United States Patent Application Publication US 2017/0009304 A1 - sequence listing, part 22

SEQ ID NO: 453109 - DNA, 98 bp, Homo sapiens
cgccggggagaggcacccgagacccacggagaccgccatgttggcagataaattgaacatgactccagaagaagctgaaaggtggattgtaaatttga

SEQ ID NO: 453110 - DNA, 98 bp, Homo sapiens
tggatcaagcagatgatgtttcctgtccacttctaaattcttgtcttagtgaaagggtgacacatctggagactacaggaaagtactgcttgttctct

SEQ ID NO: 453111 - DNA, 50 bp, Homo sapiens
cttgaaaccataatgctacaaactctaggcaatgatgaagtaaaacgggg

SEQ ID NO: 453112 - DNA, 75 bp, Homo sapiens
ctctctcctctgcaacctgataggatttggctacccagcctacatctctggtcggatgagcagtgtgcatcacag

SEQ ID NO: 453113 - DNA, 100 bp, Homo sapiens
ggaagataatggtcagaagatgcctggtcaccctgagaccctttcgaagttccacctggtgccaagcatcaacaccatgagtggcagtcaggagctgcag

SEQ ID NO: 453114 - DNA, 50 bp, Homo sapiens
ctgttcctctcctgtgcacagaaacagtgttgacttcaaaatcaaaactg

SEQ ID NO: 453115 - DNA, 74 bp, Homo sapiens
ggcttttgggggatcactgtcctctctcggcagcagattctccccattctatatgaagctggaagctccccaag

SEQ ID NO: 453116 - DNA, 100 bp, Homo sapiens
ggatggggcagaggacgaggagtggatcaatgagctgagcaatgttcctgttcctgtcatgctaatgccagatgacttcaaagcctacagcaagatcaag

SEQ ID NO: 453117 - DNA, 95 bp, Homo sapiens
ggagccaaagtgatttcaacagcatgcagccttgaagataagcagtgccttgaaagattcagacctcccataggaaattttgtctgtggctaaaa

SEQ ID NO: 453118 - DNA, 100 bp, Homo sapiens
atggattcctacctaaaccagtcatatggcatggacaatcacagtggtggtggtgggggtagcagtatgtccgtggttcagaccctgtattaaagctttt

SEQ ID NO: 453119 - DNA, 98 bp, Homo sapiens
ggaagcggaaaccagtggccacagcatctttgtctagccccagtgcagatgccttcgtgaacagccaggaatggacgctgagtcgatctgtcccggag

SEQ ID NO: 453120 - DNA, 100 bp, Homo sapiens
ttgagtgaaagtggtctgtgccgtttggaggaggtctttagaatccccagccttcaataaactgtttcacgttagacctgtaacccaaggagatgtgtat

SEQ ID NO: 453121 - DNA, 50 bp, Homo sapiens
acatcgagttgctgacacttttcaggaacgagttgaagcagttaatatgg

SEQ ID NO: 453122 - DNA, 90 bp, Homo sapiens
attccacagaatacagccaacctccaggtttcagtggcagttctcagggaagaggaagaacgtctgagaaataaaattcgagctgatcat

SEQ ID NO: 453123 - DNA, 98 bp, Homo sapiens
tgcaagcggggccgcaagcagtgcaagacccatccccactttgtgattccctaccgctgcttaggtctaattcgtctacaagagctcatcaaagctcc

SEQ ID NO: 453124 - DNA, 100 bp, Homo sapiens
ctgtcactgcctacactggacccctcgttgaggacttccttagtggtttccagagctgccaaacggaggcccgaagaaaaagaacctgaaaaagtaaatc

SEQ ID NO: 453125 - DNA, 100 bp, Homo sapiens
accagaaatacagcagccactttgcagaaaggaaggattatgtcaaatagttagaagattcccaggatcaaaatggtttcaatcccagaatactatgaag

SEQ ID NO: 453126 - DNA, 122 bp, Homo sapiens
ctgtatgtgcgtagaagacgacctattttggagaccgttgtggaaatcaaactgttcaaaggccctaaagtttttcccctacatcctgctgctctttgcgatcctcctgtacctgcccccgc

SEQ ID NO: 453127 - DNA, 99 bp, Homo sapiens
aattggctagatcaggaagcctatgtcaactatggaacaacaacttgcagctcatctctattgatggttttcagcagtatagatcgaatcactcagaat

SEQ ID NO: 453128 - DNA, 98 bp, Homo sapiens
aaaaagaagcaaacagcctggcttcatctggtcctcataatcttacttatcctctaggtcccaggaatgaaggagatctgcgctgacccccagtttat

SEQ ID NO: 453129 - DNA, 82 bp, Homo sapiens
attttgcattggatattcgcatgcctggggttacacctaaacaggtgttggagcgggccggagagaagtagagtgggctgcg

SEQ ID NO: 453130 - DNA, 75 bp, Homo sapiens
tccacaatccttacagaccatttgagggcttcctcatcgacttaaagcaatacgagaattggagacccaaccagc

SEQ ID NO: 453131 - DNA, 90 bp, Homo sapiens
aagaagaccacacactgggaaacatcattaaatcaaatggaagcaactgtcgagattgcagcggaatatgattctcttcctccttgcctt

SEQ ID NO: 453132 - DNA, 100 bp, Homo sapiens
cgccgggatcaaagtgtaccagtcggcagcatggctgtccagaccaaaacgaagaagacgttagccaaacccaatataaggaatgttgtggtggtggatg

SEQ ID NO: 453133 - DNA, 75 bp, Homo sapiens
gctgcttatggctataaaattacagctgttaaacgtttaatgaaagaagcggcagaattgaaagatccaacagat

SEQ ID NO: 453134 - DNA, 75 bp, Homo sapiens
acagaactgatattttatattgaaatggatcctccaggtgtcagctgtgatgcatgtttaaaaggaaattttcga

SEQ ID NO: 453135 - DNA, 88 bp, Homo sapiens
gcatacttggaatgaatccttctagagacgtccacgtgttatagttttgccgctggactcttccctcccttcccccaccccatcagga

SEQ ID NO: 453136 - DNA, 75 bp, Homo sapiens
aaaactggacattataacattaagcctactgaacttgacgcactggtatttggccatctatacaccattcttacc

SEQ ID NO: 453137 - DNA, 75 bp, Homo sapiens
agctccatgtggtacctgtggaatcagcaggtacatggtgcagtggccgggagcacgcatccttcggcgtcagga

SEQ ID NO: 453138 - DNA, 51 bp, Homo sapiens
ccgggacgaggccaattgccatttgaaagttgagagcagcatgttttgccc

SEQ ID NO: 453139 - DNA, 74 bp, Homo sapiens
gggcgactgagtactcaacatattgactgtatttgggctgcagcacaggctttcgccaaggtcttcaacacaac

SEQ ID NO: 453140 - DNA, 90 bp, Homo sapiens
gtcatcactctcatcaggagtcatccaggaagccttagccacaaatatggtaactcaactggacccaaataaatcattattggaggtaaa

SEQ ID NO: 453141 - DNA, 51 bp, Homo sapiens
ctgccttggcagaagcttttagggtatgggcactaggaaaagacttcttcc

SEQ ID NO: 453142 - DNA, 75 bp, Homo sapiens
agacggcctgggtgctggcgaagcggaggccggaggtaccaggatcatctatgaccggaaattcctgatggagtg

SEQ ID NO: 453143 - DNA, 123 bp, Homo sapiens
tggagaaggtggaagtaaagaattacgatgccgctctccgaaaaatcacctttccccacgtgctgagcgccgtcctcaaggatctctaccacctgctgaagcacgtagtgtgtctggagcccg

SEQ ID NO: 453144 - DNA, 100 bp, Homo sapiens
ttaattttagggtcctttatatagaagggagagtagggctttcagcaatcgtgagaccgtctagtataagacagagcacgaaaggcatttttactgctgg

SEQ ID NO: 453145 - DNA, 98 bp, Homo sapiens
cgcggacgcgcagcatggcggtggaggacgaggggctccgggtcttccagagcgtgaagatcaagatcgatacaaggcagatccaaccatccccaccg

SEQ ID NO: 453146 - DNA, 80 bp, Homo sapiens
cccagatgatgcggtggtgggggacctgccggcacgcgactccccccgggcccaaaataacgaaggaggcccaacttcat

SEQ ID NO: 453147 - DNA, 82 bp, Homo sapiens
ctggccacttgcttgggatcctttatcctggtcatcttctatttccaaagccagaagcggactcctagaagaggggagcagc

SEQ ID NO: 453148 - DNA, 51 bp, Homo sapiens
ttaagaaagaagatgttaactttcaggtgaatctggattgggaaagtcgac

SEQ ID NO: 453149 - DNA, 113 bp, Homo sapiens
aattctcgagagaccagcaaggaatccaaatgcatcattcagatgcaaggcaactcgaccactccgggaagcagtttgttcgctatataaacatgttgataaacgacacgacg

SEQ ID NO: 453150 - DNA, 98 bp, Homo sapiens
gagctggctctggaaccaggctgctccaggagtaagaatatgtgtcatcacattggcagaatctcatccagttcttcaaagtggaaaaacaattaaaa

SEQ ID NO: 453151 - DNA, 98 bp, Homo sapiens
ctggctgcacttgaggttcccgcccaggaaggtacttcctattgaagacagtggaccagcacatgaagctggccttctccaaggtcttgcgacagaca

SEQ ID NO: 453152 - DNA, 96 bp, Homo sapiens
caacacgcgaacacccgagatctcaggggatttggctgacgcctcacaaacctccacattgatccaacttagaaataatgtttcattcaagataag

SEQ ID NO: 453153 - DNA, 75 bp, Homo sapiens
gcagaagctattcagacacccctgaaatctgccaaaaatagggatgaggaagaaatgaccaaacgagatgacaaa

SEQ ID NO: 453154 - DNA, 75 bp, Homo sapiens
caagtacctttatgaaccagtgtatcccaagattcaactggaagctttgtgctgcctttccggcaagtcatgtat

SEQ ID NO: 453155 - DNA, 75 bp, Homo sapiens
ctgcaatcagcccttacttcagtctcccatcaaaggacgtgcacagccttatgatcccaatttttacgatgaaac

SEQ ID NO: 453156 - DNA, 100 bp, Homo sapiens
tcaactgccatcagggaaagccgttgcctatggtctgcgcaggcatggcactaagtgtcccatggcacatttggccctcatggaggcctcaaaagggcag

SEQ ID NO: 453157 - DNA, 97 bp, Homo sapiens
aaagagtgcctggagagggctctagctaaaaatgagcaagttaaaggcaagatcgacaccatgaagagagaactcgatgccaccgcaacggtattgg

SEQ ID NO: 453158 - DNA, 82 bp, Homo sapiens
gcatgaagaccccggcggacacagccaggcgggcaccacggcaggggctgagctaccctcatggaagggagaggaccgtacc

SEQ ID NO: 453159 - DNA, 65 bp, Homo sapiens
cagggaccctattgacgttgacctgccacctggtttccatcgggcctatagttccccactctaca

SEQ ID NO: 453160 - DNA, 75 bp, Homo sapiens
gaaagaaatggaccagacactaatcatcagagaaagcttcttgctatctacctccaccatgatgaaagtgtgtta

SEQ ID NO: 453161 - DNA, 100 bp, Homo sapiens
aaggtgatcctggtatttcaagcattggtcttccaggtcttcctggtccaaaggtttgatgagaagagggcagtgcagcagctgagagcatgtggtgtcc

SEQ ID NO: 453162 - DNA, 50 bp, Homo sapiens
tgcaggctgccaaggccagcggttacgaagtgacagtgctggtgcgggac

SEQ ID NO: 453163 - DNA, 50 bp, Homo sapiens
agtttgtctccactccctccttgtttatacatgaaagcatccatgatgag

SEQ ID NO: 453164 - DNA, 75 bp, Homo sapiens
tttcaaatttttgaggagtcttcttgacccaaggtcaagctttacaaaagcgaaaacctcgacaatccaatccag

SEQ ID NO: 453165 - DNA, 90 bp, Homo sapiens
gaaagcggaagcggcctggcaggggaaggatcgaggtatggatcctggcgggagccagtcaacccctattatgtcaatgccggctatgcc

SEQ ID NO: 453166 - DNA, 95 bp, Homo sapiens
ctgtactctccgagaggtcgttttcccgtccccgagagcaaggtggatccgatattgaatatctggacttctataagcctgtcgtgtggttctgg

SEQ ID NO: 453167 - DNA, 100 bp, Homo sapiens
cagcaggacgtcactgttggaagaagtggtcactcaccctttcaaaaccatcgagctacagatgaagaagaaggggttcaaaatggaagtgggacaatac

SEQ ID NO: 453168 - DNA, 101 bp, Homo sapiens
tcccaggggcttcctttggactggactgtccctgctcatccattctcctgccacccccagacctcctcagctccagacacgaagatcgattgagaagttat

SEQ ID NO: 453169 - DNA, 75 bp, Homo sapiens
caaggagacgctcctggcactgcaggttcgagaacttgtcttggacaattgcaaatcaaatgatggaaaaattga

SEQ ID NO: 453170 - DNA, 100 bp, Homo sapiens
catcaaagccgtctctagcagtggcagtggactcggctccggaggtggcagttaaggtcactgggaataaaatgacatctctaaacttagccaccatatt

SEQ ID NO: 453171 - DNA, 125 bp, Homo sapiens
gacgctgtcccgcagccctgagggctgagttctgcacccagtcaagctcaggaaggccaagaaaagtggaagcatcagttcacagcagtaatgcacactgtacagataagacaattgaagctgct

SEQ ID NO: 453172 - DNA, 100 bp, Homo sapiens
gagatcttccaggttgccccgactcccaccgggactcctaccagcagcaacctcatcattgtggccgaggcaggtggatccataaagaacccagccaacc

SEQ ID NO: 453173 - DNA, 122 bp, Homo sapiens
gtggaatatgccaaggaaaaactggagagcttcatcaaaaatagtgatagctttgataagtcagaagagatcaattctacagaaatttccagtggttctgttgaggctttatggaattcagc

SEQ ID NO: 453174 - DNA, 93 bp, Homo sapiens
ccgggaccccctggagcccccatgatccctaagaagacagcttgaacctaggccaaacgtaccaagaaagtcgggatcgtcggtaaatacggg

SEQ ID NO: 453175 - DNA, 100 bp, Homo sapiens
gtacatgctggtcacctacgacgaacccccgtactgcatcaaggttcagcttgttggtttagatgaggagagttcagagtttatttgcagaaacaccttt

SEQ ID NO: 453176 - DNA, 100 bp, Homo sapiens
aaagccacccaggcaaagcaggcacttttggcaaagaaggagtgagggccccaaggctgttgcagctcctcgacctgatcggttggtcaatcgcttgaag

SEQ ID NO: 453177 - DNA, 90 bp, Homo sapiens
caaaaattggtatcaccttcaaggagcacaagtagctgctcttccaagcaaggaagtcgacagttggcaaacatgaattgactgggcata

SEQ ID NO: 453178 - DNA, 80 bp, Homo sapiens
tccttgacagcccgggccgagaagcattttgaaagcgaagcagaagccgtagaatcagcggcgagcctgttgaaagaacc

SEQ ID NO: 453179 - DNA, 100 bp, Homo sapiens
gaaggttctggtcttgcactaagtgaacagagtatctgccaagcccgggcttccgtgatggtctacgatgacaccagtaagaaatgggtaccaatcaaac

SEQ ID NO: 453180 - DNA, 98 bp, Homo sapiens
gaaacagagtattggattacctaaggaaagaagcagaggatggaatttgagtgttcagtcctaaacgagaagctcgaacaactgctgcaggctttgca

SEQ ID NO: 453181 - DNA, 100 bp, Homo sapiens
cagtcctaccatgtcagccttcccagtagctgggaccacagggatgcccgctgtctgtagccccggcatggtgcccgtggccctgcccccggccgccgtg

SEQ ID NO: 453182 - DNA, 91 bp, Homo sapiens
aatggatgcaaaagctacatgaccaacttgagctgcagcacttcctccgagactgccacgagtcctcctgttgcagttcgtcgcctgcagc

SEQ ID NO: 453183 - DNA, 100 bp, Homo sapiens
agaagaggaaagagaaagccaagatccactaccggaagaagaaacagctcatggttgtgcccacgtgcctcagggccttggtagaaatggcccgggtagg

SEQ ID NO: 453184 - DNA, 75 bp, Homo sapiens
agactatcagccactaatgaagttgggaactcagaccgtaccttgcaacaagttggttgaatctggcgatgtgga

SEQ ID NO: 453185 - DNA, 100 bp, Homo sapiens
tgtcagggggctgccggattcgccgcgggcagacattgctacaagtggttggtgtggtctctgtggctgtggccgtgattccttggatcgcaataccctt

SEQ ID NO: 453186 - DNA, 100 bp, Homo sapiens
gttcctctgcccctctctctgtctgtttccctaggcctctgcgggagaagatgaagccggaaagacagcgtggaagatgaactggagatggccaccgtca

SEQ ID NO: 453187 - DNA, 100 bp, Homo sapiens
cttttgatagatgtcataacagtatttggagaactcactgatgaaagctggactggccattatggaggaggagctgcagcattcccattgtgtgaattgt

SEQ ID NO: 453188 - DNA, 95 bp, Homo sapiens
acccccatggaagtcaggcccgaggaacctctagtggtgaaggtggaaggcacaagtccagctcatgataatattgcattccaagactctacgag

SEQ ID NO: 453189 - DNA, 80 bp, Homo sapiens
cagaggtcgtggaggtggccgtggaggcagaggtggcatgggcctatgtgcttcccaagctgtatgtgaagctacattac

SEQ ID NO: 453190 - DNA, 115 bp, Homo sapiens
ctggcgtgcactccgcacctcggggacattattgcgcgtggaacggctgcttttggaagggaaccctactctggaaactgtcagtcccagggcactggggagggctgaggccgac

SEQ ID NO: 453191 - DNA, 99 bp, Homo sapiens
agaaagccgctgaggacaagtgcaagcaggtggagctggctctgtgggacacagcagggcaggaagactatgatcgactgcggcctctctcctacccgg

SEQ ID NO: 453192 - DNA, 51 bp, Homo sapiens
tgcaactgtgaacagcagcgattcaaagagattttgaacaaagtagaggaa

SEQ ID NO: 453193 - DNA, 100 bp, Homo sapiens
cggaccggtgccggagagccacgcatgcgcactgggtgctgtgccgttcctggtcagtgccacctctggcaccactgtgctaggggcctttgaccccctg

SEQ ID NO: 453194 - DNA, 100 bp, Homo sapiens
ccttgcagatgcttcgggagaacctggaggaggaggccatcatcatgaaggacgtgcccgactggaagcctccacgttcctctatccagttcccgcaccc

SEQ ID NO: 453195 - DNA, 100 bp, Homo sapiens
ctgcggctggtccaggccttccagtacacagacgagcatggggaaggagttggtaaaatattaaagaagatcaacaaggccatcgtctccaagaagaata

SEQ ID NO: 453196 - DNA, 51 bp, Homo sapiens
ggagaaagaacggcagaacacacagcaagatctttgatggaaaacagattc

SEQ ID NO: 453197 - DNA, 123 bp, Homo sapiens
gccgaggctcagccgccaggctttgatgagatgctgcctggtcaagtggatcctgtccagcacagccccacagggctcaggctttctgtattctgccacaccaggggcagatgtttgctttgc

SEQ ID NO: 453198 - DNA, 100 bp, Homo sapiens
tgactcaatgcggcagataagagcagagctcaggagtgctctcctgggggacaccagtttcttcggagtccttatagaagtgtccgttttgactcatggc

SEQ ID NO: 453199 - DNA, 75 bp, Homo sapiens
tatcaaaaaatgcagtcccctcatgccaaggcgcctgtgtctggcagagctggtgtgagacgagacaatcctgcc

SEQ ID NO: 453200 - DNA, 82 bp, Homo sapiens
atccggggggaccggtgctggcgagacctcacctgcatggacttccactatgagtagagacagggtttcaacgtgttagcca

SEQ ID NO: 453201 - DNA, 73 bp, Homo sapiens
gaactgaatgggacagaagcgaaattagtgcggaaagttgccggggaaaaaagtacagtccatccagcgtctc

SEQ ID NO: 453202 - DNA, 100 bp, Homo sapiens
atttggagcatatttgtttctctctgcctgatttctcctgaatttggaaactatttgtaagaattctctacgcctgtggttttagcgttttgttgaccag

SEQ ID NO: 453203 - DNA, 82 bp, Homo sapiens
ctgggcaaaccctggtcctcctggatcgacgccgccaaattacactgctccgacaagcatgaataatctttcatttagtgag

SEQ ID NO: 453204 - DNA, 83 bp, Homo sapiens
agaactggcgtcacgtttacaaggtgctggagaatctggtaaaagcaccattgtgaagcagatgaggatcctgcatgttaatg

SEQ ID NO: 453205 - DNA, 75 bp, Homo sapiens
ctgtggatgaaaccctgattcctacagcacaagcagcaggagacccagaatatctagagcagccatcaagaagtg

SEQ ID NO: 453206 - DNA, 75 bp, Homo sapiens
gaccgtgaccgagagcgtgaccgagagcgcgaatatcgtcatcgttagaaggttttgctttgtgaccctgaagcc

SEQ ID NO: 453207 - DNA, 74 bp, Homo sapiens
gcctcccgggtggcttacagacgctgccagcatcgccgccgccagggcacggccgagcagatgaggactgtgtg

SEQ ID NO: 453208 - DNA, 74 bp, Homo sapiens
ccagcgggggaggggccttcctggtgctgcccctgggcaaggtacatactttttggatagacaccaagaactac

SEQ ID NO: 453209 - DNA, 101 bp, Homo sapiens
tcaggatcatgcagagttcagctatgttctcaatgggatactcaacttgattccatcaaccagagtggagactgctgcacggactctggaaccatgaacat

SEQ ID NO: 453210 - DNA, 96 bp, Homo sapiens
cgagacaagttcaccccgaagtctgccgctcttggagtttgacaaggagttgtctgtctttaaggacagactgtatgaactggacatctcgttccc

SEQ ID NO: 453211 - DNA, 50 bp, Homo sapiens
cccaagtccctctactcgcgagtaccttctccaggcaaattccgttcccc

SEQ ID NO: 453212 - DNA, 58 bp, Homo sapiens
cagaagtccagagctgaggactgcctgtttgcaggaccgtataatagacgctggcccc

SEQ ID NO: 453213 - DNA, 75 bp, Homo sapiens
gaaaaccctgctgatgtcagtgttatatcctccaggaatactggccagcctgatctagttgaatctgaagatgtg

SEQ ID NO: 453214 - DNA, 75 bp, Homo sapiens
tggaacgggactttgcagaaatgtgtgcagactacatggcatctaccatagggatggagtctcgctctgttgccc

SEQ ID NO: 453215 - DNA, 88 bp, Homo sapiens
ggagctaggacgcggaacatcccagaggccagcatcaacatgtcagaatggcggcagtggagcatcgtcattcttcaggattgcccta

SEQ ID NO: 453216 - DNA, 51 bp, Homo sapiens
aagagcagcgagaatggcgcggtatcgaaggatgatcgcagtgatgtggag

SEQ ID NO: 453217 - DNA, 96 bp, Homo sapiens
cttatatcatgtatacaactgtagatgcaaatgggtatctgaaaaatggatcagacgtgaagccctccaatatgctagtaaacacaagaggacagg

SEQ ID NO: 453218 - DNA, 100 bp, Homo sapiens
cctccccttcacagacctcctccctgggaacggcgttcacacagcatcaccgacctgtcattacaggacccagagcttccttcaaaatgtctactgttca

SEQ ID NO: 453219 - DNA, 75 bp, Homo sapiens
ggtgaactctgtccagttttcaaaccacacaggttaatttggagtggcccctggagtcagtttcctacaccatcc

SEQ ID NO: 453220 - DNA, 98 bp, Homo sapiens
cttggagaatggaaaagaaccattgaagcttgagagaaaagcccccaaaagcagctattcaggtggttatcactaggctaaaactggacaaagaccgc

SEQ ID NO: 453221 - DNA, 100 bp, Homo sapiens
caatcccagtctcttcccctcactccctgtgaagctctccagcatcatcgaggtcccatcagggccgttgctccagggagaactgcaaatatcttcatcc

SEQ ID NO: 453222 - DNA, 100 bp, Homo sapiens
tcacttattcatctgtccagcatgactcatccccgggagtgttgagaggaaacttgttcctttgagtaagaaggtggagcgtagggagaaaagaagagag

SEQ ID NO: 453223 - DNA, 76 bp, Homo sapiens
tgaagagctgagcagtccctatgatgtccaggtggttgtctggggtgagtgcgactccactgatgactgtattgag

SEQ ID NO: 453224 - DNA, 100 bp, Homo sapiens
atagttctgaattaattggtcctgctgaagctcactcagattccctcattgatacctttcctgagtgtagtacggaagataacgaaggaggcccaacttc

SEQ ID NO: 453225 - DNA, 75 bp, Homo sapiens
gtctgccaggtggtgtccatcatgtgagtgtgtccgcttgaaaccaactgacatacagcccgacatcttcagcta

SEQ ID NO: 453226 - DNA, 90 bp, Homo sapiens
cccgggacctgggctgggaacccgcggtggagcgggacacgaacgtgggtccccagccccaccccagccccaaaggaggctgttcgagag

SEQ ID NO: 453227 - DNA, 100 bp, Homo sapiens
agcaatcctaccatgtcagccttcccagtagctggaactacagctaaagctccatggaatagagattcctgaaaggacagattatgaaatggacaggcaa

SEQ ID NO: 453228 - DNA, 82 bp, Homo sapiens
gggctcggctgcagacttggccaaatggacgggactattaaggctgcagacgggctggtccgtgcacacctaccagacggag

SEQ ID NO: 453229 - DNA, 98 bp, Homo sapiens
gacattgccgtcgacggcgagcccttgggccgcgtctcctttgagtgcatgagcagccgagcctgctaaccgcagctccgcacttgtccatccccctg

SEQ ID NO: 453230 - DNA, 101 bp, Homo sapiens
tttacccttcccgccggccagaaggagtgcttctaccagcccatgcccctgaaggcctcgctggagatcgagtaccaaccttagattgtaagcaaaagaaa

SEQ ID NO: 453231 - DNA, 100 bp, Homo sapiens
atgatatattgagcccatgcgtagccttttatttgagatggcgttcaggaagtggcttatattcactcaaaccagaatgtaattggatcgagcaaagctg

SEQ ID NO: 453232 - DNA, 76 bp, Homo sapiens
gccggcctgtctgccgcgatggatgacagtaagttgagaaaccaaggcagtatcatgagcaggaagaaacacctga

SEQ ID NO: 453233 - DNA, 100 bp, Homo sapiens
ctgagccgtgaccatgagggccatcccgaaactgtgattgttttctggtgttcagcctgccaccgtcggtgctttggtgctctgcccaggagctggtggg

SEQ ID NO: 453234 - DNA, 74 bp, Homo sapiens
ggaagacccaaaggcagcaaaaacaagagtccctctaaagcagctcaaaagggcgacataccttctgttgaata

SEQ ID NO: 453235 - DNA, 96 bp, Homo sapiens
gtggagagggagtgatgtcttccagactcggtgctgtacccgccgtggaaaaggattattcatacctgaaggagatatgtgatcaccaagccgaac

SEQ ID NO: 453236 - DNA, 75 bp, Homo sapiens
tgtcattaaaaattaagcgtggcttttgaggaagatgtgacaactaccggaggtggagccgccaccaaaatgcag

SEQ ID NO: 453237 - DNA, 100 bp, Homo sapiens
ccgaaggtatctggaagtcgtgacacggtataagtgtgctagcggagtgtctagattgtcctgaattgaaagcaactgcagatgactttattcatcagca

SEQ ID NO: 453238 - DNA, 100 bp, Homo sapiens
aaccttctcaaacagcagaagaaaccctggtgggcagcagtgggaccattctgaccacaatgcctgtaatgatggggcaagagaaagtgcccattaagca

SEQ ID NO: 453239 - DNA, 106 bp, Homo sapiens
tggtcatacaccagtactaccaaggacagcttttttcctgcaagctgatgaacttattagtcctaaagacattgatcctgtccagcgctatgtcccactaaaggat

SEQ ID NO: 453240 - DNA, 82 bp, Homo sapiens
cctcgctactcgcttgcctacccgccggcccgcgggtctacttcctcaaagggggacttgatctcatcttcatgccaggcct

SEQ ID NO: 453241 - DNA, 87 bp, Homo sapiens
aagtgctgttcacacagtgagatgcattctggggctttgttatgcacctaaagccatattggaagctccagaagaaagagcaccccc

SEQ ID NO: 453242 - DNA, 100 bp, Homo sapiens
ttccagcttctgctgtccttctttgtggagagcaaggaaggatttgatgccctggatccctttattcccatcctggtttccaactataacccaaaggaat

SEQ ID NO: 453243 - DNA, 100 bp, Homo sapiens
gtaactttgcccgagcatatgcacagggtatcagccgaaccaagtactgggaggaacaggagtacagctgtgtagtaaagatgccttctggtgaatttgc

SEQ ID NO: 453244 - DNA, 89 bp, Homo sapiens
gttgttactaatcaatgtcattctgaccttgtgggtttcctgtgctaatggacaagagtgcacggcctggagatagagggcagggactg

SEQ ID NO: 453245 - DNA, 83 bp, Homo sapiens
ctcacaatgaggctccctgctcagctcctggggctgctaatgctctgggtctctggatcacctgctgttaccagctaccaccc

SEQ ID NO: 453246 - DNA, 98 bp, Homo sapiens
aggagaatgaggacggagacttcacggtgtacgagtgcccgggcctggccccgttaaacctcttcactcagtctaactcaagagtttttgaatcacac

SEQ ID NO: 453247 - DNA, 88 bp, Homo sapiens
ctgacaggaccgtggccgaccggcagctgtgaagcagccgacacgagtcgttgttcataaaacagcttttgaaagttgagagcacacc

SEQ ID NO: 453248 - DNA, 100 bp, Homo sapiens
ctttgttcggtccacgggggcagaacctggtctggccagagacctgctggaagcaataagagctaactgccatcaagagccatcagtatgtcttcaagct

SEQ ID NO: 453249 - DNA, 98 bp, Homo sapiens
gcgaggacatgggcagccgcggcgcgcccaccccccgcgccgcgtggggtagagcagcggctgccatgctcttctgtggcttcatcatcctggtgatc

SEQ ID NO: 453250 - DNA, 100 bp, Homo sapiens
cctgtttgaaatgagcaggcactccttggagcaaaagcccactgacgctccaccgaaagctccgggttgacaaatggtggggtaacagaaaggaactggc

SEQ ID NO: 453251 - DNA, 90 bp, Homo sapiens
ttaaccacaacttcatgagagattctgagccagaatcacccagctaagctgctcccgggttgccaggggatgccaacagacagatcagcg

SEQ ID NO: 453252 - DNA, 83 bp, Homo sapiens
gagtgaccgagaccgcggccgggaccgaggaagaaagccagcttccctctacaagtgctctgggaaaaggagagcaggttgaa

SEQ ID NO: 453253 - DNA, 91 bp, Homo sapiens
agcggcaagcagagaaaacctgccaatcaagatgagtatgggtgtgtggatgtctcctagatcttgacttgctcctgaggaaatattgtgt

SEQ ID NO: 453254 - DNA, 100 bp, Homo sapiens
tgtgtcgctgtgtggtgagctctccaggccaggtgccgcgcggcctccacctctgcgatcatcaatttctacatgaatatgctgatggagcgaagtaaag

SEQ ID NO: 453255 - DNA, 100 bp, Homo sapiens
cagctggccttagaagaacagcatgaaagggaaagttcagttctcccaaaactccaggaggcttttcaccaggcattcctttccaaactgaagagggccg

SEQ ID NO: 453256 - DNA, 80 bp, Homo sapiens
ccgagaagctgtgcatctacaccgacaactccatccggcccgaggagctgctgactgtgccctgtccacggtgcctcctg

SEQ ID NO: 453257 - DNA, 83 bp, Homo sapiens
ctgactacttgacacactggctcgtactgccaaatctgtcgaaagggagataatgaagaactgcttcttctttgtgatggctg

SEQ ID NO: 453258 - DNA, 100 bp, Homo sapiens
agtgaaacggagccagcggctgaggaggggccccagcagcccccgaaggccctatcaggacatggagtatgaaagacgggcagagcggcttgggtaaatc

SEQ ID NO: 453259 - DNA, 82 bp, Homo sapiens
cgagcgcgagcggcgcgagaaaacatgggaaagcggaaccaccaaaaggagtgatgatcaacgatctcatgataaatctgga

SEQ ID NO: 453260 - DNA, 82 bp, Homo sapiens
cagtgacgagcggccgaagcagctttgcgcggtttgctgtgtttcaaagaagggtgctgaccacagtagtgctcccccagca

SEQ ID NO: 453261 - DNA, 50 bp, Homo sapiens
gacaacagaagactggactgaagataaaatggacccaagtggggtcaaag

SEQ ID NO: 453262 - DNA, 51 bp, Homo sapiens
aaacagaaattctggaacacctatatgcacttttccagccattaactccag

SEQ ID NO: 453263 - DNA, 74 bp, Homo sapiens
ggaaaatttattaagacaccaccaggagtttctgctgcagaaccttggcctgaaaatgctacattatatcagca

SEQ ID NO: 453264 - DNA, 90 bp, Homo sapiens
ctgccgtcatcaccatcaccttcaatccgctctactggaatgtggagatggtgtatcaggccaccaccaagagcctcatcgagggcgtca

SEQ ID NO: 453265 - DNA, 100 bp, Homo sapiens
actgcttgcagtgcgcggcttgggagcccgcccctcctgcacggaggagtcggcctgccgccgcggcggcatctggatggggtttcactcttgttgccca

SEQ ID NO: 453266 - DNA, 100 bp, Homo sapiens
tggattctaaggcaacacttccttgaagaaacaagcttacaggtgtttttggggaaaaaaatcacaatctggacgtgagaaaggacatgaggagactaaa

SEQ ID NO: 453267 - DNA, 83 bp, Homo sapiens
gtgtgatttacctcaactggatagagtactgctcttcccgaagagcaaagcagtacttctggaatagaaattctaaacattag

SEQ ID NO: 453268 - DNA, 83 bp, Homo sapiens
gaacgaggcaaggagctaaagcagcgtgcgttcagccctgggctgcatccagatctcattatgcatcagaaaaatgaaaaaac

SEQ ID NO: 453269 - DNA, 73 bp, Homo sapiens
agcccattttcgtttttctcctgagtactagggcaggatgctttcattggatttggaggaaatgtgatcaggc

SEQ ID NO: 453270 - DNA, 80 bp, Homo sapiens
gtgagtcttctggcaaacagtgtttgcctctggttcagctcatacaacagcttcttaggatgctgaaaacgccattcaac

SEQ ID NO: 453271 - DNA, 100 bp, Homo sapiens
gccctggtgtgccgcgtgcagcttgggccctaccagcccggccggccggcagcctgcgacctgagttatggctgcagcttcgattgccaatattgtaaaa

SEQ ID NO: 453272 - DNA, 57 bp, Homo sapiens
ttgattaactcattcaaggttacccagttgttcccatttggccggcgcttgccttgt

SEQ ID NO: 453273 - DNA, 100 bp, Homo sapiens
gtcaacttcttggtatatagatacttgcaagagtcaggtgaaagaacttgtcctggacaacagtcggtcgaatgaaggcaaactcgaaggcctcacagat

SEQ ID NO: 453274 - DNA, 90 bp, Homo sapiens
cgcgtgtctaggtgagtcgcggtgggtcctcgcttgcagttcagcgaccacgctgccagccttgccctggctctgaatggcgtctttacc

SEQ ID NO: 453275 - DNA, 82 bp, Homo sapiens
aggagctgtagagaggaccccggtacatctgaaagccgggaaatggacatggatttgattgacatactttggaggcaagata

SEQ ID NO: 453276 - DNA, 75 bp, Homo sapiens
cgcagggggacggggaccagcagctgtcgccgccgctctcagctacttcaccgagccgtggtgcctggccctgtt

SEQ ID NO: 453277 - DNA, 76 bp, Homo sapiens
gagatgctgcagatgccgttaaacaaatcctggaggcagttgctcggtcacctttgtcccggtgtccaaggtgagc

SEQ ID NO: 453278 - DNA, 83 bp, Homo sapiens
tccagcaactggctgagggactcacagctgatgacctgctgctcgtgctgatctcagaagtccattggaatattaagcccagg

SEQ ID NO: 453279 - DNA, 82 bp, Homo sapiens
taatgagtgtgttgcacagacatggtttcgctttttacacatgttaagctcagcaaaacccagcagctcagattcctgccag

SEQ ID NO: 453280 - DNA, 100 bp, Homo sapiens
cggagccgccgccgcgcctgcgcagaaggccggggccggccagaagcgggcggcgcgggggagatggtaagaatgattgatgttggctgatattggagtg

SEQ ID NO: 453281 - DNA, 88 bp, Homo sapiens
agatccatagggaggacggcggaacatctggaggctgggaaatgaattaaacaaccaccatgtcgagcaaaaaggcaaagaccaagac

SEQ ID NO: 453282 - DNA, 116 bp, Homo sapiens
cccagaccctggagcctcagttggaagcagccgatccagcctgcggagcctgtggggcagttttctggatatgccgcagaaggatccgtgccagaagcaagcctgtgagatacaga

SEQ ID NO: 453283 - DNA, 82 bp, Homo sapiens
cacgccgcacctgcgcaacctcgccgtggccatgtgcagccgctacttgattatggaagattcccacaagagtaccacgtca

SEQ ID NO: 453284 - DNA, 98 bp, Homo sapiens
gacaccaatctttgccccaaagaaaagaactatgagtggtcctttatccagtgtccaggatgagttagatgaactccgtgctgagatggaagagatga

SEQ ID NO: 453285 - DNA, 82 bp, Homo sapiens
ggtccccgctcagctcctggggctcctgctgctctggctcccaggtgaatcacaagcctttgagaacagcctgagccttcag

SEQ ID NO: 453286 - DNA, 74 bp, Homo sapiens
tggagatgtgattaagactgagggagccactctaaggctgttgacctggcgacccaattctggagaaactgccc

SEQ ID NO: 453287 - DNA, 100 bp, Homo sapiens
agatgtctgacatggaggatgatttcatgtgcgatgatgaggaggactacgacctggttaaacccatccagagtaatggctgcggccttacccaggaccc

SEQ ID NO: 453288 - DNA, 75 bp, Homo sapiens
caagtttaatcagacctgctcacacttcagaatagagaagacctccaagaagctggtgaactcggtggctggctg

SEQ ID NO: 453289 - DNA, 51 bp, Homo sapiens
caagatgttgtcctgtgctggggctgacagttattttgaggccctgtcccg

SEQ ID NO: 453290 - DNA, 100 bp, Homo sapiens
ccacattcaggagtgtgacaagagatgtggataatattaatgcagctgtgatggatttgaaaaaaaagaagatccgcagtctaagtgaagaggtcaaaat

SEQ ID NO: 453291 - DNA, 100 bp, Homo sapiens
ttatggctgcggtccagaacccggccctcaccgccctcaccacccctatccagacggctgcccttcaagtaccataactctctgtcctggtatggtgggg

SEQ ID NO: 453292 - DNA, 83 bp, Homo sapiens
atttggctgaggagttttcaatcccagttctccccatgacaccacctgaacgtctcttcctcccaagggtgtgtggcaccacc

SEQ ID NO: 453293 - DNA, 100 bp, Homo sapiens
ctggggctggactacgtggcggcgctggaagggatgtcgtctcagcagtgctcgggcgcagaacccagcgggtgccgcttctccacccgaggcttccacc

SEQ ID NO: 453294 - DNA, 100 bp, Homo sapiens
cttgggtgatgatgaatctgcattggataatgatcaacatggccaatctttcctaagctgctcagcttacaagaaaaggaatcatactgctaagaattca

SEQ ID NO: 453295 - DNA, 88 bp, Homo sapiens
cgcggagcctggaagagccccgagctctgagggaaaaggccataccaatgctggagatgcaatatatgaggtggtgagtctacagcga

SEQ ID NO: 453296 - DNA, 96 bp, Homo sapiens
cgctccgggcctggaatccctacgcgtccctttgggtttagcacgatgagctcaatcggcactggggccatttcataattctgaatcatgtctgat

SEQ ID NO: 453297 - DNA, 75 bp, Homo sapiens
caaaattgaaacagagcatgggactagcatcttgcagtctgttaagactggactctgaaatgggcatgtacagag

SEQ ID NO: 453298 - DNA, 101 bp, Homo sapiens
gtggagaacaaatccaagattagcacagttctctttcaacatgttcgaccaccctattcccagggtcttccaaaaccgcttctccacacagtaccgctgct

SEQ ID NO: 453299 - DNA, 100 bp, Homo sapiens
gcccaagaaacattatattcatgtgtggtatctgtgcgctttgaagaagatgaagacaggaacttgtgtctaatagcatatccattgaaaggggaccatg

SEQ ID NO: 453300 - DNA, 95 bp, Homo sapiens
caggaagtcggagtttgagccccggaggcagagcggctgccatgacggtgggcaagagcagcaagatgctgcagcatattgattacaggatgagg

SEQ ID NO: 453301 - DNA, 49 bp, Homo sapiens
ctcagctctgcttggatcaggaggactccccccaggtcctgagggcagg

SEQ ID NO: 453302 - DNA, 100 bp, Homo sapiens
tagctaatgaccgtggttcccactgagtcactctctgaaagagaacaaagtaattttctgaagggaagctgcagaatatggaaaacatatattggagcta

SEQ ID NO: 453303 - DNA, 50 bp, Homo sapiens
cggcgcgcggcgctttacgtacacagtatggtgtttgcgaaaacttgcgg

SEQ ID NO: 453304 - DNA, 78 bp, Homo sapiens
gagaccagcaaggaatccaaatgcatcattcagatgcaaggcaactcgaccaatatttatccccattttacaaggcct

SEQ ID NO: 453305 - DNA, 87 bp, Homo sapiens
ctcaaagctgctgccgccccttgggctaaaagtatatgactctcaacccttctactaagaggaagaatactggatccccagacagga

SEQ ID NO: 453306 - DNA, 98 bp, Homo sapiens
catcagcatatatgtcaactctaccatgtgctagagacagccaacaaaatattcatggttcttgagattgttcagtttggcatgaatgaaaaggttgg

SEQ ID NO: 453307 - DNA, 99 bp, Homo sapiens
tgtccatcttcgacagtgaggaagatatcaccaccttcgtcaagggcaagatacacaccaaagtgaaggagtttggaattgaccctcaaaacatgttcg

SEQ ID NO: 453308 - DNA, 82 bp, Homo sapiens
ttgtttgtggatcgctgtgatcgtcacttggccgagacgcatccagagctttcgtgaccggggactgttctgaagcaggcct

SEQ ID NO: 453309 - DNA, 75 bp, Homo sapiens
cagggacaaagagatctggacagaatcgccggacaggtgggtgaattttctggagccaataaggaaaagcttgaa

SEQ ID NO: 453310 - DNA, 75 bp, Homo sapiens
ctctgcgggaggtggagcacctgaagagatgccagcagatgctgtgtgctgtggacccacctggggttcatggag

SEQ ID NO: 453311 - DNA, 100 bp, Homo sapiens
gaggagaaagatgcttctaagggttcctaatgtgagaggctagacccagatcatggaggtgcttcagtgtgatggctgtgatttccgagccccgtcttat

SEQ ID NO: 453312 - DNA, 98 bp, Homo sapiens
ctgagcaagcccccgttccgctacctgcacgacatcatcacggaggagctacagggagctggccgactgcacctggcacatggcggagaagctgggct

SEQ ID NO: 453313 - DNA, 83 bp, Homo sapiens
cttggagaggccgagggtttgatgaaggtggaggcagcgcggctctcagctgtgagaaacgaccgaaacaagaagaagaagga

SEQ ID NO: 453314 - DNA, 80 bp, Homo sapiens
ccgccgccaccatgcccaagagaaagcatcccagccatcactcttccacctgctccttagagaagggaagatgagtgagt

SEQ ID NO: 453315 - DNA, 100 bp, Homo sapiens
tgtacagggctaaattttgggaaggtggatgttggacgctatactgatgttagtacgcggctgggctgggcgagtatctcttcgaaaggctcactctcaa

SEQ ID NO: 453316 - DNA, 144 bp, Homo sapiens
tttctgacggcaacttcaactggggccgggttgtcgcccttttctactttgccagcaaactggtgctcaagacagccacaaccaaagtcccggagatccgtgatgtaacaaggattgagcgaatcggtgagtgagttgggtcag

SEQ ID NO: 453317 - DNA, 90 bp, Homo sapiens
gccgcccccggagctgctggtttcattcgaggtttcgggccggtaactgcatcctgcccagcatgacggccccctgcccgccgccacctc

SEQ ID NO: 453318 - DNA, 100 bp, Homo sapiens
acagctagtgttttcttatttagccggagtgagaagcaagaaggccctggacacagcaatatctctgggctttcacaggaaaaccaattctgtgtcctcg

SEQ ID NO: 453319 - DNA, 82 bp, Homo sapiens
cggtagacttaggtctgttagaggaagacgacgagtttgaagagttccctgccgaagggaaatttgtgcacagagataacac

SEQ ID NO: 453320 - DNA, 90 bp, Homo sapiens
cgcagcaggactacgaactcgtccagagggtcggcagcggcacctacggggacgtctataagagctgtaactgaagttcgtgaagtcacc

SEQ ID NO: 453321 - DNA, 98 bp, Homo sapiens
gtcgagaggaggtcgaacagatggtcgacaagtgcccccaatgatttatggtacaacttcattgaactgccctaccacggggaaagcatcagcatgct

SEQ ID NO: 453322 - DNA, 92 bp, Homo sapiens
ataatatttatggagcatatattatggaacacaggcgtatcctggatctaaagactggaacagtgaaaaaggaaggtcagcagtcttccatg

SEQ ID NO: 453323 - DNA, 75 bp, Homo sapiens
ctggaaggtgcgtgtggggctgggtctcggagtgggagacgtggagtgcagccatcagccagcaaagacctcgtc

SEQ ID NO: 453324 - DNA, 100 bp, Homo sapiens
cagtgagaagggccggctgcctgagcgcctcaccaagttcctcatcacccagctgctggagccagttctgcttctcggcaaggagcgatttgctggtgta

SEQ ID NO: 453325 - DNA, 83 bp, Homo sapiens
atgcagttgccttcacaagaagattcaatcatgtgaaatgacaatggatgctctgttggctcgattgaaacttctgaatccag

SEQ ID NO: 453326 - DNA, 74 bp, Homo sapiens
gcgcacgggctcggccgccgcccctgccggccagctgcgggccgtccagcggctgtgccacttctacagcgccg

SEQ ID NO: 453327 - DNA, 75 bp, Homo sapiens
cggaattccagtctctgtggacaaaatgacccaggtacttttacagcgggttgatgaactagagaagctattcaa

SEQ ID NO: 453328 - DNA, 82 bp, Homo sapiens
aattgatgccccagttttctacaattgagtacgtgatacagagtgttgcggagataggaacatgggagagaaacaatctggg

SEQ ID NO: 453329 - DNA, 134 bp, Homo sapiens
tcctcgggcgcccgcggcgatgttcaaccgcgccgtgagccggctgagcaggaagcggccgccgtcagatacgtaggtaacctttccagagatgtgacagaagtccttatacttcagttgttcagtcagattgg

SEQ ID NO: 453330 - DNA, 100 bp, Homo sapiens
gacaagcggcagcggaaccggtgccagtactgccgctaccagaagtgcctggccatgggcatgaagcgggaaggtcacccttgtggttggagcgtcccag

SEQ ID NO: 453331 - DNA, 90 bp, Homo sapiens
gaaaactgaagcagatgttgaacaacaaggtcagtactcctgcatttgtaccaacgaaaactcacgtgctgcttcatcgaatgagtggaa

SEQ ID NO: 453332 - DNA, 75 bp, Homo sapiens
ccaccaggattacatcatctgctgtgtggacgaatgtggaacctcgctctgtggctgtgttcccttggcactcct

SEQ ID NO: 453333 - DNA, 98 bp, Homo sapiens
tcgtcactgtactggtatagcaatcaaatggatgtgatcttcgtggtggaaagctaaattttaaaaccaccccaatggatgcagacagtgatgttgca

SEQ ID NO: 453334 - DNA, 82 bp, Homo sapiens
cttccatgtaccactggtaattatgacttttggacagtccaagctatatcgaaggccttcctgatgcgcttgcctgctccct

SEQ ID NO: 453335 - DNA, 75 bp, Homo sapiens
ccagctcgcgcttcagcgtcccggcgccgtcgcgccactcctccgaaactgatagtgcatcagccgacccaggta

SEQ ID NO: 453336 - DNA, 90 bp, Homo sapiens
cagtaccagagacagaagcagatggattcgtccttttaggaatggtggaaagcagcagacataattggagtgggttggataagcaaagtg

SEQ ID NO: 453337 - DNA, 100 bp, Homo sapiens
tggttgtgtcagcaaaattcttggcaggctccgagctctgtccagtggtgggagtattacatcccctcctctttctccagcattgccgaagtataaatta

SEQ ID NO: 453338 - DNA, 101 bp, Homo sapiens
tgaagaggaggtgcagatggcactttccaaagtggatgcctccggggaggtttttcgttggaatatacgttgcacatttatggcgattctgagtgtgaggg

SEQ ID NO: 453339 - DNA, 83 bp, Homo sapiens
gtcttccccggccggtccctcgcctcccggccgagctgacggtcagcccaaggccaaccccactgtcactctgttcccgccct

SEQ ID NO: 453340 - DNA, 51 bp, Homo sapiens
gcttccatcttcaacctcggatgatcgggtctataagaaggagaaagctcg

SEQ ID NO: 453341 - DNA, 90 bp, Homo sapiens
ctttttctcaagtatgaagacatgcatcgggccaaatttgagtttcatcatggtgactatgaaaaacagtttctgcatgtactgagccgc

SEQ ID NO: 453342 - DNA, 74 bp, Homo sapiens
agctgtgtctttgctggggagtatgaagacactcgatggatccacccacattcactttcaactttaacaatgaa

SEQ ID NO: 453343 - DNA, 100 bp, Homo sapiens
tgatcaccatcggaaatgaacgtttccgctgcccagagaccctgttccagccatccttcatcggtaccttgggatcacaaggcccctcacataccctgtg

SEQ ID NO: 453344 - DNA, 82 bp, Homo sapiens
ggagcagagagctggcgagcaaggcgtctacggtgacgtgcagcgcgtgaagatcctgttcaataagaaggagaacgcccta

SEQ ID NO: 453345 - DNA, 75 bp, Homo sapiens
ttcaacactagaagatatttgctgcagcctttaggtcaaaatgcagatcttcgtgaaaacccttaccggcaagac

SEQ ID NO: 453346 - DNA, 98 bp, Homo sapiens
gagcggacggattcgattcaacggggttccggaccgcgctgcgctatggagcagggtgtgggccgaagatatgctcatgtggtgttgaggaaagcaga

SEQ ID NO: 453347 - DNA, 75 bp, Homo sapiens
gacgcactgactcgcctcaagcacctgcgcatcgtcatcggttcaggaacaagtgcatcccactctctcagctaa

SEQ ID NO: 453348 - DNA, 51 bp, Homo sapiens
tcctgaatagctgggattgcagtgtcaacctaagaaaaagtctacgccact

SEQ ID NO: 453349 - DNA, 100 bp, Homo sapiens
ggctcccggggcgggccgggcgggccgcgggagccgcacgcggcgatatggaagaggagggcaagaagggcaagaagtgttctaagaacggaagcatctg

SEQ ID NO: 453350 - DNA, 90 bp, Homo sapiens
tctactcagaaaatgaccgactgagaatcagcaggtaccacgagtggatgaaatcagaggagctgcagcgtttgacagcctcggagccgc

SEQ ID NO: 453351 - DNA, 80 bp, Homo sapiens
atcaaaaatatcaacgatgaaagagtatttgttgataagcaatacaaatcggtaacaaaaccaaagccactaagtcaagc

SEQ ID NO: 453352 - DNA, 80 bp, Homo sapiens
cgtgcaggcggccgtcagcaacctcgtccggtctctggctgatgaacttgctcttgtggatgttttggaagataagctta

SEQ ID NO: 453353 - DNA, 51 bp, Homo sapiens
atggactactatgactctgaacacaaaccagtccagctacgggggcccagc

SEQ ID NO: 453354 - DNA, 75 bp, Homo sapiens
ctcaggatggaggaagactcgatccgcctgcctgcgcacctgccttcaggatgagttagagaaaggtgaacggga

SEQ ID NO: 453355 - DNA, 131 bp, Homo sapiens
ccattatcctctgtttctctgctgcaccgacctcgacgtcttgcctgtgtcccacttgttcgcggcctatagacaatgcagatcttcgtgaagactctgactggtaagaccatcaccctcgaggttgagcc

SEQ ID NO: 453356 - DNA, 100 bp, Homo sapiens
cagaagagaactatatccgggaccgccttgccctctctttaaaggttcactattatgaagatggcaatgttcagttggttagtcataaagatgtacagga

SEQ ID NO: 453357 - DNA, 96 bp, Homo sapiens
tgccgctgccaccggcgcgcccgagttgttggaaaggacaccaatgtcatgttggtggctttggcagcaaaatgtcttactggcctggctgttggg

SEQ ID NO: 453358 - DNA, 100 bp, Homo sapiens
gcacctcagcggggagttcgggaaaccgtattttatcaaggctcatgtttcagtcgtttggcagctagaggagaatgcctttccaaacaggacagcagac

SEQ ID NO: 453359 - DNA, 101 bp, Homo sapiens
tatcttccgactgatccagctggtggtcctggtctacgtcatcggggaataaccagcaagtacctgtcaagaatgaagtagatcattgtgaaaatttgaag

SEQ ID NO: 453360 - DNA, 98 bp, Homo sapiens
aggaccttggcttgcctgctgctcctcggctgcggatacctcgcccatgttctggccgaggatggcccaatggaatcagctacagcagcttgacacac

SEQ ID NO: 453361 - DNA, 83 bp, Homo sapiens
gcagtcggcactgctactgcgaagacagctggcagacacagccgccagcccaaacagcagcggcatgggcagcgccagcccgg

SEQ ID NO: 453362 - DNA, 75 bp, Homo sapiens
gcagcatggacctgcaactttcctgaagcatctccagggctggatgccatgcatccctaggccaacacccccagg

SEQ ID NO: 453363 - DNA, 83 bp, Homo sapiens
gccgagctgggcttggagatccccgcctatagcaggaaccctcagtgctgcgtctagattctgcaggggaggtttgctgggac

SEQ ID NO: 453364 - DNA, 75 bp, Homo sapiens
ctgcgcagggcggctgggcagctatgtcatcaacgggcgcaccaagagtgatcagcagctggactgtgccttgga

SEQ ID NO: 453365 - DNA, 80 bp, Homo sapiens
agtatgccacccccgtgttccaggaggtggcaccaagagagcaaggaaagtccatcagcttgataatggaggagaacaat

SEQ ID NO: 453366 - DNA, 83 bp, Homo sapiens
tgatatgtaccgtattttattgtcacaaacaacaggagttgccattccattacatgcaattgcagagcctgtttttgctgtgg

SEQ ID NO: 453367 - DNA, 80 bp, Homo sapiens
ccaccaacttcagagatttgtccaaggtgttttcacagtcctgtgtttggtatggagagtgtggaattgcatatggggac

SEQ ID NO: 453368 - DNA, 75 bp, Homo sapiens
acctttttgaagcctttgcaaaaatgtgtcttgctgaatcagggctctcttatccctgccatcgacttacagtgg

SEQ ID NO: 453369 - DNA, 90 bp, Homo sapiens
tccaggctgaccacgagcttttcctccaggcctttgagagtgcactttacaggtccccgatgaaccaagagaaccctccaccatatccag

SEQ ID NO: 453370 - DNA, 100 bp, Homo sapiens
agccacatcattgctttatgtggacacattcagctaacgtattttagcaggtggagtgaggttgaagattcctgtgacagcgatgccatagagagaatgt

SEQ ID NO: 453371 - DNA, 99 bp, Homo sapiens
ctaagacttggcgaagcgctgcgctcgcgcccggatccctcaggtgagaagccctaccactgcaactgggacggctgcggctggaagtttgcgcgctca

SEQ ID NO: 453372 - DNA, 100 bp, Homo sapiens
ctaccagcccatgcccctgaaggcctcgctggagatcgagtaccaagtcatgcaagacaagataatctgccttccgaaaagagtgcagcctgctcagaac

SEQ ID NO: 453373 - DNA, 100 bp, Homo sapiens
caaaatagtgtgcctccttcacagaagccctatgagtttgtctctctggaatggctgcaaaagtggttggatgaatcaacacctaccaaacctattgata

SEQ ID NO: 453374 - DNA, 83 bp, Homo sapiens
caactttccagagaccacttctccacatgaatattctgttttgctgcccgaagcttggtttttgtcatccattggagggacac

SEQ ID NO: 453375 - DNA, 74 bp, Homo sapiens
aaatctgaaacctgtcccgctcattggtccaaaattgaagagaaggttatattcccagaggatgtcagtcccaa

SEQ ID NO: 453376 - DNA, 76 bp, Homo sapiens
ggcagacgcggtcctggatatacttcagataacttctttgtggatgattatgctagatttactatcttggattccc

SEQ ID NO: 453377 - DNA, 75 bp, Homo sapiens
cccggagcccccagcgcagcggccgcgaaatgggacgtcggtcatcagatactgaagaagaaagcagaagcaaga

SEQ ID NO: 453378 - DNA, 100 bp, Homo sapiens
cacgcacgggatccagagcgccgcgcacttcgtcatgttcttcgcgccctgtgttctaagaacggaagcatctgggctggatggaatttagcatcaagca

SEQ ID NO: 453379 - DNA, 50 bp, Homo sapiens
ggggccggcgcccgcggttcaggttatggaaacaaaggacatgctttaca

SEQ ID NO: 453380 - DNA, 75 bp, Homo sapiens
cgtaccgcagcccccgggcacgacctctcggacacggtgcaggcagatggtcagtaggacagaaggtaacattga

SEQ ID NO: 453381 - DNA, 100 bp, Homo sapiens
tgctgctgctgctcctggaaaccgcccatcatcttcgtttcggacagagcaaacagcaacaaggagctgggtgtggaccaggagtcagaggagggcaaag

SEQ ID NO: 453382 - DNA, 82 bp, Homo sapiens
gcgatgctgaggatcgaggaacgttgtctggccaagactaaggggctgcagagcggggtggacattggcgtcaagtactcgg

SEQ ID NO: 453383 - DNA, 100 bp, Homo sapiens
gggcggtggagcaggagctggcgtctctggagaaaggaagaaacacctcttacagtcatctgcaggggattctccaaggacatgggaagatagatgtaag

SEQ ID NO: 453384 - DNA, 100 bp, Homo sapiens
agaagaacaacctaactccagatatctacctaattgattggctgtaggttccatgaggacaggccttgagtctgtcctggtctctggaatcacggtgtct

SEQ ID NO: 453385 - DNA, 83 bp, Homo sapiens
aggcagtgagtgttaaggaatgggtgtaaaagtgccttagctggaccaattattgtggagccacatgtcacagcagtatgggg

SEQ ID NO: 453386 - DNA, 80 bp, Homo sapiens
actgggcaaaccccgcttccagcaggtgtccctggccagtgtccttccacctgtccacaagcatggggaacatcttcgcc

SEQ ID NO: 453387 - DNA, 83 bp, Homo sapiens
ggcccgcgcctgggctgccggcacttcgcggcaggaatggatataaatttctctactgttctgcccgtgccatcgggatggcg

SEQ ID NO: 453388 - DNA, 100 bp, Homo sapiens
cttctccatcctcttcgactatgagtatttgaatccgaacgaagggtttggaaatcccttgtctccaggttgctgggattgacttcttgctcaattgaaa

SEQ ID NO: 453389 - DNA, 82 bp, Homo sapiens
cctagccaggaagagccgccgtccgcaccgggaccggagaggaagcggaggtgagaagccctaccactgcaactgggacggc

SEQ ID NO: 453390 - DNA, 100 bp, Homo sapiens
cttgaagtatttggctgaggagttttcaatcccaaacattaaccaggtggtatttgttggaaatttcttgagaattaatacgatcgccatgcggcttttg

SEQ ID NO: 453391 - DNA, 75 bp, Homo sapiens
ggggaagcgatggctgggcccgcgtggatctctaagagctgcggtgcaaccctgggcagtttgcgtgtcgcagcg

SEQ ID NO: 453392 - DNA, 80 bp, Homo sapiens
ttgatgaaattcaccagtgaagccgtgacatcctgggatattctttgttgagagagtccctgtgaagcaggaagagtgag

SEQ ID NO: 453393 - DNA, 100 bp, Homo sapiens
gagcccagagggacagcccaaggtccaccgagcccgcaaaaccatgtccaaaccaggaaatggacagcaacctgacagccttccctgggggcgccaagga

SEQ ID NO: 453394 - DNA, 75 bp, Homo sapiens
gtctccaaagtcaacgttctctcctgctccacgttatgacacaatagcttcctgggcaacaaatctcaagtcctc

SEQ ID NO: 453395 - DNA, 83 bp, Homo sapiens
gaaaagcctctgggagcagaagggaggctccaagacctcatcaacaattaaggaattgaatgatctggcacgggaccctccag

SEQ ID NO: 453396 - DNA, 83 bp, Homo sapiens
tggagcagccgaggaaggcggtggtagtgacggcaccgaacaagatttgtgatgaaatggagcctggaacaaactcttttcgg

SEQ ID NO: 453397 - DNA, 100 bp, Homo sapiens
gaagaccacaataaaagagacctctacttagctcagcaattcttaccttatcagaacactgaggctcagagaagttaactactccaaagtcatatagcca

SEQ ID NO: 453398 - DNA, 96 bp, Homo sapiens
cccgctagttgaagcactagttacagaagcatggagaaggctagaaaggagtagcactgtagatgggttaaggaaaagacccctcatcgtatttga

SEQ ID NO: 453399 - DNA, 88 bp, Homo sapiens
ttgtcatcttccttgaattctttgcgtggggccttttgacaactccaatgttgactcacacagcaagaaggaggccatcagcaaactg

SEQ ID NO: 453400 - DNA, 100 bp, Homo sapiens
atcttcgaacttagacttccggaaggactttggcgaggctcttgaggctagtgcgcctctaggcaagatgtccctgcccatcgggatataccgccgggca

SEQ ID NO: 453401 - DNA, 100 bp, Homo sapiens
gcaagagaaaaagaacattactgtcttggttgaattgaccaaagcaatggtgatggagaagcctagtcccctgctggtcgggcgggaatttgtgagacag

SEQ ID NO: 453402 - DNA, 99 bp, Homo sapiens
gtggggactaagagtggcaagctgaaaaaggcttccacctctacctcggatgggatgctgaccttggacttgatccaagaggaagacccttcccctgag

SEQ ID NO: 453403 - DNA, 100 bp, Homo sapiens
ggccagcgcgcattcggccccggacgaaggtactcgcagcacttggagcgcagaaccggccgcgcccgacaaatttacatgtattggagaccagaccaga

SEQ ID NO: 453404 - DNA, 96 bp, Homo sapiens
ggggccggcgggagcgcgaacgagcgacggcggaacccgtgggcctgtggactgcagcctcggcggtcagcagaaccttttgaagatgctctcaag

SEQ ID NO: 453405 - DNA, 88 bp, Homo sapiens
gcggcggggccagaggctcagcggctcccaggtgcgggagagaggattgcagtaacggatgctccgcagagtgtaccggagaaggagg

SEQ ID NO: 453406 - DNA, 100 bp, Homo sapiens
cggagtcggctggaggaggaaaagaggatgctggaggcacagctggagcggcgagctctgcaggcctatgaaggggtgctgcagctggtggaggctcgcg

SEQ ID NO: 453407 - DNA, 75 bp, Homo sapiens
ccttgttcagcggggaggcccaggatgagggggcaggatttaggggtggtaacctgtgtatggtgactggaggtg

SEQ ID NO: 453408 - DNA, 74 bp, Homo sapiens
ggcagagtacatcattcagcaaggtggctgggttggtgacatcgtgaaagtcacaaggatgaatataaatggcc

SEQ ID NO: 453409 - DNA, 100 bp, Homo sapiens
agcggggtcagttctctgtagtgtttgccaatgttggagccgtctgcaaagtgtccccggcaagaaggaatctgcagcttataaagctgtgaatgcactt

SEQ ID NO: 453410 - DNA, 99 bp, Homo sapiens
cccgagaagtgaccccagcaaaagaaaaatattgctgtacctaaattcaagtccttttggaataaatcatgggattgagcttcattcagatgtggtgga

SEQ ID NO: 453411 - DNA, 75 bp, Homo sapiens
aatttaattaagggagtaaaaaggatacttgaaaaccctcagttggatgatgtcattgacaacattatgcgtctg

SEQ ID NO: 453412 - DNA, 50 bp, Homo sapiens
gcaaactgcaggtcaagctggagccagattcgaactaagtggatcccact

SEQ ID NO: 453413 - DNA, 75 bp, Homo sapiens
ctttgggcggggcggagccgagagccacactttcaagtaaaccagatccagagacaatggccccgatgggatgga

SEQ ID NO: 453414 - DNA, 98 bp, Homo sapiens
gaggagatggatgagcagaggcggcagaatgttgcctatcagtacctgtgccggctggaggaggccaagcggagtaacctggacaagctgtaccatgg

SEQ ID NO: 453415 - DNA, 83 bp, Homo sapiens
atcgactggaccaagatcgagcccagcgtcaacttcctcaagtcgcccaaagcggagcccatcgtggtgaggcttaaggaggt

SEQ ID NO: 453416 - DNA, 80 bp, Homo sapiens
gtggtccggccatggacgacctcggtggttaaataaacttggatcggctgtaatccatcaggaatccactacaaaggatg

SEQ ID NO: 453417 - DNA, 75 bp, Homo sapiens
atcttctgggagctgaggaaccagatatcttgaaaagctgccagaaaggtgccgtgagcgatgtggagatgcagg

SEQ ID NO: 453418 - DNA, 96 bp, Homo sapiens
ggccccgtgtcctgcaggtattgggagatccacagctaagacaccgggacctcctggaagccaaaaatggtggaaagttaccgaggctggacagtg

SEQ ID NO: 453419 - DNA, 90 bp, Homo sapiens
tgcacatcctcgtggtccatgccatggtgatcctgctgacgctgggcccgcctcgagggaaggtgctgagctactggtgcttcagtcccg

SEQ ID NO: 453420 - DNA, 100 bp, Homo sapiens
cagttcagaagagccaaggaataaacatgcaatgaacccaaaaggggccgcgatgggcctcttggaacattggtgtgttcatctgcattcgatgtgctgg

SEQ ID NO: 453421 - DNA, 75 bp, Homo sapiens
tgccaataaaggagcaagatggctagggctgtccctacctggctcgcaagctgacccttgccatccccatcatcg

SEQ ID NO: 453422 - DNA, 90 bp, Homo sapiens
atatgctggatgagctgctgaagcccaccgaattaggccatcagcatcagcaaagccatcaacacccaggaggcccccgtgaaggagaag

SEQ ID NO: 453423 - DNA, 100 bp, Homo sapiens
cacggatctataccaacgccaaacgcacgagtattacccctatctcagcagtgatggggagagccatagcgacctgcctagagctggaacgttacctcca

SEQ ID NO: 453424 - DNA, 75 bp, Homo sapiens
tgtgatgttggagaactacagaaacctcgtctccctggatgtctcagggcaaccctggcctgggcagcctgctga

SEQ ID NO: 453425 - DNA, 82 bp, Homo sapiens
ccccatagatggccagctttcccccgagggtcaacgagaaagagatcgtgcctacaccaactaatgttacaattgaatccta

SEQ ID NO: 453426 - DNA, 100 bp, Homo sapiens
aatcgcgctccccaattgtggcgcaagctggcaaacttccccagactctgcgaggaaacggaaaggattgttgctaaccacattcgtgagcgagaaggga

SEQ ID NO: 453427 - DNA, 76 bp, Homo sapiens
atcgtgtataagctggtgcctggcttgcaagacactccgggaagcagtttgttcgctatataaacatgttgataaa

SEQ ID NO: 453428 - DNA, 100 bp, Homo sapiens
tgttaccaagaggggattgatctgctcctgcaggttctgaaagagcccacaggcggttttgtgagctgcttccccaggagcagcggagcgtggagtcgtc

SEQ ID NO: 453429 - DNA, 132 bp, Homo sapiens
aggcactttattatgcaggtggtctgtgaagccacacagtgtccagatacgaggactcctcagacccctgcacaattgagagaaaagcccgaagaattagcgtgacctccaaagtacaggcagacatccatg

SEQ ID NO: 453430 - DNA, 98 bp, Homo sapiens
gtggatctgccgccgggttgctgtgcgactattctccgggagccgtccgtgtcaccgccggaacctggcgcagaatgtcaaaactggaccaatggggc

SEQ ID NO: 453431 - DNA, 75 bp, Homo sapiens
ctaacctagggctactgttgattttgactatcttcttagtggccgttgtcatggatgcactggtagaagatgata

SEQ ID NO: 453432 - DNA, 83 bp, Homo sapiens
cgcctgggctgccggcacttcgcggcagcttaaccagctcgaaaaagcagtggaagcagctcacacatttttcgtggctaacc

SEQ ID NO: 453433 - DNA, 75 bp, Homo sapiens
atattgctgcaatcaggaccattgcaataaaatagaacttccaactactggtaacctgtgtatggtgactggagg

SEQ ID NO: 453434 - DNA, 90 bp, Homo sapiens
agaaactcttcgactacttcaaccaggaggttttccgagacaacaacggcaccgcgggctgaagaagatgcagagcagcctgaagctggt

SEQ ID NO: 453435 - DNA, 51 bp, Homo sapiens
gtgttcttgactccgctgctcgccatggtatgaaaatgaaagtcttcagaa

SEQ ID NO: 453436 - DNA, 82 bp, Homo sapiens
cctggagagcctgcaggacggcgcggcagagtccccgtacgcctacagtaacggtttacccaaggtccagcctagcccctag

SEQ ID NO: 453437 - DNA, 75 bp, Homo sapiens
ggagtctgaggggttcgggcttgtcaggttctagaaataagcgggttttgaaaacaaaaaaaagaaggagtggaa

SEQ ID NO: 453438 - DNA, 111 bp, Homo sapiens
gcggcgcctgaggagcgggatctaacccaggagcagacagagaagctgctgcagtttcaggccaagaataaggagacgggtgctttggctgcggccaaagtcattgaaacc

SEQ ID NO: 453439 - DNA, 73 bp, Homo sapiens
gtctctctgctgcggcgcggggaccgctgtgctctcggtcttcgccttgatcgtgttctcctgcatctatggt

SEQ ID NO: 453440 - DNA, 114 bp, Homo sapiens
cctgaagttcgataaagggccgtggctcaagcaggacaatcgcactttataccacctgcgattactctctccagggcacaccgtattcagctctgagcggtctttgctagtgag

SEQ ID NO: 453441 - DNA, 75 bp, Homo sapiens
gtggaccacagtcatcgagaggaccttccacgtggattctccagacgagagctgtttgcagacaaggtcccaaag

SEQ ID NO: 453442 - DNA, 137 bp, Homo sapiens
cttttccggaatctgttccatcgccagggcttctcctatgactacgtgttcgactggaacatgctcaaatttttggaacgtagttatcagcgattcacagctttctacgccagccgccacagtggccgaaaattgac

SEQ ID NO: 453443 - DNA, 100 bp, Homo sapiens
acatattcttaatgaaaaggtttctgacgctagcatcagcacatgtaggggtctaagagactttagaagacagctttccatcgacactaggccctttaga

SEQ ID NO: 453444 - DNA, 100 bp, Homo sapiens
gcatgaaatccatcgaggtgaagcacagtgccctctccgtcgagctgcacagtgacatggagagacagggtcttactctgttacccaggctggagtgcag

SEQ ID NO: 453445 - DNA, 100 bp, Homo sapiens
tacacctcttcgcagtgttttatacctttggtaatatcgcatcaattgggagtgccggtggtggtgtgcacattgagccccggtatagacagttccccca

SEQ ID NO: 453446 - DNA, 90 bp, Homo sapiens
cgaaagcctatcagcatagttaaggtattatagctgcaaatgtccttgtattctgtttatggagagtaccttctctgcagcggacaatga

SEQ ID NO: 453447 - DNA, 100 bp, Homo sapiens
gaggaggggccccagcagcccccgaaggccctatcaggacatggagtatgaaagacgttcagtgcattcagaacaagcccctgtattttgctgatcggct

SEQ ID NO: 453448 - DNA, 75 bp, Homo sapiens
gctgcatatgcccattttgctgtgtgttacaggggctggtggcagcagcgtcgtcataggtaatattggtgccct

SEQ ID NO: 453449 - DNA, 103 bp, Homo sapiens
gtcaccattggagctcatcagactgaccgtgtcttacatcagttcagagagcttgatcctctcccagaaaaggttttacagcaaagacccaatgcaaacgctg

SEQ ID NO: 453450 - DNA, 96 bp, Homo sapiens
caccctgtatcccagcatcttgacatttccgtggcaaccaaagacgggcgcctatcagtacacaataagggtttactcctggcttgggggcattag

SEQ ID NO: 453451 - DNA, 100 bp, Homo sapiens
gtctagcccagtggaccttctgaaggttatacattggctcttcaaagacgttcacctcatcagagaaatccctgactcctttgcagtggtgtagacatgt

SEQ ID NO: 453452 - DNA, 95 bp, Homo sapiens
gttatgacaggaagcagagtggctatggtgggcaaactaagccgattttccggaaaaaggttgcagtgagagcagatgctggcaagaagcactta

SEQ ID NO: 453453 - DNA, 100 bp, Homo sapiens
cctacctgctgtttggcaccgactaccccttcttccatgacccaccatctgtcttctacgtaaagtttgaaatatgggatacagctggtcaagaacgata

SEQ ID NO: 453454 - DNA, 98 bp, Homo sapiens
cttacaagaaacagttctctcaatacataaagaacagcgtaactccagacatgctcgaaatctatgacatgattggacaagcaatcagcagttctcgc

SEQ ID NO: 453455 - DNA, 102 bp, Homo sapiens
atactacgtgcaggccgtgaatgagaaaaatggagaaaacaagacaagcccattcattcatttgagcatagcaaaccattcctcaagaattttgtatccaag

SEQ ID NO: 453456 - DNA, 82 bp, Homo sapiens
agaatacgaggaggaagaggtggccataccgttgaccgctcctccaactaaccagttggagtcagttagctgctatgcactg

SEQ ID NO: 453457 - DNA, 90 bp, Homo sapiens
gtgatatttcgtgctttagatcctgctttcaaaatagaagatccttatagcccaaggatacagaggctttttggtggtgctggagttggc

SEQ ID NO: 453458 - DNA, 98 bp, Homo sapiens
tttggatcacaaatagaattcagctgttcagaaggggacatccaacgggctcatagagtggtagctgagcttcaggctgggacgtgcttcattaacaa

SEQ ID NO: 453459 - DNA, 100 bp, Homo sapiens
cttcactgtggctcatacatggtgagagcacagagccgggataagcagatagaagaaaggatgctgtctcacaggcaagatgacaacaacaggcatgcaa

SEQ ID NO: 453460 - DNA, 100 bp, Homo sapiens
ctgggaaggtggagccaccagcctctccctggaccctctttgcaagttcagtgcttaacctgaccgaactggctgcccttcggcctgaccttgggaaact

SEQ ID NO: 453461 - DNA, 75 bp, Homo sapiens
ctgcttcccaatcccactgatgaggatcagcccatggcaactcaaagttatgttgacgaatgtcctatggacgga

SEQ ID NO: 453462 - DNA, 100 bp, Homo sapiens
caagcgaaaacatgaccgctgagcccatgagcttaaattccccactcggccaaaggtgcgggttcctaccatccccattacgaagcctcacactatgaaa

SEQ ID NO: 453463 - DNA, 100 bp, Homo sapiens
cacaggggctcttctgcgagaggaacaagaccaatttcttcaacgactggactcgggccatatccgtggtgccgtcaacatgcctttcatggacttcctg

SEQ ID NO: 453464 - DNA, 74 bp, Homo sapiens
ggagcctgtgtccaagtggagaaatgtccgtggccacaatcctctggtcacagggattatggacccagaacaga

SEQ ID NO: 453465 - DNA, 83 bp, Homo sapiens
agcgaagtcaaggccctgtgcgctaaggccaggcactctgatggttctaaaacatccctacccaagaaaagtggaagaaccct

SEQ ID NO: 453466 - DNA, 78 bp, Homo sapiens
cataagaagttcttcgatgtatctaaacttggcaccaagtatggtgaccttgggaaaggtgttgaaagtgatcgtcgt

SEQ ID NO: 453467 - DNA, 100 bp, Homo sapiens
cgatccagtgcttagttccgtcatatccctctccacgacctcggtcgagcatgttcaccagggcccaggcagctatttttgctatgataatcctgctgcc

SEQ ID NO: 453468 - DNA, 90 bp, Homo sapiens
gtctcttacgtctgcggaagtgcagctgcctcagttcttagcgcaggaacgtcacagtggcctcgagcaggagcccccggtgccttatcg

SEQ ID NO: 453469 - DNA, 99 bp, Homo sapiens
ccgctatcaccatggggatggttcttctaaatgaagcagcaacttcgaaaggcgatgttggaaaaagacggaagtatttgatttctgacactggaggac

SEQ ID NO: 453470 - DNA, 75 bp, Homo sapiens
ggaaaattggcaaatctgttactgcagacagatgggaaaaatatttgatcaagcagatcgccaaactgaggcagc

SEQ ID NO: 453471 - DNA, 50 bp, Homo sapiens
acacaatgacataaacatcgctctctgggtgaaccaggaggatgaggtgg

SEQ ID NO: 453472 - DNA, 100 bp, Homo sapiens
agcctcaggaccggccacctccatcactggcgtcaccatgggggctgtgctgggtgtcttctccctcgccagctggagagaagaagaaggaggttcctgc

SEQ ID NO: 453473 - DNA, 74 bp, Homo sapiens
cggaacaacgtcggcgagcggggaccgcagctgaatgcacagctagaaggttggctttcacaagtacagtctac

SEQ ID NO: 453474 - DNA, 75 bp, Homo sapiens
cagccagtactctatatgaacaatccgtctggatcacggatgtaggaagtggtgatttgatgaaggctgctgcag

SEQ ID NO: 453475 - DNA, 50 bp, Homo sapiens
ctggacatcaatgcctttaggggaattgatgttgatgctgaaaattgtgc

SEQ ID NO: 453476 - DNA, 89 bp, Homo sapiens
gcaagtgagaagaggcctggaagggaaggaacagatacgtaggtaacctttccagagatgtgacagaagtccttatacttcagttgttc

SEQ ID NO: 453477 - DNA, 100 bp, Homo sapiens
cgctgtgtataatgaagatacatccatgatagaaaaacttctttcacatggtacaaatattgaagaatgcagcaagcttttgttaggagtgataaaccca

SEQ ID NO: 453478 - DNA, 75 bp, Homo sapiens
taccaaggaatctgcttttcaagtatgccaccaacagtgaagaggtgttggagagcacaatggctgaacaagtcc

SEQ ID NO: 453479 - DNA, 83 bp, Homo sapiens
agcgaggaagaagaggacgacgacgacgaggaagaggaggtttctgaggtactccaaagattcaggtttactcacgtcatcca

SEQ ID NO: 453480 - DNA, 83 bp, Homo sapiens
ccaaggaataaacatgcaatgaacccaaaagggactctctgggaggaaacagccgcacagtgatgatcgctcacatcagtcct

SEQ ID NO: 453481 - DNA, 100 bp, Homo sapiens
agaaatgaacccaaactacacagaatttaaattccctcaaattaaggcacatccttggactaagggagatcggatgtggcactttgcggtgtctgtgttt

SEQ ID NO: 453482 - DNA, 51 bp, Homo sapiens
cctgaggtctccccaacgcaggacatcagacttatgcagagatggacccca

SEQ ID NO: 453483 - DNA, 98 bp, Homo sapiens
attggagtcagcagaactgaaataggcttgttagcagtggcacaagatcttacagaggatgaagaaacagtagaagattccataattgaggatgaaga

SEQ ID NO: 453484 - DNA, 101 bp, Homo sapiens
gctgggaagaagcatatacttttgaaggtgcaagatactatataaacaaaccagtccagctacgggggcccagccagccagcagctgagtgggggttacgg

SEQ ID NO: 453485 - DNA, 80 bp, Homo sapiens
ccgccagatcaacctggagctctacgcctcctacgtttacctgtccatgactttatattcagagcaccaatcaaattaag

SEQ ID NO: 453486 - DNA, 96 bp, Homo sapiens
atcctgcatttccccgaagtattacatgattttcactccttgcaaactttgccatctttgttgcagagaatcgggaaagaccacagcaagattctt

SEQ ID NO: 453487 - DNA, 75 bp, Homo sapiens
ataaagctcttgaactcaatatgttgtccttgaaagggcataggttgatggaaatcacaatcttctgacaaagct

SEQ ID NO: 453488 - DNA, 73 bp, Homo sapiens
gcggagctcgcggaggcaaggccgaggataaggagtggatggagtggcatcctcgggcacctgtcctgttggc

SEQ ID NO: 453489 - DNA, 50 bp, Homo sapiens
cgttggaggccaccgtttccaggtgcactacatcctccaggaggtggtga

SEQ ID NO: 453490 - DNA, 100 bp, Homo sapiens
acatttggccctcatggaggcctcaaaagggcaggaccagcaccctcttctacggaggaaggaacgggcacagcagagacggggtttcatcatgttggcc

SEQ ID NO: 453491 - DNA, 75 bp, Homo sapiens
cgaaaaagaaccgcgcgggaagccccagcccgcagccctcggggcagagaagcctgtgttcttcccagccttcgc

SEQ ID NO: 453492 - DNA, 75 bp, Homo sapiens
tgccctacttcaaggataagggtgacagcaacagctcggcgggctggaagagtacagcgcctgaggaggagcatg

SEQ ID NO: 453493 - DNA, 87 bp, Homo sapiens
gaaagccgttgcctccagcaccacttctaatgcttacgaggaaatatttcagtaaaagcagttaaaaaagaagtagaaaagaaactc

SEQ ID NO: 453494 - DNA, 100 bp, Homo sapiens
ggaatgctttgcagtcagtggagaattgtccagaagacttggctcagcagacataaacgtgacccaaaaaagcttcaattttgccaagaagttctccctg

SEQ ID NO: 453495 - DNA, 75 bp, Homo sapiens
cacctgcgctgtgatgcctgcagagctgtggcttaccagagaccccaccccctggctacctgagtgaagatggag

SEQ ID NO: 453496 - DNA, 90 bp, Homo sapiens
tctttggagaatgatatcaaaccagctgggtgcagtggcttgtgcctgtaatcccagcactttgggaggccgaggcggccggattgcctg

SEQ ID NO: 453497 - DNA, 101 bp, Homo sapiens
agaatggagtggaaaacatgatgttgtttgaagttgttaaaatgggcaagagtgctatgcaggtttgtttctgcgtcacatgatcttggcctacagtaagc

SEQ ID NO: 453498 - DNA, 98 bp, Homo sapiens
aatcacgcggacatcgtctcctgtgtggcgatggtcttcctgctggggctcatgtttgagctctaagcgaaagacatgaggcctcagcctgaaatgag

SEQ ID NO: 453499 - DNA, 100 bp, Homo sapiens
cgctctgggagcctagaatgcatcagtgcccttgtggcgaatggggctcacgtcgaaggcatttcatccttcatgaagccattcaggattttgaattgca

SEQ ID NO: 453500 - DNA, 100 bp, Homo sapiens
gtcattcttctctacagaagagcttctcctcatcaactggggatgattacagttcttcctaaaaaaggttggatggcaagcatgtggtgtttggcaaagt

SEQ ID NO: 453501 - DNA, 100 bp, Homo sapiens
ttatgacaccatggatctcttcaggcacactacagaactaaatatgcatcaaattcaacacccaacagcttccttaatagcaaaggtagcaacagcccag

SEQ ID NO: 453502 - DNA, 50 bp, Homo sapiens
ttattgcatttcgttttctcaccacagatccagctccaggtcccacaggg

SEQ ID NO: 453503 - DNA, 82 bp, Homo sapiens
acggcggcggtggcggcttggacgactcggagagccggatgtgttcgaaatgcgctttgccaagatgccggacgagcctgag

SEQ ID NO: 453504 - DNA, 100 bp, Homo sapiens
gctggcggacatcactttagaccctccacctaattgcagaaatgagccgtcagactgctacagcattacctaccggtacctcgaagtgtccaccatccca

SEQ ID NO: 453505 - DNA, 51 bp, Homo sapiens
cctcagtgcctgccatggactgtctccacaaaccggaggactacccccaga

SEQ ID NO: 453506 - DNA, 100 bp, Homo sapiens
cgaaaagccacttgaagaaaagggtgaaggaggcgaattttcagttgataggaggttcagcaacatcagatgaccatgaatttgatccatcagctgacat

SEQ ID NO: 453507 - DNA, 74 bp, Homo sapiens
cgaccagtccaagagccggcggcatgacgacagcagccgctcttctaaaacattcaaaccaaagaagaatatcc

SEQ ID NO: 453508 - DNA, 98 bp, Homo sapiens
ccctggaggcttactgcaagaagtatgagcagctcaagcattccgttggcagctggcaaatttgatagagaactgtacttactaggaattaaaagacg

SEQ ID NO: 453509 - DNA, 50 bp, Homo sapiens
gcggcaaccaaatcggcgccaaggctgatcagctgaccgaagaacagatt

SEQ ID NO: 453510 - DNA, 75 bp, Homo sapiens
gaccccgcctactgcggcgcggggacccttgagatgggagcctcactgtattgcccaggctggtcttgaactccg

SEQ ID NO: 453511 - DNA, 100 bp, Homo sapiens
gacagaacagttaatcctcaatttaagcctgatctaacccctagaaacaggcccgccaagctgccccctgtgtgctattctttgatgagctggattcgat

SEQ ID NO: 453512 - DNA, 100 bp, Homo sapiens
ttctgcatgaacatctccagccagggcctggagctgctgaagactgctattgggaaagctggctacactgataaggtggtcatcggcatggacgtagcgg

SEQ ID NO: 453513 - DNA, 97 bp, Homo sapiens
acaatcaatacgattggaaccagcacaagtacaaagttatggtgaatggttgcatggatttgaaaaaaaggcaaaagaatgtatggctggaacttca

SEQ ID NO: 453514 - DNA, 75 bp, Homo sapiens
gctatgatcgaattggtggaaaggttgaagttcaagagctcagaccctaaagccaaagatgaagaggaagccttt

SEQ ID NO: 453515 - DNA, 112 bp, Homo sapiens
cttaggccggggcgtttcgacaggcagatctttattgcttcttggacacttaatgattgttggcaagaaatgtgctgctgatctgggcctgaataagggttatcgaatggtg

SEQ ID NO: 453516 - DNA, 88 bp, Homo sapiens
ggcttagagcaggccgcttggttctgacccagctgagatgtcctgtgaagtcaacgagtgccgaaaaattgagagtcttgaaaacttg

SEQ ID NO: 453517 - DNA, 101 bp, Homo sapiens
ctgaaaagtcgcagcgagctggagccgccggaggtgggaatgtttaaagtccaccctgagatcccagagtccatgtctgcagaggccaaggcattcatact

SEQ ID NO: 453518 - DNA, 101 bp, Homo sapiens
agatcctttgacaccttcagaatcgactcaagagttacatgcatcaggacagctgggaagtggtggaaggactgaggggggagatgaattacacccaggag

SEQ ID NO: 453519 - DNA, 76 bp, Homo sapiens
tacgacaaaggtcttttatattggcctgagaggagagtggactgaggtctccagaaatgctttgggttcatctttc

SEQ ID NO: 453520 - DNA, 100 bp, Homo sapiens
cgttggggtgagaccctcacttcatccgggcaagactggagagttaaatcagcttttaaatgcagttaaatcaatgcaggagaagacagttgtgtttcaa

SEQ ID NO: 453521 - DNA, 100 bp, Homo sapiens
gaccaagacgctcatggagagaactgtttccttgtctcagatgtaaaggataactcctttagccgatcacggagttcaagtgtaacaagcattgacaaag

SEQ ID NO: 453522 - DNA, 100 bp, Homo sapiens
cccggccttcgcgcttttcttgatcactgtggctggggacccgcttcgcgttatcatcctggtcgcaggttggagcttagtgataatataatttctggag

SEQ ID NO: 453523 - DNA, 141 bp, Homo sapiens
caaagagatgctgcaccactcacttccagtggagacagggacagcgacttccttgcagcctcttctccggacctgcctagagctggaacgttacctccagagcgagccctgctatgtttcagcctcagaaatcaaatttga

SEQ ID NO: 453524 - DNA, 100 bp, Homo sapiens
gtctcaccaaagggacctcttgcttgttcgagaacatacttttttggagctactcatgttccttacttggggggcagaccgggccgttccagtgctgatc

SEQ ID NO: 453525 - DNA, 100 bp, Homo sapiens
ctatagttaatcttggcgacattgacaatgatggctttgaagtctcagaccagtatccttcaggggttctcttactctgatttgcggaaatttggcatcg

SEQ ID NO: 453526 - DNA, 90 bp, Homo sapiens
agagaatggatctctcctgctttctgcttgtggttcataggccatgtattcagaaacgtgaagccagcaattgtttcgcaattcggcatt

SEQ ID NO: 453527 - DNA, 83 bp, Homo sapiens
ctccaggtccgacccgcgaacccctctgggatccccgccgctctgtctacaacccgaggatgcagcagtctcggccctggctg

SEQ ID NO: 453528 - DNA, 90 bp, Homo sapiens
aaacagctatatgggaacaacatacagtgacgcttcacaggatacactctgtgcagttttagagagagacacactcagtattcgagaaag

SEQ ID NO: 453529 - DNA, 83 bp, Homo sapiens
tgcctgggtttgaattgtgcggtttcagaattatgatctagcccttaagtatttccagaaagctgctgaacaaggctgggtgg

SEQ ID NO: 453530 - DNA, 100 bp, Homo sapiens
aaaaagaaagaatctcagttacaagagttaaaggcattaggatttcctgaaggacttgtgatacaagcgtattttgcttgtgagaagaatgagaatttgg

SEQ ID NO: 453531 - DNA, 100 bp, Homo sapiens
tgtcaatggagctggaaaacatcgtggccaacacggtcttgctgaaagccagggaaggaaaatagtggccgagtatgagaagaccatcgctcagatgata

SEQ ID NO: 453532 - DNA, 90 bp, Homo sapiens
ctgggaaaattgaggagagtcctttcagtgtcgaggctcacagaacatttcctgcctgttgctcacactctgttgtccacagcatacccg

SEQ ID NO: 453533 - DNA, 96 bp, Homo sapiens
cgactagggctcgggcgccggcgagatgcctttgttcaccgccaaccccttcgagcaagacgtggatgggtcagagaatttctgaatgaagaaaac

SEQ ID NO: 453534 - DNA, 74 bp, Homo sapiens
tcgcctccacgagcgggcgctgctggatgccgagcgcctcaagcgcgagatcatggaagggaagtggttgctgt

SEQ ID NO: 453535 - DNA, 92 bp, Homo sapiens
cgaggatatcgtgtctggagcagtggagcccaaagacccctggagacatggtcccaggtgtgacaccttcagcaggtctcagggaagatggc

SEQ ID NO: 453536 - DNA, 100 bp, Homo sapiens
aacgtgagccacagcaatggcacacacgtgctcctggaggccggctggagcgagtgtgggaccctcatgcagagcggcagagcggcttgggtaaatccac

SEQ ID NO: 453537 - DNA, 76 bp, Homo sapiens
tttccttccccctcggaaaatggttcccactgccgggcgaggccacaataagccagctaaggagtgaacttgccaa

SEQ ID NO: 453538 - DNA, 116 bp, Homo sapiens
cccgggaggaaggaacgaggcaaggagctaaagcagcgtgcgttcagccctgggttacagaatgtctgaaggggacagtgtgggagaatccgtccatgggaaaccttcggtggtgt

SEQ ID NO: 453539 - DNA, 75 bp, Homo sapiens
tcctctacctcagcagcagcctgggaactgagagtttgtcccgctggctggaagcctggcagtgacacgattaag

SEQ ID NO: 453540 - DNA, 75 bp, Homo sapiens
ccggttccccggcccacagtgggggtgtgcaaacccgagagaactggacaggggcaagtgtccgagtggtgaatc

SEQ ID NO: 453541 - DNA, 100 bp, Homo sapiens
tgcaggcccatacgatttgagccaccaatgctggatttccatgaacacatgttctgtactattcaagacagtgcttaatggtgtcccgtaatcttggttc

SEQ ID NO: 453542 - DNA, 90 bp, Homo sapiens
gaaccagtgaaatttgttccacaggatgtgccaccagaacccaagaagattccgataagaaacacggttcaaaccttgtactactcagct

SEQ ID NO: 453543 - DNA, 106 bp, Homo sapiens
tggggctcatgaaccgcgccgtgcaactgctcatcctggcctacgtcatcgggtgaaatgacaatggatgctctgttggctcgattgaaacttctgaatccagatg

SEQ ID NO: 453544 - DNA, 75 bp, Homo sapiens
ctcaatttaagcctgatctaacccctagaaacagaattcagaaggagctggcggacatcactttagaccctccac

SEQ ID NO: 453545 - DNA, 100 bp, Homo sapiens
agctattcctgttgatggtgatgaagacaggaagccagttgagggaagttctccatgaatgtacgtcacaatgatgatgaccgaccaaatccctctggaa

SEQ ID NO: 453546 - DNA, 50 bp, Homo sapiens
caaagaagtgctatctggaaagagagctccagcggcgccatgagcaaatg

SEQ ID NO: 453547 - DNA, 74 bp, Homo sapiens
gactgtatttgggctgcagcacagggacaaaagtggctctcaatccagcacatgcacattgaagcaagttaaag

SEQ ID NO: 453548 - DNA, 100 bp, Homo sapiens
ggattcctcagagagtgaacttggaatcttggacctcatccagagtgggctccacctcaaccagaatatttctatcagcctaaaggaaatgaaaaggtac

SEQ ID NO: 453549 - DNA, 74 bp, Homo sapiens
acaccctcgtattctcctgcccttccccagatcatggaagggaagtggttgctgtgtatgttactggtgcttgg

SEQ ID NO: 453550 - DNA, 100 bp, Homo sapiens
ggcgccgagcgcggggtcttggtccaccttccagcacaaggagctgatggccgctgacaggggacgcagggtaaactagcgctcctttccgtaaccacgg

SEQ ID NO: 453551 - DNA, 100 bp, Homo sapiens
gactactggctggacgtgctgtacagcaagttccgatgaagttaaattccgtcaagatttaatgaatattgcgggcacaacattatcctcaaaacttctt

SEQ ID NO: 453552 - DNA, 82 bp, Homo sapiens
gcagccgcgaggaggcgcgggaggtgttcgagaacgaccccgagacgggtgacgagaacaagtcagtgcgcgaccgtttcaa

SEQ ID NO: 453553 - DNA, 82 bp, Homo sapiens
atcaccggcccgtggccatcggcagctgcggccacacgtattgacctgatggacatggcttcggacatcctgcagcccaaag

SEQ ID NO: 453554 - DNA, 75 bp, Homo sapiens
tcccccgtcccaccactgaggctgttgggccaggccagtcatgctagaacctgctgtggcaccgcgcccagtatg

SEQ ID NO: 453555 - DNA, 83 bp, Homo sapiens
gaagaatcttctggtggcgaagaagaagatgaagatgagaacattgaggagcagacgcctccgcctagacctgaagcctaccc

SEQ ID NO: 453556 - DNA, 100 bp, Homo sapiens
tattgcacttgtgcgaacaaagcttttctgatatgatgggaaatacaaatgaaccaagcacacgtgtccgaacgtgccaaatactggtgtaagcaaacct

SEQ ID NO: 453557 - DNA, 75 bp, Homo sapiens
gtgccttttcttgttcctactgtaaaggagatgggttagatgttgatgtatcaggaatgccagctctgtgctctc

SEQ ID NO: 453558 - DNA, 82 bp, Homo sapiens
ccaacttcggcaagatccagatcgggatttacgtggagatcaagcgcagcgatgatagcctgggctggaagctcttctacgt

SEQ ID NO: 453559 - DNA, 75 bp, Homo sapiens
gtcgtgaggctttggcagaaattaagaaggaaatatctccattacatgaagaggagcatcggcggcgtgaggaag

SEQ ID NO: 453560 - DNA, 98 bp, Homo sapiens
aatgaagtgcccgcccctctaagcccggagcccggcgctttccccgcaagatggacggtttcgccggcagtctcgattttggggtaagtgcgttccta

SEQ ID NO: 453561 - DNA, 83 bp, Homo sapiens
aagagtaacagcagcgccgtcccgtccgacagccaggcccgggagaaaactcccccactggaaaggattctgaaagaaatgaa

SEQ ID NO: 453562 - DNA, 90 bp, Homo sapiens
ctcgagggaacgtggtcggaggccgattcgacacagacaagaatctccctggaaaaggagacatgaatgtctgcaatgatacttcctgac

SEQ ID NO: 453563 - DNA, 90 bp, Homo sapiens
cccaggtgtaagcgcagaaagcaggcgaacccgcggcgcaataacgtctggctcttgctgattgaattcctttggtgcagtttagcatgt

SEQ ID NO: 453564 - DNA, 100 bp, Homo sapiens
ccggaagaaactgtccgagaagcccaaagaagcatctcgaagaacagccctgccacactctttgaagttcctgacacatggtaaccaagacctgagggca

SEQ ID NO: 453565 - DNA, 75 bp, Homo sapiens
tggaagaggcatgtgtcatccacagagacttgtaccttaccagtaacaaatgtggcaaatatgtggacattggag

SEQ ID NO: 453566 - DNA, 101 bp, Homo sapiens
gcctgtggtaccccctgctgtagtgatactgagctggaagccatctgccctcactatcagcagccaggtcacccctcctaatttctcagtgtcacaagtgc

SEQ ID NO: 453567 - DNA, 75 bp, Homo sapiens
ggcgagtcctgagcggccaggacgacgaggagcagggcctgactgcgcaggtactccaaagattcaggtttactc

SEQ ID NO: 453568 - DNA, 75 bp, Homo sapiens
cctatattacagttagtgtaaagggcgttcccacagctgtgcagaacttagcgccacgcgctgctgttgctgctg

SEQ ID NO: 453569 - DNA, 82 bp, Homo sapiens
ctgagctcagacctgccaatttaccagagataattgataacaccctgtaacagctgagttcgatacaagaggctgttttcct

SEQ ID NO: 453570 - DNA, 99 bp, Homo sapiens
gcagcggctgtctcacggaccacggcggcgcccgcagctcctcaccggttcatgtgtgcccagctccctaatcaggtcctggagagcatcagcatcatc

SEQ ID NO: 453571 - DNA, 98 bp, Homo sapiens
aacagtcagcgtgatacctctgatattaaggttgaagcactggacaatgccacatactttgtggatggtgtgggtcttgggggtcatcatcagcctct

SEQ ID NO: 453572 - DNA, 95 bp, Homo sapiens
caggcaaggacaaggccacagagtcggggtcttcacggtggtcctgacaaccaagtccactttgaagggtaccaggtgtccaatcagtgtatggc

SEQ ID NO: 453573 - DNA, 100 bp, Homo sapiens
tgctggctgcttccagtgttcgccgagaggtaccgggggtgacagctccgggaccggccgaaaggcgaggaaccggctttgtgccttgggcaaagggcag

SEQ ID NO: 453574 - DNA, 100 bp, Homo sapiens
tgcagcgcagtggaagtcaagagcaagaatgccttcagaaatcttgctgaagatattttcctacttggatgctgtgagccttctgtgtactggatgtgtg

SEQ ID NO: 453575 - DNA, 90 bp, Homo sapiens
tgatttctgcatttccatctgagagcccccctccatgcgcctgaaggcccgacccagcagccctggcttttccgtgcttacctgcagcgc

SEQ ID NO: 453576 - DNA, 100 bp, Homo sapiens
agccacatactatccgtttgttcaggaaccaccagtgacagagatctagtttgaagcactaagaagaataagacatcagtttgaaaagaggctctatcag

SEQ ID NO: 453577 - DNA, 74 bp, Homo sapiens
tttggacctgaaacagaaattctggaacacctatatgatctggtggctggacccagagctgacctatggctgcg

SEQ ID NO: 453578 - DNA, 99 bp, Homo sapiens
agaaggtctctggagacatcttcagcaggtacaagaagaacttgaaggccctctacgtggtgcaccccaccagcttcatcaaggtcctgtggaacatct

SEQ ID NO: 453579 - DNA, 75 bp, Homo sapiens
aacggctcaagaatttcaagaacaaaggccgcgacttggaggaactaagcgtcttgtagaaggaactattaatcc

SEQ ID NO: 453580 - DNA, 88 bp, Homo sapiens
gttccccggcccacagtgggggtgtgcaaacccgagagaactggaaataagcgggttttgaaaacaaaaaaaagaaggagtggaagag

SEQ ID NO: 453581 - DNA, 100 bp, Homo sapiens
catattctggaatgacgtaaaagaccctgtctcaattgaagaaagagcggtgctggaaacgtgcgtagcaacagtaggccgagtatccaacgttgatcat

SEQ ID NO: 453582 - DNA, 50 bp, Homo sapiens
ttctgacagtatttcatgacagaaaatgtttataggaggccttagctggg

SEQ ID NO: 453583 - DNA, 82 bp, Homo sapiens
ttcgagtgacccgggtgccgaggagcgggaagagttgctgggggtggcccagttgaaatccttcccttcctctaccttggaa

SEQ ID NO: 453584 - DNA, 96 bp, Homo sapiens
gggggagctgctgggcgaagcacgctactacctggtgcagggcctgattgaggactgccagctggcgctgcagtgaagctgtggtctaccaatcta

SEQ ID NO: 453585 - DNA, 75 bp, Homo sapiens
agccaagaactattcggttctctacttccaacagaagaattgatagatgtcacatgtaccctgctgcttctaaac

SEQ ID NO: 453586 - DNA, 83 bp, Homo sapiens
cccagccactgccgccgactgcagtgacatactgcggctgatcaaggtcgggaaagaggttaaagaagacacgcaagtatgat

SEQ ID NO: 453587 - DNA, 83 bp, Homo sapiens
tggcggacatcactttagaccctccacctaattgcagcaaaagactgttgaagtagagagcattttgcccagctcactcggat

SEQ ID NO: 453588 - DNA, 100 bp, Homo sapiens
gaggtggaagaggacgggctttaggctggaagcgccttagaggagccatttttccagctcattcttggaatcccagaacaggccttaagtcttctccaca

SEQ ID NO: 453589 - DNA, 87 bp, Homo sapiens
gaagctgccgccgaacgacaggacgttggggcggcctggctccctcagggtgatcagcccatgacctaaacctccagacaaaataaa

SEQ ID NO: 453590 - DNA, 83 bp, Homo sapiens
actccgccgccatcatggtgaagctcgcgaagagctgtaggtaaaacttgcctactgatcagttacacaaccaatgcatttcc

SEQ ID NO: 453591 - DNA, 74 bp, Homo sapiens
cgaggctgaagccattgctccacaggttggcaatggcattgaacctggccacatcccaggtaccgtgaacatcc

SEQ ID NO: 453592 - DNA, 100 bp, Homo sapiens
ccgagaggagccacaatggagacgccgccgctgcctcccgcgactttgcctcccgggccaaactggcagttcaaaaactagtacagaaagttggattttt

SEQ ID NO: 453593 - DNA, 82 bp, Homo sapiens
ctccgtccacaacgccgcttcggggctcctaggagcttctacctggccctctacaagcagatgagcttcctggagaagcgag

SEQ ID NO: 453594 - DNA, 75 bp, Homo sapiens
gtccgttctctcaggctcccgttcagactcggtgaaatacctggagtgctcagctctcacccagagaggcctgaa

SEQ ID NO: 453595 - DNA, 100 bp, Homo sapiens
cggcctcggggccgagctgtgccccccttcgtattcacgcgccgcgggctctgtgtgctccgggatggagcaggtgtgcagagggtgagaacccagctct

SEQ ID NO: 453596 - DNA, 100 bp, Homo sapiens
caacagaaaacatgggagaagagggatatgaagccagcagctaacactgggaaagttcagatcatctctaataatagggaagccattgaaaagcatgccc

SEQ ID NO: 453597 - DNA, 100 bp, Homo sapiens
ggacattgaaagcaaaatccaaccaggttctcaacaggctgactcacggatgataccatcggggaccttaagaagctgattgcagcccaaactggtaccc

SEQ ID NO: 453598 - DNA, 82 bp, Homo sapiens
atctattccggccacccattgatttgatgcataaaggcagctttgaaacacctactcagcaggaagacaatgaggatgaaga

SEQ ID NO: 453599 - DNA, 98 bp, Homo sapiens
gtcttggggagtacccagtggagcagatgacaaccatagcccagtgccaatgcatcttctgtactctggatgacaaggagtatgtgggctttgcaacc

SEQ ID NO: 453600 - DNA, 145 bp, Homo sapiens
acagagtccagctactgtgagtcaccagaaagggaaaccagttccacgtatagctgaactcatggacaaggtgatggcatcagctgagaagggaaggaagcccatgtgaggacactgaagaaggagtgagcagacaataagaagc

SEQ ID NO: 453601 - DNA, 98 bp, Homo sapiens
cctgattctgtgaccttgagcttcatagaggaaatgaaagactcctctatggaaagctatcatggtgaacttacttcagattgtgcgggaccactggg

SEQ ID NO: 453602 - DNA, 50 bp, Homo sapiens
ccgtcaacgccttcaaccaggagcatttaaatcaaacggtattgagatgg

SEQ ID NO: 453603 - DNA, 100 bp, Homo sapiens
ctgatgaaaagctccatgtcacagagtgtgaacatggctacgcctcttcattcccgtccatgccgagcccccgactgcagcattcaaagcccccacggag

SEQ ID NO: 453604 - DNA, 75 bp, Homo sapiens
aaaagagaagtcacaattcctccaaaatatagggaactattggctgcacagaaaactgaatctgtagataacgag

SEQ ID NO: 453605 - DNA, 102 bp, Homo sapiens
tgactggtgtggatagctacacctgtgaaaatggtaacaaatttggccctgtttgctgaaatgttggggccaaacaacttgatagagcctatgatgttcctt

SEQ ID NO: 453606 - DNA, 83 bp, Homo sapiens
acttacgggaggacggggaaaaagcggccaaagaagtgaagctgctgctactcggaaaatgtttataggaggccttagctggg

SEQ ID NO: 453607 - DNA, 100 bp, Homo sapiens
cgcggtcggtcggcgcctgttctcgggctgtttggcgggcacagaccccacaggctcctcggacactgggtccatcacctcctgccccatcatccactcc

SEQ ID NO: 453608 - DNA, 80 bp, Homo sapiens
gcaattatgaaagaagtcattccttttttgaagaggcagtaatgaaccaggaaaaaagaagcagcatatctgtcatattg

SEQ ID NO: 453609 - DNA, 80 bp, Homo sapiens
gaggggaaactatgggagttcccaattaacaatgaagcagcacttctcagaacttctggatgagttttcccagaacgtct

SEQ ID NO: 453610 - DNA, 98 bp, Homo sapiens
cagtggtcgcttcttctccttgggtatattcaggcctgccgggcactcatgatcaccgccatcctcctgggcttcctcggcctcttgctaggcatagc

SEQ ID NO: 453611 - DNA, 98 bp, Homo sapiens
ggtgaagcagtgcttcgtggtgactgaaaaaggttttttgcatgtctgacacccatgactccacctggaccttatggctccacccagaagcaattcag

SEQ ID NO: 453612 - DNA, 100 bp, Homo sapiens
tcagtggaataaatggcgtccaaagtcacagatgctatagtctggtatcaaaagaagtatcggttttatggagaacctgtaataaaagcatgtattgaaa

SEQ ID NO: 453613 - DNA, 110 bp, Homo sapiens
atggacatggaaaatgaagaaagcatgatgtcctatgagggagacggtggggaggcttcccatggtttggaggatagcaacatcaggaagtgagctcacaatgactcaag

SEQ ID NO: 453614 - DNA, 75 bp, Homo sapiens
ggaaaccttgtgaagaacaccctagaaaaatgtcagagagaaaatggatttatgcacagaccccacaggctcctc

SEQ ID NO: 453615 - DNA, 95 bp, Homo sapiens
caatccaaagttcgatgaagaaacagccaacaataaaggtggcaaaggacctgtcagaaggaaaatatttatccccaaacagaaacctgtacaga

SEQ ID NO: 453616 - DNA, 80 bp, Homo sapiens
ccttagggacaccgagtgacacgcaggagcttcgggacagcctgtggagccccctgagctgcccgctgatctgcagcact

SEQ ID NO: 453617 - DNA, 75 bp, Homo sapiens
gattcgtatgcaccagacttcggctaaaggaaagatgagtccaaggagcccatcgtggaggttcgaacggaggag

SEQ ID NO: 453618 - DNA, 90 bp, Homo sapiens
atcttcaacataataagatatttgtgaaccaagagacggggttttgccacattggccaagctgatctcgaactcctggcttcaagtgatc

SEQ ID NO: 453619 - DNA, 100 bp, Homo sapiens
tgtagagacgcaggccaaggaaaatgcctatgatctggaagccaacctggctgtcctgaagctctgctacaggagctgagagaccctaccctcactttcc

SEQ ID NO: 453620 - DNA, 83 bp, Homo sapiens
cccgggattggaccgacgcagccatggcaaaatttggtttctctaatattactggaattgattactctccttctgcaattcag

SEQ ID NO: 453621 - DNA, 75 bp, Homo sapiens
gaggccgtgcgggacgcgggcgccaggaccggccgaacgcagagcgcttctctgaagtagctttggaaagtagag

SEQ ID NO: 453622 - DNA, 74 bp, Homo sapiens
tgtctgtgagctctgcaacaaagggttgggagggaagtggctgagagctcacaggcaccccctccgcccccgag

SEQ ID NO: 453623 - DNA, 142 bp, Homo sapiens
gtgctggctcagtacatattcaccttgaagaggaagacggggcggaagaccaagatcatcgagatgggccatgtttatgagtggactaagtgaaagcaaacaaacccatgtacacctgaggaatgtcgatgctgccacctta

SEQ ID NO: 453624 - DNA, 50 bp, Homo sapiens
ctagcagtcgggaccgtactgagtacatagtggaatgtcatgggatcacc

SEQ ID NO: 453625 - DNA, 97 bp, Homo sapiens
atgcttctcatggctgccctgtggggcctctacatgtccctggttaatgtgggccatgtctgatggactcaccctgtcacccaggttggactgcact

SEQ ID NO: 453626 - DNA, 51 bp, Homo sapiens
cctagtgactgcggcctgcatcccggtgctggagaatctggtaaaagcacc

SEQ ID NO: 453627 - DNA, 75 bp, Homo sapiens
ccccttccccacgcaaccccagatccatttacactttacatttccctgaaacctgggctcttgaagacgcatcac

SEQ ID NO: 453628 - DNA, 89 bp, Homo sapiens
ggaaagcagctgagatccagaggagtggaaggctcccccttgactaaagctgtcaaggtgaagatgttcttaaagggtcccagattacg

SEQ ID NO: 453629 - DNA, 75 bp, Homo sapiens
gacaaaaaatgatttggtggtcagcttgcctgaggagagcctattgtgaagaatggcaggcctccaacgtctcac

SEQ ID NO: 453630 - DNA, 98 bp, Homo sapiens
cgcgttcctatggacagacgcacagacacctgcagctaatgggaatgacagcaagaaatttaaacgagatagacctccctgttcgccttcccgtgttc

SEQ ID NO: 453631 - DNA, 75 bp, Homo sapiens
gtctgggcttcatagcattcgcctactccgtgaagaattttgagactgaagaagtagaactttccttctccaaga

SEQ ID NO: 453632 - DNA, 75 bp, Homo sapiens
gtggtacatggcactttctccattgctgactccattgagttggaaggtgtgatccctcacatccacaaatctctg

SEQ ID NO: 453633 - DNA, 80 bp, Homo sapiens
catggcctacccgggatacggaggagggggtaagcttgatgattaccaggaacgaatgaacaaaggggaaaggcttaatc

SEQ ID NO: 453634 - DNA, 60 bp, Homo sapiens
ttgtgtagcgtctgcgagggaaagggcttgcaccgggggtgcgctcccctggggccccag

SEQ ID NO: 453635 - DNA, 101 bp, Homo sapiens
gcccacggtagcgcagccgctctgaggcctggtctccaagtcctctcctaagaagcctcgtggacgtaacatcttcaaggcccttttctgctgttttcgcg

SEQ ID NO: 453636 - DNA, 100 bp, Homo sapiens
ctgagttactacaaatctgaagatgaaacagagtatggctgcagaggatccatctgtcttagcaaggctgtcatcacaagattaagaattcagtgtccag

SEQ ID NO: 453637 - DNA, 75 bp, Homo sapiens
atttcaacaaaagaaagtggctgttgcatgtaatctttctggcactaaagaaagcggcagcccagaatctcgtgt

SEQ ID NO: 453638 - DNA, 82 bp, Homo sapiens
gactttttgctgccctgatgagtaggtggaaagccactcggattttctcctatgggtcaagtctggcaccatctttgacaac

SEQ ID NO: 453639 - DNA, 75 bp, Homo sapiens
cgacaagccgctggcagccgcggatctcaccgccgctcagggtcttgccccagaagctgcgggcacatccacgcc

SEQ ID NO: 453640 - DNA, 88 bp, Homo sapiens
tcaaatgaggctggaagcagctcctgctcagccacagtcactgtcagagagatctggttggagttggagggtgagagaaaatgaattc

SEQ ID NO: 453641 - DNA, 73 bp, Homo sapiens
ctgaagcgcacgacctccgactactttctccttcaagaaaagcacttggttctgcttcgagatggaaggacac

SEQ ID NO: 453642 - DNA, 88 bp, Homo sapiens
cgggggcttttcatccaatttgcacctacattgaaattggacatcatcctgagcctcaagtactacagccttccagcagccttcccag

SEQ ID NO: 453643 - DNA, 100 bp, Homo sapiens
gacgccggcggagacgcgggcgagagcactagacaaactgaatggatttcagttagagaatttcaccttgaaagtagcctatatccctgatgaaatggcc

SEQ ID NO: 453644 - DNA, 101 bp, Homo sapiens
aaggctcttccctgaccattttctactgtccctgcgcgagcggaacggaagccgccccttttcaacatgaatgcaatgagtgccttatatcacattgccca

SEQ ID NO: 453645 - DNA, 101 bp, Homo sapiens
ggaggacctgttgaccttactttgaagcagccaagatgttttgtattaatggatcacattttgaatttgaagctttacacggattttgatgaaattcgaca

SEQ ID NO: 453646 - DNA, 83 bp, Homo sapiens
cctgccccggcgccgtccgtgcccgcgggacctgacagccgggtcagagaaaactttagaaactgttcctttggagaggaaaa

SEQ ID NO: 453647 - DNA, 110 bp, Homo sapiens
ccctcaagttgtagcaagatatttaagtcatgtcctacaaaatagtgaacacttgtcctgctccttcacctttttcttgcatggagacagcaatgtttgtaccagtgtgg

SEQ ID NO: 453648 - DNA, 100 bp, Homo sapiens
agtatggtagccacacccccaggttattggaggattcttgaatttgattatgagatgaaacttctgaatcatgtaactcagcttgtggattctgaatcat

SEQ ID NO: 453649 - DNA, 84 bp, Homo sapiens
gaagttccctcacattagccagtgtgaagacctccgaaggaccatagacaatgcagatcttcgtgaagactctgactggtaaga

SEQ ID NO: 453650 - DNA, 98 bp, Homo sapiens
gattctgtgatggaatgggaagtggatgaagtgctgaactggacaaatacactgaactttgatgaagataagatttcagtttccacagctgactggag

SEQ ID NO: 453651 - DNA, 76 bp, Homo sapiens
accatctttgacaactatgacctactgcttggcgtccatggcttacaagagatgggaatgaggtgggaggtggaag

SEQ ID NO: 453652 - DNA, 74 bp, Homo sapiens
ttctgggcgttcatgatcctggccagcctgctcatcgcctactgcagagccttcacgtaaatgggtccagtcat

SEQ ID NO: 453653 - DNA, 99 bp, Homo sapiens
acctgcccgaactcatggccgagaaggactcgctcgacccgtccttcactcacgccatgcagctgctgacggcagctggaggagcaccggaattcacag

SEQ ID NO: 453654 - DNA, 107 bp, Homo sapiens
gaataaatgggaacaggccagcaaaacactcagctgcaagtccaaagccacaagttttcggctttgtgagaaaccttaccatcaaacacgatggccagcaacgttac

SEQ ID NO: 453655 - DNA, 102 bp, Homo sapiens
gtccaactcagaggacgaggcctccttcaagtccgaggtgctggagaatctggtaaaagcaccattgtgaagcagatgaggatcctgcatgttaatgggttt

SEQ ID NO: 453656 - DNA, 100 bp, Homo sapiens
tacttgggtgacatctgcctgagagatctccaagaattacaggtatggacctgtctgccaatcaggacgaggagaccgaccaggagaccttccagctgga

SEQ ID NO: 453657 - DNA, 100 bp, Homo sapiens
gaggaaagcatggacctaatgaacgggcaggcaagcagtgtcaatattgcagctactgcttctgagttacagatgaggacacagtaaagaggtattttgc

SEQ ID NO: 453658 - DNA, 90 bp, Homo sapiens
aacttcgttgcttgcttgcctgtgcgcgcgtgcgcggacatggcctcaaacgatggccgccaagaacgagtcatgtttgacaaaattaca

SEQ ID NO: 453659 - DNA, 100 bp, Homo sapiens
ggctgccctgacagcggagcattttgcagcactccagagcctgctcaaggttgcaattgtagctcaagacttggcagcattccatactgcctcatcagaa

SEQ ID NO: 453660 - DNA, 75 bp, Homo sapiens
tggacatgaaggcaaaggcagcattctttctttccttaggaaaaaataggtgatcttcagctttgcaaactggat

SEQ ID NO: 453661 - DNA, 100 bp, Homo sapiens
gaacttggttccccctccctcagcttccgccccaaaagcccaggagttctgtttccgaagaaagagccagatgattctagagatgaggatgaagatgaag

SEQ ID NO: 453662 - DNA, 82 bp, Homo sapiens
ctgcccctggacgaccaggtcatcctgctgcgggcagagtggaatcgatggaagccctgcccatactgagccgtaacccaag

SEQ ID NO: 453663 - DNA, 88 bp, Homo sapiens
gaaaagaggagtcagacacggggcaggctgagttcctcttgctcacagagctctgtaaaggtgtttccccccgggccggcctgccgtg

SEQ ID NO: 453664 - DNA, 80 bp, Homo sapiens
tgtcttcggtggactccttcggcagtccacccaccgccgccgcctcccaggcctggtctccaagtcctctcctaagaagc

SEQ ID NO: 453665 - DNA, 50 bp, Homo sapiens
gccgccgccatcgccaccatggttgtcgccgtgatcctgaaggcgctgac

SEQ ID NO: 453666 - DNA, 90 bp, Homo sapiens
gacgctgccaacaacgggcactacaaggagagctgatagtattcattccactcttttcataattggtcagaacagttagaaattgctttt

SEQ ID NO: 453667 - DNA, 75 bp, Homo sapiens
tagacctgaagacaaaaatccagaagtacaagcagtctgatatccaattgttccagcaccatttgttgaaaaggc

SEQ ID NO: 453668 - DNA, 100 bp, Homo sapiens
aatacattagatattatagcgatccatttgaaccacagcgacgtctccccgcgaagaaaagtcgacaacaacttcagcgagaaaaagcccttgtagagca

SEQ ID NO: 453669 - DNA, 100 bp, Homo sapiens
gaaccgacctggcacatcctggagaaaaacctgaaatcccacttacagaatcctgccaacttccacaatgccgccacggagctgctggactggtgcggag

SEQ ID NO: 453670 - DNA, 100 bp, Homo sapiens
tcccgcgcacacacggccatggcggagctccaccgggggacggctacgtgcaggcggacgcccggggccccccggaccacgaggagcacctgtatgtcaa

SEQ ID NO: 453671 - DNA, 97 bp, Homo sapiens
tgacagagacccgtgagccagctgagactgggggctacgccagcttggaagaagatgatgaagacctttccccagaaatctccaaattggacatcca

SEQ ID NO: 453672 - DNA, 75 bp, Homo sapiens
tggaagcagccgatccagcctgcggagcctgtggggcagctcattgctatggacagtgctatcaccctgtggcag

SEQ ID NO: 453673 - DNA, 82 bp, Homo sapiens
ctctagaggcgttttttggccaaggggtaatgctggaggatggaagaagcaaagggtttggcttcgtctgcttctcatctcc

SEQ ID NO: 453674 - DNA, 75 bp, Homo sapiens
atcctcaccgatgtcgggaaggtcactgaacctgaccctctttgcaagttcagtgcttaacctgaccgaactggc

SEQ ID NO: 453675 - DNA, 85 bp, Homo sapiens
gctgcagtgacatgtccagcatgaatcccgaatagattggattcagcatcaaaatacatctactcatattgagagctgtcgacag

SEQ ID NO: 453676 - DNA, 50 bp, Homo sapiens
gagggatcggtctcagccgcgcggatgctgttgatggagtaatgaatggt

SEQ ID NO: 453677 - DNA, 90 bp, Homo sapiens
ggtgctaactgagggcacctctacccatctggctttcattttccaatctgggtcctgtatggtggaagagtcggggaccctcgaatccca

SEQ ID NO: 453678 - DNA, 100 bp, Homo sapiens
ctacacattggattccattttatttctacttaataacgtgcacctttctcatcctgtttatgtccgacgtgcagctggtctcctcatgctgctacagaac

SEQ ID NO: 453679 - DNA, 98 bp, Homo sapiens
gcgccaccatctttcgggctgccgagggtgttcttgacgattaatcaacagtggacagaggactgcagaaaatcaacctatcctccttcaggaccaac

SEQ ID NO: 453680 - DNA, 99 bp, Homo sapiens
aaaggatacaatatagaggcagaaggccttttttcaaagagctcagagttctacagagtcaccactgaacaatatcagaaagctgctgaagaggtggaa

SEQ ID NO: 453681 - DNA, 98 bp, Homo sapiens
ctggggcggatagagcgaggccagccatgtaacgcctgtggtgaccagtgccctgggttcgccttgcataaatggagcggaatggccaaagactatga

SEQ ID NO: 453682 - DNA, 75 bp, Homo sapiens
gcaccactgaagtgaccgaatgaggtctattgaatgatggaactgtgggtatttttaggggcaaccagatgcgct

SEQ ID NO: 453683 - DNA, 100 bp, Homo sapiens
cttaacaacctgggcaacttcatcaacaggctgaaaactgttctggccaagcgaactgggcggtctgaagtagagatggaagggccagaggaatgcctgg

SEQ ID NO: 453684 - DNA, 101 bp, Homo sapiens
agtgatctggaaaaggagatgcagaaaatgaatccatacaagattgatataggcgcagtatattctcacagaatgatgaacaacatgggtggtgatgagga

SEQ ID NO: 453685 - DNA, 100 bp, Homo sapiens
atggcgctcctgctgtgcttcgtgctcctgtgcggagtagtggctgctgtgacttactcgaagcctcgattggccacattttggtactacgccaaggttg

SEQ ID NO: 453686 - DNA, 90 bp, Homo sapiens
gtcagccgatgcaccgagtccagcccaggaaaatggagagccatgtgatgccaagaggctcaggaactggcatttacagcaatgctgcac

SEQ ID NO: 453687 - DNA, 74 bp, Homo sapiens
gaattccaagacggaatgcctcttaatgccgatatgagggaaggcaccattggagatatggctatcctgggtat

SEQ ID NO: 453688 - DNA, 100 bp, Homo sapiens
aaggaaggtgatacaatgatggggcagcaagtggccaaacatgttttgagcgcctgctgtgtctcaagccctgtcctaggcactggagatgagatgaaga

SEQ ID NO: 453689 - DNA, 80 bp, Homo sapiens
cccccggaggtgcccacgcagctgcctggacaagttctgcggggagtgtctccagccctgcctgcaggtgccatccccgc

SEQ ID NO: 453690 - DNA, 75 bp, Homo sapiens
agctcagcttggagcaggaggtccaggaagtgcttcgggagatccaggatgcagtggccagggcggggcaggtgg

SEQ ID NO: 453691 - DNA, 83 bp, Homo sapiens
tgcgcatctccaacagcgacctgagcggttatggaaacaaaggacatgctttacatcgtcactgaatttgctaaaaatggaga

SEQ ID NO: 453692 - DNA, 100 bp, Homo sapiens
cttcactggagagaaggaacagttggctcaggctgtggctcgcatcaagaagatttatgaggagaaggcaatcgaaaatatcgacaccttaaccaacctg

SEQ ID NO: 453693 - DNA, 99 bp, Homo sapiens
caaagcgtccatcatccgcctcaccacgagctacctgaagatgcgcgccgtcttccccgaagccggcccgctggggctggaggcacgggcccatcaacg

SEQ ID NO: 453694 - DNA, 101 bp, Homo sapiens
aaaggtggagcccccctttaaacctctgttgcggaatggccaaagactatgacgggtcttcctagcacatcagggacaactgccagtgtggtcatcattcg

SEQ ID NO: 453695 - DNA, 101 bp, Homo sapiens
cagacccagccgcctcagccagccttagaaaggcttccacgatagtccacctggcctgcccacggtgagcaagaggatgctggcggggggcgtgaggagca

SEQ ID NO: 453696 - DNA, 96 bp, Homo sapiens
cgagcactacgttatttagaaacaagacgagaatgtaactccgttgaagcagaaataagatatgtggaacggagttatgtatcaaaacccactttg

SEQ ID NO: 453697 - DNA, 95 bp, Homo sapiens
tgtggagaattcggacacattcaaaaagactgcaccaaagtgaagtgctataggattgtgcagactggtgcttaaaatggaagtcgatattaatg

SEQ ID NO: 453698 - DNA, 98 bp, Homo sapiens
gttcgacacaccatgccgactgtcagcgtgaagcgtgatctgctcttccaagccctgggccgcacctacacgcggagacccacatcaagggcttcaca

SEQ ID NO: 453699 - DNA, 116 bp, Homo sapiens
gtcatattacaaaaccgagggcgatgaagaagcagaggaagaacaagaagagaaccttgaagcaagtgccaccaaaaccctcaacaggggcatctctgagttcatcgtgatggctg

SEQ ID NO: 453700 - DNA, 101 bp, Homo sapiens
ctctccagggagtgctctgttcacggctccatcgctgttatttcattcattggctcccatgtactatcgaggctcagctgcagctgttatcgtgtatgata

SEQ ID NO: 453701 - DNA, 75 bp, Homo sapiens
aggcattttgctgtctcctcctaatacgaatttggactcatatcaagatgctctgaagaagaacaaccctttagg

SEQ ID NO: 453702 - DNA, 50 bp, Homo sapiens
tatagtgctcagcccaactgtgcagatctctcaaaggccttggttctgac

SEQ ID NO: 453703 - DNA, 74 bp, Homo sapiens
tttgatgtcctttcttataagaagacaatgttgcacttaactgatattcagatagtgctgcaagagggaaattc

SEQ ID NO: 453704 - DNA, 141 bp, Homo sapiens
ctgcgggcggagacatggccaacatcgcggtgcagcgaatcaagcgggagttcaaggaggtgctgaagagcgaggagtgcctgatcaactttctagcgggagaacgatcatggaggtggtgccagctgaggtgaatagttt

SEQ ID NO: 453705 - DNA, 82 bp, Homo sapiens
cggacccgcccccgactcgccgagccagggactggtgattgcagctggaagtgcccatgaccgagctggcgtcctccggggg

SEQ ID NO: 453706 - DNA, 83 bp, Homo sapiens
agcgtgagtgatcactctcaatcccgggccatttcataattctgaatcatgtctgataacggagaactggaagataagcctcc

SEQ ID NO: 453707 - DNA, 75 bp, Homo sapiens
agcagctttcacaaatagtaccaaagagatcccagaagacccacttgtggctgaagagtactacgctgatgcatt

SEQ ID NO: 453708 - DNA, 90 bp, Homo sapiens
ctacctgtccacctgcaaggattcaaagaagtggaagacctggagcggaacaacggctccctggaccggccctactacatgtccaagagc

SEQ ID NO: 453709 - DNA, 100 bp, Homo sapiens
ctcctgctcagtgtagcattaaggattatcgagattgcagcctgtcactccacacacacgtctgcggccaagacgcagggtgggcacgtgtacatgtggg

SEQ ID NO: 453710 - DNA, 90 bp, Homo sapiens
cgggcagggctctaggaaacatatgttacgatagccctcaggtacctgacaatgatgagcagtttgtaccagactatcaggctgaaagtt

SEQ ID NO: 453711 - DNA, 96 bp, Homo sapiens
cggagagctggggcgggtctcagattgagaggatccagaatccagatctctggaatagctaccaggcaaagaaaaaaactatggatgccaagaatg

SEQ ID NO: 453712 - DNA, 100 bp, Homo sapiens
ctttaatcggggtggtggcaatggtcgtggaggccgagggcgaggaggaccggggatgaaccctgtcgggaattccatggcaatggctttccaggtccca

SEQ ID NO: 453713 - DNA, 102 bp, Homo sapiens
ggcagaagaagacgaagaagcagaagcgtctgctcaggttgcagcaggagagagggggggccctcagcctcttggccttgaacgggctgttcatcttgattc

SEQ ID NO: 453714 - DNA, 100 bp, Homo sapiens
accacagccagagcctcagcaggagcctgttctcatcaccatggcaacaggtacatggccacctctggcctagaccaccagctgaagatctttgacttgc

SEQ ID NO: 453715 - DNA, 51 bp, Homo sapiens
tggagaacgtggacctgacctctgtggttaacgtccctaaaacccgccgga

SEQ ID NO: 453716 - DNA, 100 bp, Homo sapiens
acggctatggcaccgagacctatgctgatggaggtgacttgcttttggagggcttcaacaactacaccttcctctccaatggctttgtgcccatcccagc

SEQ ID NO: 453717 - DNA, 100 bp, Homo sapiens
ggattcttttcaatacatcctaaaacaggtcaaaatgcagatcttcgtgaaaacccttaccggcaagaccatcacccttgaggtggagcccagtgacacc

SEQ ID NO: 453718 - DNA, 100 bp, Homo sapiens
gccggcgcccggccatggcggtctccagagactgacttgcataccaaatgtgtggtggatgtggatgcaaacaaggttattcttaatcctgtaaatacga

SEQ ID NO: 453719 - DNA, 76 bp, Homo sapiens
agtaccagagacagaagcagatggattcgtccttttagctgatgttctgagcgaagaagcaatactgaaatggtat

SEQ ID NO: 453720 - DNA, 95 bp, Homo sapiens
acgggctttctgctgccgcccgcaagcagagtacaagcaaatgctggtgaatgctttcacggagcaaattctgcctcacttctccacggagggcc

SEQ ID NO: 453721 - DNA, 96 bp, Homo sapiens
gaatatgccaaggaaaaactggagagcttcatcaaaaatagtgatagctttgataagggagcccgagttccgctacactgctgggatccatggcaa

SEQ ID NO: 453722 - DNA, 75 bp, Homo sapiens
cgtgggcaccttgcgcttcttgcagtcgatgcagaagctcgtgaaggccgcgaaggacggcaccaaggacgggct

SEQ ID NO: 453723 - DNA, 90 bp, Homo sapiens
caagatattgaaagaatctgatgaaagatacttggcatatcgaaattttatgattgacacgtatcgtctaaacccccaagagtatttaac

SEQ ID NO: 453724 - DNA, 75 bp, Homo sapiens
tgtctgcccctattgtaagtgcagatggaacacaacagttgagccccatatgggggttggcaggcagcagagagg

SEQ ID NO: 453725 - DNA, 75 bp, Homo sapiens
cttttgaagtgcctttgatttctggactggattatggacagaacttggaaatattgagaataatttcttaaagcc

SEQ ID NO: 453726 - DNA, 101 bp, Homo sapiens
ctccaagacctcatcaacaattaaggacagagcgggatgccaccagcttgtccaaagggaagttccaggagctcctggtgggcatcgttgtggagaatgac

SEQ ID NO: 453727 - DNA, 100 bp, Homo sapiens
gcggcggcgaggccgggactcgggcttagggcctgctgtggaggcagcggcggacgccgagctaagcagttttgaacgaagaatgtgatcagaactggta

SEQ ID NO: 453728 - DNA, 100 bp, Homo sapiens
cgagctgagcagagtctgcatgaccttcaggaaagcacacagcaagaaggaggccatcagcaaactgggaagaggaccctcaccaggaaccacatctgcc

SEQ ID NO: 453729 - DNA, 100 bp, Homo sapiens
tcagaactgttccttcagccaaagaaacaagccgtggaataggtgtatcaagtaatggtgcaaagcctgaacaggatcaggtgagctgtgtccagaaaac

SEQ ID NO: 453730 - DNA, 53 bp, Homo sapiens
cgcttcacggaggcaatagctagccggttcgagaacttgtcttggacaattgc

SEQ ID NO: 453731 - DNA, 98 bp, Homo sapiens
tgacgtccatccatttcgtggttcacccgctgccgggcaccgaggaccagctcaatgacaggctggacgtaaagaaagaagtgatgcactcaattctg

SEQ ID NO: 453732 - DNA, 88 bp, Homo sapiens
gtgaatttgacttttcctggtctaaaatttctgacattcagtctcaggtaaaggaagcacctgatgaggctgaagtggtgttcacggc

SEQ ID NO: 453733 - DNA, 97 bp, Homo sapiens
cctgactgtggagatggcggctcagaagataaacgaggggctggaacacctcgccaaagcagagaaatagaaccctcacccagaatgaaatgatatt

SEQ ID NO: 453734 - DNA, 98 bp, Homo sapiens
ttcagaaagtggctgacatggccaccaacacacgtggaagaacctaggaaagtccgctttgattatgacttattcctgcatcttgaaggccatccacc

SEQ ID NO: 453735 - DNA, 87 bp, Homo sapiens
ccacatccgcgggtccatcacacaaggccgctacctgtctgaggaacccgagccctacctggcagtctacctgcactcggagccccg

SEQ ID NO: 453736 - DNA, 83 bp, Homo sapiens
aaccatccacacatcataaagctttaccagataacggcaaaagcttctatcatttttgttactcttcagtacaatgtcaccct

SEQ ID NO: 453737 - DNA, 129 bp, Homo sapiens
attatggctgctgttgtccaacagaacgacctagtatttgaatttgctagtaacgtcatggaggatgaacgacagggtgataaaagaaaatgtggctgaagttacccgaagttcagcttgcagtgtaat

SEQ ID NO: 453738 - DNA, 110 bp, Homo sapiens
aaggaagccaagttggaccgttctgatgtgactgagagagaaggctcagtttatgaacctcttaaaagcattaatcttccaagacctgataatgaaactctctgggataa

SEQ ID NO: 453739 - DNA, 100 bp, Homo sapiens
tactcatattgagagctgtcgacagttacgtcaacaaaatgaagctgttgtcatttctggaaggaaactggcccagcagatcaagcaggaagtgcggcag

SEQ ID NO: 453740 - DNA, 90 bp, Homo sapiens
cctggctcgagaggtgaacgtggtctaccaggtgttgctggtgctgtggaaagaccacagcaagattctttcattcgtctcctcctagcc

SEQ ID NO: 453741 - DNA, 82 bp, Homo sapiens
gaaaggaaggaatatatcctgactgattgagccttcacgtaaatgggtccagtcatgcctcccagtaagaagccagaaagct

SEQ ID NO: 453742 - DNA, 80 bp, Homo sapiens
gaacctcacctttccagggcgcaagtaaccctccactgagtgaagaaatgttgcctcctggagagtggatgtgtcaccgg

SEQ ID NO: 453743 - DNA, 100 bp, Homo sapiens
tccatcaggaccccagatgtctgacagccctgtgtgacaccaagataagtaacgtggcaagtgcaggcagctgtcccggttatgccggaatcgttgcagg

SEQ ID NO: 453744 - DNA, 100 bp, Homo sapiens
tgttgctctgggacctgcaggtcccggaaggtccttagggaggaccccagacaccggagactgggaaatggatgtatagtgagatggatgtcatgtccac

SEQ ID NO: 453745 - DNA, 101 bp, Homo sapiens
gtcgcctcttcctttttcgacgcctccgccgccgcctgaggaggcgagctagccgggagttacaccgccaccgccagatatttggagttcttacaacatgg

SEQ ID NO: 453746 - DNA, 83 bp, Homo sapiens
ggcctgcagcgggagctggacggcgagcgcgagcggcgcgagaaagtcgagtcccagacaccagaagtctgaatttggagaag

SEQ ID NO: 453747 - DNA, 101 bp, Homo sapiens
ggccggttgccgggcgcgggcgagaaaggtactagcaaaggccagacgtcttactcaacaacttccctgccaccacctccaccatcccatccggccagcca

SEQ ID NO: 453748 - DNA, 100 bp, Homo sapiens
gttgctacgcgcaccatggctggagtgaccaaagacttgaccactcaaagtccagctccccagaacactgctcgacatggacaccggtgtgattgaaggt

SEQ ID NO: 453749 - DNA, 75 bp, Homo sapiens
acttggaaatggctgcaggttcagagtccttcaagggttagattacttacacagtaagtgcaagatcattcatac

SEQ ID NO: 453750 - DNA, 100 bp, Homo sapiens
catgctccacttcagcttctttgtcaccataggagacatggacgaagccttcaaatccatcaagctcatcaaaaggaactgtggctgcaccatctgtctt

SEQ ID NO: 453751 - DNA, 83 bp, Homo sapiens
cgcgagtgggagcaccaggatctcgggctcggaacgagactgcacggtggcacaagaatggctcaactctccaaatagagaga

SEQ ID NO: 453752 - DNA, 97 bp, Homo sapiens
cagggatattgagaaacttctgagcaacagatctaaagccctggtggatgttctgctgcttagccagttcatccggcctcatggaggcatgctgccc

SEQ ID NO: 453753 - DNA, 89 bp, Homo sapiens
cgcgcatcaggcatgaagaagaatatctatggcaatatcgaggacctggggctaagccagctctaccataaccagagtcagggactctt

SEQ ID NO: 453754 - DNA, 87 bp, Homo sapiens
acagagtcctccgtgtcctcccccgcatgacccccttgatcatgagcgtcttgttgttcatcgagcactcagtagaggtggcccatg

SEQ ID NO: 453755 - DNA, 83 bp, Homo sapiens
ctggttcttccaaagtgcccggacccaaaacaggaagtccctgtgcgttttattgcgacctgccggtgggaactttgtctccg

SEQ ID NO: 453756 - DNA, 50 bp, Homo sapiens
tcgatctccgccctggggtcattgtcaggaaaatgttggggcttttcagg

SEQ ID NO: 453757 - DNA, 97 bp, Homo sapiens
agccagttgctactgctcctattcctggtactccatgtgataatatgcagcatgcatactgggaactgaagagagaaatgtctaatttacatctggt

SEQ ID NO: 453758 - DNA, 74 bp, Homo sapiens
gctcgtccctccgggccgacatgagtggggaccacctccacaacgattcccagaagatgctgtggacaattatc

SEQ ID NO: 453759 - DNA, 75 bp, Homo sapiens
tccccaggggagttctctgtgtctgtgaaaggcctgagggagctcaatcctggtagcaacacccctgaattcctg

SEQ ID NO: 453760 - DNA, 75 bp, Homo sapiens
tggtgatggagattttgatgtggatgatgccaaagttttattagggaagctgctgagagacttggaatataagac

SEQ ID NO: 453761 - DNA, 75 bp, Homo sapiens
tacaagtgcactgtgtgtggccagtcatttaccaccaatgggaacatgcacagggatggggaaagacaccatagt

SEQ ID NO: 453762 - DNA, 75 bp, Homo sapiens
cgaccgccctgcgcttcgtgcaccggggcggtccgttgccaaagccaggttgccaacttggcctgttccatctca

SEQ ID NO: 453763 - DNA, 80 bp, Homo sapiens
aattactgaatgtgaagaaatatatgagatcctgactccaaactccattcccaagggtttcatggacgggaagcaggcgt

SEQ ID NO: 453764 - DNA, 100 bp, Homo sapiens
gccatggccgccgccgatgccgagaacgtgctggccaaagcgctctatgacaatgtggccgagtccccggatgagctctccttccgcaagggtgacatca

SEQ ID NO: 453765 - DNA, 100 bp, Homo sapiens
caactatggaacaacaacttgcagctcatctctattgatggcagagatcctacaagaatccaggatgatgatcccagattgccagcgcaggttggaagcc

SEQ ID NO: 453766 - DNA, 83 bp, Homo sapiens
ggtattactgtagccagtcttgaaagattcagcacatatacttcagataaagatgcttacaacaggttgatgaacatagtaaa

SEQ ID NO: 453767 - DNA, 80 bp, Homo sapiens
ctccgaccggctgaggcggcgcggcagcggagggacggcagtctcgcgcggtactccaaagattcaggtttactcacgtc

SEQ ID NO: 453768 - DNA, 51 bp, Homo sapiens
cttcgatgtgcgagactttggaaaggcggcgctggcggcggccctgggacc

SEQ ID NO: 453769 - DNA, 97 bp, Homo sapiens
ggattccaggggagttctgggaccttttcaaactgaagagaggaggctggctgcatcatgggagaagagattgggaaaatgaggtacgttagtgttc

SEQ ID NO: 453770 - DNA, 75 bp, Homo sapiens
gaggatcatccagcagcctttgatataccagaatgcagctactagctttcaaggccagaacacaaagcgtgaatc

SEQ ID NO: 453771 - DNA, 100 bp, Homo sapiens
ccacgacccacgagatcatggggcccaagaaaaagcacctggactgtggtcttcaagctgacagagaagctgacggaacagaaggagtggatgaagatat

SEQ ID NO: 453772 - DNA, 116 bp, Homo sapiens
ttccgtgtagggactcagcctctcaatcccagtctcatgcttccagcctggataatgattgagccacctgtccaggtcccgagcagccccgcccaacatggacccagacccccagg

SEQ ID NO: 453773 - DNA, 98 bp, Homo sapiens
agcactctgcatgcagaagatcctctttccatcaccttcatggaccaacataactttagtccaagatggttgatggtgcatgttgataaaagaattac

SEQ ID NO: 453774 - DNA, 98 bp, Homo sapiens
gcttgagccccatcgtggattccaagacatccctgctgagagagccaaggctgttgcaaatgagtccggactaaattttatatctgtcaagggccccg

SEQ ID NO: 453775 - DNA, 101 bp, Homo sapiens
cggcgagaggaggccgtccagcagatggcggatgccctgcagtacctgcagaaggtctctggagacatcttcagcagcgcgagcccagcattgacctgctg

SEQ ID NO: 453776 - DNA, 75 bp, Homo sapiens
cctggcctcaactgttgcttcttataaagcttacaaaacactacacagcaaaataatgatctgctagactgctaa

SEQ ID NO: 453777 - DNA, 98 bp, Homo sapiens
agtcagacgtgaggaaggacctacctccttggtcaaagctgggatgggaagtttccaagggtcacttgtgtctcgtccgtgggaagaccgggggagcc

SEQ ID NO: 453778 - DNA, 83 bp, Homo sapiens
cgcagggcctgtgctgtgggccagccacttagtgcacttcctgagctcagaaacacgcagtaagactttgaccccgacgcagg

SEQ ID NO: 453779 - DNA, 74 bp, Homo sapiens
caacaataaaggaccgagggtgccgagcgggagtggcctcgttggaagtcctaccccaaccactcatgaaatag

SEQ ID NO: 453780 - DNA, 97 bp, Homo sapiens
agagaggcatctggagctgcagcatggaccagcgagagcccctgcctcccgctcctgcaggtttttgtctacaatgaagcagaatgccctgcaaggt

SEQ ID NO: 453781 - DNA, 80 bp, Homo sapiens
aggcctccccagccacatggaactggataagactgcatgaatatgtcgaaacagccagtttccaatgttagagccatcca

SEQ ID NO: 453782 - DNA, 75 bp, Homo sapiens
gaaaaactttgagtgggttgcagagagagtagaggtcgacaaagatgctgaattagtggcccaatggaactattg

SEQ ID NO: 453783 - DNA, 50 bp, Homo sapiens
tgggagccatttgcaaggatggaccctaaagtaaattggttgaagaaatt

SEQ ID NO: 453784 - DNA, 101 bp, Homo sapiens
gcccctctaagcccggagcccggcgctttccccgcaagatggacggtttcgccggcagtctcggttttgggtcctgctcctcggtggtgttccttcttaga

SEQ ID NO: 453785 - DNA, 87 bp, Homo sapiens
cacggaggcaccatgaagaagtcttactcagcctcacctgagtcaccttccaagttgttccatgggctcctggctctggactgtggc

SEQ ID NO: 453786 - DNA, 75 bp, Homo sapiens
gtttttgctttagctggactaacagatttgcggccctccaggcactgaagcgtaagaagaggtatgagaagcagc

SEQ ID NO: 453787 - DNA, 110 bp, Homo sapiens
aattccacccagtatttcaagagtcacttctttacttggtgcaggaaggcagtctttgctacgtacagcaaaaggatcgttccaggaagagaaaggagatccatctatta

SEQ ID NO: 453788 - DNA, 74 bp, Homo sapiens
ctttcaagaggactttagactaattgcagataattaagttgtgtgacttcattgagacacattacctgaatgag

SEQ ID NO: 453789 - DNA, 90 bp, Homo sapiens
aaagcctggaagcaagccgccgtggagaaggaagaactgtgctgagtatccatatattcctgcacatattacaaagcctaaggaacataa

SEQ ID NO: 453790 - DNA, 158 bp, Homo sapiens
cggacgtgcctctgtactacaccctggaccagctgagcagcaccatccactgcaacacaccaagcctcctgcagttgcgcatcttggcgacagttgggacggagtttgacctacggacgctgagggcagttcgagtgctgcggccgctcaagctggtg

SEQ ID NO: 453791 - DNA, 83 bp, Homo sapiens
agactccatggcaccgggctgagcggggacttcaaaatgagcgtccctgactacatgcagtgtgctgaggaccaccagacgct

SEQ ID NO: 453792 - DNA, 75 bp, Homo sapiens
gttggaccgttctgatgtgactgagagagaaggtatttcagagagatgggaatgatttgcacatgacatataaaa

SEQ ID NO: 453793 - DNA, 82 bp, Homo sapiens
cagtcacaattatcaccgggtatttagccgaatatgtgggagtccatgtcctgcagtgtggcctgatgtaatcaaactacca

SEQ ID NO: 453794 - DNA, 100 bp, Homo sapiens
aacattttgagacctctatgatctgtagaactgctgctctttggcgtaaattgcaatcgattagggatcgtttctcagaatcaagttagaagtgagagtt

SEQ ID NO: 453795 - DNA, 80 bp, Homo sapiens
ctcctacctctggctcaagttttcacttatcatctattccaccgtgttctgggtcactcctggaagcaaggcggctctag

SEQ ID NO: 453796 - DNA, 75 bp, Homo sapiens
agactacattttcctcacaactgttctttccaaccttacacataggaagctcacacctggctccgccaaatccag

SEQ ID NO: 453797 - DNA, 99 bp, Homo sapiens
tgtgactatggacctatggagttggccctgagtattccctctttgtgggggacctgaccccggacgtggatgatggcatgctgtatgaattcttcgtca

SEQ ID NO: 453798 - DNA, 74 bp, Homo sapiens
gcatgtatttggttaatggctccgcggagtttaagagagctgtgaaagtagcaacaggacaagaactctcaaac

SEQ ID NO: 453799 - DNA, 80 bp, Homo sapiens
catggacacagacctgctgtgtgtgcttctgcgccccagagctcaggccccggggcctccagcggcaccagcggagacca

SEQ ID NO: 453800 - DNA, 100 bp, Homo sapiens
cagcgaactgggcgatctcgaggatttgcttttgtgtattttgagagaatagatgactcaaaggagccaggtgactttatacacactttgggagatgcac

SEQ ID NO: 453801 - DNA, 110 bp, Homo sapiens
gcggcggcagcgggcggacggccggcgggggcggcgtgcggcctagcgtctcaggtgagaagccctaccactgcaactgggacggctgcggctggaagtttgcgcgctca

SEQ ID NO: 453802 - DNA, 99 bp, Homo sapiens
ggggtccagccgtccccagaacgcagatcagaggtagtcggacctttcccgctggcgcgcagcctcagctagacttcattagaggggtggtagactcgg

SEQ ID NO: 453803 - DNA, 96 bp, Homo sapiens
acaccatccggaccacgaccaggtattgcactctcagtctcgccatgttgaagtcagaatggcctgtattcactatcttcgagagaacagagagaa

SEQ ID NO: 453804 - DNA, 89 bp, Homo sapiens
attctggtgtaactgtggacatcaccattcaggaaggttaaacccatccagagtaatggctgcggccttacccaggaccctgggggagt

SEQ ID NO: 453805 - DNA, 82 bp, Homo sapiens
cgctgggccgaccccagagaggcgctggacaggtgagaagccctaccactgcaactgggacggctgcggctggaagtttgcg

SEQ ID NO: 453806 - DNA, 98 bp, Homo sapiens
agaacaggagcgggacaagctgcagagtcagccaagatgtttaactacgcgggatggaagaacacctgcaacaacatcttcatcgtcttcgccattgt

SEQ ID NO: 453807 - DNA, 83 bp, Homo sapiens
accctggccgccccgagcggagcctggaggaatgtttacccttgcggaagttgcatcacttaatgacattcagccaacttacc

SEQ ID NO: 453808 - DNA, 78 bp, Homo sapiens
agccttctgccgctcgccctctgcctgctggctgcacccgcctccgcgctcgtcagacaagtcagaccccaggtacct

SEQ ID NO: 453809 - DNA, 100 bp, Homo sapiens
tgatgaggagatgtactcagcccacatgcccgctcacctgcgctgtgatgcctgcagagctgtggcttaccaggccgaggagtcttgtaaatgtaatggc

SEQ ID NO: 453810 - DNA, 100 bp, Homo sapiens
gcgaaactcctgaaactgaaggcacagctgggtcctgatgaaagcaaacagaaatttgtgctcaaaacccccaagctccgccgcatgcaagagatgattg

SEQ ID NO: 453811 - DNA, 74 bp, Homo sapiens
tcggggacccaggagtttcctgtgtccagcgctgccggagccgcctgagatggagtcttgttctgttgcccagg

SEQ ID NO: 453812 - DNA, 101 bp, Homo sapiens
gtacgagctgcaggaggttatcggcagagtctccagagatttgggccgctacaaaaagtgcattttgcccattcggctgtggatagagaagcaggaagagc

SEQ ID NO: 453813 - DNA, 100 bp, Homo sapiens
ccaataggacctcgggcctgctacgatgaaggcaaacgtgttgcagagaccatgtgctatgcctacatgaagcagggctgtgcctgcgcccagaagcagc

SEQ ID NO: 453814 - DNA, 75 bp, Homo sapiens
aagggaggaggaggcatttcacggagaaggaaacggtgaacatcattccaataattgcaaaagctgacaccattg

SEQ ID NO: 453815 - DNA, 100 bp, Homo sapiens
caacaggctgctctacccccggcaggtgcgctcccaggccctgctgttcatcaaacgcatgtatgagaaggagcagctgcgggagtatgtggagaaattt

SEQ ID NO: 453816 - DNA, 82 bp, Homo sapiens
ggagccactagacagagccgggcctagcccagagacatggagagttgctacaacccaggtcacggagactcaccagttggca

SEQ ID NO: 453817 - DNA, 120 bp, Homo sapiens
cacacagccccaaacctcagagactcagacctctcatctgccagaatcagaaagaattcatcacactgtagacgagttgtactgctgtcacaggaaatggacgctggattacaagcatgg

SEQ ID NO: 453818 - DNA, 125 bp, Homo sapiens
cccccaccatgggactctacctggggatatacatgcatgcaccaaaacgaggacaggcggtctatgcttgcttggtgcttatgctgacagtgatgacgatgacaatgatgtttccgaaaaactag

SEQ ID NO: 453819 - DNA, 101 bp, Homo sapiens
gagccaatcacattttgcacaagggcagtcaccatgaaaggagaggagctgcctttctcttcgagacatcacgtccagctggccccagtggctgctcatcc

SEQ ID NO: 453820 - DNA, 80 bp, Homo sapiens
attattggcattcctgtgtatgtgggccgcaagggcacagtcagtggtgtgctgctagttacaccaaataatataatgtt

SEQ ID NO: 453821 - DNA, 83 bp, Homo sapiens
gggcggccagagcgccggcaagagctcggtgctggagaacttcgtgggccgatggagttttaacattgaatgcggagaacact

SEQ ID NO: 453822 - DNA, 100 bp, Homo sapiens
tgggattcactttaatttggaagaatggagaataaaggcagccccgttgatgactgaaaatgacaaagcatccacctaacagacgaggaatcagctttga

SEQ ID NO: 453823 - DNA, 74 bp, Homo sapiens
gcagtggtcgcttcttctccttgtttcagtcattcagtcagtaccgctgtaagactgccaagaagtcagaggag

SEQ ID NO: 453824 - DNA, 101 bp, Homo sapiens
ctcgtctcctggccgcttcaccaaggagaccacccagaagaatttcaacaatctctatggcaccaaaggtatgctgccccacaaaaccaagcgaggccagg

SEQ ID NO: 453825 - DNA, 100 bp, Homo sapiens
gcagctaagaatagactgcatatatattgggattttaaaccgcttcctgcctgacacagctcacttcaagaagtgcacaatgtcagaacgtggaattaag

SEQ ID NO: 453826 - DNA, 100 bp, Homo sapiens
gagaagcagaattatacctagaagtctactaatggacagttagtcacccacctacatgttgagtactataaccaagagtggacattgtgggatcgctttg

SEQ ID NO: 453827 - DNA, 101 bp, Homo sapiens
cgtgtcaccgccggaacctggcgcagggaggttcccctgaaggatgctaaggaatacgctgaatccataggtgccatcgtggttgagacaagtgcaaaaaa

SEQ ID NO: 453828 - DNA, 80 bp, Homo sapiens
tccacacaactccagtgctaactcaacagatacagtttatgtaacttgatggaagaaaatggaattactccaaaaagaca

SEQ ID NO: 453829 - DNA, 100 bp, Homo sapiens
ctgtcatcaagaactgtaatacttctggaatccagacagaatgattagtgacaagagctggggttaggatccggttggactctgacatcggatgccctca

SEQ ID NO: 453830 - DNA, 100 bp, Homo sapiens
cgtcaacaccaagtgcatcaccatccccagggcggcgactggcggcgcgatggacctgaccgggctcctgctggacgaagaaggcaccttctccctcgcc

SEQ ID NO: 453831 - DNA, 75 bp, Homo sapiens
ggacaccgacatggaacagggactcactggggaggtcctgggcctatgtcaagaagtgcaaaaacaacatgtgtc

SEQ ID NO: 453832 - DNA, 50 bp, Homo sapiens
tcgaccacttcgaagaagtcagcaaggtgagcgtcctgaccaccctggag

SEQ ID NO: 453833 - DNA, 83 bp, Homo sapiens
cagcagctctgctgcggagcgggaggaggaccgaaagctggccagctcagcgtccctggaagggaagggacaactgaagttca

SEQ ID NO: 453834 - DNA, 78 bp, Homo sapiens
ggagagcggctctgacactctgggttgaaatcacaaagattagacacctttttagataggtgttcttcagcaccactg

SEQ ID NO: 453835 - DNA, 90 bp, Homo sapiens
gagtccggcgcgtgtcgggttttgagctgccgcggtcccgggactgagtgcagattgctgtctgaagctcccttgtttatctactcttgc

SEQ ID NO: 453836 - DNA, 100 bp, Homo sapiens
ggatgagaggaggcggcagaacattgcttatgaatatctgtgccacttagaggaagccaaaagctgcgcagttggacagcattggcttcagcataatcag

SEQ ID NO: 453837 - DNA, 76 bp, Homo sapiens
agtcggtcgtccgctggacaagcacgagggcgcgctcgagacgctcctgagtactatactggcaattgctggagaa

SEQ ID NO: 453838 - DNA, 83 bp, Homo sapiens
cgtgtggagctgttcgaggactcgcgggtgtgcaggcaacatgagtgagaatgaggaagaggaaatttctcagcaagaaggca

SEQ ID NO: 453839 - DNA, 99 bp, Homo sapiens
agaagtgcaccccctggtacagtgccccttcacaagaaaccccagagataaccttggctgctcatgtaacccttcgattgctcttaaacttggtgtgac

SEQ ID NO: 453840 - DNA, 98 bp, Homo sapiens
agacctcggagatcatcacgtttgccgagtcaggttgacctgacagttcaagaaaaggagaaatatcttaatgtgtctcgctggttttgtcacattca

SEQ ID NO: 453841 - DNA, 98 bp, Homo sapiens
gaatgtcctgatgagctcattgagagaaccatgatggtcaattgccatgcacacttctggggccagagagtggctgagctgatcctgcatcatgcccg

SEQ ID NO: 453842 - DNA, 82 bp, Homo sapiens
ccacggggtgctgcagatcctgttccaggagtttcggacgtggctgagggaggaatgggggcgcacgctggaggacatcttc

SEQ ID NO: 453843 - DNA, 100 bp, Homo sapiens
cagggctgggagagggaagaagtgcccagaaggtcggggctgtcggccggccacagggatgtcttttactatagaaaatgtaccttgtgatggagctttg

SEQ ID NO: 453844 - DNA, 74 bp, Homo sapiens
gctggatggaggggattttgtcagcttgtcgtcaagacttcagaagaaacacctacaacaggagaaggagtgcc

SEQ ID NO: 453845 - DNA, 100 bp, Homo sapiens
ctcggctgtttacagtgtggcccggagcgtcttggctgccgccctgctccacgcagtctgcttcagtgcagtgaaggtactaggttttgacaagcttgca

SEQ ID NO: 453846 - DNA, 71 bp, Homo sapiens
ttgcacagatagcaaggacaatgaaggagtggatgcccgtcaccaagttgggccgcttggtcaaggacatg

SEQ ID NO: 453847 - DNA, 97 bp, Homo sapiens
ccgcgcggctgcgacggcccaggagcgcgtctcggcgggagcctcagggggggccctcagcctcttggccttgaacgggctgttcatcttgattcac

SEQ ID NO: 453848 - DNA, 75 bp, Homo sapiens
aagaataacctggtgattttccacagaggtgaccatgtctgggatggaaaagtgagataattcgagataatactg

SEQ ID NO: 453849 - DNA, 74 bp, Homo sapiens
cagcattggtactaatggccaactcaagattaaaggatcctggtcaaataaaagaggtaaagaaaattacaatc

SEQ ID NO: 453850 - DNA, 74 bp, Homo sapiens
cgaggaggaagcgagcagcccagacagcggccacctcaaggaggaggaagccaagaatctggtgagcgaagcca

SEQ ID NO: 453851 - DNA, 101 bp, Homo sapiens
cacctatgtatcaacttacttgaaaaggtgacagagctgaatgaacctctctccaatgaagatcgaaatctcctctctgtggcctacaagaatgtggttgg

SEQ ID NO: 453852 - DNA, 75 bp, Homo sapiens
gttggatcaaacaaaaacaacacaatttgtcccggaattcctcctgatcagcagagactgatctttgctggcaag

SEQ ID NO: 453853 - DNA, 75 bp, Homo sapiens
aagtgtatagggaaacctgggggctccctggacaactccgagcaggtctcggcgcggaagatggccggcggcgtg

SEQ ID NO: 453854 - DNA, 50 bp, Homo sapiens
aagagcctcttccttggccagaagctgtggaaagtgaagaaggcattgaa

SEQ ID NO: 453855 - DNA, 82 bp, Homo sapiens
cagccagccctcgctggaccagaccatggccgcggccttcggtttacccaaggtccagcctagcccctaggcaccatgtcgg

SEQ ID NO: 453856 - DNA, 83 bp, Homo sapiens
cagattgattttcacagcaactggaccattttacattcccactagcagggtacagcagggaagaactggaaactcagagaaag

SEQ ID NO: 453857 - DNA, 83 bp, Homo sapiens
agatcccaggcggtgacagagtggagccatggctagagtgtggacgaatgtggaacctcgctctgtggctgtgttcccttggc

SEQ ID NO: 453858 - DNA, 82 bp, Homo sapiens
gaataatatagctggtattgaagagagacgagttgtactgctgtcacaggaaatggacgctggattacaagcatggcagctc

SEQ ID NO: 453859 - DNA, 75 bp, Homo sapiens
caagaatggagtctaatggggaaggtacaggtttgcagattccgccagcagcacagcaagctctacagatgagtg

SEQ ID NO: 453860 - DNA, 50 bp, Homo sapiens
atggatcctcatccagtttgcatttagggctccgccatgtcacagatgac

SEQ ID NO: 453861 - DNA, 90 bp, Homo sapiens
agcagatttacaaactggccaagaagggccttactccttcacagatcggagccaaaaacctgtatatcatctccgtgaaggggatcaagg

SEQ ID NO: 453862 - DNA, 96 bp, Homo sapiens
ggccaactccatctcttcctacctaattaagcctgtccaaaggatcaccaaatatcaactgctcctgaagggtctaaaattcccaggactccacag

SEQ ID NO: 453863 - DNA, 90 bp, Homo sapiens
gaccgagggactgggagtcgttagtgagggctccgtaggcaccaactgcaaggacccctccccctgcgggcgctcccatggcacagttcg

SEQ ID NO: 453864 - DNA, 74 bp, Homo sapiens
ctatgtttccacatcggtcagaaaaagatcctcttctgaaacagtctccctggagcaaccatcagagcagtggc

SEQ ID NO: 453865 - DNA, 90 bp, Homo sapiens
tctgtaaagatcattttccatacgctgcacataagtgtccgtttgcattccagaaggctgctggcaaaggggacgtcccaacgaagagac

SEQ ID NO: 453866 - DNA, 100 bp, Homo sapiens
tggtatctcagttagaggaggcagaagatttctggccagtggagagaggaattcctcaagacaccattccaggttgaggaacaggttagcaccactgaga

SEQ ID NO: 453867 - DNA, 82 bp, Homo sapiens
cccaagagtgttgagcagcccatcgtgcttaaagaagggtgaaagaaaatggcccgaaccaagcagactgctcgtaagtcca

SEQ ID NO: 453868 - DNA, 73 bp, Homo sapiens
catcaaaaaggaacaagctctccaggttcaatgtggcttaattgtggtggcctacaaagatggatcacctgcc

SEQ ID NO: 453869 - DNA, 90 bp, Homo sapiens
gaaaaattcagaaaagagcaacttggagctgtaaaggaaatggctagtgatgagctgaaagagatgcggaaaaacttgaccaaagaagcc

SEQ ID NO: 453870 - DNA, 90 bp, Homo sapiens
aaggaagcacccaacagttacaaactacttctccaaagaggcgacaggaagaagggtattacagccgcctggaagccgagaggcgcagac

SEQ ID NO: 453871 - DNA, 82 bp, Homo sapiens
gttattcgagtgaccgagaccgcggccgggaccgaggagctgccacgaaggccgctgcccgctcatgctgaccgaatgtccc

SEQ ID NO: 453872 - DNA, 74 bp, Homo sapiens
gtgactcaaatttagaaaaagacaaagaggctgaatatgcaggacagctgattttcacacccgctaccactgtg

SEQ ID NO: 453873 - DNA, 75 bp, Homo sapiens
aaagaattacgatgccgctctccgaaaaatcacctttccccacgggaacccagtgcacctaagctcgaagggcag

SEQ ID NO: 453874 - DNA, 101 bp, Homo sapiens
ctgctgcagaagaatattttgcctgctggaacctgctgtatctactcaagagtggaagttttcacagatgtgtatatctcatgattgatatggagaaacta

SEQ ID NO: 453875 - DNA, 83 bp, Homo sapiens
cttagctgtgctcgcgctactctctctttctggcctggaggctatccagcatctaaccatgagctaccctggctatcccccgc

SEQ ID NO: 453876 - DNA, 100 bp, Homo sapiens
tttggacaaccagcggcaactcgtgtccaacctggaaaagaagcagaggaaatttgatcagctgtcggaaaaggtaacagaagatggaactcgaaatccc

SEQ ID NO: 453877 - DNA, 75 bp, Homo sapiens
gagagacggccaagcagcaccagcgtgcctttgggtgataagggacacttcgtgtatgatcatgtgttcgctgag

SEQ ID NO: 453878 - DNA, 75 bp, Homo sapiens
ggataaatctcaaagatctcgtacaagatccttctttagggccaagatgggtcgccgagctcaacaggagtcagc

SEQ ID NO: 453879 - DNA, 95 bp, Homo sapiens
gatctcaacattttggctgaactttatcttcaagccaggatgaagggagactgggcaagactcttacgccccacactgcaatttggtcttgttgc

SEQ ID NO: 453880 - DNA, 74 bp, Homo sapiens
aaaaagcaaactgctcttgatcccagaactacagttcctgaggaagaactaaatccaaagatactagctttgca

SEQ ID NO: 453881 - DNA, 100 bp, Homo sapiens
ctgctgcccgcgtccgaggctcgcgggcggcgggcccggggggcagtacccaaaggaaacgctacgaaagaatacatggagagcttgcagctgaagcccg

SEQ ID NO: 453882 - DNA, 90 bp, Homo sapiens
cggcctggaggagccgcagtgggtcccggacaaggagcatcacaggacatggccccctcagccacctagctggggcccatctaggagtgg

SEQ ID NO: 453883 - DNA, 145 bp, Homo sapiens
ttgtgtccagccacatcatatcacagtatcagttaaggagcttgatttgtttttggcatactacgtgcaggagcaagagaccatcatgcagacatcagagactgggtcggacacaggctcgacagtgaccttacaaacatctgtg

SEQ ID NO: 453884 - DNA, 89 bp, Homo sapiens
ctccagaagacaagcagatgccgctatgcttcctgaacagcccacagaactttctgccaaggaaagagaaaataccttttaatcccagg

SEQ ID NO: 453885 - DNA, 100 bp, Homo sapiens
tgtgatcacagagcctatttacccagaagtagtccatatgactctaaaatagagctcaagcttgagaagagagaaccactaaagggcagagcaaagactc

SEQ ID NO: 453886 - DNA, 100 bp, Homo sapiens
aagttaagcgcctccttgatcaccaggataatattctctcattgattaatgtcaatggaaatgctgtctatgatttcttcattggccgtgaattaaaccc

SEQ ID NO: 453887 - DNA, 98 bp, Homo sapiens
ctcggagggagataatgaatcagaggaatttctctatggcgttcagaagtctgggccaacggtcacaaaagttgtcactgttgtgacaaccaaaaaag

SEQ ID NO: 453888 - DNA, 97 bp, Homo sapiens
agcatccggggacagctgagctggcatcagaagacctacgccttcagctggaccagctattccttctgttgtggcgtatccgaaaaggagtcagacc

SEQ ID NO: 453889 - DNA, 90 bp, Homo sapiens
gttagagtctgaagttgttaccaatggtgaaactacatgttcagaaagcagaggtggaggagacactgaagcgactgcagagccagaagg

SEQ ID NO: 453890 - DNA, 95 bp, Homo sapiens
cctgggtcctcgctgtggggcaatccgggcttgcagacgagcctcatgtttgactgttggagatttatcctgtgcaagagacctggaagcaacag

SEQ ID NO: 453891 - DNA, 98 bp, Homo sapiens
tcgtggcctgcctctgcgtgcatcgcccaggaccacaccgcagcgtaactgcaggcctctcagcgaaaaagggggaaagcaaagacccgggtgtgcat

SEQ ID NO: 453892 - DNA, 83 bp, Homo sapiens
gtccgccgattcctcctccttggtcgccgcgtccttggctggcgtggtcctcactgagcagcgagtcgtcccccgtgtcctct

SEQ ID NO: 453893 - DNA, 99 bp, Homo sapiens
tctgcgcgccggggcctcgaggctttttttctccagccgagaggacgcggctgtgatatacgaagggtatgagtattatagaacaattagaccctgtat

SEQ ID NO: 453894 - DNA, 74 bp, Homo sapiens
tgagtggctaatcgtgaaccggaacccatcgatggtatacatgacaaggggattgtagaagacatccattgtgg

SEQ ID NO: 453895 - DNA, 82 bp, Homo sapiens
agtgcagacgaggtggatgaggccgagggcggcgacaagaaccgatgaggacggggacttggttgccttttccagtgacgag

SEQ ID NO: 453896 - DNA, 100 bp, Homo sapiens
gcggatgttcatgggcagcaccatcgagccagaagcagtatttgtcctgggtgctggaaatgtaaacaagaatagactgttcattcctgatggcttttag

SEQ ID NO: 453897 - DNA, 75 bp, Homo sapiens
cttgaataatcacatgatctcacagtttctcatcccagtttccccagcctcctgtgaaggtgtcagagaaagaag

SEQ ID NO: 453898 - DNA, 75 bp, Homo sapiens
ttcaacagcacccagagcctcatctttcttcagattattaaggaatcccagcagcagcatggtttacggcatgga

SEQ ID NO: 453899 - DNA, 101 bp, Homo sapiens
ggcagccggcatcctccctgggcgagaggtagtggctctttatgactacacagcgaatcgatcagatgaactaaccatccatcgcggagacattatccgag

SEQ ID NO: 453900 - DNA, 100 bp, Homo sapiens
ggggctccggaccctcggcgcagtactaaggctcgtacgtctgcatcgattatcttacgtggggcaaatgatttcatgtgtgatgagatggagcgctctt

SEQ ID NO: 453901 - DNA, 100 bp, Homo sapiens
ggagcatctgtatattgttcctgattggcctgatgtgtggacggatcaccaagcgagtgacacgagagctcaaggacagaatttcgctaaggagtttgtg

SEQ ID NO: 453902 - DNA, 75 bp, Homo sapiens
gattcgcagtggtcgcttcttctccttgagtgacaaaaagagtagtccccagaaagaagttaagtatgaaccctt

SEQ ID NO: 453903 - DNA, 119 bp, Homo sapiens
aggaacatccgccccaacatcatcctggtgctgacggacgaccaggatgtggagctgggactcgggcagccgcaagtagctcctccagcgccagcagccagcccagcagcaagcagcag

SEQ ID NO: 453904 - DNA, 75 bp, Homo sapiens
cccagagtatagagcggaagcaagagaggttctcttacatctgatggaaaaaatttgtctcaggaaaaagaattg

SEQ ID NO: 453905 - DNA, 82 bp, Homo sapiens
ccagcgagccccactgctcggggaggaggagccacggccggggacagtgctcgccagaaacccagagctaattatttagaag

SEQ ID NO: 453906 - DNA, 101 bp, Homo sapiens
cagcctcccgagtggctgggattacaggggacccgaagctgccagtactgtaccaagtggagcggacacgaacagggtcgagcttctcggtgcgctctgtg

SEQ ID NO: 453907 - DNA, 88 bp, Homo sapiens
tgattcacaattatggagactgtatgggtctgtgaagaaatcccggatctcaagctcgctatggagaattacgttttaattgactatg

SEQ ID NO: 453908 - DNA, 100 bp, Homo sapiens
actgaaggctgagttgcctcttgtgttttcagcttttcacatgtctggttttgcaccatcacagataccatgtttgtgtggaagtgccccgtgtttgcta

SEQ ID NO: 453909 - DNA, 100 bp, Homo sapiens
ggacctgaaggacaagctggactttgcccctcccaccccaccccattaccctccacatgaagttatagaccttactcatgataacaaagatgatcttcag

SEQ ID NO: 453910 - DNA, 90 bp, Homo sapiens
aaaaaaacgacgcggccaaggggatcgccgacctgctgtcaaacggtcgcatgaggcgggccctcgggaccaaggatcacgtcatgactc

SEQ ID NO: 453911 - DNA, 90 bp, Homo sapiens
caagcagtgcttctacgaggacatcgctcagggcaccaagtgcaccctggagttccagagtgtgaacatggctacgcctcttcattcccg

SEQ ID NO: 453912 - DNA, 100 bp, Homo sapiens
ggaaagctttaggagttcacagtatttggagtccaggaatgagactaagcatttatctgtaggaaaagatattattcaaaacactggttctcagtgggag

SEQ ID NO: 453913 - DNA, 110 bp, Homo sapiens
gccggagctgcccagtcgccgcgggaccggggccgctggggtctggacgggggtcgccatgatacatcagcccacagcaaggcgggctccagcagcccggagccatgggc

SEQ ID NO: 453914 - DNA, 84 bp, Homo sapiens
agaccgcgcgcagggcctgcagcgggagctggacggcgagcgcgagcggcgcgagaaaaaaactttagaaactgttcctttgga

SEQ ID NO: 453915 - DNA, 100 bp, Homo sapiens
tcatcactttcattgtctcggacgtgcggggcctgggcctcccggtccgcaagcagtgcggaaacatggctcgcgaaggactgcggaccctcgtggttgc

SEQ ID NO: 453916 - DNA, 101 bp, Homo sapiens
cagaagagaagaagaagcaggatgaactgaaacggattgccagagaattggcagaaggaatgggtaccacagaccatgtcatcgtcctggcgtccacgaac

SEQ ID NO: 453917 - DNA, 107 bp, Homo sapiens
cggcgctctggctctggctgtgcgcgctggcgctgagcctgcagccggccctgccggattttttatcaagcagaaatgcatcgaacaacgagaatcaagatcactga

SEQ ID NO: 453918 - DNA, 100 bp, Homo sapiens
agctttagtgattgtctttgtgttgtctgcatttggaggagcaacaatgtgggactatacgagaacatgcatctttaagttcctcggcgccgtagcaatg

SEQ ID NO: 453919 - DNA, 100 bp, Homo sapiens
ggcggagtcttccaggccatcaagggtttccgcaatgcccctgttgaatgatgagaagacagcagctgattacaagattttaggtggttcagtccttcac

SEQ ID NO: 453920 - DNA, 98 bp, Homo sapiens
cggatctcatatcttcacttggcaaactcaacaagtgagagggtccaagcctggtaagaatgtccagcttcaggagaatgaaatcagaggactgtgct

SEQ ID NO: 453921 - DNA, 100 bp, Homo sapiens
tagccactcgccatggactcccagaaaagacgagttgtactgctgtcacaggaaatggacgctggattacaagcatggcagctcaggcagcagaagttgc

SEQ ID NO: 453922 - DNA, 82 bp, Homo sapiens
gagtcattgcaggaagtggatgagttccacctcattttagagtatcaagcaggaacatttacagttcagttttatgatggag

SEQ ID NO: 453923 - DNA, 83 bp, Homo sapiens
ctgggggtgcgcgcctgcgacctgcccgcctggctacgagttccagggagctctgtcctggtgaccgtgcccgggttatgacg

SEQ ID NO: 453924 - DNA, 50 bp, Homo sapiens
gatggtttagaaatggaaaaatgtgaagaggagttgtacgcatgtcagag

SEQ ID NO: 453925 - DNA, 87 bp, Homo sapiens
agcccggggctgcactgccaccctgggcaacttcggagagaagatgactgaggaggaggtggagaccgttctggcaggacacgagga

SEQ ID NO: 453926 - DNA, 100 bp, Homo sapiens
ctatgctgggacattgctgctacttctggcaggtgtggcctgcctccgaggaaagtccaatatgggtggctctcccaagacagctgttgaccatatcaga

SEQ ID NO: 453927 - DNA, 100 bp, Homo sapiens
caaagataaaatcttttgtgaaagtgtataactacaatcacctaatgcccacaaggtaatccacgacttcttattctccttgaaggaaagcccagaaaag

SEQ ID NO: 453928 - DNA, 75 bp, Homo sapiens
ctgacacgcggcgggacatgcaggttggtgaattctggccttacgtcagtctgttgttcagctttgtcctcggta

SEQ ID NO: 453929 - DNA, 98 bp, Homo sapiens
gtcgatgagcttcaggaatgccaggagcaggatctgcagaagacgcagggctcaagctatccagtcagttcgctgctattcccatgggtcacaggaga

SEQ ID NO: 453930 - DNA, 73 bp, Homo sapiens
cggtccctgtgacctgtggagacacggccagatctgccctccaaaactagacacaatgtgcgacgaagacgag

SEQ ID NO: 453931 - DNA, 100 bp, Homo sapiens
cagagagacagggagaagggaggacatcacgggtcctggtgcttgatggtcgaggccatctcctgggccgcctggcggccatcgtggctaaacaggtact

SEQ ID NO: 453932 - DNA, 49 bp, Homo sapiens
cctccagacctctcggcgcggctctctggcctgacaaccaatgttgtgg

SEQ ID NO: 453933 - DNA, 83 bp, Homo sapiens
gacaggcattgatctaagtgtgtgcacacaatggtggtgaagcagtattttccaatttgaagattcatttgaaggtggctcct

SEQ ID NO: 453934 - DNA, 83 bp, Homo sapiens
cttgggacccaccgctgccctcagctccgagtccagggcgaggggacggcaaaacagaacagaaaggcggagataaaaagagg

SEQ ID NO: 453935 - DNA, 75 bp, Homo sapiens
caaaatggcggatcatgtgcagggcgatgccagtccctccactccagaggagaacgaaaccacgacaaccagcgc

SEQ ID NO: 453936 - DNA, 75 bp, Homo sapiens
tcaaccctgagctgcgtgagaacccgcccatgaagccagatttctcccaggctgaaggtgatgtggccgccctca

SEQ ID NO: 453937 - DNA, 96 bp, Homo sapiens
tgttttggaactgtcaggtacctcaaagcctctttcgacgtgtagcagcagctttgccgggaatggaaagcacacaggacagaagcagagaagata

SEQ ID NO: 453938 - DNA, 83 bp, Homo sapiens
ggcacttcataagggatccgcagctgctcccgctctccagaatgtgacagtgatgataacatgggtgccaaaaatacttcaat

SEQ ID NO: 453939 - DNA, 75 bp, Homo sapiens
ctcggtcggtacagtctctgcacctcgcgccccagcaggtgctcctgacctctgataaagctgcagccaatttct

SEQ ID NO: 453940 - DNA, 100 bp, Homo sapiens
tttgtagctgacagattacttgtggaacttggattctcaaaggttcaaaccttgtactactcagctgatcacaagctgcttgatgggaacctactagatg

SEQ ID NO: 453941 - DNA, 75 bp, Homo sapiens
tggcgctgctgttaaaactggcaaggcatgtggcgtcatagtagaattaatcaaaagcaagaaaatggctggaag

SEQ ID NO: 453942 - DNA, 50 bp, Homo sapiens
caccgactcgtggaccactttcatagataccccagaatcttccatgctcc

SEQ ID NO: 453943 - DNA, 75 bp, Homo sapiens
acaccaccccatgttattggtcagttggacaaactcatcagagaggtggcattgcagacagtgtagccaagtgga

SEQ ID NO: 453944 - DNA, 75 bp, Homo sapiens
cgtttcccctggctcacagtctgcaccgaacaagatttgtgatgaaatggagcctggaacaaactcttttcgggt

SEQ ID NO: 453945 - DNA, 74 bp, Homo sapiens
gagcaccaggcggtggtgggcgccgtgaagagccttcaggcgctgggcgagaggtgcctgatgctgttaattcc

SEQ ID NO: 453946 - DNA, 100 bp, Homo sapiens
agaagatctggcaaaagcaattcagatggcccaagaacaggctacagatactgaaattttgattgttcagattccattctgtggggaaattgactgtgag

SEQ ID NO: 453947 - DNA, 82 bp, Homo sapiens
aagagaagtttctggtcactccccaggattatgcgcgaatgtgaaaacctttgcatcttctgatagtctagccaaggtccaa

SEQ ID NO: 453948 - DNA, 72 bp, Homo sapiens
tgctgctgcttggagagccccagacagtcgcttgaagagaaaatatttacaccagcagctccagttcatacc

SEQ ID NO: 453949 - DNA, 100 bp, Homo sapiens
gggccgagtgggtgtctggtgccggcgtttgggctacggttgttgttggcgactgtgcttcaagcgggcaggtaagccccctcccggtttacatctggat

SEQ ID NO: 453950 - DNA, 74 bp, Homo sapiens
ggaagctattgctgggattttgaggagagctcagccggtctatcagtgtcgatttagcagaaagcaaacggctt

SEQ ID NO: 453951 - DNA, 100 bp, Homo sapiens
ccacggcacccattctggccccagctacaccccaggtgtgggcccatcgctggatggatctgtcagaacacggctttgggctggccctgctcaacgactg

SEQ ID NO: 453952 - DNA, 100 bp, Homo sapiens
tggccagcgcctcagatgatggcactgttagaatatggggaccagcaccttttatagaccaccagaatattgaagatataattgaccctgcaatcctgcg

SEQ ID NO: 453953 - DNA, 100 bp, Homo sapiens
cgaggtggtgggactcaccgctctggccagggtgcttttggaaacctacttgtttgcggccccctactactacggcttctacaacaaccggctgcaggcg

SEQ ID NO: 453954 - DNA, 101 bp, Homo sapiens
ccctgagagaacagggtggccgcttggtccaggtatataatgtttacatggcagggaggcagctgtgttctaagcggtaccgggagtttgctatcctacac

SEQ ID NO: 453955 - DNA, 51 bp, Homo sapiens
tccccatcaagggaatgaacttcacaccaaaagaatgcaatggtgtaaaga

SEQ ID NO: 453956 - DNA, 75 bp, Homo sapiens
ccaagagagcctacgcagaagcagtccacctggataagccccatcagcaacgctctgcagaaagtggatgtgcag

SEQ ID NO: 453957 - DNA, 100 bp, Homo sapiens
aatccaaagagtgtctgacatttcttttgtgcaagatgagcctcaagtgcttctgcattacaaatacctcctctgaaaaatggcagaagcagttttccat

SEQ ID NO: 453958 - DNA, 88 bp, Homo sapiens
tggatgtggatgcaaacaaggttattcttaatcctgtaaatacgaatctttccaaaggagatgcccgatttggataagtgaagacagt

SEQ ID NO: 453959 - DNA, 82 bp, Homo sapiens
aagagccggcggctgcccgggcggaactctaatgatccaggacaaagaagttaccctggagtatgtatcaagcctggatttt

SEQ ID NO: 453960 - DNA, 103 bp, Homo sapiens
ggccgtctcgctctgggtctccaggcccgcgaccgtccgccagtcgtcccgagcttcctgggtctgcaggtccagccggctggcaccctccatgtacccaggg

SEQ ID NO: 453961 - DNA, 75 bp, Homo sapiens
caggaggcatttgaagttccaggcccagtgttcaccatcataccaggggccagaggcgatggcttgcctccatga

SEQ ID NO: 453962 - DNA, 97 bp, Homo sapiens
ccgggtcccgcgcgagctttcccgggataagtagctttagcgatcgggagacagccgggcgctgcaagatggtcctagaacaattggagattcatac

SEQ ID NO: 453963 - DNA, 75 bp, Homo sapiens
aaatccagaagtacaagcagtctgacaggccgacggtcgcaaggtcctacggtcaagcatccgggagtttctatg

SEQ ID NO: 453964 - DNA, 96 bp, Homo sapiens
gctcggcccgcgggggagccccgggagccgcacggtagcagaaggtcaagaaatttgtgtgattgaagccatgaaaatgcagaatagtatgacagc

SEQ ID NO: 453965 - DNA, 75 bp, Homo sapiens
tggactgaagtatccagcgctcattgggaatttagttaaggcatttctcattgcaattgtggtaccagatgttga

SEQ ID NO: 453966 - DNA, 100 bp, Homo sapiens
tggcggatggccccaggtgtaagcgcagaaagcaggcgaacccgcggcgcaataacggatcacctgctgttaccagctaccacccataacaagaccacaa

SEQ ID NO: 453967 - DNA, 80 bp, Homo sapiens
gccagactcagggatcaaagagcaaacagattcagtggcctgcattggcagcacacttctgcttttgttccttcatcagg

SEQ ID NO: 453968 - DNA, 73 bp, Homo sapiens
tgcaaaggccaatgttggtgctggcaaaaaggcttctagtgaggacgttgccagctccccggagcgccactac

SEQ ID NO: 453969 - DNA, 100 bp, Homo sapiens
cgacgacgtgctgttcgaggatgtgtacgagctgtgcgaggtgatcggaaagtttctacgataaagacagttcagggtggagttctagcaaagataagga

SEQ ID NO: 453970 - DNA, 75 bp, Homo sapiens
cagatatcgaggtggatggaaagcagaacatttccccagaggagctcaaaatggagttgccggagagacagccca

SEQ ID NO: 453971 - DNA, 71 bp, Homo sapiens
ctacatctacccctggcggcggccgtttcctctccctcgccggcctcggcggagattccaggccctataga

SEQ ID NO: 453972 - DNA, 100 bp, Homo sapiens
ttccacagaatacagccaacctccaggtttcagtggcagttctcaggtgtcagttgtacccgaggcgttctcagcagcagcaagtacctgtggtggattt

SEQ ID NO: 453973 - DNA, 83 bp, Homo sapiens
ccagggggccggagggccagggtctcccggaggtgagaagccctaccactgcaactgggacggctgcggctggaagtttgcgc

SEQ ID NO: 453974 - DNA, 75 bp, Homo sapiens
gcctacccgccggcccgcgggtctacttcctcaaagctcatgatggagcagtccaagaagtcctccctcatggtg

SEQ ID NO: 453975 - DNA, 75 bp, Homo sapiens
gtgctgaacaattgaggcagcttgccagaagatttaaggaccatagtacagctatggatactgaaccaaacccgg

SEQ ID NO: 453976 - DNA, 90 bp, Homo sapiens
tgcaacaggttaacgtgtatggcgtgtgcgtgccaggttattgaagaaattgaagaaatgatgcaggaatcaccggacccagaagatgat

SEQ ID NO: 453977 - DNA, 75 bp, Homo sapiens
ctgacatgttagtggtgaccacaaaagcaggccttcttgagccccgtgacccccagcacaccagggagcccgcca

SEQ ID NO: 453978 - DNA, 76 bp, Homo sapiens
ggcttgtgtctcatatatgagggaaaatcaacaaacttttgagtcttttgcagagcagtctctgatgaagaatgcc

SEQ ID NO: 453979 - DNA, 82 bp, Homo sapiens
tccagcaggaggatataaaaaagaaggagccatattgtaggaaaacatcggttgtgaagagaaagccaaaaagaatgccaac

SEQ ID NO: 453980 - DNA, 75 bp, Homo sapiens
gcagatcggagacggggcctggagggtctgcggaagagggagctgctgaaggagctgctaccagtcatcgggcag

SEQ ID NO: 453981 - DNA, 82 bp, Homo sapiens
agacagttggcaagaaaaccccgaggagccctgttccaaagcctcctggaccgtccaagaataagactttgaccccgacgca

SEQ ID NO: 453982 - DNA, 75 bp, Homo sapiens
ggcgagctagccgggagttacaccgccaccgccagaggtatgaaggttattgaaaaccgggccttaaaagatgaa

SEQ ID NO: 453983 - DNA, 99 bp, Homo sapiens
cgaagcttaagtagctacaggggaaaatattctgagaaactggcagacctttcacttcgtatccaacaaattgaaacaactctcaatattttagatgca

SEQ ID NO: 453984 - DNA, 75 bp, Homo sapiens
cctcccaaagcactaggattacagtttcttgcagaacataaattattaggaaacattaaaaatgtggccaagaca

SEQ ID NO: 453985 - DNA, 86 bp, Homo sapiens
atccagcaaggtcggcagagcaaggggcttacgcagaaggacctggccacggctgaaggtgatgtggccgccctcaaccgacgcat

SEQ ID NO: 453986 - DNA, 88 bp, Homo sapiens
ctccatgcctttgagaacctagaaatcatacgcggcaggaccaagcaacagtggacccaagagccatatcagtgctagcaaaatggca

SEQ ID NO: 453987 - DNA, 97 bp, Homo sapiens
tcaaggctctgggggccatgtggaaactacataagaaggcggtcaccttctccttactatagtcgtggaggatacagatcacgttccagatctcgat

SEQ ID NO: 453988 - DNA, 90 bp, Homo sapiens
ctaaggacgagctgatcaagtatatgactgaagaaggtattccaataactgtaccacctccaggtaaaacttttttcatgttttctccat

SEQ ID NO: 453989 - DNA, 100 bp, Homo sapiens
tgttcagaaagaaggacagggatcacaaacactcagagtggaaaaagtaccatcatttgaaacaggtctttcttcgagaatccttggaacagaaactgga

SEQ ID NO: 453990 - DNA, 75 bp, Homo sapiens
ttcacagcagccgtcaccctggggaacccagacgtcctcgtgggttcagggattggttttcagagacatttcgga

SEQ ID NO: 453991 - DNA, 100 bp, Homo sapiens
tccatccctgagctcatgcggatcctggtggacgtggagaaggtggactgggacaaggaacccaagacagaccaggatgaggagcattgccggaaagtca

SEQ ID NO: 453992 - DNA, 100 bp, Homo sapiens
ccaagcctcccagtgcaccttctaggagacaagcaaggtgtcatggagaaactccagctgggcccagagattctgcagcgggaaaatccaaggcttattt

SEQ ID NO: 453993 - DNA, 76 bp, Homo sapiens
cgggcatcctggtgcagctcctggtgcgtggcccagcctcagagtacatcaggaacgtctctatcaagaatacaat

SEQ ID NO: 453994 - DNA, 101 bp, Homo sapiens
attcgcttctccctggacaacaggagaggcttctacagccaggacctgcccccaggagcctctcaggggtctgtgcagacttttgcagacaaatcaaaaca

SEQ ID NO: 453995 - DNA, 75 bp, Homo sapiens
gagcagcgattgtaaggagaggcggtcccggtgtcctcgggtcccagccatacacactgctgctatggatatgct

SEQ ID NO: 453996 - DNA, 98 bp, Homo sapiens
cgaccctgacctggtcatggcgtccagctccggcctggcgtgaggaccccccaatccgcgtgaggctgagtcatcactagagagtgggaagggcagca

SEQ ID NO: 453997 - DNA, 75 bp, Homo sapiens
agaaagagaatggagaagtaaagattttgctgaaaagtgcagcttcaagcttaggaccacccaccatgcctatcc

SEQ ID NO: 453998 - DNA, 83 bp, Homo sapiens
ttgggggatgacagctgttgacccatgggcctcctggggagccccaccctgtttggccaggatgcctttgggacgcttggcag

SEQ ID NO: 453999 - DNA, 100 bp, Homo sapiens
actcctaatatcaccaattcttctaagttcctggacattgatccggaggaggattcgcagttcaacatcaagcccgagctacactggaaatcctcatccc

SEQ ID NO: 454000 - DNA, 82 bp, Homo sapiens
tttgacaggagaggctgcttcttgtagaggtcccctcttgctgttggctgcacatcaggaaggctgtgatgggaatgaaggt

SEQ ID NO: 454001 - DNA, 100 bp, Homo sapiens
cacctacccccagcaccacctccagcccctgcgcctcgggaggaggtaaatgacaaattgcgggatatgccagatgggaccttcttggtccgagatgcct

SEQ ID NO: 454002 - DNA, 98 bp, Homo sapiens
gcctagaatgcatcagtgcccttgtggcgaatggggctcacgtcgaattttcagacgatgctggttggttttcaagaaggcttctagcaaaggaccca

SEQ ID NO: 454003 - DNA, 97 bp, Homo sapiens
gtgtccgctgtgcccgggcctgcaccatgagcgtcccggccttcatcgacatcagtgaagaagatcagttcaggacctcaaggggctcggctatgag

SEQ ID NO: 454004 - DNA, 75 bp, Homo sapiens
ctttagagaagttaagagaagaattagctatcaaatccggccaggctgctctttggcgtaaattgcaatcgatta

SEQ ID NO: 454005 - DNA, 80 bp, Homo sapiens
caagggcaacttcgcggtggtcaagcgggccacgcacctcgtcaccaaggccaagagatttacaaacgaggaccacctgg

SEQ ID NO: 454006 - DNA, 50 bp, Homo sapiens
gaggaagaagaggaggaggaagaggaggaagaaggtgggaaaggtgaaaa

SEQ ID NO: 454007 - DNA, 76 bp, Homo sapiens
tgatgcggtggtgggggacctgccggcacgcgactccccccgggcccaaagttctgcggggagtgtctccagccct

SEQ ID NO: 454008 - DNA, 100 bp, Homo sapiens
caggacttctaccagaagtttgccacaggcagtgtgcccatcccctggcagaacgagccaggggtctgacagcaatgaagaggactatgacccaaattgt

SEQ ID NO: 454009 - DNA, 100 bp, Homo sapiens
attccggcagcagcacttcctagctgggctcctgctgacggagctggcactggccctcgaacctgaggctgaaggtttgtcccgctggctggaagcctgg

SEQ ID NO: 454010 - DNA, 100 bp, Homo sapiens
agccccagccaagcaatgcaggaatatatcgcagtagttaaaaaactagatccaggttggaatcctcaggctgttcaggggaccggcttagcttttattg

SEQ ID NO: 454011 - DNA, 82 bp, Homo sapiens
cagccaccctgcccccaagaaggaagtcatcatgggccggcctggaacaggcccagattattcatcagcatggctacctgct

SEQ ID NO: 454012 - DNA, 75 bp, Homo sapiens
gctgttctcaaggcggattaattagcccaagaaacattatattcatcccccaggctccgctcttgccagagggac

SEQ ID NO: 454013 - DNA, 100 bp, Homo sapiens
tgcagactttggttggtggaggctgtggcaatggaacaggcttgagaaacagtcttttcgtctgcagatgactatagagaacatgaaccatttgaaattc

SEQ ID NO: 454014 - DNA, 100 bp, Homo sapiens
gtttggctgcccaggctcgcctcgactccaaatggttgaaaacagatatacagctgatttagaagaaagttttaatgaacatgaactggagccctcatca

SEQ ID NO: 454015 - DNA, 75 bp, Homo sapiens
agagaagtcaaaagggaaggctaagcgagaattagaactgcagcgtcagcgtgacttgcataagatcaagcagct

SEQ ID NO: 454016 - DNA, 84 bp, Homo sapiens
atctaatattagccttgtctttgattttatggaaactgatctagagcaagtgaattcatggtattttacttttttgggaaatac

SEQ ID NO: 454017 - DNA, 50 bp, Homo sapiens
gagagagcggtaacaagggtgagcccaggccccaggtggagcaagttggc

SEQ ID NO: 454018 - DNA, 75 bp, Homo sapiens
ttttctgctggcactttttacccaccagtcttggcaaaggacaagaggaccctgccttggtgtgagagtgaggga

SEQ ID NO: 454019 - DNA, 50 bp, Homo sapiens
ctcaaccccaaaggggactctgccagggccgtggtggagaagcgcctagc

SEQ ID NO: 454020 - DNA, 50 bp, Homo sapiens
cgggactctgaggaaaagctcgcaccagcttcgagagctgtgcccaggag

SEQ ID NO: 454021 - DNA, 100 bp, Homo sapiens
tggaatcaggatctatttgtaaaggccagcagcttgtgatgatgccaaacaagggagatgcacttatttacatggaaccagagaaacaagtgatgtccag

SEQ ID NO: 454022 - DNA, 80 bp, Homo sapiens
cttggctatgtgacgctgctggaggaaacacctcaggacacggcctacaacaccaagagaccatggtgaatccgggcagc

SEQ ID NO: 454023 - DNA, 75 bp, Homo sapiens
cggagcccggccccggggaactagggagcgtctccggctgcacagcgctcagggggaaatttgcagtggtgagaa

SEQ ID NO: 454024 - DNA, 51 bp, Homo sapiens
aattggagtcagcagaactgaaatagcacttttccagccattaactccagg

SEQ ID NO: 454025 - DNA, 82 bp, Homo sapiens
tgaagccgccgatctggaaaggcaaatagaaactatgttccaacttcctgtcaacaatcttggcagtttaagaaaagcccgg

SEQ ID NO: 454026 - DNA, 100 bp, Homo sapiens
ccaccgtcggccgcatccgtttccacgactttctgggagactcgtcatgactgtccaaagtatgataatcacatgagagtgctcgttgctacggatgtca

SEQ ID NO: 454027 - DNA, 100 bp, Homo sapiens
ctgcccggatgttgcgatggctgatcgggggaggccgagaaccgcagggactggccgagatcccagattacaggaatgcagtaatcgtggccaagtctcc

SEQ ID NO: 454028 - DNA, 80 bp, Homo sapiens
gagctctacgcgtgggacaacagaagagtgcaatcgactgttaaagtggtgtcctgccccagattgccaccatgttgtta

SEQ ID NO: 454029 - DNA, 99 bp, Homo sapiens
cgaaggcagtgtgcccccaccactctcctccagcccaggggggaccagcccctcaccacctcccaggacagacaatgctgtgaagaatcactggaactc

SEQ ID NO: 454030 - DNA, 82 bp, Homo sapiens
ccgacccctgcccccgcagcattcatgctggtcctggccagcaatctgcctgagcagttcgactgtgccatcaacagccgca

SEQ ID NO: 454031 - DNA, 100 bp, Homo sapiens
aggaagagtagaagatgttgttgttagtgatgaatgcagaggaaagcagcttggcaaattggaacgtgtgaaagaagaattgtggggaaaaaaaagcaag

SEQ ID NO: 454032 - DNA, 100 bp, Homo sapiens
caatacataccgatgtcggaatgtggcaaaattactgtatatgcacatgctgggctaccctgctcactttggacaggattttgtgtggatgagggctcgg

SEQ ID NO: 454033 - DNA, 104 bp, Homo sapiens
gcagacgttagcgtgagtgatcactctcaatcccgggcagcaattccatttccgtgagggcgtttctagatgaagatgacatgagcttggaagaaataaaaaat

SEQ ID NO: 454034 - DNA, 100 bp, Homo sapiens
ttcagattggaaaataccacaggatggagactacgagtttcaaaagtactttgactcaggagactacaacatggccaaagccaagatgaagaataagcag

SEQ ID NO: 454035 - DNA, 97 bp, Homo sapiens
ctcggccgctgcctggacgacgtgaaggagaaattcgactatggcaacaagtacaagcggcgggtgccccggtgcactggtgattgctgcggtgttt

SEQ ID NO: 454036 - DNA, 75 bp, Homo sapiens
gaatcctctgaagcaggagactgccctatccagggactgctgagatgtcctctattcttgaagagcgtattcttg

SEQ ID NO: 454037 - DNA, 114 bp, Homo sapiens
gcggtgctctgctggcgactggcaggacgcggtgcagagagcggacttccgcgacgcggcctcccccactggcaggattgccatgagttgtggagtaagaaacggcgacgtcag

SEQ ID NO: 454038 - DNA, 75 bp, Homo sapiens
catgaatcccgctgacaaaccagcctgggcccgagagatccgagggaagggcttcgactggccgctgctggtgaa

SEQ ID NO: 454039 - DNA, 50 bp, Homo sapiens
gatggaggagctgagcgctgatgaggaagcctgagaagggagtccagtac

SEQ ID NO: 454040 - DNA, 75 bp, Homo sapiens
ctccgtgcccgctgacattatctcatccacagacaaacttgatttggtgcttccagatgtgagttatcaggtgga

SEQ ID NO: 454041 - DNA, 100 bp, Homo sapiens
cggaagtgcagctgcctcagttcttagcgcagacggaaatggagagctggatttctccacttttctgaccattatgcacatgcaaataaaacaagaagac

SEQ ID NO: 454042 - DNA, 50 bp, Homo sapiens
agtaaaattcactgttcacacaaagatcatgctttacgattatggaatat

SEQ ID NO: 454043 - DNA, 99 bp, Homo sapiens
cgaagcgagggtctgaagttcacgactactagaaggggaggggagtggaaaggctctcagtgaaaaagacaaacccgtggtgctccagttcattgactg

SEQ ID NO: 454044 - DNA, 100 bp, Homo sapiens
cggcaccgaggccacactgggccatgcgaagacgctgttggcggccatccgggctgtggaccgcaccctgagcgctctgtgatcagcagctgcccgggcc

SEQ ID NO: 454045 - DNA, 100 bp, Homo sapiens
gataaacagggccgtgccgcagatgcccaccggaatggagaaggaagaggagtcgcatgcttttcacttccactgcatctctcgctggctcaaaacacga

SEQ ID NO: 454046 - DNA, 80 bp, Homo sapiens
tgaatatggtgactaggcaaggggcactttgggctaatactctaggttctctgggaaccattggcactggcaagtggggc

SEQ ID NO: 454047 - DNA, 100 bp, Homo sapiens
ttcaccaaggagactgcaggctacctcaggggccgtccccaggacactgtccggatcttccctccctgggacacggccaacacggtgaaggaaaagttcg

SEQ ID NO: 454048 - DNA, 100 bp, Homo sapiens
aaagcgcaccggccccaaagggagcacatgtccagtttgtacaatgacgacagaaacctgcttcgaattagagagaaggaaagacgcaaccaggaagccc

SEQ ID NO: 454049 - DNA, 100 bp, Homo sapiens
tggctcagagctaggaaaaaagctgaaggcaactatggatgctgggaaactgccggccggcgctcacttgtcttcaggaagctcggagcctttggtggag

SEQ ID NO: 454050 - DNA, 76 bp, Homo sapiens
tggcagttatggctatggtgatcaaagatgaccgtcttaacaaagaccgtgtggatgatttggctctgagcatata

SEQ ID NO: 454051 - DNA, 96 bp, Homo sapiens
acaaaaggcatggtgatccttcgggacaagattcgcttctatgaggtcatccgtccttggctcaggatttggagagcttgcaccaccaaaaatggc

SEQ ID NO: 454052 - DNA, 76 bp, Homo sapiens
cgtccggaggacctgggacaccgcggaagtcgggaaatggtagacgttacatccaagaggaaataatccaggcaag

SEQ ID NO: 454053 - DNA, 100 bp, Homo sapiens
tttttgcctttgttgattaactggacaaattcaggcatcaagcatgatggaaccatgtgtgatacctgccgccagcaaccaatcattggcattcgatgga

SEQ ID NO: 454054 - DNA, 85 bp, Homo sapiens
agaaacatctcaccaatttcaaatccgctgtctcctatatataatctggttccagtgaaaatgaaaaatgcacacctaaagaaac

SEQ ID NO: 454055 - DNA, 85 bp, Homo sapiens
tcggcttctgagacggcggcagcagcggcattcagggcccggcaggaagatgggctcccgtggacagggactcttgctggcgtac

SEQ ID NO: 454056 - DNA, 100 bp, Homo sapiens
atggagcttcatgtcctcgtgcaggaagtactcatcgactgatgtggcagactttgctccctggcaaaaggcgccctgcgtccggcagaggaggcgagca

SEQ ID NO: 454057 - DNA, 50 bp, Homo sapiens
gacggcagtgcggcggaagcggttcatcgtgaagaataaatgagataagc

SEQ ID NO: 454058 - DNA, 100 bp, Homo sapiens
ggacgaataggccgggaagctcgctttgagaccacttctggaaaggctcagcacaaacactgggaactggcggggaccaaactgggagatataatgggcg

SEQ ID NO: 454059 - DNA, 98 bp, Homo sapiens
ataggaaacaagtgacttgctgagtccagataacactgactgtcagaagatactggtgtaatggtaaaattatatccaaatatgactgcggtactgct

SEQ ID NO: 454060 - DNA, 100 bp, Homo sapiens
gagacggcttggaaaacggagagactggggagaacccctggcgaagcggtgctgcctccagcccagagatgccgccaagatgcccgagagcgcttggaag

SEQ ID NO: 454061 - DNA, 73 bp, Homo sapiens
ctggagtgaggtggccggttcttggtgggatctgagcaggctgaactccagtgcacccagttagacttggagc

SEQ ID NO: 454062 - DNA, 74 bp, Homo sapiens
aaaaaaggcacctgctgctaaggagttaggacctggaaatgtacagaaagaagtctcatcttcctttgaccacg

SEQ ID NO: 454063 - DNA, 146 bp, Homo sapiens
gatattacactgtcaaaactttacaagttaattgaagagtcttgtccacagctggcaaattcagtgcagatcaggctggaacctatttgcctcagtcctatctgattcatgagcacatggttattactgatcgcattgaaaacatt

SEQ ID NO: 454064 - DNA, 50 bp, Homo sapiens
ctagattttctctcaaactacgagctggccaccacggcactttacttcac

SEQ ID NO: 454065 - DNA, 75 bp, Homo sapiens
gcggcggcggcggcggaggatgagcctgcagagcgcgcagtacctccgagaggtacagaaagcagtcaacactgc

SEQ ID NO: 454066 - DNA, 50 bp, Homo sapiens
attttatgttgtgtcatttcgaaggatgcctgaggaagtgcaccatggag

SEQ ID NO: 454067 - DNA, 50 bp, Homo sapiens
cttcgccaagggggtgcagtacaacagaatactcccccagttgcaagagg

SEQ ID NO: 454068 - DNA, 98 bp, Homo sapiens
gcaagacctgtgggcagccaaggcgtggctgatcacggcccgcagcctctacccggcagactttaacatccaggggcatcttcctggataccattgtc

SEQ ID NO: 454069 - DNA, 101 bp, Homo sapiens
aaacaatcaaagagctgtgagagaacataaaggcctcccatatcttatcagatttctgagttctgattcagattaatatttttggggacagatttgtgatg

SEQ ID NO: 454070 - DNA, 101 bp, Homo sapiens
tcttcaaagaatgatatttccaaagtttgcagaaaagaatatgaggaggcaagtgaggcctatctggttggcctttttgaagacaccaacctgtgtgctat

SEQ ID NO: 454071 - DNA, 100 bp, Homo sapiens
gtgctgggcatcatcccctatgcgggcatcgacctggccgtctacgaggccgccatggcatcagatgaaggcaaactttttgttggagggctgagttttg

SEQ ID NO: 454072 - DNA, 100 bp, Homo sapiens
ccagcatccattgcaaaccttattaatctcagggaactggatgtcagcaagaatgcccgtgatgctgatgagcgagagaagtggatccatgccttagaag

SEQ ID NO: 454073 - DNA, 98 bp, Homo sapiens
agagcatcctgcggagatttttggtgctgaacccagctaaacgctgtactctcgaggccaagaagacgctggagggaggctgttaggagggactctga

SEQ ID NO: 454074 - DNA, 100 bp, Homo sapiens
agagagagaagagaggagattgcagcagcgaaccaatcccaaggtctcaaggctggctgagtagctggctgcccacgtggcgccccacttccatgtctca

SEQ ID NO: 454075 - DNA, 98 bp, Homo sapiens
ccatgtccgcgcacaatcggggcaccgagctcggcaagaagctcttctggctgccattagtgaaaaagacgccaatatagctctcttggagctttcgt

SEQ ID NO: 454076 - DNA, 75 bp, Homo sapiens
ggggaggaagaggaggaggaagaagaaggtgatggtgaagattctgaggatgattctgatttttgtgagagtgag

SEQ ID NO: 454077 - DNA, 90 bp, Homo sapiens
tgccaagttagatgccgattacccacttcgagtcctttattgtggaggtccttgaatgggcaagagggcacatgaagtacggcgtcctcc

SEQ ID NO: 454078 - DNA, 97 bp, Homo sapiens
gttacaggacaggctaacaccaatggaggctttacttcagacaaggattttttatcaagcagaaatgcatcgaacaacgagaatcaagatcactgag

SEQ ID NO: 454079 - DNA, 100 bp, Homo sapiens
atctgaaaacaacatcatgcagtggaatgcagttatatttggaatgagatgctggaggaaggacatgagtatgcggtcatgctgtacacctggcgcagct

SEQ ID NO: 454080 - DNA, 88 bp, Homo sapiens
gctattttcccactgcaaagaggcgatatgagtctcatccagtctgtgctgatctgcaggccaaaattcttcagtgttaccgtgagaa

SEQ ID NO: 454081 - DNA, 96 bp, Homo sapiens
gtattctcacagctctgcggcccaggcccaaggtccaaactgctttgcagaaaccgcggtgatccctgctggcagagaagtgaagactgacgagtg

SEQ ID NO: 454082 - DNA, 100 bp, Homo sapiens
agtctctccccttttcaacggtgtcacatataaggagtttaacattccattggaaatgcttcgggaactcttaaacctgtttggcagtcttgaacagaag

SEQ ID NO: 454083 - DNA, 98 bp, Homo sapiens
taatgacagcacaaatgaagagttagctattgagaagaatctacaaatgtgggaagaaatgaaaaaagggagccagtttggtcagtcctgttgtttgc

SEQ ID NO: 454084 - DNA, 100 bp, Homo sapiens
gggaaagagagttgtgagtctctttcctgtttacctccagtgtcccttcttccacatgaaaaggataagactgactgaacatgtgcaagataaaagcaag

SEQ ID NO: 454085 - DNA, 50 bp, Homo sapiens
ccgggccggaccgaccccaggcggcgacactcgcctatggggacatgaac

SEQ ID NO: 454086 - DNA, 96 bp, Homo sapiens
aaaattcaattctttagacgctcatgaagaaatcagggatttcctcagacccaggggctgatgatgatggggaaatcacctacgagaatgttcaag

SEQ ID NO: 454087 - DNA, 90 bp, Homo sapiens
gaagctcacccaggaacaagtatctgacaggtgtggaaacaggaagagaactagaactggaagtaaagcattgaagatgtgactgaattg

SEQ ID NO: 454088 - DNA, 105 bp, Homo sapiens
agggcagctgttcccactggctctgctgaccttgtgccttggtcaaaatgcagatcttcgtgaaaacccttaccggcaagaccatcacccttgaggtggagccca

SEQ ID NO: 454089 - DNA, 100 bp, Homo sapiens
atcaccagttactttaatgattgacattaacaaggctcttcttgccaagagaaagagactagaaatgtataccaaggcttctctcaaaactagtaaccag

SEQ ID NO: 454090 - DNA, 98 bp, Homo sapiens
tctgttccagggaggtgggattgaggcttcgtgctgtgtcactccatcgctgggggtacgggttctggcctgggctcctacctcctggagcgactgaa

SEQ ID NO: 454091 - DNA, 97 bp, Homo sapiens
cttcttcaggcagctccaggcgctcctagaccttccagcagtactttggtggacgagttggagtcatctttcgagaaaaagaaggtggaggacgtgc

SEQ ID NO: 454092 - DNA, 98 bp, Homo sapiens
gggaaatcaagtcagtcatgaatacagctggaaatgaaaccacccctactcctaatcccccgactacagaagaggagaaaacggaatctaatcaggag

SEQ ID NO: 454093 - DNA, 90 bp, Homo sapiens
gaaagaagtgggaaggatctgcgcgggtattttgaaggtggcgtctcatctgtctacctctgggatctggatcatggctttgctggagtg

SEQ ID NO: 454094 - DNA, 50 bp, Homo sapiens
cggcggcgtggatggctccggcgcagtgcgatgtatgatgtatggctttg

SEQ ID NO: 454095 - DNA, 100 bp, Homo sapiens
ggagctggcagagcagaagtctgtggagaccgcaaaaaggatttcttacaatctccagctacaacctgcttagcttgctactcagtacgtgaattaggat

SEQ ID NO: 454096 - DNA, 75 bp, Homo sapiens
atttacatgacagaaatcacctatgtttacagcgacaggtttgacaactattcagccaatgtgatggtggacagc

SEQ ID NO: 454097 - DNA, 75 bp, Homo sapiens
gcgtccgccgccgcggtggcagtcagcagccggcagcagcagcgggaggaagaaggcacctacgatcaaactctg

SEQ ID NO: 454098 - DNA, 102 bp, Homo sapiens
cgaaaagggctaagattcggccatgagcagcgcccctcggcgccccgccaagggcgcagattctttctgtacgccagctgaggtgggtgtcctggttggcaa

SEQ ID NO: 454099 - DNA, 78 bp, Homo sapiens
caaaaacctcagcctggaggccattcagctgtgcgaccgggacgggttttggccaaattgggcgagggcacaaaataa

SEQ ID NO: 454100 - DNA, 88 bp, Homo sapiens
cagatcttcaacaagaggacccaggagaaattcgccctcaaactgcctgtggaggaaccgattgtgtccacagatgaggtcatcttcc

SEQ ID NO: 454101 - DNA, 75 bp, Homo sapiens
ctgaggagcgcggccagccctgctcgcagaattaccgcctcttctttaatccaggtgattgagaatgatagagcc

SEQ ID NO: 454102 - DNA, 82 bp, Homo sapiens
ctggtgcagatcatctacgacgagaaccgggattttttatcaagcagaaatgcatcgaacaacgagaatcaagatcactgag

SEQ ID NO: 454103 - DNA, 100 bp, Homo sapiens
ctgggattggaactgtgtttgggagcctcatcattggttatgccagagcccccctccatgcgcctgaaggcccgacccagcagccctggcttttccgtgc

SEQ ID NO: 454104 - DNA, 98 bp, Homo sapiens
aacaccagatagtggaaagaaaccatgtgctgaaatgtttgacgacactgatggtttgggaacctggactaaaacacgtgttccggtggcagattgaa

SEQ ID NO: 454105 - DNA, 98 bp, Homo sapiens
ggccagatgggtttgtatggacaggcttgtccatctgtaacttcattaagacaggggcaagtgtccgagtggtgaatcagctacttacagagatggat

SEQ ID NO: 454106 - DNA, 98 bp, Homo sapiens
agaagatctccattcctgaggaggagagagtgactcagacatctcctctacaagtacctaacccatcctggatgcaccaccattcatacctcatgcag

SEQ ID NO: 454107 - DNA, 113 bp, Homo sapiens
gggatggctaccttttccaattgctgcggattgctgatgcccacttggacagagtgatctcactgatgaaaaggcctccaggtttttcacctttccgatcatcacgaataggg

SEQ ID NO: 454108 - DNA, 83 bp, Homo sapiens
gctgaccgcgggccctgccctgggctggaacgaccctgggccgcgatgggcctcttggaacattggtgtgttcatctgcattc

SEQ ID NO: 454109 - DNA, 92 bp, Homo sapiens
accaccttcaagggagtcgaccccaacagcaggaatagctcccggtcaaaatgcagatcttcgtgaaaacccttaccggcaagaccatcacc

SEQ ID NO: 454110 - DNA, 97 bp, Homo sapiens
tgatcgaccgcaacttacgggaggacggggaaaaagcggccaaagaagtgaagctgctgctactcgatggacttgccagtttcaaaagtttcctgaa

SEQ ID NO: 454111 - DNA, 101 bp, Homo sapiens
gtccgcgcgctggagctggagaacgaccggctcctgctcaagatctcagagaaggaggaggtgaccacgcgcgaggtcaaaatgcagatcttcgtgaaaac

SEQ ID NO: 454112 - DNA, 75 bp, Homo sapiens
cctgaagcagctgctctagtgaaggagtcatcaagctttggtgtatgtgttggccggttctgaagtcttgaagaa

SEQ ID NO: 454113 - DNA, 90 bp, Homo sapiens
tgagggagcaagaggtgtcggaggtctcatctttgaactactgccggagcttctgccaggcctgaggccttctctgaagtggctgagaaa

SEQ ID NO: 454114 - DNA, 98 bp, Homo sapiens
cgggcccgaggccggaggaacccggactccggcgtagcggatacctccaaaagcagccatactttggagcagttattgggagggtggccaaccgaatc

SEQ ID NO: 454115 - DNA, 96 bp, Homo sapiens
ggaaaaacatcaaattcttgaccaatctagggtatgcccaagaggacagagaacgaatgcacagaaatattgtcagccttgcacagaatctcctga

SEQ ID NO: 454116 - DNA, 101 bp, Homo sapiens
tcttggatgttcttggacttgacggaagttgccttaaagaatagacaagagctgtatgcactacctcctcctccccagttctactcaagccttattgaaga

SEQ ID NO: 454117 - DNA, 82 bp, Homo sapiens
tcgttgggcccaaaccaagagaatggtgatgcttttccttggacgatcagcttgcataatttcagcatatatacccttcttg

SEQ ID NO: 454118 - DNA, 75 bp, Homo sapiens
ctttgattccagtgtgaactgtcaatcataaggcgcagttgtgtagcagttgagtaatgctggttagctgttaag

SEQ ID NO: 454119 - DNA, 75 bp, Homo sapiens
ccccgcgccggggttccccgggtccgagcggatggcgactgcagccagcccgctacagcctccgcttggcgtccc

SEQ ID NO: 454120 - DNA, 109 bp, Homo sapiens
ccggcgtgccccaccatgtcagacgcagccgtagacaccagctccgaaatcaccaccaagggcagctggtggaatttttgaagaaaatggaatctcgaggccccctttc

SEQ ID NO: 454121 - DNA, 100 bp, Homo sapiens
ctgtgccagaggctggactttctgctgggctccgtggtccatgagaaaacatcggttgtgaagagaaagccaaaaagaatgccaacaagcctttgctgga

SEQ ID NO: 454122 - DNA, 100 bp, Homo sapiens
tcatgtcaagcgaagccttgaaaaagctgccctgagacggtgtcccgccgaaaggtggtatcacggaaaacttgacagaacgatagcagaagaacgcctc

SEQ ID NO: 454123 - DNA, 104 bp, Homo sapiens
ttcaaggcaagaccgaattcagaaggatatcgacgtcgtgatccagaagtccagagctgaggactgcctgtttgcagggatgacccaagatttcctacggttcg

SEQ ID NO: 454124 - DNA, 82 bp, Homo sapiens
ctaaaatctaaaacttacctggatggggaaggctgcatagttggttaccacagagaagcgcttcctcaaagacagtttgtac

SEQ ID NO: 454125 - DNA, 100 bp, Homo sapiens
cttctctacagccgaaaagagggtcaaaggcaagaaaacaaaaacaaaaatagatataaaaacatcctgccctacctagaggatcaagacataatgggag

SEQ ID NO: 454126 - DNA, 75 bp, Homo sapiens
ctggaatttgattaactcattcaaggttacccagttgatcatcaatgctgtggtactgttgattttattgagtgc

SEQ ID NO: 454127 - DNA, 97 bp, Homo sapiens
gtcaagaactggaggtttgtgcaatttgagaccggtcggcactgtgcagagatcagagtactaagagacaggattatatgcgtcaggcaggagaagt

SEQ ID NO: 454128 - DNA, 83 bp, Homo sapiens
gctaaagaactccctcaagtttcatttgtgaagctctggtagctgaagaacatctcacagtggacgccagggtctattcctac

SEQ ID NO: 454129 - DNA, 100 bp, Homo sapiens
agagcgagtctcggagaagatgtggtggcttccgtttgttggtggaggaggtggcaggcctcggcgagatggagtttcactgtgtcagccaggatggtct

SEQ ID NO: 454130 - DNA, 100 bp, Homo sapiens
caaaagagtcggactcaggcccttaagcaaaaatgaagagcttgtcatcaaagctgaaggccttgctagatcctcgttgtgccctgaggttccagtccct

SEQ ID NO: 454131 - DNA, 75 bp, Homo sapiens
ggagcacagaaatcaatgttagcagatagccagcccatacaagatcgtcaccagatactgctacaccatctcatc

SEQ ID NO: 454132 - DNA, 100 bp, Homo sapiens
caggaaggtctcacctgaggtgaaccttcgaccttggacttctcagcctccagaatgatatttggatttgacctgcattttggaatttatctacacttaa

SEQ ID NO: 454133 - DNA, 53 bp, Homo sapiens
taggcatcatagccattcagcagaaggggatggagtctcgctttgtcgcccag

SEQ ID NO: 454134 - DNA, 100 bp, Homo sapiens
agagaagggcacattaaaaaggaatgcccacagtttaaaggctcttcagatcggccatggatatggaacattccttatgtcaaagcaccggatacgcatg

SEQ ID NO: 454135 - DNA, 83 bp, Homo sapiens
ctgcaccgcaccgagggcgagctccagacaatgcagatcttcgtgaagactctgactggtaagaccatcaccctcgaggttga

SEQ ID NO: 454136 - DNA, 50 bp, Homo sapiens
gcgtgaaccacatgcccagcacggaaccatatttatttagagtcagaatg

SEQ ID NO: 454137 - DNA, 74 bp, Homo sapiens
ggatctgatgatgctgcctacacacaaggtcctgtccctgctatcagtggggcactgaagaaagcaggactgag

SEQ ID NO: 454138 - DNA, 100 bp, Homo sapiens
cttggccccgcgcagcgtctggtcactcgctctcctctggggactgcagagaagcaggacctcgggccatggacccaacatgagtgaagtttcctgcaag

SEQ ID NO: 454139 - DNA, 100 bp, Homo sapiens
taggcggaccacaccgcccacaacggccacccccataaggcataggccaagaccatacccgccgaatgtaggtctcttcagagctgctgtgcccagtggt

SEQ ID NO: 454140 - DNA, 95 bp, Homo sapiens
gacgacatcatcgtcttcgcctatgcctgccaggctgctgaaacattgaatgaggaggataaagcaaagattgctaaaagcaagaagaagatgag

SEQ ID NO: 454141 - DNA, 90 bp, Homo sapiens
tcgggggccacctggcttgatgcaaacggaaggcttccggaagcgctggttcaccatggatgaccgcaggctcatgtacttcaaagaccc

SEQ ID NO: 454142 - DNA, 90 bp, Homo sapiens
gttttacttggaccggaagcaaagcaaagttcatgtagtattgaaactctggaagagtggattcagcctggataatggagaactcagaag

SEQ ID NO: 454143 - DNA, 80 bp, Homo sapiens
gtttatctggagtgaggtggccggttcttggtgggatctgagcagtgcaggtcgtaatctgaaggagtggctgagggagc

SEQ ID NO: 454144 - DNA, 110 bp, Homo sapiens
cggagccggagaccctcccttgaaaccggcactgggacttctcgatctctggaggcacctgttgcaagtgacagcgtctgagagaagaaatggaagaaatcacacagcag

SEQ ID NO: 454145 - DNA, 88 bp, Homo sapiens
ccccttcatgcatgcgcggaggccgcctgctagcaaggactttgaagaatatcctgaacatagaacgaactttttcttactacttcag

SEQ ID NO: 454146 - DNA, 90 bp, Homo sapiens
cgcgtcgtggaggagtactttgtggcccccccaggtaaccatgtgcgaccgaaaggccgtgatcaaaaatgcggacatgtcggaagagat

SEQ ID NO: 454147 - DNA, 95 bp, Homo sapiens
gcatccccaaaagtatcactccttctcgaatccttcagaacatcaagtctggatgtggatagtgaagctaagaaactattgggtttaggacagaa

SEQ ID NO: 454148 - DNA, 100 bp, Homo sapiens
cactcggcgagtccgggactgcgctggaacaatggataacttcttcaccgagtcactgtgtgcccagtattctgcagacaaacgagaagatgagaagatg

SEQ ID NO: 454149 - DNA, 100 bp, Homo sapiens
caggagagcccatggcaggaccggcacggcgaaaccttcaccttcagggcggcgactggcggcgcgatggacctgaccgggctcctgctggacgaagaag

SEQ ID NO: 454150 - DNA, 90 bp, Homo sapiens
cagcacctttcggcttctgagacggcggcagcagcggcattcaggtgatactgtgcttgtccaccgagttcacagttatttagagcgtca

SEQ ID NO: 454151 - DNA, 82 bp, Homo sapiens
gcgaggatggctcctttacccaggcttccgaagatcttctcaaggaacactacgttgacctgaaggaccgtccattctttgc

SEQ ID NO: 454152 - DNA, 83 bp, Homo sapiens
gtgaagctcaccgacagtgccctgagggccttcgagagctaccgcgccagacagatgaaggatttgggggcagagcacttggc

SEQ ID NO: 454153 - DNA, 100 bp, Homo sapiens
agacgtaaacgtgttcaataccatccttaccaccagaagctatccacaacttcgcagaggttcgacgaggtgctttataaatcatctcaggactttcaac

SEQ ID NO: 454154 - DNA, 51 bp, Homo sapiens
tgcatgcaagtcggaggaaacgctagtgcaatatcagacaccccgaagaac

SEQ ID NO: 454155 - DNA, 83 bp, Homo sapiens
aaccaggttctccttcgaggaacagagaaaatgaaaccagcagacagaatttgtcagggttgaaaggaggagcaggaggtact

SEQ ID NO: 454156 - DNA, 109 bp, Homo sapiens
ctgggattacaggtgtgcaccaccacgcccagtctcagcttttagcaagaagccacggtcagtggaagtggccgcaggcagccctgccgtgttcgaggccgagacagag

SEQ ID NO: 454157 - DNA, 75 bp, Homo sapiens
gcctcccctcggaactcgggcatcatggcctcagttggaatcgaagcctcttaaaatggcagatgacttggactt

SEQ ID NO: 454158 - DNA, 100 bp, Homo sapiens
agaaggttcagttggcaaaccagatatatgacttgatcactttttaaactcacataggtaggtatctttatagttgtagactatggaatgtcagtgttca

SEQ ID NO: 454159 - DNA, 87 bp, Homo sapiens
aagagagaaaacaaaagttcttgagacttatgggtgcaggaaaggtgatctgtgaaaatggttcgctattcacttgacccggagaac

SEQ ID NO: 454160 - DNA, 87 bp, Homo sapiens
gtgttggaccttccggagcttctcagaagacagagggttttcttttgaggtaagaatgattgatgttggctgatattggagtgctca

SEQ ID NO: 454161 - DNA, 100 bp, Homo sapiens
cgggcggacccgggggcgccctccggacgcggcagcgcaatgtccctgctcttctctcgatgcaactctatcgtcacagtcaagaaaaataagagacaca

SEQ ID NO: 454162 - DNA, 99 bp, Homo sapiens
atctggcccgttcctccttccagaccatgcagggggtcatcaccatggatgggacgctgcaggccctggaaatagctcgtctgctggccctggaggagg

SEQ ID NO: 454163 - DNA, 74 bp, Homo sapiens
ttcattatggagggaggtttggcagatggagaacctgatcgaacttcggtgcttttgaagatgatgatatcacg

SEQ ID NO: 454164 - DNA, 100 bp, Homo sapiens
ctgtgatgtgtgccgagggaggaattggtccttccatagtgacgccccccaaggacatctggaatgtcactggtgcccaggtgtacttgagctgtgaggt

SEQ ID NO: 454165 - DNA, 98 bp, Homo sapiens
ccggcgggagcgcgaacgagcgacggcggaacccgtgggcctgtggactgcagcctcggcggtcagcaggtgagccctattcccagaggcaggtggtg

SEQ ID NO: 454166 - DNA, 83 bp, Homo sapiens
gattgaaattgcaaagaattacaacgtaccctatgaacctgactctgtggtcatgggagaaaactggttgtcctggatgtttg

SEQ ID NO: 454167 - DNA, 90 bp, Homo sapiens
gtcgccaggaaagtggtgatccaggcaggaccaggctgcactgaagggacagagcaaaaaggcattgggatgaacgagccgctggtggac

SEQ ID NO: 454168 - DNA, 87 bp, Homo sapiens
accggatcaacttcgacaaatagagttcgtctgcacttccacaatctggtgaagggtctgaccgatctgtcagcttgtaaagcacag

SEQ ID NO: 454169 - DNA, 100 bp, Homo sapiens
ccagcttggagaaccaccgcatcaagagcttcaagaacaagggccgcgatgtggaagacttccaatagtagtcagacattatcatcctgtcatactatgg

SEQ ID NO: 454170 - DNA, 88 bp, Homo sapiens
gcaggagcgggactgagagcgcctggaggctcgagcggagggacaccgagtttccaggtgtggttgcaagacccattggagaattcag

SEQ ID NO: 454171 - DNA, 82 bp, Homo sapiens
agccaagccctgagcaggtgccagctccagcaggcagccgccctcaatgcccaggctcttcagaggtgttcctgcccccaga

SEQ ID NO: 454172 - DNA, 100 bp, Homo sapiens
ggctgacaactcacagcctgaaaatgaaaaggaagcttcaggtggagacagcccgaagcttatgtccctgatgccaaaaatgcacctactctttcctcta

SEQ ID NO: 454173 - DNA, 100 bp, Homo sapiens
gttttttctgtttctggccatggaggaagagaaagatgacagcccacagttccctgacatcgtggagttctgcgaggccatggccaacgccgggaagacc

SEQ ID NO: 454174 - DNA, 101 bp, Homo sapiens
gagcttggtgtccggcgtcccgggggcgcagggaaggagggcgtccgagtcaacaaccgcttcgagctgatcgacgacatcgcggatggcgccgtgaagcc

SEQ ID NO: 454175 - DNA, 98 bp, Homo sapiens
taccaaggagaagctatagactacttctactccaccaggaagggcctcggcttcacaggatggggctgccagtgtcctgggcccctcctgccctctgg

SEQ ID NO: 454176 - DNA, 90 bp, Homo sapiens
gaaggcctcgctggagatcgagtaccaattttctggatatgccgcagaaggatccgtgccagaagcaagcctgtgagatacagaaatgtt

SEQ ID NO: 454177 - DNA, 98 bp, Homo sapiens
cgcactgtgtgcacttggaggcttcaaagagacaatcaagataggatccgaggttcagtggatgtttccaaggattgtcttcagtcatggccttggga

SEQ ID NO: 454178 - DNA, 50 bp, Homo sapiens
ttggattgggacatcagctgaaaaagtatggagaatacagaatcccaaac

SEQ ID NO: 454179 - DNA, 90 bp, Homo sapiens
ggcaaaatcaccgtgcagttctctgacatgcggacgtgtcgcgtttgcccattgaatcagctgaaaccaatggagttttgctcttgtcac

SEQ ID NO: 454180 - DNA, 97 bp, Homo sapiens
actggaacagaatcaacccagaacggatagctccctcctggaaaagggtttcgaaaaaacgatgaaatgaaagctatggatgttttaccaattttga

SEQ ID NO: 454181 - DNA, 82 bp, Homo sapiens
gcacaacctggcccagcaggcacccgagttcagcgccacgcaagatggagttttaacattgaatgcggagaacactaattat

SEQ ID NO: 454182 - DNA, 83 bp, Homo sapiens
atgaagcttctgaaccatccacacatcataaagctttaccagcgtgttacacgttcccaagaagaacttcgagaagataaagc

SEQ ID NO: 454183 - DNA, 101 bp, Homo sapiens
cttatggcggcgctggagagggggcgctgagctgttgggataagaaggctgactgcacaatcacaatggctgactcagacttcctggctttaatgactggt

SEQ ID NO: 454184 - DNA, 51 bp, Homo sapiens
cctgtattggtctcctgctcctagagatccagacatttaatgtggatgcac

SEQ ID NO: 454185 - DNA, 100 bp, Homo sapiens
actgaactaggaaagaaagctgatcagttcagtgatatgagaatcagcataaaccagacgcctgggaagagtcttgactttgggtttacaataaaatggg

SEQ ID NO: 454186 - DNA, 100 bp, Homo sapiens
agagtgcaagcagcagtgaagcaggatgtaaatcagtggcacagtatactgcctccttgtgcctctggatcctgccacttcacatctactcttccatggc

SEQ ID NO: 454187 - DNA, 100 bp, Homo sapiens
cagcatctgaaaagccataatcagcgcctggtggagcaggtgggatcccttcaagatgcgctagaagggtgtccgcaatgttgccagtgtctgtctgcag

SEQ ID NO: 454188 - DNA, 100 bp, Homo sapiens
actctctgaagaccagcaggaaagcagtgagcccttacagaaaaatcctcagatcatgtatctagaacaggagttagaaagcctgaaagctgtgttagag

SEQ ID NO: 454189 - DNA, 100 bp, Homo sapiens
tgccattcaaggaattgatgatgatgctacaagccagcttgcaagaaattggggatcgaaaagaggcacagttagatgaagaaggacagtttcttgtcag

SEQ ID NO: 454190 - DNA, 75 bp, Homo sapiens
aagaaacctcaggacttgagtaacagcaacatgtgtgccccctaccaccggagccagagaatggtggctacatct

SEQ ID NO: 454191 - DNA, 51 bp, Homo sapiens
cccagatatagccgttggtacaaaggctgaaggtgatgtggccgccctcaa

SEQ ID NO: 454192 - DNA, 75 bp, Homo sapiens
ctgtattctttacctgcttcccaatcccactgatgaggatcagcccatgtggatgacgtagtagatgaaagtgat

SEQ ID NO: 454193 - DNA, 101 bp, Homo sapiens
ccgggcgcggggaagtcatgctcgcttcacggaggcaatagctagccggtattgggagagttgctgctacatctttaggaaatttgactaaccatggttct

SEQ ID NO: 454194 - DNA, 100 bp, Homo sapiens
cagcggaggcgggggctgggcagacccccgaacgtgcctgagcctgctgtcgctggggacgtgcctgggcctggcctgtaaaagctgcaccattgggatg

SEQ ID NO: 454195 - DNA, 82 bp, Homo sapiens
ttctatgctccttggtgtggacactgcaaaaatgaacagcagagaatttcaaaggaccttgctaatatctgtaagacggcag

SEQ ID NO: 454196 - DNA, 101 bp, Homo sapiens
ccagtgcggcatcacctcctccaagaccgtgctggtctttctcaacctcatcttctggtcactctccagttcttcaagaaatattcaacaaatgttggcag

SEQ ID NO: 454197 - DNA, 75 bp, Homo sapiens
tgagaagtgacatcctcctcgaatcaaaagacttaattcagtgcacaaatgagatgaatgtgaacatcccacagt

SEQ ID NO: 454198 - DNA, 100 bp, Homo sapiens
tggtgaagtacatgaactcagggccggttgtggccatggttagaaaatggatttctgactggaatctcaccactgaaaaaaagcacacccttttaagact

SEQ ID NO: 454199 - DNA, 98 bp, Homo sapiens
gatttggaaagttttaatgaggattttctgaaacgtaacgctacctctcttcagcatctactttcagtattatatgtagatgtggaatctgattttca

SEQ ID NO: 454200 - DNA, 100 bp, Homo sapiens
aggacgccggaacaccctggaagccgagaaatgatggctcaatcacaaaggagtgagacagaaacgcctgaatgtctggctgggaattaagaatgaggat

SEQ ID NO: 454201 - DNA, 75 bp, Homo sapiens
tgaaggaaaacctccttatgctgatatacatccaatgagggaggtcccaggtgattgaaaagtttgaggccttgg

SEQ ID NO: 454202 - DNA, 100 bp, Homo sapiens
ccggccaagaaatgccggctgcggaggaggatggactcggggagaaagaacaggccgcaaggaagaggcccagcagaagggactcgctgagccacccccc

SEQ ID NO: 454203 - DNA, 100 bp, Homo sapiens
ctcacctgccatttccaaaagatgcctctttaaacaagtgctcctttcttcacccagaacctgttgtggggagtaagggctcggagctgggaggctggtc

SEQ ID NO: 454204 - DNA, 74 bp, Homo sapiens
cttttgatatctaggaggactcttctctcccaaactgagagatcagtgacagttgtccagtttatccagtcatc

SEQ ID NO: 454205 - DNA, 98 bp, Homo sapiens
caatgtgctgctggctgccggctcctgtgacttcaagtgtcggagagaagtggatgggccctatacctccagccgtgaatgccagactttaagattgc

SEQ ID NO: 454206 - DNA, 82 bp, Homo sapiens
ctcggggtccggaaccagacgatgagacagagttgcgaccgcgcggcaggtcttccccagggaggtcctgaactacacagct

SEQ ID NO: 454207 - DNA, 82 bp, Homo sapiens
ctggggtgttccccgtcactgtggccgcatcatcgagtgcacacactgtggctgtcgtggctgctctggctgaggctggcgc

SEQ ID NO: 454208 - DNA, 74 bp, Homo sapiens
cacgtgcagacatctacaaccttcgatctcctgacgatttgaacccacttatgaagaattcccttccttagaga

SEQ ID NO: 454209 - DNA, 100 bp, Homo sapiens
cccacaccaaggacaccaggagcccccaaggagttggaagagatgcagagaggtgttcataaagagcaatatcagatggcaccccaaaaaaggatatgaa

SEQ ID NO: 454210 - DNA, 74 bp, Homo sapiens
ctcccatcattgatgtggtgcgatcgtttttagtgggcatgaaaggcaaggatgaagctatggccattggaggc

SEQ ID NO: 454211 - DNA, 82 bp, Homo sapiens
tcttcacagcacagttcctgggaaggtggagccaccagcctctccttggtgtcgtgaaaactacccctaaaagccaaaatgg

SEQ ID NO: 454212 - DNA, 96 bp, Homo sapiens
gtctcatgctgacaagatgtgaccactgcaaacaggtatttgaaatatctcaccaaaaaatatttgaagaagaataatctacgtgactggttgcgc

SEQ ID NO: 454213 - DNA, 75 bp, Homo sapiens
tggccaccgcctccagcttgccaccaaagacctgcgactttgctcaggctgccgcgggcggacacgccagaggag

SEQ ID NO: 454214 - DNA, 83 bp, Homo sapiens
cttccacaagaaccgcgaggacagaggaacaagatcactcaaggtgaaggataatctactaataccagcactttgaatgaaaa

SEQ ID NO: 454215 - DNA, 98 bp, Homo sapiens
ggctcctccagctaccggcccaaggccatctacctggacatcgatggacgcattcagaaggaaccacgtgaatgttgagggggcgacacacaagcagg

SEQ ID NO: 454216 - DNA, 100 bp, Homo sapiens
ggcgggggccatggcgctgccatcccgaatcctgctttggaaacttgtgcttctgcagactcccctgggacctgtggccgccgcccacagaccatgctcc

SEQ ID NO: 454217 - DNA, 97 bp, Homo sapiens
tcaacaccagcaccgcagatgttgtcaaggtggcctaccaggaggccaggggtgtcgccatggtgacttcatggtcatgacgattttcttcaatgtg

SEQ ID NO: 454218 - DNA, 90 bp, Homo sapiens
ggagtatctggcctccatcttcggcaccgagaaagacaagttacaggaggttccagtggcatcgggaagtgcattgctatcgagtgctat

SEQ ID NO: 454219 - DNA, 98 bp, Homo sapiens
ttggaggtggctgcggcagctggaacggtaatggtaggagagagagagcagggattggggaatgctgcccccccaaagtttctgtggctgcgcttagc

SEQ ID NO: 454220 - DNA, 75 bp, Homo sapiens
agagaggaacactacaaactgctgtatgaagtttcccagatgatttcacaaaagttcatcttcattgcagatacc

SEQ ID NO: 454221 - DNA, 98 bp, Homo sapiens
agtttttggtcttctgtcaaaaacacagggatgagggcagtgactaattgtgagtctttggtgaaggacttctactccaagctgggactacaataccg

SEQ ID NO: 454222 - DNA, 75 bp, Homo sapiens
atggacagcatgcctcaccaagtcacatgacaagcaacaatgattctgcagcttcagaccctgatgctgaaacca

SEQ ID NO: 454223 - DNA, 83 bp, Homo sapiens
caaaggcccatgaggggatgcagttatgggctctgtcgccgtggaaatgcactcggtgatggaaagagagccactattctgaa

SEQ ID NO: 454224 - DNA, 98 bp, Homo sapiens
cttcacttccctcggtctgggcttctctgaggcggcgagagatggtcaggtctggagctcgaccgggccagttggatgaaaaatctgacaaacagtat

SEQ ID NO: 454225 - DNA, 75 bp, Homo sapiens
gaccaaggctcgcaattttgagagagttttgggaaaggtcatgaaacgagtgcgtaccgagcagattcagatggc

SEQ ID NO: 454226 - DNA, 51 bp, Homo sapiens
tctggcttcccctctcttcaactagtaaaaatgtctccatcgtatcatcag

SEQ ID NO: 454227 - DNA, 82 bp, Homo sapiens
gacaaaatgatcccttgaaagacagttacgttgttgacctcctgtactggagagacattaagaagactggagtggtgtttgg

SEQ ID NO: 454228 - DNA, 100 bp, Homo sapiens
ctggctactatccggatgaaagctacaatgaagtatatgcagaggaggtcccacaggctcctgccctggactaccgagctgacatagcccagagatacag

SEQ ID NO: 454229 - DNA, 75 bp, Homo sapiens
taacctgaggagccgggggaagctggccttggggttgaattgaccaaagcaatggtgatggagaagcctagtccc

SEQ ID NO: 454230 - DNA, 90 bp, Homo sapiens
ggaagtttgtctggattttcctgtagaactgagggcaggatcaaccacaggtttgtctgctaccccccctgcctcattacctggctcact

SEQ ID NO: 454231 - DNA, 90 bp, Homo sapiens
gtcctcgagtggaaagctctatgcggagtacgtctgggtcacctaggcctgcaggctattcctgcaccaactgacctgaagttcactcag

SEQ ID NO: 454232 - DNA, 83 bp, Homo sapiens
cttttttatcagggcaagctgtgttccatggcagggaacttttggcagagctcccactatgagaaggcaaccaaagtgcagga

SEQ ID NO: 454233 - DNA, 114 bp, Homo sapiens
gaaaaatggtggtgatggcgcgactctcgcggcccgagcggccggaccttgtcttcacaatgcagatcttcgtgaagactctgactggtaagaccatcaccctcgaggttgagc

SEQ ID NO: 454234 - DNA, 90 bp, Homo sapiens
ctcggagaccccgcgccgacggctgctcaaacatcaggctctagccggcccggtccttggactgaaagaatgcaccaggggctcggcagt

SEQ ID NO: 454235 - DNA, 90 bp, Homo sapiens
gccaatgttggtgctggcaaaaaggcaatctttggcagccagacactacctaactccaatttatggacaatgaataatggtgcaggttgt

SEQ ID NO: 454236 - DNA, 101 bp, Homo sapiens
ggagcagggcgaagtggttacaagtacagactctggagccagactgcctgggtttgaattgtgcggtttcaggctcattggtgggcagtattacttatggg

SEQ ID NO: 454237 - DNA, 50 bp, Homo sapiens
gggcgggcagggccgggctccgcaggtaccaggtcatcagtacaccatct

SEQ ID NO: 454238 - DNA, 75 bp, Homo sapiens
cagcacaatcaacgcaaccacagaaacaagtggtacagaatggagatgtatgcatttcgattcttcatccgcctg

SEQ ID NO: 454239 - DNA, 75 bp, Homo sapiens
gcttcactccatctacgagaggaaggagagggaggagaggagcaggaagtggcggtgcgagggctgctgcacagc

SEQ ID NO: 454240 - DNA, 74 bp, Homo sapiens
ggcaacgggaccctgtgccccaactctacttccctctgctccttcccagaagtgtggaaggctgatgaccagat

SEQ ID NO: 454241 - DNA, 100 bp, Homo sapiens
cctctgtctccgagctcgcctgcatctactcggccctcattctgcacgacgatgaggtgacagtcacggttcgagaacttgtcttggacaattgcaaatc

SEQ ID NO: 454242 - DNA, 83 bp, Homo sapiens
gcctctccatcggccccgacttccagaagggcctgaaggatggaactatcttatgcacgtggctatggaccgccccctgcagg

SEQ ID NO: 454243 - DNA, 88 bp, Homo sapiens
ttaggatggtttttcaacaagttggagtaagcatgcaatcgggacaagaatccttcaagaaacaggaaaaaactcctaaaacaccaaa

SEQ ID NO: 454244 - DNA, 50 bp, Homo sapiens
cctcgctgcgctcatggcgtcgcccgggaagcatgagtgggaaaagcatg

SEQ ID NO: 454245 - DNA, 82 bp, Homo sapiens
aggctccgggctgaagattgcttctcttctctcctccaagtacaaatggtgatgatcatcaggtcaaggatagtctggagca

SEQ ID NO: 454246 - DNA, 88 bp, Homo sapiens
gggtgctccctacttatgccagtgaattaatttttgaagttgattcaagtcagttgagacgccagttgtgtggaggaagtcaggccgc

SEQ ID NO: 454247 - DNA, 100 bp, Homo sapiens
tcgtcctcgctgctgtacttcgtctatgtggcgcccggcatagatgttgccgatgactatatccacaccgcagcctgcttacatagcctggctttagaag

SEQ ID NO: 454248 - DNA, 105 bp, Homo sapiens
cccttctttcgatcagagatcggcggagaccctcgaagtgcgcaaacttgacactcaccctgaccgagatcccactggcattgttggtggtaggcctgggcgggg

SEQ ID NO: 454249 - DNA, 75 bp, Homo sapiens
tgctcctatgttaccgccacctaaaaacaaagaggattttgagaagaaatctcacaagcgaggaatgaaagggga

SEQ ID NO: 454250 - DNA, 100 bp, Homo sapiens
taatgactttggtgccctcaacatctctcagagacgaaagctcagagtcaagatctccactgaagttggcatcacaaatgttgatctttccaccgtggat

SEQ ID NO: 454251 - DNA, 75 bp, Homo sapiens
gaacaaggattttggatgaagaagtttttgagagaacctgcagttttggaggatttgacttgacgaatcgctctc

SEQ ID NO: 454252 - DNA, 80 bp, Homo sapiens
taacttgtcagcaaactactttcaggagaaacttcaaggtattgcagcatgctgattgaagaaggaggattgcagcattt

SEQ ID NO: 454253 - DNA, 76 bp, Homo sapiens
tatgaagtggtgaaggagtgtgtgcagcgcgcatggatttaggagaatgtaccaaaatccacgacttggccctccg

SEQ ID NO: 454254 - DNA, 49 bp, Homo sapiens
gaaagtggaattgaaatcccataaagacaggatctcactctgtcaccca

SEQ ID NO: 454255 - DNA, 105 bp, Homo sapiens
tagctgtgctcgcgctactctctctttctggcctggaggctatccagcggagcatttcctgaagacgtagtcatgcagcacgtcagcagctcccagagcagccag

SEQ ID NO: 454256 - DNA, 102 bp, Homo sapiens
tacgacccggagcacccgacccctgagccgttaattaaggaaaagttgagccagggcgtgaccctcgtcgtggacagatacgcattttctggtgtggccttc

SEQ ID NO: 454257 - DNA, 85 bp, Homo sapiens
gaacgaggcaaggagctaaagcagcgtgcgttcagccctggggtccctgtgcgttttattgcgacctgccggtgggaactttgtc

SEQ ID NO: 454258 - DNA, 98 bp, Homo sapiens
ttaaaacatccaaagtgccttattgtggattttagcaaccctgaggaggcaagtgaggcctatctggttggcctttttgaagacaccaacctgtgtgc

SEQ ID NO: 454259 - DNA, 87 bp, Homo sapiens
cgggagccgcacgcggcgatatggaagaggagggcaagaagggcaagaaggtggagccgccaccaaaatgcagattttcgtgaaaac

SEQ ID NO: 454260 - DNA, 98 bp, Homo sapiens
aagaagcaccgctttgggctacccgccaacatagccgaggtagaggtctccatccctgccaagctgcacaactccctcattggcaccaagggccgtct

SEQ ID NO: 454261 - DNA, 100 bp, Homo sapiens
atgcctgcaaagcgaggctgaagaaggccaaggctgcagaagccaaagccacgcacatggattaattgatgtatgttgagtttatggagctgccttttgg

SEQ ID NO: 454262 - DNA, 100 bp, Homo sapiens
tgcacgtcttcaccttcggcagccggctgtacgcacacaccatcgcaggagcaactttcagccagaggcatggatgcttctctgtctcatcagtccttag

SEQ ID NO: 454263 - DNA, 50 bp, Homo sapiens
ccggccaccagcaattgtccggtaggagcaacggtgggaatgccctctga

SEQ ID NO: 454264 - DNA, 50 bp, Homo sapiens
tacttcacaggaattgccatttgaaattctgaaacagccacacctacaaa

SEQ ID NO: 454265 - DNA, 85 bp, Homo sapiens
cacctcaatgccaacgactgggccaccaatggtgtgggccggaaagagactggggatatttatatctggggctggaatgaatcag

SEQ ID NO: 454266 - DNA, 74 bp, Homo sapiens
caacctgtccggggatcccagggagcctacaggtggcagatgagaactctcaacacagttgtgttagaagaagg

SEQ ID NO: 454267 - DNA, 83 bp, Homo sapiens
agacactggaaaactggatgctgcagacactgaacgaggagccagtggctcaggtacacgccaatttgaaagtaaacaacgtg

SEQ ID NO: 454268 - DNA, 75 bp, Homo sapiens
gtgaagagacaggaggcagtagccaaacacccagggcagcagcgttctcggatgctagctactctttttaaggat

SEQ ID NO: 454269 - DNA, 100 bp, Homo sapiens
cctagttgcagtcaggcttcatacgctattgtcctgcccgactgttgggaaagatcctgatggctatccgagatgcaggttttgaaatctcagctatgca

SEQ ID NO: 454270 - DNA, 87 bp, Homo sapiens
cagtggaaccatcacacaaaagcacacaaagacctcctcctccacaggggagacagagggcatttggtccactttggtgccatgaag

SEQ ID NO: 454271 - DNA, 75 bp, Homo sapiens
cgcttgagttggtcgggggcagcggcaggggctttgttatgcacctaaagccatattggaagctccagaagaaag

SEQ ID NO: 454272 - DNA, 75 bp, Homo sapiens
gttggacgctgccagtttgcacagcagcaggctgtgggtgagcgtggaggatgctcagatgcacaccgtcaccat

SEQ ID NO: 454273 - DNA, 75 bp, Homo sapiens
aactacagacccagtctctgccaagtgaaaatgagttcttcagtaagaagaaaaggcaagccaggcaaaggaggt

SEQ ID NO: 454274 - DNA, 100 bp, Homo sapiens
ggccggctgccaccttctgggctcctggggccctgcccaccacaaattcaggaggaatcagatatgtggaaaataagagaactggaaaaacagatggaag

SEQ ID NO: 454275 - DNA, 100 bp, Homo sapiens
tctatacagggacgtgatgctggagaattataggaacctggtctccctgggagagtagttatcttgatggaattagaagttttgaagtcagctgaagcag

SEQ ID NO: 454276 - DNA, 100 bp, Homo sapiens
accgtttcctccaggacagcacctagtcgtggccggaggagtctcagagctgtcagaaaggatgtcttcatcacattttgccagtcgacacaggaaggat

SEQ ID NO: 454277 - DNA, 78 bp, Homo sapiens
tcctccgtgtcctcccccgcatgacccccttggagatgcagaaactaccagaggccgttcagctaattgagaaggcca

SEQ ID NO: 454278 - DNA, 101 bp, Homo sapiens
gctttcacagtttgcgggactcagtcccatcactccaaggagagaaggaagccatgcagtgtgtggaagagctgaatgcccagggcctactacatgttttt

SEQ ID NO: 454279 - DNA, 100 bp, Homo sapiens
atctcttggagcagctggggatcatgaaatgggacgtcggtcatcagatactgaagaagaaagcagaagcaagagaaaaaagaaacaccgtagacggtcc

SEQ ID NO: 454280 - DNA, 98 bp, Homo sapiens
agatacagaatccaggctcaatgataatgtttttgccactcccagccccatcatccagcagttggaaaaaagtgctcctgacatcaagtgctgttcac

SEQ ID NO: 454281 - DNA, 100 bp, Homo sapiens
cgcagttccgacaaaggtcgcctttgctactaccgcgactggctgctgcggcgcgagacattgcctaagatactgagccatatcgccccagcattttgca

SEQ ID NO: 454282 - DNA, 83 bp, Homo sapiens
gtgctgcagctgaagaacccggcggggctggcggtgaaggaagactgcaaagtgtgtcgtgaaaactacccctaaaagccaaa

SEQ ID NO: 454283 - DNA, 100 bp, Homo sapiens
tttgatgtggatgatgccaaagttttattagaaaccaatagagccatggcgactccctctgctgccttcgaggcccttatgaatggtgtgacaagctggg

SEQ ID NO: 454284 - DNA, 78 bp, Homo sapiens
ttctcttcggatgaggagaccctggaagacaatctaaggttcaaaatcaaaggaagcccagaagggaggtcattttta

SEQ ID NO: 454285 - DNA, 74 bp, Homo sapiens
ggacgtcggacgtgcagtaccaagtgtcggctaatctagacgaaatccagatgagttcacctacattccttaga

SEQ ID NO: 454286 - DNA, 50 bp, Homo sapiens
gctgtccctgctggaggagcgcttccggatcgagaacggctactttgtac

SEQ ID NO: 454287 - DNA, 100 bp, Homo sapiens
aggaccgacggcagacccagcagccagagagtgaaagtcgtccctcatggaccttgctgacgtcttcacggccccagctcctgccccgaccacagacccc

SEQ ID NO: 454288 - DNA, 50 bp, Homo sapiens
cctccggagtggccagcaggcctgcgaggatggagtcttgctctgttgcc

SEQ ID NO: 454289 - DNA, 86 bp, Homo sapiens
gcctttgtgtctgcccatgtaataggaataggatgagtgataatccacccagaatggaagtgtgtccttactgtaagaagccattt

SEQ ID NO: 454290 - DNA, 51 bp, Homo sapiens
gccgattccagttcctgtatgatgttcaggcccgccagctcatcctgcagt

SEQ ID NO: 454291 - DNA, 50 bp, Homo sapiens
gctattcctgttgatggtgatgaagacagatgtacctgtgtggtctaagc

SEQ ID NO: 454292 - DNA, 97 bp, Homo sapiens
tgaagaaaatgtatgtactgacgggaaaaggaggataagcaagtcgaatttttgtcttacgtaccaaaagaattggtggagctccatttgaagctga

SEQ ID NO: 454293 - DNA, 101 bp, Homo sapiens
acacacctccattggatttaaaagacagtcctcgtcagcactgactttcagctatggaatcgagtggagactgctgcacggactctggaaccatgaacata

SEQ ID NO: 454294 - DNA, 74 bp, Homo sapiens
acaagatggtccttaaaaccgaagaggaggacggtacggacattgctgcaggagaagaggttgccatcaagctt

SEQ ID NO: 454295 - DNA, 75 bp, Homo sapiens
ggattccagcatggacgtcttccacctggagggcatgactacatctgtcatgtgtggacgaatgtggaacctcgc

SEQ ID NO: 454296 - DNA, 96 bp, Homo sapiens
tggtgccgcgcagctttccccgagtgatcagcagctggactgtgccttggacctaatgaggcgcctgcctccccagcaaatcgagaaaaacctcag

SEQ ID NO: 454297 - DNA, 96 bp, Homo sapiens
attatgtccattgttctcttggagcagctggtcatcatggttctgactcctcaggagcaaaaaacataacctgaagagggaggaagtggatttggg

SEQ ID NO: 454298 - DNA, 100 bp, Homo sapiens
atgttctccttgagcaccatccggggtcaccaggatgctgaaaacgccattcaacagatgggtggccagtggcttggtggaagacaaatcagaactaact

SEQ ID NO: 454299 - DNA, 73 bp, Homo sapiens
taaaatgttggatatgttgaagcagacaggaaggcggggacggcccaggagcggaggagcagacagcggtggc

SEQ ID NO: 454300 - DNA, 91 bp, Homo sapiens
ctccatcacccaccaacaacaccacaataatccacagccaaggcctccccatggccacccatggaccagtcggcattcacttcctcccttc

SEQ ID NO: 454301 - DNA, 50 bp, Homo sapiens
ggtagacctgcccaagtctcccaaggttaatgactccagagagtaagatc

SEQ ID NO: 454302 - DNA, 82 bp, Homo sapiens
gggagatcatcatctgcacctaccgccagatcacacaaaccctgaactggctggtgaggatgacatcagaaatagagaccaa

SEQ ID NO: 454303 - DNA, 96 bp, Homo sapiens
tctgctttttttctggctagaccgaagtgtactagccaaggagttgaagtttgtgactttgttgattatgttacagttacctttgagagaaacaga

SEQ ID NO: 454304 - DNA, 100 bp, Homo sapiens
gactatggcatcaaacagcctcttcagcacagtgacaccatgtcagcaaaacttcttttgggtcaccaggagactaaagtccatcaaaaacatccagaaa

SEQ ID NO: 454305 - DNA, 90 bp, Homo sapiens
tctaaacagcttaacaactgggccgtgtataggttgtcaaaattcacaaggcaaggtgactttgaaagggttgcttttgtaatgaagaag

SEQ ID NO: 454306 - DNA, 90 bp, Homo sapiens
tggaagaggaaccacaagaaaatcaaaagaaacttttgcccttatcagtaacacctgagataaaccgagaaaactggtgtacaatagagc

SEQ ID NO: 454307 - DNA, 75 bp, Homo sapiens
gtgccatctgctcagtctcctggagttcatgcagatgcagatcaggcaaggggatcaggcgagtgaagccgaagc

SEQ ID NO: 454308 - DNA, 82 bp, Homo sapiens
acagccctcaaggaagatggtgtcctctgctgccaggacaccatcaagagaaattggaggctagtgactgtgatcaccagca

SEQ ID NO: 454309 - DNA, 75 bp, Homo sapiens
caattattacattgaatctctgctctggaaagttcttgtcaataccaaggtggggagaagaattttcattgtcca

SEQ ID NO: 454310 - DNA, 98 bp, Homo sapiens
aattgtgaactaaggccccctgcccccttttcctggtgcatgtgaagttatcaaaaacaggttgggggccgtcccgctcctaaggcaggaagatggtg

SEQ ID NO: 454311 - DNA, 74 bp, Homo sapiens
agaaagcagggctgtattctgacgtttacaaaactacagaatgaagcagatgatgatgatgatccagaatataa

SEQ ID NO: 454312 - DNA, 96 bp, Homo sapiens
tcagcatcccagccgtgctcacgttgcccagaagattgttgccacaaggaagaagcagcagctgtccataggaccctgcaagtcgctacctaattc

SEQ ID NO: 454313 - DNA, 98 bp, Homo sapiens
cggggactcggagctgagaggagctgctgctcggaccagcgcggacctgctgaagttcccatgatgtcacccaatggatccattcctcccattcatgt

SEQ ID NO: 454314 - DNA, 50 bp, Homo sapiens
gaagaaacccagcttgatatgttgggaaaagaagatctcccggagcagtg

SEQ ID NO: 454315 - DNA, 50 bp, Homo sapiens
ccgacaacagcctggcgtccgccacggtgtcccgacccaggctaagcttg

SEQ ID NO: 454316 - DNA, 90 bp, Homo sapiens
aggtgatccagagtttgccgaagaatggtaaaaagcgcagactcaccattattgaatgtgggtgtgacattaacatgatgattgatctgg

SEQ ID NO: 454317 - DNA, 98 bp, Homo sapiens
tagaagctatcaaagcccttgaagtcaggtgttcctgatccaagcagaaccctgttatttgaagagcctgagaaatcttatcccgtttacaaatgtcc

SEQ ID NO: 454318 - DNA, 75 bp, Homo sapiens
aaagcttggagataaagttgctttttactggacctgggaggaaggcaaggtgctcatctttgatgactcctttga

SEQ ID NO: 454319 - DNA, 100 bp, Homo sapiens
aggggcgacggcgtactttgggcttcatcatggaggactacctgcagggttgtcgagctgctctgcaggtctgcccagaacaatctgacaaaggcagtag

SEQ ID NO: 454320 - DNA, 75 bp, Homo sapiens
aaattgaaaggcttcaaagctagcaggtgcggtcttgctctgttgcctaggctggagtacagtggtatgagtatg

SEQ ID NO: 454321 - DNA, 134 bp, Homo sapiens
gagccttacggagccgtctaccagatcaacgtcctccgggaccggagtcagaaccctccgcagagtaaagagctccatgaacctgcctccagacaaggcccggctcctgcggcagtatgacaatgagaagaaat

SEQ ID NO: 454322 - DNA, 96 bp, Homo sapiens
ctataatagcagcccagccttgtcaggccagctccagttcccagagaatatgatggctgagagctagcaaggaaaactcaggaccatgatggctca

SEQ ID NO: 454323 - DNA, 80 bp, Homo sapiens
acgcaaggaggctgatggagaacaggcagaatccagagaccacatttgaagtatatgttgaagtggcctatcccaggaca

SEQ ID NO: 454324 - DNA, 95 bp, Homo sapiens
gtcggagctgggcgcggagcccctcacagtgcaggtagcacaggcggagtgcagcggaggcccctgccgctgccgtcatgccgttcccgtttggg

SEQ ID NO: 454325 - DNA, 51 bp, Homo sapiens
cggggagggacgagagggcctgacgtacagaacgacaccgtaactatccgc

SEQ ID NO: 454326 - DNA, 51 bp, Homo sapiens
cttctctcctcacagaaatttaactgactcctttctacgaaaccgttcaag

SEQ ID NO: 454327 - DNA, 97 bp, Homo sapiens
tccttccgagaaatggagaatcagccccataagaaatacgaactcacggaaggacaggtggagggaagcgccccagacaaggaagctggcaaccagc

SEQ ID NO: 454328 - DNA, 98 bp, Homo sapiens
ggaaacaaaaagttaaacaagcaagcctgccataagtgagaagtgctgggcctaaaggagataacatttatgaatggagatcaactatacttggtcca

SEQ ID NO: 454329 - DNA, 75 bp, Homo sapiens
ggatcctgcactcttcctccctcaggtctgtgctgccaacatagtctcacaagatggtgaacagaatggtctcat

SEQ ID NO: 454330 - DNA, 49 bp, Homo sapiens
atcgccttggaccccgctcacggtaaaagcagtctgggcgcaggctggg

SEQ ID NO: 454331 - DNA, 74 bp, Homo sapiens
tcatggctctcaaagaaccagcggacctgagtcttcaatgaaagaggtaaatgtgtttcgattggaaatggagg

SEQ ID NO: 454332 - DNA, 96 bp, Homo sapiens
gccatcggcaaagccaggcaagctgcaaagacggaaatagagaagcttcaggtgcgagtactccagaaggaactggctgcatccacctctgaagac

SEQ ID NO: 454333 - DNA, 100 bp, Homo sapiens
gtgcaggacatcgtgtaccgcaccatggagatcttccagctcctgaggaacatgcagtcaggtgacacacagtcttttgcacagaagctccagctccggg

SEQ ID NO: 454334 - DNA, 98 bp, Homo sapiens
aaaccaacccttgggcccatgcccctgatgctgctaacaaggaaattgcagccacatgttcggcgttgtagaatgaatgaagacactggcactgatta

SEQ ID NO: 454335 - DNA, 100 bp, Homo sapiens
tgcgaccccgagggaagatgaacgggacgcggaactggtgtaccctggtggacgtgcacccagaggaccaggcggcgcttgtcagctcatttgcagctta

SEQ ID NO: 454336 - DNA, 126 bp, Homo sapiens
ccggagaagagaccctccttttaccacctgagtgagattgtggagaatctgctgcctggacaatataaaaagctgataccccaatgtccttctttgactttgtggttgatcctcattctttccccc

SEQ ID NO: 454337 - DNA, 98 bp, Homo sapiens
ctcaaggaaacctttccaacacagatgtccaagctgccaatcatggcacagattgaaaaacaagagagatttgaacagtatactacctgtaagagctg

SEQ ID NO: 454338 - DNA, 52 bp, Homo sapiens
tgtccctgcttgtcagggctgagagcgacgatgtaaaaaaagattggtctga

SEQ ID NO: 454339 - DNA, 82 bp, Homo sapiens
cacacggagcactgcaggcgccgggtgaagctcgtgtgtggagtgccacggtacaatcagacgacagatggacagtgtgaca

SEQ ID NO: 454340 - DNA, 83 bp, Homo sapiens
agacctgcgtacattcggggtgccagaaggaaagcatagtgcctccggagccagcgtggtggccatagacaacaagatcgaac

SEQ ID NO: 454341 - DNA, 87 bp, Homo sapiens
gtttcagctggcatggtactggatatagtacagggcacaggcaggatggccgatgctgacaggaaccagcggtgactctggggcccc

SEQ ID NO: 454342 - DNA, 100 bp, Homo sapiens
tcggcatcaccagtggcttcgtgaagcccaagctggatatgtgttgagacggattctccgccgagctgtccgatacgcccatgaaaagctcaatgccagc

SEQ ID NO: 454343 - DNA, 100 bp, Homo sapiens
cctggagaccttcgagcaccccaacgtggtcagtactaaggctcgtacgtctgcatcgattatcttacgtggggcaaatgatttcatgtgtgatgagatg

SEQ ID NO: 454344 - DNA, 100 bp, Homo sapiens
tgaagcgattcctgcaggcgttggttcccctctttgacctgccaaaacctattgatgtacaagtcattacacaccacatgcagcgatatgcagtttggtt

SEQ ID NO: 454345 - DNA, 50 bp, Homo sapiens
ctttggttatgttggatgaacaaggagtatctggagtccatctttcacca

SEQ ID NO: 454346 - DNA, 100 bp, Homo sapiens
gagcaagtcttgagggatgcacctatggattccattgaatgggctgaagtggtgatcaatgtgaacaatattctcaagagttcacccagggcatgatctt

SEQ ID NO: 454347 - DNA, 100 bp, Homo sapiens
gcgcaggctgcccgtactgcccgtggcatgagggagccggaagagctgatgcccggtagaagtaaaatctggagaagaagatgaagaaattttgtttaaa

SEQ ID NO: 454348 - DNA, 50 bp, Homo sapiens
cctgtgttaaaacctggagacaggggggatggagacagaagtcacaaact

SEQ ID NO: 454349 - DNA, 90 bp, Homo sapiens
cctcccctggctggagtgccctgcctggagggagccctcctggctgggggcaagagctcaacctgggtgacaagtgtctggacggcgtgc

SEQ ID NO: 454350 - DNA, 80 bp, Homo sapiens
aactgcacggtgcgggaccacgtccactgcttggaaatgggcaagttcatgaaacctgggaaggtggtgcttgtcctggc

SEQ ID NO: 454351 - DNA, 74 bp, Homo sapiens
ctacccccatcactgcttccctcagccataacagtatgactatgaatatgatgaaaatggtgacagagtcgttt

SEQ ID NO: 454352 - DNA, 75 bp, Homo sapiens
aaacttgacactcaccctgaccggtatttctgggaaaagccagcttctgtttgcactggtcttcacaactcgtta

SEQ ID NO: 454353 - DNA, 83 bp, Homo sapiens
cacagagcctcgcctttgccgatccgccgcccgtccacacccgccgccagttgagaagctgatgtctcctcgacttccaactg

SEQ ID NO: 454354 - DNA, 97 bp, Homo sapiens
acggcttccgacatgcccgcaacgtggacagggtcctctgcagcttcaagatcaatgactcggtcacactcatactgtatctggacggatggactga

SEQ ID NO: 454355 - DNA, 75 bp, Homo sapiens
cagggtgatgggaaatggcacctggtgtacagatctgaggggtttacttccctgccctgaccagcctgctgtcgc

SEQ ID NO: 454356 - DNA, 82 bp, Homo sapiens
cgcacttgtcttagcagttctcgctgaccgcgctagctggactccctggaggaaaagcggaagcggcagcggtctgaacgcc

SEQ ID NO: 454357 - DNA, 75 bp, Homo sapiens
tgtccctgtcctgaacccctacgaagaatggctacgtgactgtcagtgagatcaaagccagtcttaaatgggaga

SEQ ID NO: 454358 - DNA, 95 bp, Homo sapiens
tactgccggcacctcaaccagatgaggaagtacaactttgagtgaaacctgggaagaatgtgctcaaagggaaacctgggaagaagcagctcttc

SEQ ID NO: 454359 - DNA, 48 bp, Homo sapiens
gcttggacgagccgccgcacatctgggcgtctctggccgagcctcttt

SEQ ID NO: 454360 - DNA, 100 bp, Homo sapiens
gcctcaggagagtggcccacgcagctggatgtaccgcatgtgatcactctgggactcgtggggctgcagcaccgtacaagccagctgccatgttgtgagc

SEQ ID NO: 454361 - DNA, 75 bp, Homo sapiens
ctcgctctgggtctccaggcccgcgaccgtccgccagtcgtcccgaggatgggagtcccagcttctggagacggg

SEQ ID NO: 454362 - DNA, 76 bp, Homo sapiens
atgatttagttgattctctgaaggatcactactcttggaatcaaagataaatccaaatactgcatatcagaaacaa

SEQ ID NO: 454363 - DNA, 90 bp, Homo sapiens
ttgcgccatcatcctcatcatcatcatagggtctcttgcaacgtgtgagctgcctcttgccaagagtgagtggcaaaagaaactaacccc

SEQ ID NO: 454364 - DNA, 101 bp, Homo sapiens
aaatgtagcatatatcctaaaggagatggaagtgatgtaccatcatgggtagcctttgataaacaggatttctctctgatcaaacggacagttcaggactc

SEQ ID NO: 454365 - DNA, 75 bp, Homo sapiens
tcggaaaccggtagcgcttgcagcatggtccccagtctatgtgaggatctcctgtcttctgttgaccagccactg

SEQ ID NO: 454366 - DNA, 75 bp, Homo sapiens
gcggcgcccagtggcgtccacctgctcgtccgcagaggttgatcttcactcgaaaaggggtactccgtgtggagg

SEQ ID NO: 454367 - DNA, 123 bp, Homo sapiens
ttcctgtgcctgaacctctctttcgcttttgtggaactactctacggcatctggagcaactgacaatgcagatcttcgtgaagactctgactggtaagaccatcaccctcgaggttgagccca

SEQ ID NO: 454368 - DNA, 100 bp, Homo sapiens
aaaatttctgaagctgaaagcgcctatagaaatgctttgtactaccgcagcaacatggctgacatgctttataatttagaagatggcgaattagaagatg

SEQ ID NO: 454369 - DNA, 74 bp, Homo sapiens
aaaaggaagactattcagacagaacaatcagtgatgaagatgaatcgtgccggtggtggtgtgcacattgagcc

SEQ ID NO: 454370 - DNA, 74 bp, Homo sapiens
ctatgacctatctgacaagagcatcaaccctctggatcctgatggtgaacatgccaggagagcaatgcaaaagg

SEQ ID NO: 454371 - DNA, 100 bp, Homo sapiens
cggacactttcgcaacatcaagggagttttccggggccctctcagcaagaacgggaacaaaactctggtcaattgttgggatgactatgtataatcaagc

SEQ ID NO: 454372 - DNA, 118 bp, Homo sapiens
tgtggataaggaacagaagctatccaaacgtgaaaaggaaaatggttgcgcaaatctgtccaaggctgcctggggagcattggagaagaatggcacccagctgatgatccgctcctac

SEQ ID NO: 454373 - DNA, 100 bp, Homo sapiens
tgcccgtgaccgtcgctagaactcagttgtgcgttgcggccagtcgccactgctggcatccgcttcgatcctgaaattccgcaaacactacgactagagt

SEQ ID NO: 454374 - DNA, 49 bp, Homo sapiens
ggaaaacaacttcgagggcagagcagtagcagaatcccatggtagccag

SEQ ID NO: 454375 - DNA, 74 bp, Homo sapiens
actcgggagctggctgaagatggctactctggagttgagcccacagaattcttccagtccctgggtggggacgg

SEQ ID NO: 454376 - DNA, 100 bp, Homo sapiens
tggagccaccatcaagctgtctaagtccaaagatttttacccagtcagcccattaaagcagatgtcctttttattcatggccttatgggagcagcattca

SEQ ID NO: 454377 - DNA, 100 bp, Homo sapiens
gtggctatcccctctgacgtctcccacttccgcttccatgtaaaagcagctgttaagtatgcccttagcgtaggctaccgccacattgattgtgctgcta

SEQ ID NO: 454378 - DNA, 83 bp, Homo sapiens
aatgaagaactgaagaagctggagttgctcagacagacacagagattgactggaaggcctacatggccgaggtagaaggcgtc

SEQ ID NO: 454379 - DNA, 99 bp, Homo sapiens
ggcctcaaatgagagagatgctatatcgtggtaccaaaagaagtctcctgaatatttacgcgttgctgaatctcctgtggacaaaccaccaataggcca

SEQ ID NO: 454380 - DNA, 75 bp, Homo sapiens
atctgacagacatccctgaatcttggtgtttggacataggagatttcagagacaactgtctgaaccctgccaccc

SEQ ID NO: 454381 - DNA, 90 bp, Homo sapiens
cggcgagcagggagcggagtaccagcacttcatccagcagtgcacagaggtcggatccgcagctgcttgcccggttctactatgccgacg

SEQ ID NO: 454382 - DNA, 75 bp, Homo sapiens
gaaggaaaatatggctgctctttgccggacagcagagtcccagattttagtccatggagaacagaatgaaatggc

SEQ ID NO: 454383 - DNA, 50 bp, Homo sapiens
ccgaggaccagctcaatgacagaaacttggtgaagatgaagaggaactat

SEQ ID NO: 454384 - DNA, 100 bp, Homo sapiens
tggggggccttgaatggcaactgatacataataagacacaatctattctgctgattcacaattatggagactgtatcatggaagggaagtggttgctgtg

SEQ ID NO: 454385 - DNA, 83 bp, Homo sapiens
ggctgctccgcaccccggggtcccaggaagggcggcccaggagcaggccgggctctcgccatgggtcactgtcgcctctgcca

SEQ ID NO: 454386 - DNA, 74 bp, Homo sapiens
gcatccacaggaggggcaggaaattctttgaagcttcaaggttactgactttttatgatgtttggtggctatga

SEQ ID NO: 454387 - DNA, 83 bp, Homo sapiens
cagtcaggcagatgtttgtcgactggaatgggttcgtgagccacacatctccccacaccaagctcctccatacaagacctcgg

SEQ ID NO: 454388 - DNA, 90 bp, Homo sapiens
catctcaatggcctttttcttctttctttctgggaccatctggattcatatccttcgaaaacgacgtgatgttgcacctgtaaccatctt

SEQ ID NO: 454389 - DNA, 50 bp, Homo sapiens
cgagctcgaggaggatgcctgggcccggggggccctcagcctcttggcct

SEQ ID NO: 454390 - DNA, 75 bp, Homo sapiens
ctggcgtgcaacctggaattggaacggaggtgtgtagaccacactccaaaactgaaactgtggatggcagccatg

SEQ ID NO: 454391 - DNA, 74 bp, Homo sapiens
cctcaatgttttgctcctggcctggaagattgggaaaatgaggtacgttagtgttcgcgattttaaaggcaaag

SEQ ID NO: 454392 - DNA, 80 bp, Homo sapiens
accagacagccatccaggaccaaccttccagttctgtctgtgaacgaggctggttatgatggtgagagtatcggaaattg

SEQ ID NO: 454393 - DNA, 75 bp, Homo sapiens
accttttccacagggaattgagttggtatgggcactaggaaaagacttcttccatcaagcttaattgttttgtta

SEQ ID NO: 454394 - DNA, 98 bp, Homo sapiens
tcctcgggggcggcggccacgccaaggacgggtttggacatatttgactcttttccccccaggttgaattgaccaaagcaatggtgatggagaagcct

SEQ ID NO: 454395 - DNA, 74 bp, Homo sapiens
cccggccgaggtggcggcggctcctcagtgcggcaccttcccgtctgatgctggcgttgtgcgtatggtgccct

SEQ ID NO: 454396 - DNA, 83 bp, Homo sapiens
caccaccagatctttctccgtggattcctctgctaagaccgctgttgtatcacggactgattcaccgagcccaaccgtactca

SEQ ID NO: 454397 - DNA, 100 bp, Homo sapiens
aaatcgtgtcaacacttttaccttctaccattgatggattatatgcgtcaggcaggagaagtgacttatgcagatgctcacaagggacgcaaaaatgaag

SEQ ID NO: 454398 - DNA, 104 bp, Homo sapiens
ggacgccggagaactgtgcccattacttctgcctggactgcattgtcgaatggtccaaggacactcatgaggaccatgatacttccactgagaatacagacgag

SEQ ID NO: 454399 - DNA, 82 bp, Homo sapiens
ccgagaggccgtgcgggacgcgggcgccaggaccggccgaacgcagagtcttccgtgtgtgctaagatcgtgcagctcctgg

SEQ ID NO: 454400 - DNA, 74 bp, Homo sapiens
gtcttgttgctacaggcccatggaggtaccctgcctggatctataacgtatacaaaactaggatatgctggaaa

SEQ ID NO: 454401 - DNA, 83 bp, Homo sapiens
cttcagccgaggccgccgccgcctctccttgctgcagccatggagatgatcggctgaatgtaacagaggaactaacgtccaac

SEQ ID NO: 454402 - DNA, 75 bp, Homo sapiens
tgggcaccttcacctgggtctgcacgccctttctggattactacagcatcccatttcccacacccactactccgc

SEQ ID NO: 454403 - DNA, 91 bp, Homo sapiens
ctttctgtacagcctgtggaactgtaaagtgaatgccgaagacagaagatttggatgatacaccactgactttctttgtttggaatacacg

SEQ ID NO: 454404 - DNA, 100 bp, Homo sapiens
atttggggagttttgccattacgagggttcttgggaatagcagggattcagtggcctttgaggatgtggctgtgaacttcaccctggaggagtgggcttt

SEQ ID NO: 454405 - DNA, 102 bp, Homo sapiens
agcctcccgagtagctggaaccacaggttgttcctcaaagtcattcaagctgtactcgccgaaggagcccccgaacggcaacgcctttccccccttccatcc

SEQ ID NO: 454406 - DNA, 83 bp, Homo sapiens
gtgtgattagcttcgcagtctggaaagctttaggagttcacagtatctcgacatggcaggagctgaggcagctgcaggagcag

SEQ ID NO: 454407 - DNA, 125 bp, Homo sapiens
gctgttgctggtctctggctccctcctcccagggccaggcgccgctcagaacggaggtcatgtttctagggactcagtctgccttcatgaagaacagacacaggcagcagggatggtggctggct

SEQ ID NO: 454408 - DNA, 76 bp, Homo sapiens
caaatttgtgccttatcgagattcagtcctcacttggctgcttaaggttcacagcatgtccgcctcggcccctgct

SEQ ID NO: 454409 - DNA, 49 bp, Homo sapiens
attttgctcactccttgtaccccttagccctgtgcctaaggatagagat

SEQ ID NO: 454410 - DNA, 100 bp, Homo sapiens
gcggccgcggccagggaacggggcatcgcggttccaacgcaatacgagaattggagacccaaccagccagacagcttcttttctgctggagaagactgtg

SEQ ID NO: 454411 - DNA, 100 bp, Homo sapiens
ccgacctcgacgtcttgcctgtgtcccacttgttcgcggcctatagtgccggtggtggtgtgcacattgagccccggtatagacagttcccccagctgac

SEQ ID NO: 454412 - DNA, 87 bp, Homo sapiens
cttagtgaagcaatagaaaaatcaacagaacaaaggaagagtatggctcctgaacctacacagatgcttgtggttggtggcatcgac

SEQ ID NO: 454413 - DNA, 87 bp, Homo sapiens
aagcagccgatccagcctgcggagcctgtggggcaggtgttcattgtactcatggcttcaatcgcactggtttcctcatatgtgcct

SEQ ID NO: 454414 - DNA, 75 bp, Homo sapiens
gcgccctgctccctctcagcacctgggcggacggcatcgttggcttcacagtatgactgatgatcctccaacaac

SEQ ID NO: 454415 - DNA, 95 bp, Homo sapiens
cgcgcggaggggaaatggctgccgaaaacaagccggaagggaccatatgatgtggtggttctaccaggaggtaatctgggcgcacagaatttatc

SEQ ID NO: 454416 - DNA, 98 bp, Homo sapiens
gaggaggccctggagctgatcaacggggtaggagattttgccgtgagtgacatcagtttcctcccagacccttgcgctcttcctgaacaacaaaagaa

SEQ ID NO: 454417 - DNA, 87 bp, Homo sapiens
cagggtcttcatgcactctgtcaagctgagcttttctgggagaagaggctacaaggacttagtgcatcagatgtaacagaacaaatt

SEQ ID NO: 454418 - DNA, 51 bp, Homo sapiens
atttgctctgagcatcagtcacggccccggggcccagcgacctgacagtta

SEQ ID NO: 454419 - DNA, 50 bp, Homo sapiens
gccttggccaaccagtgcctctcccaagcccacggccgccaatcccactc

SEQ ID NO: 454420 - DNA, 100 bp, Homo sapiens
gagcggtccgcgagccaccgaggcccaggtttgtctacagattttgagcgttcgaagttgacccctgactaagtatactttgctgctccctcagcctttg

SEQ ID NO: 454421 - DNA, 100 bp, Homo sapiens
cgctccgagtggaggcgactgggggctgaagagcgcgccgccctctcgtcccactttccagggcataattggaatatcatttggagaaagtgtcatggaa

SEQ ID NO: 454422 - DNA, 83 bp, Homo sapiens
ccaacgtgggctcgctcttcgacgacatgatatcatcaagttgaatcgaaaggaagggaagaagcagaattttccaagactaa

SEQ ID NO: 454423 - DNA, 74 bp, Homo sapiens
taagattgtcttggaaatactaagttgggcatcaagcatgatggaaccatgtgtgatacctgccgccagcaacc

SEQ ID NO: 454424 - DNA, 100 bp, Homo sapiens
catgacggtcgcacccagcgacaggccgctgcaattgccagtggagcttctggtgatgaaggccctttcggtggggctggtgaaaggcagtatagacgag

SEQ ID NO: 454425 - DNA, 109 bp, Homo sapiens
catcgttcgtctggtggccttttgtccctttgcctcatcccaggttgccttggaaaatgccaacgccgtgtctgaaggcggggagacaaccccttccccaagaatgctg

SEQ ID NO: 454426 - DNA, 100 bp, Homo sapiens
ttttgacatagatgatgcaaagtctagaacagatgacaaagttattcgatttaagagagcaattggatattattcagcgactagtaagcctatgtcattt

SEQ ID NO: 454427 - DNA, 100 bp, Homo sapiens
cccactagcctaaagccgggcggactgcgggggtcctgatgacaacttaattgaaggtggaggaacaaaatttgtctgcaaacctggagccagaaacatt

SEQ ID NO: 454428 - DNA, 118 bp, Homo sapiens
gccgatcatgccctgtggtgcagtcgagccagcacctgtttctggacctgcctaagttcctctgtgacgagggtgcaggtatctctggggactacatcgatcgcgtggacgagccctt

SEQ ID NO: 454429 - DNA, 100 bp, Homo sapiens
tgagtagccggtaacaaacgagggttcccgggattggaccgacgcagccatggtggacccccaaaagtacaagggcatatttaacggattctcagttaca

SEQ ID NO: 454430 - DNA, 100 bp, Homo sapiens
aatgacagagactacatggagaggaacaagatcgacgtcaatgaggtcatttatagcaaatacactgacctggttccaaaggaggttatgaatgcagatg

SEQ ID NO: 454431 - DNA, 100 bp, Homo sapiens
gagaagaccagctatgtcctgactgacaggctgggggaaagagacccccgaagggaaagcaggcaggatgggagagtcgccgatagaaccacctcttccc

SEQ ID NO: 454432 - DNA, 75 bp, Homo sapiens
cggctcccaccccggcccgaccccgacccggcccggtcaggccccatactcagtaatctatgccagcaattatga

SEQ ID NO: 454433 - DNA, 75 bp, Homo sapiens
agcagaatgtgatttgcttgaagatatgaggagcaatgggtaaccaaatgagtgttccccaaagagttgaagacc

SEQ ID NO: 454434 - DNA, 87 bp, Homo sapiens
cagctgaacgagtgcaagcagctgtccgagtcccaggtcaagagcctctgcgagaaggtgacgggggaagtgacagatccatcagga

SEQ ID NO: 454435 - DNA, 98 bp, Homo sapiens
gccctgcagatcctgccctacacactggcctccctctaccaccgggagaagcagagaccgtccaggctggacttgaactccttcctcggctgaagtga

SEQ ID NO: 454436 - DNA, 140 bp, Homo sapiens
ggcgaactggaaggccacgcctcctcccgcctgccccctcagccctgtggctgggggcagagctcagttcagacttggttccttcaacctagagaaagttgaaaacccagctgaagtcattagagaacttatttgttatt

SEQ ID NO: 454437 - DNA, 75 bp, Homo sapiens
ggactctcggctcaaggcgtcaacatgaacagacttcctgctccgacagttagttaatatgtgcatcaacccaga

SEQ ID NO: 454438 - DNA, 90 bp, Homo sapiens
gcgcgcctgatgggtcgaggcggacgcgcggctgcgtcaggaagtttggggctcaagggtcacgacttactggagcaggatggggaggct

SEQ ID NO: 454439 - DNA, 100 bp, Homo sapiens
ctgcaggtttaatagatgacaatgatctctaccgatgggaagtccttattattggccctccagatacactttagacgtcattatggagcagtaacttgtg

SEQ ID NO: 454440 - DNA, 100 bp, Homo sapiens
aactcctgcacctgtatatagggccaagtcaattctggagacctgggtgtgggtcaagcaaccagttggtgcttcccgtgctgctgttgatgctggcttt

SEQ ID NO: 454441 - DNA, 131 bp, Homo sapiens
gtgaagacccagtggatcatgttggaaatgcaactgcatcccaggaacttggttatggttgtctcaagggatctataaagggcactgcttccggatcaatcacttcccagaggacaatgactacgaccacg

SEQ ID NO: 454442 - DNA, 90 bp, Homo sapiens
tggactaatgggagttgcttttggaatgaatttggaatcttcccttgaagagcttcaagaatccagaggctttaggaagaagataaaacg

SEQ ID NO: 454443 - DNA, 96 bp, Homo sapiens
ctatattgcggacattgaggtggacggcaagcaggtgttcctgcccaaataccgaggggacactggaggtgctagcagtgaggacagcctgatgac

SEQ ID NO: 454444 - DNA, 100 bp, Homo sapiens
cattggtctaaacttgatccaaagacaatgaaggaccctgatgctcccataagacagaaaatgccccttgatgatctggatagagaagatgaagttagat

SEQ ID NO: 454445 - DNA, 76 bp, Homo sapiens
cagcaatgaccttccctcgggaattccacctctgcgtttttccctccagctgcaggacaagttcgagcatcttaaa

SEQ ID NO: 454446 - DNA, 90 bp, Homo sapiens
acgtcaccgaggagaagtaccaggaggcgttggccaaggaagacgtgaacgatcaagagagagggaccatagtagatcacgagaaaagag

SEQ ID NO: 454447 - DNA, 90 bp, Homo sapiens
acttcttccgagttacaggcataccatcactgtcaggatattaatgcacacgcctgtgttactggtaaacccatcagccaagggggaatc

SEQ ID NO: 454448 - DNA, 82 bp, Homo sapiens
ccttcggcagtccacccaccgccgccgcctcccagtactgtaagattgatgttaaaggcatggtgttcaccccacttcatca

SEQ ID NO: 454449 - DNA, 75 bp, Homo sapiens
ggaagcttgtggcgctgaaaacgaacggcattgaagttgatatcgatgtggagcacggagggaaaagaagccgcc

SEQ ID NO: 454450 - DNA, 99 bp, Homo sapiens
cttcagcaacaccagcgagctggccaaggacttcattcgccggctgctcgtcaaagatcccaaactcgctctccgtctccagcaatgacgccagtccac

SEQ ID NO: 454451 - DNA, 83 bp, Homo sapiens
cttcccagaatgccgagatgataggtttagtgtttcaaatgacttaaagtatgatgctgaaagagatttaagggatattggag

SEQ ID NO: 454452 - DNA, 73 bp, Homo sapiens
gaaagctgtgaaagttctcaaggacttaaccaccaccatgtcgagcaaaagaacaaagaccaagaccaagaag

SEQ ID NO: 454453 - DNA, 75 bp, Homo sapiens
gatggaaaacttgtcactgtcgattgaggatgtgcagccaagattttaggtgatgggcaagtcagaaagtcagat

SEQ ID NO: 454454 - DNA, 95 bp, Homo sapiens
gtgaaggagagaacagaggaacctatggagacagagcccaaaggtggttatcactaggctaaaactggacaaagaccgcaaaaagatcctcgaac

SEQ ID NO: 454455 - DNA, 100 bp, Homo sapiens
tatcagatcaaccaccaaagtgggaaacattgaaatcaaggttattgttgtgggtaatccagccaataccaactgcctgactgcttccaagtcagctcca

SEQ ID NO: 454456 - DNA, 107 bp, Homo sapiens
tagcatccggtagggaaatggtcgtgctttcggtccccgccgaagtcaccgtgatcctgttagatatcgaagggtgttttgaatgctgtatcaaatgcctggggggc

SEQ ID NO: 454457 - DNA, 108 bp, Homo sapiens
ttttgcagatcttcaacaagaggacccaggagaaattcgccctcaaagttaacacagaaatctgcctcctgggccatgccgcttctaaggcctgtttcttctcatgag

SEQ ID NO: 454458 - DNA, 75 bp, Homo sapiens
ctcctctgaggcctgtgttggcctggagcctccccaggatgtgatcaacaaatacaagcgcagacgatttcagaa

SEQ ID NO: 454459 - DNA, 97 bp, Homo sapiens
tcttcttttggacccttattttatgccataatggctcaagtggtcctgtcgaagtatttatcactgagactccgagtcagcccaactcccaccccat

SEQ ID NO: 454460 - DNA, 88 bp, Homo sapiens
atttccctctctgttgaagcaaaggccggggcagacctcctaatatgaggccccaggattcctggcgaggtcctcctccccttttcca

SEQ ID NO: 454461 - DNA, 100 bp, Homo sapiens
aaagcaactaggaaaaaagagaagaaagaaagattgaaaccagcaggaaggaagatgtctctcagaaacaaaggcgatgacaacctatgcaacactcccc

SEQ ID NO: 454462 - DNA, 88 bp, Homo sapiens
tcagcctcagcccccatggctgcaggcatcattgcgctggccctggaagccaagtataagcagtttagccaaattttgaagaacattg

SEQ ID NO: 454463 - DNA, 100 bp, Homo sapiens
tctgggtaaaagtagagaaggatcaaggacggatgatgaagtagtacagaggtagttggcaaaaaaggagaaagccactaaggtacaaaagacactggac

SEQ ID NO: 454464 - DNA, 93 bp, Homo sapiens
ttggaggaaaatctctgactacatatggactcagtgcatatagtggaaaggcactggtgaggtggattgatgatgaatcttctggcacacctg

SEQ ID NO: 454465 - DNA, 105 bp, Homo sapiens
gccggcaaggggacccagtgcgcccgcatcgtcgagtaagactttgaccccgacgcaggcttcagtgattgccgcggatcagaagcctgagcactttggctcgag

SEQ ID NO: 454466 - DNA, 100 bp, Homo sapiens
taccgcctacgtccatggaagtgaaagtcctctttttctttgtaccacttactgaggtatctcaggagattacatttcagcttgaaaaagggtcggtgga

SEQ ID NO: 454467 - DNA, 90 bp, Homo sapiens
gccgccgccaccacgccggggactgttgacagccagaacctttaagcgtaacagagtcacctgtgtcggagatgtatgcagtgtgacgcc

SEQ ID NO: 454468 - DNA, 111 bp, Homo sapiens
ttgcactgctgcagtccaggctgaagacagagggctctgatctgtgcgacagaatctgactgcagccatgagcagcaatgagtgcttcaagtgtggacgatctggccactg

SEQ ID NO: 454469 - DNA, 98 bp, Homo sapiens
ctggagaggatgacccttttgattctgacttttcttgtccagtcaaacttcatagaggccgagacgcatccagagctttcgtgaccggggactgttct

SEQ ID NO: 454470 - DNA, 76 bp, Homo sapiens
gcctggggctcggggactggctagatctggacgtccagatcggtgacatcgtcacagtgggcgagtgccggcctct

SEQ ID NO: 454471 - DNA, 82 bp, Homo sapiens
ttcggaggctggtgtccagggtctcagcgcgggggacgactcagttcaaggagcagggacaagttacaggaatgttctccaa

SEQ ID NO: 454472 - DNA, 82 bp, Homo sapiens
ccggcacctcaaccagatgaggaagtacaactttgaggtatatttgcttacttaaactaccatgttcctcgaacgagacgag

SEQ ID NO: 454473 - DNA, 50 bp, Homo sapiens
ggagacttcagaaacgagaactggctggatctccagaactgttctctgga

SEQ ID NO: 454474 - DNA, 84 bp, Homo sapiens
cattggatttaaaagacagtcctcgtcagcactgactttcagctatggaatcgaccatgccagatgatgtccaaggcactgttg

SEQ ID NO: 454475 - DNA, 83 bp, Homo sapiens
ccattgccaatgcttttcgacgaattctgctagctgagcccaagctgacgcctcaggagaagctgaaactgaggatgcagaag

SEQ ID NO: 454476 - DNA, 100 bp, Homo sapiens
taggcgtcagcgggggaacagctagcggcaaggtcgtgatatcattgggcttgcagaaactggctctggaaagacaggcgcctttgctttgcccattcta

SEQ ID NO: 454477 - DNA, 99 bp, Homo sapiens
tgtcaggcagcttatgatgccaatttgtcccatgctgttctgtaggaagttatacaatcaattttcgggtaatgagttgtgattcctttcccatccgac

SEQ ID NO: 454478 - DNA, 100 bp, Homo sapiens
gagacatcggcctctgcaggcttgccgaagaagggagtttctgcaggactgtaaactggattcctggaacctttgatattcctggctgtgtatagtgcct

SEQ ID NO: 454479 - DNA, 75 bp, Homo sapiens
gatcttggacttatttcagcttaataaggttgtagaaggaacgcctcttattgatggaagaagactcaagtatag

SEQ ID NO: 454480 - DNA, 75 bp, Homo sapiens
gattatcgtaggaggagtcctccacctcgtcgcaggaactttgctgccacaatacctcggcccttctcagttcgc

SEQ ID NO: 454481 - DNA, 83 bp, Homo sapiens
ctttgggcggggcggagccgagagccacactttcaagtaaaccaggttgtgcagcctgactctgaagaagctggtggtcttca

SEQ ID NO: 454482 - DNA, 100 bp, Homo sapiens
atgtggatgttgtagagattctgccttacctgccctgcctcacagcaagagaccaggtctataacttgacccaggagttcttccggcacgataaaccagt

SEQ ID NO: 454483 - DNA, 98 bp, Homo sapiens
tccccgcaagatggacggtttcgccggcagtctcggtctagatgttgatggaatatatcgagttagtggcaatctggcaacaatacagaagttaagat

SEQ ID NO: 454484 - DNA, 83 bp, Homo sapiens
tggatttaaaagacagtcctcgtcagcactgactttcagctatggaatcggtgcagagcattgtagaccaaggagccatggat

SEQ ID NO: 454485 - DNA, 101 bp, Homo sapiens
gtggactgcagcctcggcggtcagcaggtagctgcaatcaacccaaatcaccctcttgctcagatgcctttgcctccgtcgatgaaaaactgcatccagct

SEQ ID NO: 454486 - DNA, 83 bp, Homo sapiens
cgggcggcgcggcccagctcgttccagggctcttccgtgggcggcggcttcgcgggcttggagttcgcgcggccgcaggagtc

SEQ ID NO: 454487 - DNA, 75 bp, Homo sapiens
gcaacatctttcctcaccccaaggctgcagtgcagaaggcaattcctatgtacaaaattgccaccaaaaacgatg

SEQ ID NO: 454488 - DNA, 100 bp, Homo sapiens
attgggcaaagttgctgccaaattatctgagactggataagatgaccttcagtgtgctgctcaaaaacagcttcctgcctgacacagctcacttcaagaa

SEQ ID NO: 454489 - DNA, 100 bp, Homo sapiens
tgcagttctaaaaccatggcccatatcctgcagctccaccaaagaaaccgcctcgccctggagctcccggtcatctgggaagccttgccagcctcagcag

SEQ ID NO: 454490 - DNA, 51 bp, Homo sapiens
cacagctgtcggcttcaaacagacgctgtgaagagggataccaaggaaagt

SEQ ID NO: 454491 - DNA, 82 bp, Homo sapiens
tgtttggattgaagccgcctctgtattacttaccagaaactcaggagtggctggaggagacggactcggaagaggacagtga

SEQ ID NO: 454492 - DNA, 89 bp, Homo sapiens
cacctctttaataaccatgcttaatgcaaaagaccttctacaggacctgaaggaggaaataatgctggccatacagttgttgtggattc

SEQ ID NO: 454493 - DNA, 78 bp, Homo sapiens
atggatgttcttcttcgagtatttgtagaaggctgtgagccgtgagctttgaggcggtgggatgtgtcagcagaatgt

SEQ ID NO: 454494 - DNA, 100 bp, Homo sapiens
gagagtgagcacgaccaagcgatggctgcttacttcacagcagcacagctgatgaaagggaatgtgccataccgaatccgtgtgcggctgtccagaaaac

SEQ ID NO: 454495 - DNA, 48 bp, Homo sapiens
gtgaggcaacatcggataccactgggcgacattgactacagcaccgtg

SEQ ID NO: 454496 - DNA, 82 bp, Homo sapiens
aaaataccacgacaaaaccaccctactgatttgaataggatgcacagacaaaatatagatgcctaccataacccagatgcaa

SEQ ID NO: 454497 - DNA, 75 bp, Homo sapiens
ttccactcggctcctgtcgtccgttctctcaggctcccgttcagtcaggatggctaaaggtgaccccaagaaacc

SEQ ID NO: 454498 - DNA, 75 bp, Homo sapiens
catgattataactggtccttcaaactttgggatcatgctactatgacagaagtgaaatctctaaattttaatatg

SEQ ID NO: 454499 - DNA, 100 bp, Homo sapiens
actacagcctgagctgtactgagctcgagggatcttcccgtctccgcctcctaagcagctgggactacagggatggagctagccaagggctgggctcctg

SEQ ID NO: 454500 - DNA, 100 bp, Homo sapiens
ggcgcgaggacagcgcgtgcccgcgaggagccgccgcgcgcccgcgccctccgcgcgacgccaggaacttgctactaccagcaccatgccctaccaatat

SEQ ID NO: 454501 - DNA, 98 bp, Homo sapiens
gcctcatttggtgatgaatgtagccaccacgcctacctgcatgaccagttctggagctactggaatagtcggccgtatactaacaaggtaattacttt

SEQ ID NO: 454502 - DNA, 90 bp, Homo sapiens
aattgaacgattttgggatttcattgaccagctgagcatcaatacttttggggagaagcctttcaactgcagctgggatggctgtgataa

SEQ ID NO: 454503 - DNA, 100 bp, Homo sapiens
caggaagcgagggatggaggttgtgcagagaccgaggcaaaggcccttttgaaggaacggcagaagaaagacaatcacaacctaagtaagccagagagcg

SEQ ID NO: 454504 - DNA, 90 bp, Homo sapiens
gtcgaaaccgcctcatgatcacacatcatgcggtcattctctttgtccttgtgccagtcgcacaggtggaagcagggaaaggcctggaga

SEQ ID NO: 454505 - DNA, 101 bp, Homo sapiens
gcgatccgctggcgctagtctgaccctccgccaggcaaaaggaagactgaagaattgaaccgggaggtcgctggccacacggagcagctccagatgagcag

SEQ ID NO: 454506 - DNA, 100 bp, Homo sapiens
cttatgagctcggttttcttatgcttataagagtggaacagatcagaccaaacattgtctggcttgcactgtaaaactagttagctgaagacgacttctc

SEQ ID NO: 454507 - DNA, 75 bp, Homo sapiens
ctggagcaattgaagctgactactaaggagaataagctgtcaaagctcgaaaaacagcagcagaggaaagaaaag

SEQ ID NO: 454508 - DNA, 50 bp, Homo sapiens
tggaagcccaggcccgcttcgcagagcaaacgaggcccctgagagctcca

SEQ ID NO: 454509 - DNA, 51 bp, Homo sapiens
ctacgacccggagcacccgacccctgatttgtcctgaagaattatggagag

SEQ ID NO: 454510 - DNA, 116 bp, Homo sapiens
ttcccgggaggggggagcggcgttggaggccaccgtttccaggccagaagcggactcctagaagaggggagcagcaaggatggaatgacagccgtgggccggaggggatgctcgaa

SEQ ID NO: 454511 - DNA, 75 bp, Homo sapiens
gatgaagctcgcaaatggtccagcaaggcttatgcatctggatgtgacattgtaatactgggaagcgattttgaa

SEQ ID NO: 454512 - DNA, 82 bp, Homo sapiens
ccagaccatggccgcggccttcggtcttgaggaccggcccagctcaggctcctggggcagcggcgaccagagcagctcctcc

SEQ ID NO: 454513 - DNA, 80 bp, Homo sapiens
tcaacataccattaggatcttaccgcttctgggctggctggctgagaaactacctactcttcgttccacccctacagacc

SEQ ID NO: 454514 - DNA, 100 bp, Homo sapiens
actggaggcattggccagccatttattgtaactgtgcaagatggacagcaagcatttgatactggagaaagtttcagaagatgaagaacttcggaagaga

SEQ ID NO: 454515 - DNA, 101 bp, Homo sapiens
aaccatccagatgcgattttagtggaggactacagagccggtgatatgatctgtcctgaatgtggcttggttgtagtctgaagttgacaagcagcagcata

SEQ ID NO: 454516 - DNA, 74 bp, Homo sapiens
atagtgaaaaataccagaagcgagaacatattaaactggctctgctgccatgaaggtgaagattaagtgctgga

SEQ ID NO: 454517 - DNA, 88 bp, Homo sapiens
ctcaggagtcatttctgttccgcacaggcctgctgaactgggtgctttatataggctttaccgatttgttacaactcaagcaagggcc

SEQ ID NO: 454518 - DNA, 98 bp, Homo sapiens
gcgctggccttctggacatatcagacctctattgctgagtgcttgacataccttgataatggtgttgtgtttgtcgggtctcgcctgggtgactccca

SEQ ID NO: 454519 - DNA, 90 bp, Homo sapiens
cagaccctgaaacctggcaaagtcgatgtgaagacagacttaagtgggcagaccaacatccacctcagcaaaaacttcttcctgacgaat

SEQ ID NO: 454520 - DNA, 90 bp, Homo sapiens
ctaagactcagcactgttgcgggcggaagatccatccaaaagctatgtgaaattacgagactttgtgcttgtgaagctttgtcaagattt

SEQ ID NO: 454521 - DNA, 51 bp, Homo sapiens
attcgcagtggtcgcttcttctccttgccttatacaggatgctgtgttctt

SEQ ID NO: 454522 - DNA, 98 bp, Homo sapiens
ccagaatgttgagattgcccgagaagtgaccccagcaaaagaaaaatattgctgtacctaaattcaagccatggttgcttgttatccgggcaatggaa

SEQ ID NO: 454523 - DNA, 75 bp, Homo sapiens
tttagagccaaactgtccaaggctttggcactgcagaagaaagatcagcaactggagcctaaaaaaagtaccagc

SEQ ID NO: 454524 - DNA, 83 bp, Homo sapiens
cgagaagcctgaaaagtcgcagcgagctggagccgccggaggagtgagctgagtcgacagaaacttcatacccaagagctgct

SEQ ID NO: 454525 - DNA, 90 bp, Homo sapiens
ctgggttctattttccctcctcaaactgactttgcagccacggagagctcaatgtcaattgctgcaagcttagtgagtgaagatacaaag

SEQ ID NO: 454526 - DNA, 100 bp, Homo sapiens
gctttgaaagaaatgatgatattggacatctctggaaatttcaagcgggtcgttaaccaagctggcctactattcaacggtacagcacaaagtcgccaag

SEQ ID NO: 454527 - DNA, 100 bp, Homo sapiens
tggatgtcatttggaaaaacactagagacagacggctggcagccaaacatcatgtcaatggcaacagaacagtcgaacctttcccagagggaacacagat

SEQ ID NO: 454528 - DNA, 75 bp, Homo sapiens
agagctgcagctcctcctgtgcgggtgaaatgacaatggatgctctgttggctcgattgaaacttctgaatccag

SEQ ID NO: 454529 - DNA, 90 bp, Homo sapiens
tgtatgctatgaaggtgctgaagaaggcaacgctgaaagctagatacactgtcagatcctttggcatccggagaaatgaaaagattgctg

SEQ ID NO: 454530 - DNA, 90 bp, Homo sapiens
cagcgagctcctgggcatcccgctggaccagtcggttcaggccctgatcaaagacttccaggggaccccgactttcacctacaaagcggc

SEQ ID NO: 454531 - DNA, 100 bp, Homo sapiens
attagagtgaatgtagttgcaccagatcatatctgaagatattagtgagctacaaaagaatcaaactacatctgtagccaaaattgcacaatacaagagg

SEQ ID NO: 454532 - DNA, 83 bp, Homo sapiens
gcagaggggacagaggcaccaaggacctccaagacagacaatgcagatcttcgtgaagactctgactggtaagaccatcaccc

SEQ ID NO: 454533 - DNA, 83 bp, Homo sapiens
cgaagatggtcgaggtgatgagaaacggaaaaataaaggcacttcgattgagaggatccagaatccagatctctggaatagct

SEQ ID NO: 454534 - DNA, 75 bp, Homo sapiens
gagctgtagagaggaccccggtacatctgaaagccgggaaatgggaaatcctcattgacgattcaatttgttgaa

SEQ ID NO: 454535 - DNA, 75 bp, Homo sapiens
ataagcactgtggctttgcaaaccacatacattattatcacttacagcgcaccatcctgggaagtgcatgtctca

SEQ ID NO: 454536 - DNA, 82 bp, Homo sapiens
ctctgggtctccaggcccgcgaccgtccgccagtcgtcccgagctgctctgttaaaagcgaaaatgaaacaattgcctgcgg

SEQ ID NO: 454537 - DNA, 50 bp, Homo sapiens
cagtgcgtcaatcagagcgtcctgtgcgattcatttggattcaaggttgg

SEQ ID NO: 454538 - DNA, 75 bp, Homo sapiens
cccacgcccagcagcagcagcaacagattttaccaaatgttgcaagaactctggagttcttatggtagtaaaatg

SEQ ID NO: 454539 - DNA, 82 bp, Homo sapiens
gctaatcaagcaattaatcccaagttgcttcagttggtcgaagacagaggttcaggtcacggtctagatcacattctcgatc

SEQ ID NO: 454540 - DNA, 100 bp, Homo sapiens
gagcctgggaggccggccggtgccagcacctttcggcttctgagacggcggcagcagcggcattcaggtacggttcctggagcagcagaacaagatgctg

SEQ ID NO: 454541 - DNA, 75 bp, Homo sapiens
caagcgaggcggaccctgaagcggaccccgaggaagttggactaaatgctcttccttcagaggattatccggggc

SEQ ID NO: 454542 - DNA, 50 bp, Homo sapiens
ctgtcagctgtgctccgagcgcctggttcaggacctcaaggggctcggct

SEQ ID NO: 454543 - DNA, 80 bp, Homo sapiens
gcgcatcgtctgcaagaccgcgaggcgagacctcttacacatcaccttcactttgggatatggaatttgataagcagtta

SEQ ID NO: 454544 - DNA, 80 bp, Homo sapiens
ttgcacattatgaaaagcgtcaagaagaggaggaagccatgcgtagggagttaaagttcctcgtaattttcgcttgttgg

SEQ ID NO: 454545 - DNA, 100 bp, Homo sapiens
ccaatcctgacatagtttgcaacaagcacatcaaatttagttgcttttttcattatgctgtggataatcttgaagaaaaagtcagcactttttgaagtgt

SEQ ID NO: 454546 - DNA, 75 bp, Homo sapiens
ggaaactgctgcctggacaaatcgtgttctgggccaaagcatcacaggtctctaattaacagaagatggcaaagc

SEQ ID NO: 454547 - DNA, 113 bp, Homo sapiens
cccttcacctgcagaagcgtgtcgttctgcaccagcgccttgatcgagtacttgagagagcgcctgctcgctgtgcccccgggttatgacgacccccaataaaggaaacaagg

SEQ ID NO: 454548 - DNA, 109 bp, Homo sapiens
tgaccgtcagcaccaggagcagcgaggcactcatcctgcacgccggcgagtgccagcgacctgcctagagctggaacgttacctccagagcgagccctgctatgtttca

SEQ ID NO: 454549 - DNA, 123 bp, Homo sapiens
attgtgagtttcctgaggccttccctagccatgcttcctgtatagtctgtggaacggaaaacaccagtgggacttagatacctgcaagggcctcttgccccggtatgaacatgctagcttcat

SEQ ID NO: 454550 - DNA, 98 bp, Homo sapiens
aaagatgctctgcggtttttgggctgtgttgacatcaaggatctaccagggatttccacaagatcaaattcgattgtggcccatgcaagcaaggagta

SEQ ID NO: 454551 - DNA, 82 bp, Homo sapiens
ctcaggcttagtggcatgttggactgttccctgatgtgggtggaggttatttcttgccacgactccaaggaaaacttggtta

SEQ ID NO: 454552 - DNA, 100 bp, Homo sapiens
gtacgtgtgttggcctcattcttctcctggaaatgtctctgtaccctgcccttcatacttaccttggtggagtgaagcatgcagcagaactgattaaaac

SEQ ID NO: 454553 - DNA, 80 bp, Homo sapiens
caagttacccaagggcaagcacagtgtcaaagtaatctcaggggcgatataatcaatgaggtggtcctaaagttgctcaa

SEQ ID NO: 454554 - DNA, 98 bp, Homo sapiens
cttatcgaacagagccgggagttcaagaagaacactccagaggttgttgaggcatcttcattaagctggagtaccaggataaaaggcttcattgcgtg

SEQ ID NO: 454555 - DNA, 50 bp, Homo sapiens
atattcctcatgacattgctgtctgatccaaacgatcaaagatgttgctg

SEQ ID NO: 454556 - DNA, 82 bp, Homo sapiens
agaaaagtgtgctggggcggaatttcaagatggatcggagccaaatctcctcagccacctgttgaagaagaagatgaacact

SEQ ID NO: 454557 - DNA, 74 bp, Homo sapiens
gtccaagatcttcccccgtttcacaattagaaggcggctgtctagagggggatatgagactttctactcggaat

SEQ ID NO: 454558 - DNA, 75 bp, Homo sapiens
cctcttgaagccccagaatctcttatgttaaaggccaaacgtaccaagaaagtcgggatcgtcggtaaatacggg

SEQ ID NO: 454559 - DNA, 100 bp, Homo sapiens
gagaagacgaggatgatgcggaaattaaccccaaggttccaattgtggacaagataaggaccattgctcaggctgtctatggagccaaagatattgaact

SEQ ID NO: 454560 - DNA, 75 bp, Homo sapiens
catcggagttcacctgggctgcacctcagcctgtgtggccgtctataagaggctgggaggcggcagaatgcagcc

SEQ ID NO: 454561 - DNA, 100 bp, Homo sapiens
atgagaggagaagagcccagcacaacgaagggtatcaaaaagccattcacagaggtcatccgagccaacatcggggacgcccaggctatggggcagcagc

SEQ ID NO: 454562 - DNA, 100 bp, Homo sapiens
ggaacgggtcggctacagggagggacccaccgtagagactaagtcagaaattggctttggaaaaatggaaacctacatcaaattggaaaagcttggagag

SEQ ID NO: 454563 - DNA, 87 bp, Homo sapiens
tgaacactatttcggattggtcaatgtattggtggcatggatggaacacaacagcagatttttaaaatgttagcagaggtactagga

SEQ ID NO: 454564 - DNA, 75 bp, Homo sapiens
cttgggacccttgcatggtgtttcaaagggtggtgaagaactaagttccacagcctcctagattagaacctcagg

SEQ ID NO: 454565 - DNA, 100 bp, Homo sapiens
ggtgacccaaagatgatgaaaaatatgttcctgcccacaaggagttagcgacctactgggggtatttgaagtataccatacaactgttttgaaaatccag

SEQ ID NO: 454566 - DNA, 110 bp, Homo sapiens
gaatggctccagagcatgtcactgcacagaagatgaagaaagcctattatctgacccagaaaattcctgatcaggctaaaacctttgaagaggaatttattatatcctac

SEQ ID NO: 454567 - DNA, 82 bp, Homo sapiens
cggacagccgcgcgctgagggtctcggggcgggcgccgcgggacctctccgggccatggatagcctgggctggaagctcttc

SEQ ID NO: 454568 - DNA, 97 bp, Homo sapiens
tgatggtgatggagattttgatgtggatgatgccaaagttttattaggcgacgttgtggacgtttaccagcgggagttcctggcgctgcgcgatcgg

SEQ ID NO: 454569 - DNA, 75 bp, Homo sapiens
gaagccagagccacacacaccatcatggtcctggaaaattgcctaagaattatgacccaaaagttaccccagatc

SEQ ID NO: 454570 - DNA, 100 bp, Homo sapiens
gaagaaggcttggaacctgtctgctttgaaaggactgatgacatcggagggctctggaggttccagggtttagatgtagattctctggtcattgagcata

SEQ ID NO: 454571 - DNA, 51 bp, Homo sapiens
cagacaccagccccccaccatgatgacgtccggttgtttgccttcgtgcgc

SEQ ID NO: 454572 - DNA, 100 bp, Homo sapiens
gccaggacacctggaagccgggaaatggagtctgtgaccttcgaggatgtggctgtgacatttacccaggaggagtgggggcagttggacgtgacccaga

SEQ ID NO: 454573 - DNA, 101 bp, Homo sapiens
gaaaaatctgttaagctatatagaagagaatcttggagtcatcaatttgatctttcagataatttcatctctcaggttcgttccaccagtcataaaccaga

SEQ ID NO: 454574 - DNA, 100 bp, Homo sapiens
caggggtgcttatgtttgccaagacagctgcagtctctgagagaattcacgagcaggttcgggaccggcagagctcttcagaaaccaggctgctttcagg

SEQ ID NO: 454575 - DNA, 82 bp, Homo sapiens
cctgcctttccttccccctcggaaaatggttcccactgccgggcgaggatggtactggggaagtatgactgttaatgaagcc

SEQ ID NO: 454576 - DNA, 95 bp, Homo sapiens
ctcacgctgggagctgtagaccggagctgttcctattgggccatcttggctccaccaccctggctccttcctcagagaagcttcctgttatgtac

SEQ ID NO: 454577 - DNA, 74 bp, Homo sapiens
gaaagagtcaacagcagtggcaacagctacaagtgtattcatcagagtttggaggacaataatagatgtcccaa

SEQ ID NO: 454578 - DNA, 73 bp, Homo sapiens
cacattgatcatccagagtctacaacgtggtgatatacagccatggactacagtggtagtggaggccgaagcg

SEQ ID NO: 454579 - DNA, 51 bp, Homo sapiens
attccaagtaactcttatttgtacaaaattggacagctgtacatgatcagc

SEQ ID NO: 454580 - DNA, 115 bp, Homo sapiens
ccggttgctaagacttggcgaagcgctgcgctcgcgcccggatccctcaggtcctctccacccggatcctggccatgaaggcctcgctctgcaagctgtcgccctgcacggtgac

SEQ ID NO: 454581 - DNA, 82 bp, Homo sapiens
gaagcagctttcttgaatgtctacaaaagattgattgacgtcccagggactggtgattgcagctggaagtgcccatgaccga

SEQ ID NO: 454582 - DNA, 90 bp, Homo sapiens
cgcaagctgctggagggtgaggagtgcaggctgctagaaattgtaagctacaaaatcattggtgttcatcaagaagatgaactattagaa

SEQ ID NO: 454583 - DNA, 71 bp, Homo sapiens
cgagtgggagcaccaggatctcgggctcggaacgagactgcacgagtcacaccggagcctggggcaagaca

SEQ ID NO: 454584 - DNA, 100 bp, Homo sapiens
tccggggacccttccgtatctgcctaggcattttgctgtctcctcctaatacggacaagaggaccctgccttggtgtgagagtgagggaagaggaagctg

SEQ ID NO: 454585 - DNA, 124 bp, Homo sapiens
ctagggtccaggacagcaggaccaagccagcagaaacagcctgagcccaccgcagactgacaatgccgtcttctgtctcgtggggcatcctcctgctggcaggcctgtgctgcctggtccctgt

SEQ ID NO: 454586 - DNA, 100 bp, Homo sapiens
cagagccgcccgggagcagggagggctccgctagcccggggggccctccccgcggggcagatggtcttctttgatgtgaggattggagacaaagatgttg

SEQ ID NO: 454587 - DNA, 75 bp, Homo sapiens
tctggatttccaaggaagaatttcctctgaagcaccgattttgcaagaacgaggctcaaggatgtgagggacaca

SEQ ID NO: 454588 - DNA, 83 bp, Homo sapiens
atttgatgcataaaggcagctttgaaacaggacaagtggtagaaaacttaaaagcacaggccctttgttcctggactgcaaag

SEQ ID NO: 454589 - DNA, 100 bp, Homo sapiens
aaacgatccgctcccaaaacggtggataattactgtaccttcctcatggaaaaagttttatttaaagtgttatttctcattgaatactatcaaaaaggaa

SEQ ID NO: 454590 - DNA, 75 bp, Homo sapiens
gaagagtatgcctgggtcccgccgggtctgaagcctgaacagaacaccaatcagggtcttcaggcctggaagatt

SEQ ID NO: 454591 - DNA, 100 bp, Homo sapiens
tttggatgtggaggggaatagactccatctatccatatgaggccccttcacagatgtagtcactacaaatcttaaattgcgaaatccatcggatagaaaa

SEQ ID NO: 454592 - DNA, 104 bp, Homo sapiens
cactggaatccattctggcacctcaacggctgatgatttctgcaattctgtggtgttcttggtcacacatttatggagtttctgaagggcagtggagattactg

SEQ ID NO: 454593 - DNA, 51 bp, Homo sapiens
gtgttcttgactccgctgctcgccatggaatgtatcctgtcaggtataatg

SEQ ID NO: 454594 - DNA, 88 bp, Homo sapiens
gctacggacttaaaatctccgcaccgcaccctccacctcaggaacttgctactaccagcaccatgccctaccaatatccagcactgac

SEQ ID NO: 454595 - DNA, 78 bp, Homo sapiens
agaaataccagtccccagtgagggtgtacaaatacccctttgaattaattatggctataccatgtttgtgtggaagtg

SEQ ID NO: 454596 - DNA, 100 bp, Homo sapiens
ctcccaagtagctgggagtacagatgaggatgacgatgaaccagaagaggatgaccaggaaataaaagataagactctgcccaggtggcagatctggctt

SEQ ID NO: 454597 - DNA, 99 bp, Homo sapiens
gctcgcccggctttggggtcaagcagattgccttcatcctccccaaggcagaggtgtgcgtgcggaaccatgtccagccctacatcccatccatcctgg

SEQ ID NO: 454598 - DNA, 100 bp, Homo sapiens
ccgcgggaggtgtgtggtgccggcactgcggccatcttgcagttcctctgcaaaggtggagtattgctcctggaaaatccaaaaggtgacaataggttgg

SEQ ID NO: 454599 - DNA, 50 bp, Homo sapiens
cagcacaagccaaaggtgctcctatcagctttgccgggaagtaaagcttt

SEQ ID NO: 454600 - DNA, 50 bp, Homo sapiens
caggcctgctcggccctcacagggaaagaccacagcaagattctttcatt

SEQ ID NO: 454601 - DNA, 100 bp, Homo sapiens
tgaacagaagctcctatgcacgggacagcatgatgattgaagaactccttgtgccatccaaagagcagatatcaatgatgtcaaacggctgaaacctggc

SEQ ID NO: 454602 - DNA, 90 bp, Homo sapiens
agaagatctattaagtgcaaaagtttgtgacttgaagtggatacatagctttcagtccagtgtaaagctgttggagcgcgggagcaaagg

SEQ ID NO: 454603 - DNA, 74 bp, Homo sapiens
cttccccaccggaggtttatcacaagggagctgcaggcccaggaagccttgcagaacggccagctgggcggcgg

SEQ ID NO: 454604 - DNA, 97 bp, Homo sapiens
gctgctgaagagtttccaaggagagccaacaaatggaattttcttgagcatgtttctaatcgttttgccattggaatccatggctcatgggctcttc

SEQ ID NO: 454605 - DNA, 80 bp, Homo sapiens
tggagtgaagaacgccgccatccagccaccattccaaggtcatttcatgggcaacaacacagtgctggatgttttgcggc

SEQ ID NO: 454606 - DNA, 90 bp, Homo sapiens
ttcgtttttaccttagtctcggggccatcgatgcacccctcggagctaatagcggagatgagaaacagtgggtttgcactgaaacgaaat

SEQ ID NO: 454607 - DNA, 90 bp, Homo sapiens
agctgggccttggcaaccagacagacgctgttcccagccccgcgcaggtgcagtttttgtcaatggaaaagaaatgacaaatcagttacc

SEQ ID NO: 454608 - DNA, 97 bp, Homo sapiens
cggacagaagatggtgcagaagaaaccagccgaacttcagggtttccaccgttcgttcaaggcacgtctgagaatggtggatgtggtggagaaagaa

SEQ ID NO: 454609 - DNA, 100 bp, Homo sapiens
atcctggatgatgccaccagtgccctggatgcaaacagccagttacagctggacgcacagaacagtctctccgtgggaggagacattatggggcgtccac

SEQ ID NO: 454610 - DNA, 83 bp, Homo sapiens
ctcgcctcgggtctcgggggccgctctgggatcccggccaccagcaattgtccgagaatggatcttggagaatgtctgaaagt

SEQ ID NO: 454611 - DNA, 75 bp, Homo sapiens
catttatgaaagcccaaatcacctgtacttggtcatgcagctatgcatcatcccattcagatgaaacctgcagat

SEQ ID NO: 454612 - DNA, 51 bp, Homo sapiens
gaagcacaagatcatgcacagagctgccccagagcacatcagctatgtgcc

SEQ ID NO: 454613 - DNA, 75 bp, Homo sapiens
cgagacgcgcagcgccggcgcccgggagacccaggaggagcccgcagacaatgcagatcttcgtgaagactctga

SEQ ID NO: 454614 - DNA, 100 bp, Homo sapiens
gaagcgactgagtccgcgatggagagcgccgccctgtgctgggctgccgggagctcgtcttcaggaacctctccaagatcctccctgccctgtgccacga

SEQ ID NO: 454615 - DNA, 88 bp, Homo sapiens
ctatcacgggcttatccgtgaccaggccatttcataattctgaatcatgtctgataacggagaactggaagataagcctccagcacct

SEQ ID NO: 454616 - DNA, 80 bp, Homo sapiens
tatgatatgcttgcttctattaaaagtggtgatgaacttcaggatgagcacccagtcagcttgaagagtttcaaatggac

SEQ ID NO: 454617 - DNA, 100 bp, Homo sapiens
ggaaaagctcctattctgattgctacagatgtggcctccagagggctaggtcaaaaccgctttccgggatgccgctgcaaagcacagtgcaacaccaagc

SEQ ID NO: 454618 - DNA, 83 bp, Homo sapiens
aaggatcatgtctgcgagccaggattcccgagtctcactgtcgcccaggctgcagtgcagtggtgccatcacgcgtcactgca

SEQ ID NO: 454619 - DNA, 124 bp, Homo sapiens
gtcttcccgcgtccgccgattcctcctccttggtcgccgcgtccttggctggcgtaggtggggctggtgtccgagcacttctcgcaggccccgcagaggctgtccttctacagctggtacggca

SEQ ID NO: 454620 - DNA, 82 bp, Homo sapiens
tctcgtcggcggcgccctgcaccgcgcctcgcaaaggcgtggagcgcatcgacgagcccggcctgcggagcctgcgcactgc

SEQ ID NO: 454621 - DNA, 75 bp, Homo sapiens
ggaaattaagcgccatcccttctttgtgaccatagactggaacaggctgaggggatctggcggtggagcgctagg

SEQ ID NO: 454622 - DNA, 101 bp, Homo sapiens
cgcgaatatcgtcatcgttagaaggcatctccttggaaacaatgccatctttgaatgtgagagataaacctagtttcagcatgtctgcagcagagaccagt

SEQ ID NO: 454623 - DNA, 75 bp, Homo sapiens
ccgggacctgggctgggaacccgcggtggagcgggacacgaacgtgcagcagtggacgtcagctcagcgaggtct

SEQ ID NO: 454624 - DNA, 100 bp, Homo sapiens
aagaaggagatggaaaacaagacacattaaatgtaatgagtgaaggtggaatccaagtcaaaaatgaaaaaaacagaccatctctgaaatctctgaaaac

SEQ ID NO: 454625 - DNA, 100 bp, Homo sapiens
aaaagaggacaccaacagtgtggtggagaaagcaatggatgaaatcaaatcccaagagtctcactatgttgcctatgctggtcttgaactcctggcctca

SEQ ID NO: 454626 - DNA, 100 bp, Homo sapiens
gggcagtttagctgatgttgttgacaccttgaagcagaggaaaatggaagagctcatcaaaaacgagccggaagaaatgggcaagttcatgaaacctggg

SEQ ID NO: 454627 - DNA, 83 bp, Homo sapiens
gggtgcccgtggaccacaggccctcgttgcccagatatcaatgtccgagttaccaccatggatgcagagctggagtttgcaat

SEQ ID NO: 454628 - DNA, 74 bp, Homo sapiens
gacttctcatccccgagttctttcaggtattatacctgaagaaccttagccctcgggtgactgaaagagatctt

SEQ ID NO: 454629 - DNA, 100 bp, Homo sapiens
ctgccagatccgctgatctagtgcttctcgaaaaaaaccttcaggcggcccatggaccacctgttcagaacattgcttacagaaatatttaaaaatgaca

SEQ ID NO: 454630 - DNA, 97 bp, Homo sapiens
agatccaaccaatggtggacagtgcacaggtgaaaggtgtagcagtcactcggcctacacccacagcatcgaccttgtgaacccagcgacctgactg

SEQ ID NO: 454631 - DNA, 100 bp, Homo sapiens
gtcatcatgctgaccaccaatcagatccgtaagagcccccctccatgcgcctgaaggcccgacccagcagccctggcttttccgtgcttacctgcagcgc

SEQ ID NO: 454632 - DNA, 82 bp, Homo sapiens
cagtcattttactgtcaagacatttcttcggcattctgcaacagattctggaacttttcaaagcctgactctcttcttgaaa

SEQ ID NO: 454633 - DNA, 95 bp, Homo sapiens
gagattattataaccgtgctctttcaggacatggatttgattgacatactttggaggcaagatatagatcttggagtaagtcgagaagtatttga

SEQ ID NO: 454634 - DNA, 90 bp, Homo sapiens
ggataaccttttgctaacaaaaacagggttattatattatgcaggacatggttatgaaaattttgggaacagcttcatggtccccgttga

SEQ ID NO: 454635 - DNA, 75 bp, Homo sapiens
gtggggaaaatggcggtgtctacagtgttctcgacttcgtcgctggaaaggaaacagattcattgtctgtctgag

SEQ ID NO: 454636 - DNA, 83 bp, Homo sapiens
gcaccctccagctccctacccatccgccaggagccctcttccttcagggggatatgagactttctactcggaatatcctgagt

SEQ ID NO: 454637 - DNA, 83 bp, Homo sapiens
gctcttcattatgcaaataaatataatatcatgttagtgaggagaaagtaaagtttctgggcgacaattaccttgaggaaggc

SEQ ID NO: 454638 - DNA, 75 bp, Homo sapiens
gccccagccccacagaccagcccagcattcagatgtcagaggatttagcaaagcagctggcaagctacaaagctc

SEQ ID NO: 454639 - DNA, 50 bp, Homo sapiens
tcatgagctactttttacagggcaaaatcgatgatgcaaccaacttggtc

SEQ ID NO: 454640 - DNA, 101 bp, Homo sapiens
gcagcagcagcaccaccggacggtcactcctggaagcaaggcggctctagctaatttatgtattggagatgtaatcacagccattgatggggaaaatacta

SEQ ID NO: 454641 - DNA, 100 bp, Homo sapiens
gccttcaaatctcttgacaaagatggcactggacaaatccaggtgaacatccaggaggcatctgcatctgggaccgacctcctgggctggctgatcaaag

SEQ ID NO: 454642 - DNA, 100 bp, Homo sapiens
tgagaactggaaaattggcagaggctaaaaataaaggagaagtatttccaacaactgaaggtggtgactctcaaaaggaaataggatcatggcagcagat

SEQ ID NO: 454643 - DNA, 100 bp, Homo sapiens
attgcctgttcagtactgtgggtgatatttgcctttagtgcactcttctccttcacagtaaagtggctggagctgaatgccaaagcagcttctctttttg

SEQ ID NO: 454644 - DNA, 98 bp, Homo sapiens
tataagctctcgtctggggcaactcagaagaacataacaacgaacttgatgcaagtgataggtttgccaaggtcagacctctcatcatccggatgaac

SEQ ID NO: 454645 - DNA, 101 bp, Homo sapiens
caaaaatcgaagaagcacctagaagaataagagatgtgattaatgtattccaccacctccgccagttaagaggaaaaagagctctgattatacaaaaccag

SEQ ID NO: 454646 - DNA, 50 bp, Homo sapiens
gctatgttcccagaaggatataagggaagaacagtgattattgagcagag

SEQ ID NO: 454647 - DNA, 97 bp, Homo sapiens
caccgtgtgggagcgggagctgcggaaaggttgtccttctattcaggccactcttcgttttccatgtactgcatgctgtttgtggcagtaagtactt

SEQ ID NO: 454648 - DNA, 83 bp, Homo sapiens
ggcgacgtctacactgagtcggaggcgaagatgcggcattccaaaagaactcactgtcctgattgggatagcagagaaagctg

SEQ ID NO: 454649 - DNA, 75 bp, Homo sapiens
agattgaaggaaggtgatacaatgatggggcagcaagtggccaagtacctgtttgttttacaactcaggcatgac

SEQ ID NO: 454650 - DNA, 98 bp, Homo sapiens
ctggccctcttcaatttctgacaaaaggttgaaatcacaaagattagacacctttttagataggtgttcttcagcaccactgacaacacggttctgac

SEQ ID NO: 454651 - DNA, 75 bp, Homo sapiens
tgttacagaggtctccagagccttctctctcctggagatatctgaagagattataggatcacccatcccagaacc

SEQ ID NO: 454652 - DNA, 100 bp, Homo sapiens
ccaggttcttcgaaaactgaagcagatgttgaacaacaagataagtttataccatggatagcacaaaggagaagtgtgacagttacaaagatgatcttct

SEQ ID NO: 454653 - DNA, 75 bp, Homo sapiens
ttatcccagatgatctatccctcctgaaactctaccctccaggggatgaggaagttgttctggagaatcatgtag

SEQ ID NO: 454654 - DNA, 100 bp, Homo sapiens
cttgtctgctgccatgtgagacgtgcctttgaccttctgccatgattgtgaggcctccccagccacgtgaaacttggaatgagaccgtggagctttttcg

SEQ ID NO: 454655 - DNA, 74 bp, Homo sapiens
ctgtacttacttaagaaattgttagggttctgagcaaggttcaaccagtcaagaacaggccttatctgctcagc

SEQ ID NO: 454656 - DNA, 100 bp, Homo sapiens
cgtggttgcacagtttggctaacagggctgatcccttatccaacatggttctaaccttcagtactaaagaagatgcagtttcctttgcagaaaaaaatgg

SEQ ID NO: 454657 - DNA, 100 bp, Homo sapiens
tacgagaaaaaaaagattccagatgcaacccctctccttgatgccagctcactggagtatctgtttgctcagttgctgaagtaaaggaaccctgcagcct

SEQ ID NO: 454658 - DNA, 100 bp, Homo sapiens
aggtggaacggggctcccaggacctccactaatcaccagaacaaaatgtgcagcactgaacctaccagatgtatttgggttggtcgtcctcccattggaa

SEQ ID NO: 454659 - DNA, 100 bp, Homo sapiens
ccttgtagagtcattcctgcctttgagcggactcccttttaaggtgatgatccttatcacaggtgctcacaaggcatttgctctgtacaaggccatcgag

SEQ ID NO: 454660 - DNA, 49 bp, Homo sapiens
cttacctctttgatctcgacaataagttacttacacgccaagtcaatca

SEQ ID NO: 454661 - DNA, 82 bp, Homo sapiens
aattgccttcaaccgggaacagagaatgtttaaggaactgtggctgcaccatctgtcttcatcttcccgccatctgatgagc

SEQ ID NO: 454662 - DNA, 100 bp, Homo sapiens
tgttgtttcacaagatgatgtttgaaactattccaatgttcagtggcggaacttgcaggggacttgatctcatcttcatgccaggccttgggtttgacaa

SEQ ID NO: 454663 - DNA, 75 bp, Homo sapiens
cagaaggccaagaacccccaggagcagaagtccttcttcgccaaatacccgaaggtggtctggatgaagaacaag

SEQ ID NO: 454664 - DNA, 83 bp, Homo sapiens
ctggacccgactgatctgaacggggcgcacttcgacccggaagtttacctagacaagccatcgtcagccagtggcagcaggag

SEQ ID NO: 454665 - DNA, 83 bp, Homo sapiens
ccggacgtgtccgcgaagatggcgggccggacaatgcagatcttcgtgaagactctgactggtaagaccatcaccctcgaggt

SEQ ID NO: 454666 - DNA, 74 bp, Homo sapiens
agagaaaaagaaatgatgcaattgtatatcagaaacaactctgctcatggtgattacatgcaaaataacgagag

SEQ ID NO: 454667 - DNA, 100 bp, Homo sapiens
gttcctgagctgctccaaaaaattctcgagctgtccagactaccctcaagtttacatacagtgaaaaatacccagatgaagctcccctttatgaaatatt

SEQ ID NO: 454668 - DNA, 100 bp, Homo sapiens
aatctgtgcggagaccctgggagaagaacagcacaaccttgccaaggagcattgcagagctacttttcttgttggaggggattaggtctctggtccgaag

SEQ ID NO: 454669 - DNA, 50 bp, Homo sapiens
gacggcggcgcggagaaggcagaatctgatgttccagcagaaatccaggt

SEQ ID NO: 454670 - DNA, 83 bp, Homo sapiens
gccgcctggctccccatactagtcgccggatttttagactctgaggagcagttggagctaatccacattatggaaatggaaac

SEQ ID NO: 454671 - DNA, 101 bp, Homo sapiens
cagagagtcaaatcattcctgtgatgccagtcattgaaattatgagactatcattcaaatggaagcattatagttcttcggaaccattatgatctcaaaac

SEQ ID NO: 454672 - DNA, 82 bp, Homo sapiens
tgaagtgctccgccgcccttgcctccagccagagagatgacacgggggaaattcctcaatattctagagaagcccaagaagt

SEQ ID NO: 454673 - DNA, 51 bp, Homo sapiens
accataaccaggaggctgatggtggtggaggaacgatgtgtttactgtgtg

SEQ ID NO: 454674 - DNA, 100 bp, Homo sapiens
acgagttgccacatttcgcaaaggaaactatgtagctgatcttggagccatggtggtaacaggtcttgataatgactctgacgcaatgagcagctcctat

SEQ ID NO: 454675 - DNA, 80 bp, Homo sapiens
accttgggtgatttgttctgtatcagaagacaatatcatgcaagtgtggcaaatggtggaggagttactgatggccatgg

SEQ ID NO: 454676 - DNA, 98 bp, Homo sapiens
ggtgccccgcccaggaccctgacgtgggaagccatggagcagatacgcgatgccctcctagctagccgtcacgggatggagggcttcatggactcagg

SEQ ID NO: 454677 - DNA, 95 bp, Homo sapiens
atctttcaagtgtttactcatttgcctataacgaaggaggcccaacttcattcaataaggagcctgacggatttatcccagacggtagaacaaaa

SEQ ID NO: 454678 - DNA, 89 bp, Homo sapiens
tccttgtctgcctcgctttctccttggccaccctggtccagcgaggcactgggacgttcgggcgggtgcacctggtgaaggagaagaca

SEQ ID NO: 454679 - DNA, 75 bp, Homo sapiens
gccaagttgaaaatggacgagtaatcgcctgctttgattcattgaaatgatgtcttggttcgtgtccccactgct

SEQ ID NO: 454680 - DNA, 140 bp, Homo sapiens
tcaagcttgcctcaagtgaaccccgaatgcatctaggtaccaatggagccaactgtggtggtgtaactcagctccacctgaaggataattgtttatctgatgctggggtgcggaagatgacagcaccagttcgagtgatg

SEQ ID NO: 454681 - DNA, 100 bp, Homo sapiens
cgagtattcagctcttcacagggggtagaacaagtggtactaggattatacattgtaagaggtgacaacgtaaactagaaaaactgcttttggaattatc

SEQ ID NO: 454682 - DNA, 114 bp, Homo sapiens
ttgtggagccggagctgggcgcggattcgccgaggcaccgaggcactcagaggagcgggctgacgcacgaggcacacaggaaggaggtggagcaggtgtatctgcgctgtgcgg

SEQ ID NO: 454683 - DNA, 100 bp, Homo sapiens
ctcgcttgcagttcagcgaccacgattctggatgaaattgaagaacataacatcaaaatctatcacttacctgatgcagaatcagatgaagatgaagatt

SEQ ID NO: 454684 - DNA, 98 bp, Homo sapiens
gattgccagggcttcctggcccgaaaggagagcctggagatacttcaggggattaccggaagattctgctgaagatctgtggtggcaatgactgaaca

SEQ ID NO: 454685 - DNA, 75 bp, Homo sapiens
caaggaaaccatggaggagcactgcaagcttgagcaccagcagcccagggtccgtctgcattttgtggagctggg

SEQ ID NO: 454686 - DNA, 75 bp, Homo sapiens
atgcccctcaggctggaacttgccctgtctcctcgcagatgaggtacctgcacatgttgttctttgtcagtgctg

SEQ ID NO: 454687 - DNA, 83 bp, Homo sapiens
gccgcgttggggtgagaccctcacttcatccggttgaagatgacagcgatgcagagacctatggagaagagaatgatgaacag

SEQ ID NO: 454688 - DNA, 80 bp, Homo sapiens
catcagcctggattggtgaaactgaatcacaggagatatttccaggaactgtggctgcaccatctgtcttcatcttcccg

SEQ ID NO: 454689 - DNA, 100 bp, Homo sapiens
aacgccggggcgcccgaggtctggaaggcgcaggtgcactacatcctccaggaggtggtgatgggtgggatggtgttggaaacaaacatgaatgaaatcg

SEQ ID NO: 454690 - DNA, 98 bp, Homo sapiens
ccaccagacggagacagcttggactaccagaatgaccaggttcttcagggcttctcggtggacaaaggagaattcacgtgtccactctgtaggcagtt

SEQ ID NO: 454691 - DNA, 50 bp, Homo sapiens
agcaaaagaacatggaatgcctgaaaagcttcttggacacttaatgattg

SEQ ID NO: 454692 - DNA, 75 bp, Homo sapiens
taccaactgccggaaagtgctgcggaagctccagggttccttgaaaagaaaacaggtagttaacctatctcctgc

SEQ ID NO: 454693 - DNA, 90 bp, Homo sapiens
cgggatttcaggggtctaccggctctcttatggcgaatgcaacccgaagagagagtgagccaatcctgaggcaaaagaaacattttaatt

SEQ ID NO: 454694 - DNA, 90 bp, Homo sapiens
gactactatgtgggcgagtggaaggacaacgtgaaacacgctctcagacaccttgagttccttggtttggtccacgtcccatgaacatgc

SEQ ID NO: 454695 - DNA, 75 bp, Homo sapiens
gctggtcaccggggtctgcctggctacgagttccagggagctctgtcctggtgaccgtgcccgggttatgacgac

SEQ ID NO: 454696 - DNA, 74 bp, Homo sapiens
tggagtatctggtgaaatggagaggctggtcgcccaaaaactatgttccaacttcctgtcaacaatcttggcag

SEQ ID NO: 454697 - DNA, 50 bp, Homo sapiens
tctttcttcactcctcttcacttcttcaaaatggaatctatttggaattt

SEQ ID NO: 454698 - DNA, 83 bp, Homo sapiens
aggaaacaagacagttctgtctgcagaagcccattatggctgtaactggagatgacacaggtcagcccaaggccaaccccact

SEQ ID NO: 454699 - DNA, 96 bp, Homo sapiens
agcagccaggaaccaagaaaacttggcttccatctgtatcacaagttgcccacaatagtgcctgagagctgccttcttataatggttggacttcta

SEQ ID NO: 454700 - DNA, 100 bp, Homo sapiens
tggaaatgaagtttcggaaaacatggaggaggaggctacggaaacaggccgagaagaacgtggagaagaaaattgacaaatacacagaggtcctcaagac

SEQ ID NO: 454701 - DNA, 100 bp, Homo sapiens
accgccctgctccgggctcatcagacttcagattttcctgtccttgatcccagctggactgctcaagaagaaatggcccttttagaagctgtgatggact

SEQ ID NO: 454702 - DNA, 127 bp, Homo sapiens
tctcagaggatagcctttcacttattcatctgtccagcatgactcatccccgggagtgttgaatggtgttatctgaaaaggttagtcagctgatggaatggactaacaaaagacctgtaataagaat

SEQ ID NO: 454703 - DNA, 80 bp, Homo sapiens
ctgagcttggcctcggcgtcctcggaattaaacaaccaccatgtcgagcaaaaaggcaaagaccaagaccaccaagaagc

SEQ ID NO: 454704 - DNA, 100 bp, Homo sapiens
cttggtgatcctactgctctttgccctgatccagtggctggcagtgccagatgaggaagaagtatgatccatttgctgagcacagacctccaaagattgc

SEQ ID NO: 454705 - DNA, 90 bp, Homo sapiens
gtcagggatccaaacagctggctgtggatcaacttttttcagagaccttggcgataaagattaccagttaccagatgccaaaacttccag

SEQ ID NO: 454706 - DNA, 50 bp, Homo sapiens
gctcagcttggctgcctgcctccttctgtggttggttttggacacagaga

SEQ ID NO: 454707 - DNA, 75 bp, Homo sapiens
aggccctcaagtacctgtcccggaaccacatgcacggtaactaggatttctacctcaaccgcgagacctatgcaa

SEQ ID NO: 454708 - DNA, 99 bp, Homo sapiens
tggtttgggcccaaagaggtgtccacagcttgtgccaccgccgtgctgggcaatcagtccccgcatcagagacttctcctgggcctcccccaatggggc

SEQ ID NO: 454709 - DNA, 97 bp, Homo sapiens
agctgcagccgcagcctgtggctgtgcagggccccgagccggcccgggtcgagagtgatcagcagctggactgtgccttggacctaatgaggcgcct

SEQ ID NO: 454710 - DNA, 75 bp, Homo sapiens
tacctggaatttacgtcttatctttagagattgggaagaccctgatggaggctgtggaagagatgaatggaaaag

SEQ ID NO: 454711 - DNA, 100 bp, Homo sapiens
ccctgaagtttgtaactcaagcagaagttcccctccacagctcatgctcagcaaagtgtttactgctcggactggcagcagtatttgtgggagtctcaat

SEQ ID NO: 454712 - DNA, 80 bp, Homo sapiens
gtcccgctcgtcatggcctacccgggatacggaggagggctatatcgagaagtttactgactttcttcggctctttgtga

SEQ ID NO: 454713 - DNA, 100 bp, Homo sapiens
cagccccccaatgcggccgcgagaagcagcgggggggcaggcgatcgaaggtattctctgaaaccaaatgaccaaatcttggctgaagacaaacacaagg

SEQ ID NO: 454714 - DNA, 100 bp, Homo sapiens
cagcggtgttggaacttcgttgcttgcttgcctgtgcgcgcgtgcgcggacatggcctcaaacggtcctcagccagcagagccacgttccttatgagcac

SEQ ID NO: 454715 - DNA, 101 bp, Homo sapiens
cggaactggtgtaccctggtggacgtgcacccagaggaccaggcggcgcatttttgaaacgttggggttgttggagtggttggattttccctggaattgag

SEQ ID NO: 454716 - DNA, 82 bp, Homo sapiens
cccggggcagcggctgccgggccgggactggtgcgcgaggggaaatctggcattttttaaagtttgcgccccacaaagagga

SEQ ID NO: 454717 - DNA, 55 bp, Homo sapiens
caggctggtctcgaactcccaacctcaggtgatctgcccacctcagcctcccaaa

SEQ ID NO: 454718 - DNA, 97 bp, Homo sapiens
ccagccatgtggtcagcctgatctcggacttcacagccagcagaactgatattgtacctgtggatgcatcttatgaagtaaaagaactatatgtgcc

SEQ ID NO: 454719 - DNA, 75 bp, Homo sapiens
ggcaggtgccttacaactacaaccagctggaaggcagattcaagcagctgcaagacaacgtgtcctggagagaca

SEQ ID NO: 454720 - DNA, 100 bp, Homo sapiens
cccgccaaatccagaggaggtgaaaacgcctgaagaaggaagaaaacaggcagattttggcgcggcaaaagtcaaactcacagtcggactcccatgatga

SEQ ID NO: 454721 - DNA, 97 bp, Homo sapiens
ggaatcattctcaccttgtatgctttacgttcgatacaagaggctgttttcctagcgtggcttgctgcctttggtaagaacatgtcgtccatcttgc

SEQ ID NO: 454722 - DNA, 98 bp, Homo sapiens
gaaggcagagaaactgaagcagtccctgccccccgagataattgacgaccttgccaacctagtggagaacacagatgaaaaacttcgcaatgaaacca

SEQ ID NO: 454723 - DNA, 74 bp, Homo sapiens
tccctccctgccccgcgctgacaggggggcctggccgcgcagccggtctcctccgggctggggctgagcaagcc

SEQ ID NO: 454724 - DNA, 100 bp, Homo sapiens
tatttttcctaatactgggactgacttacctaggaatgagagggacaggagtatctgaggatggagaactcagcagttatcaggacaccccatgggagag

SEQ ID NO: 454725 - DNA, 75 bp, Homo sapiens
ttggacatttttatttcatctgtgcaaaaagttttccaggagtatgttgcaagtgagggtgaagaagatccagaa

SEQ ID NO: 454726 - DNA, 75 bp, Homo sapiens
gggcccttcgcgggagagcgtcgtgcacgcgggccagaggcgggcatggtgctgatgtgaaatgtgtagactggc

SEQ ID NO: 454727 - DNA, 108 bp, Homo sapiens
caggccggcaggctgagaaaagcgagaccgcgtgcgaggaccgggactttgaacatgtcggggatcgccctcagcagactcgcccaggagaggaaagcatggaggaaa

SEQ ID NO: 454728 - DNA, 99 bp, Homo sapiens
tgcacctataacaaatcgggctccagggagtgtgagatgatgtctttctacctaaagatattgacctagacagtgtggatatggatgagacagagaggg

SEQ ID NO: 454729 - DNA, 96 bp, Homo sapiens
ctttgggatacttttggtgatcatcacaaagacagacgctttgcatatggcagtgcacttggaggctcctcagctcttcatatcccagcttttcca

SEQ ID NO: 454730 - DNA, 75 bp, Homo sapiens
ggattgtagaacttctctctctgctccgtatgtggatgtgatctgtttgaacagctactactcttggtatcacga

SEQ ID NO: 454731 - DNA, 90 bp, Homo sapiens
ctggtgcaccaggagcggaccttggcctttgctgattttatagggctagatcccagaattgctgcatggcttatagatcctagtgatgcc

SEQ ID NO: 454732 - DNA, 83 bp, Homo sapiens
cgcagagccgagtgcagaagatctgggtgcccgtggaccacaggccctcgttgcccagatcttcctggacaagatcgacgtga

SEQ ID NO: 454733 - DNA, 98 bp, Homo sapiens
aggcggagaccgcaggctgaccccgcagcggccgggctgtcgcggcccccacctcaggtgacattgcattccggttccttaattatgttcagtcccag

SEQ ID NO: 454734 - DNA, 100 bp, Homo sapiens
tgacaaccaggcaatgctggatagataccgaattcttatcacaaaggtccttatgtcgtcagaagatcgagaagctcaggaggatgaattgctggccctg

SEQ ID NO: 454735 - DNA, 97 bp, Homo sapiens
ggaccgggcgccccggcaccgccgcgcgccacccgctaggatgccggtggccccagcgccctcagccgacggagataacgaaggaggcccaacttca

SEQ ID NO: 454736 - DNA, 74 bp, Homo sapiens
gattcctcagctacgaggaggcgctgaggagaggaacacagacagacctatgggaacacacgggaacctctttt

SEQ ID NO: 454737 - DNA, 100 bp, Homo sapiens
gggaagattgcggtcatggagcttttcaggcccaagaagctaaaccagccccagaaatatttgaaaatgaagtcatggccctgctgagagactttgctaa

SEQ ID NO: 454738 - DNA, 96 bp, Homo sapiens
cttccatgtggtggtgtatgtgcgcttcccagggatcttgagagtgaagatctcgaaggatttcataggtggtggccaatgcagtggcagcgctct

SEQ ID NO: 454739 - DNA, 100 bp, Homo sapiens
cgcagatcagaggtagtcggacctttcccgctggcgcgcagcctcagctagtttcctattctgtgaaacagaagacattgtgatggagtggttcttcagc

SEQ ID NO: 454740 - DNA, 80 bp, Homo sapiens
ccatttgcttttctggggagtcctggcggtttttattaaggctgttcatgtgaaaggttaattcctgtaccaatggtggg

SEQ ID NO: 454741 - DNA, 74 bp, Homo sapiens
tcccagatctatgctggttacacctgctcctttgctgtcagtgaagtggtgggtaattccagaattgattggcc

SEQ ID NO: 454742 - DNA, 90 bp, Homo sapiens
agacaagatcattatggtgctgttaggtaggacttgtatccagatgtaaggataaaatggaccagttgctacagatgctgcaaagtacag

SEQ ID NO: 454743 - DNA, 74 bp, Homo sapiens
tccctgggggctatttcagctcagatgtcctaaacgatgctatatttgatgaagatcatgatgagatggtgatt

SEQ ID NO: 454744 - DNA, 100 bp, Homo sapiens
gagaccccgcggctgggcgttcatctaccacgctttcgtgtgctggagaatctggtaaaagcaccattgtgaagcagatgaggatcctgcatgttaatgg

SEQ ID NO: 454745 - DNA, 90 bp, Homo sapiens
gtcatttccttcgtacccacagtgcttcatgagagattagcctgaggcctgctcagtcgttcctaatgaataaaaatcaagtgccaaagc

SEQ ID NO: 454746 - DNA, 98 bp, Homo sapiens
gagcgcgctcgctccggcgccggcctcgcctcctcgcagcagcgccatgggctttgttcgcgggggtcacagctctcatggctgcagctagcgtgacc

SEQ ID NO: 454747 - DNA, 100 bp, Homo sapiens
cttcctgtctcaacgatacctattttctagtgctgagatcctgagacaatgatgaagattatggaagagattcgggccctcccactaagaaaattcgatc

SEQ ID NO: 454748 - DNA, 100 bp, Homo sapiens
tcgggaacagccatgcaaaggcaggggaggaagccacctcgaggtttttcttcccccagtccctcagctgctgctgctgctcaggaggtcagatctgcca

SEQ ID NO: 454749 - DNA, 50 bp, Homo sapiens
ggcccggagccggcgcccccggcgcggtttcaaccgtaacgggcacctca

SEQ ID NO: 454750 - DNA, 101 bp, Homo sapiens
acgggaccaagttcgcaactggaggacaagcagatccttcaagccagacttcatcctggtccgccagcatgcctacagcatggccctgggggaagactacc

SEQ ID NO: 454751 - DNA, 100 bp, Homo sapiens
gagctattagagattgtgaagaagaatttcgatctccgccctggggtcattgtcaggatgaagcctgctgggagcgtgaatgacatggccctggatgcct

SEQ ID NO: 454752 - DNA, 87 bp, Homo sapiens
cttcgggatcactggattgctgacggcagccctctcagattgatttcctaaattcagtaatagtggaccttcaaaggaagaatcaag

SEQ ID NO: 454753 - DNA, 75 bp, Homo sapiens
gtgacggctggcatcatcattgttggagatgagatccttaaggaaatgacttaatcgtctttttggcagaccaga

SEQ ID NO: 454754 - DNA, 100 bp, Homo sapiens
cagctggagagaatcaacgtctactacaatgagtcatcgtaaaaggcatatggaaggagcatttctctttgctgttctcctacatttcaagcatatctac

SEQ ID NO: 454755 - DNA, 100 bp, Homo sapiens
caaaagcgcactaaatcgtctccaagttccagtgtctcgccccatcctcaccctcagggttcccagggcccaggctgtggtgggggacctgctggagctt

SEQ ID NO: 454756 - DNA, 98 bp, Homo sapiens
gaagatcgaaaattaaacctcagctatgatacttgggtccatagtaatgatgttgatgctgaaattgaagatccaccaattccagaaaaaccatggaa

SEQ ID NO: 454757 - DNA, 98 bp, Homo sapiens
gggaaactcatcatcactaaggagttggcagaagaaggcttcagggatgacttcttagggggcaggggaggtagtcgcccaggcgaccggcgaacagg

SEQ ID NO: 454758 - DNA, 82 bp, Homo sapiens
tcgggaccatcgtcgtgaggatcgtgtgcattacaggagtcctccacttgccactggatggtgatccctggagaccctgagg

SEQ ID NO: 454759 - DNA, 75 bp, Homo sapiens
gcaagggaaggaaatgtgcccaacatcatcattgcggtgaaaattagttctgctgtgcttaaagctgcggcccat

SEQ ID NO: 454760 - DNA, 75 bp, Homo sapiens
gcccaagatggccgacttcgatgatcgtgtgtcggatgaggagaaggtcaacaggacatactgctgtggcaccta

SEQ ID NO: 454761 - DNA, 88 bp, Homo sapiens
cacacaggtgaatttaaaggagcagccctggtgtcacctatcagtaaaaggcgtcacaatgtagcagggaccccaggcgtcgtgctca

SEQ ID NO: 454762 - DNA, 87 bp, Homo sapiens
ccaaagatagaggctatggagaaaagtcttattgttacaggtatcgctgtgctgctcggagccagaacacacctgatagctctgctt

SEQ ID NO: 454763 - DNA, 100 bp, Homo sapiens
actaatccagaaaattatcaacattctcacagacaagcatggagcctggggaaattctgcagtgagacccaacatgagtgaagtttcctgcaagaaacgg

SEQ ID NO: 454764 - DNA, 75 bp, Homo sapiens
ggacagacctcaggggaagaagctggacttcagccgtccaagatccagaggcaacagggacatggccacctggga

SEQ ID NO: 454765 - DNA, 50 bp, Homo sapiens
ggtcaaggtatttcatgccgagaaagtttcctacactactgaggtttagg

SEQ ID NO: 454766 - DNA, 100 bp, Homo sapiens
agtgtgtcaggagatgtatttgacatatggagatggagaagaagttggtggaatgtgggttgaaaaggtggttgtgtcaaaccgattggtgacatctcca

SEQ ID NO: 454767 - DNA, 100 bp, Homo sapiens
attggcaggctgccatgacaaccaggcaatgctggatagataccgaattcttatcacaaaggaatattccctgggcttttgaggcaataaagcaagcaag

SEQ ID NO: 454768 - DNA, 97 bp, Homo sapiens
cttggatcccattcacctgaggcacccgaagaagagaccatccatatttccagaatgaaagtgcccttgtgaaagaaaaagagctgtcaatcgaact

SEQ ID NO: 454769 - DNA, 83 bp, Homo sapiens
gtctcaatctctggaaaaacttcttgccaaccaaataatagtagacgtcgccatgaaagtgaagaaggagatagtcacaggag

SEQ ID NO: 454770 - DNA, 82 bp, Homo sapiens
accattgacgccatgtcgggttattcgagtgaccgagaccgcggccgggaccgaggagccaagcacacctgcaaaaagacat

SEQ ID NO: 454771 - DNA, 100 bp, Homo sapiens
agtcagtgactgaagcgcccgtccattccaaggccaggtcagagcagcccaccatgggatggggagggggtggaggctgcaccccgcgcccacccatcca

SEQ ID NO: 454772 - DNA, 101 bp, Homo sapiens
gtaaaatccgagtctgaagggaggccggagagggtctttcacttgtgctgcagttcggcggtcaggcctacagcgacgtggaacacacttcagtccagtgc

SEQ ID NO: 454773 - DNA, 97 bp, Homo sapiens
tggaactgggcatcatagccgacgctaccgtccgctccctgggtaatgtgaggctacaggagatgatggcaacaatgtgccaggaacgtggagcccg

SEQ ID NO: 454774 - DNA, 96 bp, Homo sapiens
tacaacaaaacagtacagattccaattacttcagaaaacagtactgtgggtttgtctaatacagaaaccgaaccctcaccaaacagatctgcttgc

SEQ ID NO: 454775 - DNA, 146 bp, Homo sapiens
gtttatattttcaaaatctatgaatgaaagcatgaaaaatcaaaaggagttcatgcttatgaatgctcgacttcaggtctggtccgagagcaggaggctgggctgctgcagttcctccgcctggacggcttctctgtgttgatgag

SEQ ID NO: 454776 - DNA, 83 bp, Homo sapiens
tgccgtccttctccactttcgccagcccgtgccgcgagcgcggcctgcaggaggtattaatctctggagaagacacatccaca

SEQ ID NO: 454777 - DNA, 82 bp, Homo sapiens
aaaggcaacatcctgtcacaggccatgctctggcaaaaactatctccaggtgtgtcagagctccggaggaattccaaaaaat

SEQ ID NO: 454778 - DNA, 83 bp, Homo sapiens
aacaaatagtcggaacatcacttgcattacgtgcacagacgtcagctatccagtcagttcgctgctattcccatgggtcacag

SEQ ID NO: 454779 - DNA, 82 bp, Homo sapiens
atttacatgacagaaatcacctatgtttacagcgacagcaaaacacttactattttggagtttaaagtatgtcatcatggca

SEQ ID NO: 454780 - DNA, 83 bp, Homo sapiens
cgcgcctgctcttcgcctttcgctgcagtccgtcgagcctgagcccttgtgaagccggcaatgacaagtctgtatggtcgcca

SEQ ID NO: 454781 - DNA, 100 bp, Homo sapiens
aagatgcggaggctgcctcggcggagcagaggaaccacacgctgatcatgaacgaagtcggcctactggagttcttccaaaatgtgataaaagaaactag

SEQ ID NO: 454782 - DNA, 100 bp, Homo sapiens
cggaaggccctcaacatcccggagcagctgccacaatgggacatgtgcaagcccatggacagaccttcacgttcccagatctgtttcccgagaaagacga

SEQ ID NO: 454783 - DNA, 101 bp, Homo sapiens
aggaagccaagggagattataccaggccccttcacagatgtagtcactacaaatcttaaattgcgaaatccatcggatagaaaagtgtgtttcaaagtgaa

SEQ ID NO: 454784 - DNA, 82 bp, Homo sapiens
cggcttcctccagacctctcggcgcgggctgaccccgcactacatctacccaccagccatcgtgcagcccagcgtggtgatc

SEQ ID NO: 454785 - DNA, 52 bp, Homo sapiens
ggcgcgggcagagcgcggcggcgcggattcttcagaggaggcccctccagcc

SEQ ID NO: 454786 - DNA, 100 bp, Homo sapiens
cttctgactatcttctcttcaccagctcttcagatcaatatgcctcgtgtgcaagctgaacacaaggaccaccatcctggcagcaacgaaccccaaaggc

SEQ ID NO: 454787 - DNA, 100 bp, Homo sapiens
caatgtccaaaagagagcggcagtccgaagggacccgagctgatccagaaagccaacggtctccacggcttcatgaattggcctcataatctgctaacgg

SEQ ID NO: 454788 - DNA, 75 bp, Homo sapiens
atttgttaaggattccaagtaactcttatttggaatgacgggacagagtttggcggctccatttaccagaaagtg

SEQ ID NO: 454789 - DNA, 90 bp, Homo sapiens
ggttctagaagaagtggactggctaatcaccaagcttaagggacaagtgagccaagaaaccttatcagggtcttgctctgttgcccacgc

SEQ ID NO: 454790 - DNA, 100 bp, Homo sapiens
ccactgccccacgcgcccgcggcccgcgcgccgagggaaaatttcatggaaatccaatgcatgtagctgtggttatttcaaactgtttaagggaagagag

SEQ ID NO: 454791 - DNA, 75 bp, Homo sapiens
agattggaccctgtaaaagctgtaaaatgataacagaggattggtcttgatttgagcaatggtaaacctcgagac

SEQ ID NO: 454792 - DNA, 75 bp, Homo sapiens
cgggtgccgaggagcgggaagagttgctggggcccctgactcggatgctgagggctacgtggagggcctggatga

SEQ ID NO: 454793 - DNA, 100 bp, Homo sapiens
gaattggctattctttacaactgtacccggacagcgaccgtcaagaaacctatgagaaccccaaagacattaaagattgctgaaatacaggcaagacgga

SEQ ID NO: 454794 - DNA, 75 bp, Homo sapiens
cggagatcacccccacaaagaagagattgtgacaccaggactgaagacaaggagtttcttcacaaggaagacatt

SEQ ID NO: 454795 - DNA, 100 bp, Homo sapiens
acggagtcctgttccaccttcagagcgtcacggcgtacgccctcatggggaaaatctccccggtgactttcaggtttagacgtctgtgccacttgccatg

SEQ ID NO: 454796 - DNA, 96 bp, Homo sapiens
cgatccccttccagctgcagcagccgcaccagcgccgggacgggggtggccgtgcagcttcaggatgagttagagaaaggtgaacgggacaatgca

SEQ ID NO: 454797 - DNA, 97 bp, Homo sapiens
ggtagtcggacctttcccgctggcgcgcagcctcagctaggctggctacagcaaacatcattcaagatgtccagcaaagggagcagcacagatggca

SEQ ID NO: 454798 - DNA, 90 bp, Homo sapiens
gtggatcgctgtgatcgtcacttggtctcctctgagcctccggcctccataagacccaaaacagatgacacctcttcccagtcccccgcg

SEQ ID NO: 454799 - DNA, 73 bp, Homo sapiens
taccaaagacgtagaaagaaatcttagcaggctttttctcctccgtgacagccagagtaatccaaaggcattt

SEQ ID NO: 454800 - DNA, 82 bp, Homo sapiens
tctcaccccgtcgttgcctccacttggcccgtccatagagccaggcaggtaaaaatcaaggtgaccccaagaaaatggctcc

SEQ ID NO: 454801 - DNA, 100 bp, Homo sapiens
gaaatacgaaaggattagcgagaagaaaatgtccacccccatcgaagtgttgtgtaaaggctacccttgcgtcttggctgcccacaagataatggctagc

SEQ ID NO: 454802 - DNA, 75 bp, Homo sapiens
ctgggacactgctggtcaggaacggtcatgtctcacaagagaacagcgagtacggatcttaagcaactgaaccag

SEQ ID NO: 454803 - DNA, 82 bp, Homo sapiens
ggcctagtgcgccagggcctcaagtgcgatggtccggcgggcggtggcctccgtggtgggcggctggctgctgtgtctgcgt

SEQ ID NO: 454804 - DNA, 85 bp, Homo sapiens
cagttatgtgtgttgcatgagaaaacgccaggctccggggatgtcaagtaccacctgggcatgtaccatgagaggatcaaccgcg

SEQ ID NO: 454805 - DNA, 111 bp, Homo sapiens
cagccgagtctgacggcgccggttcgctgcccggtccgcccgcggtgagagccctggcctagtgtgtccaacctggccaaggacttcattgaccgcctgctgacagtggac

SEQ ID NO: 454806 - DNA, 82 bp, Homo sapiens
tgcaccaaccttcctacgtcaaagaccgctgctgcagtagtgacctgtgtaattatgcagaagaatggagctggattacaca

SEQ ID NO: 454807 - DNA, 100 bp, Homo sapiens
cgcaatgatgagaggatgtggtggtctactctgatgtcaatcttgagggctagggttttttcccagggaaccaatctgtccttttgaagaaaagacaaag

SEQ ID NO: 454808 - DNA, 82 bp, Homo sapiens
ccgtcacatcgccctgctgggctttgagaagcgcttcgtacccagccagcactatgtggaacacctgcagcaggagactgct

SEQ ID NO: 454809 - DNA, 100 bp, Homo sapiens
ggatggcagagctaggtgacggccgggaaagtaaccagaagcttcaggaagaggcataaacttggaggaggcagtggagagagcatcctggtatcacagc

SEQ ID NO: 454810 - DNA, 100 bp, Homo sapiens
ggcggacttcgacacctacgacgatcgggcctacagcagcttcggcggcggcagaggagaatggatcttggagaatgtctgaaagtccatgacctggctt

SEQ ID NO: 454811 - DNA, 100 bp, Homo sapiens
ctcagcctctccagcagctgggattacaggtggatagatacttctcaagacatcacacagcgtgagtcaatcaaggagggaagccacaagcagactgaca

SEQ ID NO: 454812 - DNA, 75 bp, Homo sapiens
gattctttctctggaactgaaccagaggttcacaaaacaagtgtagtagtacaatgcttgcacactgcacggtgg

SEQ ID NO: 454813 - DNA, 101 bp, Homo sapiens
aggcgacatggggcacccggtgtaccgcggcgagaagccccagctgcactacgcgaaatgaaagctcattagcatctacactgaagacgctcctgttcttc

SEQ ID NO: 454814 - DNA, 75 bp, Homo sapiens
cgccgctgccccggctgcctcctccctgagttggttaccacagagaagcgcttcctcaaagacagtttgtacaat

SEQ ID NO: 454815 - DNA, 80 bp, Homo sapiens
tgcccttcaccgcgggcgccaatggggagcagaaggactcggacacagatgaaggatttgggggcagagcacttggcagg

SEQ ID NO: 454816 - DNA, 100 bp, Homo sapiens
agtgtggcaaccagatcggagccaagttggattggatgctgctggcaagacaaccattctgtataaactgaagttaggggagatagtcaccaccattcct

SEQ ID NO: 454817 - DNA, 80 bp, Homo sapiens
cgcgggatacgcctcagcgcggcgcatattaaatttcctattgactacccctattcaccacctaccttcagattcttgac

SEQ ID NO: 454818 - DNA, 82 bp, Homo sapiens
gctgagaatggagtggtcaataaaggcttctttttcggacttgggagtccatagaggccactgtattctattgaagaacatg

SEQ ID NO: 454819 - DNA, 83 bp, Homo sapiens
ccaccgtgcagcggggcatcatcaagatgggctctctaaatacgtacagattctgcgataatgtgtggacttttgtactgaat

SEQ ID NO: 454820 - DNA, 97 bp, Homo sapiens
atcactactcttggaatcaaagataaatccaaatactgcatatcagaaacaacaggattttctgccgtctcttggcaaaaatggcaaataatgatgc

SEQ ID NO: 454821 - DNA, 75 bp, Homo sapiens
gacgtctatgatatccctccttctcataccactcaagggattcacttgttttcagaaccacagtttcaaggtcac

SEQ ID NO: 454822 - DNA, 82 bp, Homo sapiens
tctgaagggcatcatgcatcttactgaaggtcaatgagtggtcattgaagataagaaaggaaatgagagttgttgacaggca

SEQ ID NO: 454823 - DNA, 75 bp, Homo sapiens
ttcgagccaagctcacagacatccagatcgagctgcagcaggagaagagcaagcgccatcatgaccgggtcctat

SEQ ID NO: 454824 - DNA, 75 bp, Homo sapiens
cgctgaggtggcccgtggggcagtctctggtccagggtggcctgtctggcagcggcgtgcctagtgagttgcccc

SEQ ID NO: 454825 - DNA, 75 bp, Homo sapiens
gtggtccgcgcccttcctcggcgggccggactgtatcccagtcgacatcagtgacagtgatatgatgctgaacat

SEQ ID NO: 454826 - DNA, 90 bp, Homo sapiens
ggccatgtcctacgtgaaggatgacatcttccgaatctacattaaaggttgttcctcaaagtcattcaagctgtactcgccgaaggagcc

SEQ ID NO: 454827 - DNA, 100 bp, Homo sapiens
gtcactatcatatgacaaaggctttgccgcagttcatcttcctccctgtgtactttccatttgccttcctggtatgccgagattttgctgtcctggagga

SEQ ID NO: 454828 - DNA, 104 bp, Homo sapiens
gttttgatgaaggaaaattaaaagctggccaaagtgtaattggtctgcaggtgttgtgtaacggaccaggaacatgtgttcctatctgtgtatctgcccttctc

SEQ ID NO: 454829 - DNA, 50 bp, Homo sapiens
cgtggaaagtacaggtcctgacagctggtactccaaagattcaggtttac

SEQ ID NO: 454830 - DNA, 100 bp, Homo sapiens
aaagaaaagaaaaaaaagagcaagaaacagaaatatgaaaaaaacaatgagtcatctgatagctcatcaatcggtcgcttggttatcggacagaatggaa

SEQ ID NO: 454831 - DNA, 75 bp, Homo sapiens
cagctatggtgatgattagagacatactaatgtacatgtttctcaactcattggatgctaaagaaatatatttgg

SEQ ID NO: 454832 - DNA, 100 bp, Homo sapiens
atagccgagtatgaaagtcaagtcaaagggattcatccaaccatcatttctgagtcattccagaaggccctggaaaagggcattgaaatcttgactgaca

SEQ ID NO: 454833 - DNA, 100 bp, Homo sapiens
cttctctgaggcggcgagagatggtcaggtctggagctcgaccgggccaggtcatgcttcaccccttcctccatctgctgcacctaccactgattctaca

SEQ ID NO: 454834 - DNA, 73 bp, Homo sapiens
gattgtcacgagaaagctgcacagtatcaagtttgtgtgcagcttggtgtattatggcctaactctgagtgcg

SEQ ID NO: 454835 - DNA, 83 bp, Homo sapiens
cgcacccctccgagcagcccggggatccagcacgcaggagagtcgcggttgctgatcgtggtgcttgagtagagccgtggttg

SEQ ID NO: 454836 - DNA, 96 bp, Homo sapiens
tcactgcacatcgaattaagagagcagaaggatgggaggaaggtcctcctacagacctgaagattatcggctataagagaataagaattgcagaaa

SEQ ID NO: 454837 - DNA, 98 bp, Homo sapiens
catgtgatcttggcctgcaggaacatggcaagggcgagtgaagcagtgtcacgcattttagaagaatggctttaccgatttgttacaactcaagcaag

SEQ ID NO: 454838 - DNA, 75 bp, Homo sapiens
ccccagctgcgcaaccctaggaactctcggctggcaaacttccccagactctgcgaggaaacggaaaggattgtt

SEQ ID NO: 454839 - DNA, 75 bp, Homo sapiens
aggacttctgcgcgcgggagttcgaggccctgcggagctgcttcgccgctgcgatcatggaagggaagtggttgc

SEQ ID NO: 454840 - DNA, 75 bp, Homo sapiens
caggaatatcgagagcgtcatgaacccgagctatagagaaaggagatgaggcttgggcactgtttaaaggaaagt

SEQ ID NO: 454841 - DNA, 100 bp, Homo sapiens
ctcggggccactgcactgggtgattcacgtgtgcccaggccctgaggtgggccggacctgggagtggcagcacgtggccgaggagctccagcatctgctg

SEQ ID NO: 454842 - DNA, 82 bp, Homo sapiens
ttccaaagggaactgaaattactattgcctttgattttgactatggaaattgattgtagaaggcatgaaacaaaaaatgtgg

SEQ ID NO: 454843 - DNA, 75 bp, Homo sapiens
ttgagtttattaagcaagcacaggcagctctgaaccaagttgtcctatgggacaagattgttttgagaggtgata

SEQ ID NO: 454844 - DNA, 75 bp, Homo sapiens
cttttggatggctatgaaacagcccgctatgggacagggagattggaaaggtgtatgagcattgtgacatcgatg

SEQ ID NO: 454845 - DNA, 98 bp, Homo sapiens
atttcataccataattgagttcccacttgaaaggggctgcgttctcatgagaggagccacctggccctggccatgtttacccgcgaggacaagtacag

SEQ ID NO: 454846 - DNA, 75 bp, Homo sapiens
tccgagggtgcctgggaatcggtcgcctggaggaccagtatttcccatggagggaagtgcagagctgtactgttg

SEQ ID NO: 454847 - DNA, 101 bp, Homo sapiens
cgaggacgaggcggcgccgccgggctgtggaggtggccatggtgcccggccctgcctcatagcaggctgccatgtcgcgggaggcgggctcatgccgcgtg

SEQ ID NO: 454848 - DNA, 100 bp, Homo sapiens
cccttccgtatctgcctaggcattttgctgtctcctcctaatacgtctgccacaggtgtgtatttagcagctttaccaactcctggtggtattcagattg

SEQ ID NO: 454849 - DNA, 100 bp, Homo sapiens
cggcgggagccagcgagccacgggagcgagccagatgataccacgagtcaacccaaaagttgctggggagaagttgctctttaatgaattgcatctcatg

SEQ ID NO: 454850 - DNA, 75 bp, Homo sapiens
tttacctcgctgaccctatgaaggaagcgttgttgacgaccatggacatcatccacgatggatttggattcatgc

SEQ ID NO: 454851 - DNA, 88 bp, Homo sapiens
cccattctcccagacatggggaacagggtcacagctctcacccaggtcgtagatgtatccaaaggaattgttaatgcagttaaggatc

SEQ ID NO: 454852 - DNA, 100 bp, Homo sapiens
tttcagaagattgtgattcagcctctactaaagttgtcatccgtggagcaggaaaccaggagatgccgctgaccttccaggatgtggccgtgtacttctc

SEQ ID NO: 454853 - DNA, 75 bp, Homo sapiens
cagcaagcgagagattgcccagctcaagaaccagctcgggttcatgacgctctcgatattcctgtgcagaaacct

SEQ ID NO: 454854 - DNA, 100 bp, Homo sapiens
gcgacaaaacaaactccaaaagaaggtgtgaaagttaacaagaaaaagcttgtggtgaaggggggcaaaaaaaagaagcaagttctgaagttcactcttg

SEQ ID NO: 454855 - DNA, 100 bp, Homo sapiens
agcttgagtccagcagctttgtggactcggacgaggatggcagcacgagcaggtcactcccacagaggagggcttgagggtcctgacccagctggtggcc

SEQ ID NO: 454856 - DNA, 50 bp, Homo sapiens
tgagaggaaaacagcctacccgaacagtgctcggcatggcagggattcca

SEQ ID NO: 454857 - DNA, 83 bp, Homo sapiens
cctggctccccatactagtcgccggtgtcgtgaaaactacccctaaaagccaaaatgggaaaggaaaagactcatatcaacat

SEQ ID NO: 454858 - DNA, 74 bp, Homo sapiens
gtggaaatccacaaggattcttttcaatacatcctaaaacagtggaagcatcagttcacagcagtaatgcacac

SEQ ID NO: 454859 - DNA, 90 bp, Homo sapiens
aaagtcaaggctgtggataccacgcctccacagccacggggacaccctgcacctattcccacgggacaggctggacccagagactctgga

SEQ ID NO: 454860 - DNA, 83 bp, Homo sapiens
ttcgtttgggacgaggagaggatccaggaggaggagttgcagaggggacaccatcgccagcgtcaatggcctgaatgtggaag

SEQ ID NO: 454861 - DNA, 82 bp, Homo sapiens
gatgagaccgggggaggcgacgctaagttgctgatcgtggcggaatcggtgagtttcaaggatgtggctgtggacttcaccc

SEQ ID NO: 454862 - DNA, 100 bp, Homo sapiens
aaatcatccatctaaagcaccagtaaaatatggtgaactcattgtcttagggtctatcatatgcaagtcacacggttggtttcacgccaccaacttcact

SEQ ID NO: 454863 - DNA, 81 bp, Homo sapiens
aaccaggagattgcgagggagcgatgcggtgcagcgcggaagcaggtcctggggaccaaggtggacgcggagcgtgacggc

SEQ ID NO: 454864 - DNA, 100 bp, Homo sapiens
tgtcatccttgcagacctcaacctctcaggtttctgctttgggacaaccatacatctaattccttaaagtagttttatatgtaaaacttgcaaagaatca

SEQ ID NO: 454865 - DNA, 74 bp, Homo sapiens
ctcagcctactatctgtctggagaagagggccgttgctccagggagaactgcaaatatcttcatccacccccac

SEQ ID NO: 454866 - DNA, 74 bp, Homo sapiens
ttttggcattgacatttaattttagggtcctttatatagaagggagagtagctccagaaatcctgaactatgat

SEQ ID NO: 454867 - DNA, 99 bp, Homo sapiens
agcggatcccgtggagtgaaggtcgcaccgcggcgtaccatgcggagaccatcaagaatgtgcgcacagccacggaaagctttgcttctgaccccatcc

SEQ ID NO: 454868 - DNA, 96 bp, Homo sapiens
cggcggtctgataggctacatcgcggcatgagatgaagctgtgacaggtgccgctacctggctgttcagctgtctcctgccatccctgtatttgct

SEQ ID NO: 454869 - DNA, 73 bp, Homo sapiens
ttgccgccttgatgcagcatcaggcgggagacactatattcaatcgtgctaagctcctcaatgttggctttca

SEQ ID NO: 454870 - DNA, 99 bp, Homo sapiens
cggaaccgtgctgccccgccccgctccacccgtgaggatgtaaagacgaccgtggtttaccctgccacagagaaacacctgcagaagtacctgcgccag

SEQ ID NO: 454871 - DNA, 82 bp, Homo sapiens
cttacgcagaaggacctggccacggcgggcgctaatattgacacctgctcagaagaccagaggaccccgttgatggaagcag

SEQ ID NO: 454872 - DNA, 50 bp, Homo sapiens
cctgctgtcgtcacatctgacctcaaatcaatggccaatgtacatggtgg

SEQ ID NO: 454873 - DNA, 100 bp, Homo sapiens
gcgccttgtgttgtgtctcctggaggctgccgacatgaagtgctttttcccggtgctgagctgtctggctgtgctggggtgagcatggacaatcttgtgc

SEQ ID NO: 454874 - DNA, 87 bp, Homo sapiens
acagcggccggggcgcaggcgcccgtgcggaatggcagcaaccatttccaaaaaagtttcctttctctgaatttgtgccaaaagttt

SEQ ID NO: 454875 - DNA, 96 bp, Homo sapiens
ggatgggtacatggtggtgaatgtcagtagcctctcactgaatgagcctgaagacaaggatgtgactgtattatacctgaagaaccttagccctcg

SEQ ID NO: 454876 - DNA, 80 bp, Homo sapiens
tctgcagagagagtgcgcagaaggattccgggagcacagttccgccgagagtgaaacacaaatcttttctaacggctgag

SEQ ID NO: 454877 - DNA, 75 bp, Homo sapiens
gatgaacccaacctagtgggtgtaatacatcatgaactgcagggtgacactgctgagtgtggagatgactgccct

SEQ ID NO: 454878 - DNA, 100 bp, Homo sapiens
gtgtgcaaacccgagagaactgggagccagaaaacttcggctccatgttggaactgtcgtggaagggaacgaagcccatagacctggggaatggtcagac

SEQ ID NO: 454879 - DNA, 73 bp, Homo sapiens
agaactcctgctacaaaagcggaaagagctccagagaagccttgggacaccaagagaagctaaaagctgagca

SEQ ID NO: 454880 - DNA, 50 bp, Homo sapiens
gggcgctccaggaggcactcacaggacatgacaccagtggcatatcacgg

SEQ ID NO: 454881 - DNA, 75 bp, Homo sapiens
agaaggcggacaccgaccctgagaacttacctgagatttcgtcacaggtggtgcagcggctgacgcggatggtgg

SEQ ID NO: 454882 - DNA, 50 bp, Homo sapiens
atcgaggagctgcggctctaccccccggactttggaatcccaaagcccaa

SEQ ID NO: 454883 - DNA, 100 bp, Homo sapiens
tcagaagaaggacttcggaatgcactacaacaggaaaatcatattatagatggagtaaagcatggagatatggaccaaaaggaacgagacgtgattatga

SEQ ID NO: 454884 - DNA, 82 bp, Homo sapiens
gcgcgggaggtgttcgagaacgaccccgagacggctactgcagcactggggtgtcagttgttggtccgacccagaacgcttc

SEQ ID NO: 454885 - DNA, 50 bp, Homo sapiens
catggaatcccttgcatggctctcaaggtggactagcagaaagactaaat

SEQ ID NO: 454886 - DNA, 75 bp, Homo sapiens
cccgtggccatgctgaagcggaggcggccgctgctcgagtttgtgaagcctggagctgagaattcaagagactac

SEQ ID NO: 454887 - DNA, 117 bp, Homo sapiens
cgctctcttcatgggccatgcccggtgaccacttttggaccaaaggcctgtgtgctgcagaacccccagaccatcatgtttggtgcacctcgatttggaggaagtagggcagggccc

SEQ ID NO: 454888 - DNA, 71 bp, Homo sapiens
aaaggcggcccagatgaaatcccaggttatgacacacctccgtgtgatttatgagcgcatgaatcagtctc

SEQ ID NO: 454889 - DNA, 100 bp, Homo sapiens
gtggaatatgagtgatgacaaaccctttctatgtactgcgcctggatgtggccagctgtgaattcctttggacaattgatgatatttatcattgtgccca

SEQ ID NO: 454890 - DNA, 100 bp, Homo sapiens
tggagagaactgctggaaggagactggatgatagaattaataactgaagtgaagtgatggactccgatttggagagtagtaagacgtgaaaggaatacac

SEQ ID NO: 454891 - DNA, 50 bp, Homo sapiens
tgcgctcgggctggaccagcaggtcttgtccaataagcatgtggctcctg

SEQ ID NO: 454892 - DNA, 90 bp, Homo sapiens
gtttgtctggattttcctgtagaactgagggcaggttcgagaacttgtcttggacaattgcaaatcaaatgatggaaaaattgagggctt

SEQ ID NO: 454893 - DNA, 75 bp, Homo sapiens
ccgggtgatgcgggccgtgccccttgaggcgtctgcaggagctgcctggtgaagtacctggaggagaacaacacc

SEQ ID NO: 454894 - DNA, 75 bp, Homo sapiens
gaagaggatgatgtttttggtgaaggacttcagaaatgggcttgggaaccagctgagttcaggatcccacacctc

SEQ ID NO: 454895 - DNA, 100 bp, Homo sapiens
ttttggaggccataatgaagacttcatcgctagtggcagtgaagtaccttaccagtaacaaatgtggcaaatatgtggacattggagtcttagcgtctga

SEQ ID NO: 454896 - DNA, 100 bp, Homo sapiens
ccgattttgattgatttccatgctctgaaagacatccttgggcccccgatgtatgaaatggagtctattatcctcccagtccacaacgctgaaccgtggc

SEQ ID NO: 454897 - DNA, 82 bp, Homo sapiens
catggcggtggaggacgaggggctccgggtcttccagagcgtgaagatcaagatcgagcccaaatcttgtgacaaaactcac

SEQ ID NO: 454898 - DNA, 75 bp, Homo sapiens
gaacggcaacccatccagatcaccatgccggaattacatgaacgacagccttcgcaccgacgtcttcgtgcggtt

SEQ ID NO: 454899 - DNA, 98 bp, Homo sapiens
gccaagctcagcggatggccgaaaatctaggcttcgttgggcctttgaaaagccaggattttgcaggttaattcctcacacacgttcaccaggtactt

SEQ ID NO: 454900 - DNA, 75 bp, Homo sapiens
tgggaattctcttcactagaatatggagactgttcaatcaccagggtgaagagatggcgtttgtgaagagtggct

SEQ ID NO: 454901 - DNA, 101 bp, Homo sapiens
gagttcaaagagctggttacccagcagttgccccatctgctcaaggtcctactgctctgttggctcatgaaataggttttggaagtaaagttacaacacac

SEQ ID NO: 454902 - DNA, 100 bp, Homo sapiens
cgcttcggccacgactgggatcctacgtgcatgaagatggacgaggtcctgtacagcatcgccgagaagccccataggctccttcaatttccgtgatcct

SEQ ID NO: 454903 - DNA, 98 bp, Homo sapiens
agcccatcggccggggataagagagcaagaaaatgaagctcaagagcctcctgctccggtattacccgccagcaatgtttttggaacagtgccagtgg

SEQ ID NO: 454904 - DNA, 100 bp, Homo sapiens
cgcagtatcatgctggccaagaagatcatcattaaggacggaggcacgttaatgaaggagttcccccttctgagtatgttcaatatccatgaaaaccttt

SEQ ID NO: 454905 - DNA, 75 bp, Homo sapiens
taaacatcgaaaaggcgttcctcacgttagctgaagatatccttcgaaaggtggggaagaaaacatgacagaaac

SEQ ID NO: 454906 - DNA, 83 bp, Homo sapiens
gacggacgcaagatggcgacggcgaccatagctctccgctggcgggaggagctctcccacatgaagcgacttcccccagtgct

SEQ ID NO: 454907 - DNA, 83 bp, Homo sapiens
tgaagagtcctgaccacaatggggaggacaacttcgcccgggacttcatgtccctgaagaggaaggagaaggaatatgagcat

SEQ ID NO: 454908 - DNA, 82 bp, Homo sapiens
ctccccaaaataaccattctccagatccaggatctcaaagatttcatgagacaagctggggaagtaacgtttgcggatgcac

SEQ ID NO: 454909 - DNA, 100 bp, Homo sapiens
ctaccgctgctggaccacaaaccgctgccagaaaagatttcagatgcatgccaggtttccactgattgccagaactcgagatcactacacatggatcccc

SEQ ID NO: 454910 - DNA, 90 bp, Homo sapiens
aaaccacttgatatgattgttgggaaggcatggaatatgtttgcttcaaaatccgaggaatgggcatgaactccccggagctgctcctgc

SEQ ID NO: 454911 - DNA, 100 bp, Homo sapiens
attctgatgaagaagttattcaagatgcgacatctcgaatcagcgatgcacacttggcagacacaatgattggcaaagcagtggaacatatgtttgagac

SEQ ID NO: 454912 - DNA, 51 bp, Homo sapiens
gcggattagccttcgcggggcaaaatggccaaaggaggactttctggtttg

SEQ ID NO: 454913 - DNA, 100 bp, Homo sapiens
gaccagacaaatcaaattagtggttttggaaaccacccctactcctaatcccccgactacagaagaggagaaaacggaatctaatcaggaggttgctaac

SEQ ID NO: 454914 - DNA, 100 bp, Homo sapiens
ctgcccagacaccagctatgcccccgtggccaccgcctccagcttgccaccaaagacctgcgactttgctcaggctaaccttgccgcgggccgagccctg

SEQ ID NO: 454915 - DNA, 101 bp, Homo sapiens
gatgacttcaaagcctattcaaaaataaaggtggacaatcacctttttaacaactatcagttgagggatttgcagttgataaaatggctggagaggttaag

SEQ ID NO: 454916 - DNA, 88 bp, Homo sapiens
tttgtgcaggacaccgacatggaacagggactcactgggggtgacgtcctgtatgagctgctccagtacatcaagacccagcggcgag

SEQ ID NO: 454917 - DNA, 110 bp, Homo sapiens
agcctcaatgaggtgaagatttacagcctcagctgcggcaagtcccttcctgagaaatgggacgtcggtcatcagatactgaagaagaaagcagaagcaagagaaaaaag

SEQ ID NO: 454918 - DNA, 82 bp, Homo sapiens
caccacgagaattccgcagcccacacggtggctattatcatggaaaactaatttttcccagagaatttcctttcaaacctcc

SEQ ID NO: 454919 - DNA, 100 bp, Homo sapiens
aatacccaagcctaggacaaaagcctggaggctccgacttcctcatgaagagactccagaaagggctgcaagctttcttcctggtggcagatgacatcat

SEQ ID NO: 454920 - DNA, 100 bp, Homo sapiens
tctggcagtgacgaggacgaagtgtccgagtgaactttgaggcgctgatcatcaccatgtcggtagtcgggggaaccctcctcctgggcattgccatctg

SEQ ID NO: 454921 - DNA, 75 bp, Homo sapiens
gagaagattagcaaaggtgctaatccagtggaaatcaggagagatggagtttcactcttgtctcccaggctggag

SEQ ID NO: 454922 - DNA, 100 bp, Homo sapiens
aaagcgcttctgccagaggtaaactgaggaaggtcccaggtagccgcggagcgcacccccgtgcccttttcagctgtgtcagcgtgttatgatgccgtcc

SEQ ID NO: 454923 - DNA, 83 bp, Homo sapiens
gcatggccccgcaggtcttcacccaggccctggagtgcatgcgcaggtgcggctggaagtatttcgggcagaggagctgatgg

SEQ ID NO: 454924 - DNA, 82 bp, Homo sapiens
aatatctgtcttcggtggactccttcggcagtccacccaccgccgccgcctcccagccacccgcgagtcggccttcgttcac

SEQ ID NO: 454925 - DNA, 100 bp, Homo sapiens
acatctcagtgaatttgcaagtggcccaggctgcaagcacaaaggaagtttgctcagtctcagccgaatagtcccagcacaactccagtaaagatagtgg

SEQ ID NO: 454926 - DNA, 88 bp, Homo sapiens
cagctggagctggcagtgctccagcagcagcaggggctgcaagctttcttcctggtggcagatgacatcatggattcatcccttaccc

SEQ ID NO: 454927 - DNA, 75 bp, Homo sapiens
ctgcaacatagagctgacattaactgtcagaggatgaagtttttgctgctgcagcagaagtacctagaatacctg

SEQ ID NO: 454928 - DNA, 90 bp, Homo sapiens
agagcaatgaactaacccgggcagtagaggaactacacaaacttttgaaagaagctggtgaaggcccttatgttagctatgggatatcat

SEQ ID NO: 454929 - DNA, 82 bp, Homo sapiens
ttcatcgtcgcggttctgctgccgatcccggcctgtgattaatattcagaaaaccatcacagtaactcctaacagaattgac

SEQ ID NO: 454930 - DNA, 98 bp, Homo sapiens
agaaagatccaaaacaagtggctgcggccgtcgcccaggagtcatcggacgccagaatctggtattgttgcagcatctggcagtgagactgaggatga

SEQ ID NO: 454931 - DNA, 100 bp, Homo sapiens
cataatcgctgaagatgttgatggagaagctctaagtacactcgtcttgaataggaacgatggcactgaatttggaggttctatctaccagaaggtgaat

SEQ ID NO: 454932 - DNA, 100 bp, Homo sapiens
gaatgacgtaaaagaccctgtctcaattgaagaaagagcgaaatgcgcccatgctggttccagctggatcagatccccttcaaggacatgtggcccgacg

SEQ ID NO: 454933 - DNA, 75 bp, Homo sapiens
gcaccaggatatggacccatcatttctagtctccctcagctgttgagcagctacaaaccactgagtaagcaaaaa

SEQ ID NO: 454934 - DNA, 101 bp, Homo sapiens
aggtgctccactgggacccggagactgtggtgcgcctgcagctctgggatatcgcagacttaattcagtgcacaaatgagatgaatgtgaacatcccacag

SEQ ID NO: 454935 - DNA, 97 bp, Homo sapiens
cgagtccagcccaggaaaatggagagactctaaaatagagctcaagcttgagaagagagaaccactaaagggcagagcaaagactccagtaacactc

SEQ ID NO: 454936 - DNA, 82 bp, Homo sapiens
acggggtgctgtcacgctgcctttggcagcctaccagcactacatcctggccaagaataacatagctgatccagaagaactg

SEQ ID NO: 454937 - DNA, 100 bp, Homo sapiens
gactcgcttggtgccctgacaggtattctgctccgctttatgttgatataacaaaaacagtcattaaagaaggtgaagaacaacttcagactcagcatca

SEQ ID NO: 454938 - DNA, 83 bp, Homo sapiens
cgagagtgggcgagaacgtccactgcgggccggcgaaagctggttcgtgctggccgtgggcagcgccgtctttgatgccatgt

SEQ ID NO: 454939 - DNA, 100 bp, Homo sapiens
cacagcacatggatttcagaaccgcctgtgaggagcggacaaggcaaaatctcagcaagttcggacctctagtacaataaggcgaacctcctctttggat

SEQ ID NO: 454940 - DNA, 75 bp, Homo sapiens
gaaccggcacctgcacacctggatccaggataacggaggctggttggaaaatggatataccttatttgattatga

SEQ ID NO: 454941 - DNA, 75 bp, Homo sapiens
aggaaaggtgccacagcagagacgcgaaggagaggccctagaaccagctacagagacttctgaagtggagagtct

SEQ ID NO: 454942 - DNA, 75 bp, Homo sapiens
caaggctctgcgcgagatgaactggcttgactacttcgtgtgggccaaactgaaattgcagaaggcttcagaacg

SEQ ID NO: 454943 - DNA, 86 bp, Homo sapiens
gtgcggccgctgccaatcactcccattggggtgacagcggccatgaggtatattactcgaggggtttttaaatattgtcaggaaaa

SEQ ID NO: 454944 - DNA, 98 bp, Homo sapiens
ggaatgtgatagaagttcgttggaagcaaaaaaagcccagtggaggaaagagctagcacttttccagccattaactccaggctctcgagaatttgaag

SEQ ID NO: 454945 - DNA, 83 bp, Homo sapiens
agtccaggctgaagacagagggctctgatctgtgcgacagaaaagaagatgctgatatgctacaacacggatgaacctggagg

SEQ ID NO: 454946 - DNA, 75 bp, Homo sapiens
cttaccttaaaccttttaagcaaggaaattgaactaagaaatggagagctcttccgccctctctggatgagggaa

SEQ ID NO: 454947 - DNA, 75 bp, Homo sapiens
gcctgttattcaaagaggttagcagtagactgttggaagtaagtgatgtcttggcattgcccattttcaagcagg

SEQ ID NO: 454948 - DNA, 87 bp, Homo sapiens
gaagaagaagccttggaggatgactctgaatcgagatcggatgtcagcagctctgccttaacagacatagggcctgattacattcca

SEQ ID NO: 454949 - DNA, 100 bp, Homo sapiens
cctgtacagcctgcagaactgaatagccaggtctggctgggtcggcacaacctgtttgagcctgaagacacaggccagagggtccctgtcagccacagct

SEQ ID NO: 454950 - DNA, 100 bp, Homo sapiens
gccggcctcctcagtgcgaagaagctgcagccgcacctggccaaggaggatgtgaaaccatatcaagttaatggagtcaacccagcctatccagaatccc

SEQ ID NO: 454951 - DNA, 100 bp, Homo sapiens
gtcagtctcaggagaagaaatagatgcaatggatgttcagcagctttcacaaatagtaccaaaggtttgagcacaaaatgaacataattagggaaaataa

SEQ ID NO: 454952 - DNA, 91 bp, Homo sapiens
acaagtcggagctttttacaggcatttccttcagtgcttcctacagagaacaatggagccagaggattggttgccgtggtctttactgctt

SEQ ID NO: 454953 - DNA, 82 bp, Homo sapiens
cttctcacaatgaggctccctgctcagctcctggggctgctaatgctctgggtctctggtgttggagagcacaatggctgaa

SEQ ID NO: 454954 - DNA, 95 bp, Homo sapiens
cgtggacgccgccgaagaagcatcgttaaagtctctcttcaccctgccgtcatgtctaagtcagaggaatcagagatcattgatttcttcctggg

SEQ ID NO: 454955 - DNA, 83 bp, Homo sapiens
ccaagttgaaaatggacgagtaatcgcctgctttgattcattgaaagagaactgcgacacatcaccaagctgaagccctggag

SEQ ID NO: 454956 - DNA, 75 bp, Homo sapiens
cccgagtggattcatttttctacatattaggatataaccctgagacaagactgcctgcgctgctgacttaaggcc

SEQ ID NO: 454957 - DNA, 100 bp, Homo sapiens
ctgaaacaacacaaaaccctatctcaagaacttgttaacctccggggagagctaggggccattgacgtttagggatgtggccatagaattctctctggag

SEQ ID NO: 454958 - DNA, 100 bp, Homo sapiens
gctattttgacaacacttattcatcttgttcagtaagtacaaggtggactgtgcatgcctcaaagaaaacccagagtgccctgttctaaaacgtagttct

SEQ ID NO: 454959 - DNA, 100 bp, Homo sapiens
tcttcataacaataattttgaaaatgctttgtgcagaaaggaatcaaaagaatatttagaatgcaggatggagaggttaaaaagatcaagtggcatgagc

SEQ ID NO: 454960 - DNA, 90 bp, Homo sapiens
ggcagcgtgggtgagcggcgcagcggcggcagcggagagcgagagaggggagcaggatttttcaagccacattcaattgataggatgaaa

SEQ ID NO: 454961 - DNA, 101 bp, Homo sapiens
acacgaagcaaatgaagttttatactaggagagtcacaccgggacagctcatgtcctatattcagctcttcaagaacaacctcaaagctctaatgaatcat

SEQ ID NO: 454962 - DNA, 82 bp, Homo sapiens
ctaggagtgctgagcccgcggaaccgcagccatgatccagagacaatggccccgatgggatggagcccgaaggcgtcatcga

SEQ ID NO: 454963 - DNA, 82 bp, Homo sapiens
cgggaactccggttaccccctcggggcgcaaggcggcaggggaagctcttcgtgggcggtcttgactggagcacgacccaag

SEQ ID NO: 454964 - DNA, 83 bp, Homo sapiens
gccagccgcaccatgccgctcctaagcctgcacagccgcggcggcagcagcagtgagagacctttgggctcttggatgcataa

SEQ ID NO: 454965 - DNA, 100 bp, Homo sapiens
cggacatcttcctagcttgtgccaagaggttctctccccctcctgctatggagaaggtgctgactccagcacagatcaagtcaatttgtcaggcaattct

SEQ ID NO: 454966 - DNA, 83 bp, Homo sapiens
atgagaagcccctggtgctggagatgctgaagagagtgactcagacatctcctctacaagtacctaacccatcctggatgcac

SEQ ID NO: 454967 - DNA, 83 bp, Homo sapiens
aattggactcaggcttaaatcaatagataatgtgtggtggacacaggcctattcatcaacatggctgagagagtctactttgg

SEQ ID NO: 454968 - DNA, 82 bp, Homo sapiens
ttgaaacgtctgtgggttacgccatctttaagcccaagaagatgaaaggattgttcttgttgacaacaaatgtaagtgtgcc

SEQ ID NO: 454969 - DNA, 90 bp, Homo sapiens
ccacgttggatgctgccttgtccggtaccctgtcaggtttgttccaagatgaagattcatgcagtgattgtagctaccgtgataaaccag

SEQ ID NO: 454970 - DNA, 97 bp, Homo sapiens
acgtgaagggctacctgaagatggcaccctctaccgaataaacagggaggcatgcatctccccatgtgctatgatgctggctctggtgtacattgaa

SEQ ID NO: 454971 - DNA, 83 bp, Homo sapiens
ggccaagttcatctcctccgtcaccagccacatctaccagagtgcctggtgaagaatgtgatgggatcactagcatgtctgcg

SEQ ID NO: 454972 - DNA, 100 bp, Homo sapiens
ctcaccagacagatcgctgtcaaaaccctagctgaggaagtggagaggctggcggcgatgcgttctgactccctcgtcccaggcacccacaccccaccca

SEQ ID NO: 454973 - DNA, 98 bp, Homo sapiens
aggaagtggaggttcaagcaagctaagatgtgatacagtggtgagtgaaatcagtactggtcaaaggactgtaaatttcaaaataaacagagagctct

SEQ ID NO: 454974 - DNA, 75 bp, Homo sapiens
ggacacgctggtgcatctgtttgccggaggatttccacaagacggcaccctatgtcgtcactggcagcgtagatc

SEQ ID NO: 454975 - DNA, 82 bp, Homo sapiens
aggtcaagatcaagatccaggtctatttcacgaccaagaagcagccaatcccactaatcctgatgaggctgacaaagttggg

SEQ ID NO: 454976 - DNA, 74 bp, Homo sapiens
accagatgtacttgtgcttcctgctggccgtgctgctgcagggaagaggaagaacgtctgagaaataaaattcg

SEQ ID NO: 454977 - DNA, 85 bp, Homo sapiens
agcttcaacttgtccagcctttccacgagcacctttaagattgtccccttggggcggaaagaagccaaggccaaggagctggtgc

SEQ ID NO: 454978 - DNA, 101 bp, Homo sapiens
gtcgcggctcgagagcgagagtcacgtcccggcgctagcccagcccgacccagaacgtgctggccaaagcgctctatgacaatgtggccgagtccccggat

SEQ ID NO: 454979 - DNA, 75 bp, Homo sapiens
gcagatagccagcccatacaagatcgtgtatggcacagtcacaagggtgggtgaaaagatacatcaaggcctttt

SEQ ID NO: 454980 - DNA, 82 bp, Homo sapiens
cagcagcctctagtggaatgatcagcgtagtcaagtaccttctagatcttggagttgatggtggcccggtggaaatcctgcc

SEQ ID NO: 454981 - DNA, 129 bp, Homo sapiens
cccttgctcgggatggtgccacaggaggctgtgcgggccccgctccgcttcgaatgggtgtgatgaatgcagactctgctaccattttggctgtttggatcctcctttgaaaaagtctcctaaacagac

SEQ ID NO: 454982 - DNA, 75 bp, Homo sapiens
tgggatcccggccaccagcaattgtccgaacatggtccaagacaattcctgggaaagttcagttcttctcaagtg

SEQ ID NO: 454983 - DNA, 51 bp, Homo sapiens
acaggcgtattctggtaatttcgaggagtgccggtggtggtgtgcacattg

SEQ ID NO: 454984 - DNA, 82 bp, Homo sapiens
cggcagcggcgggcctgaggcgaaggagcggccgggagcccgccgcgctggtagcggtgagaagccctaccactgcaactgg

SEQ ID NO: 454985 - DNA, 96 bp, Homo sapiens
atccataaaaattcatcagagagcattttactactgagctgcaaaggtgacctcaaagcagaagctctgaattcacctctcatctgacgactgaca

SEQ ID NO: 454986 - DNA, 82 bp, Homo sapiens
tgtgcttttattactttcatctatacacttccagtgtcgaaggctggacagggtttggaaatcccttgtctccaggttgctg

SEQ ID NO: 454987 - DNA, 98 bp, Homo sapiens
agcaccagatgcttcgggacctcataaaggaaagtctgcgggccaggcatcgacatccgcaacgactatcagcagctgaagcgcctggagaactgcac

SEQ ID NO: 454988 - DNA, 93 bp, Homo sapiens
cgctgccgtcgccgccgccaccatgcccaagagaaaggtaactaggatttctacctcaaccgcgagacctatgcaaggacggtgtggaccaac

SEQ ID NO: 454989 - DNA, 90 bp, Homo sapiens
gcgccgctgggcctgcaggtctctgtcgagcagcggacgccggtctctgttccgcaggatgaccctgtacacgtatcctgaaaactggag

SEQ ID NO: 454990 - DNA, 99 bp, Homo sapiens
ggtgaaccctgaagtcggtgtctgctgcgttcacggcaggattcggttagggagacgactccgtgggaaggcgttctacaacgtgggtgagaaagtgta

SEQ ID NO: 454991 - DNA, 87 bp, Homo sapiens
tgaaaatggagagactttcctgacatacatcagtctgttacacagggtggtaagcacacaggccccagacaggggctggatggcact

SEQ ID NO: 454992 - DNA, 75 bp, Homo sapiens
cgtacgccctcatggggaaaatctccccggtgactttcagggttgtgagtcccggcccagcccctccacccccct

SEQ ID NO: 454993 - DNA, 75 bp, Homo sapiens
ttttaaaagctaaggtcatacggaatgcaaaaggttctctacttttagagtcgaaaataaatcctaacactgcat

SEQ ID NO: 454994 - DNA, 75 bp, Homo sapiens
gcagctgaaagcgtgaactgtgtaacggcgactgtgactgtggtgaatgtgtgtgcaggagcggctggactggcg

SEQ ID NO: 454995 - DNA, 98 bp, Homo sapiens
gaccgctcgcggcctggcccttggcctcctcctgctgctactgtgtccagcgcagcatgcttttcacttccactgcatctctcgctggctcaaaacac

SEQ ID NO: 454996 - DNA, 74 bp, Homo sapiens
tattctggtgcttatggtgcctcagctgaagaaaaggtgactggtctcatgagccctgaagaatgaactcagag

SEQ ID NO: 454997 - DNA, 100 bp, Homo sapiens
gagaacctcaacaacccacatgacattgtcatcttccatgagctgaagcagccaagagaacactcgtgaaactgctcaggccatcaagggtatgcatata

SEQ ID NO: 454998 - DNA, 82 bp, Homo sapiens
acgcaaaccaaggatctggggatcttcgcactatcccaagatcaccgaagtggccttggagtacaacaactgtcatggggac

SEQ ID NO: 454999 - DNA, 51 bp, Homo sapiens
ccccagcacacagaagccgagacgcttaacattggtatcccttccctgaca

SEQ ID NO: 455000 - DNA, 100 bp, Homo sapiens
cttcctgtaccgcttatgccaggccgatcccgacctggactcagacaaggtttggttcaagaatcgtcgggccaaatggagaaagagggagcgcaaccag

SEQ ID NO: 455001 - DNA, 100 bp, Homo sapiens
gaccgagaccgtgaccgagagcgtgaccgagagcgcgaatatcgtcatcgttagaagatggataatcaaatagtggtttctgactatgcccagatggacc

SEQ ID NO: 455002 - DNA, 74 bp, Homo sapiens
aaggacaaagtggcccatcatgaaggattaattcgactgatagaaccagatgcctgaggaaacccagacccaag

SEQ ID NO: 455003 - DNA, 100 bp, Homo sapiens
acatgacgccgtcacccttcctgcgattctacttagggcttcgtgggacacatatgcaacatgcctatgatttttacaagcctgatatgctatctgaata

SEQ ID NO: 455004 - DNA, 74 bp, Homo sapiens
cggcgtccccggcgcgaagaggctggactcggattcgttgcctgagcgtttgctgccaattgatggggcaaatg

SEQ ID NO: 455005 - DNA, 100 bp, Homo sapiens
atcagcaccaaaatctcaggagaaatccaaggaactgactcagcacaagaagacagcttcgactccctatgatttcatctctgaccaatcagcactcctg

SEQ ID NO: 455006 - DNA, 98 bp, Homo sapiens
ggaacttcggacactaatcagccagagtaaagaagtcttctgggagagagagttgatgaaaatacagaagaaaatcattgtggagaaacttctagcca

SEQ ID NO: 455007 - DNA, 83 bp, Homo sapiens
ccttgagcaaagagatccgtccagtctgccgcaagttcatgcaagatacccccccaagacacatatgacccaccaccccatct

SEQ ID NO: 455008 - DNA, 100 bp, Homo sapiens
gcaccgggatcgtgaccgagaccgtgaccgagagcgtgaccgagagcgcgaatatcgtcatcgttagaagacctgattcctcagacctctgccctatcgg

SEQ ID NO: 455009 - DNA, 100 bp, Homo sapiens
tgatgagctccgaggcctctgatgtgtggacagaggccaacctgagtgccgaagtctcgcagcatgttgacatagcggctttattgataaaatacaacac

SEQ ID NO: 455010 - DNA, 100 bp, Homo sapiens
gctgtgcgacctgcagggactggcagacccgtagctaagacgccaggatttcctggaagcagagaaatgggaactctaatgatccaggacaaagaagtta

SEQ ID NO: 455011 - DNA, 83 bp, Homo sapiens
atttaagaaagaagatgttaactttcagcttcctctgaagacgggccagttccttgctgtctggcaagaggaaacagctgggg

SEQ ID NO: 455012 - DNA, 101 bp, Homo sapiens
cacaacagggacacctggttccagctgcagcacgtggacgctgactcggaagtgcaggtgattgaaaactcagcctcaaaacaaaaaattcactagttatg

SEQ ID NO: 455013 - DNA, 74 bp, Homo sapiens
ccgggggtggaggtggtgcctctggcagtgacgaggacgaagtgtccgagatttgggaatggatgatgaaggag

SEQ ID NO: 455014 - DNA, 74 bp, Homo sapiens
cttcccgagtatttcctccagagattgtggagcagatggtctgctttacaagaacttgaagaattgaaacaaat

SEQ ID NO: 455015 - DNA, 100 bp, Homo sapiens
gaaggatgtggactgcagtgctgcagtgccagaaatacaggtatcaggatgaagatacacctcctcaagagcatatttccccacaaatcacaaatgaagt

SEQ ID NO: 455016 - DNA, 90 bp, Homo sapiens
gcccgaagccgtcgcggcggggaccatgttgcttccgaacatcctgctcaccggagcttgtggaaacacttccgtgctgtaagcctttgt

SEQ ID NO: 455017 - DNA, 90 bp, Homo sapiens
tacagcccttccagatacagctaccagaccatgtctgctaaagagaaaggaaaatttgaagatatggcaaaagcggacaaggcccgttat

SEQ ID NO: 455018 - DNA, 98 bp, Homo sapiens
ccgcggagtatacaccatgagcaaagctcaccctcccgagttgaaaaagtctcctctgagcctccggcctccataagacccaaaacagatgacacctc

SEQ ID NO: 455019 - DNA, 74 bp, Homo sapiens
ggatctgcaggacctgcgccgggcactggaggagggctcgggtactcactttgtccagttatgctgccaaagaa

SEQ ID NO: 455020 - DNA, 90 bp, Homo sapiens
gggcgagcgcgcgctgtggtgcagccgccgcgacggcggcctccagctccgacccggaaatatatcctggacaattccagccatctctct

SEQ ID NO: 455021 - DNA, 112 bp, Homo sapiens
cctggtttgtggcaggctctatggcctgcaggaagcgctggaaatagccagagagatgtgcaccaattccagctggacatcactgtgaaaatgggacgggataaagtccgag

SEQ ID NO: 455022 - DNA, 50 bp, Homo sapiens
cagatgtgcaacaaagtgcgatggatgaccagtgtcccagtgaaggaacg

SEQ ID NO: 455023 - DNA, 76 bp, Homo sapiens
gcgtggttctgagcacacggttaatttcaaagcttttcccatggagagttcgcagtatgtgcagtgcgtggccggg

SEQ ID NO: 455024 - DNA, 100 bp, Homo sapiens
ggtgggactcaatgttctcgatgccaatctctgcttgaaaggagaagacttggattctcaggtgggactctaatatttgatgaagctgacattgaactcc

SEQ ID NO: 455025 - DNA, 75 bp, Homo sapiens
tggtgggcttgggaagacaaacgacgctctgaaatttggctcccagatgccatggacaatattaccaggcagaac

SEQ ID NO: 455026 - DNA, 75 bp, Homo sapiens
ccgagagcgcgaatatcgtcatcgttagaagggccgctgctacaatggcgagtgcaagaccagagacaaccagtg

SEQ ID NO: 455027 - DNA, 80 bp, Homo sapiens
ctcagaagacagagggttttcttttgagcccgagcgggaagaagttccgcagcaagccgcagctggcgcgctacctgggc

SEQ ID NO: 455028 - DNA, 90 bp, Homo sapiens
gcggtgctgaggctacgcgggctggagactcaggtccatttgggaacaggagcgagtgcccctttggatcaagccatacaagattcttgt

SEQ ID NO: 455029 - DNA, 90 bp, Homo sapiens
ggcgggagcgcgaacgagcgacggcggaacccgtgggcctgtggactgcagcctcggcggtcagcaggctggcgcccatgcggctctaca

SEQ ID NO: 455030 - DNA, 100 bp, Homo sapiens
gcgtcgactgcccagagtccgcggccggggcgcgggaggtgaaatgacaatggatgctctgttggctcgattgaaacttctgaatccagatgaccttaga

SEQ ID NO: 455031 - DNA, 100 bp, Homo sapiens
ccggacggggcggacggcgacgcagcccgcggcagaaggtacagtagcagagggagctcccattattccaatttcagctcagctgaaatacaatattgaa

SEQ ID NO: 455032 - DNA, 100 bp, Homo sapiens
tcctgggtggcatggcgctcctgctcctccaggcgctgcccagccccttgtcagccagggctgaacccccgcagcaggaggatgcattagcacaacaggc

SEQ ID NO: 455033 - DNA, 100 bp, Homo sapiens
ctgaagagcattttccgcagaggcctggtcaaggtggctcagaccacaggagtgttggaggaagcagaattttacaatatcacctcattaataaaacttg

SEQ ID NO: 455034 - DNA, 99 bp, Homo sapiens
gctggacatacttgaccggggtcatcctagggaaaacactatcctctgagatcccagatcatgaggcgatgtaccaattttgacaactgaagacgacat

SEQ ID NO: 455035 - DNA, 83 bp, Homo sapiens
cgactgtgacgaggacgaggaggcagccacggggcccctggatgaaggatttgggggcagagcacttggcaggtcatgaaggg

SEQ ID NO: 455036 - DNA, 100 bp, Homo sapiens
gatgccagtcgtggtactttaagcagctatagtcttgtattgatggttttgcactatttacaaacttttgaagaccctgatagtgccgtcgatgaccgag

SEQ ID NO: 455037 - DNA, 100 bp, Homo sapiens
ttcaaatattagataaatccacgaaaggaaaaacagatctcagtgtacaaatctggggcaaagctgccattgcatatactttagaagaacagaagaacct

SEQ ID NO: 455038 - DNA, 80 bp, Homo sapiens
gggccagggaaccctggtcaccgtctcctcaggttcgagaacttgtcttggacaattgcaaatcaaatgatggaaaaatt

SEQ ID NO: 455039 - DNA, 100 bp, Homo sapiens
tccctacaatggtgtcactgtggctcaggacaactgctatgcctcggcggccccgctccctctgctggccatggcccccccgcccgcgtgccggtccccg

SEQ ID NO: 455040 - DNA, 100 bp, Homo sapiens
tgaaaatttaagtgcaaaaagcatgacaaagcaatatgaggttgccgtggtatgggaatggatggtccaggttttggaggaatgaatagaattggaggag

SEQ ID NO: 455041 - DNA, 100 bp, Homo sapiens
cctggcagaagaggctctgcgcacggacatcctgtgcaacctgcccagctacaaggccaagaaatacaggtatcaggatgaagatacacctcctcaagag

SEQ ID NO: 455042 - DNA, 100 bp, Homo sapiens
gggagagcggccgccgccgctgccgcttccaccacaggacctacaagaacagtgaggagcttcggtctcgtattgtgtctggaatcatcacacctatcca

SEQ ID NO: 455043 - DNA, 100 bp, Homo sapiens
tcttcttctaagagcacactgtcagacatctggatggtcacttactgagcaggtgctgttggcagcagcggtctgcacaaaagcaggaaaggctattgtt

SEQ ID NO: 455044 - DNA, 82 bp, Homo sapiens
gccccaccatgtcagacgcagccgtagacaccagctccgaaatcaccaccaagatgaagatctccttcaacgacaaaagcct

SEQ ID NO: 455045 - DNA, 75 bp, Homo sapiens
agcgcggtccctgtattggtctcctgctcctagaggttcgagaacttgtcttggacaattgcaaatcaaatgatg

SEQ ID NO: 455046 - DNA, 75 bp, Homo sapiens
tcagctgcaacaacttcaatgcagtctttagtcgcatttctaccagtccctgcactaggtcagacaatccccttt

SEQ ID NO: 455047 - DNA, 76 bp, Homo sapiens
atcaaaaggactgaagtggggttaagacttcagggtaaatctgcagagaccagagaaagcacacagctgagccctg

SEQ ID NO: 455048 - DNA, 100 bp, Homo sapiens
cttccggctgcttatttgaatccttgctctgcgatggactattccctggctgcagccctcactcttcatggtcactgctaaaagatggcggcaaggcagc

SEQ ID NO: 455049 - DNA, 100 bp, Homo sapiens
agagccccaaagccactggagtctttaccacacaactaaaattccagatggcaaactcaatgaatggcagaaaccctggtggtcgaggaggaaatccccg

SEQ ID NO: 455050 - DNA, 87 bp, Homo sapiens
tttatgaaccagtgtatcccaaaatgccagtgcccagtatctgggagaagtattttttgacatttcgctgtttgtccattgctgttt

SEQ ID NO: 455051 - DNA, 83 bp, Homo sapiens
tacttccgggagctctttgggatccggccagatgattacttgggatggtgaccactatgatgccctgagggactgcctcaagg

SEQ ID NO: 455052 - DNA, 90 bp, Homo sapiens
agttgaggttcaggaaggattcctgagattccaggaggaagtactggcgaagtgctccatgctacctatggcctgccccacccgcatcct

SEQ ID NO: 455053 - DNA, 133 bp, Homo sapiens
cttgaaaagctggagcttcaccagaatgcactcacgagctttccacaacagctatgtgaaatacgatgaatggattaaagcagataaaatagtaagacctgctgataaaaatgtgccaaagataaaacatcgg

SEQ ID NO: 455054 - DNA, 100 bp, Homo sapiens
agaccctgtgcacctctcagcaggcctttgctggacagatgaagagtgacttgtttctggatgattctaagagggatgccattgaaaagttatttcctga

SEQ ID NO: 455055 - DNA, 82 bp, Homo sapiens
cggagcttcgcggggatcctgctggactgcacgaaaaactcagtgtggaggctgctggccctgccatctgtaagaagatgtc

SEQ ID NO: 455056 - DNA, 100 bp, Homo sapiens
cgctgaatgggctgaaggaggaggacaaagagcccctcatcgagctcttcgtcaagagctctgagctcttcaccctgacctatggtgccctggtcaccca

SEQ ID NO: 455057 - DNA, 75 bp, Homo sapiens
ctattggagcctcctgccgggatgattctgagtgtatcacaaggctatgcaggctttcattaaagatagaaccag

SEQ ID NO: 455058 - DNA, 83 bp, Homo sapiens
agaacaagactctcggctatggagtccccatgttgtttctaataagtgaccgtgacccacagtgcaacctccactgctccagg

SEQ ID NO: 455059 - DNA, 51 bp, Homo sapiens
agtctgcatgtgcagttttcagtctgcccagtcaagcccgtccaactccag

SEQ ID NO: 455060 - DNA, 75 bp, Homo sapiens
tgatgccctgactgagctgctggctaagatcaccaacacagacgtggacactcatgaggaccatgatacttccac

SEQ ID NO: 455061 - DNA, 83 bp, Homo sapiens
gccgccgccgccgccgctgccgctgccgctgccgcacctccgtagctgactcggaggaggcctcggtggtaccagaagaggag

SEQ ID NO: 455062 - DNA, 75 bp, Homo sapiens
ctttgacttggtgtggggaaatggaatcaatactgctgatatgggtgaagcagctgaccgatgaggaggagtgtt

SEQ ID NO: 455063 - DNA, 100 bp, Homo sapiens
gagttcgagaccagcctgaccaacgcgtgagccactgttcccagcaggaatttcttttttatagtattggataaagtttggtgtttttacagaggagaag

SEQ ID NO: 455064 - DNA, 83 bp, Homo sapiens
cttgagtccttgaacgtctctgtggctgcagggccatgaagcccccaggaggagaatcgagcaatctttttggaagtccagaa

SEQ ID NO: 455065 - DNA, 75 bp, Homo sapiens
ttctcgacctgctaacagaactggaccttttcgattagaaatgatatttgccaaatttgatgaagtgcaaagttc

SEQ ID NO: 455066 - DNA, 90 bp, Homo sapiens
ccagatcccggacccaaaccatgttccctgtgaaggtgaaagtggagaaatcaggtgctggagaatctggtaaaagcaccattgtgaagc

SEQ ID NO: 455067 - DNA, 82 bp, Homo sapiens
acaagtatggcttccttgggggcagccagtactcgggcagcctaaaaagcttgtggtgaaggggggcaaaaaaaagaagcaa

SEQ ID NO: 455068 - DNA, 75 bp, Homo sapiens
gttggagtttatatacacaggaactttaaatcttgacaggcttttaaagaagcagttttttcaccgagccctaaa

SEQ ID NO: 455069 - DNA, 83 bp, Homo sapiens
ggggaattggctattctttacaactgtacccggacagcgaccgtcaagagcccagtgacgagcaccatccggaagtgaaggct

SEQ ID NO: 455070 - DNA, 74 bp, Homo sapiens
gcactgccaccctgggcaacttcgaatttatagagcggcagcacgcaaagaacaggtattactactaccaccgg

SEQ ID NO: 455071 - DNA, 89 bp, Homo sapiens
atcaaggttccgacgcagatcatctgggggaaacaagaccaggttgcacactgggccacagaggatccagcaaggatgaagaaatggag

SEQ ID NO: 455072 - DNA, 100 bp, Homo sapiens
acatgcaatgaacccaaaagggctttcttctagtcaagatgagtgataaaccagacttgtcggaagtggagaagtttgacaggtcaaaactgaagaaaac

SEQ ID NO: 455073 - DNA, 75 bp, Homo sapiens
gctgctcattttctactgtctacaaatgtacaaatggtgatgatcatcaggtcaaggatagtctggagcaattga

SEQ ID NO: 455074 - DNA, 75 bp, Homo sapiens
gcgcagcccggaaatgtccggcaagatcgagaaagcaggctactgcagcactggggtgtcagttgttggtccgac

SEQ ID NO: 455075 - DNA, 75 bp, Homo sapiens
cttcagaacaaagtacagcttctggaggaacagaatttgaatctttggccatctatgaaacaatttccatgggaa

SEQ ID NO: 455076 - DNA, 100 bp, Homo sapiens
catatcttcaaagcacctagtacctcctaccattgtcaactgccatcagtggcctatgtacataccacgccgggtctgccttcaggctgggaagaaagaa

SEQ ID NO: 455077 - DNA, 75 bp, Homo sapiens
gtcgctggagtccgcgcctccctgggctgtctgtccccagaccccagagcacgtccggcaccaccatgactgggc

SEQ ID NO: 455078 - DNA, 100 bp, Homo sapiens
tgcaacagaagcaggtgcagccacagctgcagcaggaggcagagccacagaagcaggtgcagccacaggtgtgggacatccagaacctgcagaaggtgaa

SEQ ID NO: 455079 - DNA, 51 bp, Homo sapiens
agtggaaagctgtttgcctggagtggtttctacgataaagacagttcaggg

SEQ ID NO: 455080 - DNA, 90 bp, Homo sapiens
cggcaagactgtcacgttagtggaggcaattaagcaggagcttctaagtaggacatccttagaaactcagaagttggatctgatggctga

SEQ ID NO: 455081 - DNA, 98 bp, Homo sapiens
gcaactactttggattcacccacagcggggcggcggcggcggcggctgcggcccaatatagtcatcagtgagttctgcctcagtcagctcccaagtga

SEQ ID NO: 455082 - DNA, 75 bp, Homo sapiens
aagaactgggcccacttgttccaaaacgggcgggtgtttgagaagtcccccctgcgggtgaagaacttcgggatc

SEQ ID NO: 455083 - DNA, 88 bp, Homo sapiens
gtgagccaccgtgcctggctgaagtagtttatgccaacgtgacttcattcatacagatgaaccaaggatcgggatagcagtataaaat

SEQ ID NO: 455084 - DNA, 101 bp, Homo sapiens
aaccctgcaaaggagtccctagagacacctagtaatgcgatctagggcagccctgcagaggtacctgttctactgtaatcgctatatgaaccacatgcaga

SEQ ID NO: 455085 - DNA, 80 bp, Homo sapiens
acctgcgcatgtttgaggtggccagagatcacctacaccaaacagactcacagatgaatgcttctcacccggaaacaaac

SEQ ID NO: 455086 - DNA, 90 bp, Homo sapiens
ttggagtgctggtgaatcatttcaagaggaggaagaaggcacctacgatcaaactctggagttccgtaggggaggtgatggccagccaag

SEQ ID NO: 455087 - DNA, 49 bp, Homo sapiens
acccctttgaattaattatggctaccaatgatgcgagctcagagtcaat

SEQ ID NO: 455088 - DNA, 75 bp, Homo sapiens
cctatgtattccctggggatggcgcatcacacaccaaaggtgtagaatgagccaaggagactcaaacccagcagc

SEQ ID NO: 455089 - DNA, 110 bp, Homo sapiens
agcatctgcagaggatggtcagtgtgccccaggtgaaggccagtgctctcaagctaatggcagcattagccgctgttgggcctcctaatcctcgggcagatccagagtgc

SEQ ID NO: 455090 - DNA, 88 bp, Homo sapiens
ctgatggcgatggtgatggcagcagttactcgcacaaccccagttaagctgcgctccgggaggggcccagctggagtaagagcccagg

SEQ ID NO: 455091 - DNA, 75 bp, Homo sapiens
atatccaaacaggccctccagaatgagctggagagactgaaagagggtatgcagaagttggctagtcaatacctg

SEQ ID NO: 455092 - DNA, 98 bp, Homo sapiens
catctctcctcggtctctccctgaagcccaccggtccccaacgcatcatgccagggagccaagcgtcctgcccggccaatcatggtgtcatggaaagg

SEQ ID NO: 455093 - DNA, 50 bp, Homo sapiens
acggagtgtgcgacggattgggaggtcaccatcagaaaagctaagtttgc

SEQ ID NO: 455094 - DNA, 99 bp, Homo sapiens
tgcgggtgatcctggaaccgttgattggagatatgcccttagttggagctttgtctatcttcttccttaggaaaccaggttacaaaataaatgccattt

SEQ ID NO: 455095 - DNA, 75 bp, Homo sapiens
gcaagaactttatccccaggatctaaaccagtgctggacaatagatgctcacatatagcactttctacattgtgg

SEQ ID NO: 455096 - DNA, 82 bp, Homo sapiens
cggcgcggtagcgaaggccgccgaacctgcctggctagccggcgacttgagtgacgagctgatcagctgaccgaagaacaga

SEQ ID NO: 455097 - DNA, 101 bp, Homo sapiens
tcaaggaagactaaccatctgcaatactagaagccatggctgagagtgtcaatccatatctacaaggacagagactggataatgttgttgcaaagaagtct

SEQ ID NO: 455098 - DNA, 100 bp, Homo sapiens
tggggcttgatgaaggcgtggatagcctgaaggcagccattcaggagtacaagcgcaagctagccagagtttccctggtgcgcaaagaactcaggtcccg

SEQ ID NO: 455099 - DNA, 100 bp, Homo sapiens
gcatcctgtcggctcacaagataatagccagctccccagaaatgaacctgcccacggtgtccgcgctcaggctctagaggacaaaatcccagtccttggc

SEQ ID NO: 455100 - DNA, 100 bp, Homo sapiens
gcaaagctgtcctaggccaaccagagattcatctttcatgcagtgacatgttgataaaaaatgatgggtcggcactcttcaccctcccgagccctgcccg

SEQ ID NO: 455101 - DNA, 98 bp, Homo sapiens
gaatggcagggcgtttgtcctgagcagccaaagcgcaaggtctaacttcaaacttgtggctgttaattcaaaactctatgccatcggagggcaggccg

SEQ ID NO: 455102 - DNA, 75 bp, Homo sapiens
aaatctaaaagatgattctcttccttcaaatccaatagaggttcaagcagttcttctcactgacattttagtttt

SEQ ID NO: 455103 - DNA, 97 bp, Homo sapiens
tttacagtaatttcaacagaagagtgagagatggaacccgaagaagaaaggattcgttacagccagagattggctctcaactacaatctgagcaaag

SEQ ID NO: 455104 - DNA, 73 bp, Homo sapiens
tgacaaactgctgagcctgccaatgcaacagccacggaagattaagcaggatactgaggaagatgaggaggaa

SEQ ID NO: 455105 - DNA, 74 bp, Homo sapiens
ggacagtgcggctactcttgatcctctccggctgcttggtctacggcacagctgctgaatgccatggtggcaaa

SEQ ID NO: 455106 - DNA, 98 bp, Homo sapiens
gttgtatttgagagaaattataagagccatcacctccagctacaggtgatttgaagatattaaagctagaaattggaactagaaaatcaaaagaattc

SEQ ID NO: 455107 - DNA, 89 bp, Homo sapiens
gagggctgtgaagacgcacggtgccaggaccaagtatctgccaaaaagacctggagaatctgaaagccgaggtggcgcggcggcaccag

SEQ ID NO: 455108 - DNA, 103 bp, Homo sapiens
gtgcgtagctgctcctttggttgaatccccaggcccttgttggggcacaaggtggcagggctgtcacatggtgactgaagaacttcattccataacgtttgaa

SEQ ID NO: 455109 - DNA, 98 bp, Homo sapiens
cagccctggatctattaaagggagcattccgatcatctgaggaacagcagaaaaagaaggggagcgttcaattccaaacagctgctttatttggagaa

SEQ ID NO: 455110 - DNA, 82 bp, Homo sapiens
ctcctccagctgttgttgctgctgggtttggtgacgttcgccgacgtagccatagacttttctcaggaggagtgggcctgtc

SEQ ID NO: 455111 - DNA, 100 bp, Homo sapiens
cagtcttcccgcgtccgccgattcctcctccttggtcgccgcgtccttggctggcgtgttcctcaagccaggacctacgcacctgttgtgagtggtgtta

SEQ ID NO: 455112 - DNA, 99 bp, Homo sapiens
actcaactgtcctgctgtgattaaacaagactgctgtattttgtgagatgagtgagagccgagcaaagagagttagaataaaagaggtagatggctgga

SEQ ID NO: 455113 - DNA, 99 bp, Homo sapiens
acctcgtcattaattggacacagtgccagagtgtatgcactttactacaaagatggacttctctgtacagcacttttccagccattaactccaggctct

SEQ ID NO: 455114 - DNA, 88 bp, Homo sapiens
gcggccatggaggtctacatcccgtcctttcgctatgaagagagcgacctggagcggggatacacgcaacatggccaatctttcctaa

SEQ ID NO: 455115 - DNA, 129 bp, Homo sapiens
agtggcttccacccagacccccggcagaaggccctgtaccgccggcttgccacagtccacatgtcccggatatccctctgaagaagatatgatcgaatgggccaagagggaaagtgagagagaggaaga

SEQ ID NO: 455116 - DNA, 74 bp, Homo sapiens
gtggaagtgcggggctccaatggcgctttctacaagagaagtcattcagaattcaaaagaagttctaagtttat

SEQ ID NO: 455117 - DNA, 98 bp, Homo sapiens
ggactgcgccgcgtcttcctcaagggactttgaacatgtcggggatcgccctcagcagactcgcccaggagaggaaagcatggaggaaagaccaccca

SEQ ID NO: 455118 - DNA, 83 bp, Homo sapiens
ctcggagaagatgtggtggcttccgtttgttggtggaggaggtggcaggcctcggcgacaatgcagatcttcgtgaagactct

SEQ ID NO: 455119 - DNA, 50 bp, Homo sapiens
gtttcttaggacttcagaaaaagcagatggagttttaacattgaatgcgg

SEQ ID NO: 455120 - DNA, 100 bp, Homo sapiens
gcctctcgaacgagtgtgggcgcgaggcaggatgcagcaccgaggcttcctcctcctcaccctcctcgccctgctggcgctcacctccgcggtcgccaaa

SEQ ID NO: 455121 - DNA, 95 bp, Homo sapiens
ggaagcggaggaaggtgaagtaggaccgaattcctgtgccgaagaggcctgcagtgggagagcagggataaacatcacgatgctgctcatgaaat

SEQ ID NO: 455122 - DNA, 75 bp, Homo sapiens
aggacatcatctgctataacctacaagcagttggacaggcctcattgctacgatttcagagtaccctggtaatag

SEQ ID NO: 455123 - DNA, 75 bp, Homo sapiens
gtggctacatgacactcttattgaaacaacagactatgctgggcttatttgcaccaattccagctggacatcact

SEQ ID NO: 455124 - DNA, 100 bp, Homo sapiens
tggagtaaggcccctggctcccagaggtgcaccaaacgtagcacaggcggagtgcagcggaggcccctgccgctgccgtcatgccgttcccgtttgggaa

SEQ ID NO: 455125 - DNA, 100 bp, Homo sapiens
cggagagcggcgaagaagcggtgacccttgtggaggatatgcagagagagcttgggagactgagacaacaggctatagaaagcgcaattggtggtaacgc

SEQ ID NO: 455126 - DNA, 101 bp, Homo sapiens
caaaggagtggaagtttgagagaagtttaagagaagaaatggacatgattgcctaaatcagccaaacacagggaggcaggtggaagtcatcataaagtttc

SEQ ID NO: 455127 - DNA, 75 bp, Homo sapiens
ccagggagaggaacccgcggaggagaggatcccggcccagggcgccctgcgtccggcagaggaggcgagcatccc

SEQ ID NO: 455128 - DNA, 100 bp, Homo sapiens
ccttatatgaaggggaaaaatttcaacttctatttaaatttagtagtcgatatccttttgactctcctcagaacgatgccaacgggactgcaaagccgcc

SEQ ID NO: 455129 - DNA, 98 bp, Homo sapiens
ctcttgagtacttgcactcgcgggacgtggtataccgcgacatcaaggttttaagctctgcagcgtcactccctggctctgaactcccctcctccagg

SEQ ID NO: 455130 - DNA, 100 bp, Homo sapiens
gagagaagatgccgcagcccgagtcccagaaggcggcgatcctgggctgcgggcaaggcggaatccattccttcattgccacaatcacctatgagagaaa

SEQ ID NO: 455131 - DNA, 54 bp, Homo sapiens
gctaatcagctctttgatcctatgacagttgtgttgcttgatacaacaactgta

SEQ ID NO: 455132 - DNA, 80 bp, Homo sapiens
caactcagtttgttccaaaacaattccccgcatcagagacttctcctgggcctcccccaatggggcctccacctccttca

SEQ ID NO: 455133 - DNA, 75 bp, Homo sapiens
cagggagggaacaaagcccacagcaccgacgttggaacttgccaggaatccagcaatgatgcaggagatgatgag

SEQ ID NO: 455134 - DNA, 87 bp, Homo sapiens
caacacacccaaggtcacagagcagctcatgaaactggatgaacaagggatgtggacgagtgctcactagcagaaaaaacctgtgtg

SEQ ID NO: 455135 - DNA, 90 bp, Homo sapiens
ctcagacaagttctggaggagatgaaagctttgtatgaacaaaaccagtctgatgtgtggtctgtttttctggggggccaccaacacctc

SEQ ID NO: 455136 - DNA, 100 bp, Homo sapiens
tagctcctgtattaatgtctaagctgtctgtgaatgcccctgaattttacccttcaggttattcttccagttacacaaacactcgtgaaactgctcaggc

SEQ ID NO: 455137 - DNA, 74 bp, Homo sapiens
tgacggtggaggttcgcggctctaacggggctttctacaagccaccagctgaacaggccaaagccagactacag

SEQ ID NO: 455138 - DNA, 74 bp, Homo sapiens
aggagaggtctggcctccaactaagtcttgaacaaggtggtgatcagggaagtggctttgggaccacaggtaaa

SEQ ID NO: 455139 - DNA, 100 bp, Homo sapiens
agaaagacaaggattgatagaaaaggcagttccacgaggtttccaatacttatctacaggaatcgccatgaccccagctctgagggaggcaacagcaaag

SEQ ID NO: 455140 - DNA, 109 bp, Homo sapiens
ggataacgggaggtgaatttccatgtcaacatagtcctgttctgctaagccaatattctctagaatgagcacaaaacaaatcgaataacagctaaacaaatcgaataac

SEQ ID NO: 455141 - DNA, 90 bp, Homo sapiens
agagaaggagagccccgactcctggatccctgggcggaaggtgctctaccagcgtgcacccaggaatatccaccgccatgtgatcctctc

SEQ ID NO: 455142 - DNA, 78 bp, Homo sapiens
gtatctaagactctgggacactcctgaagtcgggaaatgcgccgtgccgtccctgcagtgacaccgaggtgctcctag

SEQ ID NO: 455143 - DNA, 100 bp, Homo sapiens
atgaatatggagtagttttctctagcaaaggtttggtgcacctcgatttggaggaagtagggcagggcccttatctggaaagaagtttggaaaccctggg

SEQ ID NO: 455144 - DNA, 100 bp, Homo sapiens
gatcagctctattatttcaaagatgaagatgaaaccaagcccttggtgccctacgagacgctgaacaaacgctttcgcgccgctcagaagaacattgacc

SEQ ID NO: 455145 - DNA, 51 bp, Homo sapiens
gtggaaagcgcatacaggaccctaaacaggccagattacctgtccctaata

SEQ ID NO: 455146 - DNA, 74 bp, Homo sapiens
cgttaatgaaatcttagaatcacccaagaaggcaaagtcgcgtttaataacgccctagactggagctggttaca

SEQ ID NO: 455147 - DNA, 75 bp, Homo sapiens
aaggattccaagtaactcttatttgaatgaccagtcaacaggggacataaaagtaattggtggagatgatctctc

SEQ ID NO: 455148 - DNA, 100 bp, Homo sapiens
tgaacagacacgggtgaatgctgctaaaaacaagactggggctgctcccatcattgatgtggtgcgatcgctttggtgtcatccccagcactcctctggc

SEQ ID NO: 455149 - DNA, 76 bp, Homo sapiens
gtggagctgggcctgcctgactcacccattcatcagtgcagttccagggaccaatctatacccatggtgacagccc

SEQ ID NO: 455150 - DNA, 97 bp, Homo sapiens
ccaggagcagttgggagttttaaagaatgccagcctttttaaaggtgtcatggagaaactccagctgggcccagagattctgcagcgggaaaatcca

SEQ ID NO: 455151 - DNA, 75 bp, Homo sapiens
gcgccgtggtggcggccgggggaggcagctccggtcagaacagaaactgttcatacttggtgcgctgtggactct

SEQ ID NO: 455152 - DNA, 51 bp, Homo sapiens
tcgccaaggctggcgcagtcggccgttcatattctgtgtgttctccaagaa

SEQ ID NO: 455153 - DNA, 74 bp, Homo sapiens
tttatggacaaacctgaagagtttatatctgaaatggacgtttctaagcatgaattgaggaacagaagaagcag

SEQ ID NO: 455154 - DNA, 100 bp, Homo sapiens
gttcttcatgtgcagtgtcgacaattgcaggatgcacagattctgaattagaggagacagcactgattgcagtgacagaagcggtgccagctaactcccc

SEQ ID NO: 455155 - DNA, 50 bp, Homo sapiens
cacgtctcgcggatcatgctataaaccgagaaaactggtgtacaatagag

SEQ ID NO: 455156 - DNA, 75 bp, Homo sapiens
aaaggaagcaccgcacatttttcagaacactatgtggctgccgtgtaagagtggaactgtcgaatggtgaaaaaa

SEQ ID NO: 455157 - DNA, 90 bp, Homo sapiens
gaatcatccacgcacctgcagctctgctgagagagtgcaagccgtggggctcttgatggaaatgtgtatgatcatctcaaggattattta

SEQ ID NO: 455158 - DNA, 100 bp, Homo sapiens
ttcgtggatgagcacaccatcaacatctccctcagtctgcaccaaaccagcctggacaccaagtctgtgtcagaaggccacctcaagaggaacatcgtgg

SEQ ID NO: 455159 - DNA, 82 bp, Homo sapiens
ggcgcccagcggtagccctccttgcgcctccgattcccaggcatttattaatacagcaaaagaaatttatgaaaaaattcaa

SEQ ID NO: 455160 - DNA, 124 bp, Homo sapiens
ggcggcgggactcacggcagaagtgagctggaaggtcttggagcgaagagctcggaccaagcgctcaggtgaatatgaccatctcccagaacaggccttctatatggtgggacccattgaagaa

SEQ ID NO: 455161 - DNA, 98 bp, Homo sapiens
catatacaaggagaaaatgggaagatgatcttaaaaaaaatagctcagttaatgaaggatcaacgtatcataaaagcaagctatagtcagcagactgg

SEQ ID NO: 455162 - DNA, 100 bp, Homo sapiens
ccaaaggctattggatcagctcagcaggggttttacatatgtggctccatctgtacttgaaagtgtgaaagaaaagttttcctttgaaccaaaaatccga

SEQ ID NO: 455163 - DNA, 99 bp, Homo sapiens
agctgcagctcattaccagtctgaaggagcaagacatggctccttactatgaagccttgtgcaaatccctcgactggcagatagacgtggacctactca

SEQ ID NO: 455164 - DNA, 98 bp, Homo sapiens
gatcacatcctctgattggcaacatgttagctttgaagtggatcctaccaggtggacattgaagtggacctaattcggttttccttttaaaagccccg

SEQ ID NO: 455165 - DNA, 100 bp, Homo sapiens
attctgtctttgtgtcctgagatcaaatggcacttcattggccacctacagaaacaaaatgtcaacaaattgatggattcgcttcaagctcagcttatca

SEQ ID NO: 455166 - DNA, 74 bp, Homo sapiens
gatatcattgctgaagacattcaaggaaccgtctttttcgctggtgagtttgctgatggccgccaaagttggag

SEQ ID NO: 455167 - DNA, 100 bp, Homo sapiens
gtgcatcgaggacctgtctgaagctgctcatgtttcccacctggagaatgtgtcagaggaagaaatgaacagactcctgggaatagtattggatgtggaa

SEQ ID NO: 455168 - DNA, 76 bp, Homo sapiens
ctctgccacaaaaaaatataataaggctgagtgcggagccaagagcctggagaaagttcttgtggaattcagtcac

SEQ ID NO: 455169 - DNA, 100 bp, Homo sapiens
cttggaccctggaaaacctggccctcttcaatttctgacaaaaggccatccagctgagccgagatgggcagtacctgctcacaggaggagacagaggagt

SEQ ID NO: 455170 - DNA, 100 bp, Homo sapiens
agccccagccccagccaggtcgtcgaggtcccgggggtccccagccgcccggccagtgccggtggtggtgtgcacattgagccccggtatagacagttcc

SEQ ID NO: 455171 - DNA, 100 bp, Homo sapiens
tctcctgcgccgagccttcggggcgatgtgtagtgccttccatagggctgagtctgggaccgagattcatgatgttgctatcaaaagttgagaaattgtc

SEQ ID NO: 455172 - DNA, 100 bp, Homo sapiens
cggagagctgcaagccggtgcagcagccttcagcttttggcagcatgaaagttagcagactcacggcagctgtgttctgatttcgtactactgctggggc

SEQ ID NO: 455173 - DNA, 76 bp, Homo sapiens
tttagttcatgtgacagactggatagagaagaaactggagcaagagtttcaggctttggccaaagagttgcaaaat

SEQ ID NO: 455174 - DNA, 75 bp, Homo sapiens
aactttacattagcagatatactattgtactatggacttcatcgctttataattgttgtgtccactgtatcctgg

SEQ ID NO: 455175 - DNA, 96 bp, Homo sapiens
cgcagttactcatctcaagggcagggtctgggtctttatcgtgcgaccatggccttgctgggtaagcgctgtgacgtccccaccaacggctgcgga

SEQ ID NO: 455176 - DNA, 75 bp, Homo sapiens
ggctgaagcagccggaggctggccaggtgtcatggagaaactccagctgggcccagagattctgcagcgggaaaa

SEQ ID NO: 455177 - DNA, 100 bp, Homo sapiens
caggcggaaggacaggagcagctcttcaaactcacagacaacatacaggacgaattgctgattcaccccaagagtggccgttcctaccacgaggagttca

SEQ ID NO: 455178 - DNA, 76 bp, Homo sapiens
gttgttgttgttgaacagaagtgctggaagagcctgtattgtcctcacaatagtatagaagaattcaagagaggag

SEQ ID NO: 455179 - DNA, 83 bp, Homo sapiens
tgctggtgtgagtgccctcaggggttccccaggaatatcgatacaacaccaacagcccgtgcagcctgccaggactcttccag

SEQ ID NO: 455180 - DNA, 100 bp, Homo sapiens
cgagtcctgccgcctcccgggagtgccgtgcgccgcagcccgggcccaggccccggcagcgcctgggacaaggtcctttgtcatccagcaaatcccaagc

SEQ ID NO: 455181 - DNA, 90 bp, Homo sapiens
tttaccagttgttatctggagcaggagaacacctaaagtgtaatggcaccattgacttccccgaatttttgactatgatggctagaaaaa

SEQ ID NO: 455182 - DNA, 106 bp, Homo sapiens
agccacgcaggatctcacagctgcagtctaatagtaacacagagggaaagaatatggcaaagctgatgcaagatgggtttattttgatccaaccattgtgtctgtg

SEQ ID NO: 455183 - DNA, 95 bp, Homo sapiens
gaggatgggtatctactcgcgcatcaggcatgaagaagaatatctatggcaatatcgaggacctggttgatgattcagtgagtgtaaatgacata

SEQ ID NO: 455184 - DNA, 105 bp, Homo sapiens
gtccgcgctgcgctgctgaggccgggccggccgcccagacgctgcccgcgggcccggccacggcggagccaaggtggacaaactggatgccttggagagtctgcg

SEQ ID NO: 455185 - DNA, 82 bp, Homo sapiens
ccctgcctcccctgcgtcccgccaccggccgcttctgtcctcgatattgaaatggattccaggcgtgtgcctcgagacaagc

SEQ ID NO: 455186 - DNA, 97 bp, Homo sapiens
gaggaaagtctgtcattctggactgcacccctacgggaacccacgaccattatatgctggaatggttccttgttgtccgagcggaactgcattgaga

SEQ ID NO: 455187 - DNA, 100 bp, Homo sapiens
agcacccaagatgaagatgctgttagcctttgcagtctcgacataagtgagatacaactcgtcaacgaatcaaattcagtgatgacagagtatgcaagag

SEQ ID NO: 455188 - DNA, 75 bp, Homo sapiens
gagaaagaaatcgacgtgctgttttcatagggatactgctattgttcatccagttcccattcgtatgactccaag

SEQ ID NO: 455189 - DNA, 88 bp, Homo sapiens
aggatccctttttgttaaacacataaccacctgcctcaaagataatctgctcaaaagacttccatttcattctccaccccaagaagct

SEQ ID NO: 455190 - DNA, 90 bp, Homo sapiens
tgctatggcgttccctcacctgcagcagcccagctttctactgtgccggtggtggtgtgcacattgagccccggtatagacagttccccc

SEQ ID NO: 455191 - DNA, 100 bp, Homo sapiens
cgagtaccaagttgtgttcgtgttgttggcacaacatttcatggaactgcactaaaggttgctgactgtgtagtgggcaaaggatcaagtgatgccgttt

SEQ ID NO: 455192 - DNA, 75 bp, Homo sapiens
aactcagccactggttgccttggtaggcaataaaattcactgagacttttttgacggagagggacaaacaatcca

SEQ ID NO: 455193 - DNA, 82 bp, Homo sapiens
cagaaggactgcctcactgagcaaccaagaggtgtccgcaatgttgccagtgtctgtctgcagattggctacccaactgttg

SEQ ID NO: 455194 - DNA, 75 bp, Homo sapiens
ggaggagcggacgtcggcttctccccgcgggagcccccagcatgggactgggctaatgctaatgtcagcagacag

SEQ ID NO: 455195 - DNA, 100 bp, Homo sapiens
gaagacatttgcctgtgagtcaggttacaggaggttccagtggcatcgggaagtgcattgctatcgagtgctataaacaaggagcttttataactctggt

SEQ ID NO: 455196 - DNA, 51 bp, Homo sapiens
tggactccagttatgcaaaaagaggtgatgagaccactgtgtggcaggccc

SEQ ID NO: 455197 - DNA, 50 bp, Homo sapiens
gaagaaagacagctttgtggaagagccccttggcaggcccatgacttcat

SEQ ID NO: 455198 - DNA, 100 bp, Homo sapiens
tctacgagctagagttgccatttcgctgggatttttgggtggtgcaaagatcgtaaagctgaaaattgaaatcatgaaagtagacaggactaaactgaag

SEQ ID NO: 455199 - DNA, 75 bp, Homo sapiens
cccatttcgcccctcgcgtccggagtccccgtggccaggggaggacgaggaagaaacgaacgtgatagttctcag

SEQ ID NO: 455200 - DNA, 97 bp, Homo sapiens
aagccgacaaggcgttcaagcgaaaacatgaccgctgagcccatgagcttcgagagctgtgcccaggagtgaacaaccagccctacctctgtgagag

SEQ ID NO: 455201 - DNA, 96 bp, Homo sapiens
caggaacccaccagaaggaaccaattccggacacataacaagcagcagtgaggacaccaaaggctttacaggaagtatggtgctggcatctgcttg

SEQ ID NO: 455202 - DNA, 51 bp, Homo sapiens
tgggaatttacatcagcaccctcaaaacagtggacgtgatgctgaatccag

SEQ ID NO: 455203 - DNA, 100 bp, Homo sapiens
aagaatgacagcgagcagtttgcagccctgctgctatgaatgggagctacggacaccgtaccccgggctcagagaagagcctgctggacctggaccttgc

SEQ ID NO: 455204 - DNA, 120 bp, Homo sapiens
atccaggtcgaggttctgcagaaggttgtgactttagtatacagtaaaataccatgaagattttgaaaaaacaaaggggagaggctttactcccgtcgtggacgatcctgtgacagagag

SEQ ID NO: 455205 - DNA, 82 bp, Homo sapiens
agccgagttcaacatcctcctggccaccgactcctacaagcctcctggatgaggaagtgagccgcactctcaacgcggagac

SEQ ID NO: 455206 - DNA, 95 bp, Homo sapiens
gactcctaaggcttgcaacaagtgttgttaaacacaaaccaccctttaaattttcaagggaaggacagggacacttaacattcagggacgtggcc

SEQ ID NO: 455207 - DNA, 88 bp, Homo sapiens
actgaagtcggtgtttggagaaaaggactcagacgaggacctattaaacttggaatggctaaaatcacgcaagtcgactttcctcctc

SEQ ID NO: 455208 - DNA, 100 bp, Homo sapiens
gtggatttcagcctgcacggatggtcttgaaacacaaatggtttttggtcttaaagaaagtgcagaagagatggtcaaaaacaaattggaaggaaaggat

SEQ ID NO: 455209 - DNA, 74 bp, Homo sapiens
tcagatccttgagtgataaaggagtagaggttaccacattctcatctggagccaggaggaagccaggacacgga

SEQ ID NO: 455210 - DNA, 73 bp, Homo sapiens
cagaaacctgttttttttctggagctgatcttagaaacctctgcacagaagggaacattgttcttacagatta

SEQ ID NO: 455211 - DNA, 127 bp, Homo sapiens
gccttcagcccttccaggaggaccagcaagggctctgtgtgcccaggatgcgccggcctccagattcggaggaacctgagtgcctcagtcatcgccgtcaccatccaggggggagcgcaccacctcg

SEQ ID NO: 455212 - DNA, 90 bp, Homo sapiens
ttgtccaaaagtgaaattttacgaactcagcctaccgtatgtgaacgggagctgtgtgtgtttgcttttcaaaccctgggagtaatgaat

SEQ ID NO: 455213 - DNA, 100 bp, Homo sapiens
tagaggatggtcaagcagtacagttagaagatggtaccacagcatttattcaccacacctccaaagggattaatgaaaatcaagttccatcctcagacaa

SEQ ID NO: 455214 - DNA, 132 bp, Homo sapiens
ggatctggaagctgagggcacgtgtttgcggttcagccctttgatgaccgcagcagactggcacagcctccaggttggcgggctcatctgcgctggggttctgtgcgccatgggcatcatcatcgtcatgag

SEQ ID NO: 455215 - DNA, 74 bp, Homo sapiens
gcgaccgatatagctcgccaggtggctgacaaacgggctcatcataatgcactggaacgaaaacgtagggacca

SEQ ID NO: 455216 - DNA, 98 bp, Homo sapiens
gtacaaccctgggagtgagagtatcaccttcctcaaggatttcagttataaccgggaagactttgccaaagcagggtctcgctctgttgcccaggctg

SEQ ID NO: 455217 - DNA, 90 bp, Homo sapiens
atttgggtcgcagttcttgtttgtggatcgctgtgatcgtcacttggggaacgcccttttgcttgtgactggcagggctgcgacaagaag

SEQ ID NO: 455218 - DNA, 75 bp, Homo sapiens
ggcctgggccgccgctgctacctgcagcgccgtgtggcacgacacaaaaatcagatctattcttacatacagccg

SEQ ID NO: 455219 - DNA, 80 bp, Homo sapiens
cgggagccgcaaggcgagagctgcaaagttggattggatgctgctggcaagacaaccattctgtataaactgaagttagg

SEQ ID NO: 455220 - DNA, 75 bp, Homo sapiens
ccttgaaagtctaaccatcatatttagaaccagctgtttaccagagtgacaggtgatttggcttctgcacagtta

SEQ ID NO: 455221 - DNA, 83 bp, Homo sapiens
tcatcctagaaggcattgtggaaacaactggtctgaaggggcgtctcgattacctgagctctctgaaggtgaagggccttgtg

SEQ ID NO: 455222 - DNA, 99 bp, Homo sapiens
ggagaacgaacatcttctggacctttgtccaggaccccagccaggccacggggacaacaggcagcagcgtcagctgcacagaggagaaaaagcaaagca

SEQ ID NO: 455223 - DNA, 100 bp, Homo sapiens
tcggataccgctgccatcccaagctctactcggaaggggaccccggggagaagctggagctggtggcaggtcatcatcagatttgaaatatttaaagtgg

SEQ ID NO: 455224 - DNA, 74 bp, Homo sapiens
tacaacagcggcgtcatctgtgagaacacctgcaagcggccttctgatctgtttaccacgtgagcaagcagctc

SEQ ID NO: 455225 - DNA, 50 bp, Homo sapiens
ggagcgggaagagttgctgggggagaagaaatgggtgaccgttggtgaca

SEQ ID NO: 455226 - DNA, 99 bp, Homo sapiens
ggagaaccaactggtcccgaaagagaatttcgctaaggagtttgtgatcagtgatcggaaggagctggaggaagatttcatcaagagcgagctgaagaa

SEQ ID NO: 455227 - DNA, 97 bp, Homo sapiens
ggaacaaagcttatcattacaggaaacatgccctgaactgtcacagaatgaaaccagcgctcttcagcgtcctgtgtgagatcaaagagaaaacagg

SEQ ID NO: 455228 - DNA, 83 bp, Homo sapiens
cgaggagagcatcgactggaccaagatcgagcccagcgtcaacttcctcaagtcgcccaaagttccagggtctccctccactg

SEQ ID NO: 455229 - DNA, 146 bp, Homo sapiens
cgaacagcgggcggtgttcccggctccgtggggccgtcttcccggcgagtccgcgacggtcgccgcccacggcgagatctgactgcagccatgagcagcaatgagtgcttcaagtgtggacgatctggccactgggcccgggaatg

SEQ ID NO: 455230 - DNA, 83 bp, Homo sapiens
cgtcggtgggtcggggatcggtcgcctgagaggttcgtgctggccgtgggcagcgccgtctttgatgccatgttcaacggggg

SEQ ID NO: 455231 - DNA, 82 bp, Homo sapiens
atgaggccgtgagggccccactggactgggcgctgccgctttctgagggatccatatggctttggagacagtcgagattcaa

SEQ ID NO: 455232 - DNA, 85 bp, Homo sapiens
cgctgcaggaggctaaagatatttgcgaggagcaggtcaacgaggcctctctgcgcttcactctgccgggctccggcactgaggg

SEQ ID NO: 455233 - DNA, 75 bp, Homo sapiens
aaaccatacagggctatgatgctattgtggttgaacaatggacagtcctggaaggctgctggctcgtgtcacgtt

SEQ ID NO: 455234 - DNA, 75 bp, Homo sapiens
cagagcataatttggcaataattggtccaagaatgcctcaggatggatcagatgacgaggacgaggagtggccca

SEQ ID NO: 455235 - DNA, 75 bp, Homo sapiens
acctcaggacacggcctacaacaccaagaggtgcagattttaatttcagtgactgaattaaaaggtgtcaagaag

SEQ ID NO: 455236 - DNA, 107 bp, Homo sapiens
aaaagatcccaagaatctcgagaatggagctcttcagccatcggacttggacagaaataagctggctgccatattggctgccccgggactccagaattacttcctcc

SEQ ID NO: 455237 - DNA, 96 bp, Homo sapiens
gatagcagtctttcttcttatacggagaagaaatgggtgaccgttggtgacacatccctacgaatctacaaatgggtccctgtgacggagcccaag

SEQ ID NO: 455238 - DNA, 100 bp, Homo sapiens
actggctaccgttcggactatttgtagtcatgtacagaacatgatcaagggtgttacactggggccgggctagagcgacatcatggtattccccttacta

SEQ ID NO: 455239 - DNA, 98 bp, Homo sapiens
aaaacgagccatttctccgtcgattaaagagccatctgtggtgccaattgaaggtcagtgacttcctgtcgggccgttcgccactgacactggccttg

SEQ ID NO: 455240 - DNA, 100 bp, Homo sapiens
gatgccctgcagtacctgcagaaggtctctggagacatcttcagcagtatctgaagaagctgcacacgcaggagcgggcggtggaggaggtgaagctggc

SEQ ID NO: 455241 - DNA, 100 bp, Homo sapiens
agctgagcctggtggcctccgttctcttggcccagtccatctcaggttttgcgcacagctgcttccagtatgccatccagaagaaatggccgctgtacat

SEQ ID NO: 455242 - DNA, 100 bp, Homo sapiens
ccctgtctcccggaggagcgcgcacccaaattgtggctactaatttgccccctgaagatcaagatggctctggggatgactctgacaacttctccggctc

SEQ ID NO: 455243 - DNA, 116 bp, Homo sapiens
ccacaatgtgactactttgactactggggccagggaaccctggtcaccgtctcctcaggtcacagtgtccatgtaactaactcctggttaagaggatatggatagaaggcacatgt

SEQ ID NO: 455244 - DNA, 75 bp, Homo sapiens
caccaggcccacgtcgcgggggagaccgtggcccggcccctcttcctggatccagaagcactggaaatccatgga

SEQ ID NO: 455245 - DNA, 87 bp, Homo sapiens
ctgaagcacctgcgggcgctgctgggttcacctttccttgccagtgaagatggcgtgcttggcggagtgattgtcctccgttcatgc

SEQ ID NO: 455246 - DNA, 97 bp, Homo sapiens
ggatgtttctatttgccacaaggtagctacagcaagctgggtagcaggcagatccaaaggatatcatgaagtttccagggcctttggaaaaccagag

SEQ ID NO: 455247 - DNA, 75 bp, Homo sapiens
gaggcaacggtggacacgtcattctgagaggtggaagcagggaaaggcctggagatgaggaagctggttctctcg

SEQ ID NO: 455248 - DNA, 96 bp, Homo sapiens
ccgcgttcacagccccagcgcaggaatgtttacccttgcggaagttgcatcacttaatgacattcagccaacttaccgaatcctgaaaccatggtg

SEQ ID NO: 455249 - DNA, 75 bp, Homo sapiens
ggagctgtcccagaattcagctataaagcagctgagccgagctacagtacatgaccctgagactggaaaattgac

SEQ ID NO: 455250 - DNA, 100 bp, Homo sapiens
ctgcggcaaataacacagccagtcagcaagcagcatcacaagctcagcctggacagcaacagtttggaaattttagcattcaggtgccaggaatgcagat

SEQ ID NO: 455251 - DNA, 83 bp, Homo sapiens
ctaattcaaggactcttactgtgggagcaactgctggttctatcacgtgggtttggaggatttgggacaacatctacaactgc

SEQ ID NO: 455252 - DNA, 51 bp, Homo sapiens
tggcctgctgctggcccgcaggctactacccacagatggcatgatccgaaa

SEQ ID NO: 455253 - DNA, 96 bp, Homo sapiens
tgagctccgtattctctgaagcctggaaacgaggcactcagttggaagagtccagcaaggcttgtgagaaggttggcatgcagatccctcgattct

SEQ ID NO: 455254 - DNA, 83 bp, Homo sapiens
cgggaggtgaatttccatgtcaacatagtcctgatttcttcgccaagcgcaagagatcagcgcctgagaagtcgtcgggcgat

SEQ ID NO: 455255 - DNA, 98 bp, Homo sapiens
cacacaagcaccccaataacctcaagggctgaccccacattggacaccgctgcatccatgtccatcacacaacacagctgccgtttcttctgcctgct

SEQ ID NO: 455256 - DNA, 100 bp, Homo sapiens
ggactaagcaacaggtgtttcaaggaactaattctctggttcaaatctgaacatcaatgatgtactagggaactactcattgactcttgttgatgcattg

SEQ ID NO: 455257 - DNA, 75 bp, Homo sapiens
ctcgcaggccgcgccgggaccaggcccgacaacaagctcaaatacgtcaccaaatggcagaggacagcaaagcag

SEQ ID NO: 455258 - DNA, 83 bp, Homo sapiens
tccgtactgcagctttgaagaaggttgaatcttgcctactcacgtttagggcctttttttggtggattgctttaataaagatg

SEQ ID NO: 455259 - DNA, 51 bp, Homo sapiens
aggacaacgtgcgcgccgctcagaaggacaggaagatgtcacccaagcgca

SEQ ID NO: 455260 - DNA, 75 bp, Homo sapiens
ctcggaaagtgctcctgcggctgtatggagcgattttgcagatgcacgagaagccctgccaacgtgggataagca

SEQ ID NO: 455261 - DNA, 75 bp, Homo sapiens
gacaacaacatccgcagcggggagatgtacaggttccaggttgttcgccgcaggacccagcggaggaagtccacc

SEQ ID NO: 455262 - DNA, 100 bp, Homo sapiens
ttccgaggaagctaaggccgcgttggggtgagaccctcacttcatccggttatggaattccactgaaagacggagatgagaaaacagatgaagaagcaga

SEQ ID NO: 455263 - DNA, 100 bp, Homo sapiens
agagcctgaggatgtcgccgtcccgggcggcgtggacctcctcaccctgccgcagctgtgcttcccaggtctctaattaacagaagatggcaaagcccag

SEQ ID NO: 455264 - DNA, 100 bp, Homo sapiens
actgccgcctcacctgtggagctctgggtacagatggcgtttaatgattgcttcagtttgaactaccctggcaacccctgcccaggggacttgatcgaag

SEQ ID NO: 455265 - DNA, 82 bp, Homo sapiens
tggacgccgcgatcgtggggcccgcgaggcgggcagccggggcgtccagatgatcatcgagcccaccagcccttgccttctc

SEQ ID NO: 455266 - DNA, 100 bp, Homo sapiens
cttgcgccgctgacttctccactggttcctgggcaccgaaagttgtacaatggtagatggagtgatgattcttcctgtgcttatcatgattgctctcccc

SEQ ID NO: 455267 - DNA, 83 bp, Homo sapiens
aaatcatggagccgctggggtcccttttgcctcagatactattttgaagaataccaagctgctattttacacttgaagaggga

SEQ ID NO: 455268 - DNA, 75 bp, Homo sapiens
agccgggttgtatttggaaacgcggagtgagtttttccgtgctgtgtaggtgcttttgaagatgatgatatcacg

SEQ ID NO: 455269 - DNA, 88 bp, Homo sapiens
ccccctatcaacaccaagagtcaggcagtgaagaatctacctgttactcgtattttggacaatcttatggagatgaagtcaaaccccg

SEQ ID NO: 455270 - DNA, 51 bp, Homo sapiens
aaacaggcgtattctggtaatttcgaggagacttaattcagtgcacaaatg

SEQ ID NO: 455271 - DNA, 100 bp, Homo sapiens
tgctttgaaacgccagcgactagaaatcaattgccaggatccatctataaagagtaacagttacccctcaatgagcgacccctacctgtccagctattac

SEQ ID NO: 455272 - DNA, 87 bp, Homo sapiens
aagacagttcctgtcataccttttaaaggtgaaaaggggaccgggaaatcaactcagaaaccattacattataagagttgtctcttt

SEQ ID NO: 455273 - DNA, 60 bp, Homo sapiens
tgcctgtgtcccacttgttcgcggcctataggactatgatttaatctccaaagaaccaaa

SEQ ID NO: 455274 - DNA, 85 bp, Homo sapiens
tacatctacaatggcaaaggagtggaagacctggagcggaacaacggctccctggaccggccctactacatgtccaagagccttc

SEQ ID NO: 455275 - DNA, 100 bp, Homo sapiens
tactaccaaacagcacttcctggcaatgatagatacatcagtgtgggaagccaagcagatacaagtgttgacttcaaaatcaaaactgtagagctaagag

SEQ ID NO: 455276 - DNA, 75 bp, Homo sapiens
gaggaaaaaaagccagtctcaacgttttacttatacaccaggcatcaagcatgatggaaccatgtgtgatacctg

SEQ ID NO: 455277 - DNA, 97 bp, Homo sapiens
cgcgcgcctggcggctacatggagagtgtcagtataaaagaacgtgtggatcactttgctgagtacatccaagatttgaagaactgaaataaatcag

SEQ ID NO: 455278 - DNA, 75 bp, Homo sapiens
atactttttggaaatgagacagttttgtagtgcatccctgagcatgagcacagaatgaagcggcgtttggatgac

SEQ ID NO: 455279 - DNA, 100 bp, Homo sapiens
gaagcagccgatccagcctgcggagcctgtggggcaggcaaaaagggcagctagctgtagaaagagctaaacaagtagaagagttcctgcagcgaaaacg

SEQ ID NO: 455280 - DNA, 88 bp, Homo sapiens
gcagagtgaagaaagctggtaatagatgtctgacaaactaaagaaagacttgtgttacatgatgcaaaattgaggggccttgcagccc

SEQ ID NO: 455281 - DNA, 75 bp, Homo sapiens
aactctggagctgctgcttatctgtgcaggccatcctcaatatgagctactacccacagatggcatgatccgaaa

SEQ ID NO: 455282 - DNA, 100 bp, Homo sapiens
ggaaaatggccgccgccgccgccgccgcgccgagcggaggaggaggaggaggcgaggaggagagactaccctacagcttggggcctgggctcctctgacc

SEQ ID NO: 455283 - DNA, 80 bp, Homo sapiens
ctaggactcatgactactgaggattctgtggcagtgcccagatgaatgaagaaatgctgtgccaagaatttggaagattt

SEQ ID NO: 455284 - DNA, 83 bp, Homo sapiens
accggccgaaaggcgaggaaccgactgtgccctgtccacggtgcctcctgcatgtcctgctgccctgagctgtcccgagctag

SEQ ID NO: 455285 - DNA, 100 bp, Homo sapiens
agcacctagtcgtggccggaggagtctcagagctgtcagaaaggatcagcagcaggctcgtcagtctcagcttgctcaggatgagcgtgtgtcccgctct

SEQ ID NO: 455286 - DNA, 75 bp, Homo sapiens
ggatgttctcatcgtccctgccaactttccaagtctggggatggccagctatccaacttgataaagtcaatcttc

SEQ ID NO: 455287 - DNA, 100 bp, Homo sapiens
caagaaagattcagatctgtaaggcgccctcaagatcaaaaagttattaacagtgctgggaggttctctacttaaaagacaatgactactgatgaaggtg

SEQ ID NO: 455288 - DNA, 97 bp, Homo sapiens
gattccaaagttgaagttttgacctataaaaaggcagatactgatctgggaaatgctccaaggctggaattttctacgacttcagtgattactgaat

SEQ ID NO: 455289 - DNA, 100 bp, Homo sapiens
ggactgggcgggggtgatgatatccgcccagacactgactggcagagtcctggtcacgagaagagaatgccttctagatgcaaaatcacctccaaaccag

SEQ ID NO: 455290 - DNA, 82 bp, Homo sapiens
ggctaatagcccggagacaagctgtatgctgatggtagcatatgtttagatatccttcagaatcgatggagtccaacatatg

SEQ ID NO: 455291 - DNA, 51 bp, Homo sapiens
gaactggaggagcgatttgccatcgtgctgcatttaaatcaaacggtattg

SEQ ID NO: 455292 - DNA, 101 bp, Homo sapiens
ggggcgacgaaggcaaagggaaggtggtggacctgctggcgcaggacgccgacatcgtgtgccgctgccaggctaaggcagctggataagcacagccaggc

SEQ ID NO: 455293 - DNA, 75 bp, Homo sapiens
cacgatcccaccgcacgttcagaagtcggccagatgaattatactttgaggaaggtgatattatctacattactg

SEQ ID NO: 455294 - DNA, 89 bp, Homo sapiens
caaccatgagccgtgtcagaggaagggccacaaggcacactgggcggtgagtgcagtaatctatgccagcaattatgacaatgttagca

SEQ ID NO: 455295 - DNA, 90 bp, Homo sapiens
gacagctggtgttctccaagctggagaatgggggctttccctatgagaaagatgtaacaattcaggttttaaaccagcttatccaaaaga

SEQ ID NO: 455296 - DNA, 98 bp, Homo sapiens
tttatacctatagatattttatccacaactggccacagctgtgcttcttggtagcaatgaatcgagcccaagtttgtttgatatccagttccaagtct

SEQ ID NO: 455297 - DNA, 82 bp, Homo sapiens
cgcaactctcagttcgagagtaaaggcccagatggtacaggaagacttggagaagacccgtgctgagctgaagactgccatg

SEQ ID NO: 455298 - DNA, 78 bp, Homo sapiens
aactggtaggaccagcaccccataccccgaagccagactgtgccctgtccacggtgcctcctgcatgtcctgctgccc

SEQ ID NO: 455299 - DNA, 75 bp, Homo sapiens
gaaatcagaggagatgtaactatcgactcaagaacctggagctagctgctgtgagaggatcagatgtccgtgtga

SEQ ID NO: 455300 - DNA, 75 bp, Homo sapiens
aaacagcactattagacaggaagccagaagatgtagacacagtgcagccaaaagctgatgtcatgtggtttgctg

SEQ ID NO: 455301 - DNA, 75 bp, Homo sapiens
ttagacttggaatggatcttactaaggatcttcaagatgaagttcaaagggagaatactaatctgcaaaaactac

SEQ ID NO: 455302 - DNA, 100 bp, Homo sapiens
ccttatccaacatggttctaaccttcagtactaaagaagatgcagtttcctttgcagaaaaaaatgatgaaattatgcagcaggaagtcagacccctgat

SEQ ID NO: 455303 - DNA, 51 bp, Homo sapiens
tacaggagtcctccacttgccactgggcaaaggccaggatggaattggtag

SEQ ID NO: 455304 - DNA, 50 bp, Homo sapiens
agtgtgctgtgagagatctaccactagccgattacaaggagagctttaat

SEQ ID NO: 455305 - DNA, 98 bp, Homo sapiens
tttacctttggttcacaacatcatcaaatggtccttggaagttccagtaaaacatacacatgtttggcttcttgtcattactgttcatgtcctgcatt

SEQ ID NO: 455306 - DNA, 106 bp, Homo sapiens
gaggcagagaagggccaggagaggagcactttgaggacatggcctccgacgaggacatgccctgtttgtgctcttcgtcctggcctacatccacatcgtcttctcc

SEQ ID NO: 455307 - DNA, 75 bp, Homo sapiens
ggagaacttgaaagttcggaccagctaccactgctaagagccatctccaccagaagcctggccagacctggaaga

SEQ ID NO: 455308 - DNA, 50 bp, Homo sapiens
ttcgcagtggtcgcttcttctccttgccaacttcacgttgccagatgttg

SEQ ID NO: 455309 - DNA, 99 bp, Homo sapiens
cgagggaatgcagaaagagttaaggaaggcaggaacgtcaaggtcgtgggaaataaaaggcagttctacacagactgcagcaacggttgcatctgcata

SEQ ID NO: 455310 - DNA, 50 bp, Homo sapiens
ttatcaaagaggtggaaatgtcaacctcgaagcggaggatccctgtgtcc

SEQ ID NO: 455311 - DNA, 99 bp, Homo sapiens
atcgcccacaacctggtccatctcctgctgctggcccgctgggaggacacacccctcgtcatactcggtgttgagggcccaatagacataaacatgagt

SEQ ID NO: 455312 - DNA, 100 bp, Homo sapiens
gaagtggaggagctcgccgaggaggtgctggcggacaagcggcagagagaagaagaaggaggttcctgctgtgccagaaacccttaagaaaaagcgaagg

SEQ ID NO: 455313 - DNA, 111 bp, Homo sapiens
gagaagattcagcaacaggtcagcaagtacccattaatggaagagattgggttcttggtgcttggcatgaggtaattcctgaatttgtaacacaagtgaatgttgccttgg

SEQ ID NO: 455314 - DNA, 99 bp, Homo sapiens
gcagactggtgacttcacttttgagtgcaactgccttccagattgagaggatccagaatccagatctctggaatagctaccaggcaaagaaaaaaacta

SEQ ID NO: 455315 - DNA, 90 bp, Homo sapiens
agccaaaatgctattgccctgtcttcatcaacatttaatcactggtcctatagtacccctcctcaggaatgtctccccagtgcaaggaca

SEQ ID NO: 455316 - DNA, 82 bp, Homo sapiens
tcatccaggctcccttccaagtcacaggattatatgcgtcaggcaggagaagtgacttatgcagatgctcacaagggacgca

SEQ ID NO: 455317 - DNA, 74 bp, Homo sapiens
actgcagaggtgctggagctggcagatgaaatgtggcaactgtggtgagatttcggacaagtggcagtacatcc

SEQ ID NO: 455318 - DNA, 75 bp, Homo sapiens
gcctcggcccgctcttctccctgcttaacgagaaccataggttacattgattacccacctagtacaacatcttac

SEQ ID NO: 455319 - DNA, 100 bp, Homo sapiens
gaggtctcatctttgaactactgccggagcttctgccaggttgtggaaaatgcccttaaagtgaacccaatactaggtccacaaatgtttcaaccgattt

SEQ ID NO: 455320 - DNA, 100 bp, Homo sapiens
tacatggagtccggacccaggaagaagctgaatgccagctgatgaagaccgagaggccgcgacccaacacctttgtcatacgctgcctgcagtggaccac

SEQ ID NO: 455321 - DNA, 82 bp, Homo sapiens
ctttccgcttcttgaatttctctctgtaaaggagaatttctctgcaaagaatgtccaaaaattcatattcacattgatcgta

SEQ ID NO: 455322 - DNA, 90 bp, Homo sapiens
agggagactgttgttcccggagatgcggcgcgcaggccaaggagcgggagctggaactgaagaacacctggtcagagaacaagctcagcc

SEQ ID NO: 455323 - DNA, 75 bp, Homo sapiens
tattggaggaaaacacaccaagactctttttgatcagaacaatgctgcaaaaaaagaagagtcagaaactgccaa

SEQ ID NO: 455324 - DNA, 83 bp, Homo sapiens
ctggaagcagcagctcaccgaggacggggactcggaacccaccaagaccaacctggtcacattcttccataccgacctcagcg

SEQ ID NO: 455325 - DNA, 100 bp, Homo sapiens
tggactccttcggcagtccacccaccgccgccgcctcccaggtggaacacctgcagcaggagactgctgctctgaaaaagcaaatgcaaaaaataaagga

SEQ ID NO: 455326 - DNA, 82 bp, Homo sapiens
ttcaaagatggaatcacaaacggcgcacattggtatgatgtggaagatgatatcatcaagttgaatcgaaaggaagggaaga

SEQ ID NO: 455327 - DNA, 110 bp, Homo sapiens
agattttgaagagagatatgccaccagcatttattaaatctttaatctcatgaagtacgacagctacagccgcttcttaaagtctgacttgtttttaaaacacaagcgaa

SEQ ID NO: 455328 - DNA, 80 bp, Homo sapiens
cttgacctctcaatgaaagtgttgaaacaggatgggaaatattttacacaggaccattgccaactatttggtgtggagaa

SEQ ID NO: 455329 - DNA, 96 bp, Homo sapiens
ggactgagcgctcccaattggggtgcacgacgccagctcccttctggggggccggggcctgggggttgccatggcccccagccacctgtcagtgcg

SEQ ID NO: 455330 - DNA, 83 bp, Homo sapiens
cgctctccagcccgcttgaacgatgatatcatcaagttgaatcgaaaggaagggaagaagcagaattttccaagactaaatag

SEQ ID NO: 455331 - DNA, 99 bp, Homo sapiens
aggttcacgaaaagttcacgttgattgatggcatccgcgtggcaacaggctcctacagctatggaagttgggaccttttccgggaggcttatgctgcca

SEQ ID NO: 455332 - DNA, 75 bp, Homo sapiens
ttgttgtttctgcctttggatttcctgttattcttgctcgtgtggctgtggcctactgaacttgacgcactggta

SEQ ID NO: 455333 - DNA, 50 bp, Homo sapiens
ccagtggaggcctctcacatccggattgcaagtcaagtagctgctttgga

SEQ ID NO: 455334 - DNA, 100 bp, Homo sapiens
gtgccctgtactctgaggagcggaactacagccagatgcggatccgggccaagcagtgggccgaggtggtctttgggaagaagcttcctgcctttgccac

SEQ ID NO: 455335 - DNA, 100 bp, Homo sapiens
tttggagggaaagaaagagccctggactgtgaagagtgaggagaccatagctgcacagccagttcgttcccacatgcagggcagcacaaggagaatgggc

SEQ ID NO: 455336 - DNA, 73 bp, Homo sapiens
aaacatggagtccatcttccacgagaaagtgatccatgctctagggcaatcatggcatcctgagcattttgtc

SEQ ID NO: 455337 - DNA, 82 bp, Homo sapiens
cccgggcctgcggccgcttcttccagaagggccaagggacttgcttttatttcgacatcttcatttgattgtacaccatctc

SEQ ID NO: 455338 - DNA, 100 bp, Homo sapiens
tattccacagtaatggaacagcaagtaaatggacagttaatagagcctctgcagatatttccaagagtggcaaaaatagaatgtttgaagtcattggaga

SEQ ID NO: 455339 - DNA, 80 bp, Homo sapiens
gctaagagcaaggccaagaggaagactccatcaagaatgctggaggaagggtgtttgtccactgccaggcaggcatttcc

SEQ ID NO: 455340 - DNA, 97 bp, Homo sapiens
gataggcacacttgcactaagccttacaatacctctgtccataatagctgacatgtgtatgcaaaagacacgttggtcgtcattgcctccgagccca

SEQ ID NO: 455341 - DNA, 75 bp, Homo sapiens
accagctttctccatgcagctctggccatgcgtattggccatgtgagttaaatggattaagggcggtgcaagatg

SEQ ID NO: 455342 - DNA, 83 bp, Homo sapiens
aaggggtagcgggagtgatgtctgtggggccgccggcggcccggcttcagggtgggagactacactggaaaataaagagttag

SEQ ID NO: 455343 - DNA, 82 bp, Homo sapiens
ttggcctccatggtgtcagagcaaggagaagctgttggtggtacagaagttggtcctgccctttgggcgactgaactacctg

SEQ ID NO: 455344 - DNA, 75 bp, Homo sapiens
attcaactcaagcagatcaaagttgttttgagcagcctcgtcttacagcgtgactgcaaagaaaaagacttttgt

SEQ ID NO: 455345 - DNA, 100 bp, Homo sapiens
gcgttcctcaaactccgtgaccagaaatgctgagccgattatcaggattagcaaatgttgttttgcatgaattatcaggagatgatgacactgatcagaa

SEQ ID NO: 455346 - DNA, 98 bp, Homo sapiens
aagaagcctacagagcactcctgtctggctcaaaccccccctatcttccattcaggataaaagaatcagagtgtctcaacccttgacaagaggaccaa

SEQ ID NO: 455347 - DNA, 100 bp, Homo sapiens
aagagagataaagcaagcaagctgttttgaaagtgtctaatattggctgatgtagagctatagaacatacatatgatagttgagaaagacacatattctg

SEQ ID NO: 455348 - DNA, 92 bp, Homo sapiens
cgcgagggccgggagaaccgttcgcggaggaaaggcgaactaaattctggggagacattgccaaggaattttactggaagactccatgccct

SEQ ID NO: 455349 - DNA, 74 bp, Homo sapiens
tgtaaccaaatattatggatcctatctgaaggcctttccccctggtgctcttcatcctttaccaaagagacaag

SEQ ID NO: 455350 - DNA, 90 bp, Homo sapiens
gagaatctgttcctgaccttgcacccatgctgtggcattcatttggtactattgcagcacttttacagagatggggtttcaccatgttag

SEQ ID NO: 455351 - DNA, 74 bp, Homo sapiens
gatggcagtttcaataacaggtcattgccgagaaaagacagcccacctgaggatattgaccataaggactcata

SEQ ID NO: 455352 - DNA, 100 bp, Homo sapiens
accatgtgactgtgaccttgggggagccttaaacaacagtgagaaagatcagtctaaagaaaaggagaagaaagtgaaaaaaacaattccttcctgggct

SEQ ID NO: 455353 - DNA, 51 bp, Homo sapiens
ggcgcgagtgaggaaaggaggtactgtagggtcagttaaatgaaagcatgg

SEQ ID NO: 455354 - DNA, 98 bp, Homo sapiens
aggatcatgctcttgcaaaaagatctgtggatggaggcctgatggttaagggcccaagacataaacctggggtcttactacatattgcaacagaagat

SEQ ID NO: 455355 - DNA, 100 bp, Homo sapiens
acataacctatttcctggcccaatagacaactctgggctattttcaggagccaaaaacctgtatatcatctccgtgaaggggatcaagggacggctgaac

SEQ ID NO: 455356 - DNA, 100 bp, Homo sapiens
tgagaatacttgctgaaaaggaagttttctggaatggatgagattgtggggaacctgggtgaaggcacctttggcaaggtggtggagtgcttggaccatg

SEQ ID NO: 455357 - DNA, 83 bp, Homo sapiens
gcagcaacggcgacatccagcaaggattaggaggccagaaggagatcccttccacggtgctaggctgagatggatcctctcag

SEQ ID NO: 455358 - DNA, 73 bp, Homo sapiens
cgcaactctcagttcgagagtaaaggcgttggagagaagttttcaacttgggaaccaaccaaacgggagcttg

SEQ ID NO: 455359 - DNA, 51 bp, Homo sapiens
gaaaactcgaaacagatttttctggacagctgatcacctgaaagagaggag

SEQ ID NO: 455360 - DNA, 75 bp, Homo sapiens
tgccgttgaggaggagacggaggagaccgacgttgttaggttgctgcttttgctcagaggacatccatgacccta

SEQ ID NO: 455361 - DNA, 100 bp, Homo sapiens
taatgatgaagaagatccttcaaaattaaaagaggagcagcatggcatttcagtcactggtttgcagagtccagatctcactgatgaaaaggcctccagg

SEQ ID NO: 455362 - DNA, 100 bp, Homo sapiens
tctgtaacctgcactgtgacctacactagtcgcgggagccacgcagaggacgccggaacaccctggaagccgagaaatgagtggccacaaactcaaaggt

SEQ ID NO: 455363 - DNA, 100 bp, Homo sapiens
cgtagctgcacagacataccatggctgctgctcttcatcctcttctgcattgggatgcatgcttgagagttcaaaccggcttgatgaagaacacaggcta

SEQ ID NO: 455364 - DNA, 75 bp, Homo sapiens
ttctcatctgaaagctttcatatcggttgactgcaggagaataaaggcagccccgttgatgactgaaaatgacaa

SEQ ID NO: 455365 - DNA, 100 bp, Homo sapiens
tgcctctcgcccatcagcgcggcgctggccgagagccgcggctccgtgtttctggaaagtgacagcagcaccctacggtccccgtcttcccccatccacg

SEQ ID NO: 455366 - DNA, 101 bp, Homo sapiens
ccttcctccgcctctcgctaccaccgccgacggtcttcagggtcacgagatgagcgctatcggtcagatcaggatcctcatgaccagccaaagagaagaag

SEQ ID NO: 455367 - DNA, 85 bp, Homo sapiens
agacttgacctaaacagcaaagagtggatccgacctttggcttcagggtctgggggtggtggcatctcccctaaaggaagtggtc

SEQ ID NO: 455368 - DNA, 75 bp, Homo sapiens
atttctgattgtcaggccaacataatgcagatggaagaagcaaaggagaagaaggaagttgtggaagaggcagaa

SEQ ID NO: 455369 - DNA, 75 bp, Homo sapiens
ggatggccgagtggtctaaggcgccagactcaagcgaatgctgatgtcttaaaggcgatggtagcagataacagc

SEQ ID NO: 455370 - DNA, 75 bp, Homo sapiens
aaacaagacaacttgagctgaaagcgaaaaactatgctgaccagagtggtggcggtggcggcccgcgatctgagc

SEQ ID NO: 455371 - DNA, 73 bp, Homo sapiens
caagttcaggagaactcgaccgatgtcaaaatccacaggcaacttcctcactttgacccaagctattgacaaa

SEQ ID NO: 455372 - DNA, 76 bp, Homo sapiens
ttcaagaatcatctgtaaacctgataacactgcatgaaatgttagagaaatttgaagatgctaaacttgctgctgc

SEQ ID NO: 455373 - DNA, 77 bp, Homo sapiens
aagaagacaatcgcagtggaaaactgagttctttgaagccatcaaatcatgctaccatccagagtatagtgagagct

SEQ ID NO: 455374 - DNA, 100 bp, Homo sapiens
ctaaaaattctaatggacaagccagagatgaatgtggttttgaaaaatgtcaaaccagaccaatgggtgaaggacgaaaatgatgatgacgatgactgga

SEQ ID NO: 455375 - DNA, 99 bp, Homo sapiens
caggatgtggacgttgatctctcagccaaaatctgaagaggaatgattatacgcctgataaaattatatttcctcaggatgagccttcagatttgaatc

SEQ ID NO: 455376 - DNA, 100 bp, Homo sapiens
atggaaggagtgggtactgatgctgtcatttatttgaaggtggagcagttctggaggttttatagccacatggtacgtcctggggacctgacaggccaca

SEQ ID NO: 455377 - DNA, 100 bp, Homo sapiens
atggtgccgttggtgcttccgaactcgcaaatacagccaaagcagaatggatcttctaaccaaagacggagatttaatccacagtatcataacaacaggc

SEQ ID NO: 455378 - DNA, 90 bp, Homo sapiens
ctctgctcatgatggcatctgggggagcgcgggagccctggaggggaagtattaaaggtggaagaaggtccatatctttttctgtgggtg

SEQ ID NO: 455379 - DNA, 83 bp, Homo sapiens
ggacagcacccgccaacctcctggaaggtaaatcctaagtaatgcactgaagagaggagagatcattgcaaagcagggaggag

SEQ ID NO: 455380 - DNA, 75 bp, Homo sapiens
tcaagtacatcataatcggcgacacaggatgccggaccagatctctgtctcggagttcatcgccgagaccaccga

SEQ ID NO: 455381 - DNA, 83 bp, Homo sapiens
ctccgggcacacccggctccccggacgcctcggcatcagtgtttttctgaccgaagttctcatttcctgacaatggaaatgga

SEQ ID NO: 455382 - DNA, 75 bp, Homo sapiens
tgtgtttctagatttttcctccagctttcctgagacttttcctccgcaaccatgtctgacaaacccgatatggct

SEQ ID NO: 455383 - DNA, 100 bp, Homo sapiens
agcagagcaagaagagcttcagagagcagccttcccggagcaccaactccgtgtcgggagtgcagaaaccaacaaaatagcctaacatggcagaccagag

SEQ ID NO: 455384 - DNA, 75 bp, Homo sapiens
ctggccctgctccttcatcttcaaagctaccaaagcagcggaagatgtcggacagcgaggacagcaacttttccg

SEQ ID NO: 455385 - DNA, 100 bp, Homo sapiens
ggcgcgtctccccggcccagtccgcgcccggccccgcggggccgctccggcccgctccgaggaatttcttcacatggctcctggagaagtgaccatcaca

SEQ ID NO: 455386 - DNA, 100 bp, Homo sapiens
aatccccctggacctgcctgggtcgccttatgccctggtgccaagactggctagaggccctgcactggtacaacactgccctggagatgacggactgtga

SEQ ID NO: 455387 - DNA, 97 bp, Homo sapiens
ctctctgcctgatttctcctgaatttggaaactattttgcatcccaggccagcaggagctttgtgagctgcaggcatggcgatggtgcgcctgttcc

SEQ ID NO: 455388 - DNA, 90 bp, Homo sapiens
cgctgcgcggcgcggcggccgggccctcgagacggggacgctcggcttctttagaagtgccaggcgcaggagggagcctggtctggaccc

SEQ ID NO: 455389 - DNA, 100 bp, Homo sapiens
cggggagctgccgcggtggtcgccgttgagtccgtccgtgccgctggggccgaggcagctggagatctcagagctgcagccttctctgcccccagggtcc

SEQ ID NO: 455390 - DNA, 98 bp, Homo sapiens
gcggatgccctgcagtacctgcagaaggtctctggagacatcttcagcagggcatcgagcgcctcaaacgaaagaaccagcccagggagcacatgggg

SEQ ID NO: 455391 - DNA, 100 bp, Homo sapiens
cttcacggcgccgagccgcggtccgaatcagctggacatcatctccatggcggagacaaccatgatgccagaggagattgagctggagatggcaaaaatt

SEQ ID NO: 455392 - DNA, 50 bp, Homo sapiens
tccggcgtccgggtcgagcgcagcaaatggaacgtgtttttccatggttc

SEQ ID NO: 455393 - DNA, 100 bp, Homo sapiens
tcatcagtgagaaaacggctgcatattggtgtcaaagtgtcactgaactaaaggctgactttccagacaacgacactcatgaggaccatgatacttccac

SEQ ID NO: 455394 - DNA, 98 bp, Homo sapiens
accgccagcctcatcgaggacattgacacttccatgaggcaggctgaacctgcagatatgcgcccagagatatggatcgcccaagagttgcggcgtat

SEQ ID NO: 455395 - DNA, 82 bp, Homo sapiens
gaggtcttcacagagttcttccctgcatctgggctgatgggccgtaccctgcaccgtgagccacccgcaggagaccaggagg

SEQ ID NO: 455396 - DNA, 75 bp, Homo sapiens
aagaatgaagccacggacccttgcggaaagtggagaatgaggacatgaataaagaccagatcttgctggaaaaag

SEQ ID NO: 455397 - DNA, 142 bp, Homo sapiens
cttgtctgtgaagctaaactcaatgctgctgtgtgggaagaagatttgtaaagaaaactcttagatccagacatttaatgtggatgcaccatgccagaccgtggaagatttaacgaatggggttgtgatggcccaggttctt

SEQ ID NO: 455398 - DNA, 74 bp, Homo sapiens
ggatgaagttgttcattgtttgtcaccacaaaaaggacagaacatggtccaagacaattcctgggaaagttcag

SEQ ID NO: 455399 - DNA, 100 bp, Homo sapiens
gcgaaggaggcgggagcggagacctcgctgcgctcatggcgtcgcccgggtgaatctggattgggaaagtcgacattaatcaactcattattcctcacag

SEQ ID NO: 455400 - DNA, 100 bp, Homo sapiens
atccagcctatattgttacaattttttttcaagaactgccgtcttctttgcctgcactaatgtccaagccttatgcatttgatcgggtgttccagtcaag

SEQ ID NO: 455401 - DNA, 108 bp, Homo sapiens
accttcagaaacagtgctgaagcctttaaatgcagcatctgcgatgtgaggaaaggcacctccaccaggaaacttggatttaactggccagaagcaggtattcaaagc

SEQ ID NO: 455402 - DNA, 51 bp, Homo sapiens
cttgacgaagtggcagaggaacttagtacaggtttgcagattccgccagca

SEQ ID NO: 455403 - DNA, 75 bp, Homo sapiens
acgctatgtccttttggcttcgaggtttaccccttccaggtggatgggaagagagtcccaagggatgcagggcat

SEQ ID NO: 455404 - DNA, 74 bp, Homo sapiens
attactgtcccgtttgattttggagaaaagcaaaaaaatgctcttgggtgttaataatgcagtttatggaatag

SEQ ID NO: 455405 - DNA, 88 bp, Homo sapiens
aaccgtgcaaatttctgatctagaggaagcaagatttccagatgtagcaaatgggtttattgaggaaataattcattttaagaattat

SEQ ID NO: 455406 - DNA, 73 bp, Homo sapiens
aatattgagaagaaacttaatcagaatagcaggtcagaggctcctcacttggcttacttgagaacaggagtaa

SEQ ID NO: 455407 - DNA, 75 bp, Homo sapiens
aagaaaccatgtgctgaaatgtttgacgacactgatggtttggtgctggagaatctggtaaaagcaccattgtga

SEQ ID NO: 455408 - DNA, 100 bp, Homo sapiens
ctgcaaacatagagaattctgggcttccacacaactccagtgctaactcaacaggtttgaagtttgaggaaattcaaaaaagatttggtgaagagttctt

SEQ ID NO: 455409 - DNA, 75 bp, Homo sapiens
agatgagaccgctactcacccggtaatagctcttcaagtctgcaataaaaaatggcctccaacaaaactacattg

SEQ ID NO: 455410 - DNA, 83 bp, Homo sapiens
gtctcgggggccgctctgggatcccggccaccagcaattgtccggtctcaccaacggctttgggggtgcgaggagcgagcagg

SEQ ID NO: 455411 - DNA, 75 bp, Homo sapiens
gttctaaccttcagtactaaagaagatgcagtttcctttgcagaaaaaaatgtgccggtggcagatatcaaagcc

SEQ ID NO: 455412 - DNA, 103 bp, Homo sapiens
ctggcgtgcactccgcacctcggggacattattgcgcgtggaacggctgcttttggaagttgattatggaagattcccacaagagtaccacgtcagagacagc

SEQ ID NO: 455413 - DNA, 82 bp, Homo sapiens
ctcagttggaagcagccgatccagcctgcggagcctgtggggcagtccctgaagaggaaggagaaggaatatgagcatgaaa

SEQ ID NO: 455414 - DNA, 101 bp, Homo sapiens
gggggtttggtgggcggcccaccgggactcgccgttgtttaggaactgcagtttcagtaatggccaagattccactgttggagtgcctaaccagacatagt

SEQ ID NO: 455415 - DNA, 100 bp, Homo sapiens
agaagacatagttggacttcaggccttccaagaaagagctgtaggtaaaacttgcctactgatcagttacacaaccaatgcatttcctggagaatatatc

SEQ ID NO: 455416 - DNA, 100 bp, Homo sapiens
ttctgtcattgctgctgactgctctggcttcctccaccaaaggacaaactaagagaaacttggcgaaaggcaaaggagcggcattgcccccgaatgtcca

SEQ ID NO: 455417 - DNA, 100 bp, Homo sapiens
gaaatgatgaaaaagtacggcaagtcctttagaaaattactttcactgtgtcttcagaaagatccttccaaaagggtgttaaataccacattatttgaaa

SEQ ID NO: 455418 - DNA, 98 bp, Homo sapiens
tcctaaccctgaagcgacttttgtcaaggaaatgacagtcattttgtttactcattcagccctgttgcaggtcccaataaactcttcataaggttgac

SEQ ID NO: 455419 - DNA, 75 bp, Homo sapiens
ctcccgagtggaggaagcaatacatccagtatgagggttgtgagtcccggcccagcccctccacccccctgcccc

SEQ ID NO: 455420 - DNA, 100 bp, Homo sapiens
catgaagacatatactgtgaacacactacagaccctcacaagtcagttactgaaaaggtcctcctgcatatgcccaagaggattgggagtggaatggaca

SEQ ID NO: 455421 - DNA, 82 bp, Homo sapiens
cacagagcctcgcctttgccgatccgccgcccgtccacacccgccgccaggacttgagcagccccagccagtacgacacagg

SEQ ID NO: 455422 - DNA, 90 bp, Homo sapiens
cggaaggcggcgtccgcgacgcagctgttcacgcttaggtgggcgacgtgggcgcaggtgggcgcagtcgtggcattcctggtggctttc

SEQ ID NO: 455423 - DNA, 98 bp, Homo sapiens
ggcagcgcaggcgcaagcgcagagagcggaggcggtggtggtggcggccgctggccagtaacctttcagctcttggggcattggtgagtctcagtaat

SEQ ID NO: 455424 - DNA, 82 bp, Homo sapiens
gccggcaagagctcggtgctggagaacttcgtgggccggtacctggactatgccagagtccccaatagcaatccccctgaat

SEQ ID NO: 455425 - DNA, 142 bp, Homo sapiens
cctgaactccctgtcacatgatacagccactgggcttatacagtatgcattggaccagggcgtgaacgtcacccaggagatcatgcacgccctgaagatgacctggcacgtgcactgctttacctgtgctgcctgcaagacg

SEQ ID NO: 455426 - DNA, 101 bp, Homo sapiens
gcaagaagtgggccttacatattttagcaagactttttgaaagtggatccaaacttctacagcaaaaacttacttcttttaggaaagacatacttgaaact

SEQ ID NO: 455427 - DNA, 88 bp, Homo sapiens
tgtcaatcgcttgccccagcacaggatgtacagttacccagcacgtgtacctcctcctcctcctattgctcgggctgtagtgccctcg

SEQ ID NO: 455428 - DNA, 100 bp, Homo sapiens
catgaatccagctagcaaagtaattgcactgaaaggttgaggaacaggttagcaccactgagagagtgtttcaggatagacaatatcagattgatgctgc

SEQ ID NO: 455429 - DNA, 75 bp, Homo sapiens
caaggaaaaactggagagcttcatcaaaaatagtgatagctttgataagactcagtggcttttgaggatgtgtct

SEQ ID NO: 455430 - DNA, 95 bp, Homo sapiens
gaggcgcccccgccggccgccgcgccgcccggcagcctcggcagacaatgcagatcttcgtgaagactctgactggtaagaccatcaccctcgag

SEQ ID NO: 455431 - DNA, 100 bp, Homo sapiens
ctgtgtgtgtcattgacatgtcctctttcacaaagtttgagataacagatagaatttttgcggcatttgaagagctttttccagattatgtttaaaattg

SEQ ID NO: 455432 - DNA, 96 bp, Homo sapiens
ggccgagcaggaggcgccatcatgtcttaggaaaagtcctcagtgctgtgggcagtgcccagctactgatgtcccagaaattccagcagttccggg

SEQ ID NO: 455433 - DNA, 110 bp, Homo sapiens
gagtcctttggtcccaggcatcatcacagttattgacaccgaaaccgttggagagggccagatgaccttgaatgatgccatgaggaacaaggcaaggctgtcaattacag

SEQ ID NO: 455434 - DNA, 82 bp, Homo sapiens
ctctttccatcagtctcaacatagaaatctgctgatttgggtcctactttaatgacaagacctggacaaccagcacttacca

SEQ ID NO: 455435 - DNA, 89 bp, Homo sapiens
ctggactgggatttggaggatttaatacacagcagcagcagcaaactagagagcctgacaaggagctgaatcctaagaagaagatttgg

SEQ ID NO: 455436 - DNA, 76 bp, Homo sapiens
atcaagttccatcctcagacaagagcttccccttctcagaatcctgctcttcctccagagagattcccaggagaag

SEQ ID NO: 455437 - DNA, 97 bp, Homo sapiens
gtgttcgggagtccttggaactgtggtccatggtaaagttttacagactccccatccccaggatgtcaacctcagtccctcaaggccatacctggac

SEQ ID NO: 455438 - DNA, 83 bp, Homo sapiens
ctcgggtctcgggggccgctctgggatcccggccaccagcaattgtccgggaacccgaggtcatatcaacaatgggtgcatac

SEQ ID NO: 455439 - DNA, 100 bp, Homo sapiens
ctcgccggtcagcggctcgtcgccgttcgccacccaagagacacctatggctgccgatgaaggctcagcagagaaacaggcaggagaggcccacatggct

SEQ ID NO: 455440 - DNA, 75 bp, Homo sapiens
gccgggcgaacatggcggcggccaccggctctacagtctgctggagaggatcaacccggaccacagcttccctgt

SEQ ID NO: 455441 - DNA, 118 bp, Homo sapiens
ttcttcctcaacaccagcaccgcagatgttgtcaaggtggcctaccaggaggccaggggtgtcgccatgatcttactgtgccgagatcgctcacaatgtttcctccaagaaccgcaaa

SEQ ID NO: 455442 - DNA, 80 bp, Homo sapiens
tgggtttagcaaaagttcatctccttctgcatccttaactgagaatgagagtattgggaaagggtcgttgtggtgcatag

SEQ ID NO: 455443 - DNA, 95 bp, Homo sapiens
aggtggtggtggccaagtatgcgcccagcggattctacattgcctccggaggaatcccagtcagaagttccagcctgccactgttctctgatgcc

SEQ ID NO: 455444 - DNA, 83 bp, Homo sapiens
agcggcgagacgcgcgtgtgtgagcgcgccggaccaagcgggcccagaagcggatgatatcatcaagttgaatcgaaaggaag

SEQ ID NO: 455445 - DNA, 100 bp, Homo sapiens
ttttagacttgccagaacagaacactattcacaaagattgcctgcagtttattgctctgtatgaaaaagctgatatcaaggggcctgaagacaagaagaa

SEQ ID NO: 455446 - DNA, 76 bp, Homo sapiens
ttgcgcccctgtggaaagggatcggccacgtcatcaaggtccctgataatttccaagaggtcgttctgaccccagg

SEQ ID NO: 455447 - DNA, 100 bp, Homo sapiens
cctcagcctcccgagtagctgagattacagattcaggaattgtagggcctcaacctatagactttgtcccaaatgctctccgacatgcagtagatgggag

SEQ ID NO: 455448 - DNA, 100 bp, Homo sapiens
ccctgtggcaatgcctgcactattgatgggctccctgtccggcagcctacccggctcactcagggtgcatagcgggctgctgcttcatccccttctgcgt

SEQ ID NO: 455449 - DNA, 50 bp, Homo sapiens
gcctgcggagcctgtggggcagatatgtacgaccaagtgctgaagtttgg

SEQ ID NO: 455450 - DNA, 82 bp, Homo sapiens
gtttggaggcactggactacttacaaaaatggtctgacacccttagaaggaactcaagacacctttaccaattttcagcagg

SEQ ID NO: 455451 - DNA, 74 bp, Homo sapiens
gactgatctccatgtcctgttgtggggcttttacagcctttgggacggcccccaagttacatgaactacctgct

SEQ ID NO: 455452 - DNA, 96 bp, Homo sapiens
tcattattttaacatttgggagaaacacagccagaagtttttacccacctcttgatgaaccatctattggaagtaaaaatgttgatctgtcaggac

SEQ ID NO: 455453 - DNA, 82 bp, Homo sapiens
aagtggaattttggagatattcaaagcttcatcgcagtaggaatggcagccccatctatgaaggaaagacaggtctgctggg

SEQ ID NO: 455454 - DNA, 100 bp, Homo sapiens
cggttcctcaccctcggggagcaacatgggttctcctgaaaagaaagctgaacattcatctataaatcaagaaaatggcactgcaaaccctatcaagaac

SEQ ID NO: 455455 - DNA, 100 bp, Homo sapiens
cgcaatacaggaggagttagggtacaactgccagactggaggagtcatagctgagatcctgcgaggatatgggttgcttttcctgtcattagtcatcaca

SEQ ID NO: 455456 - DNA, 73 bp, Homo sapiens
gcggatttggctggcgtcccgcgtagatataatctgtggtgatcacctgttggagcagtatcaaactctaagg

SEQ ID NO: 455457 - DNA, 100 bp, Homo sapiens
cctaccatggtatgacactgaaatctgtaacgcactgccagtgaaagatgtagaagataaacctgaacaacaaaccagaacaagagagactgacaaatca

SEQ ID NO: 455458 - DNA, 75 bp, Homo sapiens
gggcggtggctacggacgccggagccgcaggaattacatgaacgacagccttcgcaccgacgtcttcgtgcggtt

SEQ ID NO: 455459 - DNA, 74 bp, Homo sapiens
aagcagcatcacaagctcagcctggacagcaacaggactgtggtctggagctcaatgatgaagatggccaccgc

SEQ ID NO: 455460 - DNA, 50 bp, Homo sapiens
cgcagatgcgctgtggtggggggtgtgtactaatggtcacttgatgtgcg

SEQ ID NO: 455461 - DNA, 100 bp, Homo sapiens
ggcatttggctttgcctttctggacacagaagtatttgtgacaggcacgcttaaaaaggcctcttaagagccttgatggtgctctatatgatgatgaaga

SEQ ID NO: 455462 - DNA, 100 bp, Homo sapiens
accagatgccccagggtgctccgcggttagctttgtacatagcatctcactttgcacaacaaccctgcaaggtaagtattgttattcttgtgctacaaat

SEQ ID NO: 455463 - DNA, 82 bp, Homo sapiens
tgccctccttcaagattgacttctcggaatggaaggatgacgaggtgctggagagtcatgcctgtgagccctgggcacctcc

SEQ ID NO: 455464 - DNA, 153 bp, Homo sapiens
aatacggaagacttggtgctgaagataggtgactttggtcttgcacggatcatggatcctcattattcccataagaatgcccttctgcctgcagggttccggcagaagaaccagacatcaaagtccaccacagggccatttgatagagagcat

SEQ ID NO: 455465 - DNA, 84 bp, Homo sapiens
agcaccgcagccttgggcctcgcgccggctatggccgtgccctggggctgagccctcagtgccctctggtggtcagaagatgct

SEQ ID NO: 455466 - DNA, 100 bp, Homo sapiens
caagagcactagtgtctagaaggcactaaggaacctagaagtcggaatccggaagaagatcgaacatgacgtggtgatgaaagccagcagcagcctgccc

SEQ ID NO: 455467 - DNA, 73 bp, Homo sapiens
gccggcaagagctcggtgctggagaacttcgtgggccggcgtctgcgtcctgcacaactgtatctatgctgct

SEQ ID NO: 455468 - DNA, 98 bp, Homo sapiens
aactctcgaaacctcaacatccagctcaagtggaagagacccccagagaatggcctaagcagcgagagctggtccatcatgaagaacatggccacgga

SEQ ID NO: 455469 - DNA, 75 bp, Homo sapiens
ctgcggagcatgtcgaccccggcccggaggaggctcatgcgggatttcaagcggcaggatgacgcaaaacacggt

SEQ ID NO: 455470 - DNA, 51 bp, Homo sapiens
acctgcagctggcgcctctgcagtggggtgtttgagaagctgcagctgctc

SEQ ID NO: 455471 - DNA, 50 bp, Homo sapiens
ctcctgagtatctggaattacaggttacaagatgttcacctaagattgag

SEQ ID NO: 455472 - DNA, 100 bp, Homo sapiens
ccgggacaactttggaggtggaaacactgcctgggaggaagagaatttgtccaaatacaaagacaggttctgggcttcagtggagccctactgtgctgac

SEQ ID NO: 455473 - DNA, 100 bp, Homo sapiens
tagcctgctgtcgcccagccgcgaaagatcaactgaaatcggcaaacttctgagttcctacttgcaaaagaaaagtgacgtggaggatcactcggtgcac

SEQ ID NO: 455474 - DNA, 90 bp, Homo sapiens
tcaaaatggagttgccggagagacagcccagggctggagcagtgcctactcaatagaatcggtcatcatgcaaataaatgccaccttagt

SEQ ID NO: 455475 - DNA, 75 bp, Homo sapiens
tccaaggtcctagaactcaggaagagtgatgtggttttggataaggtgaagtgctgcggctgggtcagcttctac

SEQ ID NO: 455476 - DNA, 100 bp, Homo sapiens
gtgcacctggcgacagcggccgtcctaaacgcggtgtgggacttgtgggccaagcaggagggaaaggtcgaggccgaagccgtgaatcgtgccatcacca

SEQ ID NO: 455477 - DNA, 100 bp, Homo sapiens
gaggccttcacaccggtggtctaccataacaaccccggcccacgctgaccctctcgcaggccccacagcctggccctcgcacccctggcttgctgaaggt

SEQ ID NO: 455478 - DNA, 95 bp, Homo sapiens
ggagcgggcagaggatgcagtggaggccatcaggggccttgacaacacagagtttcaaggactattcttgataagaaagagctcttggagtttgc

SEQ ID NO: 455479 - DNA, 96 bp, Homo sapiens
actgtggcaaaaatttcgggacttgagcattgaagagtacattcgggtttacaagtttaccgttctgggtcagaggtggtatctggctaacttttc

SEQ ID NO: 455480 - DNA, 90 bp, Homo sapiens
gcccgagtccacgctgatggactgccgtagacatgtggcaccatttattgagtttctgaaggccatacaagatggaacaatagttttaat

SEQ ID NO: 455481 - DNA, 100 bp, Homo sapiens
ggctgccgcaggacctgcagcatcccagagctgaaaatgtgtgtctgacatgcaagctcagtggggcagagacccgtggattgctgtgccctgccctccg

SEQ ID NO: 455482 - DNA, 83 bp, Homo sapiens
catgtcccagctgcagctgtggctgcagtttgaggctctgaacaagaggacaaaagcatgtcttcccttcctgggtgcattgg

SEQ ID NO: 455483 - DNA, 90 bp, Homo sapiens
tcgatttggatctgggatgaacatgggcaggataaatggcctgaccgccgctgcctacagagtcacactcaatcctccgggcaccttcct

SEQ ID NO: 455484 - DNA, 100 bp, Homo sapiens
ctctgcgggaggtgataaaggccatgaccaaggctcgcaattttgagagagttttgggaaagttacagcaagctgctgaagtttctcagctgcggggagc

SEQ ID NO: 455485 - DNA, 75 bp, Homo sapiens
tttctcttgagtaaatacctaaaagtgggcttgctggctagatgaggaagaggagcgaaggaaaaggcgccggga

SEQ ID NO: 455486 - DNA, 100 bp, Homo sapiens
gtggagtgcaactaccactgctaccacgagaaggacccggacgggacctgctgcagctgggaggggagctggcccggacatcacgagctgtccaggaggc

SEQ ID NO: 455487 - DNA, 83 bp, Homo sapiens
gtgcctgaccagaaaggaactcccaagcgactgcaggcagaagctgagacggctaaggtctgtcagtttgtcgtctctgtcaa

SEQ ID NO: 455488 - DNA, 83 bp, Homo sapiens
gctctggctgtgctgcgcgacccccgcgcatggtgcgcgcggagccatggttatcatgtcggagttcagcgcggaccccgcgg

SEQ ID NO: 455489 - DNA, 78 bp, Homo sapiens
gggtttccaaaaacagtgtaacatttgtggctgagcaggtttcccatcatccacccaccagcagaaaactgagcttcc

SEQ ID NO: 455490 - DNA, 49 bp, Homo sapiens
ctgaagctcttgcgctacctctggaattcagtactgtacacaggaaatt

SEQ ID NO: 455491 - DNA, 82 bp, Homo sapiens
agagaaaaccagctgagacagggcgccacttactaggaccttctggaccctgcacggtggcggatgctgatccagcagttcc

SEQ ID NO: 455492 - DNA, 100 bp, Homo sapiens
gagggaagaattactgctgctgacttttgagtggattttacagctgggtaaactgaggctcagagagggtttggacagaggagccaaaggccaaatttcc

SEQ ID NO: 455493 - DNA, 75 bp, Homo sapiens
tttgatcgatttctgggataagcatgactgagctggacaaagaaataagtaccttgagaagtggcttgaaagcag

SEQ ID NO: 455494 - DNA, 75 bp, Homo sapiens
tattgacctcgactcccatgcggtgtctttcctgaagactatcttcccgtctcaaaatggacatgatggatccac

SEQ ID NO: 455495 - DNA, 75 bp, Homo sapiens
aggaaccacagctgctcagaaggccaggtggaagttaaacgagctgagcctcgggacagcaagagccaagcgccg

SEQ ID NO: 455496 - DNA, 80 bp, Homo sapiens
caccattgcagaaggaataaccttcatcaagttttatgctccatggaactgtggctgcaccatctgtcttcatcttcccg

SEQ ID NO: 455497 - DNA, 98 bp, Homo sapiens
cgaggttggaacacctggcgagtcctcggtgtcggtggccggcagtcatctcgcggccgttcaggtagtgctcacgaatacagctcctccccagatga

SEQ ID NO: 455498 - DNA, 101 bp, Homo sapiens
aacaagggcagcccctatacaaggacagttggctcctaagggagggactaaatttgtctgttttgatgccaagataaactttgatgacaacgcagaattcc

SEQ ID NO: 455499 - DNA, 50 bp, Homo sapiens
ccagaacgtgccatggagacgcttaacgatgtggttgccctgcttggctt

SEQ ID NO: 455500 - DNA, 100 bp, Homo sapiens
gcatccctgagtgtccctccgggtacacgatgaattccagcaaagtcttcctgcgagcaattaatcagtatgcagatatgctgaacaaaaaatttctgga

SEQ ID NO: 455501 - DNA, 89 bp, Homo sapiens
actgtttgacacaactgtagagcagctgtatagcatcttcactgtaaaggagatatggaggccacatttgcagagtatgaagaatggtc

SEQ ID NO: 455502 - DNA, 88 bp, Homo sapiens
acgagccactcgcttggtgaagtcacaacagagtgcagcctgagcagcagactgatgaccttctgaggatgacagaatcctggttttc

SEQ ID NO: 455503 - DNA, 101 bp, Homo sapiens
aagaagcattaatactcatcttgtccagaactctgtcaaatgaagaacactttcaagaaccagagcgtttcccaaagtgtattctgcggaactagcaccta

SEQ ID NO: 455504 - DNA, 49 bp, Homo sapiens
gaaaaaggccctcttcaagcctgagcttccttctcctacatctgcttgc

SEQ ID NO: 455505 - DNA, 75 bp, Homo sapiens
ggacagagcccatacacctaccagatgcacggaaaaaccatatggcatagttgaaaagaagtccagaatattccc

SEQ ID NO: 455506 - DNA, 98 bp, Homo sapiens
ggcgagctcaccacatgctacaggcagcacacttctgcttttgttccttcatcaggacgaatttactcttttgggcttggtggtaatgggcagctggg

SEQ ID NO: 455507 - DNA, 100 bp, Homo sapiens
gtgaggttaaatgagaagaattatgaactcttgaagggtcggcgctttgcctgatgaccctacctctctgacagatctgagaagagtttactcttcagct

SEQ ID NO: 455508 - DNA, 99 bp, Homo sapiens
aacaagagagacatttctggctctgaaggcgaacgcttcgctggccatttaggagctctgctcaaagccagacgatccagtccttctgtggaacttctg

SEQ ID NO: 455509 - DNA, 90 bp, Homo sapiens
ccggggggcagcaacggcgacatccagcaagctcttccaccaaagccacctaagccaatgacttcagcagttccaaatggaatgaaggac

SEQ ID NO: 455510 - DNA, 96 bp, Homo sapiens
atacacagactggagttagcacgtggcacgaccccaggataccaagggttactggacctggaggacgatggggacttgatcaccgtggagtttgac

SEQ ID NO: 455511 - DNA, 101 bp, Homo sapiens
agcagatgagccattacagtatccttgtcagtattcagatgaaggacagagcaactctgccaccagtacagatcaaggatctggattttgcataactggta

SEQ ID NO: 455512 - DNA, 102 bp, Homo sapiens
cccaaagagcaactgaagattcatacgcagctggcagatattatcatagttgctgcagaccaccgctgaaacttcacttctacacagaggctttctttccca

SEQ ID NO: 455513 - DNA, 82 bp, Homo sapiens
cggcggctcagttgtccatgaccctgaaggtccaggagtacccgaccctcaagttgggccggtgcacaaacagcgtggtcaa

SEQ ID NO: 455514 - DNA, 98 bp, Homo sapiens
tggcacctgctgcacgagtcattgtttggatctgttgctgatgatcagaaacttatgatgacaaagcccacaaacgctatctgctaatgagcattgac

SEQ ID NO: 455515 - DNA, 73 bp, Homo sapiens
ccgttggctccagacaaataaacatggagtccatcttccacgagaaattcagtgatcggattttgtggttggt

SEQ ID NO: 455516 - DNA, 100 bp, Homo sapiens
tgtgacaccaagataagtaacaccttctcttccaccttctaaacaagctaacaagaatctgattttgaaggctatatctgaagctcaagaatccgtaaca

SEQ ID NO: 455517 - DNA, 100 bp, Homo sapiens
gtggtagaaatgtgatggggtaggccgtcgctttcgggttctctcatcgcttcgtcgttcgccaatgtttgaggagaaggccagcagtccttcagggaag

SEQ ID NO: 455518 - DNA, 75 bp, Homo sapiens
cgaggatgcaccttcccctgccttggaaagccgtttccctggggagatggtaaccatactctattccataaccct

SEQ ID NO: 455519 - DNA, 82 bp, Homo sapiens
gcagcccatcgtgcttaaagaagggtgtggacactgccagcggctgcagccgacttggaatgacctgggagacaaatacaac

SEQ ID NO: 455520 - DNA, 100 bp, Homo sapiens
gtggcagccccatgcgagcacccgaggaaggctgaagccgacgtagcttctctgaacagacgcatccagctggttgaggaagagttggatcgtgcccagg

SEQ ID NO: 455521 - DNA, 74 bp, Homo sapiens
agagctgccaaagaccttccttcggtgaatctgtaaaatatttcctggataacttggataaacttggagaacca

SEQ ID NO: 455522 - DNA, 100 bp, Homo sapiens
gtgatgatggagtttgtgagggaaacctgctcccaggagttgaaaaggccggggtcagaaagaaaaaagagggtcccggggccgaggcaggaggacatca

SEQ ID NO: 455523 - DNA, 121 bp, Homo sapiens
caagtacatcttcatggtcaaggccatcaaccaggcgggcagccgcagcagtgagcctgggaagttgaagacaaacagagaactgtcagaatgaggagatcctgaacagtctcaagtatgt

SEQ ID NO: 455524 - DNA, 99 bp, Homo sapiens
cacagattccagcttcggaacaagagaccctgtgtatgctgatggtagcatatgtttagatatccttcagaatcgatggagtccaacatatgatgtatc

SEQ ID NO: 455525 - DNA, 75 bp, Homo sapiens
tatttgagacaacatctggatggttggggagaacggtcagacacattctatgtgaaaaacatggcaaaatcatgg

SEQ ID NO: 455526 - DNA, 74 bp, Homo sapiens
gccggccagccgaagatggtggcggctactcctcctggtttggtgcacctcgatttggaggaagtagggcaggg

SEQ ID NO: 455527 - DNA, 87 bp, Homo sapiens
ttgcaataacaatggaaaggtcatttcaagtatgccattttgaagactgagacgttggagttttatcctagaggataaaggaaatct

SEQ ID NO: 455528 - DNA, 100 bp, Homo sapiens
cttgaactcagtgctggatgacaataagctcctaactttgcccaatggagagcgcctcagtcttccacccaatactctgttacggcatggtgcaaatcca

SEQ ID NO: 455529 - DNA, 82 bp, Homo sapiens
gacccagtccctgagccgcccctacacccacaggttcgttaccgtgaacgcatcaccattcttcgagggaatcatgagagca

SEQ ID NO: 455530 - DNA, 50 bp, Homo sapiens
ggagaccctctatggcactaagaagatttgaagaccttgcttctcatcac

SEQ ID NO: 455531 - DNA, 83 bp, Homo sapiens
caatattctactttctgtctctatgaatgtgactaccctggttacctcatatcaccgaacaagatttgtgatgaaatggagcc

SEQ ID NO: 455532 - DNA, 98 bp, Homo sapiens
cagagtctttcgtttgcagaacccaaaagccagagtgcctgaacaacggattgagctatatcagattttgaaagacatagccaatcgattccatatga

SEQ ID NO: 455533 - DNA, 100 bp, Homo sapiens
cctggctcggagcagcagcctctgagttccagctattcttcagatgctctggattttgagacggagcacaaattggaccctgtatttgattctccacgga

SEQ ID NO: 455534 - DNA, 82 bp, Homo sapiens
ccgcactgagtcaacagactgagcgcgtccaggcctgacagctctgcggctcgggccctgagttgatattcactgatggact

SEQ ID NO: 455535 - DNA, 100 bp, Homo sapiens
tctgtgattggtggtcgcttggggtgatcatgtatgagatgctcatcgtgtctgcacatcaccgaacgatgagagaggactacagcgacaaagtgaaagc

SEQ ID NO: 455536 - DNA, 100 bp, Homo sapiens
ccagaggaatcgttactctttcagacgttccatcctcagagcagcctgaactgttcctaaagaaacttcagcagtgctgtgtcatttttgacttcatgga

SEQ ID NO: 455537 - DNA, 89 bp, Homo sapiens
ccggcttgtgagtggatgggtaaaacctatcatcataggtcgtcatgcttatggggatcaaattttgatccaaacaatatcttcaaggc

SEQ ID NO: 455538 - DNA, 98 bp, Homo sapiens
tgccagtcataatagatttcgagacaacagtggccttctgatgaatactttaagaaaattgggccgatttccacctatgatgcatcatcaccaggcac

SEQ ID NO: 455539 - DNA, 98 bp, Homo sapiens
caatgaagctcctgaagccgacctgggtcaaccacaatgggaaaagaagatctcccggagcagtgccctgaaagtgctggaccatgccatgattggcc

SEQ ID NO: 455540 - DNA, 51 bp, Homo sapiens
ggagagtttttgcaatttgttcaacttgatagtgacatatctgcaggccat

SEQ ID NO: 455541 - DNA, 75 bp, Homo sapiens
ggtggttaaaccatgttaaggaggattttacagaggtggaggccatagtggagtttgactaccaggcccagcacg

SEQ ID NO: 455542 - DNA, 100 bp, Homo sapiens
tgaccgagagcgcgaatatcgtcatcgttagaaggtagaagaagcagatgattggctcagatatggaaacccttgggagaagtcccgcccagaattcatg

SEQ ID NO: 455543 - DNA, 98 bp, Homo sapiens
cggacgagatgatcaaacgcctgaagttgggccatatggtgctcttcccagtctggttcctgtacagtctgctcatgaagctgttccagcgctccacg

SEQ ID NO: 455544 - DNA, 50 bp, Homo sapiens
gggacctcaaggaagcttatgacagagtcgtgtcccaaatgcgaacatcc

SEQ ID NO: 455545 - DNA, 50 bp, Homo sapiens
agtcgacttgtctgcagtagatcagaaaaatatggctcaggagactaacc

SEQ ID NO: 455546 - DNA, 90 bp, Homo sapiens
cccgggaggcggcggcggggaggggagaggctctgagaggcgaggccggacaccattcgcttttcacccaagatgatttgatgtcttata

SEQ ID NO: 455547 - DNA, 97 bp, Homo sapiens
agcctagggaggcgaggttcccgcaccggatagatatgaagatcaatgatgcagactgatggttttgatgaagctgggcatttataactagattcat

SEQ ID NO: 455548 - DNA, 83 bp, Homo sapiens
cgagcagcgccctgggagccctcacgagtcccgagtctcactgtcgcccaggctgcagtgcagtggtgccatcacgcgtcact

SEQ ID NO: 455549 - DNA, 100 bp, Homo sapiens
ccgcagccttacgagttcttcagcgaggagaacagtccgaaatggcggggactgttggtctcggccctgcggaagaatatgcttttaaggctattaacca

SEQ ID NO: 455550 - DNA, 115 bp, Homo sapiens
gagcggagcctcaggagccggcggggacgccatgcgagccaggctcatcgggaccttccgcatggtgctgcagaaggtggtagaggagagccatgtggaggtgactgacacgctg

SEQ ID NO: 455551 - DNA, 101 bp, Homo sapiens
aaaatatttcaccacgaccaagaaagggaagaaggagaaagggccaacccctgaagaagcaatacagaaactgaaggagacagagaagatactgatcaaga

SEQ ID NO: 455552 - DNA, 83 bp, Homo sapiens
aaggtggttttgatcaccggggctagcaggtgccagaaccctgtggagcatcatgaactgggaagagtagctgagccccagag

SEQ ID NO: 455553 - DNA, 100 bp, Homo sapiens
atcctggttccatgccgcagtaggacagcaggcccaagtctgcacatcccaggacccttcaaagttgtacaagaaagcagatgatgttgcagccattgaa

SEQ ID NO: 455554 - DNA, 101 bp, Homo sapiens
ttagagtcctcagaagcatgtgtcttccccagctctgcagccacatactatccgtttgttcaggaaccaccagtgacagattttcggctttgtgagaaacc

SEQ ID NO: 455555 - DNA, 74 bp, Homo sapiens
actacctggcattgccttttgttgagatttagtggttgaaggactgcgatgtgtagttttgccagaagatcttt

SEQ ID NO: 455556 - DNA, 82 bp, Homo sapiens
cgcggatctcaccgccgctcaggctccagctccagaaatcccagtacctgcaactgggccccagccgaggccagtactatgg

SEQ ID NO: 455557 - DNA, 100 bp, Homo sapiens
agccgttcatgatgtgaggctttcattattacagcgttattttaaggatgaaataatgcaaaaggtgtcccaaggctcctgaccagtgaacaaagatttg

SEQ ID NO: 455558 - DNA, 82 bp, Homo sapiens
ggctgaggcggccgcggggcccgagcgcagaaattgctagaggcccacgaggagcagaatgtggacagctacaccgagtcgg

SEQ ID NO: 455559 - DNA, 100 bp, Homo sapiens
ccgcgtgtcctcggagcgcggtccctgtattggtctcctgctcctagagcatggcggacaccgacctgttcatggaatgtgaggaggaggagttggagcc

SEQ ID NO: 455560 - DNA, 75 bp, Homo sapiens
ttcctattcggccatcttggctcctccctcgcttgcccagtttcgacaaagaaaagctcagtcggatgggcagag

SEQ ID NO: 455561 - DNA, 75 bp, Homo sapiens
cttgaaagaagctgcagcggaggaaggcgaggagctgctaagacacatggttgcacagaaggtgaaaccaaatct

SEQ ID NO: 455562 - DNA, 71 bp, Homo sapiens
gttttctgagcgagccttgaaagagataaaagcggaagtttgccacacgagtactattaatcccgtagatg

SEQ ID NO: 455563 - DNA, 100 bp, Homo sapiens
ccctctgactggatccagttcctcaacaagttaagtgggcagaccaacatccacctcagcaaaaacttcttcctgacgaatcgcgccagggagcgctcag

SEQ ID NO: 455564 - DNA, 50 bp, Homo sapiens
caagaacaaaggccgcgacttggaggtgcgcgcggagccatggttatcat

SEQ ID NO: 455565 - DNA, 88 bp, Homo sapiens
agccatcaacacccaggaggcccccgtgaaggagaagcacgcccggcgccttcaataatctggagaatcttgtctttggcaaaggatt

SEQ ID NO: 455566 - DNA, 82 bp, Homo sapiens
cgtgatcccaggaacagccccgtgccccccacaaagaaaggccgggctctcgccatgggtcactgtcgcctctgccacggga

SEQ ID NO: 455567 - DNA, 50 bp, Homo sapiens
ccaatgtgggcatcaacaggtggcggtgtttgtggcttgatcgtccccca

SEQ ID NO: 455568 - DNA, 98 bp, Homo sapiens
caggagaggagcactttgaggacatggcctccgacgaggacatgtgagaagccctaccactgcaactgggacggctgcggctggaagtttgcgcgctc

SEQ ID NO: 455569 - DNA, 74 bp, Homo sapiens
aaagaggaaggatgggaaacatctcacacttcatgaggctgcccttggagctggcttctctgacaagactcctg

SEQ ID NO: 455570 - DNA, 82 bp, Homo sapiens
cagagtcctttttggcatctaacctcctgtggataagggctcagaatagcaccattgctggagcccagtttcctccaattgc

SEQ ID NO: 455571 - DNA, 100 bp, Homo sapiens
gcggcgcccacctggtgactctggagctgcacagcgagggcaccaccgtcctgctcttccagttcgggatggtctcggcgcggaagatggccggcggcgt

SEQ ID NO: 455572 - DNA, 75 bp, Homo sapiens
agagatcatgactttggtagatgagactaacatgtatgaaggtgtaggaagaatctgagtccacctcaggacgag

SEQ ID NO: 455573 - DNA, 100 bp, Homo sapiens
cccctctgaaggccgccagcccagccccagccccagccctacagaggttttgcaaaaggcatcaaattaaatcaagttcaaatattccctgtgtccctaa

SEQ ID NO: 455574 - DNA, 75 bp, Homo sapiens
gaaacattaagacctactaccagctttaccgatttgttacaactcaagcaagggccagcagaaattctcttttga

SEQ ID NO: 455575 - DNA, 90 bp, Homo sapiens
ggatgatgcgctgcagccagctggcccccagggccctgcaggaacatctggattatgagattatccagtctctaaatcctgaatttaaca

SEQ ID NO: 455576 - DNA, 90 bp, Homo sapiens
ctgcggcgccgcaatcaggagctgaagcaacaggctgaagggtatgtgattggcagctgtattaaacacattccaatcgcaggacgagat

SEQ ID NO: 455577 - DNA, 50 bp, Homo sapiens
tcacggccaacgccttggcactagggtcaaatttgttggggcataaaggt

SEQ ID NO: 455578 - DNA, 100 bp, Homo sapiens
gctcagctccaaacacgcttctacactgataacaagaagcctggacttctcaacatcagtgaacctgccgcgcagccatggctggcagacacgtggccta

SEQ ID NO: 455579 - DNA, 100 bp, Homo sapiens
ggcggcccgggaatccgcaaggacgctttcgccgacgccgtgcagcgggcccgccaggccagcactccttgcccgaggacagagatggcgagcgcccgga

SEQ ID NO: 455580 - DNA, 100 bp, Homo sapiens
ccttgaagaaatacagcttggtgaagagttactagctcaaggagtacttgattcttcagaaaacctccaaagtagatgtggactcaagtggaaagaaatg

SEQ ID NO: 455581 - DNA, 100 bp, Homo sapiens
gctgccattgttgatatggttcctggcaagcccatgtgtgttgagagcttctcagactatccacctttgggttcttgctcagaactctggttttgacctt

SEQ ID NO: 455582 - DNA, 90 bp, Homo sapiens
tcaagatggcgtgcttgttggagaccccaatccgcatgagcgtcctttcggattgtgcagactggtgcttaaaatggaagtcgatattaa

SEQ ID NO: 455583 - DNA, 82 bp, Homo sapiens
ctcctttctgggcaaacgttccaagggtctgcggaagagggagctgctgaaggagctgctaccagtcatcgggcagaacctc

SEQ ID NO: 455584 - DNA, 97 bp, Homo sapiens
ttttcccctcggcactaggcagcggaggagcccgaccgacccggtgctggagaatctggtaaaagcaccattgtgaagcagatgaggatcctgcatg

SEQ ID NO: 455585 - DNA, 113 bp, Homo sapiens
aaaggttgcattgatgaaattaaagatgcatgctgatggcgataagtcattaccacagatttggagcaagaggtggtggtggccttcccccgaagaaatttggtaatcctggg

SEQ ID NO: 455586 - DNA, 87 bp, Homo sapiens
aaaaggacgcaaagttctccggcgagagggctctgaactcctacttcgagcctccggtggaggagagcgccttggaacgccgacctg

SEQ ID NO: 455587 - DNA, 75 bp, Homo sapiens
ggggtcaaggaccgaggcgccggcctgctgcagtcagattctgcccccgtggagactcccagagggaagccccca

SEQ ID NO: 455588 - DNA, 113 bp, Homo sapiens
tccttgcccgtgaccgtcgctagaactcagttgtgcgttgcggccagtcgccactgctgatttgcctcaaagggcactgcaaaaattgaacagaggaatcccaaggaagctgc

SEQ ID NO: 455589 - DNA, 100 bp, Homo sapiens
caggcccacgtcgcgggggagaccgtggcccggcccctcttcctggagttttctgttccccagagccacctgccaagacctctaccccagaagacttcat

SEQ ID NO: 455590 - DNA, 100 bp, Homo sapiens
ggaggaggaggggctccggctggtctgtggtgagaagaagcctgagaagatgatgcacagatagagaggcaccaggacttgagaggcaccaggacttggg

SEQ ID NO: 455591 - DNA, 82 bp, Homo sapiens
tcttggatccaaagcaagcactgatgaagctcaccctagcatttaaatcaaacggtattgagatggattgggttatgaaaca

SEQ ID NO: 455592 - DNA, 75 bp, Homo sapiens
ggagagcgagagaggggagcaggttctccagcatttggctcaaggccccaagggcacatgtgacaagaaggcgcc

SEQ ID NO: 455593 - DNA, 100 bp, Homo sapiens
tgggccagggtgcgggcctgcgcctccctcggctcctggcgcgggcctcggggagaggaaatgtagacaaccaatttcctgggcaagctgctccacctgg

SEQ ID NO: 455594 - DNA, 100 bp, Homo sapiens
ccacgacccacgagatcatggggcccaagaaaaagcacctggactaaaatgtgccagaggaacttcaagaaccattttacacagatcagtatgaccagga

SEQ ID NO: 455595 - DNA, 75 bp, Homo sapiens
gaaaaacatttgggaggtgtctagcccagtggaccttctgaaggtggttaaataaacttggatcggctgtaatcc

SEQ ID NO: 455596 - DNA, 98 bp, Homo sapiens
aatgtgatttgcttgaagatatgagacatgcaagaaagcacttcagccaagcagaagggagccagctggacgaggtgcgccaggccatgggcatgctg

SEQ ID NO: 455597 - DNA, 83 bp, Homo sapiens
ggacggcgaggccctcatgtaccacacggttttgattcccaccatggccatcacccagtttcggttatttaaattttgtacct

SEQ ID NO: 455598 - DNA, 83 bp, Homo sapiens
ttccccccgcgcctctcttcgcctcgcctcgggacccgcggtccccgctcttgctgaaaactttagaaactgttcctttggag

SEQ ID NO: 455599 - DNA, 102 bp, Homo sapiens
caaaggaaggactggtcatctctttcatatctcaaaaccatggctcagattgggagtttggaagagaaaccaagaatttatctccaaaggaaaacatttatg

SEQ ID NO: 455600 - DNA, 98 bp, Homo sapiens
gaattcccagtttgacaccacaggctgagctccctgaaccagatttctgcatgaatccccagacagtgctgctcctgcgggtcatcgccgccttctgt

SEQ ID NO: 455601 - DNA, 89 bp, Homo sapiens
cagattcgcagtggtcgcttcttctccttggatacgcagctccacctggatgatgccctccggggccaggaggacctgaaggagcagct

SEQ ID NO: 455602 - DNA, 51 bp, Homo sapiens
gaagaaggggaactcctgctgcccactcagtcactgtgtgcccagtattct

SEQ ID NO: 455603 - DNA, 107 bp, Homo sapiens
cagggcctgcagcgggagctggacggcgagcgcgagcggcgcgagaaatgaagatagtgatccggggagacaggaacacgggcaagacagcgctgtggcaccgcctg

SEQ ID NO: 455604 - DNA, 85 bp, Homo sapiens
cggacggaacgttaggaaggccctggattttttatcaagcagaaatgcatcgaacaacgagaatcaagatcactgagctaaatcc

SEQ ID NO: 455605 - DNA, 100 bp, Homo sapiens
cgagctggaccacgagaggaagctgagggagaccgcccagggccccggccagtgcccagccccgctgggagacccggccagcaccacggacggcgcccag

SEQ ID NO: 455606 - DNA, 95 bp, Homo sapiens
tttctgattacgttgacacttaccatgctgctgcccttagggactttgaatccaaagcaaaccatcttggtgattctggtgggactcctgtgaag

SEQ ID NO: 455607 - DNA, 75 bp, Homo sapiens
gtgcgggcgcagctggcggagctggagctggagctctcggagggaaactctttatacagtgaaacaggaggaaag

SEQ ID NO: 455608 - DNA, 100 bp, Homo sapiens
atcctgagggcggagaaccagaagacgatgaggctcctgcaaaagcctcttatacctagaagtcccacaagcagcgttgccacgccttccagcaccatca

SEQ ID NO: 455609 - DNA, 101 bp, Homo sapiens
gagagcgcggaggcagccatggtgcggttcaagcacagaactcttgatgtttcagtgagctttaatggaggaaaatctgtcatttcaggatcattaattgt

SEQ ID NO: 455610 - DNA, 96 bp, Homo sapiens
cctgctaacagaactggaccttttcgatgggaatttcttagccataggctcacatgacaactgcatctatatatatggcgttagtgacaacgggag

SEQ ID NO: 455611 - DNA, 101 bp, Homo sapiens
gaggaggaggaggctggagtgggcgcggaggcgaccgccatggcgttcctcaaactccgtgaccaggtgaatctggattgggaaagtcgacattaatcaac

SEQ ID NO: 455612 - DNA, 75 bp, Homo sapiens
gaccccatgaagcagtgggaagtcactagcaggaaggagatggataaagcagatgtttattggggcattccttat

SEQ ID NO: 455613 - DNA, 76 bp, Homo sapiens
ccggagggacgccctcactggccacctgaggacgcactccgagcttatgaagatgttccttgggataagatgctac

SEQ ID NO: 455614 - DNA, 95 bp, Homo sapiens
cccagaatacaccttgcttctgtagaccagctccaacaggattccatggtagctgggatgttagggctcagtaatctatgccagcaattatgaca

SEQ ID NO: 455615 - DNA, 101 bp, Homo sapiens
cgccgccgaagaagcatcgttaaagtctctcttcaccctgccgtcatgtctaagtcagagaatgagtccctggaacgccagatgcgtgaaatggaagagaa

SEQ ID NO: 455616 - DNA, 100 bp, Homo sapiens
aaggaacttagaaaagctgcacacaggagtggaatgaagaatgccagagacaccctaaccctggagactcagcctgcctgcacccaggtgaaataaacag

SEQ ID NO: 455617 - DNA, 83 bp, Homo sapiens
ctgtgggtttaatccaacagaagaaggccaagaagcttgagagaagaaaaatttcagaaaaattgtctcaatttgactagaat

SEQ ID NO: 455618 - DNA, 100 bp, Homo sapiens
attaactcgtcatttacattaggtttggcaaacatcgaaaagatgacaagattgagaaaacgggtaaaataaaaatacaggaatcctttacatcagaaga

SEQ ID NO: 455619 - DNA, 75 bp, Homo sapiens
tcaaaacctcgctccggaaaggggacacctggaatcaaacattttaagtccagtgcaggatggaacaaagaaacc

SEQ ID NO: 455620 - DNA, 100 bp, Homo sapiens
ttgaatgaaagacccagtgcaaagacatcaccatgaacactagcagtgtggatgaggtcaccattgtcaacattttgaccaaccgcagcaatgcacagag

SEQ ID NO: 455621 - DNA, 100 bp, Homo sapiens
ctttgatttttcatcttgtgaaagcagtccttgttcctatggcctaatgaacaacttccagcgtctcgctcgaaccgggatcatagtgaccacgagtgag

SEQ ID NO: 455622 - DNA, 74 bp, Homo sapiens
gcacgtcttcgcggtggagagcatcgagaagaagcggatccgcaagctcagctcacctatgaaccccgtcagca

SEQ ID NO: 455623 - DNA, 51 bp, Homo sapiens
gagcctggagctgcgcaagtgataaaatgcaggttgatcaagaagaagggc

SEQ ID NO: 455624 - DNA, 75 bp, Homo sapiens
cttctaactggaacgcctggctcttggacaaggatggaactgcaggatccaaagatgaatggagccctcccttcg

SEQ ID NO: 455625 - DNA, 100 bp, Homo sapiens
tatggaatcactgagatccaagactgaccacatccctgctcatctcacctatgggaagctgctagctctaacagaaacccttttccaaagagaaatgaag

SEQ ID NO: 455626 - DNA, 83 bp, Homo sapiens
gccgccgccgccgttttcgcctgcagctgctcaccggatcaaaccagaagatgccatggactttggcatctcccttctcttct

SEQ ID NO: 455627 - DNA, 83 bp, Homo sapiens
cggggctaatgttgacaacaggctcgagagctccacgcaggagatcggtgaggagctgatcaacggagtcatctactccatct

SEQ ID NO: 455628 - DNA, 82 bp, Homo sapiens
ggcgtgctactgtgcgctcgatccagcaccatggggaagcgggacaatcgggtggatcgaatcatcaatttagttgttggca

SEQ ID NO: 455629 - DNA, 82 bp, Homo sapiens
ttggaagttaagggagacaaagttgaaaacaaagtgctgttttgtaccaatggctagaagcagatcgtcatggcaagagcca

SEQ ID NO: 455630 - DNA, 74 bp, Homo sapiens
gcagaaggttgaagaacaggaggacacatgacggaagtgtgtatttttgggccactccacggcaggtccctagc

SEQ ID NO: 455631 - DNA, 110 bp, Homo sapiens
cagaacatctgggagaatatttaatggaaaatcgcttggttaaaacctgacacttttaacaggcaattaagttggaatatgcaaggttggttaagttggcccaagaagac

SEQ ID NO: 455632 - DNA, 75 bp, Homo sapiens
aacagtttgtggcaagacaagctcagaactgagaagctgtcaccacagtttctcaactcattggatgctaaagaa

SEQ ID NO: 455633 - DNA, 100 bp, Homo sapiens
ccttcagaaacagtgctgaagcctttaaatgcagcatctgcgatgtgaggaaaggcacctccaccaggtgcgttgtagaagacaagaactcaaaggtggc

SEQ ID NO: 455634 - DNA, 145 bp, Homo sapiens
caaaagcaaataccatatatcagtggctgaagaaggaaatgataaatggctctctcttgatttggagcagggccttggaactgatgaagatactctaattgagattttggcatcaagaactaacaaagaaatcagagacattaac

SEQ ID NO: 455635 - DNA, 82 bp, Homo sapiens
cggcagcgtcccggacgaggaggagagaagatgactgaggaggaggtggagaccgttctggcaggacacgaggacagcaacg

SEQ ID NO: 455636 - DNA, 100 bp, Homo sapiens
acggggccgggcgacctgggcaccagcaggacccgaggccaggagccaggggcccagaagtttcagtcattcagtcagtaccgctgtaagactgccaaga

SEQ ID NO: 455637 - DNA, 90 bp, Homo sapiens
ccccggagcccggccccggggaactagggagcgtctccggctgcacagcgctcaggtgatctgcaactctttcaccatctgtaatgcgga

SEQ ID NO: 455638 - DNA, 75 bp, Homo sapiens
aacctcaggatcttgagctagagtgggtaattccagaattgattggccataccattgtcactgtattactgctca

SEQ ID NO: 455639 - DNA, 73 bp, Homo sapiens
gaaatgagatccgcttcctgcccaacgattgagatggcacagaagctattgaactctgacctgggtgagctca

SEQ ID NO: 455640 - DNA, 100 bp, Homo sapiens
ggcgagggctacccgctctttgccgtgacaacaccgttcccccagccgggctggaatgggtaccacagaccatgtcatcgtcctggcgtccacgaaccga

SEQ ID NO: 455641 - DNA, 115 bp, Homo sapiens
cgccgcgctgtggctgctgctgctgctgctgccccggacccgggcggacgagcacgaacacacgattgcttgcacacatttagatgtggatttagtctgcataactgtaacagag

SEQ ID NO: 455642 - DNA, 87 bp, Homo sapiens
cgtggtctggctgtggcggaggagcataagaaggacttcctcgttctgcccatcttcctaacaaggctatggctgataacagcagtg

SEQ ID NO: 455643 - DNA, 100 bp, Homo sapiens
tatagagatgtgatgttggagaactacagaaacctcgtctccctgggtataagtgtgctagcggagtgtctagattgtcctgaattgaaagcaactgcag

SEQ ID NO: 455644 - DNA, 100 bp, Homo sapiens
tcagcactggcaagatcggctggttcctgggaggccagttaaatgtctctggtgcaagaagtggggtgtcccaattgagaagatttacaacaaaacccag

SEQ ID NO: 455645 - DNA, 90 bp, Homo sapiens
aatttttgaagagactgctagattccagccaggatacagatcttaaatttgtcagatcttgtagaaaatttcagctgtagcccttggact

SEQ ID NO: 455646 - DNA, 100 bp, Homo sapiens
cgggagtgatgtctgtggggccgccggcggcccggcttcagcttcccatcgacggtcagtgcgcacgttgtaatcagctgaggccatgtcaggagacgga

SEQ ID NO: 455647 - DNA, 73 bp, Homo sapiens
ttttggaactgtcaggtacctcaaagcagtcatcttagtgggatttggggaagcaacagggctgtgtggggta

SEQ ID NO: 455648 - DNA, 100 bp, Homo sapiens
ggctgctgctgggaacacctggagtctccgcgggcaggaagatgagaatgtgcctactgctcctgatcctccaagtcaacatttacgtgggcatgggaca

SEQ ID NO: 455649 - DNA, 97 bp, Homo sapiens
gaatcacaaatgttcttaatggcatctagaatgctaggtgacgtgatggttgacattgcaagtaacatcatgttggctgatgaacgtgtcctgtggc

SEQ ID NO: 455650 - DNA, 137 bp, Homo sapiens
caaaacaaagtagaataagaaatatttcaaatacagtaatgaaagtaaagcagatcctgggcagaaggaaggtgtcttgctgcaggtaactaatgaagaagtggtcaaccacagagtcttcaagaaataagaaattc

SEQ ID NO: 455651 - DNA, 83 bp, Homo sapiens
atcgtaggccaggctgatggagagctgaacattactcttccagaagagtttatcgatggtcgactggcaaaactaaatgcagg

SEQ ID NO: 455652 - DNA, 88 bp, Homo sapiens
gcgcgcctgggagacgctgcctcggcccggacgcgcccgcgcccccgcggctggagggtggagtacgagagggcctccaaagtggacc

SEQ ID NO: 455653 - DNA, 83 bp, Homo sapiens
atacatttggagctcttgggggcaatctaatagcccacatggttttgcttcttggacacttaatgattgttggcaagaaatgt

SEQ ID NO: 455654 - DNA, 51 bp, Homo sapiens
ggcagcatatgaaagtggattatgggtccttctggcactcctctggtggac

SEQ ID NO: 455655 - DNA, 100 bp, Homo sapiens
ctatctgaagaaaagtagaaggaaaaacagaacgttgcaaactctggaaaaaaacttggcaacgttctactgttgcttccatgatgcacagacaggagac

SEQ ID NO: 455656 - DNA, 74 bp, Homo sapiens
gaagaatagagccataaagaaagcaaagcgcagaaatgttggatttgaatgatgctattgctgagattagagcc

SEQ ID NO: 455657 - DNA, 97 bp, Homo sapiens
gagaaggacacgcgaatttgaagatagagacaggtctcatcgggaggaaatggaggcagctgacaccctagctgtacgccagaagcggcggatttac

SEQ ID NO: 455658 - DNA, 75 bp, Homo sapiens
cggcggcgacggaggagagcagctcctcactgtcaagcacgagctgcggactggaacttaagagatttgagaact

SEQ ID NO: 455659 - DNA, 100 bp, Homo sapiens
ctccagccttggtggtgacatcaatgcctccacaaatgggaagtgttcctgtaatgacgcaaccaaccttaatatacagccagcctgtcatgagacctcc

SEQ ID NO: 455660 - DNA, 50 bp, Homo sapiens
agaacaaaggccgcgacttggagccacataaagaagatccctaatagtca

SEQ ID NO: 455661 - DNA, 82 bp, Homo sapiens
gtgagagctccccaggggagttctctgtgtctgtgaaaaactatgttccaacttcctgtcaacaatcttggcagtttaagaa

SEQ ID NO: 455662 - DNA, 100 bp, Homo sapiens
ctaagtccgtgagcggtggcagtcgcgaccgcgggtgcatccagtttctgcgcccaggatgaccatgaaagctgtggttctaattctaccaaccgtagta

SEQ ID NO: 455663 - DNA, 82 bp, Homo sapiens
ataaagatttggattcaaggttgaaaagcagtttttttgataaagcaggaattacatgaacgacagccttcgcaccgacgtc

SEQ ID NO: 455664 - DNA, 75 bp, Homo sapiens
caggcatcatccgctatgcaattgggaattacctctctgaacaggactttgtgtctgtgtttggcatcacaagag

SEQ ID NO: 455665 - DNA, 99 bp, Homo sapiens
gcttacactcctttcatacgcttttctgtaggcgatgttttaaatatgactgcttcctacatcaccatgctcgacagctgaccaaggccatgatgcgaa

SEQ ID NO: 455666 - DNA, 96 bp, Homo sapiens
ccgcagtatcatgctggccaagaagatcatcattaaggacggaggcacgatactctgggcagggatggaagcctagatgcctcaccgcaaggagcg

SEQ ID NO: 455667 - DNA, 83 bp, Homo sapiens
ctatccgtttgttcaggaaccaccagtgacagagtgtcgtgaaaactacccctaaaagccaaaatgggaaaggaaaagactca

SEQ ID NO: 455668 - DNA, 99 bp, Homo sapiens
cggagcctggcgggcgtgggaacccaggccccgccgaggcggccaggctgtattcatctgcggtttttggtgacttcgagcagtttcctcctccagaaa

SEQ ID NO: 455669 - DNA, 100 bp, Homo sapiens
acacgaggttggtcatgaaagagattccttgcagagacagctcaacacggcacttccacagtgtttgctttcacaaccaaagttctgggccattcagaca

SEQ ID NO: 455670 - DNA, 51 bp, Homo sapiens
ggtgagggacctgcccagacctggagaaatgagccgtcagactgctacagc

SEQ ID NO: 455671 - DNA, 101 bp, Homo sapiens
ggccagggaaccctggtcaccgtctcctcaggtttgatgaacttgtgaaaaaattcaaagtcgaatatcatgctggtggctctacccagaattcaattaaa

SEQ ID NO: 455672 - DNA, 82 bp, Homo sapiens
cccgaatgccagcgcctcttctaccggggcaagcagtgtcaacagcatctccaccctggagcctgtgagccggtgccagcgc

SEQ ID NO: 455673 - DNA, 75 bp, Homo sapiens
cagatgctgaaaagagaaggtcaaacagctgaaggtagacaacaccaagtttacgatggactgcgtagcgcctac

SEQ ID NO: 455674 - DNA, 83 bp, Homo sapiens
agatctgggaccgaaatttgactggaaaactttcacttatctcttctttaacttatcgtggaaataaaacagctgttttgcag

SEQ ID NO: 455675 - DNA, 90 bp, Homo sapiens
ggtgttcaagacccagggggtgatcaagtacatggggccggcaggcaactcgagatgtggtgctgagccgggtgccggagcaggaggagg

SEQ ID NO: 455676 - DNA, 100 bp, Homo sapiens
ggcggcgccctgtaggctggagggactgtgagtttgcagagcagtctctgatgaagaatgccataaaaacatcggaggagtcatggattgaacagcagat

SEQ ID NO: 455677 - DNA, 75 bp, Homo sapiens
acatctgcacatcaatcatcatttagaattcagatttacagaatacaggaggaagaggaggtagaacgggaaatc

SEQ ID NO: 455678 - DNA, 50 bp, Homo sapiens
gcaatcagatttatcattcggtttgaaaaagtaccagaaggtcctatccc

SEQ ID NO: 455679 - DNA, 50 bp, Homo sapiens
tgctgctcttctccaggctctgtgataccgccgcagctacgactcggatt

SEQ ID NO: 455680 - DNA, 100 bp, Homo sapiens
accgttgattggagatatgcccttagttggagctttgtctatcttcttccttaggaaaccaggatgtgagctcatttcaactcctgatcaagaccacact

SEQ ID NO: 455681 - DNA, 74 bp, Homo sapiens
ttgggatgtcaattggggtgcacaacatagggcaggggaaaaaatgcatttttcaaagacctaacttcaattca

SEQ ID NO: 455682 - DNA, 75 bp, Homo sapiens
agaaaaaagcgtccgcttccagctttgcgcagaaatgttcccactgccaggaggcaggcgccaccttgggctgct

SEQ ID NO: 455683 - DNA, 101 bp, Homo sapiens
gagcaccaagactcacagcattctttcttggcatttttgaatacgcctaccgatgctctggatcaatttgaagaagattttcagtcaatgacttatggatt

SEQ ID NO: 455684 - DNA, 100 bp, Homo sapiens
ggccggccggtgccagcacctttcggcttctgagacggcggcagcagcggcattcaggtttttctgctataccacaccttatgattccatctactgccca

SEQ ID NO: 455685 - DNA, 98 bp, Homo sapiens
ggggtgaccagagagcccaacgcctggtgctcaagactttctccgagtcttaggaaaagtcctcagtgctgtgggcagtgcccagctactgatgtccc

SEQ ID NO: 455686 - DNA, 97 bp, Homo sapiens
gtcagttccttgtggagccggagctgggcgcggattcgccgaggcaccgaggcactcagaggagggtccagtgtccatcaaagtccaggtgcccaac

SEQ ID NO: 455687 - DNA, 103 bp, Homo sapiens
agctcctgatggtccacctcaggaagttcacctggagcctatatcatctcagagcatcagggtcacatggaagattccactgtgtaaagtaattagattcaac

SEQ ID NO: 455688 - DNA, 73 bp, Homo sapiens
tgcagcgccgtgtggcacgacacaaaaatcagaaacattattccatcatttgtgttgatggatatccaggctt

SEQ ID NO: 455689 - DNA, 75 bp, Homo sapiens
aaaaggaacttattgatgacattgaggtcccatgatgtgaaaaatggaggtgaacttactcatcccacccatagc

SEQ ID NO: 455690 - DNA, 74 bp, Homo sapiens
ccggagccgccgcaagccacacggcaacaatttgggatgaatcccaaagacattatgctgaatgggagaaatca

SEQ ID NO: 455691 - DNA, 100 bp, Homo sapiens
tgtaatcaattgtgctgacaacacagggaagccccacccaccagaagccaagatgtccagcaagcgggccaaagccaagaccaccaagaagcggccacag

SEQ ID NO: 455692 - DNA, 50 bp, Homo sapiens
gttttttctaatggctattcaaggcagggcaagaatcctttcgttccatc

SEQ ID NO: 455693 - DNA, 100 bp, Homo sapiens
aataaaaacatccccgtcatcgagtatgagcagttcatcgcagttcctccaactcctctgccaaccaatgatgttgatgtgtatttcgagacctctgcag

SEQ ID NO: 455694 - DNA, 100 bp, Homo sapiens
ggtggctgaggtcatcgctgtcgccaccatgcggtgcctcccaggactgcaccccatcttcaaggtcacgagaagagaatgccttctagatgcaaaatca

SEQ ID NO: 455695 - DNA, 101 bp, Homo sapiens
ggaggaggcgaggaggagagactgtgattcgcaaggggtggctcaccatcagcaacattggcatcatgaaaggcggctcgaagggatactggttcgtcctt

SEQ ID NO: 455696 - DNA, 98 bp, Homo sapiens
tttgtaactacctggcattgccttttgttgaggcatctccttggaaacaatgccatctttgaatgtgagagataaacctagtttcagcatgtctgcag

SEQ ID NO: 455697 - DNA, 100 bp, Homo sapiens
atccaactgccttacgaattggcaatcaatatatttcagtatctggacaggaaagaactaggaagatgtgcacagcacgttcacgtccatgttcttccca

SEQ ID NO: 455698 - DNA, 83 bp, Homo sapiens
taactctgccaaatatagaaggttgtggtctcctgaacagaagtctgtctccaaacacaaatcaagcagcaagatcatctgct

SEQ ID NO: 455699 - DNA, 75 bp, Homo sapiens
gctgcaggaagcaaaactgtaggactgcctggacagatcctttcgggcacaggtgttcagctgccctgcctgccg

SEQ ID NO: 455700 - DNA, 100 bp, Homo sapiens
ctggcctccatcttcggcaccgagaaagacaatgttctggacttggtgcctctttctgttatatgctttcctatttagttgggagaccagttgtatacaa

SEQ ID NO: 455701 - DNA, 85 bp, Homo sapiens
attaaaacgagatgacagaagccaaagtaattatggtatatttgcgtgctctcgtgagaaatctttttaatgaaggaaatgacgt

SEQ ID NO: 455702 - DNA, 98 bp, Homo sapiens
ctggaagtcgaacatggcacgaaagagatcaagatattctatattgagcgcattataccaataatcagaaaacattgctgaatcattttgtctttaaa

SEQ ID NO: 455703 - DNA, 82 bp, Homo sapiens
ggaacagaagaagaagaaccggaagaaactgtccgagaagcccaaagtactccaaagattcaggtttactcacgtcatccag

SEQ ID NO: 455704 - DNA, 123 bp, Homo sapiens
tgggatctatgagtggaaaggtgaccaagcccaaagaggagaaagatgcttctaagggttggtgatgtagtagaagtacaggcagatgaaacctttccctgtgatcttattcttctatcatct

SEQ ID NO: 455705 - DNA, 82 bp, Homo sapiens
caaccattgacgccatgtcgggttattcgagtgaccgagaccgcggccgggaccgaggctcctgtccaaatatgacccccag

SEQ ID NO: 455706 - DNA, 82 bp, Homo sapiens
cctggacacagcaatatctctgggctttcacaggtgtggacactgccagcggctgcagccgacttggaatgacctgggagac

SEQ ID NO: 455707 - DNA, 100 bp, Homo sapiens
ccgcgacctcatgccaaagaccatcatgcacctcatgatcaacaatgaagatattcctcgtcagcttgtctacattggtctttacctcttccacattgct

SEQ ID NO: 455708 - DNA, 75 bp, Homo sapiens
acagtggtcatggccgtgtgctccctgcctctcacgttctttccaaatggcaatgcatttgccactggctcagac

SEQ ID NO: 455709 - DNA, 75 bp, Homo sapiens
aagggcattacgtatgatgaccccatcaaaaccaggtgtgatgaatgcagactctgctaccattttggctgtttg

SEQ ID NO: 455710 - DNA, 100 bp, Homo sapiens
gtggactttttgaatttcaagaacagtaaagttggaacacagcagagggtgtgtaataaaatacaggaacttagtgatttggcccgtgaccctccagcac

SEQ ID NO: 455711 - DNA, 82 bp, Homo sapiens
aaaactcagcatgcttagcattcgagagaacaaaattaaacaactacctgctgaaattgacccagtggcttattggctcagg

SEQ ID NO: 455712 - DNA, 136 bp, Homo sapiens
cctgccttcagcccttccaggaggaccagcaagggctctgtgtgcccaggatgcgccggcctccagctccgggaggaagcctggcgggggtttgctgccttggacgaccccctggccgggcttctggacatgctgg

SEQ ID NO: 455713 - DNA, 100 bp, Homo sapiens
catacacgggtaacttggcaatgaatgacagcactgtagaacagctttatgaaacagcttgcttcctacaggttttccctgatgaatttcacctccagac

SEQ ID NO: 455714 - DNA, 100 bp, Homo sapiens
ccaaattgaatattttagtacagcaacattttgacttggcttcaactactattacaaatattccaatgaaggtgaatgaaaactttgccattgatttgat

SEQ ID NO: 455715 - DNA, 83 bp, Homo sapiens
gttgtgccttgaatgtcaaaaagctgccagcacttttaaacattacagttgtataagatggagtctcgctctgtctcccaggc

SEQ ID NO: 455716 - DNA, 82 bp, Homo sapiens
cagcgaacatgtcgcggcctgtcaggttcccagtagctgcagcagtgaaagacagtgattggctccagtgctcccagaagga

SEQ ID NO: 455717 - DNA, 140 bp, Homo sapiens
ctgcagaccaatggacaccttctaagagtttggcgagtcagtgactgaagcgcccgtccattccaaggagtacaagcgcaagctagccagagtttccctggtgcgcaaagaactcaggtcccggatccagagcctgccag

SEQ ID NO: 455718 - DNA, 75 bp, Homo sapiens
tgggacttcccgtccgcggcgtggaggtctagagcatgtttggaaaggattcaagaattagaggacttgcttgct

SEQ ID NO: 455719 - DNA, 98 bp, Homo sapiens
atataaagagaaatgagatggtagccaaacacccaggcactgaaagtattgaggacatcagagtttatgccctatgtggtatttattgcggctccgga

SEQ ID NO: 455720 - DNA, 96 bp, Homo sapiens
gcaggcgggggtgctgcagaggacacgaggcggcgggctggagacatggaccgcggcgagcaaggtaagaatgattgatgttggctgatattggag

SEQ ID NO: 455721 - DNA, 75 bp, Homo sapiens
cagctggcccccagggccctgcaggtggggaacgccaagcacaacgtgcatgtcatgaacatctccacaggcaag

SEQ ID NO: 455722 - DNA, 98 bp, Homo sapiens
atgacgtctccagccaaattcaaaaaggataaggagatcatagcagagtacgatactcaggtcaaaggtggctgatttatgaagaacctggatttcag

SEQ ID NO: 455723 - DNA, 100 bp, Homo sapiens
tgaacttcgaaacgtgataagaagcacctggatgagacatttgctacagcatcccacattaagtcaacggtccaagcatctcattttgaaggcctaatca

SEQ ID NO: 455724 - DNA, 100 bp, Homo sapiens
acacaaaatcccagatctacctgacgggcctgcgagggttgaagattgtgaagcaatagcctaaggcatcatggccgccctcagaccccttgtgaagccc

SEQ ID NO: 455725 - DNA, 96 bp, Homo sapiens
ctgccgccggcgcggctcatgggcagagtcggccgggcgggccggagtgtttaatggggacagtgggcactctcctgcttgaaaacccacttgggc

SEQ ID NO: 455726 - DNA, 90 bp, Homo sapiens
ccttccttgctttcagaatttcacccaggttctgacaggttcgtgagccacacatctccccacaccaagctcctccatacaagacctcgg

SEQ ID NO: 455727 - DNA, 75 bp, Homo sapiens
gatgaagtgcagaggtttttttctgattaatatttttggggacagatttgtgatgcttgattcacccttgaagta

SEQ ID NO: 455728 - DNA, 99 bp, Homo sapiens
catccagatttctttggacagcaccccgtagaaaggggatgcagttattaaatgctgttcttctctcctaagttgaaaatcagaaacttgtggaaaaga

SEQ ID NO: 455729 - DNA, 100 bp, Homo sapiens
atgatgaagctgaagaaggagaggttgaagatgagaactcaagtgatgtagaggaggtatatcgaattccaaagaaaagtcaaactgaaaaggaaaacac

SEQ ID NO: 455730 - DNA, 98 bp, Homo sapiens
ctcaatcagaaagctcggatgaagttacagaattagacctttcacatgggaaaaaagatgcttttgttttggaggagcatctttccttgaagaagtac

SEQ ID NO: 455731 - DNA, 50 bp, Homo sapiens
agcaatcagaaatgatcaagggtgaccaagaatatggcccaggtgaccaa

SEQ ID NO: 455732 - DNA, 100 bp, Homo sapiens
ttcagatgggatctttccggatcaatccagatggcagccagtcagtggtggaggtaaaaaagagtgtcaagtggacatgcaaagcttgtggagagaagca

SEQ ID NO: 455733 - DNA, 100 bp, Homo sapiens
acggccatgtccgaaacctacgaatcaaaggcatgggaggttgatacctgccggggccattacaacaatgtatcttgtgccgtcttccaccctcgccaag

SEQ ID NO: 455734 - DNA, 98 bp, Homo sapiens
gtcatcctgccagggaagacgccggtgtatgtgagaaagatcagtctaaagaaaaggagaagaaagtgaaaaaaacaattccttcctgggctaccctt

SEQ ID NO: 455735 - DNA, 75 bp, Homo sapiens
gcacccctctccacccctcgcctgctcatcaacaaggagaaagctggccagataccccagaatcttccatgctcc

SEQ ID NO: 455736 - DNA, 74 bp, Homo sapiens
atcacagctacatatttgttattggggagaaaatcttcagaggtgtgcctgcacaggagacagcaccagccaag

SEQ ID NO: 455737 - DNA, 75 bp, Homo sapiens
gggattttgggactcgcctttgccctggcaaacactggaatcctactttttctatttgctgttgctgagtctgat

SEQ ID NO: 455738 - DNA, 75 bp, Homo sapiens
tgaactccaagccaaaatcacagctttgagtgagaaacagagtgtcctgccatacttcgtagctacaaaactggc

SEQ ID NO: 455739 - DNA, 75 bp, Homo sapiens
gtgcagctgcctcagttcttagcgcaggctccgtgtgtttgacagtggcgtcatggtaattgagcttcagtctca

SEQ ID NO: 455740 - DNA, 74 bp, Homo sapiens
gtcgccgctctccatcaaacaattcctggacttcgaggtccaattacacatttggaatacaaaactagttttgg

SEQ ID NO: 455741 - DNA, 83 bp, Homo sapiens
tgacggagaatccgtttcaggaaagaacatccatgatagcagtcttctgtaaatcgaacttttcaagaattctctgaaggaac

SEQ ID NO: 455742 - DNA, 100 bp, Homo sapiens
tttgaaactggacaatgtattactggactctgaaggccacattaaactcactgactacggcatgtgtaaggctcgtggtcccaagaagcatctgaagcgg

SEQ ID NO: 455743 - DNA, 74 bp, Homo sapiens
ttggatgctttattgtacaaaggtctccggataactgtgctcctgacatccttccttatggttttgggaactgg

SEQ ID NO: 455744 - DNA, 80 bp, Homo sapiens
atcagccctggacctggcagatccttcagcaaaagctgtccttacaggcgccccctgtctcagctttgacatagtccggg

SEQ ID NO: 455745 - DNA, 75 bp, Homo sapiens
aatggacaagcttaataaaataaccgtccccgccagtcagaagttgagctccttcgagaactcatagaacggaag

SEQ ID NO: 455746 - DNA, 118 bp, Homo sapiens
ccagcagatggcggatgccctgcagtacctgcagaaggtctctggagacatcttcagcagactagacgcttgaagcaaagctgccatcccagaagacgacatgctctcagcaaccccc

SEQ ID NO: 455747 - DNA, 82 bp, Homo sapiens
ctagcgtcctggaattacttcaatcaaatttggagcaagaggtggtggtggccttcccccgaagaaatttggtaatcctggg

SEQ ID NO: 455748 - DNA, 75 bp, Homo sapiens
ctctatgagcttttgaaacttgttaagtttactgtaaacacaccacctactccagaagacctgatgttaagtcaa

SEQ ID NO: 455749 - DNA, 80 bp, Homo sapiens
acctaaaactgatggctactaaaaagcagagcatttctgtcttatgatgtaatcagcgcgatttcacttcctgaatttcg

SEQ ID NO: 455750 - DNA, 100 bp, Homo sapiens
gaaattaactatctgtacttataaggccaaagatgaagaggaagcctttctggattggagtgatgatgatgatgatgatgatgatggatttgatccaagc

SEQ ID NO: 455751 - DNA, 100 bp, Homo sapiens
gaagtgaagccagtactacagaagttaggtcaagatgaagacatggatgtcaaatactttgcacaggaagctataagtgcacgtaaccaaggctttgacg

SEQ ID NO: 455752 - DNA, 95 bp, Homo sapiens
caaaatgtcaacaaattgatggattcagaatggacagtttagaagaacctcagaaaaaagtctttaaggctcgaaaaacgatgagagtgagtgat

SEQ ID NO: 455753 - DNA, 98 bp, Homo sapiens
aaaaccccgaggagccctgttccaaagcctcctggaccgtccaagaagagtctagtaaaagccctaaaacgatgaagaaatttcttcataaaaggaag

SEQ ID NO: 455754 - DNA, 75 bp, Homo sapiens
attgagtctgtggctgattacttcaagcagattggtattattaagatgacaaggacctcccaagtgtgccaccac

SEQ ID NO: 455755 - DNA, 100 bp, Homo sapiens
tatgtttgggatatcaagagtataatgtctatggtgaagtcttttgtacagtggttaggacatgtctcaggaaggctatggaactagatctcaacctcct

SEQ ID NO: 455756 - DNA, 75 bp, Homo sapiens
gactgtccggggccgggctcaggagcagagctgagatctgtatctgtggacctgaatgttgatccctcgcttcag

SEQ ID NO: 455757 - DNA, 135 bp, Homo sapiens
tatgcagagttttcttgaacttttagaatatgaaaataagagccctgaggatccacaggtcttggataagtccttttggaataaatcatgggattgagcttcattcagatgtggtggaatatgccaaggaaaaac

SEQ ID NO: 455758 - DNA, 100 bp, Homo sapiens
ccctcaacaaacaccagcgctttggacagagtttcactcctgttacccaggctggaggacaatgatgtgatctcgggtcaccacaacctccgcctcccgg

SEQ ID NO: 455759 - DNA, 74 bp, Homo sapiens
gtctccgtgggtttgactgctcatgcagactgccagattcacttacagccccagctaattccaccaaacatgga

SEQ ID NO: 455760 - DNA, 75 bp, Homo sapiens
ctgtttgttgtgacatggaggctcaagctgggtctactcaagatcaggatcctcatgaccagccaaagagaagaa

SEQ ID NO: 455761 - DNA, 90 bp, Homo sapiens
cgcctggcagcagagaccaccagaagggagaactgtgtttatgaaactgtagttttgcctttggatgaaagggcatttgagaagacttta

SEQ ID NO: 455762 - DNA, 100 bp, Homo sapiens
aattaacggcaaaaaatggtggagcagtggaatacctcaatagcattctccagcatgccaaggatttcaaggaatatcacagatccgtcacaggcaaaat

SEQ ID NO: 455763 - DNA, 90 bp, Homo sapiens
gtaacttcctaggagggaagtggatcccaaagaccatggcagccgtgaccatgtcggtgcccgggcggaaggcgccccccaggccgggcc

SEQ ID NO: 455764 - DNA, 96 bp, Homo sapiens
caggacctagcattcaccttcctcttctgttccgagtgcgagaagcatccctctctacctgccaacatcctgtattagagaacttgtggccggagg

SEQ ID NO: 455765 - DNA, 100 bp, Homo sapiens
gtaggatgcatttcaggctcagagaagtgtaccatcagcagctcatccctgtgcatggtgatcaccatctattatgatggcctgatatgaaggagtcacg

SEQ ID NO: 455766 - DNA, 90 bp, Homo sapiens
tggacttggaggaggaggaggaggagagctctgtggatggcaaaggctcttcatcacggtcatggacaagctgcgcctggagatccgcgc

SEQ ID NO: 455767 - DNA, 82 bp, Homo sapiens
tcagactgaccgtgtcttacatcagttcagagagcttcgttccagagcccagcatgaatggatacgcggaatttccgcccag

SEQ ID NO: 455768 - DNA, 75 bp, Homo sapiens
gcgcagaaatgttggatttgaaacctgcctagagctggaacgttacctccagagcgagccctgctatgtttcagc

SEQ ID NO: 455769 - DNA, 83 bp, Homo sapiens
ggcggcggcaagacctctccccctcggaggcggcgggcggaggcggcggaggctgggaggcggcagaatgcagccagaggagg

SEQ ID NO: 455770 - DNA, 97 bp, Homo sapiens
agttgttcattgtttgtcaccacaaaaaggacagaaattgcaggtgctgcagtgtctgaaatttccgggcctttctcaacagaggatgtagccagca

SEQ ID NO: 455771 - DNA, 100 bp, Homo sapiens
acactaggaggacagacacaggctccaaactccactaagtgatgtccaaggtccccagctccataagtcaggaacaatccaggcaagacgcgatctacca

SEQ ID NO: 455772 - DNA, 85 bp, Homo sapiens
gcggggaccgctgtgctctcgtggagaccatcctgggcctcacaggagcgaccatgggaagcctcatctgcttcatctgcccggc

SEQ ID NO: 455773 - DNA, 90 bp, Homo sapiens
agtttcagaggatccgatgatggggatggagttgcattaaaatcctcccctactgaaagaaacggaggccaggataactgtagagcagca

SEQ ID NO: 455774 - DNA, 100 bp, Homo sapiens
cagagaagtgcccgaggagagttaacagcatgttggcagataaattgaacatgactccagaagaagctgaaaggtggattgtaaatttgattagaaatgc

SEQ ID NO: 455775 - DNA, 100 bp, Homo sapiens
tcagttagatttgtaacaaaaattaatatgaacggaataaataattccagtgggatgagtggttaagaaagtagctcaatacatggctgatgtattggaa

SEQ ID NO: 455776 - DNA, 90 bp, Homo sapiens
tcagcctcgagtttagccacaccaggctggagaatatggtgcagaggccctccacggttagaaaatggatttctgactggaatctcacca

SEQ ID NO: 455777 - DNA, 97 bp, Homo sapiens
cttctgccatgattgtgaggcctccccagccacgtgaaactccattcaaactcctccccacgacactctgaagcagcgacggcacagcgggaagaat

SEQ ID NO: 455778 - DNA, 82 bp, Homo sapiens
gcgggcgcgggcgctgcggcgggacagctcgacgcgcaggacatggcaaccacagagagagcagcccttttctttccccctt

SEQ ID NO: 455779 - DNA, 96 bp, Homo sapiens
caacgttatattttgtcttctgtgtggattcttcagaaagtgaacttggcattttagatctaattcaagtccaagggtagccaaggatggctgcag

SEQ ID NO: 455780 - DNA, 82 bp, Homo sapiens
cttggactgagtcctgcaggacacagagtgtcaatccatatctacaaggacagagactggataatgttgttgcaaagaagtc

SEQ ID NO: 455781 - DNA, 75 bp, Homo sapiens
cagagcggcctgcgccagcgaacaggccgacggtcgcaaggtcctacggtcaagcatccgggagtttctatgcag

SEQ ID NO: 455782 - DNA, 98 bp, Homo sapiens
ttcaggacaacctcttgggcaggagccagctctcccaggcgctgaacggactgtcagacagggccaaagaagccaaggagtttctggtacagctgcgc

SEQ ID NO: 455783 - DNA, 85 bp, Homo sapiens
ggccacgacccacgagatcatggggcccaagaaaaagcacctggactccgggaagatttccagaggattccagaacttgccatca

SEQ ID NO: 455784 - DNA, 98 bp, Homo sapiens
gcaactctggatgggattgcaaaatggtcgtagttcccccgctccctgggaaagcgtttttgcgtcagcttccttttagaggagatgatggaatattt

SEQ ID NO: 455785 - DNA, 74 bp, Homo sapiens
caagttttcacttatctcgaaagcctatcagcatagttaaggaggagagacttcagcatgcaaaccttcatctg

SEQ ID NO: 455786 - DNA, 75 bp, Homo sapiens
ttgactgtgtggacgagatgctcaccctggctgccatgctcacagacagggtctcactctgtcgcccaggctgga

SEQ ID NO: 455787 - DNA, 90 bp, Homo sapiens
tcctacccaggcctctgccagtccccgttcctggattctaggtggcctgcgtgtccccctcagcccagtgccttcctgagactctcagca

SEQ ID NO: 455788 - DNA, 98 bp, Homo sapiens
ggggcctggggctgcctgccgggcggccgggcgcggcgagcccaggaatcctacggcccctgaatattttggcatcttcaacctaccgcaactgtgtc

SEQ ID NO: 455789 - DNA, 90 bp, Homo sapiens
ccctgggagctggaggaaccgcggttgaaatcacaaagattagacacctttttagataggtgttcttcagcaccactgacaacacggttc

SEQ ID NO: 455790 - DNA, 82 bp, Homo sapiens
gcccggcgggaggataaagaccaccacgctgctgatgcaaggaatcccctgggctcccgtccactccactgctgaccagccc

SEQ ID NO: 455791 - DNA, 75 bp, Homo sapiens
gtcgggggcaagggtggtgtgggcaagaccacctgcaggtgtccatgctggcagtggacgagatgtatgatgacc

SEQ ID NO: 455792 - DNA, 100 bp, Homo sapiens
ctgggattggagattccacccaaacttgctggtcactgggaggctgaaggtgatgtggccgccctcaaccgacgcatccagctcgttgaggaggagttgg

SEQ ID NO: 455793 - DNA, 83 bp, Homo sapiens
agaaaatacaaatcacacgcataatggatgaaaggaaccgacaggtagctacagcaagctgggtagcaggcagatccaaagga

SEQ ID NO: 455794 - DNA, 90 bp, Homo sapiens
caaggctttggcaaagctggggattggccagctgactgctcaggaagtaaaatcgcagctactccatccgccactcaataagtatgccag

SEQ ID NO: 455795 - DNA, 100 bp, Homo sapiens
cagagatgtgatgttggagaactatagcaatctggttttcttgggaaagaccacagcaagattctttcattcgtctcctcctagcctgggggaccaggct

SEQ ID NO: 455796 - DNA, 73 bp, Homo sapiens
gacatcgagatcaaccgggagccggattctactctgctactcaagtagtggtcactatgattctgtgtactca

SEQ ID NO: 455797 - DNA, 98 bp, Homo sapiens
ttcatccacagatgaacttgctagccttggagaatacagagatacccccctgtgatgcagatccatccgccctagcaaaatatgttctggctttggta

SEQ ID NO: 455798 - DNA, 74 bp, Homo sapiens
ctccgttgggctccggccctcctagagaggcctccatagcgcagtagagatggggttttaccatgttggccagg

SEQ ID NO: 455799 - DNA, 75 bp, Homo sapiens
cccatacatgtcaaatggatctctttctccacccatcccgagaacaaacaatatgatacatcttcaaaaactcac

SEQ ID NO: 455800 - DNA, 98 bp, Homo sapiens
gtccctttgttgtgaaggcgccggggcctagcgctatgcctgcggcggagactgcatcaggctctcgggggggccctcagcctcttggccttgaacgg

SEQ ID NO: 455801 - DNA, 87 bp, Homo sapiens
cgaatctgcccacccctcctgtaacccagcctgtttcacttcttgccactgaggcggctcccagctgcgttggcgacatggccgaca

SEQ ID NO: 455802 - DNA, 100 bp, Homo sapiens
tgtggttctaattatgccaactttgagctggatcttggcaagaaagtcctaaacctgctgaaggtcgtacctagctcagctgcaaccatcaaacttcatg

SEQ ID NO: 455803 - DNA, 90 bp, Homo sapiens
cctccttatgctgatatacatccaatgagggtgaccaagaatatggcccaggtgaccaaagccctggacaaggccctgagcaccatggac

SEQ ID NO: 455804 - DNA, 90 bp, Homo sapiens
caggatttggtctccacggtcaacgtggtatactcgcagacaacccaaccggtatacaatgatatcaacaagtttctttggatggtccgg

SEQ ID NO: 455805 - DNA, 89 bp, Homo sapiens
agaggctctatgcaggttccactgtcaaggatgatgatgctgaagctatccttgctgcagacttcgaaattggtcactttttacgtgag

SEQ ID NO: 455806 - DNA, 74 bp, Homo sapiens
agaagactcttgtcacactaattgccaacaacaatgattcactggatgaaagaaagataaaaggggtcattgag

SEQ ID NO: 455807 - DNA, 82 bp, Homo sapiens
ccaggcgaagctggccgagcaggctgagcgatacgacggtttccacttgagcggcacagtgacagaacctgcaatacaatcg

SEQ ID NO: 455808 - DNA, 83 bp, Homo sapiens
cgctggggacgcgcgcggccgagactctggcctgcagtcgccgccgccgccgccagacaatgcagatcttcgtgaagactctg

SEQ ID NO: 455809 - DNA, 50 bp, Homo sapiens
ggaactcttggttgggataagagactttgcagcaattgatcatgatgtcg

SEQ ID NO: 455810 - DNA, 83 bp, Homo sapiens
gggactgtgatggccagagagatgacgatcttaggcattgccacctggggtatcgttgtcatggcagaccccaaagggaaggc

SEQ ID NO: 455811 - DNA, 90 bp, Homo sapiens
gttgaagcctgccacaaggtccacctgttgttgtgggtttttgggtgaccagcaggaagaaccggacccggcgaacctggaagtggacca

SEQ ID NO: 455812 - DNA, 99 bp, Homo sapiens
acctacacagaacagaggattcaaatttttcctgttgattctgccattgacactatatctccattgaatcagaaggaatcattgacatagagtaactcc

SEQ ID NO: 455813 - DNA, 50 bp, Homo sapiens
attatcgcgaccaacacataccagcaggtgtaggaattggcgtggtccat

SEQ ID NO: 455814 - DNA, 100 bp, Homo sapiens
acagcaactggacacttatgaagatggacattgctacaagtggttggtgtggtctctgtggctgtggccgtgattccttggatcgcaatacccttggttc

SEQ ID NO: 455815 - DNA, 100 bp, Homo sapiens
atcaaagaactgagagtgattgagagtggaccacactgcgccaacacagaaattatgtgatagtagaaaaggctcccaaagctcggataggagacctgga

SEQ ID NO: 455816 - DNA, 82 bp, Homo sapiens
cgctccgtggccttagctgtgctcgcgctactctctctttctggcctggaggctatccagcccttcgtgaccctgctgaatg

SEQ ID NO: 455817 - DNA, 75 bp, Homo sapiens
aaggcccacctgtgtcctggttgagggtctccagggttctttggggcccgagctatttccttcgtgctaccatca

SEQ ID NO: 455818 - DNA, 75 bp, Homo sapiens
cgagatcgagctctttgtgaaggtattctttaggtgatgctagaaggcctcttcatgaaacagcagttttggtag

SEQ ID NO: 455819 - DNA, 100 bp, Homo sapiens
ccgccgccctgtactccgtgtaccggcagaaggcccgggtctcccaagagctcaagagtgatcagcagctggactgtgccttggacctaatgaggcgcct

SEQ ID NO: 455820 - DNA, 100 bp, Homo sapiens
accgaagcagcgtgtcctccgtgggagcccgagattcccgacagttaagcaatggggagacatttggctttgctcctgcttctgctccttctcttccaac

SEQ ID NO: 455821 - DNA, 98 bp, Homo sapiens
gccctctattgccaactgttaagttcaggaagatttgactgaagagaaaaaaagggaactggagcataatgctgaagagacctatggtgaaaatgatg

SEQ ID NO: 455822 - DNA, 100 bp, Homo sapiens
ttccgaggaaagcgaacattatatccagaatcatggacggacagaggatgcacttgtccaatcctcaatcctgcaatggctgccatccggaagaaactgg

SEQ ID NO: 455823 - DNA, 100 bp, Homo sapiens
gagaaaacacgaggtgcagaagatgaccttaacacagtagcagctggaaccatgacaggcatgttgtataaatgtacagagacagggttttgccgtgttg

SEQ ID NO: 455824 - DNA, 98 bp, Homo sapiens
cctggaagtagcaggccgcatgcttggagccccatctgtgacttcctagaactccagcgccgttaccgcagcctcctggtcccctcagattttctgtc

SEQ ID NO: 455825 - DNA, 74 bp, Homo sapiens
aacgtgtttttcgggagagcaaaggctgtgtctacggcagcctggggatataaaagccttgagccgggccatgc

SEQ ID NO: 455826 - DNA, 51 bp, Homo sapiens
aatggctggtataattataggcaccaggagtcagaaataccatcagaggag

SEQ ID NO: 455827 - DNA, 75 bp, Homo sapiens
tgacctggttgtggggctgtgcactgggcagatctcggtgctcagcggcggcaaggccaagtgctcgcagttctg

SEQ ID NO: 455828 - DNA, 90 bp, Homo sapiens
gagggatccttcacccgtgtctgacaccattcgcttttcacccaagatgatttgatgtcttataaaactctgatgaaccatgatggctac

SEQ ID NO: 455829 - DNA, 75 bp, Homo sapiens
agggacaaggactatagagcaagagggagagatgacaagacagcagtgaagaccgtttgggtagaaggtttaagt

SEQ ID NO: 455830 - DNA, 100 bp, Homo sapiens
gcaactccttcccagtggaggaagcgactgttccaagagccagttttggaattgtaggcacaaacacagagcgggcagagaagatgggccagaatctcaa

SEQ ID NO: 455831 - DNA, 100 bp, Homo sapiens
agaacttctcctcccaggttgtggaacgacacaacaagccggaagtggaagtcaggaattgaatgatctggcacgggaccctccagcacagtgttcagca

SEQ ID NO: 455832 - DNA, 74 bp, Homo sapiens
gataaagtagccgttcttcaggcacttgcatccacagtaaacaggatagaagaagtcagagatgccatggaaaa

SEQ ID NO: 455833 - DNA, 113 bp, Homo sapiens
gaaacaatggcatttacagaaagagtcaacagcagtggcaacaggggggcattctcagtggtgagaagatgtatgaaaattcctactggacaagaatatgctgccaaaattat

SEQ ID NO: 455834 - DNA, 75 bp, Homo sapiens
ccagtctgcagatttgcaaggatgtcatggatgccctcattctgtgtctcatagttgggggaggaccctgtggct

SEQ ID NO: 455835 - DNA, 75 bp, Homo sapiens
ctccgcctcagcccaacggggagaagatggctgtgccacccacgtatgccgatcttggcaaatctgccagggatg

SEQ ID NO: 455836 - DNA, 50 bp, Homo sapiens
ttcgaagggagttggtaaacgctgagtcaccatcatgtctcttctcacca

SEQ ID NO: 455837 - DNA, 83 bp, Homo sapiens
cgggtctggagtgcgtgggggaccggctgttggcgggagggccctcctggacccgggagcggaccctggtggcggtgaagccc

SEQ ID NO: 455838 - DNA, 100 bp, Homo sapiens
ctgggcatccctctgggccaggacgccgaggaggaagccaaagctgtagttgaagaaacaagagccctgcgtagtcggattcatcttgctgaagctgctc

SEQ ID NO: 455839 - DNA, 100 bp, Homo sapiens
acaaagtggggcgcgtgaagctcctttctccttccatcctgaagccctttccgctgtggacaggaaaacaggagctctcaacttaatcatccttcagcaa

SEQ ID NO: 455840 - DNA, 50 bp, Homo sapiens
cgaagactttccagctcagagagtgaaggctcatccatggaataccaatt

SEQ ID NO: 455841 - DNA, 100 bp, Homo sapiens
gctgggcgacttgcgaggatgagagcgacgaagccaactgtccagtattctaccttgtaaatactgttatttgtatatactgtaaatgatgacatcggtg

SEQ ID NO: 455842 - DNA, 101 bp, Homo sapiens
ccggaagctggcgtactccggcagcgaaagcggtgcagacgggaggaaggtggaagttaaacgagctgagcctcgggacagcaagagccaagcgccgggac

SEQ ID NO: 455843 - DNA, 100 bp, Homo sapiens
ggccaactgcaccatccagtttgaggagctgctgcagaacgggagccgccacttcgaggactgggttgctataaaatccattcgtaaggacaaaattaag

SEQ ID NO: 455844 - DNA, 73 bp, Homo sapiens
aaaaccagttattgaatatcaagaggaggagttgttgatttagtgctatacaatgtgcagctgccgtccctag

SEQ ID NO: 455845 - DNA, 75 bp, Homo sapiens
gaggccttgggaacctcgggaccggcccccggcgagcgcagcggcgcccagtgattttttatcaagcagaaatgc

SEQ ID NO: 455846 - DNA, 90 bp, Homo sapiens
tcatgttcagctccatcgtctgcagcgtcccgcacacctggcagcaaaagaggagcatcagatccatgctgctgctgactcggagcccca

SEQ ID NO: 455847 - DNA, 100 bp, Homo sapiens
cagagtttgtaccaggccaagccttttgctcacatacaggtttctgggtgtctctggggagcccctgggccagattttcctctagactccagcccatctc

SEQ ID NO: 455848 - DNA, 83 bp, Homo sapiens
gacgaaggtactcgcagcacttggagcgcagaaccggccgcgcccggtgtggacactgccagcggctgcagccgacttggaat

SEQ ID NO: 455849 - DNA, 83 bp, Homo sapiens
ggggcagccaggcgctccggcgcttctccactggccggcttttgccttatgaacagtcctctcttttggaactcataaagact

SEQ ID NO: 455850 - DNA, 82 bp, Homo sapiens
ccgagcgcggcccgggcgccatcgagccttggcggcggacgtgcagatgtgaagttcatttccaatccgccctccatggtgg

SEQ ID NO: 455851 - DNA, 98 bp, Homo sapiens
ccagagcctggagtctgcgaaggccgggacccggttccccggcccacagtgggggtgtgcaaacccgagagaactggtatccggagtgtgatgcagaa

SEQ ID NO: 455852 - DNA, 100 bp, Homo sapiens
ctcttctaaaaggatatgtgttgctaatacccatctttactggcatcctaaaggtgaatctggattgggaaagtcgacattaatcaactcattattcctc

SEQ ID NO: 455853 - DNA, 100 bp, Homo sapiens
cctgaaggtcccggtgctcacttggacatgtgaatggtagtgtctagaaagggtatgtcccttcaagagagaggtgccaatgtccaaccggcctaataac

SEQ ID NO: 455854 - DNA, 153 bp, Homo sapiens
ccattcacaaggcagctcgctctgggagcctagaatgcatcagtgcccttgtggcgaatggggctcacgtcgatactaaggctcgtacgtctgcatcgattatcttacgtggggcaaatgatttcatgtgtgatgagatggagcgctctttac

SEQ ID NO: 455855 - DNA, 100 bp, Homo sapiens
gtttaatctggaaaatgtcactgttttcaatacaaatgagcaggaaagcaccctgggtcagaagcattgctattggaaatacttaatagtagatgaagga

SEQ ID NO: 455856 - DNA, 90 bp, Homo sapiens
gtgctgaccctgtaacccaaaggaggaaacagctggctaagctcatcattgttactggtcacagggattatggacccagaacagatgctg

SEQ ID NO: 455857 - DNA, 97 bp, Homo sapiens
cctgacccgactgcctctctcagtgagcaacagcttgcacaactacagaaagaaaaatcagagattctgaaaaatctggcattatattacttcacat

SEQ ID NO: 455858 - DNA, 50 bp, Homo sapiens
ccaccagtgagatccactgctccagatatgtggtagatggtggctttgtg

SEQ ID NO: 455859 - DNA, 75 bp, Homo sapiens
gtccacccaccgccgccgcctcccagtcagagcaccataacatggtgtgggaagtgaagacaaatcagatgccta

SEQ ID NO: 455860 - DNA, 101 bp, Homo sapiens
gggacgggcagctagcgcgaccctgagccggcgcccgtggtccggccatggacgacctcgttgttgacctcctgtactggagagacattaagaagactgga

SEQ ID NO: 455861 - DNA, 98 bp, Homo sapiens
cgggaggcgacagtgaaaccctttgccatcgacatatttcctgtcaccaacaaagatttcagtgaaggagaacgacctgctcagaatgagaagaggaa

SEQ ID NO: 455862 - DNA, 90 bp, Homo sapiens
tgccaagacagatgggagtttccttgtacaccactttctctccttctatctcaaaggtacctgcacatgttgttctttgtcagtgctgtc

SEQ ID NO: 455863 - DNA, 97 bp, Homo sapiens
atttcttttgggaaaacataaagctgccattgaagtatataatgaagcagctaaactcaaccagaaagattggagacggaacctcactatgttgccc

SEQ ID NO: 455864 - DNA, 101 bp, Homo sapiens
ctccatcatatgacaaggacaagagtgttctggctttcagaggaatccctgacagtcattttgtttactcattcagccctgttgcaggtcccaataaactc

SEQ ID NO: 455865 - DNA, 80 bp, Homo sapiens
gcagtctttgctacgtacagcaaaagtgaaagctcggacagctcaattagccaagataaaatgggtgataagtgtcgctt

SEQ ID NO: 455866 - DNA, 75 bp, Homo sapiens
attgcaggaaaagaaactctttcatctgctgctaaaagagataagacatgggatgttcatgagtatttgaatagt

SEQ ID NO: 455867 - DNA, 100 bp, Homo sapiens
ggtggtggtgtcttacttcctcatcaccggagggtgtccgcaatgttgccagtgtctgtctgcagattggctacccaactgttgcatcagtaccccattc

SEQ ID NO: 455868 - DNA, 89 bp, Homo sapiens
ccggggcgcgcccaccgcgccgcatccatgttcgagttgcaaaacttcctcaagttgttcaacagcaaacacccgtggccagcatccag

SEQ ID NO: 455869 - DNA, 83 bp, Homo sapiens
aaccgccagatcaacctggagctctacgcctcctacgtttacctgtccatgcttataggctttatactgtggtgcctcgcctg

SEQ ID NO: 455870 - DNA, 100 bp, Homo sapiens
taaggattccaagtaactcttatttggtttgtttgtaaaaacaatggtgtgttgtttgaaaaccagctgcttcaaattggacttaagtctgaatttcggc

SEQ ID NO: 455871 - DNA, 75 bp, Homo sapiens
gtaagtgcgtttgaaggcttccacaccctctactccagggggaaagcctcctgaagctgatggtgtggatagatc

SEQ ID NO: 455872 - DNA, 100 bp, Homo sapiens
gagaagcctttgaaattaatggcacagaagatggcagaatagctgaaacctttggacttcaagaaaattatatcaaaattgtcataaataagaagcaact

SEQ ID NO: 455873 - DNA, 98 bp, Homo sapiens
ccaaggctatggacaagcatcacaagtgtgatgaatgcagactctgctaccattttggctgtttggatcctcctttgaaaaagtctcctaaacagaca

SEQ ID NO: 455874 - DNA, 75 bp, Homo sapiens
gcacagaaatagtggagtacaccagcaaagatgaggtgagtataggtgcttggagaggataaggaaatcaccctg

SEQ ID NO: 455875 - DNA, 100 bp, Homo sapiens
gagatcatggggcccaagaaaaagcacctggactaggagaaggcagagcccccccaggctatgaatgccctgatgcggttgaaccagctgaagccagggc

SEQ ID NO: 455876 - DNA, 108 bp, Homo sapiens
agagttctagggttctaagtgatgtccaggaaggaggaggaataatatttatggagcatatattatggaacacaataagccaatggacacgtcagtgttatctgaaga

SEQ ID NO: 455877 - DNA, 82 bp, Homo sapiens
ctgtaaagtcaccaacgagatcttccgccactacgagacatggatttgattgacatactttggaggcaagatatagatcttg

SEQ ID NO: 455878 - DNA, 96 bp, Homo sapiens
tgcttggtgtaccagaattcggccatgagccgctacatactcatcatggggctcctgtacaaggcttcctgtgtccagtaccggttagtggtccgg

SEQ ID NO: 455879 - DNA, 100 bp, Homo sapiens
tatcaacagacgggagactgaacttgagatattttggagtgtatacaataatatccctcctgtgactagcctgcctttgagatgtagttatcatttaatg

SEQ ID NO: 455880 - DNA, 83 bp, Homo sapiens
aagaagctgatcgagcccctcaccaatctcatccacagcccgcggcgccatggctcacgtcggctcccgcaagcgctcgagga

SEQ ID NO: 455881 - DNA, 99 bp, Homo sapiens
gccgccatcaaccgccagatcaacctggagctctacgcctcctacgtttacctgtccatggatgccttccgcgccttccaccctgacctggaattcgtg

SEQ ID NO: 455882 - DNA, 75 bp, Homo sapiens
gaagagacatgagatggtagacaaaaccccaggtgctggagaatctggtaaaagcaccattgtgaagcagatgag

SEQ ID NO: 455883 - DNA, 90 bp, Homo sapiens
gcggcagtcggatagacaataccacaacaacacattttgcagagataaagaaatgggggctccgagcagtcaagaagaacatgccccaag

SEQ ID NO: 455884 - DNA, 89 bp, Homo sapiens
cgatcctggacaggatgcaggcagattcctcactaggctcatcgacttcttcattccagtccatgggttcttatggacctttcggcagg

SEQ ID NO: 455885 - DNA, 101 bp, Homo sapiens
tatagatttcttacccttcgatattcgtctcgaagaaacccatattgtcgggcaattcatgatgttaaagccacagatctgggattaggtaaagtaagatt

SEQ ID NO: 455886 - DNA, 103 bp, Homo sapiens
cacgccagccgcaccatgccgctcctaagcctgcacagccgcggcggcagcagcagtgagagctctacgaactcgacggggaccccaagaggaaggaattcct

SEQ ID NO: 455887 - DNA, 82 bp, Homo sapiens
gcccatgcgagtacctgaggaaggtggatcagtacaagggaaagcgggatttggagtcactgagggagtacgtggagtcgca

SEQ ID NO: 455888 - DNA, 75 bp, Homo sapiens
atagatttcgagacaacagtggccttctgatgaatactttaaattactctcgtggctttggtggccggtacgggg

SEQ ID NO: 455889 - DNA, 75 bp, Homo sapiens
cagtcctgaaagctcaccagtctcactctgcaggtgatgatgatgcttatctgtgtattcatgaagatcagactg

SEQ ID NO: 455890 - DNA, 133 bp, Homo sapiens
ggtgacccgggaccgggcggtgaggaagctccggaaatacatcgtcgccaggactcagcgggccgcagggtcgaaggagtcccagtgctttaaaatacactccaggggagtacacgttactaccttgtgaaga

SEQ ID NO: 455891 - DNA, 82 bp, Homo sapiens
gctctacgcctcctacgtttacctgtccatgccaatttctgggtacgatggccccaaatttcaccatcctcatcaagaacag

SEQ ID NO: 455892 - DNA, 100 bp, Homo sapiens
aacctcttggcttctgaggcatctgacaaggtagttggcaaaaaaggagaaagccactaaggtacaaaagacactggacaaccatattgcaatcagatct

SEQ ID NO: 455893 - DNA, 100 bp, Homo sapiens
ctcagtctcccaacacctctgacttaattcagtgcacaaatgagatgaatgtgaacatcccacagttggcagacagtttatttgaaagaactactaatag

SEQ ID NO: 455894 - DNA, 74 bp, Homo sapiens
gcagccaccccatctgggaaatcccaaaaggataatcacttacaatgaagccatggatagtccagatcaatgaa

SEQ ID NO: 455895 - DNA, 98 bp, Homo sapiens
tgcagaaggtctctggagacatcttcagcagggtcctcactgagcagcgagtcgtcccccgtgtcctctccggccaccaaccacagctcccccgccag

SEQ ID NO: 455896 - DNA, 83 bp, Homo sapiens
agggtttccaccgttcgttcaagatgccgctcctacgaggactgctgtggctccaggtgctgtgtgcgggccctctccataca

SEQ ID NO: 455897 - DNA, 102 bp, Homo sapiens
gcccaataagcagaaagaccaacatgcaggtgccagacaagcagacatgtatggaggtattggaagccttgtatgatggtagcctaggagactgtaaagaag

SEQ ID NO: 455898 - DNA, 98 bp, Homo sapiens
ggaaacctttatcaaaaatatattcacaaagaaacggtgtctaaatgaggtgtatgtgctgaagcggccacatgtggacgagttcctccagaggatgg

SEQ ID NO: 455899 - DNA, 80 bp, Homo sapiens
agagaggcatcctccttgaagtatttggctgaggagttttcaatcccagctccagggagttccacgctgtccagttctct

SEQ ID NO: 455900 - DNA, 100 bp, Homo sapiens
gagttgctgcccttccggagtccgccccgtgaggagaatggccagaagcggactcctagaagaggggagcagcaaggatggaatgacagccgtgggccgg

SEQ ID NO: 455901 - DNA, 100 bp, Homo sapiens
tgcccctcaggctggaacttgccctgtctcctcgcagatgagtggtgatcatgtgtgcgagcagtgacaccatccggagcatcatgctggtggcgcacag

SEQ ID NO: 455902 - DNA, 75 bp, Homo sapiens
caagcccaggctttggtcaccagtgagctggagaagttccagaagaaatcgacgttgacgtggagagcacggact

SEQ ID NO: 455903 - DNA, 83 bp, Homo sapiens
cgacatgagtgatgtggaggaaaacaacttcgagggcagaggactttgaatccaaagcaaaccatcttggtgattctggtggg

SEQ ID NO: 455904 - DNA, 82 bp, Homo sapiens
cggcagaggaaaagggcgggggcagctagagtacatgtcccagagcaagcacacggaggcccgggagctcatgtactcggga

SEQ ID NO: 455905 - DNA, 75 bp, Homo sapiens
ttcatttctgtgacaagtgtggattgcctattaaaatctatgggagaatggcacatgatggctccgctacttact

SEQ ID NO: 455906 - DNA, 74 bp, Homo sapiens
tcctgacgcctcccagccgtgcttcctgttaagcctgtgaaactcgtatctggtgcaggccgtgagagcagcgg

SEQ ID NO: 455907 - DNA, 100 bp, Homo sapiens
actgggggattcgcagggaggatgtcgggacaccccggaagctgggaaatggaggtgtcctgtgggacctggagagccctcccgtgtgcctgactgtggg

SEQ ID NO: 455908 - DNA, 100 bp, Homo sapiens
cgcctggtggacaacatattccctgaagatccaaaagaaaagaaagctgcattggaaaaggagcgagaagaacggatagctgaagctgaaattgaaaact

SEQ ID NO: 455909 - DNA, 75 bp, Homo sapiens
ccatcaagatcgccctgcgctgctgatgaacttattagtcctaaagacattgatcctgtccagcgctatgtccca

SEQ ID NO: 455910 - DNA, 74 bp, Homo sapiens
agacctagaactacccagagcaagaccacagctggtgaacagtccagcatgattttgaagtcagaggagatgtg

SEQ ID NO: 455911 - DNA, 60 bp, Homo sapiens
gaacatgccatcaaactgtttgaagaaatcagagaggctgaactcacgggaatcaaatgg

SEQ ID NO: 455912 - DNA, 75 bp, Homo sapiens
tctaccgcaaccatcacaaggagtacttccagcatgccaggaacccttctctgaagcaacagctcttctcctacg

SEQ ID NO: 455913 - DNA, 98 bp, Homo sapiens
tcggctgccgccaaggtgttcggtccttccgaggaagctaaggccgcgttggggtgagaccctcacttcatccggttcgatacaagaggctgttttcc

SEQ ID NO: 455914 - DNA, 97 bp, Homo sapiens
aaccttggacagcagattttggtttaatatctgattgggacaacattcagacccatttccagtcatgacccagccatctaatcagtctccgatgtct

SEQ ID NO: 455915 - DNA, 100 bp, Homo sapiens
gcaagcagctgtccgagtcccaggtcaagagcctctgcgagaagcaacatctgaatgaattgatgacgaagaagtggctattagggtcaaacgctgtaga

SEQ ID NO: 455916 - DNA, 75 bp, Homo sapiens
accagaaggtctacatgccccgggaggggaagctcatctctgacatcaacaaggatgatggtttgcagaaaatac

SEQ ID NO: 455917 - DNA, 100 bp, Homo sapiens
tctgtcattccagaaatatttgtcaggcgcccctggtgtgtcagatttcaacactacacttgcacaatgtctttgaaaccaagagtagtagattttgatg

SEQ ID NO: 455918 - DNA, 75 bp, Homo sapiens
ccagtacgagcgggagaaggcgctgcgcaagcacgctgaggagggtgttgaaagcagcaggggcctagaagacat

SEQ ID NO: 455919 - DNA, 73 bp, Homo sapiens
ctggcccgtgctggaaaagtgagaggtcagactcctaaggtggccgacatgaaaaagaagatggaggacagtg

SEQ ID NO: 455920 - DNA, 95 bp, Homo sapiens
ttacgccaatgtggacggactcactgccctgcaccagaacaccttccaccatgaccacctcagcaagttcccacttaaataaaggcatcaagcag

SEQ ID NO: 455921 - DNA, 82 bp, Homo sapiens
ctacttcaagagcaagttctcggacttcacagagaatgcagttgtcttgacttcaggtctgtctgttctgttggcaagtaaa

SEQ ID NO: 455922 - DNA, 50 bp, Homo sapiens
ccgcgacctggttctcccggagtctacacggcgggagatgggactagagg

SEQ ID NO: 455923 - DNA, 99 bp, Homo sapiens
agaactgagcccaggccacagtaccctattcacgctctgtgcttgtgccaagaatggagaatggtgtgttgggaaacgccttggaaggtgtgcatgtgg

SEQ ID NO: 455924 - DNA, 90 bp, Homo sapiens
ggagttgttcctttggccacatatatgcgaatctataagaaaggtgatattgtagacatcaagtgggagccaagaagaaaggtttgctcc

SEQ ID NO: 455925 - DNA, 90 bp, Homo sapiens
cctctggcccgaagccttcctttatcgctttcaggtgttggtaaatcatgcttattgctacagtttacagacaagaggtttcagccagtg

SEQ ID NO: 455926 - DNA, 50 bp, Homo sapiens
gaagcttccagaaatggcatttagcccagacatggctccttactatgaag

SEQ ID NO: 455927 - DNA, 100 bp, Homo sapiens
ccggccttggtgcggcgagccgagcgaggcagctctgagccgcgcgtgtgccggtccaacaaaagcccttgggtctgtttgacttgttcaagtgtccact

SEQ ID NO: 455928 - DNA, 100 bp, Homo sapiens
gggcatggtggtctggggcaacgcggaaggagatgcctacatagaagagtgacagcagctagactaaatgtttaactgctgaactagttcctcaggtatc

SEQ ID NO: 455929 - DNA, 51 bp, Homo sapiens
ggtgaaggtactggtgttgggagactcagggtctctctctgtcacccaggc

SEQ ID NO: 455930 - DNA, 99 bp, Homo sapiens
cctgaccttgcacccatgctgtggcattcatttggtactattgcagcacttttacaggttggtgttcgaggaagagacattgttgttcttggtgtggag

SEQ ID NO: 455931 - DNA, 100 bp, Homo sapiens
cgcgaatatcgtcatcgttagaaggttgctcggcgctggggcatccagaagaaccggccagccatgaactatgacaagctgagccgctctctccgctatt

SEQ ID NO: 455932 - DNA, 75 bp, Homo sapiens
ggttccttcactgtgcgtgctgaccatgctattgacctgaaaagtggttctggaaaagtgtaccaaggccctgca

SEQ ID NO: 455933 - DNA, 100 bp, Homo sapiens
cgagaagaaggacagaaagaagactgggagacaccggaactcgaaagaaaatcgcacacagcaagaaggaggccatcagcaaactgggaagaggaccctc

SEQ ID NO: 455934 - DNA, 100 bp, Homo sapiens
gaaaagattgagcggcgacagcaagaagtggagacagagcttaaaatgtgtacactgaggaggggacggctccgtcttcacattgtgcacagatctgagg

SEQ ID NO: 455935 - DNA, 75 bp, Homo sapiens
atctacaagaggggacaagtacctttatgaaccagtgtatcccaagggccagtgtcattcaaagatgtggctgtg

SEQ ID NO: 455936 - DNA, 100 bp, Homo sapiens
gcatgacgtgcaggtctctagcgcatggataatgtgcttatggtgtaaccaggtttgagggaggcatatctcatgtgactgggagaagccaatcatcatg

SEQ ID NO: 455937 - DNA, 100 bp, Homo sapiens
ttattacattaatggatgctccaggccataaggacttcattccaaatatgattacaggagcagcccagtttctggaacattcaaattcagtgtttctaca

SEQ ID NO: 455938 - DNA, 78 bp, Homo sapiens
agccatcctggagtacctcaccgcagaggcttttgatgaggccattgctgaacttgatacactgaatgaagactcata

SEQ ID NO: 455939 - DNA, 83 bp, Homo sapiens
cccgagttcgctgccagccccaagaaggagaccctcatccagctgatgcccttcttcgtgtcaaaatgcagatcttcgtgaaa

SEQ ID NO: 455940 - DNA, 74 bp, Homo sapiens
acccagaagtagctgaatgtgttactccattgctgaggagtggctacggagagtgaggtaggagatgtagattt

SEQ ID NO: 455941 - DNA, 90 bp, Homo sapiens
gctcgctggagggggcgtcagataccctggaggcccaggcccatggctggcgcttatcttcagagcctgcagagcctctgttggtcaggc

SEQ ID NO: 455942 - DNA, 100 bp, Homo sapiens
gctcgcacatttgacttggaagcaatgtttgaacaaactcgaagaacagctgtggaaagaagttgcaaaacactggggaaaatttgttggcagattgttt

SEQ ID NO: 455943 - DNA, 75 bp, Homo sapiens
cctcacgccagcctaggagaagaagttcgtagtcccagaggtgctgctggtgagtagcagccggtacccagacca

SEQ ID NO: 455944 - DNA, 82 bp, Homo sapiens
aggaggagaaaattcccccagattcgggcagttaattggccttggtcctcacagctccaaaaagaaacaggatctcgataag

SEQ ID NO: 455945 - DNA, 100 bp, Homo sapiens
gtgatccaagcggcagtgatttgcctcaagggtgaaaaggaacagcctgtatttgcaatgaccggccttcgatggggatctttcagagatgctggcgtca

SEQ ID NO: 455946 - DNA, 83 bp, Homo sapiens
ctagccccggacgagaagcgcagcaacgtgcggtgggaccacgagagcgtgacttaagagattaaaattaatttggttgctgt

SEQ ID NO: 455947 - DNA, 75 bp, Homo sapiens
cgaggctgcgggaccccaggatgggggacaggaggctgcggggcctcagactggaaagctacccttgaggagaat

SEQ ID NO: 455948 - DNA, 100 bp, Homo sapiens
tacgtgctcacggtcaacgagcggggcaaccactgcgagtactgcttcaccaggtgacagccgtgagggtgtatgtgaacagttcctctgagaatctcaa

SEQ ID NO: 455949 - DNA, 98 bp, Homo sapiens
ctacaacaccaagtttgccctggtggcccctgtccaggctgaagaagactctgcccagtgcttgtgagcaggtgtcatggtttccagaatgtaccact

SEQ ID NO: 455950 - DNA, 75 bp, Homo sapiens
gtgaaacacttctactggacctcagactcctgcccgaggcctggcgtggtggtctcgctctgtcgcccaggctgg

SEQ ID NO: 455951 - DNA, 90 bp, Homo sapiens
ggcggaggaggggagtggcaggtgatcctcacagggtcgtctactcaatttgagctgctccacagttcccacctttgttctgtccatcac

SEQ ID NO: 455952 - DNA, 101 bp, Homo sapiens
cacatcctcatccgagcctttgatttgagtggtctatccttcactggagtctgatgatgatgaccctgctttgaaatctcgacccaagaaaaagaagaatt

SEQ ID NO: 455953 - DNA, 90 bp, Homo sapiens
tggatttgccgaagattaggaagaatccactgatagaaatcatttccatcaataccggtaatgatgtagacatggaaacagatcactact

SEQ ID NO: 455954 - DNA, 103 bp, Homo sapiens
gttctctcctttccagtcggagacctctgccgcaaacatgctccgccagatcatcggtcaggccaagaagcatccgagcactctggcaacgggtaactcgagc

SEQ ID NO: 455955 - DNA, 129 bp, Homo sapiens
ccatgtttcggaatagtctcaagatgctgcttactggtgggaaatcaagtcgtaaaaacaggtcaagtggcgaggattaaatccaccacacagggtgaaatctatctccatgacaacattcacacaaca

SEQ ID NO: 455956 - DNA, 98 bp, Homo sapiens
ggtagatcaactttggaaacttatgaattctggcccgatgagagaaagggaaagttaaggatgctggagcagaacaatggatttctctttctctttca

SEQ ID NO: 455957 - DNA, 97 bp, Homo sapiens
tgtccatatggtcactcatttcattcaggcaggatgtagccaatcaaatgtgcaccaagaccaaggaggagtgtgagaagcactatatgaagcattt

SEQ ID NO: 455958 - DNA, 98 bp, Homo sapiens
tagggtcgccgccactgccgcaggaggcgtgagggctccatggagaacgagcctgtagcccttgaggaaactcagaagacagatcctgctatggaacc

SEQ ID NO: 455959 - DNA, 99 bp, Homo sapiens
atcctttcctgcttttggtttccctggcaggggttgaactgtggagtgtgtggcaccctcatcacatgtgtggattctgggattctcagagtctggcat

SEQ ID NO: 455960 - DNA, 100 bp, Homo sapiens
accgagtcaggcagctgcatgaagcccacagggactttggtccagcatctcagcactttctttccaagattatggagaagtctggcgaggaaggaatgcc

SEQ ID NO: 455961 - DNA, 100 bp, Homo sapiens
gccctctggaagcccaagactgctggaggcacgccccaaaggcgagggcctgactccataccagggcaaaaagcgctgcttcggcgagtacaagtgtccc

SEQ ID NO: 455962 - DNA, 83 bp, Homo sapiens
tgacaagtgtgggaaccagcgcttctccaccaggatcacgtttgagtgtgctcagatatcgcttctcaataggtttggcatgg

SEQ ID NO: 455963 - DNA, 74 bp, Homo sapiens
ttttcaatgctgcgaaagctgccaaaagtgacatgcagatttgcctctgcaacttgactctcctctaggaagag

SEQ ID NO: 455964 - DNA, 75 bp, Homo sapiens
ctatcaaatacttacacttgaaaaggatcagatcggtgttgctggaagtcggtccaggagctttttggataatcc

SEQ ID NO: 455965 - DNA, 100 bp, Homo sapiens
gagaacctcaacaccgagtccccagcaggtacactgaggaggggacggctccgtcttcacattgtgcacagatctgaggatgggattagcgaagctgtgg

SEQ ID NO: 455966 - DNA, 75 bp, Homo sapiens
tgggtccctccctgctgcgggacagcagctgaactgataaatttcaaacggaagagagtggcagcatttagaaag

SEQ ID NO: 455967 - DNA, 100 bp, Homo sapiens
cagctccgtctcggcggcggcggctagaacaacagaggcagcagttgcttactgaacgccaaaacttccacatggaacagctgaagtatgctgaattacg

SEQ ID NO: 455968 - DNA, 75 bp, Homo sapiens
gccagtgaccttgcagccagtgacctcaaaggatttcagccacaggtcagcccaaggccaaccccactgtcactc

SEQ ID NO: 455969 - DNA, 100 bp, Homo sapiens
tctcagggtagtcatctctctccagctgacagcagaaaaaagggttgccaccccagttgattggaagaatggacttacacgctgggccaaggaaatagaa

SEQ ID NO: 455970 - DNA, 90 bp, Homo sapiens
cgggaatttgtgagacagtattacacactgctgaaccaggccccagacatgctgcatagacatatctgaagagatggattaagaatgctt

SEQ ID NO: 455971 - DNA, 80 bp, Homo sapiens
gccgggagcgctgactggcccggctgggcaggacttgttgagcccattaaagaaatggaagtctcgctatctgatggagc

SEQ ID NO: 455972 - DNA, 95 bp, Homo sapiens
agctgtgactgtagtatgacttccttcagtggaccactctgcaatgaccgaagaggatcacctagcccgggtagaagaggcaatcacccgtatgc

SEQ ID NO: 455973 - DNA, 99 bp, Homo sapiens
cggccatggccatgggcagaggcgaagggctggtgggcgatgggcccgtggacatgcgcacctcacacaggaatatattaaaggaatctgtgaacctga

SEQ ID NO: 455974 - DNA, 83 bp, Homo sapiens
gcacacactaggagatctcctcaaagaagtttgtccttctgctattgatcctgaagaggaggaggtggaggaggaggaggatg

SEQ ID NO: 455975 - DNA, 75 bp, Homo sapiens
acctcctgctgcagctctactctggacgcctgcagcaccagtggcagttcgcagcctccaggacttggctcgcat

SEQ ID NO: 455976 - DNA, 100 bp, Homo sapiens
ggagatttcagtgcattgcctcccctgggtgctcttcatcttggagctttcagcagaggccaaggcagcattgcttgaatttgaagaaagggagcgacag

SEQ ID NO: 455977 - DNA, 98 bp, Homo sapiens
ctggacaaggacaaagggaaaaatgctgaagtgctgtactcgatcgagtcaggagacatggattacaactggttggatcatacgtcttggcatagcag

SEQ ID NO: 455978 - DNA, 49 bp, Homo sapiens
acgaacatcttctggacctttgtccagaagccggcaggagtgactctcg

SEQ ID NO: 455979 - DNA, 50 bp, Homo sapiens
gcagaatgcactgcttgaaaagttggttccacggcaagatcacacgggag

SEQ ID NO: 455980 - DNA, 50 bp, Homo sapiens
gtgaaggtcacgccgcggcgcaaaatggcggctgccaggcccagcctggg

SEQ ID NO: 455981 - DNA, 75 bp, Homo sapiens
gtgaagaaattattggtacctgcactttagtgcagccgtcattatccatgacaccggaaactgtgaaagatgttg

SEQ ID NO: 455982 - DNA, 75 bp, Homo sapiens
ccgaccagaatgatagccagtccctggagctggtgcacaggttccaggtgaaagaaaatggcccgaaccaagcag

SEQ ID NO: 455983 - DNA, 109 bp, Homo sapiens
tcccggccaggacacggtctgggccgccgaatctccggccgaagagcggcggcggcagcggcgacagaaacagtctccgccagtcaagaaaccctcaaaagtattttgc

SEQ ID NO: 455984 - DNA, 100 bp, Homo sapiens
cgagccgcctgccccggtgcgcagacagagctattccagcaccagcagagatcaggaagaatcaccattatagggtgcaaagagtttgctcagaggtgaa

SEQ ID NO: 455985 - DNA, 100 bp, Homo sapiens
cgcccggctttgcagcggggacttcggcggcggcgcctcaggcacctcggcccggaaggaatttccacttcatccctagaagttgtgccagagaacttga

SEQ ID NO: 455986 - DNA, 82 bp, Homo sapiens
ggcggagctgacggtggaggttcgcggctctaacggggctttctacaaggtgctgatagtctgcagcacaggtttagctggg

SEQ ID NO: 455987 - DNA, 75 bp, Homo sapiens
gctgacattgcgaggatgctatataaagacacatgtcatgagctctctgatgtaaaggatggagtaaatcaagca

SEQ ID NO: 455988 - DNA, 83 bp, Homo sapiens
tcctccacagggcgacggcggcaggagctcgggaaccgggactgcgagcggatgagcagcaccagcagtaagagggctccgac

SEQ ID NO: 455989 - DNA, 100 bp, Homo sapiens
gattgtgcagtgctcgactgtgaggatggagtggctgcaaacaaaaagactgagaaaactgttacagcagaatatgaactagaatacttactactggaag

SEQ ID NO: 455990 - DNA, 75 bp, Homo sapiens
tgaagttggcactgcagcagacagctccctgggcaccaggcagctaacaggggatcctttcagatgatcatgggc

SEQ ID NO: 455991 - DNA, 74 bp, Homo sapiens
atctctaagctgaagaagaagcagtgtggcccagagttgctcagaattggagcagagcctgagacgtatctgca

SEQ ID NO: 455992 - DNA, 97 bp, Homo sapiens
ggggtcccttttgcctcagatactattttgaagttgtctggcgccgggagtgagaccctaaaacaaagaagaacacaaatcatgtcccgaggacttc

SEQ ID NO: 455993 - DNA, 75 bp, Homo sapiens
tgagcaagagcagcggcgcagaaaggtggaggccgggaggacgaagagacaagaggagcagcagcggcaccgccc

SEQ ID NO: 455994 - DNA, 90 bp, Homo sapiens
ctgaagtcggtgtctgctgcgttcacggcaggattcggttagagatcctacagtaaggaattgtttgaagaagttatttcaaagatgcgg

SEQ ID NO: 455995 - DNA, 90 bp, Homo sapiens
accagccggcccgtaagatccgcagaaaaagcttgtggtgaaggggggcaaaaaaaagaagcaagttctgaagttcactcttgattgcac

SEQ ID NO: 455996 - DNA, 74 bp, Homo sapiens
gcccttcgccttcgtgcgcttcgaggacccccggaagctcttcgtgggcggtcttgactggagcacgacccaag

SEQ ID NO: 455997 - DNA, 74 bp, Homo sapiens
gggaactcagaccgtaccttgcaacaaggaaaattgcctaagaattatgacccaaaagttaccccagatccaga

SEQ ID NO: 455998 - DNA, 96 bp, Homo sapiens
ttggaaagacatctttgatcaccagattcatgtatgacagttttgacaacacctatcaggttgatgagaaagctctgaagcacataacggaaatgg

SEQ ID NO: 455999 - DNA, 90 bp, Homo sapiens
atatgccattgaggctatcaaggtttaccaaagatgcaggtcattaggaactattctggaacaccacccccagctctgcatgaaggaccc

SEQ ID NO: 456000 - DNA, 100 bp, Homo sapiens
tgtatagtcatcattttcagaggacttccaccagttgagtcaaaatctgctgctgtggttagcgagtgccaagaaccggaggcagaaggctcatgtcacc

SEQ ID NO: 456001 - DNA, 96 bp, Homo sapiens
cctcggggtccggaaccagacgatgagacagagttgcgaccgcgcggcagagggaatctggaaaaattgcaatcaaaacatcatttctctaagaaa

SEQ ID NO: 456002 - DNA, 98 bp, Homo sapiens
aacaatccaaatggccatgggcacaattataaagttggattggatgctgctggcaagacaaccattctgtataaactgaagttaggggagatagtcac

SEQ ID NO: 456003 - DNA, 100 bp, Homo sapiens
aagaaaaacagatgctaaaaatctcttctgaaaacagcaatccaggaggagacatcacagctttcccagatcgggaggaaaaatatggaatgtgttttac

SEQ ID NO: 456004 - DNA, 90 bp, Homo sapiens
tttccacctcatcaaacaaacagccttcgacgacgcagtggaagaacgagtgatcaacgaggaatacaaaatatggaaaaagaacacccc

SEQ ID NO: 456005 - DNA, 100 bp, Homo sapiens
acgtcagccggatgtcgcaccagcctgctgttggtactttgaactcaagtaaacaaaagggaagattttctcgttgatactggagactgcacaacaatgg

SEQ ID NO: 456006 - DNA, 100 bp, Homo sapiens
tacatctagcacagctcactgcagcaactttgacaaaactggaagaatttcgcagtaagacagcaacaggagcaagatcttgtgcaaaccctgagttgtt

SEQ ID NO: 456007 - DNA, 82 bp, Homo sapiens
ccgtgtactacaagttggcgaagaagatccttcacgcaggctttaagatgatgagcaaaggctatgagggcctcgtggaggg

SEQ ID NO: 456008 - DNA, 83 bp, Homo sapiens
tggagtacccccgggggaagaggaagaagggctccaccatggagcgctggtctcgaagtgctgcagctaaaactcatacaact

SEQ ID NO: 456009 - DNA, 82 bp, Homo sapiens
aggctatcacaagctgcaccagcttctaaccgagcttcagcgattagccaaagatcttctaaaacaagtacaagttcaagac

SEQ ID NO: 456010 - DNA, 90 bp, Homo sapiens
gatcaacctgaggccgcagatgtcccagatgccagtatggacagaatagcttatgatgcttatccccacccaccacttccgaaacattga

SEQ ID NO: 456011 - DNA, 87 bp, Homo sapiens
ttgggtgatttacaggcctctgtctattcctgcatggcccagaggacagatgcagctggacccacaaaccgtggagaccaagaactg

SEQ ID NO: 456012 - DNA, 82 bp, Homo sapiens
caaagacaaaggcacagctggatgaatggaaagcaaagaagaaagcttctaatgggaagccaagtacaagaagctggagaag

SEQ ID NO: 456013 - DNA, 75 bp, Homo sapiens
cgaggacccaaggctggggtttcctgcttggatcaggagtgcctggggaactgatgatgcttcggatgcacaatc

SEQ ID NO: 456014 - DNA, 75 bp, Homo sapiens
cgtcgtgatccagaagtccagagctgaggactgcctgtttgcagatcctgaggaggatgaaggggctggccctgg

SEQ ID NO: 456015 - DNA, 100 bp, Homo sapiens
atctgcgatgtgaggaaaggcacctccaccagtgctggacccaaaggagacaacatttatgaatggaggtcaactatattgggacccccaggatctgtct

SEQ ID NO: 456016 - DNA, 100 bp, Homo sapiens
aggactatacacatctacaagtgttcaggcatcacagagcattggaggttccagtgctttcggatttgttctgctaagccaatattctctagaatgagca

SEQ ID NO: 456017 - DNA, 51 bp, Homo sapiens
aagacctgtggaagactcaacagacccggaggccccacagtatcaaatatc

SEQ ID NO: 456018 - DNA, 100 bp, Homo sapiens
ttccgtgcccgctggcattgctaaacacgtggaaagaatcaatttgggatacgattcattagttcagtcccaagccagggagctctcccttcaacggcag

SEQ ID NO: 456019 - DNA, 107 bp, Homo sapiens
aaggaataacaaggcttatctctaggatccataaggcatctccactgaatttacctcaagctagaaacaaatttagtttggaagaaagaaaggagagaaggaaggag

SEQ ID NO: 456020 - DNA, 100 bp, Homo sapiens
acctggagttgagacagacgactgggatggaccagcatatagcactttctacattgtgggtttaatattatcaatgcagataccttttgtgggattccag

SEQ ID NO: 456021 - DNA, 95 bp, Homo sapiens
gctgggattggagattccacccaaacttgctggtcactgggaggtcatcatcagatttgaaatatttaaagtggatacaaaactatttcagcaat

SEQ ID NO: 456022 - DNA, 75 bp, Homo sapiens
cggggaggcagcgcgggatcccagcctcaggcgtgcgcggacggtgtgcggaatgattgtctgtaaccaggtgat

SEQ ID NO: 456023 - DNA, 74 bp, Homo sapiens
tcaagacgcggcccaaggtgtcccttggcggcgcgagcaggaagatctcccttgagtttagaaatctggctgag

SEQ ID NO: 456024 - DNA, 100 bp, Homo sapiens
cctcaagttgatactcctccaacactggaaagcatactaaatgagaccagcatctcagacatgtcgaaaaagatgttttgatccctaaaataatgagaga

SEQ ID NO: 456025 - DNA, 50 bp, Homo sapiens
gcaagtgcagatagatggccttctgttcgggggtcttgtctggattttgg

SEQ ID NO: 456026 - DNA, 90 bp, Homo sapiens
tatggaacaggaggatgatataatcattcaagaaaccaatgataggctggtcttcaaagcaattcaagtgtttatgaacctcagttgcag

SEQ ID NO: 456027 - DNA, 100 bp, Homo sapiens
agccttcccagtagctgggaccacagacagcaactctggaaagtggcttctaactcggcgcattttcttagtggatgcagtaagtggacgagaaaatgac

SEQ ID NO: 456028 - DNA, 75 bp, Homo sapiens
ctcgctctcgttcccgttccaaatctgcagaaaggacttggatgttgtgggtgatggtatgcagtgtcctccttc

SEQ ID NO: 456029 - DNA, 100 bp, Homo sapiens
atcacatcctgcccaagtgcaagctggccagggacctcaaggaagcttatgacaggatgaagcctgctgggagcgtgaatgacatggccctggatgcctt

SEQ ID NO: 456030 - DNA, 101 bp, Homo sapiens
ccatgttttataagtattgacattacacagtgttaacaatgcatccacagaggaatgaatctgaagtctgctgcagtaaaacacagaaggctttaaaatgt

SEQ ID NO: 456031 - DNA, 74 bp, Homo sapiens
ggaaatagtaaccctgccaaatacatcagcttgtaggagacagagtggaaagaggcaaaacctgatgaattaat

SEQ ID NO: 456032 - DNA, 95 bp, Homo sapiens
tccactcccggctgttcccccggaggatcagttcgacagcttagacaagcatacacaatggggaattgacttcttggaaagatatgccaaatttg

SEQ ID NO: 456033 - DNA, 100 bp, Homo sapiens
gagccggagctgggcgcggattcgccgaggcaccgaggcactcagaggagtgtgatccgccttattatgcagtacttgaaggagaacagtttacatcggg

SEQ ID NO: 456034 - DNA, 88 bp, Homo sapiens
cgtgatggggcagcccaccgagggtgcattgatggccctggcgatgaagagagcagcacttgaggcatgtcacaagggctggggcgtc

SEQ ID NO: 456035 - DNA, 74 bp, Homo sapiens
ccaccgtcaggcataaattgattattcctcgcccacatctgtgccaggttggttgtggagctggaaatagtgtg

SEQ ID NO: 456036 - DNA, 83 bp, Homo sapiens
cagtgctccaagcccggtgtcatgttaaataggattgcgaatcaggtggccattcagcggaagaagcagtttgtggagcgagc

SEQ ID NO: 456037 - DNA, 50 bp, Homo sapiens
aagttggatgcatattcaaaaaaactggggtacagctctgccgggggggg

SEQ ID NO: 456038 - DNA, 100 bp, Homo sapiens
aaatactggtttcacactccaccaagcatcccattacagatagaagaggcacgtgggaaaaagcgccagataggctggttcccagctaattatgtaaagc

SEQ ID NO: 456039 - DNA, 75 bp, Homo sapiens
aaggattccaagtaactcttatttgaaacctgctaatattttagttatgggtgaaggtcctgagcgaggaagagt

SEQ ID NO: 456040 - DNA, 98 bp, Homo sapiens
cctaaatttacctggaattagatcatgcaaaatggcaactcttaaggaaaaactcattgcaccagttgcggaagaagaggcaacagttccaaacaata

SEQ ID NO: 456041 - DNA, 97 bp, Homo sapiens
ccgagtccggaccggagactttggggcctaactagtcagcagataagcagagagccctagaagaaaccaaagcctacaccacccaatccttagcaag

SEQ ID NO: 456042 - DNA, 75 bp, Homo sapiens
ggaggaggttcgaagctgagtatgtgacaggttgtttacattcagagctctatcaataagaggaatacatattac

SEQ ID NO: 456043 - DNA, 99 bp, Homo sapiens
tttggagaaagccagcctaatccaaagactgtggaacttttaagtggagtggtggatcagaccaaagatgggagtctcgctgtgtcacccaggctggag

SEQ ID NO: 456044 - DNA, 90 bp, Homo sapiens
cggcgaggagcgcggagccggagctggacgccgccgccgccaccgccacctgcgcggcagtcatcaagaaagcataacccctactgtaga

SEQ ID NO: 456045 - DNA, 100 bp, Homo sapiens
tctccatctggttcgaagtctcagcggtattctggtgcttatggtgcctcaggtaaaagagaacctgctttcatgcaagatgctgctgcactgcaaacgg

SEQ ID NO: 456046 - DNA, 80 bp, Homo sapiens
ctctcagggggcatagacttcaaccagcctttggtcatcaccagggtgacaaccaaagccaagcaactgaaggattcagt

SEQ ID NO: 456047 - DNA, 99 bp, Homo sapiens
gctgtttggaaagacccaggagaagccgcccaaagaactggtttatcttgcagattatggactttcctacagatattgtcccaatgggaaccacaaaca

SEQ ID NO: 456048 - DNA, 109 bp, Homo sapiens
agaaaatcatccatctaaagcaccagtaaaatatggtgaactcattgtcttaggacgctctgctgttgcccgtattcaggagttcttcagacggagaaaagaaaggaaa

SEQ ID NO: 456049 - DNA, 90 bp, Homo sapiens
gatttctgcatttccatctgaggaagggttttcactcattggtagcaaggactggttgaagattgtaagacgcgtggattgtctgttgtt

SEQ ID NO: 456050 - DNA, 50 bp, Homo sapiens
gcctcccaagtagctgagattacaggtgcacaccaccacgcccagctaat

SEQ ID NO: 456051 - DNA, 100 bp, Homo sapiens
caaggatgaccaggaatgggaaagccccagggatttatttaatggggatgtgttcaaggcaagagcgaattcagaaggatatcgacgtcgtgatccagaa

SEQ ID NO: 456052 - DNA, 75 bp, Homo sapiens
tgggcaccgagagggactacgtgggcaccttgcgcttcttgcagtcgatctgcgagtgaagagggacgagggaaa

SEQ ID NO: 456053 - DNA, 100 bp, Homo sapiens
gatttcttcaatgattaccaccttcaaaatggagatgttgttgggcagcattcatttcctggcaggtgttccaccaggtcctgcctatgggaagctgaaa

SEQ ID NO: 456054 - DNA, 100 bp, Homo sapiens
tctggaagcggctcaatgaccatggcaagaactggcgtcacgtttacaaggagaactacgatgacccgcacaaaacccctgcctccccagttgtccacat

SEQ ID NO: 456055 - DNA, 100 bp, Homo sapiens
agcctgcacgcgctggctccgggtgacagccgcgcgcctcggccagagccccacagtcttcgttataacctcacggtgctgtcctgggatggatctgtgc

SEQ ID NO: 456056 - DNA, 51 bp, Homo sapiens
gtgcatgcgtcgtcggcctctgggcagcagaatcttgctgtgtcacccagg

SEQ ID NO: 456057 - DNA, 97 bp, Homo sapiens
ctgcccacatggttggttcagcccagcacaggaaaaccagtagattcccagacatcgcgaagtgaatctgaaattgtgccaaaagttgctaaaatga

SEQ ID NO: 456058 - DNA, 82 bp, Homo sapiens
ggcctcctggcatctgccggctgctccgcaccccggggtcccaggaagggcggcccaggtgagaagccctaccactgcaact

SEQ ID NO: 456059 - DNA, 100 bp, Homo sapiens
aggggacgtcacatgtcattataccttcacccagcatttcatccctcgtcgaaaggattggattggcatctttagaggtctcctatggacagaagtgcgg

SEQ ID NO: 456060 - DNA, 75 bp, Homo sapiens
atttattggtgccaatcccctgggtactccaaagattcaggtttactcacgtcatccagcagagaatggaaagtc

SEQ ID NO: 456061 - DNA, 100 bp, Homo sapiens
gggcttctctgaggcggcgagagatggtcaggtctggagctcgaccgggccagcttggatttacactgggcaacgtggttggaatgtatctggctcagaa

SEQ ID NO: 456062 - DNA, 109 bp, Homo sapiens
gagcgcagcgccgagcgcggcccgggcgccatcgagccttggcggcggacgtgcaggtgagaagccctaccactgcaactgggacggctgcggctggaagtttgcgcgc

SEQ ID NO: 456063 - DNA, 99 bp, Homo sapiens
agaacccggcccggaccgtgtcgccgacgccaaaggggacagcgagtcggaggaggacgaggacttggaaggaaccctaaggactctgcaatatgaata

SEQ ID NO: 456064 - DNA, 90 bp, Homo sapiens
gccagccgcaccatgccgctcctaagcctgcacagccgcggcggcagcagcagtgagagctgtttgcagacaaggtcccaaagacagcag

SEQ ID NO: 456065 - DNA, 75 bp, Homo sapiens
cggtctacaccgacttcgacggtgacttaagagattaaaattaatttggttgctgttggttctgaacaaataatg

SEQ ID NO: 456066 - DNA, 101 bp, Homo sapiens
ccaggtttgcagcccaggctgcacatcaggggactgcctcgctttcagtgaaaggttacaatgacaagcagccaattttactaaagaagattattgagaaa

SEQ ID NO: 456067 - DNA, 74 bp, Homo sapiens
gaaagacaaggatgaccaggaatgggaaagccccaggtgctgaccttaaggaaagagccaaaatgagttccagt

SEQ ID NO: 456068 - DNA, 100 bp, Homo sapiens
agccattcagggcctttgcctttgttacatttgcagatgatcaggaatcagagatcattgatttcttcctgggggcctctctcaaggatgaggttttgaa

SEQ ID NO: 456069 - DNA, 100 bp, Homo sapiens
gcatttgcaagatgaagattacgagataatgcagtttgccatccagcaaagtctgctggagtccagcaggagccagcggagaccctgttaactactacgt

SEQ ID NO: 456070 - DNA, 50 bp, Homo sapiens
agtgcgtcaatcagagcgtcctgtgcgggacccagaccccaggaggcctc

SEQ ID NO: 456071 - DNA, 100 bp, Homo sapiens
ctgctcagagcctatcagatcctcaacagctacaagccacaggcaaggaatacaaacagaagcttgcacgagtaacccaggtccgcaaggaactgaaatc

SEQ ID NO: 456072 - DNA, 75 bp, Homo sapiens
gcgtgcgcctgggggcaccgctgccgttccgagtgtgcaccggcacagacatgaagctgcggctccctgccagtc

SEQ ID NO: 456073 - DNA, 83 bp, Homo sapiens
agtgtaccagcagggcgttggctatgtgcccatcacaggtgacttaagagattaaaattaatttggttgctgttggttctgaa

SEQ ID NO: 456074 - DNA, 76 bp, Homo sapiens
gccccgtgaagcccagttcccctgccagcaagcctgatggagagaagaagaaggaggttcctgctgtgccagaaac

SEQ ID NO: 456075 - DNA, 80 bp, Homo sapiens
tgtttccacgtgcggtgctcgtcgggagtgatcacctaccctacaggagaataaaggcagccccgttgatgactgaaaat

SEQ ID NO: 456076 - DNA, 100 bp, Homo sapiens
caccaagttggacgctatgctggaagaatttaagaaagaacaaggcaaaggcaatctgcatgtaacatcaccagaagatgcagaatgccgcagaaccaag

SEQ ID NO: 456077 - DNA, 50 bp, Homo sapiens
gccacctgttcctcagttccaaccacagatcgtcagtatttaaacagatc

SEQ ID NO: 456078 - DNA, 100 bp, Homo sapiens
accaaccattgtgtgctgtgaggtaaaggagcatctttccttgaagaagtacattattgacattgtggttgaaagtacagctccagcagaagctttgaaa

SEQ ID NO: 456079 - DNA, 83 bp, Homo sapiens
ttcagaagaccgaagcgttcgtatctggaaggtaactaggatttctacctcaaccgcgagacctatgcaaggacggtgtggac

SEQ ID NO: 456080 - DNA, 98 bp, Homo sapiens
ctcctccaggcgctgcccagccccttgtcagccagggctgaacccccgcagattgtggtggtgccatgcagcaagaatcagagagatgcagagttaga

SEQ ID NO: 456081 - DNA, 100 bp, Homo sapiens
ggccatctgcacaaagctaagcagctgggcctgaagaacatcatggcgctgcggggagaccctgcacttgatggaccagctggcaccacccagatcaata

SEQ ID NO: 456082 - DNA, 60 bp, Homo sapiens
gaagcacaatacaaagaagtaaaagtggtggctaatgtatgggcactaggaaaagacttc

SEQ ID NO: 456083 - DNA, 90 bp, Homo sapiens
gcctgggagttcgaggctgcggtgagctgtgattgcaccactgcactccagcctgggcggacgccgcgggcatggactattcgtacgacg

SEQ ID NO: 456084 - DNA, 100 bp, Homo sapiens
caggtgagaggcggatctacagacatagcttttcatgcaacacccaacacttataagcggaagaacacagaaacagctctagacaacaaaccttgtggac

SEQ ID NO: 456085 - DNA, 82 bp, Homo sapiens
gtggttatcgcaatcagttgtattcaaggtataatattgagcccagcctatattgcccgtttttctctcttggagcatgcat

SEQ ID NO: 456086 - DNA, 90 bp, Homo sapiens
ggcccagatgcgcgcgatgctggaccagttgatgggcacctcccgggacgctgcagatccctagtgtgaagggcttcgattttgctaagc

SEQ ID NO: 456087 - DNA, 100 bp, Homo sapiens
cccggaccccccggatctgacggggcgggacctggcgccaccttgcagattttaggtgatgggcaagtcagaaagtcagatggatataactgatatcaac

SEQ ID NO: 456088 - DNA, 100 bp, Homo sapiens
aagcaggaggctaagaaagtggtgaatcccctgtttgagaaaaggcctaagaattttggcattggcagtagcaggtttgttggcagatgctcgttcttta

SEQ ID NO: 456089 - DNA, 88 bp, Homo sapiens
tccctgaaggcaaagaatccccaggataagatcctcttcaccaaggctgaggacaagagcgagcccagggcgtggtgctgaaagtgct

SEQ ID NO: 456090 - DNA, 100 bp, Homo sapiens
atccagaacgagatcagctccctcaaaggtttccacttgagcggcacagtgacagaacctgcaatacaatcggagccagaaactgtttgcaacgtggcca

SEQ ID NO: 456091 - DNA, 100 bp, Homo sapiens
ccatgcttataaacaagtggatccgtctattacgtttttagaacttcagccataaaaatgggcagaattttccttgatcatatcggtggtacccgtctgt

SEQ ID NO: 456092 - DNA, 100 bp, Homo sapiens
ttcacactgcagaactgggttctggactttgggcgtcccattgccatggtggcacaagaatggctcaactctccaaatagagagaatttctatcagttgc

SEQ ID NO: 456093 - DNA, 83 bp, Homo sapiens
ctagagcactgtgtgtctccccggacgcgagcccgctcccctgacgtgagtgcatctccatccacgttggccaggctggtgtc

SEQ ID NO: 456094 - DNA, 90 bp, Homo sapiens
gccttgggccagagttccaggggctctgggagtggctgccagactccttctctccgcaccgtggggaacattgtcacgggcacagatgag

SEQ ID NO: 456095 - DNA, 89 bp, Homo sapiens
tggagccgccgccggccacccggggagagtcccgtattctcagagtaaaagttgtttctggaattgatctcgccaaaaaggacatcttt

SEQ ID NO: 456096 - DNA, 100 bp, Homo sapiens
cctcttctgcaaggtccggctgctggatggaggggattttgtcagcttgtcgtcaaggtgaacttcacggtagaccagatccgcgccatcatggacaaga

SEQ ID NO: 456097 - DNA, 50 bp, Homo sapiens
gcggccggacagcaaggacatttccaagagtgagctgagtcgacagaaac

SEQ ID NO: 456098 - DNA, 100 bp, Homo sapiens
ccagagggacacgctggtgcatctgtttgccggagggtactgtgagaatagagatgtttcgaaatatgcagaatgcagaaatcatcagaaaaatgactga

SEQ ID NO: 456099 - DNA, 50 bp, Homo sapiens
catggagttcacagaagagtcgaggagatgatccagatcctgatgatgga

SEQ ID NO: 456100 - DNA, 100 bp, Homo sapiens
ggctggagcctctccagcctcccgcgaagggaatgacagaggaagaggaagacaaacttctggcactgaaagacttcatgatgaaatctaataaagcaaa

SEQ ID NO: 456101 - DNA, 98 bp, Homo sapiens
attttgataatgtcagtgtggtatctctacagcagtatcctggtgtgaaccagctatcctccagtataggaggattgagtcttcagagttctccacaa

SEQ ID NO: 456102 - DNA, 94 bp, Homo sapiens
ccatgagtctgacttccagttccagcgtacgaggaattgagtgatctacagcgcgatccacctgctcactgttcagctggacctgtgggagatg

SEQ ID NO: 456103 - DNA, 82 bp, Homo sapiens
tctgagggccccggcccctggatgcacagccccggcgctgggatccaggtccggcacgatcaagacccaggctacatgcatc

SEQ ID NO: 456104 - DNA, 83 bp, Homo sapiens
gatctacggggctgacatcagcggctctttgtatgatgacgtggtacagaagttggtcctgccctttgggcgactgaactacc

SEQ ID NO: 456105 - DNA, 100 bp, Homo sapiens
agggggtgtggtctcagctcacacagctgacatagcccagagatacaggataagcaaatacccaaccctcaaattgtttcgtaatgggatgatgatgaag

SEQ ID NO: 456106 - DNA, 74 bp, Homo sapiens
aagagggaagacacgcggaaacagttcagatattttggatggcagtagtagcagcagtggcttatcctcagacc

SEQ ID NO: 456107 - DNA, 75 bp, Homo sapiens
cgggcagcgtctatatcaccttgaagaagtgaactgtggctgcaccatctgtcttcatcttcccgccatctgatg

SEQ ID NO: 456108 - DNA, 75 bp, Homo sapiens
ccgccccccaccgccgccccctccggcgtgttcatgcccccgggggatgtttcagcagcccctgagaaggaagag

SEQ ID NO: 456109 - DNA, 100 bp, Homo sapiens
gaaaaataaaaagaaattgctgcagattttactttatgtgagaaaatctacaatttcttcgagacactcatataaagccaagctacatcagtgatgtggg

SEQ ID NO: 456110 - DNA, 80 bp, Homo sapiens
gtcggcaagaagatcggctgcggcaacttcggggagctccgcctagaggctgggaggcggcagaatgcagccagaggagg

SEQ ID NO: 456111 - DNA, 100 bp, Homo sapiens
gcctggccagaatctacagctaccagatggcacttacacccgtgttcctctgtgacgagggtgcaggtatctctggggactacatcgatcgcgtggacga

SEQ ID NO: 456112 - DNA, 58 bp, Homo sapiens
ctttggatgaaatcaagaagcgttctgaaagtgtgaagcaaaggaatgatgtgtttta

SEQ ID NO: 456113 - DNA, 97 bp, Homo sapiens
gaaatctgggaaggccataatatagctgattatattgatccagccatcatgaagacctgcgaccgcatcaagcagtccgccagcggaaccaagcggc

SEQ ID NO: 456114 - DNA, 75 bp, Homo sapiens
gatgaggtgaaagactatgtggccaaggagaccagcataaacactttggggactgagaggataagccatatcatt

SEQ ID NO: 456115 - DNA, 95 bp, Homo sapiens
ccaactgaagagtactttgttacaggatctgccgaaggcaatataaaggatcttcctgtgtcacccaggctgaagtgcagtggtgagatcatagc

SEQ ID NO: 456116 - DNA, 50 bp, Homo sapiens
ggacatcctgaagccaatcctgatgattctttgggattgggacttaaaac

SEQ ID NO: 456117 - DNA, 88 bp, Homo sapiens
tgcctgcccagaggccacccagcctcctagacaggggtccccacggagtctggaccatggaggagcgaggtctggcccccaagttcga

SEQ ID NO: 456118 - DNA, 100 bp, Homo sapiens
aagcgattcgccacgtcaacctctgaagaaggtgctgggattacaagcatgagccaccgccgccagatgccttcaattaagttgcagagttctgatggag

SEQ ID NO: 456119 - DNA, 100 bp, Homo sapiens
ctttctcgctgatcgcctaacttctactgacgaagcttggaagttgcagaaggtcctacaacgtgactttaaaaagacagcagaaagcaaaaatgtccca

SEQ ID NO: 456120 - DNA, 99 bp, Homo sapiens
cagaatactacgttcagctaaattaaggatggatagaatgacagaagatgctcttcgcttgaatctgttgaagcggagcttggacccagcagatgagcg

SEQ ID NO: 456121 - DNA, 75 bp, Homo sapiens
attaaggctctccgtacagacggcaccaatatcacatcgggcaaagcggtgggtgtggccgtggccaccggcctg

SEQ ID NO: 456122 - DNA, 75 bp, Homo sapiens
tacgggcaagcgctgttcaaacccatgaaggcacagtcttttgctgagcgcctgcgcctgggaattgcagtgatt

SEQ ID NO: 456123 - DNA, 101 bp, Homo sapiens
cttgcaagggtgaagtgcttcgggtccagaccaaacatttccacatcaagtgtttcacctgcaaagcttgaaattttgacaaacttggcaaatgaagccaa

SEQ ID NO: 456124 - DNA, 74 bp, Homo sapiens
ccaagaggaggacagttcgctacacagcaatgcatcgaggtttgttgataagccggggcccttcgtgggaccct

SEQ ID NO: 456125 - DNA, 73 bp, Homo sapiens
gcgtgcaacatggggcttgagaaagggcgagaaccactgtctctgatcaacgtgcggaagaggaacgtggaat

SEQ ID NO: 456126 - DNA, 75 bp, Homo sapiens
tcttccacctcctccgactgtcagcactgctccacctctgattccaccaccgggcccagattgccttcctgcagg

SEQ ID NO: 456127 - DNA, 85 bp, Homo sapiens
gacgtcaagaaagttcctaaaggtgttcccctgcagtttgacataaacagtgtcggaaaacagaacattaaccaggtggtatttg

SEQ ID NO: 456128 - DNA, 83 bp, Homo sapiens
cttaaaatgcaccctccttccacctggccaggaatcaggaattacatgaacgacagccttcgcaccgacgtcttcgtgcggtt

SEQ ID NO: 456129 - DNA, 101 bp, Homo sapiens
agcggttacaaagaactgaggtggtaaagaagcatatcaaggccgctttgtagttcagaatgtttctgcacagaaagatggagaaaaatctagagtaaaag

SEQ ID NO: 456130 - DNA, 95 bp, Homo sapiens
agtagagacagatgctgtgatattccctctaggattgattataccggaacagagccttccagtccctgtaataaatgtttatctccggatgtgac

SEQ ID NO: 456131 - DNA, 90 bp, Homo sapiens
gctgaaggagcggaacaagaggatccaggaggacaaccggctggagctgcagaagaggcatttcatccttcatgaagccattcaggattt

SEQ ID NO: 456132 - DNA, 100 bp, Homo sapiens
actatggaaaagttgccaaattggaaattatcagttcattgcctagcatagtaaatgacaaatatggaaggaaggtcctattgtacttactaagccccag

SEQ ID NO: 456133 - DNA, 83 bp, Homo sapiens
attgaattgatcggccacatcagctgctagcagaagaaagtcttcccacaaccccattttatttcatattgggaaaacacagg

SEQ ID NO: 456134 - DNA, 75 bp, Homo sapiens
attggatgttccttttaaagtcaaggctggccaaattgatttttcggacgccgcccgatactacattccctgagc

SEQ ID NO: 456135 - DNA, 75 bp, Homo sapiens
cctgtgcagtcctgttggaatttaatccagggcctgaaaacccagaatgaacttgtgtccatcccagagatcact

SEQ ID NO: 456136 - DNA, 100 bp, Homo sapiens
gtcaaaaggtcaactaaaagcattgtttctagaacatgaggaaagaccacagcaagattctttcattcgtctcctcctagcctgggggaccaggctcgaa

SEQ ID NO: 456137 - DNA, 90 bp, Homo sapiens
cagcaggagctttttgcttagcactgaaaattctggataatggtgaatggatgctcagtgacctccaggagtctgtggccagctctcgcc

SEQ ID NO: 456138 - DNA, 90 bp, Homo sapiens
agagactgcaacattctggcttgggttccatccttatatgaaccagttcctgatgatgatgaggtggataagattgtggaccagctgcag

SEQ ID NO: 456139 - DNA, 90 bp, Homo sapiens
gttaaaacgggtcagttggcagccatcaaagttatggatgtcactgagggggacttgatctcatcttcatgccaggccttgggtttgaca

SEQ ID NO: 456140 - DNA, 115 bp, Homo sapiens
agcagtgtcaagtgccagccctcccgcgtccaccaccgcagcgtcaaggagcttgatcctggatagtgtttgtatgatgtgcacacgtctctgcaaatgcttgtttgaagattgg

SEQ ID NO: 456141 - DNA, 100 bp, Homo sapiens
tgacgactgacagctgctgccaccgccagcctctgtcccttgcccaggcctgtcacacggctgcctctcagcagggatagctgggagtatggccaccctg

SEQ ID NO: 456142 - DNA, 75 bp, Homo sapiens
cgcgccgacggctgctcaaacatcaggctgctggaaacgcgttctgccaggctgcacagctgcacctgcagctcc

SEQ ID NO: 456143 - DNA, 80 bp, Homo sapiens
tggccccgggcaacgatcggaactcggacacgcaagagcctcctgatctagcagccaagactccccctgacctttggcca

SEQ ID NO: 456144 - DNA, 100 bp, Homo sapiens
cattgatgtcaacactgtcgctaatgaagtatacaagtataattttcctcacacacagttacttgccaagacgattgaatccaaaagaaactcttccttc

SEQ ID NO: 456145 - DNA, 100 bp, Homo sapiens
gccaagatggtgctgtcccagagacaacgagatgaactgagaaccaggtgcatcagcgcattgcggagctgaggaaagcaggtctgtggtcccagaggcg

SEQ ID NO: 456146 - DNA, 100 bp, Homo sapiens
caggaaaccacccacgtccccttcgagtctggctgtccatcagatcatcaccatcaccgtctccctcatcatggtcatagctgctctcatcacaactctt

SEQ ID NO: 456147 - DNA, 100 bp, Homo sapiens
gaagtatctcgccctggctgtgaagaacagcaaatcaatctctgaggttgggtttacccagggttgatgataaccgctggccttattcattggattttaa

SEQ ID NO: 456148 - DNA, 75 bp, Homo sapiens
gaacttccttaaacttgcaaataatggcactgttctcagctttcaccaacaatcaccagtggtttacacaacatt

SEQ ID NO: 456149 - DNA, 75 bp, Homo sapiens
caagatcaccacggacgagatgatcaaacgcctgaaggttcttgggtgtctctggggagtccctgggccagacct

SEQ ID NO: 456150 - DNA, 98 bp, Homo sapiens
caagatgcagttttttgatgctgaggagctcctggtcgatgaagaggatgatgtttttggtgaagacaaatttacatgtattggagaccagaccagaa

SEQ ID NO: 456151 - DNA, 100 bp, Homo sapiens
ggaggaggctgagcgagagcaggaagaggagccgcctcaggtgtggacagctttggagtttaacccttctgccaatccagaggcaagcacaatattccag

SEQ ID NO: 456152 - DNA, 95 bp, Homo sapiens
tcaatttttccgtattctactacgaaattcttaattcccctgaccgtgcctgcaggttggaaagggcaaagaaattacaagaacagcgagaaaag

SEQ ID NO: 456153 - DNA, 82 bp, Homo sapiens
tcaatctccttttccttggctacccaatgggagaccatgaccgagaatgaggaggtgacatcaaagccaagtagttctcaaa

SEQ ID NO: 456154 - DNA, 100 bp, Homo sapiens
cggcggctgcggcccaatatagctcttagaacaagctctggtgattgaggaacagctgcgccgggctgcttacttgaacatgtcagaagacccttctcac

SEQ ID NO: 456155 - DNA, 75 bp, Homo sapiens
aatgtggaggtgacgatgtctgtgcacgatgaggagggcaagctcttggaggatgtcctggaacaggtggaggcc

SEQ ID NO: 456156 - DNA, 88 bp, Homo sapiens
agattcgcagtggtcgcttcttctccttggtattgacctgatggacatggcttcggacatcctgcagcccaaaggagatgatgtggcc

SEQ ID NO: 456157 - DNA, 50 bp, Homo sapiens
tgatgaagagggcgtccactggaggtacactgaggaggggacggctccgt

SEQ ID NO: 456158 - DNA, 80 bp, Homo sapiens
ttctgaggtgaagacagatcatgggactgataaattgggtgtatgtacaaagacttttgaagaggtgtgggagcacacat

SEQ ID NO: 456159 - DNA, 82 bp, Homo sapiens
cccaaagtctcgcttctgccgaggtgtccctgcttcctgggtctgcaggtccagccggctggcaccctccatgtacccaggg

SEQ ID NO: 456160 - DNA, 98 bp, Homo sapiens
tcagccagcaggcccctgccattatctgtgacttctatctgtggctcattggaaggaaacccagggtactcctgccatgcgtcgctcccttgtccccc

SEQ ID NO: 456161 - DNA, 103 bp, Homo sapiens
gaacacaaatgcaggagggagaggtgccaagaagcagcggtacacgaattgaatgatctggcacgggaccctccagcacagtgttcagcaggtcctgttggag

SEQ ID NO: 456162 - DNA, 96 bp, Homo sapiens
gttacttttctgcctcttaacaagttagatgtcagggatacagcctatcctgaaaccaatgtgtgtgtgtgcaggccacagcagcatgcccttggt

SEQ ID NO: 456163 - DNA, 100 bp, Homo sapiens
gccgcgggcggcgcggcccagctcgttccaggagggtgtgaagacagagaatgaccacatcaacctgaaggtggccgggcaggacggctccgtggtgcag

SEQ ID NO: 456164 - DNA, 82 bp, Homo sapiens
tggaagaggacgggctttaggctggaagcgccttagaggagccatttttccagatggaagaactggagcaaggcctgttgat

SEQ ID NO: 456165 - DNA, 101 bp, Homo sapiens
tgcttcctctgctcgcggttagcccgtcagtccctgctctgtgcgcgcctccatctgggccatggatggcttttcttggacagtgacttactttgattctt

SEQ ID NO: 456166 - DNA, 75 bp, Homo sapiens
agaggtttagtgccctcctgagtgactgcgtcaggcatctcaatcatggccgaagaacagttgagaattgttgaa

SEQ ID NO: 456167 - DNA, 100 bp, Homo sapiens
ccagcagagcttccaggacatcaagcccatgcgggaccagatcatccgcgtgaagcggaaatactcttaattctaaggaaaacctggaagcacaatggga

SEQ ID NO: 456168 - DNA, 85 bp, Homo sapiens
tttataccctgggccacctccacgactcataccccacagaccactatcacctcgatcagacattttgctgtcagctggaagagct

SEQ ID NO: 456169 - DNA, 100 bp, Homo sapiens
cccaagcacaattccaggaagggacagagcgggatgccaccagcttgtccaaagggaagttccaggagctcctggtgggcatcgttgtggagaatgacgc

SEQ ID NO: 456170 - DNA, 71 bp, Homo sapiens
gagctgggtggtgtgggcctttgcaacacccaggatgaagatttgataaagtggaaggcactgtttgagga

SEQ ID NO: 456171 - DNA, 75 bp, Homo sapiens
tcctgtacagcctgcagaactgagagggctgaacccccctcatcgtgtcaagtcaatctccatgacaactttcac

SEQ ID NO: 456172 - DNA, 75 bp, Homo sapiens
ccttcgagagctaccgcgccagacagtaattcgccaaaatgacgaacacaaagggaaagaggagaggcacccgat

SEQ ID NO: 456173 - DNA, 75 bp, Homo sapiens
caggaggccaggggtgtcgccatgtgggatgaagctctcttgactatgagtaaaggagaaaaggctcgactggag

SEQ ID NO: 456174 - DNA, 96 bp, Homo sapiens
aagtgactcaaattttcaagtgccaaacggaggaatacctcgtatgcaacctcaggcttcagccaatcggctggagctggaagcggcgcagaagtt

SEQ ID NO: 456175 - DNA, 50 bp, Homo sapiens
attctaaaaccatgacctgtcctcttagcaatgcataccacgagttagca

SEQ ID NO: 456176 - DNA, 100 bp, Homo sapiens
gaatttgctagtaacgtcatggaggatgaacgacaggttttgatgatgatggttcagaatttcatgaacatatatttctggagaaacacctggagagctt

SEQ ID NO: 456177 - DNA, 100 bp, Homo sapiens
attgccggtctgggagttgggggcaaggagaagatcctggtttctctggaaacccccctggtaagtgtggaggaggcgggacactctgacccaagacgaa

SEQ ID NO: 456178 - DNA, 75 bp, Homo sapiens
tcgacctgcagggagcagaggggacagaggcaccaaggacctccaagacaggtcttgggcgtctttggtactggc

SEQ ID NO: 456179 - DNA, 82 bp, Homo sapiens
agaaccaggaccttccaccaatattcctgaaaatgacctttccaaagtgaaactgatgagatttgatgatccactgttgggg

SEQ ID NO: 456180 - DNA, 91 bp, Homo sapiens
ctatgaccacgcacatgtaaagccccttctgcaaaaggttttaaaatcaaagatgggaaaatcggagaaaattgcccttccccatggccag

SEQ ID NO: 456181 - DNA, 75 bp, Homo sapiens
aaaattcagggcttcaaatataatgccatcttcaaggaaaaggctccaagtagctcctctaactgtcctccatct

SEQ ID NO: 456182 - DNA, 75 bp, Homo sapiens
tgctgccgccccccactccgcctccgggagagggagtgaactactttatgtccaagggtatcctggatgattcgc

SEQ ID NO: 456183 - DNA, 75 bp, Homo sapiens
agcaatccacaaagccaattccattaccacagtcaacacctggcgagacacagcattgttggttttgccatgtac

SEQ ID NO: 456184 - DNA, 100 bp, Homo sapiens
gaaaaattcaagaagttgaaaaacgcttttcacgtcacctggagagatgcacaggattaaagcaaggagagccaatcatgactggcaaaacacagaccag

SEQ ID NO: 456185 - DNA, 80 bp, Homo sapiens
cgctgctcaagttccagatttggttggtcaaagaaaaagtgatgtatgaaaaagaggcaaaacaacaagaagaaaagatt

SEQ ID NO: 456186 - DNA, 100 bp, Homo sapiens
aaattcaggaaggactattctcattaaggtatgtctgattgacctgggctgcttccgagaaattgatgagctaataaaaaaggaaaccaaaggcaaaggt

SEQ ID NO: 456187 - DNA, 90 bp, Homo sapiens
tgtctggcaggaaaggagggatcctgggcggtggatccggacccctgcccctgtctaatctgctaagatgcagccgctctctgctccctg

SEQ ID NO: 456188 - DNA, 75 bp, Homo sapiens
ttcagcaatatccccacataccttctcaagtttgaaggatgacctctaggaagaaagtgttgctgaaggttatca

SEQ ID NO: 456189 - DNA, 99 bp, Homo sapiens
ctcaaagtgtacaacaaggatcctgcacatgcgtttaatcacacaccaaaaactatgaatggagacatgaggaatgagaagactttgggacatttcatg

SEQ ID NO: 456190 - DNA, 74 bp, Homo sapiens
gattggtaactcccatgtgcattctactgacgtttatgggaaaaacagatggagactattacaccctggatgac

SEQ ID NO: 456191 - DNA, 75 bp, Homo sapiens
cctggcggagctccacgacgagctggaaaaggattatattccatcacaacaagatattctgcttgccagaagacc

SEQ ID NO: 456192 - DNA, 82 bp, Homo sapiens
acaataagagcagaggatggaacacttcagtgcattcaagcacatggattaattgatgtatgttgagtttatggagctgcct

SEQ ID NO: 456193 - DNA, 96 bp, Homo sapiens
gttgaacagaacgcggctcccagccacaccaagttcagcaggatcctaaggcctttgtagtccttcagccactgtgggccctgcctctgcctgttc

SEQ ID NO: 456194 - DNA, 100 bp, Homo sapiens
gtcctcaactttctgggcgttcatgatcctggccagcctgctcatcgcctactgcagtgaaatgacaatggatgctctgttggctcgattgaaacttctg

SEQ ID NO: 456195 - DNA, 75 bp, Homo sapiens
cagatgaaaaagtgtgacttggcagctggcaaagatgccttttgatgccaacaaactgtattgcagtgaagtgct

SEQ ID NO: 456196 - DNA, 82 bp, Homo sapiens
gtacccgccgccgccgttggctggaggaaaacgaagccccctcctgtattgacagctgggaattgtggagtccaccgtcctc

SEQ ID NO: 456197 - DNA, 83 bp, Homo sapiens
tgctttccactcggctcctgtcgtccgttctctcaggctcccgttcaggttttgggatttgagattgacgcggtgaactctgt

SEQ ID NO: 456198 - DNA, 82 bp, Homo sapiens
cgagggtggccctaggggcagcgagcaagacagcaagcaggatgccggctccaggagcagcagtggaggtcgggaacgcctc

SEQ ID NO: 456199 - DNA, 100 bp, Homo sapiens
cgccgccgcctgaggaggcgagctagccgggagttacaccgccaccgccaggaatcccagtcagaagttccagcctgccactgttctctgatgccatgcc

SEQ ID NO: 456200 - DNA, 115 bp, Homo sapiens
cctcaaggtggggttcggggggccaccgaatcgctgtcacgccggcagttacagaatgtctgaaggggacagtgtgggagaatccgtccatgggaaaccttcggtggtgtacaga

SEQ ID NO: 456201 - DNA, 51 bp, Homo sapiens
aggaggcgccggaccggggggatgttttcatcttctgcccctgtggatcag

SEQ ID NO: 456202 - DNA, 83 bp, Homo sapiens
cgagaccgtgaccgagagcgtgaccgagagcgcgaatatcgtcatcgttagaagtttgggatatgagattgaaaatgacgact

SEQ ID NO: 456203 - DNA, 83 bp, Homo sapiens
cagcccgagtgcaaaaagcgcctcaatgaccggattgagatgtggagttacgcagcaaagggtgctgtgccgttcctggtcag

SEQ ID NO: 456204 - DNA, 50 bp, Homo sapiens
gaggccaggcgggagaactaccgcagcagagtgctgatgctgtaaaaaag

SEQ ID NO: 456205 - DNA, 100 bp, Homo sapiens
tatgtgggcgccgtccctcaccgcggcatcaagcaggtccggacccactggctgctggagcttgtcaccaccaggactcagaattcatgattgaagaaat

SEQ ID NO: 456206 - DNA, 100 bp, Homo sapiens
ctggagacccttttggctaaactcatccaaacctgtcaacatgttgaacggttaagaagattgtctaccaaatatagaacagaaaagatatatcccacag

SEQ ID NO: 456207 - DNA, 101 bp, Homo sapiens
ggcatgatttatgattccctggattatgcaaagaaaaatgaacccaaacatagacttgcaagaagcccgggtactatgaagatggggcttttggaattcgc

SEQ ID NO: 456208 - DNA, 90 bp, Homo sapiens
gccttttccgttgccggtgccggcctagcgtcctggaattacttcaatcaatgctgggattacaagcgtgagctaccacacccagcgagg

SEQ ID NO: 456209 - DNA, 104 bp, Homo sapiens
caagcggcggcgtggaagctgtgagcgcccccatcccggaggtctccgccggctcccggtgccggtggtggtgtgcacattgagccccggtatagacagttccc

SEQ ID NO: 456210 - DNA, 100 bp, Homo sapiens
cctcctcccccaggctttaagtctgagttcacaggatgtacagttacccagcacgtgtacctcctcctcctcctattgctcgggctgtagtgccctcgaa

SEQ ID NO: 456211 - DNA, 74 bp, Homo sapiens
aaagtttgtcattaaacccatcgacaagaaggcacctaacgatgccaacgggactgcaaagccgccttttctca

SEQ ID NO: 456212 - DNA, 100 bp, Homo sapiens
gcggggacgctgccgtgcgcgccagagatcccagactgcgtggagcagaaatgcactcggtgatggaaagagagccactattctgaagaacacttggcca

SEQ ID NO: 456213 - DNA, 83 bp, Homo sapiens
ggggaagccgaggcggagaagccgcgcgcgcctcagaagctcccggacgcccaggaatcccttggcaccatgtcctgtgtgca

SEQ ID NO: 456214 - DNA, 82 bp, Homo sapiens
cacctccttggacctcagccccaacggcaagcaacttggtgtccaggactaagcctgtatgtgtcacctgcagtgcccatct

SEQ ID NO: 456215 - DNA, 75 bp, Homo sapiens
ccgccagtgtttccgtcagtacgcgaaggatatcggtttcattaagggctccaaacgaatcctgcggtcccatga

SEQ ID NO: 456216 - DNA, 83 bp, Homo sapiens
gagtttccgatttaaagctgagctgcgaggaaaatggcggcgggagagttgtctgctggttctcagcttgaagaagattctgc

SEQ ID NO: 456217 - DNA, 108 bp, Homo sapiens
ttccttcccctcccttgcatgatggaaacaccatggctgcggcggcccagctctctctgacacagcacagaatgaaaagcacctttgaagaatcgtaagccatgaatg

SEQ ID NO: 456218 - DNA, 101 bp, Homo sapiens
gcatttcatctgctatggccatggtttttctggggaccagaggtaacacggcagcacagctgtccaagatctttaatctcatgaagtacgacagctacagc

SEQ ID NO: 456219 - DNA, 74 bp, Homo sapiens
gtcgcacccaccatgatggaagacgacgggcagccccggactctttccctactgaaggaacagatgctaaggaa

SEQ ID NO: 456220 - DNA, 83 bp, Homo sapiens
gtaagcaccgagaagtctgttccttatcacgtgtgtaaggggaaaaagtgaggaaattaaagttcagccaagtcagttcagag

SEQ ID NO: 456221 - DNA, 101 bp, Homo sapiens
cgcgccgccgcgcagcgccccagccacacgccggcgggcagaagccgcccgctctccggtttgaaggttgcgagaaggccttttcaaggcttgaaaatctc

SEQ ID NO: 456222 - DNA, 97 bp, Homo sapiens
catgggaaaatcatggaagttgattactcagtctctaaaaagctaaggaagccaccattcttcagagggcaatgaaggcacagaaatggaagtacca

SEQ ID NO: 456223 - DNA, 90 bp, Homo sapiens
cagagattgagaatgtccatggatttgtttctcattctcatatttcaccaataaaggttcatgaaccatcgagctccagccaatggccgc

SEQ ID NO: 456224 - DNA, 80 bp, Homo sapiens
ccccagcaagatgcggaggctgcctcggcggagcagaggaaccacacgctgatcatggactaatggctgaaggataaatc

SEQ ID NO: 456225 - DNA, 98 bp, Homo sapiens
ttttggaactgtcaggtacctcaaagcgttatacattggctcttcaaagacgttcacctcatcagagaaatccctgactcctttgcagtggtgtagac

SEQ ID NO: 456226 - DNA, 82 bp, Homo sapiens
ttggttcttggcaggaatatggaagacaggaaagaaccggaggctgaagcaggccaaagaagaagctcaggctgaaattgaa

SEQ ID NO: 456227 - DNA, 98 bp, Homo sapiens
accaaggaagagaagaaggaacggaaacaaagttattttgctcggtttgatgatctgatggccaacattccactgcccgagtacacaaggcgagatgg

SEQ ID NO: 456228 - DNA, 82 bp, Homo sapiens
acggtccagaactggattgaattacttagtggtgtggatgaggtcaccattgtcaacattttgaccaaccgcagcaatgcac

SEQ ID NO: 456229 - DNA, 100 bp, Homo sapiens
cccagcatcatcgcagagatcctgagtgtctaccagaagtgcaaggacaagcaggctgctgctaagctacagcatgctggccatagggattggaaccctg

SEQ ID NO: 456230 - DNA, 75 bp, Homo sapiens
tcatctctcacacagacttttgatggacaggaggagaagttaaggctgcaaggccaaatcacagagggaagcaac

SEQ ID NO: 456231 - DNA, 74 bp, Homo sapiens
gtgctgctgagcttggcctcggcgtcctcggacaatgcagatcttcgtgaagactctgactggtaagaccatca

SEQ ID NO: 456232 - DNA, 100 bp, Homo sapiens
ctgtgggtctggactgatctccatgtcctgttgtggggcttttacagcctttgggtcattgctagaatcgtggatggaagcagattcactgagttcaaag

SEQ ID NO: 456233 - DNA, 75 bp, Homo sapiens
aggcaaagaaaacatcaatgatgagcctgtggatatgagtgctagacggaggtaccattgttggatactggtgac

SEQ ID NO: 456234 - DNA, 90 bp, Homo sapiens
tccctggctccctcattaccgtcgccagcggagcgaacccgagagcgtggagcgggctgggccaggaaagcttagatatgccaacaacag

SEQ ID NO: 456235 - DNA, 100 bp, Homo sapiens
tcggagtgaggaagaggaagaagaggatgaagatgtggatctggcccagagaactgccggtgtggtgagtctccagtatgggaggaagtgtccaactctc

SEQ ID NO: 456236 - DNA, 100 bp, Homo sapiens
aaactgcaaaaccactctgggctggaaatacgtcttggatgtgctggatctgtgtgtggttgttcttcagtcccacaaaaaccagctgcttcccttggct

SEQ ID NO: 456237 - DNA, 98 bp, Homo sapiens
cgcgatgacggctacgaggccggaaccaacccgtgtgcggacaggaacggggggtgcagccacctgtgcttcttcacaccccacgcaacccggtgtgg

SEQ ID NO: 456238 - DNA, 100 bp, Homo sapiens
cgctcacttgtgatgccctgactgagctgctggctaagatcaccaacacagacgtgatacactgcctctaggactgggacagatagccactgagtacctg

SEQ ID NO: 456239 - DNA, 90 bp, Homo sapiens
gacgaccaggacgaagtgctcggcggcatgtgcgtgtgctaagctcaggtctgagcacggtggatcccatgggtgtggctctgaggaaat

SEQ ID NO: 456240 - DNA, 87 bp, Homo sapiens
cactgcctgcgcagctccggccgcctggctccccatactagtcgccgatctgccgacaccccaggccatcgagccccaggccatcgt

SEQ ID NO: 456241 - DNA, 75 bp, Homo sapiens
cttctcgcagtccccgcgcgtggtcatccaggttctgcggggagtgtctccagccctgcctgcaggtgccatccc

SEQ ID NO: 456242 - DNA, 75 bp, Homo sapiens
gtctgcgaggaggaagtcgcctctgtgctcgtgagtccagggatctaagagtaatcaagtcagaggattatatga

SEQ ID NO: 456243 - DNA, 100 bp, Homo sapiens
gaccacatgaaggtgcacagccagggtcctcaccatgtctgtgagctctgcaacaaagcctactggatcgcacaccaagcagtgaaaatagtgtttgact

SEQ ID NO: 456244 - DNA, 73 bp, Homo sapiens
caggagccggcggggacgccatgcgagccaggtacatgtcccagagcaagcacacggaggcccgggagctcat

SEQ ID NO: 456245 - DNA, 96 bp, Homo sapiens
atcaagctgtctaagtccaaagatttttacccagactcggcccagccttctgccatccctgaggcctccaacccagcctccaacccagcctctgat

SEQ ID NO: 456246 - DNA, 90 bp, Homo sapiens
gacagcagccccgagcactgtggccgaggcccacctgctgacatctacctgccaggaaaaccaattctgtgtcctcggaggaccacagcc

SEQ ID NO: 456247 - DNA, 75 bp, Homo sapiens
gaaaaactcatggatgagactacttcagaatcagattatgtttgagaccttcaacaccccggccatgtacgtggc

SEQ ID NO: 456248 - DNA, 100 bp, Homo sapiens
atgaatttaaacttggtaagataactttcatcagaaattcacgtccccttgtcaaaaaggttgaagaggatggagatgaagatgaggaagctgagtcagc

SEQ ID NO: 456249 - DNA, 50 bp, Homo sapiens
cactgacctgcctgagaggttccaggtttgtgaatggggcaggttacttt

SEQ ID NO: 456250 - DNA, 100 bp, Homo sapiens
agtgaggagcctctccgcccggcagccaccccatctgggaagaaggaccgagtgacagttcaagaacgtgaagccgaagcattgaaacagaaggagctgg

SEQ ID NO: 456251 - DNA, 80 bp, Homo sapiens
ttccatctggagtctgtcatgattgccaaccccaatgtccccgcttaccggaaggatggcttcctggccttccaaactag

SEQ ID NO: 456252 - DNA, 101 bp, Homo sapiens
cctgcccgacatggggaaccccgggcccagtcttaggaaaagtcctcagtgctgtgggcagtgcccagctactgatgtcccagaaattccagcagttccgg

SEQ ID NO: 456253 - DNA, 102 bp, Homo sapiens
aatctcaggaatctggtctcattgggttttgtagtgcatccctgagcatgagcacagaatgaagcggcgtttggatgaccaggagtcaccggtgtatgcagc

SEQ ID NO: 456254 - DNA, 82 bp, Homo sapiens
tattgaacagattccacttgtgaaggtcccaacaagcatcagagtgctgtgacctgtttacagttcaacaagaactttgtaa

SEQ ID NO: 456255 - DNA, 89 bp, Homo sapiens
tcaaattcgatatctgaatcaccagcttgtaataataaaagcccaaaaaggtcagtggttgagtggcttttttgactatggatctttct

SEQ ID NO: 456256 - DNA, 100 bp, Homo sapiens
cagctgattacctcagcagatgaaatacatgaaggagacctagtggaagtggttctttcagattgactggggcgactttggggtagaggcagtgtctgag

SEQ ID NO: 456257 - DNA, 95 bp, Homo sapiens
ccgcatggagcctgacgagacgttaagtgggcagaccaacatccacctcagcaaaaacttcttcctgacgaatcgcgccagggagcgctcagaca

SEQ ID NO: 456258 - DNA, 75 bp, Homo sapiens
acttctgctggaaggacaggacgtccgggaacgtggaagacgcaagcacgaggagcggcaggacgagcatggcta

SEQ ID NO: 456259 - DNA, 74 bp, Homo sapiens
cctgaaccggcacctgcacacctggatccaggataacggaggctgggaaaattgcctaagaattatgacccaaa

SEQ ID NO: 456260 - DNA, 98 bp, Homo sapiens
ggaacttgtgattgagcagtttgaagacttgctagttaggattttattactggcagcatgtatatcttttatacatgatcacggatatcatcgggaag

SEQ ID NO: 456261 - DNA, 100 bp, Homo sapiens
gggttctaagtgatgtccaggaaggaggaggaataatatttatggagcatatattatggaacacaccattccacagattttgaagtacaccgaaactggc

SEQ ID NO: 456262 - DNA, 75 bp, Homo sapiens
tgggaggaggaagggacaccgagggaccaaagggcggtatgcctggactgttgcccagtgtaagatctgtgcaag

SEQ ID NO: 456263 - DNA, 75 bp, Homo sapiens
ctttaatacagaaccagcatgcagaggctcgtctgcttgaggaacaacgaagagttcaggtttaccttcatgaaa

SEQ ID NO: 456264 - DNA, 101 bp, Homo sapiens
cccaagaagaccattcagatgggatctttccggatcaatccagatggcagccagtcagtggtggagctgcttaacacagttgaagaaactacaaaagatgt

SEQ ID NO: 456265 - DNA, 100 bp, Homo sapiens
tcaggttacttcttcctcaacaccagcaccgcagatgttgtcaaggtggcctaccaggaggccaggggtgtcgccatgatggagtctcactctgttgccc

SEQ ID NO: 456266 - DNA, 83 bp, Homo sapiens
ccgctcacctgcgctgtgatgcctgcagagctgtggcttaccaggttgggaaggagaaaatgctcaaggtgaagattgtgaag

SEQ ID NO: 456267 - DNA, 106 bp, Homo sapiens
ctgggaggccggccggtgccagcacctttcggcttctgagacggcggcagcagcggcattcaggtgacttcatggtcatgacgattttcttcaatgtgagcaggcg

SEQ ID NO: 456268 - DNA, 90 bp, Homo sapiens
cttgtttttcagcagctttgaggaaaagtataggtagttccaatttgccagcagaatgagtacagaaagagactcagaaacgacatttga

SEQ ID NO: 456269 - DNA, 101 bp, Homo sapiens
ctggacaggatggattgccagggcttcctggcccgaaaggagagcctgattatatgcgtcaggcaggagaagtgacttatgcagatgctcacaagggacgc

SEQ ID NO: 456270 - DNA, 50 bp, Homo sapiens
tgattgttggatatgcataagagttgccaaaacaaaggggatttggtgat

SEQ ID NO: 456271 - DNA, 83 bp, Homo sapiens
gccagatggtgttacctggagcttaaaaagctgcacgcaagtgttaaacttctgatcccctgtttttggagcacagctttcaa

SEQ ID NO: 456272 - DNA, 75 bp, Homo sapiens
caaaaatccagaagtacaagcagtctggaatactcccccagttgcaagaggcgcaggaccgtggaagacttcaac

SEQ ID NO: 456273 - DNA, 50 bp, Homo sapiens
atcatggaatcccttgcatggctctcagtctgttacagaagtctcggttt

SEQ ID NO: 456274 - DNA, 88 bp, Homo sapiens
gaaggcggctttagtggcagcatgaagcgcaccccgactgccgaggaacgagagcgcgaagctaagagccagcccctgggcaacaaag

SEQ ID NO: 456275 - DNA, 74 bp, Homo sapiens
gaattctgtggggctggttctctccaggacatctaccaaggatttgttaaggattccaagtaactcttatttgg

SEQ ID NO: 456276 - DNA, 83 bp, Homo sapiens
atgagcagcctgcccaacttctgcgggatcttcaaccacctcgagcggctgctggacgaaggatccggccccagctgtcgaag

SEQ ID NO: 456277 - DNA, 82 bp, Homo sapiens
tccagcctgcggagcctgtggggcagggtatcaagccagcaaaccagatgcactctccaaattggaacgaggagaagaaact

SEQ ID NO: 456278 - DNA, 75 bp, Homo sapiens
gaggatgagaaggacgacaagcccatccgagactgggctggcttagatgaagatgaagatgcacatgtctgggag

SEQ ID NO: 456279 - DNA, 101 bp, Homo sapiens
cacagtcgggggtgtaggttatggggtgccggtggtggtgtgcacattgagccccggtatagacagttcccccagctgaccagatcccaggtgttccagag

SEQ ID NO: 456280 - DNA, 75 bp, Homo sapiens
tggtgatgggcgtgagcggctcggggaaccatacacactgctgctatggatatgctgggaggacctggtatcgaa

SEQ ID NO: 456281 - DNA, 75 bp, Homo sapiens
tggcatggcggacgaggggaagtcgtacagcgatcatggaagggaagtggttgctgtgtatgttactggtgcttg

SEQ ID NO: 456282 - DNA, 82 bp, Homo sapiens
gaacagggacagcacctcatcccctggatgggggaccacaagatcctcatcgacagtgtaggaagaatgatgatggagacac

SEQ ID NO: 456283 - DNA, 88 bp, Homo sapiens
agaatgtatgaggagaattctcagcctagagcagtcattatggcgaaccttggctgctggatgctggttctctttgtggccacatgga

SEQ ID NO: 456284 - DNA, 82 bp, Homo sapiens
gcgctgttttcgtgatcttcagaccccaggttctttgggatcgcttacacctgagacgaactacagaacagcacgtaccaga

SEQ ID NO: 456285 - DNA, 100 bp, Homo sapiens
aagcaagcatgcagcttactgcttgaaaggtacaccaggggttggaaaaaccacactaggcaaagaacttgcgtcaaaatcaggactgaaatacattaat

SEQ ID NO: 456286 - DNA, 100 bp, Homo sapiens
ctcgactccaaatggttgaaaacagatatacaggtggcacaagaatggctcaactctccaaatagagagaatttctatcagttgcaagtacgaaaatttc

SEQ ID NO: 456287 - DNA, 110 bp, Homo sapiens
cagtcagaaggtgcattcttactgcgatctttttatttgctaccttgggcttaaggagcctgcctatatctactgagcttattgcaggagtgaccaggacactacctcct

SEQ ID NO: 456288 - DNA, 75 bp, Homo sapiens
cgcccgccttccgccgtctcttcgagttcttcgtgctgctcaagctgtgagccgtgagctttgaggcggtgggat

SEQ ID NO: 456289 - DNA, 90 bp, Homo sapiens
ggctggtgggcgatgggcccgtggacatgcgcacctcacacagacatgtcatgctgcccaaggacatagccaagctggtccctaaaaccc

SEQ ID NO: 456290 - DNA, 100 bp, Homo sapiens
ttccaagtgtctataagaacctggttcctaagcctgtaccacctccttccaaggatggtaagcggatgtttggcacctattttcgtgttggtttttatgg

SEQ ID NO: 456291 - DNA, 78 bp, Homo sapiens
ggaggtggtggagtgacctggccccagtgctgcgtccttatcagccgagccgaaccccatgcatcccagctcaaggtg

SEQ ID NO: 456292 - DNA, 80 bp, Homo sapiens
aagaagaggaggaagccatgcgtaggagggacccaataattgcaaaacagctctttagcagcttgttttctggaattttg

SEQ ID NO: 456293 - DNA, 85 bp, Homo sapiens
atatggccattcctggaggccccaaatttgaacctcttgttcgagacatcaacctacatctctggcatctctatcccctatgagg

SEQ ID NO: 456294 - DNA, 100 bp, Homo sapiens
tgtgaatctcaggagagagcagccagagtggatgctgggcagttttatgctaaatataaagaaacaagattgaaggaaaaggaagatgcactgactagaa

SEQ ID NO: 456295 - DNA, 83 bp, Homo sapiens
ccccttccccacgcaaccccagatccatttacactttacagagcagctgatgagccagatccgggagacgcagcagctctgcc

SEQ ID NO: 456296 - DNA, 50 bp, Homo sapiens
gaagacttacccagaatgatgtagcacgctccctgaaatttggcaggcag

SEQ ID NO: 456297 - DNA, 95 bp, Homo sapiens
cgcggactccgcatcccgcaccccgatggtagccgaggagctggattatatctgtccaagatgcgagtctggttttatcgaggagcttccggaag

SEQ ID NO: 456298 - DNA, 115 bp, Homo sapiens
cccggccccgcgtcgtctggcgccgccgccgccagcgcggtgtgcaactgaggaacatggctcaagaaactaatcacagccaagtgcctatgctttgttccactggctgtggatt

SEQ ID NO: 456299 - DNA, 98 bp, Homo sapiens
ctaggaatgcatgggatgcttatggaatgtgcgagaacacgggtcagaatgaaggaacgatttccgtagttgaaggagaaacattgtatgtcatagag

SEQ ID NO: 456300 - DNA, 100 bp, Homo sapiens
gtcctgccggggaagaatcaaagagcagtgactgcttttcaggaagccttggacgctgcaggtgataaacttgtagtagttgacttctcagccacgtggt

SEQ ID NO: 456301 - DNA, 75 bp, Homo sapiens
tttagagctgcggaacaggacgccctctgatccccactgcaggccccaccatggcgccgttcctgcgcatcgcct

SEQ ID NO: 456302 - DNA, 75 bp, Homo sapiens
gggtcgaccattccaaaaaaatcggttaatttggagtggcccctggagtcagtttcctacaccatccgaggcccc

SEQ ID NO: 456303 - DNA, 121 bp, Homo sapiens
ttcaggaagagaatgtgcgggacacacagcaggtgaccaccctccagctacccccgaagttcaccatgtctattctcaagatccatgccagggagatctttgactctcgcgggaatcccac

SEQ ID NO: 456304 - DNA, 73 bp, Homo sapiens
ctgtctctggactggacagcagtggcgtccgcttttctctaaggaacccgaggctgggaggcggcagaatgca

SEQ ID NO: 456305 - DNA, 90 bp, Homo sapiens
gagggcaaagagctggtggcctcaggtgaaaaatgtaggtgcaaaaaactacagacatctctgtgctgtttattacaacaagaatcctgg

SEQ ID NO: 456306 - DNA, 100 bp, Homo sapiens
ctctgagggagggtccgagccagccgctgttttgccggaggagcccctcaggcctggctgcttcaacccccaactccactgctggtgcagccatgaactc

SEQ ID NO: 456307 - DNA, 82 bp, Homo sapiens
ttcgagaacgaccccgagacggatccagcaatgcctgtgagaaaacctccttcaccttcctcaggcaggagctgcctgtgcg

SEQ ID NO: 456308 - DNA, 100 bp, Homo sapiens
ggactaattttggcagttctaaatttgaatttgaggctgccatttgtcgatgtagtcagccactctctggattcagtgccaggtgcctggaggatgaaca

SEQ ID NO: 456309 - DNA, 90 bp, Homo sapiens
atccacgggttttagaaaaacaagaattacagcagccaacctatgttgccctgagttacataaataggattactacagcatcccatttcc

SEQ ID NO: 456310 - DNA, 96 bp, Homo sapiens
tatcaggttcacgccaacagtacctcattgctctttggcgactcttattggtgtcatggagaaactccagctgggcccagagattctgcagcggga

SEQ ID NO: 456311 - DNA, 82 bp, Homo sapiens
gactccttcggcagtccacccaccgccgccgcctcccagatcgacctgatgccccatgacctcatcactcagctcttgcgcg

SEQ ID NO: 456312 - DNA, 75 bp, Homo sapiens
cctcatcgggatttggttggtgaattgggaacagctctccggaagaggatgaccagtgtcccagtgaaggaacga

SEQ ID NO: 456313 - DNA, 75 bp, Homo sapiens
ttggtatactgggcacaatccatctggtggcaggcagtacaagaaacatggtgccggcatctgcttctggcgagg

SEQ ID NO: 456314 - DNA, 90 bp, Homo sapiens
tatgctgttcttgctgatgactaccgcactgtcaaggagctgcttgatggagatctggtaaatgaggagccaaggacaggactacgacca

SEQ ID NO: 456315 - DNA, 75 bp, Homo sapiens
tctccaaaatggccacttacctgactggggaactgacggctccatttatcttaaagaaattggacagcatatgaa

SEQ ID NO: 456316 - DNA, 100 bp, Homo sapiens
gccccggaacccgagctggagctgaagcgcaggctgcggggcgcggagtcgggagagtcttctgaagaggagtctgatgatgaaatagcagataaggatt

SEQ ID NO: 456317 - DNA, 100 bp, Homo sapiens
gggaaacaatccctcgcctccggaggcggcgaggagcggcgggaccatggccaacctggagcgcaccttcatcgccatcaagccggacggcgtgcagcgc

SEQ ID NO: 456318 - DNA, 82 bp, Homo sapiens
atgatgcaaaggcagcaagagatgcacaggagattgaaaatggctcaggaatcagtcagcaagttgacttcagagaagaaag

SEQ ID NO: 456319 - DNA, 75 bp, Homo sapiens
ccgggagccccagggcagccgccccgccgagtcgcaggtgagaagccctaccactgcaactgggacggctgcggc

SEQ ID NO: 456320 - DNA, 100 bp, Homo sapiens
gaccgccgccgccgccgagagagaggagaaggaggcccacctgccgtttgctgtcattggcagcacagaagaactgaagataggcaacaagatgatgagg

SEQ ID NO: 456321 - DNA, 99 bp, Homo sapiens
cagtcttcttgcttcctgaaatttcctctggtgcacacatcttgaccaactcagcagcaaggtggattttctttgtgtttaaagaaaaaaaatgtccct

SEQ ID NO: 456322 - DNA, 117 bp, Homo sapiens
tccggcagtgaccgtgtgtcagaacaatcttgaatcatgaagctactaaccagagccggctctttctcgattgccaacactcctgatagctgaatgtgtgctggtttacatgactcc

SEQ ID NO: 456323 - DNA, 82 bp, Homo sapiens
acaggagctgtagagaggaccccggtacatctgaaagccgggaaatggacttctgcacggacctggccgtctccagtgccaa

SEQ ID NO: 456324 - DNA, 82 bp, Homo sapiens
catacggcgagtggaatcgggctgcatggctggcaaaagcaggagtagggctgattggagccattgtacagtgtcgggaaca

SEQ ID NO: 456325 - DNA, 83 bp, Homo sapiens
gtgtcatccagccttagcaaaccagagggcttaaaagacaaccttcttgcttctgggacatccagcctgacagccaccaaaca

SEQ ID NO: 456326 - DNA, 50 bp, Homo sapiens
gcaagatcggcagccctaaagcttcaccgctgacctgaggtccaacacgg

SEQ ID NO: 456327 - DNA, 89 bp, Homo sapiens
atcgaaaggagcaagagcaagatcaccgtgacatccgaggtgcctttctccaaaaggcgaatctggctttgggggaagaggaagaaaag

SEQ ID NO: 456328 - DNA, 83 bp, Homo sapiens
ctcgggtctcgggggccgctctgggatcccggccaccagcaattgtccggtttactcctggcttgggggcattaggaagcact

SEQ ID NO: 456329 - DNA, 83 bp, Homo sapiens
cagatttgcaaattcagaaaatgtgaggaactcaaaaagaagccttccgctgctctggagtttgacaagtatgcgcccaagct

SEQ ID NO: 456330 - DNA, 75 bp, Homo sapiens
aggcgaacgcttcgctggccatttaggagctctgctcaaagccagacgtattcagagcggaagactctaataccc

SEQ ID NO: 456331 - DNA, 51 bp, Homo sapiens
ggccggagagttctgcatgttgattcgtgctggagaatctggtaaaagcac

SEQ ID NO: 456332 - DNA, 75 bp, Homo sapiens
gtcgtctccagactccacactcctagcaaatcaacagtacaaattctgaagtttgtaaacttgctgatggtggtg

SEQ ID NO: 456333 - DNA, 83 bp, Homo sapiens
gcgccggatccaacacctttccccagctctgcgcgtaccgcgctctttggaaacgaattatccacctccgacccttaagccag

SEQ ID NO: 456334 - DNA, 100 bp, Homo sapiens
cctctcgcctcgggtctcgggggccgctctgggatcccggccaccagcaattgtccggtacacctgagagcctggcagaaaaagaacggcagctctccac

SEQ ID NO: 456335 - DNA, 100 bp, Homo sapiens
aaaggcaagagtaacagcagcgccgtcccgtccgacagccaggcccgggagaacctcacgattttgatgaatgtcgatttgatattagtgtaaatgatag

SEQ ID NO: 456336 - DNA, 101 bp, Homo sapiens
ggggaaaccccgtaaagtggttggttgcagttgtgtagtagttaagaaagatgtagcacttaagcctcaggaacgtgtggagaaacgccagacgcccctga

SEQ ID NO: 456337 - DNA, 83 bp, Homo sapiens
gcgggcgcagccctttgcgcagccgccgggaccctggcccctgtcgaggtacatgtcccagagcaagcacacggaggcccggg

SEQ ID NO: 456338 - DNA, 59 bp, Homo sapiens
tggaacagagggggccagtctaaaagataaggggatgaccgctttggaagacgtgttgt

SEQ ID NO: 456339 - DNA, 100 bp, Homo sapiens
cggtgttggaacttcgttgcttgcttgcctgtgcgcgcgtgcgcggacatggcctcaaacgagccagcagccacccccgcccagccaacacctccccagg

SEQ ID NO: 456340 - DNA, 75 bp, Homo sapiens
gaaaacggaagcgcagggagaaggaagaggtgtttgaaaagggtgtcaaattgagaaccaggtagatccccacca

SEQ ID NO: 456341 - DNA, 100 bp, Homo sapiens
cccactactctcaagatacgccaatgcgctcaaaggcaaaaagggttttgctgttactgctcagtgtagtcacaccttgaataagaaatggaaaaccttg

SEQ ID NO: 456342 - DNA, 74 bp, Homo sapiens
cagttaatgcacgtattttaaactcccgggcctgcggacgctatgcacagaccctcaggcagtttgattgcatc

SEQ ID NO: 456343 - DNA, 88 bp, Homo sapiens
cctccttcgtggggctcatcgtgatcccggcgacatactacctctggccccgagatcagaatgccgggctagtcgttggatttatcct

SEQ ID NO: 456344 - DNA, 100 bp, Homo sapiens
gcagaggaacctatacaaagaagtgatgctggaaaatctcaggaatctggtctcattggctccgggattgtggagggctgcgggaggtggaggtgactgc

SEQ ID NO: 456345 - DNA, 75 bp, Homo sapiens
gtgaggctcccgatggcgggagctccaggaaaggaaatctatacctttggaagaatattgggaaaagggagcttt

SEQ ID NO: 456346 - DNA, 75 bp, Homo sapiens
aagttggagaagtatccaatagggatattgtagaaactgtctttaacctggtagctacagcaagctgggtagcag

SEQ ID NO: 456347 - DNA, 73 bp, Homo sapiens
cgccgggtggtggttaaaccatgttaaggaggattttacagagggtttttgattggtcaaggagcacatgtag

SEQ ID NO: 456348 - DNA, 100 bp, Homo sapiens
ttagcagtatattccaaagataattacaaacgggtcacaggtactaggacatcaatgcaagcttgaataagaaaaacaaattcttcctcctaagccatgg

SEQ ID NO: 456349 - DNA, 75 bp, Homo sapiens
ctacttcttgctatgttggagacaatactgttcagcagactgtacaggatctttttggcagagccccaagtaaag

SEQ ID NO: 456350 - DNA, 90 bp, Homo sapiens
caggttctccttcgaggaacagagaaaatgaaaccagcagacagaatttgtcagacttcagtattgatgctcctccatcctttaagccag

SEQ ID NO: 456351 - DNA, 97 bp, Homo sapiens
ctgaacccctgtttggagaagagaaaggagaccaccaagaggcacttgtttttcacaggtgatctgtgaaaatggttcgctattcacttgacccgga

SEQ ID NO: 456352 - DNA, 99 bp, Homo sapiens
ccgggagcacgtcatctccatcgaggcttgctgagcgagagcgagaagcggcccttcgtggaggaggcagagcgccttcgcgtgcagcacaagaaggac

SEQ ID NO: 456353 - DNA, 85 bp, Homo sapiens
ttagaattaagagttaaaactgtgaaatactttaaagaacttggaatccattttgatcacatatggcaaaaaactttgacagtgt

SEQ ID NO: 456354 - DNA, 100 bp, Homo sapiens
ctgtaacttcagctttgaaagaagttggcgtggaggagatgttaaagtaacccatcttgcaggacgacattgaagattggtcttctgttgatctaagatg

SEQ ID NO: 456355 - DNA, 75 bp, Homo sapiens
aggagccattatttatgtcatcaagaagaatgacgatgctgaaaatgtgtgtctgacatgcaagctcagtggggc

SEQ ID NO: 456356 - DNA, 75 bp, Homo sapiens
cttcaaaggctgtcgcaaggaggaaggaacctggaggagaagcggctcacttggaggcttccagatgtgtccgag

SEQ ID NO: 456357 - DNA, 51 bp, Homo sapiens
ggaaattcccagaggactttggagaccagtctgagggaaaaggccatacca

SEQ ID NO: 456358 - DNA, 75 bp, Homo sapiens
gttgcaacaggactgtgacctgagctgtcagatcaccattcccaaagagccagtcttggtgctctgtgttcacct

SEQ ID NO: 456359 - DNA, 49 bp, Homo sapiens
tctacctgcactcggccctggtcaaggattcagagactgtttttgatat

SEQ ID NO: 456360 - DNA, 97 bp, Homo sapiens
ttctatacaatattccgcttttttgaacagcgaaaccagcgtttgcgagggagccccaatttcacaccaggtgtgatccctcacatccacaaatctc

SEQ ID NO: 456361 - DNA, 100 bp, Homo sapiens
gggcctggaggacgggcaaaacgggtcccgccagggacatgcagcccaccatgaagttcgtgatggacacatctaaatactggtttaagccaaacatcac

SEQ ID NO: 456362 - DNA, 74 bp, Homo sapiens
catggggctgtttggaaagacccaggagaagccgcccaaagaactgccctgcctctttcttgtcgcagtcagtt

SEQ ID NO: 456363 - DNA, 74 bp, Homo sapiens
gcttctccgaggacgccttcaactccacttttatctccaccatagaatgaactctggaagcccagccagggaca

SEQ ID NO: 456364 - DNA, 51 bp, Homo sapiens
ctggaggtggatctgaagaacggctgcccagagcccagaccaagcatggac

SEQ ID NO: 456365 - DNA, 90 bp, Homo sapiens
ggccttcacaatccaagttccacaatatattgactactgccacaattccgatgcctgtgaggagccaccaacatttgaagctatggagct

SEQ ID NO: 456366 - DNA, 82 bp, Homo sapiens
ccaactggaactggttccagctgaggtgtatgcaggtcggcgggaatgccaatgcgagccattgctgctgagattgttctaa

SEQ ID NO: 456367 - DNA, 76 bp, Homo sapiens
ccacgctcgtgctcatctcctactgtcccacggccaccgaagagctgaacatactgacttgtggagtcattggctc

SEQ ID NO: 456368 - DNA, 50 bp, Homo sapiens
ggggcgctcatgctgctgcagctgagtggagactgctgcacggactctgg

SEQ ID NO: 456369 - DNA, 96 bp, Homo sapiens
agacattgtaccaacaaactacaaaggtatcattggtacaggtttgcagattccgccagcagcacagcaagctctacagatgagtggctctttggc

SEQ ID NO: 456370 - DNA, 50 bp, Homo sapiens
cgttttgatgattgcagttctaaggactttgcctcccgggccaaactggc

SEQ ID NO: 456371 - DNA, 100 bp, Homo sapiens
ccgacagccaggcccgggagaagttaattatagaaaatgccaagtaggaaatttgccgatggtgaagtggtaagaggtcgatggcctgggagttcacttt

SEQ ID NO: 456372 - DNA, 80 bp, Homo sapiens
cttgaaggtcatttaaccaacctcagctttacaaaccctgaatttataactgagtcgctgcggaggagctttgctgtctg

SEQ ID NO: 456373 - DNA, 100 bp, Homo sapiens
ggtcagcggggctgcgagcactatgacagaggatgtctcctaaagggccggtgcataaacttctcccgagttccatctcagtaaaagggaagcaggaaga

SEQ ID NO: 456374 - DNA, 80 bp, Homo sapiens
cgccgttactccgaggagataccagtcggtagaggattctggatgaaattgaagaacataacatcaaaatctatcactta

SEQ ID NO: 456375 - DNA, 75 bp, Homo sapiens
gagcgggcggcgcgggcaggtccacgggaagcctacacgcccaagcagctgtcgattcggcagaccgaagtcctc

SEQ ID NO: 456376 - DNA, 94 bp, Homo sapiens
ctccactttcgccagcccgtgccgcgagcgcggcctgcaggagggtgctttcttctgcgacctggtactcatctacctcatcaaaaagagagag

SEQ ID NO: 456377 - DNA, 85 bp, Homo sapiens
cagttcatcttcctccctgtgtactttccatttgccttcctgggattctgagaaacgaacccctcttcatgtggccgcatttctg

SEQ ID NO: 456378 - DNA, 110 bp, Homo sapiens
aggctcagcaaggatgcctacagtgagatgaacatatgcagtaatgtcacctcaaaagagagttaagaacgtccaggcacaaaacaggacttcacaaggtagtagtagtt

SEQ ID NO: 456379 - DNA, 83 bp, Homo sapiens
gggcccaggtcccttcctccgtggtctgtttttctggggggccaccaacacctcccgtgaatctaccatgtacccaaaagcag

SEQ ID NO: 456380 - DNA, 101 bp, Homo sapiens
cagcgcgcggcaggcggcgagctcgggggccgcagcaccggaagccccgcggctggagtttcgggatccggcactcggactacctggccccgctggtgacc

SEQ ID NO: 456381 - DNA, 96 bp, Homo sapiens
tagaacacgctaaagaagaaacaaaaaaagctatcaaatatcagagcaaggcaagaagggaatccactgaagacctacatttcccggaaggttaac

SEQ ID NO: 456382 - DNA, 83 bp, Homo sapiens
cgccgccgcgcacctgccttcgctcccgcaccgatggcttaagcaaaatcagactaaactatagcgatgaatcacctgaagct

SEQ ID NO: 456383 - DNA, 100 bp, Homo sapiens
aaaaacaaaaaggatagcctccggcattccaggcagttatacttaagcatgaacattgacgacaaactggaaggattgtttcttaaatgtggcggcatag

SEQ ID NO: 456384 - DNA, 82 bp, Homo sapiens
cctacttcaaggataagggcgacagcaacagctctgccggctggaagggatgtttcagcagcccctgagaaggaagaggagg

SEQ ID NO: 456385 - DNA, 100 bp, Homo sapiens
gcggccgccctgggagcgagcggaggagcaggcgccggaggtgctggagaatctggtaaaagcaccattgtgaagcagatgaggatcctgcatgttaatg

SEQ ID NO: 456386 - DNA, 75 bp, Homo sapiens
actgagagaaacccactgaagacgtctgcgtgagaatagagaccaccgaggatattagaaatggctactccccag

SEQ ID NO: 456387 - DNA, 76 bp, Homo sapiens
cccgggcatgggcggcaactctttgatgtactactataatgggaaagcggaaagaaaccttgactggttccccagg

SEQ ID NO: 456388 - DNA, 75 bp, Homo sapiens
gttttgtgcagattgccagtctaaagggacagtatgatttggtgaaatgcctggctcctattcgagaccccaaga

SEQ ID NO: 456389 - DNA, 88 bp, Homo sapiens
agaggaacactgccggggcccaaccacaagacgactcaataggaggaaggctccatggtccccttctcgatgcgcatcttgcacgcgg

SEQ ID NO: 456390 - DNA, 102 bp, Homo sapiens
ttcttggagaacacaaagaagtgtgatggagaagacagactgctgctttggacctgttggtaatgatggcctgagctaaacatctaactagaagggataccc

SEQ ID NO: 456391 - DNA, 100 bp, Homo sapiens
agccggagtgtaggcggcagaggattcgctcccagagcagctgcggccaggcccagacatgtccgtccttgtaagttaaaagcttccatgggagccttcc

SEQ ID NO: 456392 - DNA, 90 bp, Homo sapiens
tcttcaactgccaaaagcacagggtggagagattcaaccagttagcgtgaaagttggagataaagttcttctcccagaatatggaggcac

SEQ ID NO: 456393 - DNA, 80 bp, Homo sapiens
gtggtgcttccaactgcgggacaggaagtggccgtagcggcttgttggataagaacttcacagggccgggggatcctgac

SEQ ID NO: 456394 - DNA, 92 bp, Homo sapiens
catgtcgggttattcgagtgaccgagaccgcggccgggaccgaggacgaaaaccactattgctctgttgtatgatgaagagtccgaaaatgc

SEQ ID NO: 456395 - DNA, 73 bp, Homo sapiens
gaaaatcgcttggttaaaacctgacacttttaacagcagagagagatcatcattgcctgaatttagctttgtg

SEQ ID NO: 456396 - DNA, 90 bp, Homo sapiens
gttctttcttgacattaccttttcaccagactatccgtttaaaccccctaaggacattagctgtcagcacgcagccctgctgagcctcga

SEQ ID NO: 456397 - DNA, 75 bp, Homo sapiens
agacaacagtggccttctgatgaatactttaattgagccccatatgggggttggcaggcagcagagaggcccctt

SEQ ID NO: 456398 - DNA, 147 bp, Homo sapiens
cggaaagactttcagctccgaggaggaagaagctaactattggaaagatctggcgatgacctacaaacagagctatgcagatacaatgttttccctcctgggaaagaagtttcagtatctcctgtgtgttctttcttatgatccaac

SEQ ID NO: 456399 - DNA, 90 bp, Homo sapiens
cagaagtccagcagcctgggcaatctgaagaaagagacatctgatgggggcaaattctggcagaccatgggcttctcagagcagggccgg

SEQ ID NO: 456400 - DNA, 100 bp, Homo sapiens
agatatagaagagggaaatcaccaggtggaagatggatgtagagaaatggcgtgtgaagagatgtataagcattccaataataaggccatgactacgggg

SEQ ID NO: 456401 - DNA, 96 bp, Homo sapiens
ggctcagagcttggagacagacgaggtcctgctgtactagccaccaaagcagctgctggtactaagaaatatgatcttagtaaatggaaatatgca

SEQ ID NO: 456402 - DNA, 119 bp, Homo sapiens
gtatctctgcattagccagattggacatatgtaaagggacatcagtatatctggatcatcagatctctcgtggaagaggaagaccaacacatgaaattgtcccttggaggcagcgaaat

SEQ ID NO: 456403 - DNA, 50 bp, Homo sapiens
gggaaggttccctcaagtccaaggagcatcagatccatgctgctgctgac

SEQ ID NO: 456404 - DNA, 75 bp, Homo sapiens
aggtcccggccggagtcagcctggcccgggtaaggcacctatatatctgtgattttcacaaaaatttcatccaga

SEQ ID NO: 456405 - DNA, 75 bp, Homo sapiens
caaagggaagaaataaaattttcccatactgaataacaacgaacttgatgcaagtgataggtttgccaaggtcag

SEQ ID NO: 456406 - DNA, 96 bp, Homo sapiens
gaatgaaacccttccagctcgatctgctcttcgtctgcttcttcctcttcagtcaagattgactggggcgactttggggtagaggcagtgtctgag

SEQ ID NO: 456407 - DNA, 100 bp, Homo sapiens
cctatacaaagaagtgatgctggaaaatctcaggaatctggtctcattgggtttattgttggccaaaaccaggctttgattgaaccaggatgaatgcggg

SEQ ID NO: 456408 - DNA, 122 bp, Homo sapiens
ggaccttgaagacgacttcgaccctgcccagcacgaccagctcatgcaggaatcagagatcattgatttcttcctgggggcctctctcaaggatgaggttttgaagattatgccagtgcaga

SEQ ID NO: 456409 - DNA, 128 bp, Homo sapiens
agtcgtggaggtggcgaaacgaggaggagataacgcggccttgggctctggctgttttggagtcagcggaagatcaccaaggccagggagtggttccaccgcactgtgaagattgactcggacctggg

SEQ ID NO: 456410 - DNA, 75 bp, Homo sapiens
gttagtcaccagctgctcctccgtcttctcaggagaccagctggtccaactaatagttatgcacgagtgcgagct

SEQ ID NO: 456411 - DNA, 82 bp, Homo sapiens
ggaacgggaacatgttttacgcctctactcagaaaatgaccgactgagaatcagcaaacggggattcagcgtccgatccttt

SEQ ID NO: 456412 - DNA, 96 bp, Homo sapiens
cccaaggagtggcttatcttcacagcatgcaacccaaagcgctaattcacagggacctgaaaccaccaaactgttaaacgtttaatgaaagaagcg

SEQ ID NO: 456413 - DNA, 100 bp, Homo sapiens
cttctacagcaacaacacaaaatcaatttgctccagcaacagatccagagcagcccgacggccatggaggctgaagagacgatggaatgccttcaggagt

SEQ ID NO: 456414 - DNA, 100 bp, Homo sapiens
gggaggaagagaatttgtccaaatacaaagacaggttgctccttgagggcaggacagttcttatggctttatccgttgcgtaagcacagagaggtctgcg

SEQ ID NO: 456415 - DNA, 75 bp, Homo sapiens
gacccggagcacccgacccctgaggcaagaatatcacggcatgggcatgagtagcttgaaactgctgaagtatgt

SEQ ID NO: 456416 - DNA, 75 bp, Homo sapiens
cagaagcgggcggcgcgggggagatggaagacagtgacccgcccattcatgaaagtctcagcatagaaaatacat

SEQ ID NO: 456417 - DNA, 50 bp, Homo sapiens
gaggatccaggaggaggagttgcagagggttaatgcctcttggaagtcag

SEQ ID NO: 456418 - DNA, 101 bp, Homo sapiens
cgccaccgccgccatgaagaagcagttcaaccgcatgaagcagctggctaaccagaccgtgggcagatgcaagcctcccctatccagccccattctagaac

SEQ ID NO: 456419 - DNA, 100 bp, Homo sapiens
ctcgaaggcagcacaggacctggaaaaattacatgactaccgaccagactcccggaaatcatgttggtaggatcccagtctttttcgcctggagggccca

SEQ ID NO: 456420 - DNA, 75 bp, Homo sapiens
cgcacttctacacacccctgaagacagagagtcttccaggatctcaaccagttctctcactgcagagtctggaga

SEQ ID NO: 456421 - DNA, 100 bp, Homo sapiens
gtggatctgacagatgccagcgtagctgaatccagtaccaaaaacgtcaacaacagttttacgatacctgaaaaaagcggcagtctgcaacccagaagag

SEQ ID NO: 456422 - DNA, 75 bp, Homo sapiens
ctccacgttcaaacagcagtgttagcaagacctgggggagagcttggtgttgtggttgccccacatacattaaag

SEQ ID NO: 456423 - DNA, 109 bp, Homo sapiens
agaatgtcacaggtccagggcagaggaccaacatgggcattttgtttatgagcaaggtggaacgtgtgatcaccattatgcagaatccacgccagtacaagatcccaga

SEQ ID NO: 456424 - DNA, 75 bp, Homo sapiens
atgttgtggggagagccaggggcagggatggtgagagaaggtcagctaaatggctcatctgcagcacacagtgaa

SEQ ID NO: 456425 - DNA, 82 bp, Homo sapiens
gtcgccttccgctacttccgggagctctttgggatccggccagatgattacttgaggctgggaggcggcagaatgcagccag

SEQ ID NO: 456426 - DNA, 90 bp, Homo sapiens
gtttctggggcctctggcggtggcggcctggggcggcgcgacggctggtgcgcagctcggcttattccaggggtgtgtttcgtcgagatg

SEQ ID NO: 456427 - DNA, 100 bp, Homo sapiens
cggggaatcatgacttctgcagccggctattcagcttgaccctgaagaaactcgtcatgctaaaagaaatggacaaagatcttaactcagtggtcatcgc

SEQ ID NO: 456428 - DNA, 75 bp, Homo sapiens
cgagcttccctcgtggccgacggaacaatgaagagctttttagatgaggaatttcctcactatgattccctgtcc

SEQ ID NO: 456429 - DNA, 101 bp, Homo sapiens
gcctccgctgggctttcaagttgttttcggctttgtgagaaaccttaccatcaaacacgatggccagcaacgttaccaacaagacagatcctcgctccatg

SEQ ID NO: 456430 - DNA, 100 bp, Homo sapiens
cggatccgagactggcagcatgagcagcatgaggtcctacaggtatggatctctggcagctgctgttgaccttggcactggcaggatcaagtgatgcttt

SEQ ID NO: 456431 - DNA, 105 bp, Homo sapiens
agcggccaacatggcggaacgcaggagacacaagaagcggatccagacttcccaagtaagaagcggaagaggagccgctggaaccaagacacaatggaacagaag

SEQ ID NO: 456432 - DNA, 100 bp, Homo sapiens
tgggagcggatccctgagctcgtcaagcagctgtcggccaagctcatcgccaacggttgtggcagcactgcctgaaggtatgagaccagattctaatctt

SEQ ID NO: 456433 - DNA, 100 bp, Homo sapiens
agaggctcccgtgcaggaagagaagctgtcaggtaaccatgtctgagtctggacacagtcagcctggactctatgggatagagcggcggcgacggtggaa

SEQ ID NO: 456434 - DNA, 100 bp, Homo sapiens
atcgtgatcttcacagtgctcctgcagtctctctgtgtggctgtaacttacgtgtactttaccaacgagctgaagcagctctgtgtccagaatagtcccc

SEQ ID NO: 456435 - DNA, 83 bp, Homo sapiens
gaaacagagaaagataggcggccatggtccaaccttgaagcaaaagactgttgaagtagagagcattttgcccagctcactcg

SEQ ID NO: 456436 - DNA, 82 bp, Homo sapiens
atggcggatggccccaggtgtaagcgcagaaagcaggcgaacccgcggcgcaataacggcagttgtgaaaaacttcaggaca

SEQ ID NO: 456437 - DNA, 50 bp, Homo sapiens
cccggttttggctgcttaaactgctggtttgctggttggctcccgagcag

SEQ ID NO: 456438 - DNA, 100 bp, Homo sapiens
ttctgaacatgcacccccagcagccaccagcaggagaactcctggaagccccgtcttcctcctcatgcccattgcctgaccagagccaccctgcactcag

SEQ ID NO: 456439 - DNA, 90 bp, Homo sapiens
tttacacctaaaccaacactctttggagcatttagtgggtggaaggttattttacatgtggatcagtctcgagaagcaggcttcaaacgc

SEQ ID NO: 456440 - DNA, 80 bp, Homo sapiens
catggacacctccaccttcctgctcagcttgtctttaaccgaactgtcacactgaaggaagacccaggaaaggtgtgagc

SEQ ID NO: 456441 - DNA, 100 bp, Homo sapiens
tgacatgcatagcaacctctccaactatcaccagcatcctccaggacaaatagcaaggaaatacagttcctgctccaccattttcctagatgatagcaca

SEQ ID NO: 456442 - DNA, 75 bp, Homo sapiens
gaacgggcccgtcaagctgcgcctgacagaaagccaaacttggccctgctggcaacaaagtcatcagtccctctg

SEQ ID NO: 456443 - DNA, 51 bp, Homo sapiens
cgtcaggctctaaacaaaattctggttatgaagacagtatggagtttccag

SEQ ID NO: 456444 - DNA, 100 bp, Homo sapiens
caatcgtgggcagattcaatctttgcaacagtcagctgctgtttatgcagaaaaatatggtgttatccctaagaaatgcttccctgaatcttatacaaca

SEQ ID NO: 456445 - DNA, 75 bp, Homo sapiens
tgttctcggtcccggcacagggaccagcgtgatggggtgcagcggaactgctgcctgacgctctgcaacttcagc

SEQ ID NO: 456446 - DNA, 82 bp, Homo sapiens
ccgagcacgcgggtctgtcatcatgtcgcgttacgggcggtacggaggagtcagactcagtcacatgcccactcgaagtcgc

SEQ ID NO: 456447 - DNA, 75 bp, Homo sapiens
aaaacattgtaatggccatcgctggaaacaagtgcgacctctcagatattaggtccctccttgtggtccatttct

SEQ ID NO: 456448 - DNA, 76 bp, Homo sapiens
gatgaagaatccccccgaaaggaccccccagagaaattaatggacttacgaaatgaatacctgcaagcggatgagg

SEQ ID NO: 456449 - DNA, 98 bp, Homo sapiens
gacagcaaagataaggaacccgaagtcgtcttcatcggggactccttggtccagctcatgcaccagtgcgagtgttctaagaacggaagcatctgggc

SEQ ID NO: 456450 - DNA, 96 bp, Homo sapiens
gtctgggagtgctgcatgcacccagctgctgtatcaccaggacatcaggaggtggaggagaacctccatttctaccagaatcctttgaccgaattc

SEQ ID NO: 456451 - DNA, 100 bp, Homo sapiens
gagcggcggcggcgacgtggtgtgcaccggctggctgaggaaatcgcctcccgagaagaagttgaggcgctatgagaactcctggaagccccgtcttcct

SEQ ID NO: 456452 - DNA, 75 bp, Homo sapiens
ctctccaagttctaccagccctactgccgtgctataagcggtgcaaacagatggaatattcagatgaattggaag

SEQ ID NO: 456453 - DNA, 82 bp, Homo sapiens
acacatgtgaaatgtttcagtcttgcagccacccggagcaatgaccctgttgctactgggtgaacagcctttctcagtcact

SEQ ID NO: 456454 - DNA, 100 bp, Homo sapiens
accacagctcttgttcccgctgatcctgcagcccagtggatggagtccagaatctacagacctgccagtgccggtggtggtgtgcacattgagccccggt

SEQ ID NO: 456455 - DNA, 83 bp, Homo sapiens
atggcgaccgccatgtacttggagcactatctggacaattgacgagatgcctgaggctgccgtgaaatcaacagccaacaaat

SEQ ID NO: 456456 - DNA, 75 bp, Homo sapiens
tgtgcccattacttctgcctggactgcattgtcgaatggtccaagacaatgcagatcttcgtgaagactctgact

SEQ ID NO: 456457 - DNA, 75 bp, Homo sapiens
ttagctgtgctcgcgctactctctctttctggcctggaggctatccagcgataatccccttttcaagagcgccac

SEQ ID NO: 456458 - DNA, 75 bp, Homo sapiens
ggcgaccaagatcaggaacctgccctgtattaattttaaagacccacagtttgctgaagattacatttttaaagc

SEQ ID NO: 456459 - DNA, 75 bp, Homo sapiens
ccttggagctgttttaaaagttaggcaagatctggtcaaagcctctacggcagacacatgcaggccaacccagaa

SEQ ID NO: 456460 - DNA, 96 bp, Homo sapiens
tacttcacattttccccaatatatggtcctcatgctgataccgccagtggatgccagaatttgcagtgtggttttcgagcctgctgccgctctggc

SEQ ID NO: 456461 - DNA, 100 bp, Homo sapiens
gtaagatggaagatgaggaggtcgctgagagctgggaagaggcggcagacagcgggatatggccgcgtggaaagtgtcaaaattcttcccaagaggggat

SEQ ID NO: 456462 - DNA, 76 bp, Homo sapiens
gaattagccattttcagagtcttcaacaaataccctacttcaaagtatgttgcccatattatgaccctgaagttag

SEQ ID NO: 456463 - DNA, 89 bp, Homo sapiens
cagcacgtaccagaggtggaagtccaagtcaaacgcagaaggactgcctcactgagcaaccaagaccaaatttgtatcctactgtgggg

SEQ ID NO: 456464 - DNA, 108 bp, Homo sapiens
ggaaatggcagcctgcccaccacccacgcttgcccagcctttcttcacgcaggggatatgagactttctactcggaatatcctgagtgttgcgtggatgtaaaaccca

SEQ ID NO: 456465 - DNA, 97 bp, Homo sapiens
aacaatggaagatatagataagaatgctgatggtttcattgatctagaagagtatattgaaactgattcagcagtacagaaagaacttagaaaccag

SEQ ID NO: 456466 - DNA, 101 bp, Homo sapiens
cgcctttgcagtccggccgcgcctcccgggccccgcgttagggccgccgctgcctccctcgccgccgccgctgcccaccatgacttgtggatcttactgtg

SEQ ID NO: 456467 - DNA, 80 bp, Homo sapiens
gaatgctacttggatgcctcttaaggaaccttcagccctcaagattccaacatcatgacctcagtttcaacacagttgtc

SEQ ID NO: 456468 - DNA, 49 bp, Homo sapiens
gcacttgttgcagaaacagccaagcaatgccaagtgagtacacctatgt

SEQ ID NO: 456469 - DNA, 88 bp, Homo sapiens
cgcagcctcgcctctgcgcgactgccaggcctggagctgctgaagactgctattgggaaagctggctacactgataaggtggtcatcg

SEQ ID NO: 456470 - DNA, 90 bp, Homo sapiens
ggcacgcagtacttgcttaggatggccaacaggctctttggggaaaagtcttgtgatttcctctcaccgagtcgtccggaaatccattgc

SEQ ID NO: 456471 - DNA, 99 bp, Homo sapiens
caccagatctgcaaactgcgaaaatgtgaggtgctgaagaaaaaagtagggcttctcaaggagagtttgccagatccggcccggtgcctgggttccagg

SEQ ID NO: 456472 - DNA, 74 bp, Homo sapiens
ccgatgatgaaattgccaaatatgatggagacagaggagctggaggaggagaagtcaggcctgcagaaggagat

SEQ ID NO: 456473 - DNA, 100 bp, Homo sapiens
ctcgtctttttattgacggtgtcttgtgtgaaaggcacccagtcagtcagagtcagagccagagaaggctccattgtgcagtgtgcccccaccccctcct

SEQ ID NO: 456474 - DNA, 75 bp, Homo sapiens
atttattagatggtgacactgcagttggcaacttgttccagcgatggcatgttcctctagaactccagatgacaa

SEQ ID NO: 456475 - DNA, 89 bp, Homo sapiens
caatgctgatgtttgataaaactaccaacaggcacagagctcctcaagagttactgatctatgaaatggcagagaatggaaaaaattgt

SEQ ID NO: 456476 - DNA, 100 bp, Homo sapiens
tctaccaggatggctctcttcgctggtggcaaactgcacctggccacattcatcatggacaagagcgaagccatcacgtctgtggacgacgccatccgga

SEQ ID NO: 456477 - DNA, 100 bp, Homo sapiens
aactaatcagttgcttgcattttctcttgtactgctactcagattcgttgatgactgtctgctatcagtttttaaggtctgtttctgtcgactgtggacc

SEQ ID NO: 456478 - DNA, 74 bp, Homo sapiens
ggacacccctgaagccgagaaatgaactggttagtactgcagaaaaaccacgacttaaagaaggccttatacat

SEQ ID NO: 456479 - DNA, 90 bp, Homo sapiens
gccactgggagccctgtgccttagccatggtcaacccaccatgttctttgacatcgccatcaacgatttgataatgggctgcattaaaag

SEQ ID NO: 456480 - DNA, 98 bp, Homo sapiens
gcagcggctgtgccgaggcgcccaactcagagagaagaagaaggaggttcctgctgtgccagaaacccttaagaaaaagcgaaggaatttcgcagagc

SEQ ID NO: 456481 - DNA, 100 bp, Homo sapiens
cacccacaaagattgaacgacatgccatgtactgcaatggtctgatggaggaagatacagaaggtgacatttcaaaaggcccgggaatactctgtcaaga

SEQ ID NO: 456482 - DNA, 100 bp, Homo sapiens
ggtgaacctggaccaggaggaggttttcaggaccaaaattgtggaaaagtcactctgaagacataatcccctcagagagtagctctttgtctgacaccac

SEQ ID NO: 456483 - DNA, 75 bp, Homo sapiens
cctctttgtcccatgcagaggtgcagagattcattattatgctgagggttggaaaagcaaaagcagatgtgtggc

SEQ ID NO: 456484 - DNA, 87 bp, Homo sapiens
gtgggcgttatcttccgactgatccagctggtggtcctggtctacgtcatcggttgctggatttgtgcgactcggtgaaggatgatg

SEQ ID NO: 456485 - DNA, 100 bp, Homo sapiens
tgaatatgaccctatggaagcagaagaagctgaggatgaagaagatggtccgaggagctgcaggtgtgactgatgggaatgaagtggccaaggcccagca

SEQ ID NO: 456486 - DNA, 100 bp, Homo sapiens
ttggtacattactatggatggaatgtcagtgtctcaatgagatcttggagtcagcagatgcacccttagaagtcactgaaggattcattcagtcaatttc

SEQ ID NO: 456487 - DNA, 82 bp, Homo sapiens
ccgcggggctgggacccgatgcggttagagccgcggagcctggaagagccccgagcagttgcatgctgagaatttgaaaaat

SEQ ID NO: 456488 - DNA, 98 bp, Homo sapiens
ttgtatgggagtgaactcagatgtggagcactacctttgtgagcagtgtgacccaaggcctgtggacagggcagcctggcatcctcgctacaacctca

SEQ ID NO: 456489 - DNA, 75 bp, Homo sapiens
aagaccacaataaaagagacctctacttagctcagcaattcttaccttgttggtgagaccagatgcaaaaaagtt

SEQ ID NO: 456490 - DNA, 100 bp, Homo sapiens
aacagctactatagtgttcctgagctgccaacgatacctgaggggggttgttttgatgaaagtgaaagctggttatattctgggcactaaatgaaggcgt

SEQ ID NO: 456491 - DNA, 58 bp, Homo sapiens
ctttatcccttcatctgtggatgggcagaaaggagaagatgagtatgccaacgttgat

SEQ ID NO: 456492 - DNA, 137 bp, Homo sapiens
aaattgatggagtatttgctgcctgtcagagtggctcttttgacaaactagaagctgtggtcaagacctatgaggaccagcacagcagtgaggaggaggaggaagaggaagaggaagaggaaagcgaggacggcgaa

SEQ ID NO: 456493 - DNA, 130 bp, Homo sapiens
gtggggacaacagtgacgaagagaactgtctcctggtgaccgagcacccgcctccgggcatcttcaactactttgaagattatccaatgagaattttatatgaccttcattcagaagttcagactctaaa

SEQ ID NO: 456494 - DNA, 74 bp, Homo sapiens
aactcgcgggtcctcgtggatcagactacagacccctttgctgatgcaagtaagggtgatgacctgcttcctgc

SEQ ID NO: 456495 - DNA, 98 bp, Homo sapiens
tcctggaggtgttccacccgacgcatgagtggcaggcccttcagccagacctgcagccagttacctactgcgagccggccttctggtgctccatctcc

SEQ ID NO: 456496 - DNA, 90 bp, Homo sapiens
cgagggcaaaggcaaggtggtggacctgctggccacggacgccgacatcatcagccgctgccagacggcgtacacagcgtgaccgcccag

SEQ ID NO: 456497 - DNA, 100 bp, Homo sapiens
gaagggagccaacaaaaattgttttttctacctgttgacgtgtcaagcactaactgcccagctgatccacgacaggaacaccgcgtcccacaccgcggcg

SEQ ID NO: 456498 - DNA, 100 bp, Homo sapiens
ggcatgtggtacgcgaaaaaacaggggcagaagaacaaggaagcggagaggcaagagggccgttgctccagggagaactgcaaatatcttcatccacccc

SEQ ID NO: 456499 - DNA, 119 bp, Homo sapiens
gggttgggcctctcagaagaaaaaagagtcaagacctggcctaggcctaagatctggcaaacttggtgaacagtgtgaagcagttgttcgctttcccagactttttcagaagtatccat

SEQ ID NO: 456500 - DNA, 98 bp, Homo sapiens
tcaacgccagcagctccctctgccctatgaacagcttaagcacttttaccgaaaaccttctccccagggcacacgtgtttcacgttgacaggtttgct

SEQ ID NO: 456501 - DNA, 101 bp, Homo sapiens
ttaaatggaggtggtatccggtcgcccattgatgaacgcaacaatgcttcttggacacttaatgattgttggcaagaaatgtgctgctgatctgggcctga

SEQ ID NO: 456502 - DNA, 76 bp, Homo sapiens
agaagtctgaaggcatacggcgagcttccagagcatggacaaggctttgcttttcgaagaaaactgaaaatacagc

SEQ ID NO: 456503 - DNA, 98 bp, Homo sapiens
ggaggccaaggaccccaagctccgagaagaccggcggccaatcacagtccactttggacagaaaccaatagagccatggcgactccctctgctgcctt

SEQ ID NO: 456504 - DNA, 100 bp, Homo sapiens
gaacagctatgcatgctgcttttgatgtctgacaacgtggatcgttgttttgaaacgttggcatcactctcttcactgtgtctcataggaaatctctttg

SEQ ID NO: 456505 - DNA, 100 bp, Homo sapiens
tgtgccagacaagagccatgaagatcctcatgaaagttggacaagatggccgccaagaacgagtcatgtttgacaaaattacatctcgaatccagaagct

SEQ ID NO: 456506 - DNA, 146 bp, Homo sapiens
aacagctccacgcgtctccagctctgcccaagcccgagccacgcgacgggctgtgatcgcgcacggaccagacgtcaataagcacaagccatggatcgagacttcatatcatggagtcataactgagaacaatgacacagtcattt

SEQ ID NO: 456507 - DNA, 75 bp, Homo sapiens
gatataagtgatttggccaccaaactcctggacagttggaaagacctaaagatgtcaagccctccaacatcctag

SEQ ID NO: 456508 - DNA, 82 bp, Homo sapiens
gatctttgagtctagcaagtgttattatttctgccctttgtacccttacaaggtggtgtaaattggtccaatgtaacttgcc

SEQ ID NO: 456509 - DNA, 75 bp, Homo sapiens
tgagaagctgcagacttacatagctcttcttgccttgccaaagaatgtgatcaatgggcaggactacgaagtgat

SEQ ID NO: 456510 - DNA, 83 bp, Homo sapiens
ctggaccagaccatgggcctgagcatcagtgtggacaacagtgagtatatgcggaatggagacttcttacccaccaggctgca

SEQ ID NO: 456511 - DNA, 88 bp, Homo sapiens
ggccatcagatacttcctttccatgaaagcagcaaggattcttgtaaaaatggtttaaatgtgatactggtgtagatctccttgttct

SEQ ID NO: 456512 - DNA, 100 bp, Homo sapiens
gaagactaccacaggctcctcaccaagtacgctgaggccgagaacaccattgaccagctacgcctcggggccaaggaatgctgtctctgcaatttgagag

SEQ ID NO: 456513 - DNA, 75 bp, Homo sapiens
tgttttgcctactgttgatccgattaatgatgttttgcagcagttttctacgtctgaaattttttatgtctctgg

SEQ ID NO: 456514 - DNA, 98 bp, Homo sapiens
ggctcgagaatacagagagaaaattgagacggagctaagagatatctgcaatgatgtactggttggacgtgataagtatgagcctgcagctgtttcag

SEQ ID NO: 456515 - DNA, 106 bp, Homo sapiens
agaccctggagcctcagttggaagcagccgatccagcctgcggagcctgtggggcagggtgataaaagaaaatgtggctgaagttacccgaagttcagcttgcagt

SEQ ID NO: 456516 - DNA, 51 bp, Homo sapiens
ctacaaccttcgatctcctgacgagttgctgaagcacatgtgcctaatttc

SEQ ID NO: 456517 - DNA, 48 bp, Homo sapiens
ccgaactgtgggcaaaaatggcggagtgtgaggaagaggctgtctgtg

SEQ ID NO: 456518 - DNA, 100 bp, Homo sapiens
tctggctacctcgtggacaagtttgcagatcgggagcgcaaggtcgccctcaaggccatgatcaaaacagctgccaaacggaggcccgaagaaaaagaac

SEQ ID NO: 456519 - DNA, 83 bp, Homo sapiens
cagctgactgctcaggaagtaaaatcggtctggagcccggcactgtggtcataacagagcaggcagtggatacctgcttcaag

SEQ ID NO: 456520 - DNA, 75 bp, Homo sapiens
gacggcgagcgcgagcggcgcgagaaaaaatgaagctgttgtcatttctggaaggaaactggcccagcagatcaa

SEQ ID NO: 456521 - DNA, 82 bp, Homo sapiens
agtgtgtcaactcagcgtttctcctctcgtccctgcaattctgtggtgttcttggtcacacatttatggagtttctgaaggg

SEQ ID NO: 456522 - DNA, 90 bp, Homo sapiens
gggttccgatttcagcatcggggcagacaccgccctgaacactatcaccgacgaagagtctaacctgtctctgcaagctcttgagtcccg

SEQ ID NO: 456523 - DNA, 87 bp, Homo sapiens
gtataaagaagctcgagcattctttcagcaattttacctgctcaagaatggaaacctcctcttccagcttatgattttctaagtatg

SEQ ID NO: 456524 - DNA, 103 bp, Homo sapiens
gaatcacttttgagattggtgctcgtttggaggcactggactacttacaaaaatggagtatgctgctgctgttccgctttgcgtcctcgctacaaacgcctgg

SEQ ID NO: 456525 - DNA, 75 bp, Homo sapiens
ctgtcttcggtggactccttcggcagtccacccaccgccgccgcctcccagcctgtcctgggagctggagaggat

SEQ ID NO: 456526 - DNA, 75 bp, Homo sapiens
ccgagatgcggttttcctcgcagaacgcctttatgcagaaggaggatcagctgatttattcggaggatttgctga

SEQ ID NO: 456527 - DNA, 75 bp, Homo sapiens
tcctgctcgttggaggctgtgcagcagaaggtttgaggaaccactggccaacctgttaaatgaacaacatcggac

SEQ ID NO: 456528 - DNA, 98 bp, Homo sapiens
ttcgcgctgctctctaggagagcctcccgggtgtacaactatgagcctttgacacagctcaagaatgtcagagcaaattactatggaaaatacattgc

SEQ ID NO: 456529 - DNA, 98 bp, Homo sapiens
gacgattgcacggaatgcacttaagcagacccgtaatcgacaaaactttgaacgaggctgactgtgccaccgtccccccagccattcgctcctactga

SEQ ID NO: 456530 - DNA, 98 bp, Homo sapiens
tcagatcttcacagcacagttcctgggaaggtggagccaccagcctctccttgtacatggactggacctgcctggagcccagcccagagcatctcctc

SEQ ID NO: 456531 - DNA, 75 bp, Homo sapiens
gcagagggagacgagagggggaccaagacggccgaagccctgcagcccacgctacagccggagatgcagctcgag

SEQ ID NO: 456532 - DNA, 83 bp, Homo sapiens
gtcaagatggataaaaagtcctttgaaatggtgctggatgaaattagaaaggatggatgcaaccttgaaagaactgacaagct

SEQ ID NO: 456533 - DNA, 83 bp, Homo sapiens
agccgcaccatgccgctcctaagcctgcacagccgcggcggcagcagcagtgagagaaaaatggctacaaacttcctagcaca

SEQ ID NO: 456534 - DNA, 76 bp, Homo sapiens
gtcctaaaagaggacgacctgcagccacagacccctttgcttctgtttttgggaatgaatcatttggaggtggatt

SEQ ID NO: 456535 - DNA, 97 bp, Homo sapiens
gtaactttggatgaatggaaaaagaaactggaatctcccaacagagaaattattattttacacaatccaaagccatccagactgaggaagacccgga

SEQ ID NO: 456536 - DNA, 98 bp, Homo sapiens
aaggattccgggagcacagttccgccgaatgatatcatcaagttgaatcgaaaggaagggaagaagcagaattttccaagactaaatagaagactcct

SEQ ID NO: 456537 - DNA, 50 bp, Homo sapiens
tgtacctgttaccactttcaaaaaaccttcagggtttataaatctgacct

SEQ ID NO: 456538 - DNA, 100 bp, Homo sapiens
gtgttcttcgacattgccgtcgacggcgagcccttgggccgcgtctcctttgagccaggcccagacatgtccgtccttgtaagttaaaagcttccatggg

SEQ ID NO: 456539 - DNA, 51 bp, Homo sapiens
cagatttgcttttacaccaataacaatgatgatgttatgttgatttctgtg

SEQ ID NO: 456540 - DNA, 75 bp, Homo sapiens
acgaatcatccacgcacctgcagctctgctgagagagtgcaagccgtggggatggacaaccggaaattttctaca

SEQ ID NO: 456541 - DNA, 100 bp, Homo sapiens
ctgaggtgtttgacaaaacataccaattcttgaatgacatccgagcgaaagagaaagagattccagaatttttctgtgatacatgaagactttccatatc

SEQ ID NO: 456542 - DNA, 96 bp, Homo sapiens
cccgcgcggaggctcgcgagatccgcatgaaggagctggagcggcagcagaaggaggtttaagaattgtttaagctgcatcaatggagcacataca

SEQ ID NO: 456543 - DNA, 75 bp, Homo sapiens
gtgtttgctgcggcaaggacgagccggggcgctgaagattctggatgaaattgaagaacataacatcaaaatcta

SEQ ID NO: 456544 - DNA, 97 bp, Homo sapiens
ggctcactgcagcctcaacctcccaggagtttgagaccagcctgggcaacatagtgagaccccatctctacaaaaactaaaaaattagctgggcatg

SEQ ID NO: 456545 - DNA, 78 bp, Homo sapiens
ggcggcaaatctaagaaatttgaacttaagagatttgagaacttcataaaatctcgtcctccttttgatgttgtcatt

SEQ ID NO: 456546 - DNA, 82 bp, Homo sapiens
ataatgatggcattgttcacattgcagtagacaaaaattcacgtgaggttgttgatcattatgaaaatcctagaaacgtggg

SEQ ID NO: 456547 - DNA, 100 bp, Homo sapiens
cagaggttggatttatgcaaacttgggccaaaggacagttagaagacagtaggtggacatcttcaataaggagctactgctaatccccatccacctggag

SEQ ID NO: 456548 - DNA, 82 bp, Homo sapiens
ggcgctctggctctggctgtgcgcgctggcgctgagcctgcagccggccctgccgagaggtggagaagagcgagtacttgag

SEQ ID NO: 456549 - DNA, 83 bp, Homo sapiens
gaagctgcataccctgagccagattgaaacttctattgcaacagttcaggaaactgtggagatataaatttagtacgactggg

SEQ ID NO: 456550 - DNA, 80 bp, Homo sapiens
gtcctttggtgacaccaagtttgttcccaacttgcccaagcccctgcagatcaagtcagtagtggcaccagagcatgtga

SEQ ID NO: 456551 - DNA, 82 bp, Homo sapiens
ttttgaagagttctgcgttttgccagtcacctctcaactgtgtgccaaagcagatcagccagtagacatgatgagcatcaaa

SEQ ID NO: 456552 - DNA, 82 bp, Homo sapiens
tttcctccacctaccttcccgacaaccatgtccaagggacctgcagttggtattgatcttggcaccacctactcttgtgtgg

SEQ ID NO: 456553 - DNA, 101 bp, Homo sapiens
atatgccttcaagtatggatgagtatgtccatcagacaaatgctgtgcttcatgaagttaaaagagaggggctccccgtggaacaaaggaatgaaatcttg

SEQ ID NO: 456554 - DNA, 100 bp, Homo sapiens
ctgcccatgctccaggcagtggccaagaaccgaggccaagggctcctcgaactcctatgccattaagaagaaggacgagctggagcgtgtggccaagtcc

SEQ ID NO: 456555 - DNA, 73 bp, Homo sapiens
gggacgcttccggttatggcgtcattatgcagccagggttcaaaagatgtcgtgataaaggcacaggttttag

SEQ ID NO: 456556 - DNA, 100 bp, Homo sapiens
gatgatcaagatcttggaaagcactctactggtcaagcagaatacctaccatgagaataagagaaagaaaatgaagatcaaaagcttattcatctgtttt

SEQ ID NO: 456557 - DNA, 97 bp, Homo sapiens
ggccccccaacacctccctgttcatcaggaacgtcgcggacgccaccaggcatgctgcagacagacctttccgtccttcatgaacacacgtgtggta

SEQ ID NO: 456558 - DNA, 90 bp, Homo sapiens
ctctcagaacaacctgcgggtgcactacaaagctattgacctgaaaagtggttctggaaaagtgtaccaaggccctgcaaaaggtgctgc

SEQ ID NO: 456559 - DNA, 75 bp, Homo sapiens
ccgcggcggcagcagcagtgagagcaggaggccactgtctgcagctcccgtgaagatgtccactccagacccacc

SEQ ID NO: 456560 - DNA, 75 bp, Homo sapiens
tgggcgacggcgccttcggcaaggtttacaagcttgctcacttccgacagagaaaaacaaaaggtgacagttcgc

SEQ ID NO: 456561 - DNA, 51 bp, Homo sapiens
cacctgcagtcagtccagagctgcccatgtgggaattttgctgtcctcgtg

SEQ ID NO: 456562 - DNA, 75 bp, Homo sapiens
gtttagagtggaattcgtgtgttgtacagacccttaaggtgtgagttcttgatacgaatgaaaggccaagagttt

SEQ ID NO: 456563 - DNA, 98 bp, Homo sapiens
acctgatcccgctgagcgcccaggaccctgttccatccaaactcttgccctttgagggaccagagacagtgcgcacggccacccccttccccatggtc

SEQ ID NO: 456564 - DNA, 50 bp, Homo sapiens
accctcagcgccggtgcatgtcgatgttcttgggtgtctctggggagtcc

SEQ ID NO: 456565 - DNA, 100 bp, Homo sapiens
cggtctgcaagctgacgtatgttatcaatactctggctgaccatcatcatcgtgggactgactttggtggaagtccttggttacatgtcattattgcgtt

SEQ ID NO: 456566 - DNA, 100 bp, Homo sapiens
cagtgacatcgtcaagcaaggctacgtgaagatgaagagcaggaagctcgggtgcattgctaaggaactgattccagaagccactgagaaatacttagga

SEQ ID NO: 456567 - DNA, 112 bp, Homo sapiens
ctcgctgtgagacatgtctgagactcctgctcagtgtagcattaaggctggtgagattggagagatgaaggatggagtcccagagggagcacaacttcagggaccggttcat

SEQ ID NO: 456568 - DNA, 74 bp, Homo sapiens
tggaacccgctgacgtggatggctgactgtattcccatgcagaatgccaccaagtatggcaacatgacagagga

SEQ ID NO: 456569 - DNA, 76 bp, Homo sapiens
agctcctggaccaccatggccaagaaccgcagggacagaaacagttgggccagagagatgacacgggggaaattcc

SEQ ID NO: 456570 - DNA, 83 bp, Homo sapiens
ctctctttctggcctggaggctatccagcggctgaaatctctttaatgatggagggaagcaggcagacgcgagtgtctcggcc

SEQ ID NO: 456571 - DNA, 90 bp, Homo sapiens
gcctggcgaggatgcaccttcccctgccttggaaagagaatagtgacagtggtacaggaaagaaagaaaaagaaaagaaaaacagaaagg

SEQ ID NO: 456572 - DNA, 75 bp, Homo sapiens
acgaaagagaaacccggagggcgccgggaactggtcatgctgctggagtggtggtcctgcacggagtgtacactg

SEQ ID NO: 456573 - DNA, 105 bp, Homo sapiens
gaccaactggcatcccacagcctcctcttccagaatgcctttgcgcagaaatgactgctgtccatgcaggcaacataaacttcaagtgggatcctaaaagtctag

SEQ ID NO: 456574 - DNA, 100 bp, Homo sapiens
aactcaaaagtcaaccgctgaagagcaggtactaggttttgacaagcttgcatcatgcgtgagtataagctagtcgttcttggctcaggaggcgttggaa

SEQ ID NO: 456575 - DNA, 51 bp, Homo sapiens
aaattatctctggtgctgcagctctgaggaaggaacctaggaagcaagcag

SEQ ID NO: 456576 - DNA, 90 bp, Homo sapiens
gtgcgaccaggtggtcggtgcgcccatcgcggtctcggccttctacgccgcccttagagatttgtttgattccatggataaaacttcttc

SEQ ID NO: 456577 - DNA, 83 bp, Homo sapiens
gggtggacgtggttggtgattggcaggatcctggtatccgctaacagggctggaccccaatggagaacaggtggtgtggcagg

SEQ ID NO: 456578 - DNA, 100 bp, Homo sapiens
ttgcttgcagtgtttctttataatacattccatgggaggagccctggtacctgacagtgtaaagaaggagctcctacaaagaataagaacattccttgct

SEQ ID NO: 456579 - DNA, 82 bp, Homo sapiens
ggagaggtccgcatttatcgtgacaaggccctgctcaatgtcatccacaccccgttaagtgggcagaccaacatccacctca

SEQ ID NO: 456580 - DNA, 51 bp, Homo sapiens
aagattctaagcataggcggaggtgcaggcgcctacaaatcgaggacttcg

SEQ ID NO: 456581 - DNA, 84 bp, Homo sapiens
gaagtaatgcaatggtctcaatctctggaaaaacttcttgccaaccaaagaactgtggctgcaccatctgtcttcatcttcccg

SEQ ID NO: 456582 - DNA, 100 bp, Homo sapiens
taccaggcgaagctggccgagcaggctgagcgatacgacggaatgaatctgaagtctgctgcagtaaaacacagaaggctttaaaatgttttcttgcata

SEQ ID NO: 456583 - DNA, 74 bp, Homo sapiens
ccggctggctcagctgctcccagggctgggagctctgcagtccttgaagtacaatgccagggagtactacgacc

SEQ ID NO: 456584 - DNA, 75 bp, Homo sapiens
cggagagccccggagtgagcggagtagcgagtcggcaacccggagtctgttggacgagctcccccagtcagtgct

SEQ ID NO: 456585 - DNA, 98 bp, Homo sapiens
tcgcctgctttgattcattgaaagtgtccttcttcacatcattatggaatcacccatttttcaccattagctgtatcactctaataggcttgttcttt

SEQ ID NO: 456586 - DNA, 74 bp, Homo sapiens
cggtagcagcctgcagccacggatcctcagtcttccacaatgaaccctgtttacagccccgtgcagcctggggc

SEQ ID NO: 456587 - DNA, 75 bp, Homo sapiens
tccactttcgccagcccgtgccgcgagcgcggcctgcaggagctgagcgtgctccgcctctcaccttccatgggc

SEQ ID NO: 456588 - DNA, 60 bp, Homo sapiens
ttctggtggattatggatcagatccaaatcagtcctggcattgatgtgcctgctccagac

SEQ ID NO: 456589 - DNA, 80 bp, Homo sapiens
gccggccgggagggcctcgggggactgactgattgggaaaatgaggtacgttagtgttcgcgattttaaaggcaaagtgc

SEQ ID NO: 456590 - DNA, 100 bp, Homo sapiens
actcctgcgcctccatgtacagccgctccatccagggccaccatgtctgcctcctggtgaaaaagcggggatctgacgagcttttctctacttgtgtcac

SEQ ID NO: 456591 - DNA, 100 bp, Homo sapiens
gaccaggccctcaagtccctgatggcctcagaggaggagctacctggaccagccctgccttgagaccgtcaaccgcatcaagttgtacagtgagtccctg

SEQ ID NO: 456592 - DNA, 89 bp, Homo sapiens
acaggtctgattacaacaacttcaaggaaattggatcgagaacagcaggcagaacattttctggagttcgtaatggacctgaaagtggc

SEQ ID NO: 456593 - DNA, 97 bp, Homo sapiens
tggtgttcgcccctcagatgaagacagtagttctttggaatcagcttcatcgcagtaggaatggcagccccatctatgaaggaaagacaggtctgct

SEQ ID NO: 456594 - DNA, 105 bp, Homo sapiens
aacaaagtctgctcaaatctcctgctgtgaaccagcagaatttttgaacaggaagatgagagactgcttaggcgccaccactagtaccatgagtccctgcactgg

SEQ ID NO: 456595 - DNA, 74 bp, Homo sapiens
gggcctccggctgccagggaaccgcctggctacgtcaaaagctacctcctcccggataagcagagcaagcgcaa

SEQ ID NO: 456596 - DNA, 75 bp, Homo sapiens
ggggctcagagatccaagtgcgcgccctggcgggtccggaccaaggtaggtggagagttttcaaacactgttatc

SEQ ID NO: 456597 - DNA, 100 bp, Homo sapiens
tgctgggacatgaagcttcgggaacagtcgaaaaagtgggatcatcggtaaagcacctaaaaccagagatttaccgcattgtttctcagaagcaaatgtc

SEQ ID NO: 456598 - DNA, 100 bp, Homo sapiens
ccagaaaggaactcccaagcgactgcaggcagaagctgagacggctaaggtgacaaaggggaaaaaggtttgcttggaatacctggagaaaaaggcaaag

SEQ ID NO: 456599 - DNA, 75 bp, Homo sapiens
aagattccatttatagacacccttcattgcaagttcttatttgtaagttccacttgtcctacacagacaaggagc

SEQ ID NO: 456600 - DNA, 98 bp, Homo sapiens
gggatggtgccacaggaggctgtgcgggccccgctccgcttcgaatgggccaaacgtaccaagaaagtcgggatcgtcggtaaatacgggacccgcta

SEQ ID NO: 456601 - DNA, 98 bp, Homo sapiens
tgaatgcacagctagaaggttggctttcacaagtacagtctacaaaaagacctgctagagccattattgccccgtcctggacccaagccagaagcctc

SEQ ID NO: 456602 - DNA, 97 bp, Homo sapiens
cctcacactccccctgaagttcatctaagatcttcattcttcaaagcaaacccgctggttcagaaccaacacctaagtcacgcattgcagaccttcc

SEQ ID NO: 456603 - DNA, 100 bp, Homo sapiens
ctggaggaggagatccgtatcagatccgccgacgactgcaagcagtttcgggaggagttcaaccccagcctcagcagaagccccaggggacagtggagag

SEQ ID NO: 456604 - DNA, 80 bp, Homo sapiens
ggaagcgcttcctggatgagaagagcggcagtttcgtgagcgacctcagcaggtgctggagaatctggtaaaagcaccat

SEQ ID NO: 456605 - DNA, 100 bp, Homo sapiens
ccggggacacacacgagtccatgtgaaagaattaggtgtcgtactgggccctgatgatattgggacctgctggtatatccttctttctggttccgtgttc

SEQ ID NO: 456606 - DNA, 96 bp, Homo sapiens
aagtacccgtttgagctggtcatggcggaccagaggagcgagagcagcaagaaccacacccagcagcaatgtcagcggaagtggaaacctcagagg

SEQ ID NO: 456607 - DNA, 100 bp, Homo sapiens
atcaccagccaagcagttacagatcccacagcagggttctccaaaaaatgtggaatcctttgcatctatgctgagacattctcctcttacacagatggga

SEQ ID NO: 456608 - DNA, 100 bp, Homo sapiens
cgcgccccgcgccgcagccagccacccgctcagcagatggaggaattggttgagggcgttcgctgggcctttattgacatgctagagaaagaaaatgagt

SEQ ID NO: 456609 - DNA, 82 bp, Homo sapiens
gtcattagaggaaggagaggggccaataggtcaataactgggagatggacaaactagagatggaagatgcagtcacattttt

SEQ ID NO: 456610 - DNA, 90 bp, Homo sapiens
gcagcagcatccgcgtcgttcgtgaagctctatgcagaactgtgccaaggcatcgtggacatagccatttccagtgtcttcccaccccca

SEQ ID NO: 456611 - DNA, 75 bp, Homo sapiens
aacagtgccgacttgcaaacggatgctttcattggatttggaggaaatgtgatcaggcaacaagtcaaggataac

SEQ ID NO: 456612 - DNA, 89 bp, Homo sapiens
ggaagacgaatcgttaaacatctgaaagggtcagtgatgtcttggcattgcccattttcaagcaggaagattccagccttccattggat

SEQ ID NO: 456613 - DNA, 82 bp, Homo sapiens
gcttcgccccgggccccccagcatgaagaccccggcggacacagggtttccaggcctgaggtgcccgccctggccccaggag

SEQ ID NO: 456614 - DNA, 100 bp, Homo sapiens
ttgctgctgcggaattaggagggaaaagtgtatgcgttaaaaggggaaaggctcgttggtggagctttgaaagatgtctggtcgtgctggaagaagaggt

SEQ ID NO: 456615 - DNA, 75 bp, Homo sapiens
gcacggatgggcaccctgggctcgatgttttgcacactagggaccaagaagccctcggggacactgctgagaaaa

SEQ ID NO: 456616 - DNA, 100 bp, Homo sapiens
gaaaaagctgccctgagacggtgtcccgccgaaaggtggagccttttgccagcttgaccgaggccgtgcggagctcagttccccgactgctcatcaaccg

SEQ ID NO: 456617 - DNA, 50 bp, Homo sapiens
gtgtggctgcgatcctcggggaaaccgagcatttggccaagagacgaatg

SEQ ID NO: 456618 - DNA, 88 bp, Homo sapiens
aggaggccaggggtgtcgccatgttccagatggaaacatgtggaagggcctgtggcagaaagaacttggagatttgaaggactggaag

SEQ ID NO: 456619 - DNA, 50 bp, Homo sapiens
agatcgcccccccagatggcacagcaggccaagtttcttcctaacagtgg

SEQ ID NO: 456620 - DNA, 83 bp, Homo sapiens
ctggctctgggccttgaacattccgaaactgtcaagattggcaaggagaatacttatctctggcgcacatcactatatttggc

SEQ ID NO: 456621 - DNA, 115 bp, Homo sapiens
tgaccattttcagcatcagcctgtgcaacagcacatagccaacataaggcagcttggatcttaaaagcaagagcgctaacagaaatggtatacatagatgaaattgatgtagatc

SEQ ID NO: 456622 - DNA, 75 bp, Homo sapiens
atgaatacatttcccaccttcaaatttgaaggcatattggcgttcctgtgctatgatgatgggctgtgtgataga

SEQ ID NO: 456623 - DNA, 96 bp, Homo sapiens
acagaatgcaatcaaagccatgcatcagtctcagaccatggaggttttagatggagcaggattagatattgatttccatcttgcctctccagaagg

SEQ ID NO: 456624 - DNA, 75 bp, Homo sapiens
tgaaaatgctgttgtatgcagtgaaagagttgctgaactacaaagaaaggttcttctgtgtggcagttcagaatg

SEQ ID NO: 456625 - DNA, 85 bp, Homo sapiens
tgaaacaccagactgtcccacagaacactggggatccatcttcggttgtgaatccggcccggaatgcagccaccccttagagcaa

SEQ ID NO: 456626 - DNA, 75 bp, Homo sapiens
cgctcgtggtggaggacttcgtgaaggattcgggcgcctgcttcagtgggcagccattctacaaaagtggaagct

SEQ ID NO: 456627 - DNA, 100 bp, Homo sapiens
ggagtttgatgagaaggaactccgaagggagatcagctatgctatcaagaatatccatggcattaggctccaggatgaaaccaacctgaggctggaagcc

SEQ ID NO: 456628 - DNA, 51 bp, Homo sapiens
cagatatcgaggtggatggaaagcagggattgtcaatgaggcagatcagat

SEQ ID NO: 456629 - DNA, 99 bp, Homo sapiens
cgcgctgattctcacgggcccggctgccggcccccgctctgccctgggcaagcaggaggacttcaagacgacagttctggagggtatggagacggccaa

SEQ ID NO: 456630 - DNA, 95 bp, Homo sapiens
cgacctcgacgtcttgcctgtgtcccacttgttcgcggcctatagctgtgttggggtggaagaggaggaggcgcccgacatcgacatataccact

SEQ ID NO: 456631 - DNA, 98 bp, Homo sapiens
gaggccaatggcagagagaccacagatgcggaaaacgccatgcggtacataaatgggacgcgtctggatgaccgaatcattcgcacagactgggacgc

SEQ ID NO: 456632 - DNA, 105 bp, Homo sapiens
gagactctcctctctcatccgcacgcacaatatcgggcagaaagataatcacggatttttagactctgaggagcagttggagctaatccacattatggaaatgga

SEQ ID NO: 456633 - DNA, 80 bp, Homo sapiens
ctgcatacccactgcacgattcagctgtcggccacgaatatcagtcgaaactttccaagcactgctcgcaggtggactcg

SEQ ID NO: 456634 - DNA, 90 bp, Homo sapiens
gtcttgcagccactcgagacatcacttctgttcgtatccagtcggaattctttattaacaccacccgagcaggtccagggacattatccg

SEQ ID NO: 456635 - DNA, 98 bp, Homo sapiens
agggactgctgcaacctacggggtgtacttgggaacgaggggtgaagcggcccaggtgagggggtattccctcagcggatactacacccatccatttc

SEQ ID NO: 456636 - DNA, 82 bp, Homo sapiens
ggaggagaagctcagcgcagccctgcaggccaagcgcagcctccaccaggtttggggaaaggtgctgctgaagcaatggaag

SEQ ID NO: 456637 - DNA, 74 bp, Homo sapiens
gacgtcttgcctgtgtcccacttgttcgcggcctataggccaccagcccctcgggttccaagatgcagctactg

SEQ ID NO: 456638 - DNA, 100 bp, Homo sapiens
aacaacaactgctacatctgttggaggagccaactagcatggaagtgcagtcacggaacagcaaatttctgagaagttgaagactatcatgaaagaaaat

SEQ ID NO: 456639 - DNA, 100 bp, Homo sapiens
cgagctccagccgaaggagaaggggggttcaaaactggtcaaatcaatggtgatttgctgatataccatgtcttactgactttaaagccatattatgcaa

SEQ ID NO: 456640 - DNA, 135 bp, Homo sapiens
tttgattttcaagttggagaagacccacctttgtttcctagtgagaaccgagtcagtgctcttacccagtttggtgccctggttgtcagatgttggaaagcagtaggacggaacatactcttcgtggttgtgtat

SEQ ID NO: 456641 - DNA, 90 bp, Homo sapiens
tgccgctgaatgggctgaaggaggaggacaaagagcccctcatcgagctcttcgtcaagggtaccatgatcctgaccaatttgacggcgc

SEQ ID NO: 456642 - DNA, 88 bp, Homo sapiens
attcccagtttgacaccacaggctgagctccctgaaccaggctacccacctttctgttctgagacccctcaagagacatataagaagg

SEQ ID NO: 456643 - DNA, 96 bp, Homo sapiens
gtccatcctgcagcaaagactttggtagacattgccaaatcccaagatgctgaggtttgtttgaagagactgtaccagagggccagggaggaggag

SEQ ID NO: 456644 - DNA, 89 bp, Homo sapiens
tatgtgaatgggaagcttgtgacggagccgctggtgctgaagtcagggagttcaggcacaaaagcaacatcaccttcaacaacaacgac

SEQ ID NO: 456645 - DNA, 82 bp, Homo sapiens
ttcaccaaataagctatatactttggttacctatgtacctgttaccactttcaaaagaaatctggcattttttaaagtttgc

SEQ ID NO: 456646 - DNA, 100 bp, Homo sapiens
tggaaaccgatacaaagccaccagtggatagctttaaagcaaagggggctccccctcgagatggaaaagtggccacagatgtctttaattccaaaaacct

SEQ ID NO: 456647 - DNA, 100 bp, Homo sapiens
tgacctggatatgaaccagtggcttcaaggtatttgaaatatctcaccaaaaaatatttgaagaagaataatctacgtgactggttgcgcgtagttgcta

SEQ ID NO: 456648 - DNA, 90 bp, Homo sapiens
cctcgctggagatcgagtaccaaagactctacaggggcaggtaattcactggtccacaagcggtctcctttacgtcgaaaccaaaagacc

SEQ ID NO: 456649 - DNA, 96 bp, Homo sapiens
cgttggtcttctgatagcaactttaatgtggttatgaagacagtatggagtttccagaccatagtagacatttgctacagtgtctgagcgagcaga

SEQ ID NO: 456650 - DNA, 100 bp, Homo sapiens
ccagctgaacaggccaaagccagactacagctggttcttgaagctgctggagatgagtatgatgtatgtgccatttgtttggatgagtatgaagatggag

SEQ ID NO: 456651 - DNA, 83 bp, Homo sapiens
ccaagacacccagagagggacaggtttggtgcacctcgatttggaggaagtagggcagggcccttatctggaaagaagtttgg

SEQ ID NO: 456652 - DNA, 75 bp, Homo sapiens
cgacctggagcggggatacacggtgatgggcagaatctgtttacgaaagacgtgacagtgatcgagggagaggtt

SEQ ID NO: 456653 - DNA, 75 bp, Homo sapiens
accgcaactctcagttcgagagtaaaggagtataagctgatgtacgggatgctcttctctatccgctcgtttgtc

SEQ ID NO: 456654 - DNA, 96 bp, Homo sapiens
tgagcacacaggcccgagacaggctggattgtgtccacatgttgctgcaaatgggtgctaatcacaccagccagatcctcgttgcctgctaaccaa

SEQ ID NO: 456655 - DNA, 126 bp, Homo sapiens
cgatttccgcatccggctccggacgcttccggtcttagctggacccgtctgggagaacctgacgacccggcgacggcgacgtctcttttgactaaaagacagtgtccagtgctccagcctaggagt

SEQ ID NO: 456656 - DNA, 51 bp, Homo sapiens
caatcctgaatctgcaacaactttcaaggaattctatgagcatgccaaggc

SEQ ID NO: 456657 - DNA, 98 bp, Homo sapiens
gaattttgtgaattggaagtttttgctaaagtactgagagctttggataaaagtgagggccccaaggctgttgcagctcctcgacctgatcggttggt

SEQ ID NO: 456658 - DNA, 98 bp, Homo sapiens
gcatgtatttgtgttgttactgatgcagagatacagcaaaagagtctacatagattttaccaaatgttgcaagaactctggagttcttatggtagtaa

SEQ ID NO: 456659 - DNA, 83 bp, Homo sapiens
ctcaaacaagtaatggaggagaagctgaatgcaacaaacattgagtcaccaaaggcttcgtgtacagctctttcctaaagccc

SEQ ID NO: 456660 - DNA, 100 bp, Homo sapiens
cgcaggagccgcgcccggacccaggctatccagtcagttcgctgctattcccatgggtcacaggagacagatgaggagtttgatgctcgctgggtaacat

SEQ ID NO: 456661 - DNA, 97 bp, Homo sapiens
atcaaaatatgcagtctcttttaccagcaggcaggtgtttgtttgccagtggcagtccatttgggccagtgaaacttacagatgggcgagtctttac

SEQ ID NO: 456662 - DNA, 51 bp, Homo sapiens
gcaggggcctcaattaatgtatctggaactctaatgaatcattgattgacc

SEQ ID NO: 456663 - DNA, 97 bp, Homo sapiens
ctggcccaggcatggaacccgagaccacagccaccactattctagcatccgtgaaggagcaggtcccctcttgctgttggctgcacatcaggaaggc

SEQ ID NO: 456664 - DNA, 80 bp, Homo sapiens
atttgttaaggattccaagtaactcttatttggttgtgaccgagattcccgacgagagagactgaggggaagagaggaag

SEQ ID NO: 456665 - DNA, 82 bp, Homo sapiens
aaagatggcggcagggaccagcagttactgggaagacaatgcagatcttcgtgaagactctgactggtaagaccatcaccct

SEQ ID NO: 456666 - DNA, 100 bp, Homo sapiens
gcggctgggccgagtgggtgtctggtgccggcgtttgggctacggttgttgttggcgactgtgcttcaagcgatggaggagatgtataagaaagctcatg

SEQ ID NO: 456667 - DNA, 50 bp, Homo sapiens
ttcgaggccgataactctgaggaaggctggagctattggccagaaactcc

SEQ ID NO: 456668 - DNA, 89 bp, Homo sapiens
cgcccagatgatgcggtggtgggggacctgccggcacgcgactccccccgggcccaaagtcccaggtctccccgctgcgctgcttgagg

SEQ ID NO: 456669 - DNA, 50 bp, Homo sapiens
ttcttctgtatagaaatgcaagctgccaggagtggtggctcacacctgta

SEQ ID NO: 456670 - DNA, 100 bp, Homo sapiens
atttactttattgccactcctcacgatggcctatttaaaggtcacccctcctaatttctcagtgtcacaagtgcccaacatgcccagctgtccccaggcc

SEQ ID NO: 456671 - DNA, 100 bp, Homo sapiens
ccgggaaggagcatcccaggacctaccagaatctgggttacgactcactgattaaaaagagggactttttcaaatactttgcacttttgattgtgtatta

SEQ ID NO: 456672 - DNA, 83 bp, Homo sapiens
ttttagagctggcagcagcatctcagcccaagagaaggaacgtcaaggtcgtgggaaataaaaggcagttctacacagactgc

SEQ ID NO: 456673 - DNA, 90 bp, Homo sapiens
gtcacttttaaaaaataagtaatgccatctgttttcctaaaagactgaaatgggggcgaccattcttagtttgaaggatgacctctagga

SEQ ID NO: 456674 - DNA, 100 bp, Homo sapiens
tttgatgtggatgatgccaaagttttattagcaataacaattggtcgtcttggttacgtttgtcctcaagaggtggcccccatgctacagcagtttataa

SEQ ID NO: 456675 - DNA, 96 bp, Homo sapiens
tcttccactggcgacgtgcagcggaggagggcaaggactacccctttgccaggttcaataaggtggacatcttcaataaggagctactgctaatcc

SEQ ID NO: 456676 - DNA, 98 bp, Homo sapiens
tacaaggccatcgaaatgccctcacaccagacctacggagggagctggaaattcctgacgttcattgatctggtagttattactagtaaaagcggaga

SEQ ID NO: 456677 - DNA, 76 bp, Homo sapiens
ggaccagacaaatcaaattagtggttttgattcaagatggaaaaggtgatgtaaccattacaaatgatggtgctac

SEQ ID NO: 456678 - DNA, 98 bp, Homo sapiens
acactggcccaaatatttcctgcagcaaagaatggctcaagaagtactgacacatttaaaggagcatcctgatgcttggacaagagtcgacacaattt

SEQ ID NO: 456679 - DNA, 104 bp, Homo sapiens
aggccatcaacaagctgaaccccaaacccaaattcttcgttctgtgcggcgacctcatccacgccatgccagatccagaagcagcaaggtctagcaattccaaa

SEQ ID NO: 456680 - DNA, 75 bp, Homo sapiens
atggcgaccgagacggtggagctccataagctaaaggttgggggccgtcccgctcctaaggcaggaagatggtgg

SEQ ID NO: 456681 - DNA, 98 bp, Homo sapiens
ccgcagacgaggatcatccagcagcctttgatataccagaatgcagctactagctttcaagtgagacggtttaagcggaagcatcttactgccattga

SEQ ID NO: 456682 - DNA, 100 bp, Homo sapiens
atgggccctgttgagaggaccctgtacagagatgtgatgctggagaactacagccacctcgtctcagtggaatatgacagatacctagcatctagcaaaa

SEQ ID NO: 456683 - DNA, 75 bp, Homo sapiens
gagcagccctggtgtcacctatcagtaaaaggacgtagacaagtttggcaacgagatcacccagctggcccggcc

SEQ ID NO: 456684 - DNA, 87 bp, Homo sapiens
ccacgcaggcaaacgagaattaaatgccgagaaggccagtacggacacattcagctaacgtattttagcaggtggagtgaggttgaa

SEQ ID NO: 456685 - DNA, 100 bp, Homo sapiens
cgggccttctggagatgcttccgaactgtgggcaaaaatggcggaagctgaatatggtgggcatgatcagatagatttgtatgacgatgtcatatctcca

SEQ ID NO: 456686 - DNA, 100 bp, Homo sapiens
gcggaagcggagaccatgttccgagcggcggctccggggcagctccggcgggcggtgggaaactacctccgtatgttccgaggttctctgtacaagagat

SEQ ID NO: 456687 - DNA, 100 bp, Homo sapiens
gacactaaagactttgtagccatcaacccgagtgcagtttcgatggaaaatgaagaaagctacatccatattggaattttaccgggaacttggattgccg

SEQ ID NO: 456688 - DNA, 100 bp, Homo sapiens
ctctgagccccgcaagaactctgcaatgaggtgtcacgtcttgaaattttaaatgtcctcagtgactctctacctctggcagatgatgttgaccttcagc

SEQ ID NO: 456689 - DNA, 90 bp, Homo sapiens
cgaacgcttcgctggccatttaggagctctgctcaaagccagacggcccatcaaactccagagaagagagtgaatactggagaagaaagg

SEQ ID NO: 456690 - DNA, 100 bp, Homo sapiens
cggctgcagcagtgaggccaagctccagtgtcccacttgcatcaagctgggcatccagggctcgtacttctgctcgcagccacaagtatatggttatgat

SEQ ID NO: 456691 - DNA, 96 bp, Homo sapiens
gaacccgtgggcctgtggactgcagcctcggcggtcagcaggatgaatttcacccattcatcgaggcacttcttccacatgtccgtgcaattgcct

SEQ ID NO: 456692 - DNA, 99 bp, Homo sapiens
tgcatcccagacccccgatgtcgtgttcgcaagcatcctagcagccttctccaaagccacatagagtgactcagacatctcctctacaagtacctaacc

SEQ ID NO: 456693 - DNA, 82 bp, Homo sapiens
tagacaccaagaaggacgcactgactcgcctcaagcacctgcgcatcgtcatcggagagaagcctcatcagtgccaagtctg

SEQ ID NO: 456694 - DNA, 100 bp, Homo sapiens
gggtgaaagaaaatcctgcttgacaaaaaccgtcacttaggaaccacgaccatgcctgcatcgcctgtcggatcatctatcggtcagacgagcaccaccc

SEQ ID NO: 456695 - DNA, 137 bp, Homo sapiens
cttgttttttcatattacatctacaagaggggacaagtacctttatgaaccagtgtatcccaagggttctgaaggaacattaaatgactgcaagataatatctgtagatgaaatcttcaagattgagagacctggag

SEQ ID NO: 456696 - DNA, 100 bp, Homo sapiens
cctcagaattggtttagggttgtttcgcggttcttcccgtattctgcctccgaggcccagtggggctggctgtggggggcccatcctgatggagctgcag

SEQ ID NO: 456697 - DNA, 96 bp, Homo sapiens
ctgcggagaggcggcggccgcggcctccgcaagccgcctaaagaatgttttttgatacaaccaaaggaaagaaaagagaataccaccaagaccagg

SEQ ID NO: 456698 - DNA, 97 bp, Homo sapiens
ggcccggaagaaatagaatgtaccaaactgggaaactggtctgccatgccaagttgtaaagctcgatgaacttcgggatgaagggaaggcttcgtct

SEQ ID NO: 456699 - DNA, 90 bp, Homo sapiens
acgagaagctggccagcgacacttacagccagctggcccaccccatccagcaggccaaggcactgggtctccagttccattctcgcatcc

SEQ ID NO: 456700 - DNA, 82 bp, Homo sapiens
cggcggagacgatgcctgagatcagagtcacgcccttgggtttggtgcacctcgatttggaggaagtagggcagggccctta

SEQ ID NO: 456701 - DNA, 100 bp, Homo sapiens
ggcagacaaggcccgcaagaagctcctggcgagggagcaaaggagtttgctgctgctctcaccgctgagcggataaagaccccaccaaaacgtccaggag

SEQ ID NO: 456702 - DNA, 105 bp, Homo sapiens
ataaatggagcaacaaggctgactataagaggggaagttgtggacatcggatacccaaggagacgaagctgaagcaggagaaggaggggaaaattaaccggcctt

SEQ ID NO: 456703 - DNA, 50 bp, Homo sapiens
ccaggagaagccgcccaaagaactgcactggccatgggcctctgtgtcgc

SEQ ID NO: 456704 - DNA, 100 bp, Homo sapiens
atcaccctgcttgagcaaaggaagctcctctggacccttcccgctgcccagcgctggggacgccttcctcaccctgcggactctggcctctctccagcct

SEQ ID NO: 456705 - DNA, 146 bp, Homo sapiens
cgacttgtccactgaagtaacagcagcaatgaccttccctcgggaattccacctctgcgtttttccctccagaatgctgcttctaaattacttgggcaaaattgggtccaaaacgcctttgatggcagctgcaactttttccgttg

SEQ ID NO: 456706 - DNA, 75 bp, Homo sapiens
aacattgttactagatgaatgtccattgcccactaaacgggagatacagatgacccaccaagaattactcagaac

SEQ ID NO: 456707 - DNA, 100 bp, Homo sapiens
acatatgcaaaattacaaaaatgtcatcagctaatgtctacctcgaatcaaagatgttccagcctggctgaaaagcctccgcctgcacaaatatgccgcg

SEQ ID NO: 456708 - DNA, 85 bp, Homo sapiens
agagatcggcggagaccctcgaagtgcgcaaacttgacactcaccctgaccgcattgtgatgaccacctgctccaccttctgtgc

SEQ ID NO: 456709 - DNA, 100 bp, Homo sapiens
tggacccggacccaaagtgccatgtctttaataccctacagcttggggcctgggctcctctgaccatcctcattgagaaaggaaagtgagtccagagaag

SEQ ID NO: 456710 - DNA, 83 bp, Homo sapiens
aacagacttcggagtacctgcgctatgaagacacgcttcttctggaagaccagccaacagccattttgcagactctgatcaca

SEQ ID NO: 456711 - DNA, 50 bp, Homo sapiens
cacggccagatctgccctccagccaaatagttgcatcacatgtatctaat

SEQ ID NO: 456712 - DNA, 100 bp, Homo sapiens
gataacttctatgtgattgatcaaggagagacggatgtaatgctggaggatggaagaagcaaagggtttggcttcgtctgcttctcatctcctgaagaag

SEQ ID NO: 456713 - DNA, 101 bp, Homo sapiens
aagcgacaccgaggaattctatgatgcccctgaagatgtgcacctagggggcggctaccccgtgggatggactagaggcttttaccagatttcttaaaact

SEQ ID NO: 456714 - DNA, 75 bp, Homo sapiens
gagtcctgtaggcaaggtcttacctgaatcagcatcgagagtaaacatgaggttacgatcctgggaggacttaat

SEQ ID NO: 456715 - DNA, 100 bp, Homo sapiens
aagcgagcaatttccacctctgtgtgtgtacgagctcatggcaccacaccaaccccgtgggcactgagtggcggtggaagatggaccagcctgaaatgat

SEQ ID NO: 456716 - DNA, 100 bp, Homo sapiens
cttcgcgacacccttgaagctgagaaatggttatccggtgttggctcctgctgcttactatgaccaaactggtgcccttgtagtgaatgcaggcgcgaga

SEQ ID NO: 456717 - DNA, 100 bp, Homo sapiens
ttcctcatgtattgaagaattccaatcccagttcatttttaacattgacatcaccaatttcagcagcagctggagcgatggcctggccttctgtgctctg

SEQ ID NO: 456718 - DNA, 104 bp, Homo sapiens
cgcctctgcctttcaaggtcatgatgttggattctgttgcctgggtaccaccagagggaaagctggggcgttgattatggaagattcccacaagagtaccacgt

SEQ ID NO: 456719 - DNA, 71 bp, Homo sapiens
cggccagcagaaggagaacacgctgcttcacctcttcgccggcggtgcaatcaaactgaggccgaaggaag

SEQ ID NO: 456720 - DNA, 89 bp, Homo sapiens
gttcgggtttttctagaacacggaggtatctcagatgaagacatcatcaacattactcttcctactggagtccccattcttctggaatt

SEQ ID NO: 456721 - DNA, 82 bp, Homo sapiens
gagaaacctcaaggagatcttcttcaatatcttggtgtttcccattaaacactaccaggacaaaatcaggccttacatccag

SEQ ID NO: 456722 - DNA, 75 bp, Homo sapiens
acatgacgcaggtgcaggtgtctcttctcgccctggcggggaagggtggactccattatgctggtggaagagggc

SEQ ID NO: 456723 - DNA, 90 bp, Homo sapiens
ggagaaggacgctgccattgaccaagaattctgccagatatcaggacagatggggaacagcagaagccgtgtggggcggagcttttgttc

SEQ ID NO: 456724 - DNA, 75 bp, Homo sapiens
aagaactgttgaaactagcaacatctataagtgaaaccttggaagagaaggtcaagaacccagtatggaagggag

SEQ ID NO: 456725 - DNA, 75 bp, Homo sapiens
gatgtggggggattctcgacctgctaacagaactggaccttttcgcaggatgaagttaaaggaagtagatcgtac

SEQ ID NO: 456726 - DNA, 100 bp, Homo sapiens
accacggtctacttctatgaattgcaggagaacctggagaagctccttcaagacagagagtctacaaggagattgaacaggtggttggcccacatcgccc

SEQ ID NO: 456727 - DNA, 100 bp, Homo sapiens
cttttcctcgcacgtggtggagatccagacatttaatgtggatgcaccatgccagaccgtggaagatttaacgaatggggttgtgatggcccaggttctt

SEQ ID NO: 456728 - DNA, 75 bp, Homo sapiens
gcaacacgaggctgccgttcagcacccgtcgagcagggtctcgctgttggagttggatttggggctatagaaaag

SEQ ID NO: 456729 - DNA, 74 bp, Homo sapiens
aaaagggtaaaactaagcagtggcaccaaaggtacagcctgtacacccgcacctggctcgggtacctcttctac

SEQ ID NO: 456730 - DNA, 75 bp, Homo sapiens
gcctcagttggaagcagccgatccagcctgcggagcctgtggggcagcggagcgggcactggacacaatgaactt

SEQ ID NO: 456731 - DNA, 75 bp, Homo sapiens
aggaactcgactcagacgtggataaagataatcccgaaatcttcccaaggctgcagacaccgacggatttgcttt

SEQ ID NO: 456732 - DNA, 101 bp, Homo sapiens
cttagctgtgctcgcgctactctctctttctggcctggaggctatccagcatgtgaagttcatttccaatccgccctccatggtggcagcggggagcgtgg

SEQ ID NO: 456733 - DNA, 100 bp, Homo sapiens
aggtggaatgttttttgctgcaatgctgcaaattaattcatcattagagaaattagatctgggtgactgtgatctgggatatcatgataacacattttga

SEQ ID NO: 456734 - DNA, 98 bp, Homo sapiens
tatgaagaaagaggttttatgtgccaagctccaagcgcttggtgaccctggcccggggactttcgcccgcctttctgcgcttcgggggcaaaaggacc

SEQ ID NO: 456735 - DNA, 100 bp, Homo sapiens
gatacagatccacgggttttagaaaaacaagaattacagcagccaacctatgttgccctgagttacataaatagatttattgccaaaccctgtgcactct

SEQ ID NO: 456736 - DNA, 100 bp, Homo sapiens
cgagcagcacagagacggctgaaagctgagctaggaattcccttggaagagaattgctgggcacccactggctcagaatgaacgctgcctacacatgttc

SEQ ID NO: 456737 - DNA, 83 bp, Homo sapiens
cagaagctccagagcccagacttgcagcaaagtgcagaggaaagttccacttccagaaaaagaactacagaagacgatatccc

SEQ ID NO: 456738 - DNA, 100 bp, Homo sapiens
tacagcttggtgaagagttactagctcaagggcccccttctttgatgcagttatgccgccttagaattcggaagtgttttggaatccagcagcatcataa

SEQ ID NO: 456739 - DNA, 100 bp, Homo sapiens
ccgcttgcttgttgctgatcaagacttttcctttaaagctggccagtggtcatcatcagatttgaaatatttaaagtggatacaaaactatttcagcaat

SEQ ID NO: 456740 - DNA, 75 bp, Homo sapiens
cacgcgaggcggaaagaagaaatccgaggaccggcgacgcctagaacaggaaagtctttgggttcggaggattcc

SEQ ID NO: 456741 - DNA, 95 bp, Homo sapiens
tgtgacctgtggagacacggccagatctgccctccattttatcttcaagacactaaaagtagtaatggtacttttataaatagccagagattgag

SEQ ID NO: 456742 - DNA, 83 bp, Homo sapiens
tctgtcttcggtggactccttcggcagtccacccaccgccgccgcctcccagcttgctatggcatcgttcaggtgccaacggg

SEQ ID NO: 456743 - DNA, 98 bp, Homo sapiens
gatgacatatttttggacctgaaacagaaattctggaacacctatatggtatgatctcgtgaaaccttgagagaaactgaatgacgaatgaaactatt

SEQ ID NO: 456744 - DNA, 100 bp, Homo sapiens
cttcattttgctcttcaacgcctggtgcccaggtgtgatgaatgcagactctgctaccattttggctgtttggatcctcctttgaaaaagtctcctaaac

SEQ ID NO: 456745 - DNA, 90 bp, Homo sapiens
cgagccagaggggaaagtatttgtggtaataacccttaccgggagtttcactgaagatgtcatctgggtgattctcagtgtggaggtggg

SEQ ID NO: 456746 - DNA, 100 bp, Homo sapiens
ctggcacagcccggcggcagcagctggaggaggatcgcactgctcatcttggccatcactatacacaacgttccaggtggctttctttcagatgcaggct

SEQ ID NO: 456747 - DNA, 98 bp, Homo sapiens
gcgggaaacgctgtttgaagcggatattctcccaggagtacatcaacctcctgctgtccatgtatttcttcgtgctgggaatcctggccctgtcccac

SEQ ID NO: 456748 - DNA, 51 bp, Homo sapiens
cctcccaaatagctgggactacagactgcgccatggggctcagcgacgggg

SEQ ID NO: 456749 - DNA, 75 bp, Homo sapiens
ctgagtgtctaccagaagtgcaaggacaagcaggctgctgctaagttaacacagaaatctgcctcctgggccatg

SEQ ID NO: 456750 - DNA, 100 bp, Homo sapiens
caaaggaagacttgtaacctggagaagaggataatttcttgagaggagataactcccgtaaagttcagcaccagcagcagaggaaacccaggaaaaaaac

SEQ ID NO: 456751 - DNA, 87 bp, Homo sapiens
aggaacgggcccgtcaagctgcgcctgacagggagtgcatccgccccaacccttttccccctcgtctcctgtgagaattccccgtcg

SEQ ID NO: 456752 - DNA, 100 bp, Homo sapiens
gcaaactccccatccagctccagagttcgaggaagggctgctggacagatgtcctgccccaggaccccatcccgcgctggtggagggtcgcaggagcagc

SEQ ID NO: 456753 - DNA, 75 bp, Homo sapiens
ctctctgctgcggcgcggggaccgctgtgctctcggagaaccaggtgcatcagcgcattgcggagctgaggaaag

SEQ ID NO: 456754 - DNA, 101 bp, Homo sapiens
gaaaagggaagcccggaatttgctcaaatctcatcttaaccttggtcctactgctctgttggctcatgaaataggttttggaagtaaagttacaacacacc

SEQ ID NO: 456755 - DNA, 100 bp, Homo sapiens
ttcagtgcattcatgaagcatctgaaaaagctgtggaaggctctggataaggaccagtacctgcccaggaaactgatatgtgtaagaagagcttgagccc

SEQ ID NO: 456756 - DNA, 83 bp, Homo sapiens
gcgggggattgtgggagtctccgcgtcccgctcgctgggagagagtgtaaatgagcaaagatggatcaggaaggtgggggaga

SEQ ID NO: 456757 - DNA, 100 bp, Homo sapiens
ctcttttccctttcttatagtcgagtaatcctgcctgtgtctgtagatgagctgcccaacatgttcggcgaccttcggtccacgtttattgccttgatga

SEQ ID NO: 456758 - DNA, 100 bp, Homo sapiens
cgcctactgaagccggcgctgctctgtggggctctggccgcgcctggcctggccgggaccatggatcccatgacagattctgttgtcacgtctccttaca

SEQ ID NO: 456759 - DNA, 100 bp, Homo sapiens
gccggatccaacacctttccccagctctgcgcgtaccgcgctctttggaaacgaattgctgagtcatcactagagagtgggaagggcagcagcagcagag

SEQ ID NO: 456760 - DNA, 100 bp, Homo sapiens
accgagagcgcgaatatcgtcatcgttagaaggaactatggaggccgcgcccgggacccccccgccgccgccatcagagtcgccgccgccgccatcgccg

SEQ ID NO: 456761 - DNA, 88 bp, Homo sapiens
gcgccggcgagatgcctttgttcaccgccaaccccttcgagcaagacgtgggacatcatggtgatgttggggctcccatagctgatgt

SEQ ID NO: 456762 - DNA, 50 bp, Homo sapiens
gaaaacatctgtaactactagcccacaggcctgtggaggctcaatccaga

SEQ ID NO: 456763 - DNA, 90 bp, Homo sapiens
atgcaacaaagctgaatgaactcattcaggttgggcctgaggtcctttcgagactgctggggaacctggtggtgaagaacaagaaggccc

SEQ ID NO: 456764 - DNA, 98 bp, Homo sapiens
ggggccagagcgagtgcgcctcctgcccgcggaccgcggcagcccagagcagctctgtgcctcagacaaaattctggagtttgatcgagattttcgaa

SEQ ID NO: 456765 - DNA, 100 bp, Homo sapiens
tgcgatgtttggaaatgatacaattacctgcacgacacatggaaattggactaaattaccagaatgcagggattggattatggaagtgggaagtgaagaa

SEQ ID NO: 456766 - DNA, 97 bp, Homo sapiens
agcatggccaactccgggcccaacagcaacaggtctcaattgtttctgggtggagcggacccctgtgcacgaggcagcccagcggggtgagagcctg

SEQ ID NO: 456767 - DNA, 82 bp, Homo sapiens
gactctatgacatctgctgcctgggaccagttactctccacaagaaaattcacacaaccacagtgctcttcatagttcaaat

SEQ ID NO: 456768 - DNA, 98 bp, Homo sapiens
tggccggctccggaggcttggtgactccagtggcccaggtcttcgccttgatcgtgttctcctgcatctatggtgagggctacagcaatgcccacgag

SEQ ID NO: 456769 - DNA, 96 bp, Homo sapiens
cccagggcctggatgactatggagcgcggtccatgagcagacaaacgagggagcaggagacaccccctgactttttttatttctctgactacgaga

SEQ ID NO: 456770 - DNA, 100 bp, Homo sapiens
aaaaaagatcagaacagaaattctattgagaacatagccaatgagactgtgaacgtgctgtggaatatatggaggtcacaagccccaaagtggacgtgtt

SEQ ID NO: 456771 - DNA, 52 bp, Homo sapiens
tggcggagtcggggctcctgacggtactaggttttgacaagcttgcatcatg

SEQ ID NO: 456772 - DNA, 74 bp, Homo sapiens
aagattctaatcaggcagatgtaaaatctgatgaagctcccattgctatcacatgttttaccagaggcttggac

SEQ ID NO: 456773 - DNA, 90 bp, Homo sapiens
cctctcgccaagggccccaatgagtggcacacagtctactatcaccgacaggaatttagataatgggctgtgtgcaatgtaaggataaag

SEQ ID NO: 456774 - DNA, 95 bp, Homo sapiens
atttgccaagcagacaggccagtggatcggaatggtggagaacttcaaccaggcactcaaggacataagcagctctatgaccaatagcacagctg

SEQ ID NO: 456775 - DNA, 100 bp, Homo sapiens
gaaagtttgtaggaaaattgctgcacatggcctttgcagaaaagagaggttcagctctatgaagattttgctaagtctcgtgccaagtgtgatgttgatg

SEQ ID NO: 456776 - DNA, 100 bp, Homo sapiens
gggtgttcgactgctagagccgagcgaagccaataatgacgatgaggacctgacaccagagcagaaggcagagcgtgagaaggagcggaggatggccaac

SEQ ID NO: 456777 - DNA, 97 bp, Homo sapiens
gaccatttatttctttggagacaaaactatgccagctgcagaagatgtcaatgttactttcgaagatcaacaaaagataaacaaatttgcacggaat

SEQ ID NO: 456778 - DNA, 75 bp, Homo sapiens
ttcctgcagtaccccactctacgatcagcgcatgattgcaaatacggccagaacagtgagatactacaggagcca

SEQ ID NO: 456779 - DNA, 75 bp, Homo sapiens
ctttgacaccgtcctgtgggccatagaactgaagcaggcccagaccctgatgagctccctgggctgaggagaagg

SEQ ID NO: 456780 - DNA, 100 bp, Homo sapiens
gccgctctcccctcctctcacggcacctcccaccatgaagcctcgaagcggaggatccctgtgtcccagccgggcatggccgacccccaccagcttttcg

SEQ ID NO: 456781 - DNA, 98 bp, Homo sapiens
cgtgaacatagctttaataggaaactaattctgaagcaagcccttatagttgtgctgcagtggtgtttcaatcacaattttagtgttcgactgtatgc

SEQ ID NO: 456782 - DNA, 100 bp, Homo sapiens
gcgaggcagcggcaccttcgagcgtctcctagctttttacctgcacctactcagctatctcaggaccagcttgaggctgaagaaaaggcaagatcccaga

SEQ ID NO: 456783 - DNA, 73 bp, Homo sapiens
agaagatcacccggaccaaggaggaggccctggagctgatcaacggcttcagggatgacttcttagggggcag

SEQ ID NO: 456784 - DNA, 90 bp, Homo sapiens
gatttgcgccatcatcctcatcatcatcataggtaacctgtgtatggtgactggaggtgctaacctaggaagaattggtgtgatcaccaa

SEQ ID NO: 456785 - DNA, 101 bp, Homo sapiens
ccagcaagacgctgcccgccatcgaggttctgtttggattctgcaaagcagactcgtcagaaagttgctgtgaactggaccaacttcagcctcaagaaaac

SEQ ID NO: 456786 - DNA, 75 bp, Homo sapiens
cccttacagtttctttgagcagtttgtggaagcgatcaatcttggagaaattcattcaaggcttttggatcacag

SEQ ID NO: 456787 - DNA, 100 bp, Homo sapiens
cccactgaaaaagatgagtatgcctgccgtgtgaaccatgtgactttgtcacagcccaagatagttaagtgggaacatacatatgatagttgagaaagac

SEQ ID NO: 456788 - DNA, 100 bp, Homo sapiens
gacgacctggctggcatgttcctccagattatgtttgagaccttcaacaccccggccatgtacgtggccatccaggccgtgctgtccctctacgcctctg

SEQ ID NO: 456789 - DNA, 100 bp, Homo sapiens
ggctttcctgtaccgaacagatttgcttgttgggtcgaacttgtggctattcatttattctcaccagggtgtcatggagaaactccagctgggcccagag

SEQ ID NO: 456790 - DNA, 90 bp, Homo sapiens
ccttgatcttggacttccagcctccagaactggaaatcctcattgacgattcaatttgttgaaggccaatttgtggactcctacgatcca

SEQ ID NO: 456791 - DNA, 101 bp, Homo sapiens
cagggaataccgaccctatgagacagagaggcaggcagacttcacagctgagaagtttccagatgaaaagtttctgctgatgtactccacggttctgtgca

SEQ ID NO: 456792 - DNA, 136 bp, Homo sapiens
ccattgccagcagcagtgacgatcggatgaatgagcctccaacctctcttgggcttgtgcctcaccaggaacaagactgccaatggagactgccgcagagacccccgggagcggagccgcagccccatcgagcgcg

SEQ ID NO: 456793 - DNA, 101 bp, Homo sapiens
tgctcgaggatgctgtccaggtgggcggccgcgggcgcgatgcggcactgcaggtttttcccactcggctttcacgtttgggattgagagccacatcagcc

SEQ ID NO: 456794 - DNA, 76 bp, Homo sapiens
gggactgtctgaccctcatccctgccttctcccgggaacaggagcagcatgtgccctttgacatccacacctatgg

SEQ ID NO: 456795 - DNA, 87 bp, Homo sapiens
cggctgcatgccgcctcctatctgcccgccgctcgcgccgggcccgtggccggcaggaacgaatgcaggaatttgggaactgagctg

SEQ ID NO: 456796 - DNA, 75 bp, Homo sapiens
cgaagcaatcttcctgctaaggccattggacacagaatccgagtggagacagtgtttcacaaaatgattttcctt

SEQ ID NO: 456797 - DNA, 106 bp, Homo sapiens
ccggactacaaggtcgcctacgtgcagctgacaccaatgggaatcccaatggggaagtcgatgctggtgcttctcaccttcttggccttcgcctcgtgctgcattg

SEQ ID NO: 456798 - DNA, 97 bp, Homo sapiens
accatcgagatcccggatcagccctgctggagccagagaagaaaaaatgctgggcatcttggtgcagcacaaagtccggagtggcgtctcgggcatc

SEQ ID NO: 456799 - DNA, 75 bp, Homo sapiens
aggcggtggagcgcagagcgggcgagcgcgtggcttttcatggcctgccactgaaaatcaagaaagaaccccaca

SEQ ID NO: 456800 - DNA, 100 bp, Homo sapiens
cattgtgcaactgccagtctaaaaattgatataggtcagtaaaatcagcttggtggatctagcaggaagtgaacgagctgattcaactggtgccaaaggg

SEQ ID NO: 456801 - DNA, 78 bp, Homo sapiens
tcctccacagagggcgagccagggtggagaagagccagcccaggttcattgtgggatcagaccgtgctatcttcatgc

SEQ ID NO: 456802 - DNA, 50 bp, Homo sapiens
caagaacaagggccgcgatgtggaaaaatggtggagtcaatgaagaaagt

SEQ ID NO: 456803 - DNA, 106 bp, Homo sapiens
gggagccggtctatggactttccgaagacgagctctattaccaggttttaaacttcgccatgatcgtgtcttctgcactcatgatatggaaaggcttgatcgtgct

SEQ ID NO: 456804 - DNA, 83 bp, Homo sapiens
actaaggcagccatcaaagctattaagagagaaaaggaacagttccgtaagctctttattggtggcttaagctttgaaaccac

SEQ ID NO: 456805 - DNA, 75 bp, Homo sapiens
tagatcttctgcactgtttacaggcacagttgcaggtttcagagattagaccgtatatatctaaatgctgggatc

SEQ ID NO: 456806 - DNA, 75 bp, Homo sapiens
ctggattcgtggcgccacaagctcattcactgtgtagggaaagcaggcaggatgggagagtcgccgatagaacca

SEQ ID NO: 456807 - DNA, 100 bp, Homo sapiens
caacttctgccagtgagagcactaaatgaagtcttcattggggagagtctgtcatccagactattgcagatatcatccgaacatgtttgggacccaagtc

SEQ ID NO: 456808 - DNA, 100 bp, Homo sapiens
aaagcagcgcccgtctgcttcgggcctctggaatttagcgctcgcccagctagccgcagagttgtcttcaggctttggagccacaggccgtgtcttctta

SEQ ID NO: 456809 - DNA, 74 bp, Homo sapiens
cgaccgcctggagaagctgctgcgctgctcgcgttgccatgaagatggacctacagctaaaaaattaaagactg

SEQ ID NO: 456810 - DNA, 50 bp, Homo sapiens
gtatgaatctgcaaacaatcgagatcttaagattgaaagtgatgttcaag

SEQ ID NO: 456811 - DNA, 101 bp, Homo sapiens
cctttgacagggacatcagtggagccttctcagacccacaggtactccaaagattcaggtttactcacgtcatccagcagagaatggaaagtcaaatttcc

SEQ ID NO: 456812 - DNA, 98 bp, Homo sapiens
atgagaaccctacttgcctaaatgaggaatgtctttcctaccatctaaaatacgaaggtttctggctgggtctgtggctcaggacatccccaagctgc

SEQ ID NO: 456813 - DNA, 96 bp, Homo sapiens
agagacacagagccagaagtgagtctcctgggagaatggatgagcctaagcaacccagctcccagatggagtctcgctctgtcgcccaggctggag

SEQ ID NO: 456814 - DNA, 98 bp, Homo sapiens
cgctctggccagggtgcttttggaaacgatgttcgtgatgctgaagacgctttacataatttggacagaaagtggatttgtggacggcagattgaaat

SEQ ID NO: 456815 - DNA, 51 bp, Homo sapiens
cccttctccacttgaccaggctgttgttttgcagccaggtccatcatttgg

SEQ ID NO: 456816 - DNA, 73 bp, Homo sapiens
gaagtgggaccggtgtctggcggatgcggtcgtgaagatagagcttgtggacaaatgtataggatcaagaatt

SEQ ID NO: 456817 - DNA, 90 bp, Homo sapiens
cggcatcgggcgacagcaggtcacagtggacgaggtgttggcggaagggtttcgaaaaaacgatgaaatgaaagctatggatgttttacc

SEQ ID NO: 456818 - DNA, 101 bp, Homo sapiens
gcttctgctgaggctggtctgcttgaagcctcccaggagaaagaagccaggtgggaatggagagagagaggaagagatatttaagcagctggatcccgaga

SEQ ID NO: 456819 - DNA, 100 bp, Homo sapiens
ggattcttgatgtttcttctgagctccagggtcaggcagtatgattgaagtttctaagccaggatcttacacatttgttccatggcttctcagctttaaa

SEQ ID NO: 456820 - DNA, 75 bp, Homo sapiens
ccttccagaaggagcttgtgatggtttggtgcacctcgatttggaggaagtagggcagggcccttatctggaaag

SEQ ID NO: 456821 - DNA, 100 bp, Homo sapiens
gatcatgggcatggatgataaccacccaaggcccaaaagcgtcaaactcaccaaaaacaacatctttccagaaagaggtcaagtctggcaccatctttga

SEQ ID NO: 456822 - DNA, 88 bp, Homo sapiens
gctgagcagaggacccggcgggcggcctcgcgggtcaggcttgaccactatgctatcatcaagtttccgctgaccactgagtctgcca

SEQ ID NO: 456823 - DNA, 83 bp, Homo sapiens
gtgctattgtgaggcggttgtagaagataatggcatcagctgctaaggaatttaaaatggacaacttttcacctaaagctggc

SEQ ID NO: 456824 - DNA, 95 bp, Homo sapiens
cgaggacacgggctgcaacctgcagcacatcagcgaccgggagaacatagacggaactagccagctgtggatggagtaagaaggagaaacacagt

SEQ ID NO: 456825 - DNA, 75 bp, Homo sapiens
attttccccgacagtactttgccctaaggaaaatccttaaacagctaattggactgcccacagatcctgccctcc

SEQ ID NO: 456826 - DNA, 50 bp, Homo sapiens
cggctcgggacggaggacgcgctagtcttcctgcctgacacagctcactt

SEQ ID NO: 456827 - DNA, 74 bp, Homo sapiens
ctccagggttctttggggcccgaggccttgctattttggaagctacaagaaaaaaatagaggaaggaaggtttg

SEQ ID NO: 456828 - DNA, 75 bp, Homo sapiens
tgggacccggccggttacctgctctactgcccctgcatgggaaaatgtttcaacgtgcgcaagagttgcggtggc

SEQ ID NO: 456829 - DNA, 100 bp, Homo sapiens
gctcactccgcccggccccagccctagcgctggccgcgaccccggcggttggtttgttggaccttgaactcaatcggctgacgaaagcgctatttttggc

SEQ ID NO: 456830 - DNA, 101 bp, Homo sapiens
aaggaagtgaagaaggcgcatcactcccagctgcgcaaagcttgcgaggtggcgttagaagtgaacatccacttgcccagctttactgccattcaatcatg

SEQ ID NO: 456831 - DNA, 100 bp, Homo sapiens
aatcactccagctctcctggaagcaggtatttaaaccatgtcagagctgcctcaccacaggaccttgctggaggctatacttcttctcttgcttgtcaca

SEQ ID NO: 456832 - DNA, 101 bp, Homo sapiens
gccaaatacccaagcctaggacaaaagcctggaggctccgacttcctcatgaagagactccagaaagggggtgtccgcaatgttgccagtgtctgtctgca

SEQ ID NO: 456833 - DNA, 100 bp, Homo sapiens
gtttacagctgggaaggcctcaataccctgttcccagagatgtgcttatcacacagactttcagccaccacaatcagctggcacagaagacccggcggga

SEQ ID NO: 456834 - DNA, 88 bp, Homo sapiens
gcctccagcttgccaccaaagacctgcgactttgctcagggtgaggtggctttgaccccgggttgcccggccagcacgaccgaggagg

SEQ ID NO: 456835 - DNA, 100 bp, Homo sapiens
gagagcttcaggggaaatggcttcagcgcagtatattactgcagcagagtcacctgatatgaaaaaggagcaagacccccctgccaagtgccacaccaaa

SEQ ID NO: 456836 - DNA, 73 bp, Homo sapiens
cttccaagttcaatattcctgacttaaaggttggcaacaatgagtaaaccagaattaaaggaagacaagatgc

SEQ ID NO: 456837 - DNA, 90 bp, Homo sapiens
cgggtgtcctgacgctcggggttcaggcggcacaggcaccaagatgtccaaccgagtggtctgccgagaagccagtcacgccgggagctg

SEQ ID NO: 456838 - DNA, 74 bp, Homo sapiens
gcaaatcgagaaaaacctcagcgacctgatcgacctggctattcaggcagctatcagccaggcctttaaaaccc

SEQ ID NO: 456839 - DNA, 100 bp, Homo sapiens
gtccatgctggtgtcccagcctcctacctgctgattcctgcagcctcctatgtgctcccagaggaatcagagatcattgatttcttcctgggggcctctc

SEQ ID NO: 456840 - DNA, 75 bp, Homo sapiens
cgcgtctcggaaaccggtagcgcttgcagcatggtttccactgtatccaaaaggaggggagaagttgcagtttga

SEQ ID NO: 456841 - DNA, 100 bp, Homo sapiens
tgacagcatagccagccagcctcatcttacaatgacactaaaatcgtaagaattgtgacaaaggccagtcttttttcattgacgccccagattccccagc

SEQ ID NO: 456842 - DNA, 75 bp, Homo sapiens
ttgtttattgagtgccagcccggttcccggacaggctaaccttgccgcgggccgagccctgcctcgccatggacc

SEQ ID NO: 456843 - DNA, 50 bp, Homo sapiens
ggccgtgagcccaagccgcggtcccggaatctcattttcagcttctgcca

SEQ ID NO: 456844 - DNA, 82 bp, Homo sapiens
gcaaagtaaatgctgtcttttcccaaaagacaggctcttcacctgaaggtaagaatgattgatgttggctgatattggagtg

SEQ ID NO: 456845 - DNA, 90 bp, Homo sapiens
gtcctggagatgatgatgaaattcagtttgatgacattggagatgatgatgaagatattgatgacactatcaagaaatccaagtggtaat

SEQ ID NO: 456846 - DNA, 75 bp, Homo sapiens
ccccagtgcccatcaaccttcgagtctactcgccacacgcagccatggcaatgacaggctcaacaccttgctcat

SEQ ID NO: 456847 - DNA, 83 bp, Homo sapiens
ggacggcaggactgtggccgtgggggacatcgtctgggctttagccagggccctctgaaggatgcacccaacctcatctgcac

SEQ ID NO: 456848 - DNA, 99 bp, Homo sapiens
gaagcgccaggaagctgtggctggccgcatacccgccatcttctccccagcgtctgcttctgcgctttgcctgggagaggccctggtggcctcgttcct

SEQ ID NO: 456849 - DNA, 100 bp, Homo sapiens
tcttctaatggatgggaacatggggcactactgcagtcttcagttaagcaacaagtagaagctattgaaaaacagtacatttctgcaattgagaaacagg

SEQ ID NO: 456850 - DNA, 115 bp, Homo sapiens
aagaaacctcgcggaaagaaatgcttctttgtgaaattttttggaacagaagatcatcctcaaacccttttggctggcatgaataaatttttgtctcagcttgaaattacattca

SEQ ID NO: 456851 - DNA, 100 bp, Homo sapiens
gagaacagagaagggagctctatagtcggagtggagaactgcaagatgtattgctgtccttgaatattagcccatttgaaaacgcctgggaagttcagcc

SEQ ID NO: 456852 - DNA, 100 bp, Homo sapiens
tgtcaagcgaagccttgaaaaagctgccctgagacggtgtcccgccgaaagcacaccgttccggaaggcaaaagccttgtatgcctgcaaagctgaacat

SEQ ID NO: 456853 - DNA, 82 bp, Homo sapiens
gcttggggatcctctgtacgcccgttcactggtgttggagagcacaatggctgaacaagtccttcctcaggctttgtatttg

SEQ ID NO: 456854 - DNA, 98 bp, Homo sapiens
gaagcatctgaaaaagctgtggaaggctctggataaggaccagtacctgcccaggaaactgggatcatagacggtatttctatgtaaacgaacagtcg

SEQ ID NO: 456855 - DNA, 100 bp, Homo sapiens
gccgctcaccccgcggccgcaccttcccgccttctcaggctaagtgctatttatggaggtacctatatgctgaataaacccattgaagaaatcattgtac

SEQ ID NO: 456856 - DNA, 75 bp, Homo sapiens
tggaattgatctcgccaaaaaggacatctttggagccagacaagttggatggcttgaggactggtactaaaagga

SEQ ID NO: 456857 - DNA, 74 bp, Homo sapiens
agccgctgccgcgttagttccgagcttgaagtcagtgctggagaatctggtaaaagcaccattgtgaagcagat

SEQ ID NO: 456858 - DNA, 105 bp, Homo sapiens
atgacaagaagacgtccaatctgagcgtgctgcggacggcgctgcggtacatccaggtgagaagccctaccactgcaactgggacggctgcggctggaagtttgc

SEQ ID NO: 456859 - DNA, 100 bp, Homo sapiens
gcggagactgggcggccggccgacccttcctgtcgctgacggcgactgcgggaggccagttgactagataacgaaggacaatgcatatatacaaaattgc

SEQ ID NO: 456860 - DNA, 96 bp, Homo sapiens
tgcttgtctgtgtcgcaaggcccttcaacttgttcacctgtgatatccagagactccaagatgttggttctccgcatccagaacattctatctgag

SEQ ID NO: 456861 - DNA, 101 bp, Homo sapiens
cccggggctgcggctcttcgggcacaggtgaaagaacttgtcctggacaacagtcggtcgaatgaaggcaaactcgaaggcctcacagatgaatttgaaga

SEQ ID NO: 456862 - DNA, 100 bp, Homo sapiens
ctcttggctcctgtcccgctggccctctgtctgcctgtgtccctgaccatggctccctgcagtaccctttaacgcggcaacctttggcactgcatccatg

SEQ ID NO: 456863 - DNA, 75 bp, Homo sapiens
aactctaccctggaggagattctggggcagtatcaacggagtctccggggatttttttcccaggaagccatcccg

SEQ ID NO: 456864 - DNA, 100 bp, Homo sapiens
cacctgccatcatggagggttatccagcacctggaggatacctgctacctggtggacaatgtcccagaaggaagcctgccagtgcacggtgaacaggcgc

SEQ ID NO: 456865 - DNA, 100 bp, Homo sapiens
gggggacgagcagcagcggctcctcaacacccctcgaaggtcagataccaggcccaggttccatgatgcccgggcagcacatgccaggccgcatgattcc

SEQ ID NO: 456866 - DNA, 96 bp, Homo sapiens
ttttgaagcaagtaaaggctggacaccagaatcatagtgaaagattcgttttcattgcagagtggtatgatccaaatgcttcacttcttcgacgtt

SEQ ID NO: 456867 - DNA, 97 bp, Homo sapiens
cctacttccagaatgcacagatgtctgaggacaaccacctgagcaatactgtacgtagccagagattcagttgtggaaattctttttgaacaagata

SEQ ID NO: 456868 - DNA, 100 bp, Homo sapiens
gagagcggtgtgaggtgcttggtagcgcgccgtagctgcttccacgtccttgcttcacctcagggttgatttgggaagcagagcacagcagcccaaattt

SEQ ID NO: 456869 - DNA, 80 bp, Homo sapiens
gcccgccgacccgcgccctgctccctctcagcacctgggcggacgcgggaatgcatatcagtccacgtgggccaagcggg

SEQ ID NO: 456870 - DNA, 83 bp, Homo sapiens
agggctccaccccgtcgcctcgacagggtctcagcttcttggaagtgaaagaccagctgctgctcatgtaccttatggatttg

SEQ ID NO: 456871 - DNA, 74 bp, Homo sapiens
cactggagcaggtcacctgttacaaggcagtcgatgatgtgaagaaaggttacatcaaagcagaagaaaagtcc

SEQ ID NO: 456872 - DNA, 83 bp, Homo sapiens
ggcctggggaggcacctgcggggccgccctcacaggaacctccatctctcagcaaatcagccggcaccaggagcagttcatcc

SEQ ID NO: 456873 - DNA, 111 bp, Homo sapiens
ccggggtcactgaggcagatgtggcgctaccgctcctgggacgtgccacagatcccatcagaggcaccccagacacatgcacgatctgattttctggagagatgtgaagaa

SEQ ID NO: 456874 - DNA, 90 bp, Homo sapiens
ggcctccccagccatgctgaactggtcgctggacacccatcaagccccagcccaggccctgaacgagactcagtgggcactagaacgcct

SEQ ID NO: 456875 - DNA, 46 bp, Homo sapiens
attaactgtggttgccctcagagatggagaagatgaagaacttaat

SEQ ID NO: 456876 - DNA, 82 bp, Homo sapiens
cagctcgggggccaactctgaggagtccactgcagcaggccaatggtggcagagtctacatagaactatgcttcgtggtgtt

SEQ ID NO: 456877 - DNA, 75 bp, Homo sapiens
gcaaaagtaaaattggcaagacatatccttacaggcagagagatgtccctggtagatttgggaaagaagctttta

SEQ ID NO: 456878 - DNA, 100 bp, Homo sapiens
aagtactatgtgactatcattgatgccccaggacacagagactttatcaaaaacatgattacagggacatctcaggcctttgaggattggaataagacag

SEQ ID NO: 456879 - DNA, 75 bp, Homo sapiens
tctgctttgaggtggtgtccaccagcaagacggtggaaatcaacaacacggatgccgagggcaggctggtgctgg

SEQ ID NO: 456880 - DNA, 101 bp, Homo sapiens
cggagctgatcgagcaggcggcgcagtacaccaacgcggtgcgcgaccgggagctggacctccgggaggatgtgaagccactgaaagcttgactcagggaa

SEQ ID NO: 456881 - DNA, 82 bp, Homo sapiens
gaggtctccgcccgcaccatgcggctgggcaggtgcgcgcggagccatggttatcatgtcggagttcagcgcggaccccgcg

SEQ ID NO: 456882 - DNA, 82 bp, Homo sapiens
cctgcagcgggagctggacggcgagcgcgagcggcgcgagaaaaacactatggctatgcatcctccaacgtcagccccgccc

SEQ ID NO: 456883 - DNA, 74 bp, Homo sapiens
ttcgtttgatatttttggtcgcaccaccactccacagcagaccaagatcccttggttccagtaccccattatct

SEQ ID NO: 456884 - DNA, 100 bp, Homo sapiens
gaacgaggcaaggagctaaagcagcgtgcgttcagccctgggatgcgcctggagaaggacaggttctctgtcaacctggatgtgaagcacttctccccag

SEQ ID NO: 456885 - DNA, 100 bp, Homo sapiens
ctatgacggagaatccgtttcaggaaaggaaagcgtctctagcagctgatatccccagacttggatatagttcctcatcccatcacaagtacatcccccg

SEQ ID NO: 456886 - DNA, 83 bp, Homo sapiens
tcccagctacctgattacttgttacccatttgtgcaggaaaaccagtccaataggaagctgaagtcttcagcagaaccctgac

SEQ ID NO: 456887 - DNA, 74 bp, Homo sapiens
gcagttctcgctgaccgcgctagctgcacagttgcagccccaacctgtttgtccagaatgtcttcgtggatacc

SEQ ID NO: 456888 - DNA, 101 bp, Homo sapiens
accgcaatctctgccagcaccttgggaagagaaagaaaatgccgaaggcactcagacagacagccaccgcactgtgttcctgacacgtacagcaacgccac

SEQ ID NO: 456889 - DNA, 95 bp, Homo sapiens
ttgagtccgcatcgccacagctgaaggctgcgagggactaagagcagagtgacttaagagattaaaattaatttggttgctgttggttctgaaca

SEQ ID NO: 456890 - DNA, 100 bp, Homo sapiens
cgttgacaaggcactgctttttcatgacggtgcgtttttgcaagactgcgcactcacacgaccattgagaggctcactttgcagtggccctcccaggccc

SEQ ID NO: 456891 - DNA, 100 bp, Homo sapiens
tgactattttgccgtcggtaacagatccaactgtttcctggttataagatgcgagccacccctctggctgctcctgcgggttccctgtccaggaagaagc

SEQ ID NO: 456892 - DNA, 50 bp, Homo sapiens
cggaatattacagcggcgaccagtcaggacatggatttgattgacatact

SEQ ID NO: 456893 - DNA, 90 bp, Homo sapiens
cgctgctacctgcagcgccgtgtggcacgacacaaaaatcagagagagcgctgtacagcatggaatgtgcgttccaccccctgttcagtc

SEQ ID NO: 456894 - DNA, 95 bp, Homo sapiens
cctgctctgggatcccttgtgaggctgccctcatggagttccccctggcccagatatgtccccaagccattgagacccagagcagcagttctgaa

SEQ ID NO: 456895 - DNA, 105 bp, Homo sapiens
cagtggcaatatgccttcaccagctatggcattagcccacaggccaaggtgaccaagaatatggcccaggtgaccaaagccctggacaaggccctgagcaccatg

SEQ ID NO: 456896 - DNA, 98 bp, Homo sapiens
ctcagggctgcggccgcccgaagaggagagagcgcgggcctctaggaaggttgggtatctacagccattggttgctgttcaggtcagctttgctccta

SEQ ID NO: 456897 - DNA, 76 bp, Homo sapiens
cagatatcaagaatacttcagtcaccaacgtgccaaatatgggagccgatatgtggatttactcccttgatggaag

SEQ ID NO: 456898 - DNA, 100 bp, Homo sapiens
ctcttctcatcaattgaatgagtttttagcacagacgctccagaggatatggctgtatcagaacttaattaaacacagctctctgtttgtcaagcagttg

SEQ ID NO: 456899 - DNA, 100 bp, Homo sapiens
gacatgcaagttggacagacgggaaaaatagtagcaccattctgcatcctccaggctctggttcccatgcagcagctgtcagcgttcagacaacccctca

SEQ ID NO: 456900 - DNA, 90 bp, Homo sapiens
gtggtatccttacaatcatcctgcttcttgtacatcactggtgggatcttgctatgttgctcgggctggtcttgaagtcctgggttcaag

SEQ ID NO: 456901 - DNA, 94 bp, Homo sapiens
cagacgcagccgtagacaccagctccgaaatcaccaccaagtctctgctttctatccgtcaagatgataaagtcgtgtgcccgagaaccaaaga

SEQ ID NO: 456902 - DNA, 100 bp, Homo sapiens
agaaagaaggttaagctggctgtcctgaaatattataaggaggctgaggatggcattattgcttatgatgactgtggggtgaaactgactattgcttttc

SEQ ID NO: 456903 - DNA, 121 bp, Homo sapiens
ctcgctccgctcgtcccgctcgtcatggcctacccgggatacggaggagggaactcccccactggaaaggattctgaaagaaatgaagtcagccctcagaaatgaagttgactgcctgctg

SEQ ID NO: 456904 - DNA, 95 bp, Homo sapiens
gggacttcactgctctgctgtctcctgcaagaactggctcaagaaatttgcctcgaaaaccaaactaatagggatgccaaaggaaaaatatgatc

SEQ ID NO: 456905 - DNA, 74 bp, Homo sapiens
ttggtgtggtgtgcggaggagctccaggcccgtcggcgcggagacccaacatgagtgaagtttcctgcaagaaa

SEQ ID NO: 456906 - DNA, 83 bp, Homo sapiens
gcttaaaaagctgcacgcaagtgttaaacttctgtagtttatgccaacgtgacttcattcatacagatgaaccaaggatcggg

SEQ ID NO: 456907 - DNA, 83 bp, Homo sapiens
gggcctcgcgccggctatggccgtgccctggggctgagccctcagtctggggagcagggaggagccctgtgccctgtcccagg

SEQ ID NO: 456908 - DNA, 90 bp, Homo sapiens
cgcgggctccagactcgccgtggtcaagttcaccatgagagggtatcagcagatgttgcacacaaacttggtataccttgctacaatagc

SEQ ID NO: 456909 - DNA, 100 bp, Homo sapiens
ggcccatcccccaagccagcaggagtggacatctctgaagcacctcagacctcttctccctgcccatctgctgacagtttaaacggaacctgcagcgttt

SEQ ID NO: 456910 - DNA, 83 bp, Homo sapiens
cggctctcggtgccctctccttttcgtttccggaaacatggtgaatgaaaactttgccattgatttgatagcagagcagcccg

SEQ ID NO: 456911 - DNA, 100 bp, Homo sapiens
aggagataaggacacaaaggacatttctgcacccaaaccaggacctctaaaaaaggcacctgctgctaagtgcagtcattggagaaatcgatgaagaaac

SEQ ID NO: 456912 - DNA, 100 bp, Homo sapiens
ccaaggtcaacaaggacaacaatgagatcgtggacaagatcatgggcaaaggacagatccagagttccacaaacatgtggagtttgatttccttattaag

SEQ ID NO: 456913 - DNA, 75 bp, Homo sapiens
gagcctagcacctcttatactgatgcagccaatcctttctttaagttgttgactatgctaatggagtttgctggt

SEQ ID NO: 456914 - DNA, 100 bp, Homo sapiens
gtgggaccccagagattcccaatttattgctaaacatgggtgcatttttggataaacccaaaactgaaaaacataatgctcatggtgctgggaatggttt

SEQ ID NO: 456915 - DNA, 52 bp, Homo sapiens
cctgcagcttctgtgtgctcctgagaggctgtgtataagatggcagacgtag

SEQ ID NO: 456916 - DNA, 87 bp, Homo sapiens
ccaggaagaaggttctcaaacaaggagcgaatccagccacagacctgagaggcgcaggcttccttgccctcctgcatctgctctacc

SEQ ID NO: 456917 - DNA, 75 bp, Homo sapiens
gaccttcgtgctgtttctctccctggcttttggggcaagctacggaacaggagatacaactcgtcaacgaatcaa

SEQ ID NO: 456918 - DNA, 100 bp, Homo sapiens
acggatggaaagatggagatgaacctctaacacagtggaaaggaaccgttctggatcaggtccaggagcccactgaggaaaaacgtcaagaagaggaacc

SEQ ID NO: 456919 - DNA, 75 bp, Homo sapiens
gcgagcagagaacttctttatccttcgaaggaagcctgtggaggtggagtgcagcaacaaagacctccattctgg

SEQ ID NO: 456920 - DNA, 90 bp, Homo sapiens
tggccgacatcgcggccttcttccgatccggagaggcagatgcgaaccagaacaatgggacctcctctcaggacacagcggtgactgact

SEQ ID NO: 456921 - DNA, 50 bp, Homo sapiens
attaatggatcacattttgaatttgaaggactttgccaataccattcctg

SEQ ID NO: 456922 - DNA, 88 bp, Homo sapiens
tgtaaccagctgcttctccctgctcctcgaacttgcttgagttccgagggaagcgcctgctttttggtattctaccttgtaaatactg

SEQ ID NO: 456923 - DNA, 100 bp, Homo sapiens
ggctcatgacactaagaagtaaaattacgaactcactgagctggaagtcattcaacgggaattgaatagtttcatcgcaaaccagaaaaggttagaaatc

SEQ ID NO: 456924 - DNA, 75 bp, Homo sapiens
gatcttctgcggattgttggaatctaccgatcaggagaaggtctggggaaaataatccagagatttccacagaag

SEQ ID NO: 456925 - DNA, 74 bp, Homo sapiens
ggagcggttcgagttgggagacggccggaagccagacttaatgaacaagccagtgaggagattttgaaagtaga

SEQ ID NO: 456926 - DNA, 76 bp, Homo sapiens
gacggccggcgggggcggcgtgcggcctagcgtctcaggacccgtgcatctcttccgactctcgggcaagtgcttc

SEQ ID NO: 456927 - DNA, 84 bp, Homo sapiens
ccagagacatggagagttgctacaacccagacttcactgaggatgtcaactgtgcttttgagttcctgctgaagctcaccccct

SEQ ID NO: 456928 - DNA, 50 bp, Homo sapiens
cctgtccccgaggaggggaccatgacacacctacagggagcccttcgagc

SEQ ID NO: 456929 - DNA, 100 bp, Homo sapiens
aatggagtactgcagatccgatatgctaagggagaagatgtcaaccggacactagaaggtggaaggaaacctcttcattatgcagcagattgtgggcagc

SEQ ID NO: 456930 - DNA, 132 bp, Homo sapiens
aaatacttaaaaaggaaagacattgaatccattagaaactttgcagctgaccattttaatcaggaaatctgtgctcagtactggggagaaggaaagcaaacatatggagatattgaagttgacctgaaagac

SEQ ID NO: 456931 - DNA, 96 bp, Homo sapiens
ccagttcaattatgaatctcaggaacaccaccttctgtcagctcctgtcacatatagagaaacttcgaacctcaatgatagatgatctaaatgcaa

SEQ ID NO: 456932 - DNA, 133 bp, Homo sapiens
gtcactgcgctacgccatccagctcatcacagctgccagcttggtgtgccggaaacgcaagggagaagcagaatttgcccgcatcatgagcattgtggaccccaaccgcctgggggtagtgacattccaggcc

SEQ ID NO: 456933 - DNA, 100 bp, Homo sapiens
tctccctgctgacttacaccggggaaggccaatgggaagtaaagaagatcaacaacgctcacaccgcgaatgctcggctagcaaagcgaggcggcagaac

SEQ ID NO: 456934 - DNA, 98 bp, Homo sapiens
atttttacaaaatttgatgaagtccagaaatctggaaacatgatacaatctgcaaatgatggcaccgaaagcgaaggaagctcctgctcctcctaaag

SEQ ID NO: 456935 - DNA, 100 bp, Homo sapiens
gtcagatggagaaataaaagtggccattagtactgtgagcatgaaccttgagagccagccccagtgcctgctgagccgtttgacaacactacctacaaga

SEQ ID NO: 456936 - DNA, 88 bp, Homo sapiens
cgggcgagctgcggctcggacgccagcggacacgcgggcgaggtctacatgttcaagtgcgtgtggcggtgctacagattgatcaagt

SEQ ID NO: 456937 - DNA, 82 bp, Homo sapiens
atatctgtcttcggtggactccttcggcagtccacccaccgccgccgcctcccagagcactacaaacaccactggtttcccg

SEQ ID NO: 456938 - DNA, 100 bp, Homo sapiens
cggagcaggagcccggccaggcgctggggaaaggctgcatgttaaatggccaagaggtgaggcttactattcactatgaaaatgggttcaccatctcaag

SEQ ID NO: 456939 - DNA, 100 bp, Homo sapiens
cggaaaccggtagcgcttgcagcatggtcgtccttggtggaaggaaccatgaactggcatctccccctcttcctcttggcctctgtgacgctgccttcca

SEQ ID NO: 456940 - DNA, 83 bp, Homo sapiens
tggggctggacatgtgccaggccatcaattgatattcactgatggactccaaagaatcattaactcctggtagagaagaaaac

SEQ ID NO: 456941 - DNA, 82 bp, Homo sapiens
tatctgcctaggcattttgctgtctcctcctaatacgtcatatttgatcagaaattggatgaaccttcgggatgctgagaca

SEQ ID NO: 456942 - DNA, 75 bp, Homo sapiens
ggtccctgaagagggaagacacgcggaaacaggacatggatttgattgacatactttggaggcaagatatagatc

SEQ ID NO: 456943 - DNA, 100 bp, Homo sapiens
ctgaaggacgtggccactgtggccttctgcgacgcgcagtccacgcaggagatccatgagaagagagaactcgatgccaccgcaacggtattggcgaacc

SEQ ID NO: 456944 - DNA, 82 bp, Homo sapiens
atcgcaaacccaaagatccccgttcctggagattctgattgagagttgtctgctggttctcagcttgaagaagattctgcag

SEQ ID NO: 456945 - DNA, 83 bp, Homo sapiens
cctcggaagaggagctgggcctggtgcacagcttccgccctgcgctgccagtctcctacctgcaggccgagctggccttcgag

SEQ ID NO: 456946 - DNA, 75 bp, Homo sapiens
gaactttctaaagtgcagatttctgagctttcatttcctgcctgtaacacggtccttatgtcgtcagaagatcga

SEQ ID NO: 456947 - DNA, 100 bp, Homo sapiens
cggcagctccgcggcggcgtctgcccagggcagggctcctaaggaaggacccgcctttaggtaggaactatatccaagcatctggactggcatagaaaag

SEQ ID NO: 456948 - DNA, 100 bp, Homo sapiens
tggacttgtgaaaaaaattttggagacgaagaaagattatgagaaattgcagcagtcacccaaacctggggagaagtggaatgcagtagccctctgggcc

SEQ ID NO: 456949 - DNA, 75 bp, Homo sapiens
gaaatgtccatgagaaaaagcttggagataaagttgctttttactggtctgccatcatggatgttctcgcagaag

SEQ ID NO: 456950 - DNA, 75 bp, Homo sapiens
atttagaatgcaggatggagagggaacctcaggacctgacccaaccactgtctacgtggacatgagagccctgag

SEQ ID NO: 456951 - DNA, 89 bp, Homo sapiens
tgcctttcggttgccaaaattcaggctgtagacggcgaggtgccgtgagcgatgtggagatgcaggaacactatgatgagttttttgag

SEQ ID NO: 456952 - DNA, 85 bp, Homo sapiens
ttttaaatgacgaaactcagcggaaatatattcagaatggagaagctgatgccatgagcttggatggagggtttgtctacatagc

SEQ ID NO: 456953 - DNA, 75 bp, Homo sapiens
acaggtgtttttggtgcccacaggagaggtttttgaacagcagctcctggaatgaggccgcccatgggaggccat

SEQ ID NO: 456954 - DNA, 100 bp, Homo sapiens
cctttgtgtcatcctccacagctccagggaaggcactcaaaagtggggggcaggaaaggcactactgcagtcttcagttaagcaacaagtagaagctatt

SEQ ID NO: 456955 - DNA, 97 bp, Homo sapiens
gaggcacgacacccatgttgtcatggcttaacatcagggagcggcaccgggggggcgtggccccgggcttccaggtggtgcacctcaacgctgtgac

SEQ ID NO: 456956 - DNA, 100 bp, Homo sapiens
cacgatgcttgtcaccttcacagacacttcaacgtggaaaattcttcggggaaaagagccatccaaaactctgtttgtcaaaggcctgtctgaggatacc

SEQ ID NO: 456957 - DNA, 87 bp, Homo sapiens
aatcgtcaagcacgtgacggtcatcggcggcgggctgatgggcgccggcattgcccaggtggccagacaagcacaaacctctcagga

SEQ ID NO: 456958 - DNA, 90 bp, Homo sapiens
gtgcgccggcagaggatccagtgttcaccatcctggccccggaaggaatgggtaccacagaccatgtcatcgtcctggcgtccacgaacc

SEQ ID NO: 456959 - DNA, 51 bp, Homo sapiens
aaaacaacttcgagggcagagcctcatgcattgtgcgtcagcagcaatgtt

SEQ ID NO: 456960 - DNA, 115 bp, Homo sapiens
tagagcccagattattgaattgttgtgcattgtagaagcactgaaaaaggatcacggccgtggggccaattttttaactcagatcttgctgagaccaggagcatctgatttaaca

SEQ ID NO: 456961 - DNA, 100 bp, Homo sapiens
aagccaatgatcagaaagatatgaaggactgggttgaagccctgaaccaagccagcaagatcaccacacgagacgacttcctgggccaggtggacgtgcc

SEQ ID NO: 456962 - DNA, 51 bp, Homo sapiens
gaacatctgccagcacttcagcaccaagttaccagatgtatgctactcatg

SEQ ID NO: 456963 - DNA, 98 bp, Homo sapiens
tttctttacagtaatttcaacagaagagtgagagatggaacccgaagaagaaaggattcgttacagccagagattgctgtcgcctggttgggcccgga

SEQ ID NO: 456964 - DNA, 100 bp, Homo sapiens
tatcaagaaatgcagtaaccagcatgtcaataaggggtcataggtggaaaagacatggctctctttaaactgtggggctccccagacaagtatcccaaag

SEQ ID NO: 456965 - DNA, 100 bp, Homo sapiens
cgggctgcaggcgggggtgctgcagaggacacgaggcggcgggctggagacatggaccgcggcgagcaagaacagatctcggcccctttccaaacactcc

SEQ ID NO: 456966 - DNA, 100 bp, Homo sapiens
acatccaggccgtgcttctgcctaagaagaccgagagtcaccacaaggccaagggcaagtgatttgacagaatttatccagttggcgaaggactttgagg

SEQ ID NO: 456967 - DNA, 101 bp, Homo sapiens
ctgattacgaggttcatgtacgacagcttcgacaacacataccagtgacttgctgtctcctgactcagtcctgagttgcttgtatcctggggatcatggaa

SEQ ID NO: 456968 - DNA, 82 bp, Homo sapiens
tgtctttctcttgatgatcttgccaaaaggatagagattgcagaggaggacgaatccatgaaccaaccaggaccaatcaaaa

SEQ ID NO: 456969 - DNA, 100 bp, Homo sapiens
gcccgaagggcaactgcctgccttcaacctggtttgacaaatccttcaccctaatcgtcttctctaacgggaagctgggcctcagcgtggagcactcctg

SEQ ID NO: 456970 - DNA, 71 bp, Homo sapiens
gacgagtaacttcggcaaagggatggggagagtttggaaattttagcattcaggtgccaggaatgcagatg

SEQ ID NO: 456971 - DNA, 50 bp, Homo sapiens
tgttcatccagggagacagcgtctggacatatcccagcttctgctcaggc

SEQ ID NO: 456972 - DNA, 98 bp, Homo sapiens
acggacatccctttggaaggctacctgttgtctccgatccagaggatctgcaagtacccgctcctccttaagagtatgtatgtaactgctctgtggtt

SEQ ID NO: 456973 - DNA, 87 bp, Homo sapiens
ggaagcaagcagttcagaagagccaaggaataaacatgcaatgaacccaaaaggccttgtcttaaaagaagaagcatctgattacct

SEQ ID NO: 456974 - DNA, 74 bp, Homo sapiens
agcccccaaaagcagctattcaggttacaggaaatacaggaggcagaggaacaaataaaagacaccacgagaaa

SEQ ID NO: 456975 - DNA, 99 bp, Homo sapiens
cgtggaggcctactgcctgctgtgcgagtgcaggtacgaggagcgcagcaccaccaccatcaaggtgatccgcaggggctggctgaccatcaacaacat

SEQ ID NO: 456976 - DNA, 100 bp, Homo sapiens
acaagttgctgccaccttatcttagagttattcaaggggatggagtagatattaataccttacaagagtgtgtaatgctgtgtcatggagctaaaatcgg

SEQ ID NO: 456977 - DNA, 82 bp, Homo sapiens
cgggcggagcggccaacatggcggaacgcaggagacacaagaagcggatccaggctaccggctctctgaccagttccacgac

SEQ ID NO: 456978 - DNA, 100 bp, Homo sapiens
attggagattccacccaaacttgctggtcactgggaggtactccaaagattcaggtttactcacgtcatccagcagagaatggaaagtcaaatttcctga

SEQ ID NO: 456979 - DNA, 100 bp, Homo sapiens
tgaagaagtactgccaagtcatccgtgtcattgcccacacccagacaccaatgggaatcccaatggggaagtcgatgctggtgcttctcaccttcttggc

SEQ ID NO: 456980 - DNA, 82 bp, Homo sapiens
ccagaccctggagcctcagttggaagcagccgatccagcctgcggagcctgtggggcagatagttttgaggcagctgtgcca

SEQ ID NO: 456981 - DNA, 100 bp, Homo sapiens
accctggaccagcagaaacctagagtgagagagatcatcattgcctgaatttagctttgtgactgcaagagcaagaccagttcctgtctggagacgactg

SEQ ID NO: 456982 - DNA, 95 bp, Homo sapiens
cactcccagctgcgcagggcctgccaggtggcgctcgcatttaaatcaaacggtattgagatggattgggttatgaaacataatggtccaaatga

SEQ ID NO: 456983 - DNA, 80 bp, Homo sapiens
cgcgaagctggccaaagcctgcccagacggctcacctgtgcgggatggaacaaaagctcatcactgcagtggtgatgaag

SEQ ID NO: 456984 - DNA, 75 bp, Homo sapiens
gactcattacgcatgggcttggtggagaaggctatctcaatttcatgggagtaaacatggaagtactaacttcat

SEQ ID NO: 456985 - DNA, 100 bp, Homo sapiens
ggcgctggttggacagacaaaaaatgatttggtggtcagcttgcctgaggagccaccattggttcaggcaatcttcagcggtgatccagaggagatccgg

SEQ ID NO: 456986 - DNA, 101 bp, Homo sapiens
gggtcggggcgccttctgcaatggccagcggctccgggtctccggggagacaggccaggaatagttgctgaacaccccaggcctgctgaggtccctccttg

SEQ ID NO: 456987 - DNA, 100 bp, Homo sapiens
cttagaagtgcttaaggaagagtgatgaagaataagctttccgatttgttggcacccatctcagagcagatcaaagaagtgataacctttcgggagaaga

SEQ ID NO: 456988 - DNA, 75 bp, Homo sapiens
ttaggaccatggtggatcgggcagaggcctttgtgtccctggtgatgttggaacattaatgatggaacatggcca

SEQ ID NO: 456989 - DNA, 98 bp, Homo sapiens
cggagcccaccaagttctgggaacatgtgatccgagggaaccgccccatcaaaactgagatggcccatcagctatatgtccttcaagtcctaaccttt

SEQ ID NO: 456990 - DNA, 50 bp, Homo sapiens
catggcaacggaggcacagtctacaagtggaaaacgaagctcattcccaa

SEQ ID NO: 456991 - DNA, 100 bp, Homo sapiens
cacggctgaaccctccttctcaatcttggaacagcacccccttctttaagtgccctgtgggacatcgagaccggccagcagacgaccacgtttaccggac

SEQ ID NO: 456992 - DNA, 89 bp, Homo sapiens
gtgagtggccctgatggccaaaacccagaaaagatctttcagaacctctgtgacataactcggtacgaatgtgaagaatcttttacgac

SEQ ID NO: 456993 - DNA, 75 bp, Homo sapiens
gaaatgtttgacgacactgatggtttgggcaggaagatcccaacagtttgcgccataaatataactttatcgcgg

SEQ ID NO: 456994 - DNA, 88 bp, Homo sapiens
cgtcttcagcttgagccccatcactaggaattgaatgatctggcacgggaccctccagcacagtgttcagcaggtcctgttggagatg

SEQ ID NO: 456995 - DNA, 87 bp, Homo sapiens
tggggcggacccaggagatgaaatgacaacgtcaaccctccaggtggggaccaatgccatggacagccccctcctcaagtacagcgc

SEQ ID NO: 456996 - DNA, 75 bp, Homo sapiens
actaggccggaggcagcgggggaccggcaggtggaccagatgttccagttcgcctccatcgatgtggcgggcaac

SEQ ID NO: 456997 - DNA, 90 bp, Homo sapiens
aaaaaaccaacaccttcctgtgcagtcctgttggaatttgaactgaaattaccattcacttttttaagtggacatattcatgaattgagg

SEQ ID NO: 456998 - DNA, 75 bp, Homo sapiens
cggcagccgaggccgcgaactgcatcatggaggtttcattgaaaacagatcctgcaaaagttccaggtgcccaca

SEQ ID NO: 456999 - DNA, 50 bp, Homo sapiens
ggcaactacagcttctcctaccagctcgatgggcaatgggctggtggctg

SEQ ID NO: 457000 - DNA, 75 bp, Homo sapiens
ctttcagaatctcaggcgggtgaggtaactgcatcctgcccagcatgacggccccctgcccgccgccacctccag

SEQ ID NO: 457001 - DNA, 82 bp, Homo sapiens
aggtccgcagtggaggccacatcaactcggcgccttgggaaccgctcgagcctaccaggtttgtgaatcttatctcagagag

SEQ ID NO: 457002 - DNA, 51 bp, Homo sapiens
tctctcgccgcggagccgccaagatggggagatgggagcctcactgtattg

SEQ ID NO: 457003 - DNA, 100 bp, Homo sapiens
gtcggtttccggatgaaacgaggagccagggacagagcagaatgggctgatatagatccggtgccgcagaatgatggccccaatcccgtggtccagatca

SEQ ID NO: 457004 - DNA, 100 bp, Homo sapiens
ttataccttcacccagcatttcatccctcgtcgaaaggattggattggcatctttagagtttctaccatgaatgaaatgaagagttattctcaagctgtc

SEQ ID NO: 457005 - DNA, 90 bp, Homo sapiens
ccaggacccactggaagcctagaaatgagccctatgagtttgtctctctggaatggctgcaaaagtggttggatgaatcaacacctacca

SEQ ID NO: 457006 - DNA, 87 bp, Homo sapiens
cgaatcaagcgggagttcaaggaggtgctgaagagcgaggagggatatttgcatttcaacaaagtaccaaacctcaagagaaagggc

SEQ ID NO: 457007 - DNA, 87 bp, Homo sapiens
tccaaggaggaagatggtccaggctgggagcatccccttagcagcagcctctggagaatttttggaaaaggtacgacagaagaaaaa

SEQ ID NO: 457008 - DNA, 100 bp, Homo sapiens
tcgggctgaagcgactgagtccgcgatggagacatccgggaactgatcgaggtggatgatgtaatggaggatgattctctgcgattcggtcccaacggag

SEQ ID NO: 457009 - DNA, 51 bp, Homo sapiens
tggcttggggagctgcagcgttcgatacaaactggactctcaggacaaaac

SEQ ID NO: 457010 - DNA, 87 bp, Homo sapiens
gctggaccgcgacgcctgcgacacggtgcgcgtcaaggccctcttcgccatctcctgagctgctgctcaagaggtcatcaaaataat

SEQ ID NO: 457011 - DNA, 98 bp, Homo sapiens
ctcctcccttagctccctgttcttgggtgaagctttgttctaagaatatttgtttcatctagtttatgagtccaaatgatatagactgtaaatgtcac

SEQ ID NO: 457012 - DNA, 75 bp, Homo sapiens
ttcgaccagcttcatcctcagacagactctttttgatcagaacaatgctgcaaaaaaagaagagtcagaaactgc

SEQ ID NO: 457013 - DNA, 110 bp, Homo sapiens
cagcaccgcagccttgggcctcgcgccggctatggccgtgccctggggctgagccctcagcaaaatgatgcttcaacacccaggccaggtctctgcctcggaagtgagtg

SEQ ID NO: 457014 - DNA, 73 bp, Homo sapiens
accctgcccttgccagaatttcctgcgctgttccacctcattcaacttcaggcactatgtcgtccgaggccca

SEQ ID NO: 457015 - DNA, 71 bp, Homo sapiens
gacaaatgcttgctgacctgggccagagctcttcccttacgcaaacctagaggatcaagacataatgggag

SEQ ID NO: 457016 - DNA, 51 bp, Homo sapiens
tctccaaactgaagaagcatcaagacagtatacagttggtcccacctggac

SEQ ID NO: 457017 - DNA, 109 bp, Homo sapiens
agcgacagctgctaaagtggcatcctgggattttgttgaagccacacaaagaacaaattgcagttgtttgagggcgatgctggatcttttcttgtctgaatgttatgag

SEQ ID NO: 457018 - DNA, 73 bp, Homo sapiens
tttagccagattggaccttgtaaaaactgcaaaatgattatggatcttggtcgggaggaacctgccatgtcca

SEQ ID NO: 457019 - DNA, 72 bp, Homo sapiens
cccggctgctggcccccgccaggctcccgagcggccttcagtgcattcagaacaagcccctgtattttgctg

SEQ ID NO: 457020 - DNA, 75 bp, Homo sapiens
gagtgcctgtgtgttgggcactggctagagataagtgagaaagatcagtctaaagaaaaggagaagaaagtgaaa

SEQ ID NO: 457021 - DNA, 97 bp, Homo sapiens
cagagagggaagagattcagccagcacactcctcgcgagcaaggatgctccaggatgaaacgccataggcctgtcagcagcagtgacagttcagacg

SEQ ID NO: 457022 - DNA, 51 bp, Homo sapiens
ctctctatcatcaatgccccgaccttggacagacaatgctgtgaagaatca

SEQ ID NO: 457023 - DNA, 49 bp, Homo sapiens
gttagtcacccacctacatgttgaggcctgctgaaaatgactgaatata

SEQ ID NO: 457024 - DNA, 80 bp, Homo sapiens
gaggtttaaccataggatagagaaaccagtgttatagttttgccgctggactcttccctcccttcccccaccccatcagg

SEQ ID NO: 457025 - DNA, 75 bp, Homo sapiens
gatgatgaggatgaaaacctttgtgatgatccacttccacttaatgaatgtttggtcagatgatgactggttgaa

SEQ ID NO: 457026 - DNA, 75 bp, Homo sapiens
gcgggaactcgactcttggcgccaccgcctcatgcactgtgtaggttgtggcagcactgcctgaaggtatgagac

SEQ ID NO: 457027 - DNA, 100 bp, Homo sapiens
ttcagcagaagaaacacttcctataaatctcgcccaaacaggaaaggaataagtcttgactgggatgaaaagagaccagaatttgttcgaggatataacc

SEQ ID NO: 457028 - DNA, 90 bp, Homo sapiens
atgaggaaactgaggcctggagaggttaaagagacccgttcagagtcctacagtggcagattctcttcaggggaagagtccacatcccac

SEQ ID NO: 457029 - DNA, 82 bp, Homo sapiens
cgggatttgggtcgcagttcttgtttgtggatcgctgtgatcgtcacttgactcggtgaaatacctggagtgctcagctctc

SEQ ID NO: 457030 - DNA, 100 bp, Homo sapiens
tgtgtaattatgcagaagaatggagctggattacacacagcaagttcctgcttctgggacagctctactgacggccctcgggaccaaggatcacgtcatg

SEQ ID NO: 457031 - DNA, 75 bp, Homo sapiens
cgagcctgagggaggggaaaggcgcaggcgcgagcttcggcctcggctctgtaccatgaagaagggccccagtgg

SEQ ID NO: 457032 - DNA, 90 bp, Homo sapiens
tggcggctcagaagataaacgaggggctggaacacctcgccaaagcagagaaatagaggatttgacagctaaggatattgaagaaattat

SEQ ID NO: 457033 - DNA, 100 bp, Homo sapiens
cgcgctgttgcccgcggccccccagccgctggagaaggagaacgacggctactttcggaagaaaggagaatcacttgaacccaggaggaggaggttgtgg

SEQ ID NO: 457034 - DNA, 50 bp, Homo sapiens
tgagccatcggatctaagatccaaaagtgaaagaaaggatgtcttaagag

SEQ ID NO: 457035 - DNA, 100 bp, Homo sapiens
tcggatctgctggacgaggtcttcttcaacagcgaggtggacgagaaagtggcataatcaccagcaacacccgggacaataatacgggggccacctaccc

SEQ ID NO: 457036 - DNA, 83 bp, Homo sapiens
aagtttggtgttcttgctaagattgtgaattacatgaagcattccccgtcggagccctttctagagaaaccagtgccggatat

SEQ ID NO: 457037 - DNA, 100 bp, Homo sapiens
cccagaaacaagaagaagagaaccctgcggaggagaccggcgaggagaagcagagtcacttatacctactggtcactgaccagggctttctacaggagga

SEQ ID NO: 457038 - DNA, 100 bp, Homo sapiens
aacgaagtaggccgtctcgctctgggtctccaggcccgcgaccgtccgccagtcgtcccgagtggacggctgcattcatcgggccgccggccccctgctt

SEQ ID NO: 457039 - DNA, 75 bp, Homo sapiens
cagggtccctgaagagggaagacacgcggaaacagagaagaagaagttggatgggataccgagattaaggatgat

SEQ ID NO: 457040 - DNA, 100 bp, Homo sapiens
ctgggatcggcccaaggccagttctccgcagggttacgactcactgattaaaaagagggactttttcaaatactttgcacttttgattgtgtattatgga

SEQ ID NO: 457041 - DNA, 98 bp, Homo sapiens
ctggcaggacgtgaaggggaagaggcccaccctggagtaaccctcactggagaatccagagtggatcaatcttcctgtcctacaactgacaaaggatc

SEQ ID NO: 457042 - DNA, 75 bp, Homo sapiens
atactgatgaacttgccactcagccaaggcgactgcttaacacactgagcaaagtgtgggatgctgtctcaggag

SEQ ID NO: 457043 - DNA, 75 bp, Homo sapiens
ccacgctcgcgtgctgatccgccagcgccatatcaggtcaaaatgcagatcttcgtgaaaacccttaccggcaag

SEQ ID NO: 457044 - DNA, 100 bp, Homo sapiens
atcaagttataccagctatcccatgcatgatttctacaggatctagtttgaagcactaagaagaataagacatcagtttgaaaagaggctctatcagaac

SEQ ID NO: 457045 - DNA, 83 bp, Homo sapiens
taaggattccaagtaactcttatttgcaatcatcctcttccagtggtagcgtgtttgggtctggaaacactggaagaggggga

SEQ ID NO: 457046 - DNA, 100 bp, Homo sapiens
ctctgaaagctagaagaaaaggtgtacttgcaagaaacctcaggacttgagtaacagcaacatggttctaagctggtctatgtccatcaccttcttggag

SEQ ID NO: 457047 - DNA, 50 bp, Homo sapiens
gtgcctggaggtggaggggaaggtggaagttaaacgagctgagcctcggg

SEQ ID NO: 457048 - DNA, 90 bp, Homo sapiens
tttcgaatcacttaaaggagtggacattgctagcaatgagctcccaaagccatccaggtgcagaccatgaattacgtggggcagttagcc

SEQ ID NO: 457049 - DNA, 100 bp, Homo sapiens
ggtcgaaacagctgcgtttcctgttttaatgttagcgttgttaatactacctgcttttggatagaatgtaaagaacatcagctttccaaaccagatgtgg

SEQ ID NO: 457050 - DNA, 75 bp, Homo sapiens
atgacaccaaggaagatgtatttgtacaccaggtggatagatacttctcaagacatcacacagcgtgagtcaatc

SEQ ID NO: 457051 - DNA, 100 bp, Homo sapiens
atacggtgaatgtgaccctgctgagatctcctaagcggcactcagtgcaaataacaatagcaactcccccagcagggaagagcatggaggaaatcaagaa

SEQ ID NO: 457052 - DNA, 100 bp, Homo sapiens
agaaaatcaacctatcctccttcaggaccaacggcactccacagaaggatgttattatcaagtcagatgcaccggacactttgttattggagaaacatgc

SEQ ID NO: 457053 - DNA, 101 bp, Homo sapiens
gaagaaggagaaacgaaagaaacgtcggcaggaacttgctcgactgagagactcagatctggcagtgtggtggggttctggaaacacacccatgttcccat

SEQ ID NO: 457054 - DNA, 100 bp, Homo sapiens
cagaggtggaggggaggattttgaggacacttgtggagagctcgaattccagaatgatgaaattgtgagtagctcggagaggaggaaggagaagtcccgg

SEQ ID NO: 457055 - DNA, 83 bp, Homo sapiens
gtttctaaggatcatgtctgcgagccaggattcccgctggagcagatccgcagggacatccgagacttccggtctagcgcggg

SEQ ID NO: 457056 - DNA, 100 bp, Homo sapiens
gaagaagataacaatcaagatgaatatgaccctatggaagcagaagaagctgaggatgaagaagatgtttgaagaaaacaggtctgaaacaaggtcttac

SEQ ID NO: 457057 - DNA, 75 bp, Homo sapiens
ccgcggatctcaccgccgctcaggccaaccgcctgccatggagactttctttaggagacatttccgggggaaggt

SEQ ID NO: 457058 - DNA, 74 bp, Homo sapiens
cctccgtctggatttccaaggaagaatttcctctgaagcaccggctccccaggttcatcctgtgtcgtctcccc

SEQ ID NO: 457059 - DNA, 97 bp, Homo sapiens
gtcctgggcccagagccgagatgagcagaacctgctgcagcagaagaggcaaccactgagaaaacggaaccgaatagtcaagaggacaagaatgatg

SEQ ID NO: 457060 - DNA, 75 bp, Homo sapiens
gggcatcttcttcgtgaggctgctcttcgagcgagtggagactgctgcacggactctggaaccatgaacatattt

SEQ ID NO: 457061 - DNA, 100 bp, Homo sapiens
tatacaacacgattcttctaatggatgggaacatgggatcgagatagacaatggggatgagttgactgcagacttcctttatgaagaagtacatcccaag

SEQ ID NO: 457062 - DNA, 101 bp, Homo sapiens
gtcaccttgtcccgctgcagccgagatgccgggggagcggggccttccacaccccctccgtgggtgtgtgcctactcaatttgaagacattgaggatgaag

SEQ ID NO: 457063 - DNA, 50 bp, Homo sapiens
gccccggccgcggccgggtcctcagagccagcccctgggcaacaaagtgg

SEQ ID NO: 457064 - DNA, 100 bp, Homo sapiens
gccttgataacacagagtttcaaggctcatcttggcagccaacagggatgaattctacagccgaccctccaagttagctgacttctgggggaacaacaac

SEQ ID NO: 457065 - DNA, 82 bp, Homo sapiens
gtgatttctgcatttccaactgagggggaagaaccaacaacgcagagaccgtgggaaagagcccagcctatcgaaggtgctc

SEQ ID NO: 457066 - DNA, 100 bp, Homo sapiens
atgctgagggctacgtggagggcctggatgatgaggaggaggatgaggatgatggaggagatgtataagaaagctcatgctgctatacgagagaatccag

SEQ ID NO: 457067 - DNA, 88 bp, Homo sapiens
attgacatttaattttagggtcctttatatagaagggagagtaggtattgtcaatatggactcgccatatggttctgtaacaccttct

SEQ ID NO: 457068 - DNA, 50 bp, Homo sapiens
accacggcctgtcagcacgtagaaactcttgctactcagttggatctagc

SEQ ID NO: 457069 - DNA, 100 bp, Homo sapiens
agagagtcaaatcattcctgtgatgccagctaatagatcagttaaagcccggaggaagattgatattgcctgttggtcctgcaggcggaaaccaaatgtt

SEQ ID NO: 457070 - DNA, 75 bp, Homo sapiens
cagtgtatgaagcccttcaccaacaaagatgcctatacttgtgcaagttaatgactccagagagtaagatcagat

SEQ ID NO: 457071 - DNA, 130 bp, Homo sapiens
ataccacgtaggagaacagtggcagaaggaatatctcggtgccatttgctcctgcacatgctttggaggccagcgggagtggcagaagctcaactatgatatccataccctgcggcaggttcgaagggaa

SEQ ID NO: 457072 - DNA, 98 bp, Homo sapiens
ccagccagccagtcagtgggtcccgcagtcgcccgcaaccggggcgaatcatggcggccgccaaggtgtatgcaacagcgttattgcaacaggctaac

SEQ ID NO: 457073 - DNA, 95 bp, Homo sapiens
tcatgtctgcgagccaggattcccggaatggtcctcgtccgaagtgagaatgggcagttgttaatgattcctcagcaggccttggcccagatgca

SEQ ID NO: 457074 - DNA, 108 bp, Homo sapiens
gatcaacgtcctccgggaccggagtcagaaccctccgcagagtaaagacaatgcagatcttcgtgaagactctgactggtaagaccatcaccctcgaggttgagccca

SEQ ID NO: 457075 - DNA, 104 bp, Homo sapiens
cctcttgtaattaatgcagtaaaacgcttccatatttatccagaggtgaccaagaatatggcccaggtgaccaaagccctggacaaggccctgagcaccatgga

SEQ ID NO: 457076 - DNA, 75 bp, Homo sapiens
ggcgcctcggaggaagccgcggaccccttaggttgggggccgtcccgctcctaaggcaggaagatggtggccgca

SEQ ID NO: 457077 - DNA, 100 bp, Homo sapiens
cgtcccccgctcggtgcccagaacctcgcttccaatctctgttggctcagaaggtcccccacaagctgaataaccctaagttcaatgatccgcacgtcaa

SEQ ID NO: 457078 - DNA, 51 bp, Homo sapiens
gcttcctgttcgcagctgcggcagtgagtgctggagaatctggtaaaagca

SEQ ID NO: 457079 - DNA, 100 bp, Homo sapiens
tgtcggcctggaccttgcagccgcaatgaggactaccccaatggcacctggctgggcgacgagaacaaccccgagatgcgggtacgctgcgccatcatcc

SEQ ID NO: 457080 - DNA, 75 bp, Homo sapiens
cctggaagtggatccttccgtagttgagccttgagatgaccacagcctagagtctcacactgtcacccaggctgg

SEQ ID NO: 457081 - DNA, 75 bp, Homo sapiens
cgaggccctggaggctgccgagcgtgaggagactcagcagaaggtgcagggttttggccaaattgggcgagggca

SEQ ID NO: 457082 - DNA, 100 bp, Homo sapiens
gcagaggtaccagccgcagcaggctattcatgctcttatggaaaatgctgtgcaacccttactcacttctgtgggagatgctatagaggccataatcatc

SEQ ID NO: 457083 - DNA, 100 bp, Homo sapiens
ccgggagctgctggacaagtactgtgtggcctacggcgtgggcatcattggcttcttcaaggacctggagcagttggctaaagagcaagacaaagaatca

SEQ ID NO: 457084 - DNA, 101 bp, Homo sapiens
taacacaacaagtttagggagtccatggccagaaaacttttgggatcaatgaactgagccatgttcaaatccctgttatgttgatgccagatgacttcaaa

SEQ ID NO: 457085 - DNA, 74 bp, Homo sapiens
atccgatggagaggctgagctgctccaggacttgggcagccaacagggaagagtgtcgcacccaggagaaagtt

SEQ ID NO: 457086 - DNA, 100 bp, Homo sapiens
cccgttggccgcgcggcgccgcgctcggcggccgccattgcagatctcattcgtcggttcggatccaagccagttctgtggtcagcaaggctcccctctg

SEQ ID NO: 457087 - DNA, 75 bp, Homo sapiens
ccgcctccggagcgcctgtgtggcatgatggaagtggttcattgcatgatattcaactgtcattgccatccagtc

SEQ ID NO: 457088 - DNA, 119 bp, Homo sapiens
gaattcagaaggaacttgcagaaatcacattggaccctcctcccaactgtagaagactgtgcagtctttgtaactgatgaagagcaaggctttgtctctaattctgcccagttaaagtg

SEQ ID NO: 457089 - DNA, 96 bp, Homo sapiens
tcgtacttacttggagagacatatgtctgaatttatggagtgttatagttgaagtcctgcctaatcaacctgtgaagttagtacctaaaattaaac

SEQ ID NO: 457090 - DNA, 75 bp, Homo sapiens
agcgcgcccacctctcgcgccggggccctcgcgaggccgcagcctgaggaggacaccgagatcctcgacagtgcc

SEQ ID NO: 457091 - DNA, 100 bp, Homo sapiens
actactttaatgaattcctaagccttccagtgcaagaattgtttatccgtgattatggagagatttttaatgtccagttaccggataaagaagaacggac

SEQ ID NO: 457092 - DNA, 74 bp, Homo sapiens
tccgcagaagcaaggggctgaaaagatctgaaggcgcggatcaagaagatcatgcagacggacgaagagattgg

SEQ ID NO: 457093 - DNA, 82 bp, Homo sapiens
tgcggcgcccgctggccgggctggctgcggccgccctgggccgggccccaccggacggggttggcatctgcacatccttcct

SEQ ID NO: 457094 - DNA, 100 bp, Homo sapiens
gctatgaatatgggtcgaccattccaaaaaaatcggcatctgcaggaaccacaccacactttggaggccatgctgcggcccagagtcaccacgctgccag

SEQ ID NO: 457095 - DNA, 90 bp, Homo sapiens
cttcgccttccctgcaccacactctgccaggtcctgcatgctgtgagccatcaggactcttgtcctgcttcttggacacttaatgattgt

SEQ ID NO: 457096 - DNA, 51 bp, Homo sapiens
tggagggggagttctcagagtcattacagtgctgctacatcctcatcctcc

SEQ ID NO: 457097 - DNA, 75 bp, Homo sapiens
cagcctccacccaccggcccaccctacatttagcgcatcatgtgatccgggaaagcgtctctagcagctgatatc

SEQ ID NO: 457098 - DNA, 58 bp, Homo sapiens
ggataagctttggacacaggtttgcactggagagttgtggactggggcaacctttgcc

SEQ ID NO: 457099 - DNA, 101 bp, Homo sapiens
ttctgaccatcatggagcagtggtggtgtatgccaccacgggctgttccctgaccctgcaccatacggagaaaccagaacatgaagacatatgtgaatacc

SEQ ID NO: 457100 - DNA, 100 bp, Homo sapiens
gcagattttacgccaaaccactggctgccttggtgacatacaaaggaagggaggctgaaaaacagagtgggtactctcttctgggaagctggcaacaaat

SEQ ID NO: 457101 - DNA, 75 bp, Homo sapiens
ctgaagtctcacatcagaggtgtcaagacgaagttatacggaagcgtctcctcattgatggagatggtgctggag

SEQ ID NO: 457102 - DNA, 100 bp, Homo sapiens
tttctatcagctctgatgccttcttccctttccgagataacgtagacagagctaaaaggaatctttagaacacgatgttcttgatgataatacagagcag

SEQ ID NO: 457103 - DNA, 75 bp, Homo sapiens
aaaccaccattacagaacaatgagggaccaaagcagtatccttacaataatctgtacctggaacgaggcggtgat

SEQ ID NO: 457104 - DNA, 75 bp, Homo sapiens
gcctagcgtcctggaattacttcaatcaagtctacttccccagcaggacagcatcattctcctatatcttctaga

SEQ ID NO: 457105 - DNA, 98 bp, Homo sapiens
tgaactcctgacactatttagtattcttgaaggagagcttgaagcaagggaccttgttatagaagccttaaaggtcctatcagcagtatcctggtgaa

SEQ ID NO: 457106 - DNA, 94 bp, Homo sapiens
caaagcgaggctgaagaaggccaaggctgcagaagccaaagccacgcaaattgtggctactaatttgccccctgaagatcaagatggctctggg

SEQ ID NO: 457107 - DNA, 50 bp, Homo sapiens
gtttttgacttacatggaaacagggattgatgaaccattgcacatcaaga

SEQ ID NO: 457108 - DNA, 98 bp, Homo sapiens
ttttttcgtaaacatctgggtgtatatcaaacggcaagatgtccagtaatgtcccggcggatatgatgctattaactgagtacttggatatgaaaaat

SEQ ID NO: 457109 - DNA, 99 bp, Homo sapiens
ctttcagaagttgtcaacagtatagtttgggttcgccagttggaattgaagcacccctgccactttggaacagaactacatagtctgtgagctgcagca

SEQ ID NO: 457110 - DNA, 51 bp, Homo sapiens
aagatggcgtctcccacagacggatcttcagcctgttaaacaagaaaacga

SEQ ID NO: 457111 - DNA, 75 bp, Homo sapiens
tcctgcctttgggccgtcaggcagttggttgggacccgctccaaccctcggggtggcctatgtatgcacagctac

SEQ ID NO: 457112 - DNA, 90 bp, Homo sapiens
tgggtaaactggagaagagcttcaactctgttcacctgcttgcagttttagaaagagcgttttcgctacgtaaagcacattcgataaagg

SEQ ID NO: 457113 - DNA, 95 bp, Homo sapiens
cgactgggactaggccggaggcagcgggggaccggcaggaattgaatgatctggcacgggaccctccagcacagtgttcagcaggtcctgttgga

SEQ ID NO: 457114 - DNA, 100 bp, Homo sapiens
caagcttttccctctccaccaagagacagcagccagctaatctcccacacccacggctgcatacctgcactttcagagtctcgctctgttgcccaggctg

SEQ ID NO: 457115 - DNA, 100 bp, Homo sapiens
ttaaacttgaattacctttgaagcagaagggagaacagcccatcttcaccacccgagcgcatgtcttccagattgaccccaacaccaagaagaactggat

SEQ ID NO: 457116 - DNA, 97 bp, Homo sapiens
gcggttcaaaacacagaggaggagaggacacgggtgcaacaccggaggatttcagcaacctcccacctgaacaaagaaggaaaaagctgcagcagaa

SEQ ID NO: 457117 - DNA, 90 bp, Homo sapiens
cgggaagcctcctgccgagataaagccaccacgtctgctctgagcccagaggaagccgagtcagccctggaggcggcccattatttcaca

SEQ ID NO: 457118 - DNA, 99 bp, Homo sapiens
aagggtggggacatcaactttgtcttcactgggttctctgtgaatggcaagttttaaaggacaccttggaaaaaaagggggtattagggcatttaaaag

SEQ ID NO: 457119 - DNA, 75 bp, Homo sapiens
ttcgacatactctccagcttcaatcctcctccgcctcctcctctctgcatgcgcgtcagagcccgtgccaagaac

SEQ ID NO: 457120 - DNA, 100 bp, Homo sapiens
tttgcttttgtaacttttgatgatcatgatacagttgataaaattgttgaacaaaacagtaagttggtggacttgaagctgaagaagctcctagaagttc

SEQ ID NO: 457121 - DNA, 100 bp, Homo sapiens
tggaagtttgagagaagtttaagagaagaaatggacatgattgcctaaatcagccaaacacaggacctgtggatgaagagccagagtcctctgaggtcga

SEQ ID NO: 457122 - DNA, 100 bp, Homo sapiens
aggagaaaatgaatgccaaatgggacacggttatggattaaaaagtcacgtcagaactcatacaggagaaaagccatatcggtgttcggaagataattgt

SEQ ID NO: 457123 - DNA, 75 bp, Homo sapiens
gaaagatctaccttctggaagctactactacgtggtgcttggaaagatgcttcaggactgccccaaggcccgcag

SEQ ID NO: 457124 - DNA, 90 bp, Homo sapiens
aagcggcgacggcgtcctcaggagctgtggggtcccctgctagaagtgggggactcggcggggcatttccggagagttcttttgaagtca

SEQ ID NO: 457125 - DNA, 75 bp, Homo sapiens
ccggcgcctctacgtgggcaacatcccctttggcatcactgagaacattaaccaggtggtatttgttggaaattt

SEQ ID NO: 457126 - DNA, 125 bp, Homo sapiens
gtgactacccagagcacgtctgcgaagtgttactcaccatggagaggacagaagatgctacaaaacttagagtttctcctaagaatcctcgtatccccaaattgcatatgcttgaattacattgt

SEQ ID NO: 457127 - DNA, 98 bp, Homo sapiens
ggcagtaattggaggaagaatgatagcacagaaaatctctgtcagaactggtagtgggcagcagtcagtgacaggtgtaacctctgtggatgacagca

SEQ ID NO: 457128 - DNA, 75 bp, Homo sapiens
caggggaccagaggaactcagccctgattgcgcatctgcaaacatagagaattctgggcttccacacaactccag

SEQ ID NO: 457129 - DNA, 98 bp, Homo sapiens
tggaacgggtggccgattactgcgagaacaactacatacaggaggcaaaaccttcaactgaggacttgggggataagaaggaaggtgaatatattaaa

SEQ ID NO: 457130 - DNA, 82 bp, Homo sapiens
ggccgcggtgcagctgctggtcaccctgagcttcctgcggagcgtcgtcgaggcgcagagacacctatggctgccgatgaag

SEQ ID NO: 457131 - DNA, 82 bp, Homo sapiens
ctgtggcgcaactggtcttggtagcggaggcacccgaatgctgcccgggtgaggttgttcttgcagaacatgccagcagaag

SEQ ID NO: 457132 - DNA, 100 bp, Homo sapiens
atgtgaaaaggcaccttgggatgagggaatacaagtgtcatgtctgtggcacttgctctgaaatttggggactgagtacaccaaatacgatagatcagtg

SEQ ID NO: 457133 - DNA, 96 bp, Homo sapiens
gatcaaagggaggcagtcagctcatggagccgaggaatgttctgctgacacccaccccgagggtatccggttaatgaaagactgttacatgagtaa

SEQ ID NO: 457134 - DNA, 98 bp, Homo sapiens
caggacagcgtggactttgatattgatgtgaacgcctctgtgtttgaaacaaacattcgaggacccgtgcatctcttccgactctcgggcaagtgctt

SEQ ID NO: 457135 - DNA, 80 bp, Homo sapiens
ggggcagccccggcccggccctgcccggcggccctatgccgggggtgccgctcagggggtgaatctctacattaagaact

SEQ ID NO: 457136 - DNA, 75 bp, Homo sapiens
ctagaatgcatcagtgcccttgtggcgaatggggctcacgtcgagtgcaaattgagcatgacccagaattagaaa

SEQ ID NO: 457137 - DNA, 100 bp, Homo sapiens
atttgatgtttcgtcagagttactagagatggctatctcagctgttgctggtatccttaaacagctaaaaagaacccacaaaaagctgaccattaacccc

SEQ ID NO: 457138 - DNA, 82 bp, Homo sapiens
tggtcatgaaagagattccttgcagagacagctcaacacggcacttccacagggtacagctctgccggggggggaaaaagtg

SEQ ID NO: 457139 - DNA, 100 bp, Homo sapiens
gcggcggcggcaccaacggcaccaactattcgcggagctggaatgactggcaacccaggcacatggacacagccctttgacctggcaagcaccagggagg

SEQ ID NO: 457140 - DNA, 74 bp, Homo sapiens
gaaacatacccatttaatccccctaaggcccgatgagagaaagggaaagttaaggatgctggagcagaacaatg

SEQ ID NO: 457141 - DNA, 97 bp, Homo sapiens
tcaagactggtccacggagtgtatgaccacaaacagccatcaaggacacattcagctaacgtattttagcaggtggagtgaggttgaagattcctgt

SEQ ID NO: 457142 - DNA, 90 bp, Homo sapiens
tagctgaatccagtaccaaaaacgtcaacaacagttttacggttttgcaaaaggcatcaaattaaatcaagttcaaatattccctgtgtc

SEQ ID NO: 457143 - DNA, 100 bp, Homo sapiens
tccaaaagcgcagaccacagttacatgtatggagaatggctggtctcctactcccagatgcatccgtgtcagtgcttaatttacccatttctgatgcgag

SEQ ID NO: 457144 - DNA, 75 bp, Homo sapiens
ccgggagagtgagagctccccaggggagttctctgtgtctgtgaagtctgcgtgggctgatcaaccttgggaaca

SEQ ID NO: 457145 - DNA, 98 bp, Homo sapiens
cttcatctcctcaacatggaaactaagacattgcctaagatactgagccatatcgccccagcattttgcatgagcagctgtagcttcgtagtggaaaa

SEQ ID NO: 457146 - DNA, 74 bp, Homo sapiens
aaaccacagccaagtgctctaaaaaggtgatctgtgaaaatggttcgctattcacttgacccggagaaccccac

SEQ ID NO: 457147 - DNA, 115 bp, Homo sapiens
aacactgctcctcttgcacatgacctgacatttagactcgatcattatccttctgtgagttaccatctgccaagttcatccgacaccctcttcaattctcccaagtcgctctttc

SEQ ID NO: 457148 - DNA, 76 bp, Homo sapiens
tgtgggattggctgtgtgcaatactcctcacgaggtccctcaagacccattgaaattttataagaagatttacttt

SEQ ID NO: 457149 - DNA, 87 bp, Homo sapiens
agcacgtgacggtcatcggcggcgggctgatgggcgccggcattgcccaggggcctgaattaatgaataaatatgttggtgaatctg

SEQ ID NO: 457150 - DNA, 101 bp, Homo sapiens
ttgtcattgatggtctcaatgttgccaaaatgtttcctaaagttcgtgaatctcaacttgtgggatgtgtgtgggctgaaattccgagctgcggttgtgca

SEQ ID NO: 457151 - DNA, 100 bp, Homo sapiens
aatcgactctcataaacagcctattcctaactgatctgtacccagaaagagtcatacctggagcagcagtgagggtcgctgtctgcccattgatagaggc

SEQ ID NO: 457152 - DNA, 74 bp, Homo sapiens
ggtacttctgccactgctgctccgtggagatcgtcccgcgcctgccgggccgccttcaacaacaacgtgagcgt

SEQ ID NO: 457153 - DNA, 74 bp, Homo sapiens
gggcttccttatgaactgactgaaggggacatcatctgtgtgttctcacaggctggagcggctctgggctccgg

SEQ ID NO: 457154 - DNA, 78 bp, Homo sapiens
ggaggcgtcgcgggagcctttggggcaccacagagatgcggttttggaaaatatgtcccatggagcacattctggttc

SEQ ID NO: 457155 - DNA, 100 bp, Homo sapiens
acaggaaggagggtggaagtatggtttccagttcccaaaggtgggggcctacccatgaccactgaagttctcaagagcttagcagctcctccagccctgg

SEQ ID NO: 457156 - DNA, 83 bp, Homo sapiens
gccctgcccaaaagtcttcagcaatttttacagcaaagcagaagctcattcacacagaagacccatttaatgatgaacatcag

SEQ ID NO: 457157 - DNA, 51 bp, Homo sapiens
agaaaaagaaggaagctgctcaaaagaagtgaccaaagacttgaccactca

SEQ ID NO: 457158 - DNA, 100 bp, Homo sapiens
tcgcgatgggggcgcaggaccggccgcagtgccacttcgacatcgagatcaaccgggagccgggttaccttccgaacaagaatctatcactgtaatatta

SEQ ID NO: 457159 - DNA, 100 bp, Homo sapiens
cgtgctcctgcagggacactctgtctacggacccttgtggatctagtttgaagcactaagaagaataagacatcagtttgaaaagaggctctatcagaac

SEQ ID NO: 457160 - DNA, 75 bp, Homo sapiens
ctgcggctctctacgtccctgcggagcagccgatttggaggccaatcactgccaccttttatttccctgtgggtc

SEQ ID NO: 457161 - DNA, 90 bp, Homo sapiens
ctggaggagtttttgaaagccacagaaaaaaaagaattcttggagccagatagctgggaggggtcattgccggaggcctcgtggggctca

SEQ ID NO: 457162 - DNA, 91 bp, Homo sapiens
aaaggagtacttcccaggaaacttatgactgcagatgagctgtggaaaggcgctttagcagagactggtgctggagcaaaaaaaggaagag

SEQ ID NO: 457163 - DNA, 100 bp, Homo sapiens
aaaaccgcccgcgggctccgaggccacagctcatatgttagatttgatatcattcgaaggatcctaaccaaggtttttggatgcagcatagtcatggtga

SEQ ID NO: 457164 - DNA, 100 bp, Homo sapiens
agatctcgtacaagatccttctttcccatgacgattgatgaactgtatgagctggtggtggatgccatctttggcttcagcttcaagggcgatgttcggg

SEQ ID NO: 457165 - DNA, 74 bp, Homo sapiens
ggaatacacttatttatgaagagggtgcatctgcccggaagactcagactcctgcagcccagccagtaccaaga

SEQ ID NO: 457166 - DNA, 90 bp, Homo sapiens
gaccggaggagacatcggcctctgcaggcttgccgaagaagggagtgaagatagtgatccggggagacaggaacacgggcaagacagcgc

SEQ ID NO: 457167 - DNA, 75 bp, Homo sapiens
gagttcgaggagtgcgtcaaggactccccgcgcttcaggccacggcgtatgcctccgaggacggggtcctgaccg

SEQ ID NO: 457168 - DNA, 75 bp, Homo sapiens
ctccggaaagagttttctccatttggtacaatcactagtgcaaagcttatgaaatgttatctgatccagtgaaaa

SEQ ID NO: 457169 - DNA, 97 bp, Homo sapiens
cgctacctctgtttgcccttctcctttcaaaatgaagcccataggacttcaagagagagggagacgtggtgggcggtccttcctgtgacacgaccct

SEQ ID NO: 457170 - DNA, 82 bp, Homo sapiens
atcgcgtcgccatgatgggccatcgtccagtgctcgtgctcagttctccccatgacaccacctgaacgtctcttcctcccaa

SEQ ID NO: 457171 - DNA, 131 bp, Homo sapiens
agcctgggaggccggccggtgccagcacctttcggcttctgagacggcggcagcagcggcattcaggaaatatgagctgtacagcatggactgggacctgaaggaggaactcagggattgcctggtggctg

SEQ ID NO: 457172 - DNA, 100 bp, Homo sapiens
atgctgatatacatccaatgagggaagctgccctctgtcgacagctccccatggaagctgagactcttgccccagttcaggctgctgtcaacccacccac

SEQ ID NO: 457173 - DNA, 50 bp, Homo sapiens
ccgaaagatgtgtctccagacccttcaaacatccagctctgtcacccaag

SEQ ID NO: 457174 - DNA, 75 bp, Homo sapiens
acatcgtggccctgtacgacttccaggaccagctgtactggcgctacgatgaccacacgaggcacatggaccccg

SEQ ID NO: 457175 - DNA, 88 bp, Homo sapiens
ctggagataagaggttacagcaaattacatgatgacctaggagagtttccatatggaaataatgaagatgtttcattttcaagaccag

SEQ ID NO: 457176 - DNA, 82 bp, Homo sapiens
actatcggggccgcactgtggtattcgccggcacgcgaagtggccgcatccgcaagtaatctcaggggcgatataatcaatg

SEQ ID NO: 457177 - DNA, 78 bp, Homo sapiens
gggccacctggtaaaggtatggaggagctggggaccctgaaccagacctgtggatcatccagccccaggaattggtgt

SEQ ID NO: 457178 - DNA, 75 bp, Homo sapiens
ccaggagcaccgccgaggactccagcacaccgaggtcgtggcattcctggtggctttccatcagaacaagcagct

SEQ ID NO: 457179 - DNA, 100 bp, Homo sapiens
gtttgatgctcgctgggtaacatacttcaacaagccagatatagatgcctgggaattgcgtaaagagacagagtctcactccatcacccaggctggagtg

SEQ ID NO: 457180 - DNA, 100 bp, Homo sapiens
cctgtggctgaggctacaccccggagccaggaggatgcagtgagtgaggggggggccatggcggaggagcggcccccccggctggtggattacttcgtgg

SEQ ID NO: 457181 - DNA, 98 bp, Homo sapiens
gcctctgtgctcgtgagtccagggatctaaggctccctggggaagggaatgcagggttgctggggctgggcccagaagcagcagcaccagggaagagg

SEQ ID NO: 457182 - DNA, 90 bp, Homo sapiens
agcgcgaatatcgtcatcgttagaagtgtttgaaagatgtatggtgatcttgaaacctccagacacaagaaaacttctagcaaattcagg

SEQ ID NO: 457183 - DNA, 90 bp, Homo sapiens
gagccgccgagcggagacccgggagcaggagctgggcctaggtctgcgccctggtttctgagtcccttcaacatgatcctgggaggaatc

SEQ ID NO: 457184 - DNA, 75 bp, Homo sapiens
caggcgaagctggccgagcaggctgagcgatacgacggaaaatgtttataggaggccttagctgggacactacaa

SEQ ID NO: 457185 - DNA, 97 bp, Homo sapiens
acccccagtgccaccagcagcagcagcagctgctccacgcccgcgatgaggaaaagtccaggtctgtctgactgtctttgggcctggatcctccttc

SEQ ID NO: 457186 - DNA, 100 bp, Homo sapiens
atattgtagaaactgtctttaacctgtaacggcacagccaacaagatgaacggagctttggatcactcagaccaaccagacccagatgccattaagatgt

SEQ ID NO: 457187 - DNA, 96 bp, Homo sapiens
cagcctcaagaaaccagtaacagattgtgttatttcaattgcctttctgggcctgacctcccatgagagaatcagcctgcagaagcagagcaagca

SEQ ID NO: 457188 - DNA, 82 bp, Homo sapiens
gaggcggcggcggcggactggcgggaaaccacccctactcctaatcccccgactacagaagaggagaaaacggaatctaatc

SEQ ID NO: 457189 - DNA, 100 bp, Homo sapiens
accctccttgcagcctcccccagaaagcaatgataattcccaggacagtcagtctggtactaacaatgcaggttgactatagtcaatggggccaatggag

SEQ ID NO: 457190 - DNA, 74 bp, Homo sapiens
gagaatatttaatggaaaatcgcttggttaaaacctgacacttttaacaggtttggacatatttgactcttttc

SEQ ID NO: 457191 - DNA, 139 bp, Homo sapiens
ccctttcctctgccagtacaactagacccggcgtctggcgtccccggtgcccagcattctgcggggcaggcgactcacagatgaatgcttctcacccggaaacaaacttgccagttgggtatcctcctcagtatccacc

SEQ ID NO: 457192 - DNA, 100 bp, Homo sapiens
acacctgcaggatattaaagtgaaattttctgaccctggacagcctatggctcagatcaccatgaaagtaatccaaggcttgtacagtggggtcaccaca

SEQ ID NO: 457193 - DNA, 101 bp, Homo sapiens
gacttttctggtgggcgaacgagtgacattggctgacatcacagttgtctgcaccctgttgtggctctataagcaggactcagaattcatgattgaagaaa

SEQ ID NO: 457194 - DNA, 50 bp, Homo sapiens
gatatctgcaatgatgtactggcctccccatggccacccatggaccagtc

SEQ ID NO: 457195 - DNA, 95 bp, Homo sapiens
gtcaccactggacctccaaggaagccacgtgcagacatctacaaccttcgatctcctgacgacaggaaaccagtctcagtgtccaactctctaac

SEQ ID NO: 457196 - DNA, 100 bp, Homo sapiens
tggtgcaggaggtctccagcgtgctcaggtcggcggaggagaaggaagtgtttggattgtgagctatttcagaactgttctcaggactcattattttaac

SEQ ID NO: 457197 - DNA, 100 bp, Homo sapiens
aaccattgccatcactagaagatttggataatacagtatttggagcagagaggaaaaaacggctatctataatagaacgccaatctgaattgccaacgca

SEQ ID NO: 457198 - DNA, 75 bp, Homo sapiens
cccggagactggccagtcacctcaacaatgtttttgttcaacagattgggatcaaagccactcacattaagttac

SEQ ID NO: 457199 - DNA, 105 bp, Homo sapiens
ccagcggccgagcgggcggcttcctggcctgggcgctccggtggcggcggaggaccaagaatcgccttcagccctgtctggtgcatccttggcagaaagtgagga

SEQ ID NO: 457200 - DNA, 82 bp, Homo sapiens
ctctctctttctggcctggaggctatccagcagccattttgttctaatagctgtgatgatccaatcaagaaagatgaaatgg

SEQ ID NO: 457201 - DNA, 50 bp, Homo sapiens
acaagcagactgacaacgtttctagaccccatatcatgtgaacctcctcc

SEQ ID NO: 457202 - DNA, 101 bp, Homo sapiens
tgcaggattcaaggaagaaattagaccagatgagaagtcaagagtctcaggagcaggggctgcggcagaggctgctggacgagcagttcgcagtgttgcgg

SEQ ID NO: 457203 - DNA, 90 bp, Homo sapiens
atgaaggaagaaggggtgaaacttctaagagaagcaatgggaatttacatcagcaccctcaaaacagtctgcagatctccaggggagccc

SEQ ID NO: 457204 - DNA, 100 bp, Homo sapiens
gagaacacccccccatggaggcgagtgccggtggtggtgtgcacattgagccccggtatagacagttcccccagctgaccagatcccaggtgttccagag

SEQ ID NO: 457205 - DNA, 75 bp, Homo sapiens
acatctcactacagtctctacctgaaaatattggcaaattcacagtctgagaatgaggcttcaccagtaaaacgg

SEQ ID NO: 457206 - DNA, 101 bp, Homo sapiens
tggagctctgcgcgctgctgggcgccccccgggacagtctccgaagtctcgagcagatctttaatctcatgaagtacgacagctacagccgcttcttaaag

SEQ ID NO: 457207 - DNA, 83 bp, Homo sapiens
gggagcggcgccgagaggccgtgcgggacgcgggcgccaggaccggccgaacgcagaggagcaggccgggctctcgccatggg

SEQ ID NO: 457208 - DNA, 75 bp, Homo sapiens
ccacacgggcgagaagccctacgagtgcaacatctgcaaggtccgcttcaccagcccgtggaccgggagcccgtg

SEQ ID NO: 457209 - DNA, 90 bp, Homo sapiens
agcccgagtggatcggggacggagagaacacgagcccatcagcggcccagcccaatccagctttactcccctccctttatattggcccca

SEQ ID NO: 457210 - DNA, 50 bp, Homo sapiens
gaggctccgcactagatctaaaaactcttccagtcttccccaaaggaaac

SEQ ID NO: 457211 - DNA, 97 bp, Homo sapiens
ccggacatctgctttatatttctctcagaccattcccatcagtgagcattacagcaacatttcattgaattggatgaaaatagacagagattattgc

SEQ ID NO: 457212 - DNA, 49 bp, Homo sapiens
atacaggcatccctgtgctcctagagaacatcgtgtggatgactcagga

SEQ ID NO: 457213 - DNA, 74 bp, Homo sapiens
tggtggacagaaagtcagcctcttgtggtggcagtagagaagagcatcacagaagttgctcaggagctgacaga

SEQ ID NO: 457214 - DNA, 80 bp, Homo sapiens
ttgtaacttttgatgatcatgatacagttgataaaattgttgctgtatcttcagtggtgtgatgaagctacagtagggga

SEQ ID NO: 457215 - DNA, 82 bp, Homo sapiens
tatttcatcacaagttgctgaacttaagaaaatgtcactgaaattcacaaatgcaaaacggattgaaggacttgatagtaat

SEQ ID NO: 457216 - DNA, 83 bp, Homo sapiens
agcaagatcggcaggcgagattgcctgacccaggcctgctcggccctcacaggagtgaagacatttccacctggacacctgac

SEQ ID NO: 457217 - DNA, 100 bp, Homo sapiens
cagcctggctcctggtggctccagcagcaggtttctggtcctcataccgtgtggttgagtgaaatcaaaacttccacgatagcaatgctgattggacaaa

SEQ ID NO: 457218 - DNA, 100 bp, Homo sapiens
tactaaaatcatgatgatgggaactcgtgaggagagcttgatatgcctcttcatgttcgacgcagtagtgacccagctctaattggcctctccacttctg

SEQ ID NO: 457219 - DNA, 90 bp, Homo sapiens
ttctcatctgactcgtgatctgcccatcttgttactccctagcagtgtggtaagaggccatcaggcggaaggtggagctggagtggggca

SEQ ID NO: 457220 - DNA, 74 bp, Homo sapiens
gacatccgagtgcagaacctgcaagaggaggagacccacccggtggacttgagctcgctctccagtaagctact

SEQ ID NO: 457221 - DNA, 90 bp, Homo sapiens
tgaaacaccactgaagcattgccaagtgacctaaaacttgacaacgtgatgctcgattctgagggacacatcaagattgccgattttggc

SEQ ID NO: 457222 - DNA, 82 bp, Homo sapiens
ttctcgactcggtcctgtttcgacagcgaacatgtcgcggcctgtcagggagtgcatccgccccaacccttttccccctcgt

SEQ ID NO: 457223 - DNA, 100 bp, Homo sapiens
cacaaaatggcgccctacagcctactggtgactcggctgcaggtgttgacttcaaaatcaaaactgtagagctaagaggaaagaaaattagattacagat

SEQ ID NO: 457224 - DNA, 89 bp, Homo sapiens
gaaaaagagaagatgaagaaacccagcttgatatgttgctgacatagcccagagatacaggataagcaaatacccaaccctcaaattgt

SEQ ID NO: 457225 - DNA, 100 bp, Homo sapiens
agcgggtgaaatctggcatattagcgctagccctgcagacagaggtgtgctgacgacctgctacaacagaagatttcctaatggaaacattcatcatgtt

SEQ ID NO: 457226 - DNA, 51 bp, Homo sapiens
gcgatgatgaggaggactacgacctggcacggatgggcagaagcctttgca

SEQ ID NO: 457227 - DNA, 75 bp, Homo sapiens
agatgacttccctaatctcttcagacagctccttcgagaactcatagaacggaagaccagctccttggatcccaa

SEQ ID NO: 457228 - DNA, 75 bp, Homo sapiens
cagattcgcagtggtcgcttcttctccttggcatcataggcgagtattagtggaatggctaagagatccatctca

SEQ ID NO: 457229 - DNA, 87 bp, Homo sapiens
ttttgaaggttggtgaaaaggctggagcaaagtgcaagtatgtgaaagcaagaacagagctaacatgggattatggctatgaagctg

SEQ ID NO: 457230 - DNA, 100 bp, Homo sapiens
atcacctggctcctaaggcccatgttctatcttgatttgactctgtttcatagagcagaggaaacaggcgaagaatcatagaccatcatgcagacatcag

SEQ ID NO: 457231 - DNA, 100 bp, Homo sapiens
ccgatgagtactacgcccgctccgaggactacgtggagctggtgcagcggaagcgagtggatgccattattacttgcaatcctgaggaattcatagttga

SEQ ID NO: 457232 - DNA, 75 bp, Homo sapiens
ggaaaatctccccggtgactttcagtgttctaagaacggaagcatctgggctggatggaatttagcatcaagcag

SEQ ID NO: 457233 - DNA, 100 bp, Homo sapiens
atatggacaaagatctcagtggatataaaggttcaaggtggggaccaaggcatactgaacacattttttagcagctgggcaacaacagatatcagaaaac

SEQ ID NO: 457234 - DNA, 82 bp, Homo sapiens
ctaattgatttcattcttatttcaatgcagggcggagggatttctctttcctgagctcaccaaacttattccagtgttgatc

SEQ ID NO: 457235 - DNA, 100 bp, Homo sapiens
cccatggtgcgaggctgggagccgccgcccgggctggactgcgctgagtccagattggcaggtggactacgagtcatacacatggcggaaactggatcct

SEQ ID NO: 457236 - DNA, 98 bp, Homo sapiens
cagagaggcctagaaaggaatgatagctggggttcttttgacctgagggctgctattgtatatcacactaaagcaactgaacgaggaagggatgctgt

SEQ ID NO: 457237 - DNA, 50 bp, Homo sapiens
caacagttcaccaccattaccggcctgtctcctccctcctacacatttcc

SEQ ID NO: 457238 - DNA, 100 bp, Homo sapiens
gagcagcatcccacggccacacctaccgagtttaattggttggggtcagataagaagaggagtgacaatcaagccaacagtagatgatgactgaagaata

SEQ ID NO: 457239 - DNA, 100 bp, Homo sapiens
aaggagatgtacagaatgggccaagctccactgttcagatgcaaagaacctcaaccagaaccctcggactttgctgcctaaattctatggactgtactgt

SEQ ID NO: 457240 - DNA, 83 bp, Homo sapiens
gcaagatggcggcccatcaccggcagaacacagcagggcggaggaaagtgcaggttattcagcttctcaaggctggaaaagcg

SEQ ID NO: 457241 - DNA, 90 bp, Homo sapiens
gacatgagaagattcatactgatgaggaaaatgaggcccaaagaagtgatgccacttggttaaggtcccagagcaggtcagaatcagacc

SEQ ID NO: 457242 - DNA, 75 bp, Homo sapiens
gtgcagaggatcctggaggcctgggaagccaacgaccacacgcagctgatcagctgaccgaagaacagattgctg

SEQ ID NO: 457243 - DNA, 123 bp, Homo sapiens
gccaccatcttttcctccgcctggtgggtccctccctgctgcgggacagcagctgataacgaaggaggcccaacttcattcaataaggagcctgacggatttatcccagacggtagaacaaaa

SEQ ID NO: 457244 - DNA, 100 bp, Homo sapiens
agaacccgggtcagcggggtcacccctcagcacatggtgggggccacaccatttgccgtggccaggctagagcttcctgcctgacacagctcacttcaag

SEQ ID NO: 457245 - DNA, 75 bp, Homo sapiens
aaacggggctgctggtgggccgcgtcgaagacatggaccagggctacggagggaagatggagagttggaagaagg

SEQ ID NO: 457246 - DNA, 104 bp, Homo sapiens
ccacggaccattaatggacaaaaacatgagtcaatatgtattgtggcattcaaatcctagcactctgggagagatcaccgaagtggccttggagtacaacaact

SEQ ID NO: 457247 - DNA, 74 bp, Homo sapiens
aagaagattaacctggagttaaggaacagatccccggaggagattgacgagatgcctgaggctgccgtgaaatc

SEQ ID NO: 457248 - DNA, 50 bp, Homo sapiens
ttgtattgagaacaatatagatttgcaggatgttgcttcagagtgtgaag

SEQ ID NO: 457249 - DNA, 75 bp, Homo sapiens
gccatctacctggacatcgatggacgcattcagaagaatgagcatgttgattacgtagatgttggtggagcttat

SEQ ID NO: 457250 - DNA, 98 bp, Homo sapiens
caacatcatcttctccaacgggaacctggacccctgggcagggggcggggtggcggccaaagccctggagatgggcgtgtttggcgcatatttcaacg

SEQ ID NO: 457251 - DNA, 100 bp, Homo sapiens
gcacgccttcacctacaaggtctatgctgacaagaggctggacgcacaagaaaccagcctggacaccaagtctgtgtcagaaggccacctcaagaggaac

SEQ ID NO: 457252 - DNA, 98 bp, Homo sapiens
gagaatgttgagttcggcagcatacagattccagactccatcatttctcgtggtgttcaggtgctcccacgagacacagcctccctcagcactactcc

SEQ ID NO: 457253 - DNA, 109 bp, Homo sapiens
tgcttggtaaaggatcatttgctggtgtctacagagctgagtccattcacactggtttggaagttgcaatcaaaatgtgaatattacttcagtgtagaaaatttggaac

SEQ ID NO: 457254 - DNA, 83 bp, Homo sapiens
atgatggcgagtgctttgtgatcgaaaccctgaccggatcccataaacactgtcgtttcttgcagaacataaattattaggaa

SEQ ID NO: 457255 - DNA, 75 bp, Homo sapiens
tccactgatatctcaaaaggtgatctggacaaaggaacaggtatctcagaataacatagctgatccagaagaact

SEQ ID NO: 457256 - DNA, 50 bp, Homo sapiens
atgatcaatgaagtggatgctgatgatttgtcccatcagatgaaaagaag

SEQ ID NO: 457257 - DNA, 96 bp, Homo sapiens
aactaactacagttaaccagccagctgatagcagatgcatgagtgagcccagctgagagcagatgacaagagcacctcaaaggcagcagcctcaag

SEQ ID NO: 457258 - DNA, 85 bp, Homo sapiens
aggcaaggagctaaagcagcgtgcgttcagccctggggctttatcctgtggataaacgcagagtgaacgagtttggggagtccta

SEQ ID NO: 457259 - DNA, 87 bp, Homo sapiens
ccgcggacctccctgcgaccgtcgcggaccatgggcgacaaagggacccggagccccttgtggcagcagcactacctgcccagaaaa

SEQ ID NO: 457260 - DNA, 75 bp, Homo sapiens
actggggtggcagcctgccacatcgggggcaccaccctccatgcctttgcagatttccacccagaagacagagaa

SEQ ID NO: 457261 - DNA, 98 bp, Homo sapiens
gttccagctctgcgccgatctatgcacgcagatgctggagaagtccccttatgaccagatacactctgtgcagttttagagagagacacactcagtat

SEQ ID NO: 457262 - DNA, 75 bp, Homo sapiens
ctgagtccttgtcagaatcagagtatattgaggaggctgtcattatttgtatcaaaaacaaagaatttgaaaagg

SEQ ID NO: 457263 - DNA, 100 bp, Homo sapiens
ccaactgcgcccggtgcggcaagatcgtgtatcccacggagaaggtgaactgtctggataaggtgattgtccagcggactctggctgccaagaacctgtc

SEQ ID NO: 457264 - DNA, 90 bp, Homo sapiens
acagccaaggaacagaattagaagaaaaggaaccctggcctgaggacaacagctttgagcagttcattattaattattgtaacgaaaagc

SEQ ID NO: 457265 - DNA, 50 bp, Homo sapiens
ctcccaaagtgctgggattgcaggatgttcttgagtcgaagaacagcacc

SEQ ID NO: 457266 - DNA, 78 bp, Homo sapiens
cgacttcttcaacatgctcatcaagtaccaggctgggcacggctccgagggcggccagggacagacgcttgcgccgag

SEQ ID NO: 457267 - DNA, 100 bp, Homo sapiens
aagaacagcgtaactccagacatggtattatctaagtaccgcagtggaaaactgcccaaggcatttaagatcatccctgcactctccaactgggagcaaa

SEQ ID NO: 457268 - DNA, 100 bp, Homo sapiens
tacacagacgacgccaggacggcaagtgtcggcactgtgggaagactgctgagaaggaagaatttgaacatcaacagaaagagctggagaaagtttgcaa

SEQ ID NO: 457269 - DNA, 75 bp, Homo sapiens
ctgatgcgctcagtgagagagacaaagtcaaatttacagtgcacacaaaggagctagccgaattcgaaaaactct

SEQ ID NO: 457270 - DNA, 88 bp, Homo sapiens
ttctacctatggaaatccaggcagccaaggctatggacaagcatcacaagaaactagcagagttgttcacatcatggattttcaacga

SEQ ID NO: 457271 - DNA, 82 bp, Homo sapiens
gtccgtgtggccaacgagctcaacgccaggcgccgctcctttacagaccggccttattgtcgcctgctaccacggctttgtg

SEQ ID NO: 457272 - DNA, 101 bp, Homo sapiens
cagatgagaccatccgtgtcgtgtccatggacagagactaccacgtggagtgttaccactgcgagtttcacctgtgattccctggatggttaccattcttt

SEQ ID NO: 457273 - DNA, 100 bp, Homo sapiens
ccagccgctggtccccgggagaccctgtgcccctaaatcgcggtccactgcgcgcgtcagatgttgctgctgctgctactggcgccactcttcctccgcc

SEQ ID NO: 457274 - DNA, 100 bp, Homo sapiens
tcccagggccaggcgccgctcagaacggttgtatcagagtaagatggacggtagctttgattgtgattgtggtgagctggagccacctgatcactaacaa

SEQ ID NO: 457275 - DNA, 75 bp, Homo sapiens
tggcccaggttcttcaaaagatttcaaggagcagggacaagttacaggaatgttctccaagcagcaatccaaaag

SEQ ID NO: 457276 - DNA, 74 bp, Homo sapiens
caaagttagaccttccagaacctgacacacaaactcgggccacttctaagagtctcttacctgttaggtccaaa

SEQ ID NO: 457277 - DNA, 98 bp, Homo sapiens
ccactactgcctggagctgctgcgaactcaagacatggctgcccagtgtgtcacaaaggtggcgctgaatgtttcctgtgccaatcttttggataaag

SEQ ID NO: 457278 - DNA, 75 bp, Homo sapiens
gggacccccaggaggtgaccctgcaggcagccttaagtgccttgaaacaattttctgaacaaggactggatccaa

SEQ ID NO: 457279 - DNA, 50 bp, Homo sapiens
ggtctctgcacctcctttctgttttgagcaaaattttggactgtgaagca

SEQ ID NO: 457280 - DNA, 90 bp, Homo sapiens
agttctttgtggatggacttgattctgatgagaggttcagaaaatggtcttgcacagaagcatcgaacacctcgccgacgatgtcagcag

SEQ ID NO: 457281 - DNA, 90 bp, Homo sapiens
catggagggagcaggagctggatccggcttccggaaggatctcgaggacctggaagaagcagaggagccagacatggaggaagacgatga

SEQ ID NO: 457282 - DNA, 75 bp, Homo sapiens
cgcctcacgccggacctggtgcagatcgtaaagctgaaaattgaaatcatgaaagtagacaggactaaactgaag

SEQ ID NO: 457283 - DNA, 116 bp, Homo sapiens
aaagctctcaaagcatgcttcagtggattgacccaaaccgaatggcagcatcggcacactgctcaatactctttttgatcagaacaatgctgcaaaaaaagaagagtcagaaactg

SEQ ID NO: 457284 - DNA, 74 bp, Homo sapiens
gccgggcgggagcccctcggccagagacagggaagaacgattggcagcactcacagctgctcaacaagaagcta

SEQ ID NO: 457285 - DNA, 100 bp, Homo sapiens
gggaaactaggtcgatggtcggcggcgcccggatgggcagctgaggccaagacccatgttcttgacattgagcagcgactacaaggtgtaatcaagactc

SEQ ID NO: 457286 - DNA, 75 bp, Homo sapiens
tgtctgtagcgtccctccctctcaaccacaataacaggcggagggtcggcgtagaatatgagttggaagtaaaga

SEQ ID NO: 457287 - DNA, 51 bp, Homo sapiens
cctcccagggccaggcgccgctcagaacgacaaaaagtaaccttcctgaag

SEQ ID NO: 457288 - DNA, 75 bp, Homo sapiens
cggcagcgcccggcgacccctgctgctgctactgctgttgctgctgctcgacttctgcctggtgtcgaaggtggt

SEQ ID NO: 457289 - DNA, 101 bp, Homo sapiens
gcactaaaccactatgcttaccgagatgcggttttcctcgcagaacgcctttatgcagaagctgtttttctgatcgaggctctctgaagagcataatgcag

SEQ ID NO: 457290 - DNA, 80 bp, Homo sapiens
ccaggatctcgggctcggaacgagactgcacggctgaccggttccctgatgtgttacctgcttctgctactgatccaaac

SEQ ID NO: 457291 - DNA, 98 bp, Homo sapiens
gggctgagcagaggacgacatgttgcttttcgtggaggctttggaactgcgacataactagcgatggctgctgcgatctcacaaagcttctccaagaa

SEQ ID NO: 457292 - DNA, 100 bp, Homo sapiens
gaggacttcgtgaaggattcgggcgcctgcttcagtgatcccagatgcagtgactggttactacctgaaccgtgctggctttgaggcctcagacccacgc

SEQ ID NO: 457293 - DNA, 50 bp, Homo sapiens
agaggaggaagccatgcgtaggcttcgagagctgtgcccaggagtgaaca

SEQ ID NO: 457294 - DNA, 100 bp, Homo sapiens
gcaattctttcttttgctaaacaaaaccaggagtcagcagtttcccagcaagcagtctatcattcagagtatgccaagtacatggaaaaccatagcattg

SEQ ID NO: 457295 - DNA, 100 bp, Homo sapiens
ggggaccggggcgtgctgaaggacgtcatccgagaaggagctggagacctagtggcgcctgatgcttcggtgctagtacagaacctgctaaggccatcaa

SEQ ID NO: 457296 - DNA, 97 bp, Homo sapiens
aggagggacttcttggcttctcccagcatagccccagcctgaccgagagggcgcaactgctcaagaacgtctttaagaagaaccacgtgaacttgta

SEQ ID NO: 457297 - DNA, 100 bp, Homo sapiens
gtgacaattgctaggcggagacagtgcagggaagagagaccttagaaaggatcaggactggcggaccaggtgataggtttgatcgagacagaccgttgag

SEQ ID NO: 457298 - DNA, 88 bp, Homo sapiens
aatggctgtagaggaacttcagtctataataaagagatgtgaagccttggctcaagctttctggattgacatcaagcgcatggatgac

SEQ ID NO: 457299 - DNA, 82 bp, Homo sapiens
cgaacggggcgagcctggaggattgtcactccaacctcttttcgctgatgatatcatcaagttgaatcgaaaggaagggaag

SEQ ID NO: 457300 - DNA, 50 bp, Homo sapiens
tggccgcctcggtggagacagcagggcgagcaccttgggagaggcacgag

SEQ ID NO: 457301 - DNA, 75 bp, Homo sapiens
catctcccctgagattggggagaaggtgcggactcttgttcttgcactggtggcagtttgaaaattgcaaggagg

SEQ ID NO: 457302 - DNA, 98 bp, Homo sapiens
gcgatgtgtgattaccatggcgaggagtctctgtccgggggcctggctaaggaaaccctattacctccagcttgaagctcaactagagaaaaaggacc

SEQ ID NO: 457303 - DNA, 83 bp, Homo sapiens
gacccgctcaccatctacggcatccggtgcggctgataaaggaagcaggaagcgctatgaaccatcagacaaggacaggcaga

SEQ ID NO: 457304 - DNA, 50 bp, Homo sapiens
cgcagagtgggcggcggtggtgggaactgactcttttttggagtaaactg

SEQ ID NO: 457305 - DNA, 98 bp, Homo sapiens
gaggattcctctgctgtcctcatggaaagcctaaagggagttgaccacatttggccatttcccagaagggccccaccccaagggtgagtggccaatgg

SEQ ID NO: 457306 - DNA, 100 bp, Homo sapiens
ccccctccccttggtgaagagcctacttggcccctaccttgttttcatggcatccaccatcaatgggtgggcagatggaaaaggacccctggcagctgcg

SEQ ID NO: 457307 - DNA, 90 bp, Homo sapiens
cgctgatgaccgggctttaccagatttaaaggtacagttgaggaactcagtaaccagatattatctgcacggagttggttgcaacaggaa

SEQ ID NO: 457308 - DNA, 50 bp, Homo sapiens
tttagaccctccacctaattgcagacctaagtcagtgttagtctaccact

SEQ ID NO: 457309 - DNA, 100 bp, Homo sapiens
gcaaagaagacgtcatcttcttctaaaagggccgtgactcaagggggccccaacaccctcaagtgggactacacgagacaagatgggacttcctaccaaa

SEQ ID NO: 457310 - DNA, 100 bp, Homo sapiens
cgagtgtccctttccttcctggcgctttcctgggttgcttctggcggccatggtgttgctgctgtactccttctccgttaaagccttccatctgaagtat

SEQ ID NO: 457311 - DNA, 107 bp, Homo sapiens
gaagaaatgatgatggaaatgaagtataataccaagaaagccccacttggacagtcattttgtttactcattcagccctgttgcaggtcccaataaactcttcataa

SEQ ID NO: 457312 - DNA, 83 bp, Homo sapiens
cgcggatctcaccgccgctcaggatgctgtgggccctgagggaaaggatcacagaggcgctgagccgggatggctacgtgtac

SEQ ID NO: 457313 - DNA, 74 bp, Homo sapiens
gaagtcaattcaaaggacctgcccccagagagagaagaaacacctcttacagtcatctgcaggggattctccaa

SEQ ID NO: 457314 - DNA, 100 bp, Homo sapiens
tgtctacaaacagttagaagatgcagcccaagggctcaccatgggtggcgatgttgaagaacatgattgcccaaggactccagatactccaaataatgac

SEQ ID NO: 457315 - DNA, 98 bp, Homo sapiens
ttgaaaagcagaggccttgtaccccccagggttgccgggcgggacagtgattccagcccttcagagctaagtccagtagtagcaaagccccaaatcaa

SEQ ID NO: 457316 - DNA, 75 bp, Homo sapiens
gccaacgccccggtggagaagctgaggtaaaagttttgtttgtgagaaacttggctactacggtgacagaagaaa

SEQ ID NO: 457317 - DNA, 75 bp, Homo sapiens
tcctaccatctaaaatacgaaggtttctggctggactcccatagtgaccctctctggccacatggaggcagtttc

SEQ ID NO: 457318 - DNA, 100 bp, Homo sapiens
tacggaaaaggaacagattgttcctaaaccagaagaggaggttgcccagaagaaaaagtccatgctccgagggagaggaggttgttacaaacacacattc

SEQ ID NO: 457319 - DNA, 100 bp, Homo sapiens
acaaagagctgagtgatttactggatttcagtgcgaatgagctgaaagccagtggtggcgaaatcaaaattcataaaatggagcaaaaggagaatgtgcc

SEQ ID NO: 457320 - DNA, 101 bp, Homo sapiens
ataacattgcccaccgagatgtcaaggtggtgttcccactgatgaagagcaggcgactgggttggagagggagatcatgctggctgcaaagaagggactgg

SEQ ID NO: 457321 - DNA, 75 bp, Homo sapiens
gagcacgaaaggcatttttactgctgataccatgtttgtgtggaagtgccccgtgtttgctatgccgatgctgtc

SEQ ID NO: 457322 - DNA, 75 bp, Homo sapiens
gtggccatgatgctggcccagctggtcagcgacgggagccccatggtccggaagtgtccccaactcctgcccagc

SEQ ID NO: 457323 - DNA, 100 bp, Homo sapiens
tgagaaaggacttgaatgacgcccgggacctgcatggccaggcagagtcagcagctgcagtgtggaaggacataagcagctctatgaccaatagcacagc

SEQ ID NO: 457324 - DNA, 100 bp, Homo sapiens
cttgaagtttgtggatgaaaattgggaaggttccctcaagtccaaggtgtgcatcaccttcgaccaggccaacctgaccgtcaagctgccagatggatac

SEQ ID NO: 457325 - DNA, 100 bp, Homo sapiens
tgcccagaccttccctgccaaacaggcccctgggggagaagaagacgggcgccaaaaggcagaagaagatgggcagtgccctcctgagcttgtcccggag

SEQ ID NO: 457326 - DNA, 108 bp, Homo sapiens
cagaagtgctgcctggtgcagaggatcctggaggcctgggaagccaacgaccacacgcaactgtgccctgtccacggtgcctcctgcatgtcctgctgccctgagctg

SEQ ID NO: 457327 - DNA, 109 bp, Homo sapiens
cacagagcctcgcctttgccgatccgccgcccgtccacacccgccgccagcttccccgggcgctgcctggacaggcctgcctgcgtgctgggacatgtctggcctccaa

SEQ ID NO: 457328 - DNA, 90 bp, Homo sapiens
gaaaaattgcagaagcacaagccaaactgatcactgtgtccactactatgatcttcgtaacactaaacagccaatcatggtattcaaagg

SEQ ID NO: 457329 - DNA, 82 bp, Homo sapiens
gcgtgtccctgcagcgaaggatcctgatggagaaggaggagacaacccgggagctgctgctgcccaactggcagggtagtgg

SEQ ID NO: 457330 - DNA, 100 bp, Homo sapiens
ccagggtcggactcccggggccatggccggaatgcagtaccctcagcagcagagcgatcgtcttctgatcaaaggaggtaaaattgttaatgatgaccag

SEQ ID NO: 457331 - DNA, 100 bp, Homo sapiens
gaaggggaagaaaagaaggggaagaagatcaaaacccaccatgccccagaaatattcattgctgccttacttgattttagtattgaaacagttccttctg

SEQ ID NO: 457332 - DNA, 98 bp, Homo sapiens
ttccccctgctttgcatggctcccggggcgctgactgcgtgttaacatcagacagaagcattaaaatgcgtggctcaggctagcaagaacagatcact

SEQ ID NO: 457333 - DNA, 100 bp, Homo sapiens
cctgcagccgggtggttatcatgttctcaaagaccttggtcttggaggtggtggaggtggatacagcagtcggagaacatctggcagagacaaatacgga

SEQ ID NO: 457334 - DNA, 100 bp, Homo sapiens
cttcgccgtcatcgtcctcatgctggcctgcctgtgctgtaagaagggcggtatcgggttcaagatttttgcacgataagaatagcagggaattcctcta

SEQ ID NO: 457335 - DNA, 100 bp, Homo sapiens
ggaagttttagcctagctgttctcaaggcggattaattagcccaagaaacattatattcatgtcagcccaaggctgccccctcggtcactctgttcccgc

SEQ ID NO: 457336 - DNA, 121 bp, Homo sapiens
ttttccctctaccttaaggatgtgcaggatcttgatggtggcaaggaagaattcgagaagagaagcgagaagaacggaggaggagagagttagaaaagaaacgtttgcgggaagaggaaaa

SEQ ID NO: 457337 - DNA, 93 bp, Homo sapiens
ggcctttgctacgcatggcacggcctttgacaagaggaggggcaacccccttcatttatctcgtgagcggtatcggaagctccatttggtctg

SEQ ID NO: 457338 - DNA, 100 bp, Homo sapiens
gggaataggagctggggagcccttctgcgccacagacagagtctagctctttcacccaggctggagtgaagtggtgcaatctcagctcagtgcaacctcc

SEQ ID NO: 457339 - DNA, 90 bp, Homo sapiens
ctcagaacatgggtccgtggtcgtttgtttctccaaggtttgaaaagcagctggcctgcaaggcctccccaaagccagtcctgtgtcacc

SEQ ID NO: 457340 - DNA, 96 bp, Homo sapiens
tattgctggcttcacaaaggagctattgcttgtgctgaaaaactagccaaaggtgaacctactgatagtttacaagtccttccactttctctctga

SEQ ID NO: 457341 - DNA, 98 bp, Homo sapiens
tctggctccagattgccgagtctgcttacagattcactctgggctcagttgctggagattcatgcccaagcacaaaacaacccatttaaagaagatgc

SEQ ID NO: 457342 - DNA, 83 bp, Homo sapiens
ccaagagggtgttcgactgctagagccgagcgaagcgccacagctgagaccgtgtatgacatcctgtccccggcagcccccgt

SEQ ID NO: 457343 - DNA, 100 bp, Homo sapiens
aggaatcaatgaacacagtactagtacaagaggtcattaggaatccctgcagcagcagcagcaggaacaagaggaagccctcaagcagtgtcgggagcag

SEQ ID NO: 457344 - DNA, 98 bp, Homo sapiens
ccgatatatgttctctaggccttttagaaaacatggtggaagttaaacgagctgagcctcgggacagcaagagccaagcgccgggacagccaggtgcc

SEQ ID NO: 457345 - DNA, 76 bp, Homo sapiens
gacgtggctattgtgaaggagggttggctgcacaaacgaggctgaccccgcactacatctacccaccagccatcgt

SEQ ID NO: 457346 - DNA, 100 bp, Homo sapiens
agtggttgtgtggtcgcgtctcggaaaccggtagcgcttgcagcatggtattgtgttggctgcgtgccaggccttggagaacagcacgtccccgctgagt

SEQ ID NO: 457347 - DNA, 75 bp, Homo sapiens
agatgatggaactttcagaagaggtgctgacacctgatggaagaccgattcagcctagatctgttgatcttagta

SEQ ID NO: 457348 - DNA, 90 bp, Homo sapiens
agcgatggaagaacaactgaaaagtgatgaggaactggcaagaaagctaagcattgatattaggcaccaaataatgtcatctgaaatgtt

SEQ ID NO: 457349 - DNA, 82 bp, Homo sapiens
atatggaattgaagactgtaagaagtaatttgaatcagctcaatcaatcgctgctgaataccactagaaacatacctgtaac

SEQ ID NO: 457350 - DNA, 100 bp, Homo sapiens
ccgggtgctgaaagtccacggatgctatccctggtcaaatcagagctcctgcccctcctaaagctgaagccaaagcgaaggctttaaaggccaagaaggc

SEQ ID NO: 457351 - DNA, 75 bp, Homo sapiens
gcatgaagtcgagtagttcagttgtggaattggttatgctactgtgttctcaggctatttttatgattcccacaa

SEQ ID NO: 457352 - DNA, 90 bp, Homo sapiens
agctggacatcgagcctgagggaggggaaaggcgcaggtgtactaatggtcacttgatgtgcgctggctgttttatccacctactagcag

SEQ ID NO: 457353 - DNA, 100 bp, Homo sapiens
cggcactctgtacaagaacaggctcggctcaggtacaggtttgcagattccgccagcagcacagcaagctctacagatgagtggctctttggcatttggt

SEQ ID NO: 457354 - DNA, 100 bp, Homo sapiens
caaaagctgctcagagtctcaatgaacttggagatacaactcgtcaacgaatcaaattcagtgatgacagagtatgcaagagtcaccttctcaactgttg

SEQ ID NO: 457355 - DNA, 100 bp, Homo sapiens
ggtcctggtcggggtggtctgtctgctcctggcatgccctgccacagccactgtttcagccttttatgctgagtgttttaacaagaagatacaattcaat

SEQ ID NO: 457356 - DNA, 101 bp, Homo sapiens
cacggtgaacctggaccaggaggaggttttcaggaccaaaattgtggaaaagtcactctggtgagcgagtgctgtgctttcatgggcctcttctttatgaa

SEQ ID NO: 457357 - DNA, 88 bp, Homo sapiens
gaacgccccgcagccctcacccctcccgccagtctccagccatgggcaccgtctgcgtcctgctgtccttccccttcatcttcagccc

SEQ ID NO: 457358 - DNA, 88 bp, Homo sapiens
accaaataagctatatactttggttacctatgtacctgttaccactttcaaaagtctataagggagaattccaactacctgactttct

SEQ ID NO: 457359 - DNA, 97 bp, Homo sapiens
gtgcacccccagtgggtgctcacagctgcccattgcctaaagaagctcagcttgtcaatcggaaacagaaattagagtctgtggaactttctagcca

SEQ ID NO: 457360 - DNA, 100 bp, Homo sapiens
ggatcattggaggaggcacgacacccatgttgtcatggcttaacatcagagtcgccaacatccagcagcagctggcccggcttgacaatgagtcctggcc

SEQ ID NO: 457361 - DNA, 100 bp, Homo sapiens
acttgtctcttatttagttctggggagcgcctcgtcgacatgagtgatgtggaggaaaacaacttcgagggcagatttcaccaggtgatatggatcggac

SEQ ID NO: 457362 - DNA, 100 bp, Homo sapiens
ttgtatagagatgtgatgttggagaactacagaaacctggtctccctagaggaatgtcgggtcctcacaattcaaaacaattgaagatgacttggtgtcc

SEQ ID NO: 457363 - DNA, 51 bp, Homo sapiens
acggagtgaatcctggtcctattgtggcttgagtctactgaaagcatcctg

SEQ ID NO: 457364 - DNA, 100 bp, Homo sapiens
attagaatttgagttagctcagcttacgaagcaatgaagggctattggcctgtcagctgctcccatccatcccctgcttactgcattgccgagttcatgc

SEQ ID NO: 457365 - DNA, 125 bp, Homo sapiens
gagtttggccgaatcaaacagggcattcagggagactggaataactgatgaggaacaagccattagcagatactgatgtttatccgggactagctgtgttttttcaaaatgcacttatatttttt

SEQ ID NO: 457366 - DNA, 113 bp, Homo sapiens
gatgaattcaatcaattctttgtgactcctcgatcttcagttgagggctgaaatctctttaatgatggagggaagcaggcagacgcgagtgtctcggccatacaagatcagcg

SEQ ID NO: 457367 - DNA, 50 bp, Homo sapiens
aatacactactcatcaaggaagaaccaggagtatgctgctgctgttccgc

SEQ ID NO: 457368 - DNA, 78 bp, Homo sapiens
gtgcagaagtccagggaatggctggcccagcagctgagatcacagtcctcctgcccctgctcgagtcttgcagtgtgc

SEQ ID NO: 457369 - DNA, 74 bp, Homo sapiens
gaaggaccatgctgtttttactcgtgtgatccgccttattatgcagtacttgaaggagaacagtttacatcggg

SEQ ID NO: 457370 - DNA, 50 bp, Homo sapiens
caaggctgagggacgagaacgagatgccttcaattaagttgcagagttct

SEQ ID NO: 457371 - DNA, 101 bp, Homo sapiens
tcgcgatgtgtggcgactgtgtggagaaggaatatcccaaccgggtatgcctggactgttgcccagtgtaagatctgtgcaagccatattggatggaagtt

SEQ ID NO: 457372 - DNA, 89 bp, Homo sapiens
cgaacagagccgggagttcaagaagaacactccagaggtcagggatgttggaagctggagtagacaggattatttctcaggtggtggat

SEQ ID NO: 457373 - DNA, 101 bp, Homo sapiens
ctcgctgcttcccagagctttcacgaaggcaccgacgtcatcatgctgaccaccaatcagatccgtaaggtacttcaactcccgcccccacctgtgtcccg

SEQ ID NO: 457374 - DNA, 118 bp, Homo sapiens
gccgagccgggatctcaggtcctcgggggcggcggccacgccaaggacgggatggcgtaggggtagatgagaagctatctttacgacgggtagctgtggttgaagatttctttgacat

SEQ ID NO: 457375 - DNA, 95 bp, Homo sapiens
ttgctcccagcagcctccgcggtggatacgtcgccatcttggatccgcgggacaagaaaattcatgcggcgtccctttcccttgcacctgttaac

SEQ ID NO: 457376 - DNA, 100 bp, Homo sapiens
ttggccgccttggagtattgtttacacccggagccgcagtctcagcatgaacttgggaatgttttcttaaaattcaaaatggacccaagtggggtcaaag

SEQ ID NO: 457377 - DNA, 75 bp, Homo sapiens
tacagatcacacgcccactaaagcccagaagaatgtggctaccagcgaaggtgtgcctagattgatcggtataag

SEQ ID NO: 457378 - DNA, 88 bp, Homo sapiens
tggattataaggatgtcatccccatggctgatgcagcaggcatcatccgctatgcaattgggcctctaaagagagcaatcactacact

SEQ ID NO: 457379 - DNA, 100 bp, Homo sapiens
gaaagtggacaaagagaggagtcaggatttccatttaaacagggttaatttggaagaatcttcaggagtggaaaactctccagctggtgctagaccaaag

SEQ ID NO: 457380 - DNA, 100 bp, Homo sapiens
ccgttcagcacaccagtggggcagtgcctcgaggtatgaaggttattgaaaaccgggccttaaaagatgaagaaaagatggaactccaggaaatccaact

SEQ ID NO: 457381 - DNA, 75 bp, Homo sapiens
cttcagacagttttggggtggtctttctcaggctgtggaaaatctctgttctcacaaagtctccccaatgctcta

SEQ ID NO: 457382 - DNA, 75 bp, Homo sapiens
gtttttccaaatattcatctgtacagaagaggactgtcagaaggacgtagaaggcacggttttactgtgaggagc

SEQ ID NO: 457383 - DNA, 100 bp, Homo sapiens
cttccctgtgtcccgcaatgccaacctcagcaccatcaagcaggtactgggcctaatcgctacgtgcctctttggctatgatgcctatgtcaccttcccc

SEQ ID NO: 457384 - DNA, 100 bp, Homo sapiens
taccgcggcgagaagccccagctgcactacgcggtaaagagaaatgtgtatgaccttacaagtatccccgttcgccaccaattatgggagggctggccaa

SEQ ID NO: 457385 - DNA, 80 bp, Homo sapiens
tccatttcgtggttcacccgctgccgggcaccgaggaccagctcaatgacaggcattatattgtacttctagcaagtgca

SEQ ID NO: 457386 - DNA, 100 bp, Homo sapiens
ggccgatatggaacccaagcagtggcgaagggaatcgcaaggctcttccctgaccattttctactgtccctgcgcgaggcaaaccacagggaagctggaa

SEQ ID NO: 457387 - DNA, 51 bp, Homo sapiens
cggaccactgtggaggtgaaacctgctgtcatcatgactccaactcgagaa

SEQ ID NO: 457388 - DNA, 75 bp, Homo sapiens
cggcgaacatgcgcttttgacacattggagactgaacattcttcacgatctgaaaggaaaagaagagattctttc

SEQ ID NO: 457389 - DNA, 80 bp, Homo sapiens
cactggccttgtgggattggctgtgtgcaatactcctcacgagcaccatatgaaggcggagtatggaaagttagagtgga

SEQ ID NO: 457390 - DNA, 74 bp, Homo sapiens
ttatgggaccgcaccttcagtcttttccagcagctcattcagaggccattgcaatcatggaagtagctcacggc

SEQ ID NO: 457391 - DNA, 95 bp, Homo sapiens
ggatcgtgaccgagaccgtgaccgagagcgtgaccgagagcgcgaatatcgtcatcgttagaagaggtctcttcattattgatgacaaaggaatc

SEQ ID NO: 457392 - DNA, 99 bp, Homo sapiens
ctgcacccaaactttgcaaggaattcggtccagaggattacggcgaagagtctttagaaagaaactggaagttaatccgagatgaaggccttgcagtga

SEQ ID NO: 457393 - DNA, 73 bp, Homo sapiens
tttcaccgacgactaccagctcttcgaggagcttgatttctccacccaggtgaactcctccctcacctccccg

SEQ ID NO: 457394 - DNA, 98 bp, Homo sapiens
tcttgaaagaggcacgcatttttgacaggtgcgagtattcgtcaaccagttatatcagccaagtttggagcgagaagtcagtaaaaatccagatttgc

SEQ ID NO: 457395 - DNA, 80 bp, Homo sapiens
cctggctccatgaagatgccacagggatcctaaaatctgctgcagaagatgtcaatgttactttcgaagatcaacaaaag

SEQ ID NO: 457396 - DNA, 100 bp, Homo sapiens
aaccattgaaaaatttgagaaggaggctgctgagatgttgatgcctaagaagaaccggattgccatttatgaactcctttttaaggagggagtcatggtg

SEQ ID NO: 457397 - DNA, 101 bp, Homo sapiens
caagttgaatgaaaatgccatctccaggctccaggctaaccaaaagtctgttctggtactccaaagattcaggtttactcacgtcatccagcagagaatgg

SEQ ID NO: 457398 - DNA, 82 bp, Homo sapiens
tgtgcagccgcgaggaggcgcgggaggtgttcgagaacgaccccgagacgaattcagaaggagctggcggacatcactttag

SEQ ID NO: 457399 - DNA, 75 bp, Homo sapiens
atgagtttcttactcgggagctggctgaagatggctactctggagttgagggtcactttccgtatcctgatcctt

SEQ ID NO: 457400 - DNA, 97 bp, Homo sapiens
aggaatgtgctcttgtcctggcattgcatccacaggaggggcaggaaattctttgaagaaatgcatcttctgcagacaccgggttaagagggtctct

SEQ ID NO: 457401 - DNA, 81 bp, Homo sapiens
attactgatgatgtggaggttaacagctatctttctgattaagcatgaaaatattgttgccctggaagacatttatgaaag

SEQ ID NO: 457402 - DNA, 100 bp, Homo sapiens
cccctactacactgacacaacaaacggctgtacctcccacaaggattaccccttccatgaagagttttgaagctgtggttgcctgctcgtccccaagtga

SEQ ID NO: 457403 - DNA, 110 bp, Homo sapiens
taaactcaaaaactgacactcgattcagctattggaaagtttttttaatgtggttggaacaactgaggtggatccataaagaacccagccaacccgcagagggaggggag

SEQ ID NO: 457404 - DNA, 83 bp, Homo sapiens
cgaccccctgaactacttcctcggtggctgcgccggaggcctgactctgggagcacgcaatgtggacgagtgctcactagcag

SEQ ID NO: 457405 - DNA, 100 bp, Homo sapiens
tcatggccttcctgctctccttctacctaattttcaccaatgaggacatggatttgattgacatactttggaggcaagatatagatcttggagtaagtcg

SEQ ID NO: 457406 - DNA, 90 bp, Homo sapiens
cagattcgcagtggtcgcttcttctccttgtgagttctctggtgatgttgatagcctggaactgggggacatggtcgagtatagcttgtc

SEQ ID NO: 457407 - DNA, 100 bp, Homo sapiens
caataaaccagagaccatttattataaagctgcaaagaagctgttgcactcaggaatgaaaattcttagccagatcattcccagtgaccccttctgggtg

SEQ ID NO: 457408 - DNA, 100 bp, Homo sapiens
tcgtggctgcgtcaccgccgcccccccagacaagatggacaccgcggaggaagaatttaattccttttcgaccttcaatccagttccaaggactccacgg

SEQ ID NO: 457409 - DNA, 96 bp, Homo sapiens
cgtttgccgacccggatctcaacaatcccttcaagagagcagagctgacatctgataaagacatgtaccttgacaacagctccattgaagaagctt

SEQ ID NO: 457410 - DNA, 75 bp, Homo sapiens
agtaacaataacaagaaaaacagcctagactagacgcacatcaggaagacagacctgcctagagctggaacgtta

SEQ ID NO: 457411 - DNA, 90 bp, Homo sapiens
ctggcccaagggcccggaggggcgctgggaaaccggcatgcggtgtactggaacagctccaaccagcagacctcagcagccatgtcgaag

SEQ ID NO: 457412 - DNA, 83 bp, Homo sapiens
ctcgcgccggctatggccgtgccctggggctgagccctcaggacaagcagctgcggatctttgaccccagaacaaagccgcgg

SEQ ID NO: 457413 - DNA, 98 bp, Homo sapiens
atttggatttgccgattagaaactattctcgcctggcaacaacagctacaggatcttcagatgactaagtctttagcaccagttggtgtaggagttga

SEQ ID NO: 457414 - DNA, 130 bp, Homo sapiens
aaagtgctacagtttgtggcctctaaaaagattcgtatgcaccagacttcggctaaagagtgaaattcacatgtctgaagaagctatacaggacatattggaacagacagaatcagacccagcatttcag

SEQ ID NO: 457415 - DNA, 100 bp, Homo sapiens
caagcactgggtggtgatcgtggcaggttcaaatggctggtataattataggcaccagacttcccaagtaagaagcggaagaggagccgctggaaccaag

SEQ ID NO: 457416 - DNA, 80 bp, Homo sapiens
gttcagctgcagcatggagagatagataaacggataacagtgatggtgaaattgctagtgaatgtgaatgcgatagtgtc

SEQ ID NO: 457417 - DNA, 75 bp, Homo sapiens
ctccaatgcaatgctgtttgccctgaacatcatgaattcccaagaaggagagatctgaaactggacaatgtcctg

SEQ ID NO: 457418 - DNA, 62 bp, Homo sapiens
cctggagaccatcccaccgccatctgaggagggagctgaacttgtcattctgtgaaatcaag

SEQ ID NO: 457419 - DNA, 100 bp, Homo sapiens
cggcggagcctccgggacggcgagcggcgggcggcggaggaggagacggcaggtaggtgagctcgtgaaacaatatgaagaggagaaaatagccttttaa

SEQ ID NO: 457420 - DNA, 75 bp, Homo sapiens
cgggcatggtggtctggggcaacgcggaagggaagtcccacctggccatcgtgcagaaggtaaacaacgagggtg

SEQ ID NO: 457421 - DNA, 90 bp, Homo sapiens
tctcattctgcacaggacttctatgagaattatgagcccaaagagatcctgggcaggatgtgaaataccctgagtatcttgatattcggc

SEQ ID NO: 457422 - DNA, 91 bp, Homo sapiens
ttccagccttccaagctctactgtgacttcagagacactgccaagcagccttagccctagtgtagagcaacacagtcactcctggcggcaa

SEQ ID NO: 457423 - DNA, 101 bp, Homo sapiens
gaaaggggcgtggctgtggagaaggcgctccggggcgaagcagattctgaaagtcaagaagacatcatccggaatattgccaggcacctcgcccaggtcgg

SEQ ID NO: 457424 - DNA, 82 bp, Homo sapiens
ggctttggagcggctaaaaacctgagcgagcccagggcgtggtgctgaaagtgctcacaaacttcaagagcagtgagattga

SEQ ID NO: 457425 - DNA, 107 bp, Homo sapiens
tttaatcactgtgcaatgaccgtgaactgtacagttacctccgtgtgtcacaggaagactcttactgtgccctgtccacggtgcctcctgcatgtcctgctgccctg

SEQ ID NO: 457426 - DNA, 75 bp, Homo sapiens
gaacgcggtggtgagagcacacgtcctcgtctcgttcctgatcgaacgtggtgacggttgatgatgaagcgccgg

SEQ ID NO: 457427 - DNA, 51 bp, Homo sapiens
ccttttctggcagtagcaagagcacttggatggacgtggtagaggtcgcgg

SEQ ID NO: 457428 - DNA, 100 bp, Homo sapiens
caaggaacatctgttgagaagaaaaacgctttttgcatacaagcaggaaaatgagatgttatccaggaagagagaagggcacagttacctaagtatcaac

SEQ ID NO: 457429 - DNA, 84 bp, Homo sapiens
gttggaagcagccgatccagcctgcggagcctgtggggcagggactggtgattgcagctggaagtgcccatgaccgagctggcg

SEQ ID NO: 457430 - DNA, 50 bp, Homo sapiens
cccatcagaggcaccccagacacagtaggacgtggcccagtggaacatcg

SEQ ID NO: 457431 - DNA, 100 bp, Homo sapiens
tggaccttgaagatctgggacttagcaggcaagagctgggctacagtggctttaatgagatagttcctacaacagcagccagtacccctgatgccgttga

SEQ ID NO: 457432 - DNA, 75 bp, Homo sapiens
aaaccaacagccagtgatatgctatacatggaaagaatacccacctcatgtccaaaaagttgaaattaatcctgt

SEQ ID NO: 457433 - DNA, 100 bp, Homo sapiens
gcttgagtcctgcattgtgggctggcgctgccgcgtgggtcagtggctgccactgcccctgatggaactcatggagaatgaagctctggaaatcctcacc

SEQ ID NO: 457434 - DNA, 98 bp, Homo sapiens
tcctaagtccctcggtcttgggttcccggagagaggatggcattccctgtggatatgctggaaaattgcagccatgaggaattggaaaattctgctga

SEQ ID NO: 457435 - DNA, 80 bp, Homo sapiens
acatcaagatatagatgtagcaatacttactgcactgctaaaaggaactgtggctgcaccatctgtcttcatcttcccgc

SEQ ID NO: 457436 - DNA, 87 bp, Homo sapiens
cagctttccctcctggccagaaatgttcagcctggactcattcagaaaaggagtagcaaagagctcctgttacaacctgtgaccatc

SEQ ID NO: 457437 - DNA, 100 bp, Homo sapiens
ttgcctccgccgccaagagtgagcgagcggacccgcgatggccagaaggtcagtttgaaagatcgtgtcttctccagcccccgaggcgtggctgccaagg

SEQ ID NO: 457438 - DNA, 90 bp, Homo sapiens
ctaaagagcagtggaccaaatatgaagagctttaccaacagggacgcttatgtcaactgggcagtgaattttgtgaattggaagtttttg

SEQ ID NO: 457439 - DNA, 83 bp, Homo sapiens
gaaggaggataaccagaccttcggctttgagatccagagatcgcggattcaggtgtggctctatgagcaagtgaatatgcgga

SEQ ID NO: 457440 - DNA, 108 bp, Homo sapiens
cttccagctggagagcgtcaacaagctgtaccaggacgaaaagggatgatcatggtgattttactgctgcttgtggctatcgtggttgttgcagtctggccgaccaac

SEQ ID NO: 457441 - DNA, 51 bp, Homo sapiens
ctttttgactacaattctcaacaacagggcatcaagttatcagcagatgtc

SEQ ID NO: 457442 - DNA, 75 bp, Homo sapiens
gcatttggctttgcctttctggacacagaagtatttgtgacaggtgaactactgagttcttcattatgtctgatg

SEQ ID NO: 457443 - DNA, 50 bp, Homo sapiens
attcttcagtgtactgctaatatactcgaagctcattcacacagaagacc

SEQ ID NO: 457444 - DNA, 75 bp, Homo sapiens
caaagtgctgggattatagacgtgaatcaaacatcccttctggaacaatacagagtaggaaaggtttgcagaata

SEQ ID NO: 457445 - DNA, 100 bp, Homo sapiens
caaggaaaaaaacctctgaccgtgaagagacatgagatgattgccaaacccccaggtgctggagaatctggtaaaagcaccattgtgaagcagatgagga

SEQ ID NO: 457446 - DNA, 100 bp, Homo sapiens
ccgcccccgtgcccgaccgccgcccgactgccatcgcccggcccggccgcgcccgcggaaccagaccagccttgaaaagatcttttgaggtcgaggaggt

SEQ ID NO: 457447 - DNA, 75 bp, Homo sapiens
aaggggaataagactgcatctgttcatatgagagaattcggtcaacagtggatgaaaaagaacaaaaacaacttc

SEQ ID NO: 457448 - DNA, 75 bp, Homo sapiens
aaaaaaaccttcaggcggcccatggttttctggatatgccgcagaaggatccgtgccagaagcaagcctgtgaga

SEQ ID NO: 457449 - DNA, 82 bp, Homo sapiens
aggccctgagcacgctgctgtgtgagcagcaggacgtgaccacgcagtctgtgatggggtttgatcctctgcctccttcgga

SEQ ID NO: 457450 - DNA, 101 bp, Homo sapiens
atgggagaagaagttgtccatgttcacactgggtgaaggaagctgaaaccacagacatgactgagtcctccatgaagactcaggcgctcaggactgccagg

SEQ ID NO: 457451 - DNA, 100 bp, Homo sapiens
agacggagctcctggcccccgaggaggagcagaggatcaatgcggttcaagaatcgattccagcggctttggacgtggaccggatggttctttacaaaat

SEQ ID NO: 457452 - DNA, 82 bp, Homo sapiens
acaaacgccgcaccaggtcttgtagcagcgcctcctcggtggacgacccaccggagcccgtgtacgcgaacatagagaggca

SEQ ID NO: 457453 - DNA, 100 bp, Homo sapiens
atttgacgactgctcttcctcctgttgtctcgaacccaatttatgacaaccaacaacaacccaaagtgcgtggttggcttctggctagccttgatggcca

SEQ ID NO: 457454 - DNA, 83 bp, Homo sapiens
tatacaaaggaaactcagactccagttatggctcaacccaaagaaggcctggcaaaaagcacgaagtgatgggtgggagcgag

SEQ ID NO: 457455 - DNA, 90 bp, Homo sapiens
gctcaaggggatgtcgctgctggttcgggcagagtccgacgatatgagatcctgactccaaactccattcccaagggtttcatggacggg

SEQ ID NO: 457456 - DNA, 100 bp, Homo sapiens
cagagttagagagagggatggtggtatctcagatgaagacatcatcaacattactcttcctactggagtccccattcttctggaattggatgaaaacctg

SEQ ID NO: 457457 - DNA, 100 bp, Homo sapiens
ctcccagatgcatccgtgtcagtcctggcattgatgtgcctgctccagacatgagcacaggtgagcgggagatgtcctggatcgctgatacctatgccag

SEQ ID NO: 457458 - DNA, 100 bp, Homo sapiens
acaaagatagataccagctggggatgtgcacagatattcattccaagtgccacaaaggagaagttgagactcaaccagatgaagtcttgctctgtcgccc

SEQ ID NO: 457459 - DNA, 75 bp, Homo sapiens
agacggtgccgagaagcagctgcgaggtggcgacatgtctaagaatgtgagccagtcacagatggcaaaattgaa

SEQ ID NO: 457460 - DNA, 82 bp, Homo sapiens
tcgattcgctgtcggaggagaatgagaccctggtggagtttgctattggtttttcacgactgaaaacaacatagcaaaataa

SEQ ID NO: 457461 - DNA, 75 bp, Homo sapiens
ccggctgggccggaagatcggcagcggctccttcggagacatctatctcgggcgtgatggtgggcatgggtcaga

SEQ ID NO: 457462 - DNA, 101 bp, Homo sapiens
gtaactctgtccttattatcggaccccgaggatcaggaaaaactatgattgggctaatggatactacagacaacagagaaaacttgttgaagagattggct

SEQ ID NO: 457463 - DNA, 85 bp, Homo sapiens
ctttggctttgctctctcttctgccatctgataatagtgccggtggtggtgtgcacattgagccccggtatagacagttccccca

SEQ ID NO: 457464 - DNA, 82 bp, Homo sapiens
cccgcaacacgcccgcaggctcctgtgtctgctgccggggcagcggggcccggaagggactggagactgatgcatgaggggg

SEQ ID NO: 457465 - DNA, 75 bp, Homo sapiens
gttacaatggttggtctgatttacccatatgttatggcaaatgggagagaccctttgaagtcaaggacaccgagg

SEQ ID NO: 457466 - DNA, 140 bp, Homo sapiens
gacactcctacccggcccgtcacccggcatgggggcatgagggaccttcacgaatccagcttcagcctctctgccccaccagctactggaagtcccttgcccctgatcggtcagatgatgagcacgaccctctcgacaac

SEQ ID NO: 457467 - DNA, 90 bp, Homo sapiens
cagcaaacagccaacccatgagagtcgaattggagaacttgttggagtgctggtgaatcatttcaagagctgccactgcagagccccgcc

SEQ ID NO: 457468 - DNA, 87 bp, Homo sapiens
cgtttctggctccgggctgagcttcctggagaagaggaaggcagctctgtggccatggatatgttccagaaggtagagaagatcgga

SEQ ID NO: 457469 - DNA, 90 bp, Homo sapiens
gtctttttgttcaagataaagtgattttttgcctttgttgattaactggacaaattcaggtatttcatggaaacttggagagagaaaagt

SEQ ID NO: 457470 - DNA, 82 bp, Homo sapiens
tttaaagctgagctgcgaggaaaatggcggcgggaggtacatgtgaagattttttggcagcttagcgtggaaaccattgatc

SEQ ID NO: 457471 - DNA, 100 bp, Homo sapiens
ccgatgcggttagagccgcggagcctggaagagccccgagcgagacccgtgtacagtatcatctcagttggagttagaagaagcctttagactttatgag

SEQ ID NO: 457472 - DNA, 100 bp, Homo sapiens
tacagaagaagcattgagaagattaagatttaatgtaaaagcagctagagggaacacaacagtagatgagttaatgatgagactcatggctgcaatggag

SEQ ID NO: 457473 - DNA, 101 bp, Homo sapiens
caggggccatggcgaagcacgagcagatcctggtcctcgatccgcccacagacctcaaattcaaaggtactaggttttgacaagcttgcatcatgcgtgag

SEQ ID NO: 457474 - DNA, 100 bp, Homo sapiens
tgttaacatctttaaggcaggagctgatgaagagagagcagagacagctcgtctgagacgagttgtactgctgtcacaggaaatggacgctggattacaa

SEQ ID NO: 457475 - DNA, 100 bp, Homo sapiens
gctcgcccggctttggggtcaagcagattggagtaaaagtccctcgcaatttccgactgttggaagaactcgaagaaggccagaaaggagtaggagatgg

SEQ ID NO: 457476 - DNA, 50 bp, Homo sapiens
cctctggcagaatgcactgcttgaaaagagacgagttgtactgctgtcac

SEQ ID NO: 457477 - DNA, 75 bp, Homo sapiens
caccgtcaccgaggcgccgcgcacagtcaagaagaatgtgaaagatgttgcagaagtgttccagaagtggctgaa

SEQ ID NO: 457478 - DNA, 83 bp, Homo sapiens
gagagaccagacctgcaagctctttgacacacagcagttcttgtcaggaatgtggacccccctgtctggtacgacaccgacgt

SEQ ID NO: 457479 - DNA, 123 bp, Homo sapiens
ggttttgcaggaaatgtgaatctcaggagagagcagccagagtgtctgtggctccagcagccttgtttctagcagctaaagtggaggagcagcccaaaaaattggaacatgtcatcaaggtag

SEQ ID NO: 457480 - DNA, 102 bp, Homo sapiens
tgcaattggaccaagagaacaatgggaaccagtctttcaaaatgaccgtgaatagtctcccacaatacgcagagccttcctgtcccagccttcctgccgggc

SEQ ID NO: 457481 - DNA, 75 bp, Homo sapiens
gtttcaataacaggtcattgccgagaaaagctctttcagtctcacatggcaacgaaaacaacttgtatgtcttca

SEQ ID NO: 457482 - DNA, 100 bp, Homo sapiens
atgctctacctctgcacatcgcacccaggtggttcagctcgcatagtgggatcagtttcattcacggatgtgactgtggactttacccaggaggaatggg

SEQ ID NO: 457483 - DNA, 100 bp, Homo sapiens
tcaagtatacagaaaatcggtgaagagaggttttgaattcacgcttatggtagtggacagtgatgtgtgttctgaaattgtgaaccatgagtctagtact

SEQ ID NO: 457484 - DNA, 75 bp, Homo sapiens
cggctgcgggaaatcgggctgaagcgactgagtccgcgatggagggaactgctcgcagaaagaagaaggtggttc

SEQ ID NO: 457485 - DNA, 100 bp, Homo sapiens
acgttcgaagaatgacagcaagccctactgagcgtgctcccctctgagactggagtgagagggtcttctggttctgactaataagaagacgaccttcttt

SEQ ID NO: 457486 - DNA, 137 bp, Homo sapiens
aacggtgcctgcggtgcctgagctgagtgaggccgaggccgggaggccgtgcccggaggtactcgaaaagattccattccacaagtcctactccctgaggaagagaaactcatcattgaagaaaccagaagcaacgg

SEQ ID NO: 457487 - DNA, 101 bp, Homo sapiens
ggcgcgccgtccccagccccgccgccggccctcggtgcgcccggccgcctgcacccccagctctgctgtagctgccactgagaagaaggcggtgactccag

SEQ ID NO: 457488 - DNA, 118 bp, Homo sapiens
cacgcggcctacgtgaacaacctgaacgtcaccgaggagaagtaccaggaggcgttggccaaggggctgaccagtttgagtatgtaatgtatggaaaagtgtacaggattgagggaga

SEQ ID NO: 457489 - DNA, 87 bp, Homo sapiens
tgctattgaaagagagtatgcacaggatcccaagtatcctgtagagaacttgctaaacccagatagtccaaggagaccttggctcgg

SEQ ID NO: 457490 - DNA, 96 bp, Homo sapiens
taggcattttgctgtctcctcctaatacgagtaatcaagtcagaggattatatgacttttatctgcctagagaagaactatggatctacaacatgg

SEQ ID NO: 457491 - DNA, 148 bp, Homo sapiens
tcccagaggcccaccttcaagcagctggtggaggacctggaccgtgtccttaccgtgacgtccaccgactttaaggagtcggccttgaggaagcagtccttatacctcaagttcgaccccctcctgagggacagtcctggtagaccag

SEQ ID NO: 457492 - DNA, 89 bp, Homo sapiens
cctgagcagcctgagctacttcaagctcatgtttgaccgctccgaggtctatggccccatgaaggtagaagaacggtcaaggctcaacc

SEQ ID NO: 457493 - DNA, 97 bp, Homo sapiens
caccacctttacagtaaagacgctgcgaattgacgccttttataataaagacacttatcttgcccaagagctgggtactccaaagattcaggtttac

SEQ ID NO: 457494 - DNA, 100 bp, Homo sapiens
tgaagtcttcaggcgagctcaccacatgctacagcaaagaatggctcaagaagtactgacacatttaaaggagcatcctgatgcttggacaagagtcgac

SEQ ID NO: 457495 - DNA, 119 bp, Homo sapiens
gaaatgcagaaaacagaaacacttcttttattttcctgtaatatatctgtatcatcggaggtgtgaccaattcagtgaaaggaacgaatgcgattctctggacctgtttgggactgagc

SEQ ID NO: 457496 - DNA, 97 bp, Homo sapiens
tggcgacgcggggccatgtgcaggaccctaacgacaggcgcctccggcccatttacgtaccaaatatgccccaacagcggcaagaccagcatcatca

SEQ ID NO: 457497 - DNA, 100 bp, Homo sapiens
aataaagtagacatggtctggatagttggtggcagttctgtttataaggaagcccatgaaacctttaatgagtggtttaagcatatgaattcagttccac

SEQ ID NO: 457498 - DNA, 75 bp, Homo sapiens
gacggcaggaattattggaggccaggtttactggagtaggtgttagtaaggttgctgctaaaaccttgccttttt

SEQ ID NO: 457499 - DNA, 100 bp, Homo sapiens
cgctcaccgactccttcctgctgcggttcctgcgcgcccgggatttcgatctggacctggcctggcgggtactaggttttgacaagcttgcatcatgcgt

SEQ ID NO: 457500 - DNA, 89 bp, Homo sapiens
agtatatactaactatggtggatgatatgctgcaggatgaagatgagctggattcccacaccatggtgaagactagtgtggagagtgtg

SEQ ID NO: 457501 - DNA, 98 bp, Homo sapiens
gtatgctcatcagtattatatgcagtaactcgagaacaggaagaactggaagaagctttagaagtggaacgacaggaaaatgaacaaagaagattatt

SEQ ID NO: 457502 - DNA, 98 bp, Homo sapiens
ccagaggtcctttgaatcatctctacagagaactgaaatttcttcttttcgatcctttggtacagaagacagaccgacagatcgtccaataccacctc

SEQ ID NO: 457503 - DNA, 95 bp, Homo sapiens
cctgctcacagtttgtaccagcattgaaaataggctatctctacacctactgggctcctctgcttacaacaggttgatgaacatagtaaacctcc

SEQ ID NO: 457504 - DNA, 90 bp, Homo sapiens
tcggctgacggcgcgggatccctggctccgcgaggtactggaggcgcaaagaaggcatcagaaggagaaatctggcatcatacctacctc

SEQ ID NO: 457505 - DNA, 50 bp, Homo sapiens
tgcacaggaacttcattatccacaggacttcctcccagctgacatccagg

SEQ ID NO: 457506 - DNA, 83 bp, Homo sapiens
ctcgcgctactctctctttctggcctggaggctatccagcgcatctgcatctgggaccgacctcctgggctggctgatcaaag

SEQ ID NO: 457507 - DNA, 98 bp, Homo sapiens
agctgagtggttgtgtggtcgcgtctcggaaaccggtagcgcttgcagcatgctgctcagatggaagataaaaagccctttatcctgtcttccatgag

SEQ ID NO: 457508 - DNA, 100 bp, Homo sapiens
atcagtgctgcagtggagaaagccatcaagaaatttggaggaaagatatggagagagatttgaaggctgactcaaacatgccactcaacaattctagcca

SEQ ID NO: 457509 - DNA, 83 bp, Homo sapiens
ctattcggggaaagaattgaaccttcaccatataagttaatacactgttaaatgtgaaattaagtgagacagaaaatggcaag

SEQ ID NO: 457510 - DNA, 74 bp, Homo sapiens
cccgctctgggaggaccgcgagctactcagctgcttaagctggcccacaagtacagaccagagacaaagcaaga

SEQ ID NO: 457511 - DNA, 75 bp, Homo sapiens
agtccgaaatgaacatttttggaccctaggttttggctcattggttcttgcacgcattgcaaatgccacgaggcc

SEQ ID NO: 457512 - DNA, 101 bp, Homo sapiens
gagacttgctattcaagatctgaaattacttgctaataaaacaccacatacttggagtagggagaatattcaggctgagtcatcactagagagtgggaagg

SEQ ID NO: 457513 - DNA, 100 bp, Homo sapiens
ccaccttccagcacaaggagctgatggccgctgacaggggacgcaggtaactaggatttctacctcaaccgcgagacctatgcaaggacggtgtggacca

SEQ ID NO: 457514 - DNA, 75 bp, Homo sapiens
ttatttggtcactgaggaagagatcaatcttaccagagggccctcagatgccagaagtgggtggagaactgtagg

SEQ ID NO: 457515 - DNA, 99 bp, Homo sapiens
gcttggtgtcgtttttccttgagctgaacgtcttgcaacagtggccgcacgcataggaagcagtcaattatagatttcttcaaaccagcttcaaaacaa

SEQ ID NO: 457516 - DNA, 96 bp, Homo sapiens
gcgcggatgggatccagctgttagtcgggtaggcataggcttacagcttcgccatgggctgctggcccaagaatggacttctagacatgaacaagg

SEQ ID NO: 457517 - DNA, 50 bp, Homo sapiens
gcacttactggagtccaagatgctaatgggatgggcgtgttttgggcgtg

SEQ ID NO: 457518 - DNA, 100 bp, Homo sapiens
tggaggagctgagcgctgatgaggtcagtaaaatcagcttggtggatctagcaggaagtgaacgagctgattcaactggtgccaaagggactcgattaaa

SEQ ID NO: 457519 - DNA, 90 bp, Homo sapiens
cggagacgggagtattatgaaaagatcctaaagatgtgattaaagagattgaagactttgacagcttggaggctctgcgtctggaaggca

SEQ ID NO: 457520 - DNA, 137 bp, Homo sapiens
tctgcccctgcgcgtggtgaaacacttctactggacctcagactcctgcccgaggcctggcgtggtgacagcaccacggtgtgacgaaatgcaacatcacgtgcagcaagatgacatcaaagatacctgtagctttg

SEQ ID NO: 457521 - DNA, 75 bp, Homo sapiens
agcagggacccgttgaacaactctgggctgtcggaaaaggtaacagaagatggaactcgaaatcccaatgaaaaa

SEQ ID NO: 457522 - DNA, 90 bp, Homo sapiens
cttgggagagctcctgggccacccctcctttcaggtcaagttcctccgtgtcacaaagcagtacctgccccacgtggcgcgcctctgtct

SEQ ID NO: 457523 - DNA, 88 bp, Homo sapiens
tgctcagcacagccaaggaacagaattagaagaaaaggaaccctggcctgagtgtaatgttcaagctcagaaatgccttatgtggatc

SEQ ID NO: 457524 - DNA, 100 bp, Homo sapiens
tctccgtgccgcccagaccggccaggtggacggcgagcttatccgtggtctggagcaggatgtcaagaaactatgttccaacttcctgtcaacaatcttg

SEQ ID NO: 457525 - DNA, 129 bp, Homo sapiens
ctcacccccatcctgggcatccacgggggctcctctatgataatggcagataagattcagaatggacagtttagaagaacctcagaaaaaagtctttaaggctcgaaaaacgatgagagtgagtgatcg

SEQ ID NO: 457526 - DNA, 82 bp, Homo sapiens
cttgtgaaaagtgtcaattgcaagagaaatggaaggataaagtatacaggtaacttacgacctatttctccgtggcgttggc

SEQ ID NO: 457527 - DNA, 50 bp, Homo sapiens
tcagtattcacagggaaagctgtgaggaaatctcctgcaaagaagctgag

SEQ ID NO: 457528 - DNA, 96 bp, Homo sapiens
agatgcagatctgaagacctattttactgataagaaaacacatctttacacactaaaccattaaaaatctcaagtgacgactttgggaaactctgg

SEQ ID NO: 457529 - DNA, 100 bp, Homo sapiens
cttcccgcaggctgaggacctctatctcgcttttcccctggccttctgtatcttcatggtgcggctcatcttcgagaggaacggaaaacagttcttcctt

SEQ ID NO: 457530 - DNA, 100 bp, Homo sapiens
ttagagacatctacgacttccgagatgttctgggcactatggcatgcagctgtaccagaattatatgcatccatatcaaggtagaagtggctgcagttca

SEQ ID NO: 457531 - DNA, 90 bp, Homo sapiens
aaaaaatggatctactgctgttgctgagtctgttgccagacacagaatgttcagcttaacaaagaaatgacacttgccagcaaccggagc

SEQ ID NO: 457532 - DNA, 90 bp, Homo sapiens
gagatgtcatggtggagaacttcaagaacctggttgcagtgggttctggcctataggaacaagacattttcagtaatggaagaaggagct

SEQ ID NO: 457533 - DNA, 85 bp, Homo sapiens
caaggagctaaagcagcgtgcgttcagccctggggcgagaaccactgtctctgatcaacgtgcggaagaggaacgtggaatctgg

SEQ ID NO: 457534 - DNA, 88 bp, Homo sapiens
ttcgcagtggtcgcttcttctccttggaatgatgagaagacagcagctgattacaagattttaggtggttcagtccttcacctggtgt

SEQ ID NO: 457535 - DNA, 97 bp, Homo sapiens
ttggagagggaagtgcgtctggatgactactaaggttacctacctgggcaaagtctccaccactggcatgcagtttttgtcaggctgcacagaaaag

SEQ ID NO: 457536 - DNA, 84 bp, Homo sapiens
ctgcggctgcccccgggcagcaagggggaggcccccaaggtcaatgtgacggtggactacattagaccagccagcccagccaca

SEQ ID NO: 457537 - DNA, 97 bp, Homo sapiens
ggtggctccatggacacagacctgctgtgtgtgcttctgcgccccagggccaattcctgtccccccagcagcatggcatcgtgtgctgaaccctctg

SEQ ID NO: 457538 - DNA, 50 bp, Homo sapiens
ctgatgtcaatcttgagggctaggactcagaattcatgattgaagaaatg

SEQ ID NO: 457539 - DNA, 100 bp, Homo sapiens
ggactgccccggcaactccagggtgtctggtccacgacctatcctaggcgccatgatttgataatgggctgcattaaaagtaaagaaaacaaaagtccag

SEQ ID NO: 457540 - DNA, 98 bp, Homo sapiens
ctgggagcgagcgcagcaaagcgcccagcctgccgcctcgctgtccctgcggcttctggggtttggatttaggtggcgagtagaaaaagaagtaattt

SEQ ID NO: 457541 - DNA, 75 bp, Homo sapiens
ggaacaaacacttctggatgcatcccaatctgcacatcgtgctgccacacgaggcttcattcgttatggctggcg

SEQ ID NO: 457542 - DNA, 96 bp, Homo sapiens
cagaatatgacggtggctataccagggactctgttctgattaggttttgcactgattgcaaaaataaagtcctccgagcatacaatatccttattg

SEQ ID NO: 457543 - DNA, 75 bp, Homo sapiens
gctgggtgcagtagctgcccaggaagtgctgaaggcctgtgcccctctctggtctcgtgcttgtggcagctctgt

SEQ ID NO: 457544 - DNA, 82 bp, Homo sapiens
aacaagctcctacttccagaaaaagtgctcctgggactccaggataccaggctgaactccagtgcacccagttagacttgga

SEQ ID NO: 457545 - DNA, 75 bp, Homo sapiens
gatgcgccgcgccagctcctactcctccctcaactccctcatcggattatatctgtccaagatgcgagtctggtt

SEQ ID NO: 457546 - DNA, 75 bp, Homo sapiens
tcagtatcactcgctcccttgatgatcttgagaggccacaagaggaagctgaatgaagaggacgccgccagcgag

SEQ ID NO: 457547 - DNA, 116 bp, Homo sapiens
acacagggttcctgacagaatatgtggccacacgttggtacagggctccagaaattatgttgaattccaaggttccacttccaaacatgagttccaggccgagacaaagaagcttt

SEQ ID NO: 457548 - DNA, 101 bp, Homo sapiens
accagttgatgggcacctcccgggacgaggtacttggaaggctccatcgcccctgaagacaaaggaagctgctcattgctgcctgggcctccatttgccag

SEQ ID NO: 457549 - DNA, 97 bp, Homo sapiens
gccgcaccacattggcgtggccgtcaaggagctggacctctacctggcctacttcgtgcgtgagcgaggtgctggagaatctggtaaaagcaccatt

SEQ ID NO: 457550 - DNA, 130 bp, Homo sapiens
gttcacgtgacatcaagaggaagcggaaaccagtggccacagcatctttgtctagccccagtgcagataacaacgaacttgatgcaagtgataggtttgccaaggtcagacctctcatcatccggatgaa

SEQ ID NO: 457551 - DNA, 96 bp, Homo sapiens
gccacagcagagacgcgaaggagaggccctagaaccccaaaagaatgcaatggtgtaaagattccagttgatgccagtaaacctaatccaaatgat

SEQ ID NO: 457552 - DNA, 90 bp, Homo sapiens
ctgctcccagctctactccttctctgcctctcaggctaccaagcagtttctcgaagagattaacaagtggacagttcagtacaatgtttc

SEQ ID NO: 457553 - DNA, 75 bp, Homo sapiens
gaaggaaggaagctgaggacttagcaggaatgtcatacccaggctatcccccaacaggctacccacctttccctg

SEQ ID NO: 457554 - DNA, 120 bp, Homo sapiens
cgagagactacgcgctctggaagacattgaacgggaaatcggcgccatccttcagaatgcaggtgctggagaatctggtaaaagcaccattgtgaagcagatgaggatcctgcatgttaa

SEQ ID NO: 457555 - DNA, 96 bp, Homo sapiens
cctttgtgagcggcgcggacgacaaaggcgcgggcccgggcagccgagatggagaaggatgaaactgtgagtgactgctccccacacatagccaac

SEQ ID NO: 457556 - DNA, 100 bp, Homo sapiens
cgaagaagaaaggattcgttacagccagagattgtgatcaacaaatacaagcgcagacgatttcagaaaaccaagaacctgctgacaggagagacagaag

SEQ ID NO: 457557 - DNA, 83 bp, Homo sapiens
ccgcgggctccgcgcccggccggacccgggcccgagatatctcccggggccaattcagcatctctacctggccatcctaacaa

SEQ ID NO: 457558 - DNA, 75 bp, Homo sapiens
tcccattccttcacagggaccctagccagatttcgggcagacaacttgaacaagctgaagaacctatgcagcaag

SEQ ID NO: 457559 - DNA, 74 bp, Homo sapiens
gcggcggcagctgcagtgacatgtccagcatgaatcccgaataacctggaaacgtagcaaaattgagacttcta

SEQ ID NO: 457560 - DNA, 87 bp, Homo sapiens
acttgcgagatgtccttagggtacaagaacaggaattgaagtctgaatttgagcagtgcagtcattggagaaatcgatgaagaaaca

SEQ ID NO: 457561 - DNA, 110 bp, Homo sapiens
gccccctgcccccttttcctggtgcatgtgaagttatcaaaaacagattatggatgattggccagggtatgacttgaatttattcacgtacccacagcactattatggag

SEQ ID NO: 457562 - DNA, 74 bp, Homo sapiens
aagaccagggccctgcagctggaagaggagctgttccagcagtcctgcgttaactgcggccgggaggctatgag

SEQ ID NO: 457563 - DNA, 101 bp, Homo sapiens
aatggagacgccattggatgttttgtccagggcagcatctctggtgcatgctgatgacgaaaaacgtaatctgtaagtcagatgctccaacaggggatgtt

SEQ ID NO: 457564 - DNA, 100 bp, Homo sapiens
tacagaaagagtcaacagcagtggcaacagaatgtttctccatcccagagagatgaagtaattcaatggctggccaaactcaagtaccaattcaaccttt

SEQ ID NO: 457565 - DNA, 75 bp, Homo sapiens
aaatcatcaacatcaacattgcagactgctcctcagcccacctcacagggtgtctgatgccatcaagtgttgcag

SEQ ID NO: 457566 - DNA, 88 bp, Homo sapiens
ctgtagtcccattattcagcggactcattctgatgaaggaaagagcgtccctgtgcagctgcgtgtccttcagttctttggctctgat

SEQ ID NO: 457567 - DNA, 89 bp, Homo sapiens
gggcagaacgcgacgggtctgcggcttaggctccagaaactaaaacgatcactttctttcaagaccaagagtttacggagcaaaagtgc

SEQ ID NO: 457568 - DNA, 90 bp, Homo sapiens
tgacaagctagttactagagggcctacaaagattcctccttatggacaacaaggccccagcgggtatggtcaacagggccagactccata

SEQ ID NO: 457569 - DNA, 82 bp, Homo sapiens
cctggctcccttctgccccagctccgtctcggcggcggcgggtacaagaatattccacagatgtcctttgatgatacagaaa

SEQ ID NO: 457570 - DNA, 100 bp, Homo sapiens
agaagatcaataaaaactgctggaggatcaagaagggcttcgtgcccaacatgcaggagtcattgcagttttcagtagaggtgtacttctgagaagtggc

SEQ ID NO: 457571 - DNA, 74 bp, Homo sapiens
cttacgtctgcggaagtgcagctgcctcagttcttagcgcaggtgtccctggccagtgtccttccacctgtcca

SEQ ID NO: 457572 - DNA, 78 bp, Homo sapiens
accaccatcctgaatggtttaacgtgtacaacaaggtacaccagaggatcgcttcctggcagaatttgggagctgttt

SEQ ID NO: 457573 - DNA, 100 bp, Homo sapiens
acgggatcctctgctgcatagtttcggtcatctaaaggaggttttaaacagtataacaggataaggaagcctgtgtgggtaccaacaatcaaagctacat

SEQ ID NO: 457574 - DNA, 87 bp, Homo sapiens
cagctccaaggtcagggtgattaagctgtcaggtgggcctcttagcaaatatccggctgtgatcaatgatatttcattctggttgcc

SEQ ID NO: 457575 - DNA, 96 bp, Homo sapiens
ccaaagccggtacgcctgttcccagagttcggtgtggagcagaggatcatgtggaagcagtgaaaaagctccagaactccaccaagatcctgcaga

SEQ ID NO: 457576 - DNA, 50 bp, Homo sapiens
gcgtcatcctaaggaacatcgacgcaagaggcagagggaaacacttgcac

SEQ ID NO: 457577 - DNA, 101 bp, Homo sapiens
tggagcctcagttggaagcagccgatccagcctgcggagcctgtggggcaggtgggtgtttctctatgagaagggctaccagacctcgagcggcctcatca

SEQ ID NO: 457578 - DNA, 87 bp, Homo sapiens
gggctgctgtttctcttcgccgacgtgtgaagcctcagtttaggtcatctggtggttcagaacactcaacagagggctctgtatcct

SEQ ID NO: 457579 - DNA, 74 bp, Homo sapiens
ccgccgcggagatgtgacccggcagtacggcaaatatggcggaggtaagaatgattgatgttggctgatattgg

SEQ ID NO: 457580 - DNA, 100 bp, Homo sapiens
ctgggatgtgaggagcacctctgcccggccacgaccccgtctgggaggcttaccactcttctctcatggatcctgataccaaactcatcggaaacatggc

SEQ ID NO: 457581 - DNA, 100 bp, Homo sapiens
tggatgcagcaaggaaataggatttaaccgctctctgcctcccagcctaccgatgttcaccgtgctcaggaaattcaccattccacttaccttacttctg

SEQ ID NO: 457582 - DNA, 96 bp, Homo sapiens
caatcagaaaatcaagtaaaggaacccaacagagatctcttctgttctccactgctagatgtggaagatgtcaagtttgtgatcaactatgactat

SEQ ID NO: 457583 - DNA, 75 bp, Homo sapiens
tatctataccacaagcaaccacatcaaatatgctgtcaccactggctcccctcccacccggtcactccgtccagc

SEQ ID NO: 457584 - DNA, 100 bp, Homo sapiens
ggtgtctgtcctgctgtctctgctgctgcttctgggtcctgctgtcctccaggagacccgagatgctgactcttttggtgatcccttcttcccccggact

SEQ ID NO: 457585 - DNA, 98 bp, Homo sapiens
ttactaccaagccctgtcagtagctcctcagattgataccgtggccagccagtgacagaaaaaagagtgaatgtgcctttaagaagaagagcaatgag

SEQ ID NO: 457586 - DNA, 90 bp, Homo sapiens
gtttaattggctctggaaacctcctacctccgttgaaaggagagccagttactaacttacgccaaattccagcgaaacagctgatgccag

SEQ ID NO: 457587 - DNA, 90 bp, Homo sapiens
cttgtgcaaaatgtacaccacacttacagcccttgtcagatatgaagaaggagagacgaccatcttgcaactagaaaaagatttgcgcac

SEQ ID NO: 457588 - DNA, 50 bp, Homo sapiens
ggcgaatggagcaggggcgcgcaggcacgggactgaaccagctggtggtg

SEQ ID NO: 457589 - DNA, 76 bp, Homo sapiens
gcagattgacgggacgagatggtcctggcagggctcatcaggaaactcggtgctggagaatctggtaaaagcacca

SEQ ID NO: 457590 - DNA, 86 bp, Homo sapiens
gttggccctgtgatccctcaagactggtccacggagtgtatgaccacaaacagccatcaaggaatcatgggtaaagaaggaagaca

SEQ ID NO: 457591 - DNA, 75 bp, Homo sapiens
gtcgtcttccacttgcacgaaagctttcctaggccaaaaagaggccctcgggaccaaggatcacgtcatgactcc

SEQ ID NO: 457592 - DNA, 90 bp, Homo sapiens
gtgaggcctccccagccatgtggaacttttcacaatggaggagcgctcatgggggccctatatcacctgtattcagggcctatgtgccaa

SEQ ID NO: 457593 - DNA, 98 bp, Homo sapiens
acctcagattcattgtctcccgcatgaaggagagggacacagtggtggctcttcaagcgctctccaaatatggaacagcaactttcactaaaagtgag

SEQ ID NO: 457594 - DNA, 82 bp, Homo sapiens
ttcgacctggagccgtcccaggactgtgcaggggactctgtcacaattttgagaagtatgctttacagaggttccgaagtta

SEQ ID NO: 457595 - DNA, 75 bp, Homo sapiens
cggacgtggtgcttggcttcgccgagttggaagatccccgtcgaggtcaagatcaagatccaggtctatttcacg

SEQ ID NO: 457596 - DNA, 74 bp, Homo sapiens
ctgggaggaagcgcaagcaccccccggaaatttccagaactctttgcacagttcaagtccttcctgggggtaaa

SEQ ID NO: 457597 - DNA, 101 bp, Homo sapiens
gctttttctggtgtcctgaacctggaagttgtgctttttaaggtgtaaatccaaaccgcttccaactcaaggcaagtaacagcccacggtgttctggcagg

SEQ ID NO: 457598 - DNA, 83 bp, Homo sapiens
ctcccagttccgcagtccttcctggcaaacagtcttctcaagtcttaggattgcagcaacacgctcggctgcccaaacccaag

SEQ ID NO: 457599 - DNA, 75 bp, Homo sapiens
atgaactggattctgggctccaagggattgtcaatgaggcagatcagattccgatttgacgggcaaccaatcaat

SEQ ID NO: 457600 - DNA, 83 bp, Homo sapiens
ctatggggtagcatcatgtgaagcctgcaaggcattcttcaagaggacaattcaagaggatgaagtttttgctgctgcagcag

SEQ ID NO: 457601 - DNA, 50 bp, Homo sapiens
gtgcaaacccgagagaactggatagggatgaggaagaaatgaccaaacga

SEQ ID NO: 457602 - DNA, 75 bp, Homo sapiens
gagtcaacagcagtggcaacagttggtgcttcccgtgctgctgttgatgctggctttgttcccaatgacatgcaa

SEQ ID NO: 457603 - DNA, 100 bp, Homo sapiens
ggactgcgcccccgggagcgggcgcccagaggttactattcgagcttcacttggacctctccagtcaaaattaccaactgcacctttcggttgcgctcca

SEQ ID NO: 457604 - DNA, 90 bp, Homo sapiens
ctgcaccagttccagtacatggggaagcgatacatagccagattgaaaaggaagatcaggccaaccccaaagaagaagtgaccaaggagg

SEQ ID NO: 457605 - DNA, 75 bp, Homo sapiens
agacttgtggttcttcaacagctgtgcagagcagagacgtaaatttaaggcctatatgaacccaatagcaatggc

SEQ ID NO: 457606 - DNA, 100 bp, Homo sapiens
gagaactcctgactgattagcattcacaccagattttgagaagagggggaaaaaggaagtttgtcctgtcctggatcagtttctttgtcatgtagccaag

SEQ ID NO: 457607 - DNA, 100 bp, Homo sapiens
ttgcgacatcccagagagcttccagagtgccatgtttcagaacagagtaagacccctggtaaagaagaactgaagatattatacagataccagatatagc

SEQ ID NO: 457608 - DNA, 96 bp, Homo sapiens
cttccggagccatgtcagaaggagtggacttgattgatatatatgctgacgaggagttcaaccaggtcttcatcctccaggtccacctttagcaag

SEQ ID NO: 457609 - DNA, 82 bp, Homo sapiens
aaaaccccgaggagccctgttccaaagcctcctggaccgtccaagaaggggatatgagactttctactcggaatatcctgag

SEQ ID NO: 457610 - DNA, 90 bp, Homo sapiens
gccggctccgcggcgatggcgctctataacccctaccgccacggtatcactggacaggccatggctccacggtcccggcgacgaaggcac

SEQ ID NO: 457611 - DNA, 75 bp, Homo sapiens
aacctctgggaacacaaccaagcaatcatcaagcacctcctcgcccacaagagtgaacagatactgaaagcggcc

SEQ ID NO: 457612 - DNA, 50 bp, Homo sapiens
gcggcgagacggcggcaggacggcggcagaatactctggagcagtgcaat

SEQ ID NO: 457613 - DNA, 75 bp, Homo sapiens
ccttcgggcaaacaggattccacagtgtcctctggaaaatgatcctgataacttaagtgactctctcttttccgg

SEQ ID NO: 457614 - DNA, 101 bp, Homo sapiens
ggtctccggaagctcgtcgcaggccatctgtgtgactccggtgcgagtggaggttctcccatgggcaggtggtctctctggatgagctgcgccccttccag

SEQ ID NO: 457615 - DNA, 90 bp, Homo sapiens
gaagagtcaaatgttcagccagtatcaacaccagtaacagtgtgtggagatatccatggacagggatcatagacggtatttctatgtaaa

SEQ ID NO: 457616 - DNA, 100 bp, Homo sapiens
gcggacatcactttagaccctccacctaattgcaggagctcttgtccctggcaaagcgaaagcgcagtgactctgaggagaaggagccgcctgtgagtca

SEQ ID NO: 457617 - DNA, 100 bp, Homo sapiens
agatggcagtgaaggtgcctctcgactgggagatgcagtgtgcattggctgggacctgaaggagaagaaggagaaggtggaggagaaggcaagccggaaa

SEQ ID NO: 457618 - DNA, 83 bp, Homo sapiens
gggccgcgcctggcacgatcgcccgtcggggacctggagccccggacagagaggacaatgcagatcttcgtgaagactctgac

SEQ ID NO: 457619 - DNA, 75 bp, Homo sapiens
agtggacttggccatgattggttttcaagcaaagtgatgtaatacccaagaacaggaaagtaaacctaagagcat

SEQ ID NO: 457620 - DNA, 100 bp, Homo sapiens
atccggttcttggtgcccctgggcatcaccaacatagccatcgacttcggggagcaggttcgatacaagaggctgttttcctagcgtggcttgctgcctt

SEQ ID NO: 457621 - DNA, 74 bp, Homo sapiens
ctacccttcttggagcccacagggggtcactcagctgccgcaaggagcaaggcaagttctatgaccatctcctg

SEQ ID NO: 457622 - DNA, 126 bp, Homo sapiens
cacagtaacatacagcactttgtggagaaagtcgtcttccacttgcacgaaagctttcctaggccaaaaagagaaatcatcctcatcctttgataactgtgcttgaacacagacctgattgctggc

SEQ ID NO: 457623 - DNA, 83 bp, Homo sapiens
cctgggagcctactatcacgacgggaagctgtgggccaagattgacagacacctaatattcatgacttgagaatattctgcag

SEQ ID NO: 457624 - DNA, 83 bp, Homo sapiens
caaccattgacgccatgtcgggttattcgagtgaccgagaccgcggccgggaccgaggcccgcggcgccatggctcacgtcgg

SEQ ID NO: 457625 - DNA, 50 bp, Homo sapiens
agccaacccaaattaccttaattgtggtcttcaagctgacagagaagctg

SEQ ID NO: 457626 - DNA, 100 bp, Homo sapiens
cggctgtttaacttcgcttccgctggcccatagtgatctttgcagtgacccaggatttggagttccatggagtgatgagattttattttcaagataaagc

SEQ ID NO: 457627 - DNA, 100 bp, Homo sapiens
aagctgccaaagccttagacaaacagccagctaaaggtgtggatgagcaaatacggctggagtgccgacgagtcggggcagatcttcatctgtagccaag

SEQ ID NO: 457628 - DNA, 100 bp, Homo sapiens
tttcagcctcatccagcaggcggtgacccgctaccggaaggccatcgccaagagctcctgaaattattcttgggttaccattttgtgaagctattgatat

SEQ ID NO: 457629 - DNA, 74 bp, Homo sapiens
ggtggtgggactcaccgctctggccagggtgcttttggaaacacatcgtggacatcaagcctgctaacatggag

SEQ ID NO: 457630 - DNA, 96 bp, Homo sapiens
ttcttcttggacacctaatacccacagtcctccaggacagaagtggcggttgctgacgcctggaaattcccctgaaggtggagcaccacccaaccc

SEQ ID NO: 457631 - DNA, 98 bp, Homo sapiens
ctgcgggaccccaggatgggggacaggaggctgcggggcctcagggtgaggtggctttgaccccgggttgcccggccagcacgaccgaggaggtggct

SEQ ID NO: 457632 - DNA, 90 bp, Homo sapiens
agtgacccgggtgccgaggagcgggaagagttgctgggtgtggacgaatgtggaacctcgctctgtggctgtgttcccttggcactcctt

SEQ ID NO: 457633 - DNA, 100 bp, Homo sapiens
tcggagaccatggcagtgcagctggtgcccgactcagctctcggcctgctgatggaactgggaagtaacagccctccacagagaaactggaagggaattg

SEQ ID NO: 457634 - DNA, 75 bp, Homo sapiens
agccgggagttcaagaagaacactccagagtaagactttgaccccgacgcaggcttcagtgattgccgcggatca

SEQ ID NO: 457635 - DNA, 90 bp, Homo sapiens
agtatatccgttctgagacatacaaatacacaatcctggaggaagagaaggctcagcaagaagagcgcatgaggatggagtccagaagac

SEQ ID NO: 457636 - DNA, 50 bp, Homo sapiens
ctgaagagacctggagccgacagacggaagttggtgaaccatctaaagaa

SEQ ID NO: 457637 - DNA, 90 bp, Homo sapiens
gttgagagatggaagcaggcagcaaagggcctctttattgctgtcaaagatgaggaccctggctcacagtccagccaccagctccacgca

SEQ ID NO: 457638 - DNA, 100 bp, Homo sapiens
gcccggcttccgacgtgcagcctggcagtgcagtggttatcaatactctggctgaccatcatcatcgtgggactgactttggtggaagtccttggttaca

SEQ ID NO: 457639 - DNA, 100 bp, Homo sapiens
acctcatggcacctcagccaggggtgtagccaagatatcccagaagctcctgagagactgatgacagacaccattaatgaaccaatcttgctgtgtcgat

SEQ ID NO: 457640 - DNA, 78 bp, Homo sapiens
tccggcggcagggcaagctgtgcgacgtgaccctcaagtataaccccgttttcacacgaatggccccttcacatattt

SEQ ID NO: 457641 - DNA, 83 bp, Homo sapiens
cgggtctcgggggccgctctgggatcccggccaccagcaattgtccgaatgttgtaccatctttgggtaggcagacttccctg

SEQ ID NO: 457642 - DNA, 75 bp, Homo sapiens
ctgggatcggcccaaggccagttctccgcagatcggacagctggcttttaaaggaatgaagagactcaatagaat

SEQ ID NO: 457643 - DNA, 111 bp, Homo sapiens
gatgctgggtggaaaaggctttttagtcattggctacttacttgaaaaggctgcaaggtgtgactgttgtaaatctcaaggaactcttaaagagcgagttcagtggcgtgg

SEQ ID NO: 457644 - DNA, 90 bp, Homo sapiens
gttggtgtagatgcgcgtcatccttctttcttcctctacagaagtgtgtcccagaagcttttgttgacaattccagtttccgaacaaaac

SEQ ID NO: 457645 - DNA, 90 bp, Homo sapiens
tgacgtgtcaagcactaactcatgctacaagtgaaaactgatgagaaactgaatgtgtctgatgagaatacagcaagttgccctttgagc

SEQ ID NO: 457646 - DNA, 76 bp, Homo sapiens
gttgggggtgagcgccgcgcggctgcagcatgagtgttgcggagataggaacatgggagagaaacaatctgggtaa

SEQ ID NO: 457647 - DNA, 82 bp, Homo sapiens
gctggccaaagcctgcccagacggctcacctgtgcgggatggaacaaaaggtgctttgcaagatatcaccttgtcacagcag

SEQ ID NO: 457648 - DNA, 100 bp, Homo sapiens
cagagcctggagtctgcgaaggccgggacccggttccccggcccacagtgggggtgtgcaaacccgagagaactggggccgttgctccagggagaactgc

SEQ ID NO: 457649 - DNA, 75 bp, Homo sapiens
gtggcaagcaagtttaatcagacctgctcacacttcagaatagagaagggcagccacacagtgcccagggtggct

SEQ ID NO: 457650 - DNA, 98 bp, Homo sapiens
ccggttcccggcatgcctcgcgcccgtaagggcaacacgctccggaagggtggtcagcgccgtggaggagcaagaggtggaaacatacagaagaagca

SEQ ID NO: 457651 - DNA, 100 bp, Homo sapiens
attttttctcatggatgttcttcttcgagtatttgtagaaggactgtggatattcataaggagaaagtggcacgaagagagattggtattttgacaacaa

SEQ ID NO: 457652 - DNA, 100 bp, Homo sapiens
ccacgcagccggccaccgccgagacccagcacatcgccgaccagcttaattggcttagtgtcgacttcaataattggaaagactgggaagatgattcaga

SEQ ID NO: 457653 - DNA, 87 bp, Homo sapiens
acctcggagcttatactcctcccagtgacgggtctggagtgcgtgggggaccggctgttggcggccacaatggtgcgcatgaatgtc

SEQ ID NO: 457654 - DNA, 87 bp, Homo sapiens
cgtgaccgagagcgtgaccgagagcgcgaatatcgtcatcgttagaagtgaaactggaacgccaagctgaagaagaacgaatacgga

SEQ ID NO: 457655 - DNA, 100 bp, Homo sapiens
cggcgtggctgctgctggcaatctggatttcttcctgaagtccaggctccaagaacaagatgtctggagaagatccacttctttctatacccacatgtgc

SEQ ID NO: 457656 - DNA, 140 bp, Homo sapiens
cggctccatgcaaaatttaaccaaaatagaccctggagtgaaaccattaagcttgtgcgtcaagtcatgggtttagatgtagattctctggtcattgagcatatccaagtgaacaaagcacctaagatgcgccgccggac

SEQ ID NO: 457657 - DNA, 75 bp, Homo sapiens
caagaactgctggagacacactggatgtttttaccatggatcttatgaccatgacctggctaccttgagtctgtg

SEQ ID NO: 457658 - DNA, 75 bp, Homo sapiens
cagctacagactttcctgagtcagactggtgtcgttcagtatttctacattgaagactggcaattcgttaatgat

SEQ ID NO: 457659 - DNA, 83 bp, Homo sapiens
cccccagcaccctccagctccctacccatccgccaggagccctcttccttcaggattctttctactaatccagatacttgttg

SEQ ID NO: 457660 - DNA, 83 bp, Homo sapiens
cgatgggcgggggtagagccccgccggagaggctgggcggctgccggtgacagttggaatcgaagcctcttaaaatggcagat

SEQ ID NO: 457661 - DNA, 97 bp, Homo sapiens
gtggcaagatggtgttggaaagcactatggtgtggcgttcaccttggtcgtcctgatgttttacctcagactccacctttggaggaaatcagtgagg

SEQ ID NO: 457662 - DNA, 100 bp, Homo sapiens
gcaggcctgggaagccagccaggctttctgctcagcctaccacgctaccctccccctgctaagccacacccagcctggctccatcgattctaacaaccag

SEQ ID NO: 457663 - DNA, 100 bp, Homo sapiens
gtttctccggggcaaagcagcaaatgcattccacgtgtatcagggtcacctgtctgtgtgcccagtttgaagccgtcctgcagcatggcttgaagaggag

SEQ ID NO: 457664 - DNA, 75 bp, Homo sapiens
ctagctgaaggatgagcagcagctagccaggcaaaggtgttggggatgtcctttgcactgaccctgaactgccag

SEQ ID NO: 457665 - DNA, 50 bp, Homo sapiens
atgcctactgctccgcggtgtttgcaggcagaggaccctgcggccttccg

SEQ ID NO: 457666 - DNA, 89 bp, Homo sapiens
gctgacgggctccctgcccttccaggggaaggaccggaaggagaccatgacactgattctgaaaagaactgatgaccaccccaatttta

SEQ ID NO: 457667 - DNA, 82 bp, Homo sapiens
tgccatccagcaagacttcgtgatttttaacagagaaaaggcactgtgtttagtcttgagtcagaggaggaggaataccctg

SEQ ID NO: 457668 - DNA, 50 bp, Homo sapiens
aacaggtggagctcagtattctggaaggtggtgtggctcctggctaagct

SEQ ID NO: 457669 - DNA, 100 bp, Homo sapiens
ctcgatgcagccagtagcttggatccttgtgggcatgatccataatcggtttcaaggaaaagtgccatcagtactggcccgaccaaggctgctggaccta

SEQ ID NO: 457670 - DNA, 100 bp, Homo sapiens
ttttacgtctagatttccatgcccatggaaggtttcgacacagccccaactgctggtacctgagaaactggactatccacacctggattaggcagtgtct

SEQ ID NO: 457671 - DNA, 83 bp, Homo sapiens
actgcaaaggccaatgttggtgctggcaaaaagacgccacaggtcatcatctggatcatcccattctggttcccgttcaagtt

SEQ ID NO: 457672 - DNA, 50 bp, Homo sapiens
ctggaacacactcaactcaggacgggtccacctaatcatcctgtgaaagt

SEQ ID NO: 457673 - DNA, 100 bp, Homo sapiens
ctctggagacccctatcaaggatggcatcctctaccagcagcatgtcaagtttggcaagaggctgacccgcggctgattgagtccctctcccagatgctg

SEQ ID NO: 457674 - DNA, 82 bp, Homo sapiens
gcaggagaagctggagctcacggagaagaaggcctccgaccgtttgcctcagcatggagggcggggccgcggcagccacccc

SEQ ID NO: 457675 - DNA, 75 bp, Homo sapiens
gcagatattatcatagttgctgcaggacatgatccacatcgcggacaccaaggtcgccaggcgttatggggattt

SEQ ID NO: 457676 - DNA, 78 bp, Homo sapiens
catcagtgactcacaaatcagcaacacagaatttctgcaagtaattggtggtctgactgacagcttgggtaacttgaa

SEQ ID NO: 457677 - DNA, 138 bp, Homo sapiens
ggaagactgccacacctagactgatgcttattagtcatcaccgttattcctactaacgtcctgtgtcactgagaatctgtcactgcgaaggggatgaagagagccccctcatcacaccctgtcgctgcactgggacac

SEQ ID NO: 457678 - DNA, 101 bp, Homo sapiens
ggcctgacgtcggcggagggaagccggcccaggctcggtgaggaggcaagtcatagtataacatcagtaacaaaaatgagcatctcccttgccccagaagg

SEQ ID NO: 457679 - DNA, 90 bp, Homo sapiens
ggaaaacaccatcaagcagctggagcagattgagatggcacagaagctattgaactctgacctgggtgagctcatcaacaagatgaaact

SEQ ID NO: 457680 - DNA, 98 bp, Homo sapiens
cagacggattcatttagagctgcggaacaggacgccctctgatgccaccagcttgggctccccacggagggcagcaagtgggacttggggaacccggc

SEQ ID NO: 457681 - DNA, 90 bp, Homo sapiens
gaatgtgtggagatggcgactagtggacaacagaacaatattggaatggtgctgtccagactaccctcaagtttacatacagtgaaaaat

SEQ ID NO: 457682 - DNA, 75 bp, Homo sapiens
gtgccgtgtgtgcgtgagagaagaccagtctttcctctagactgtgccctgtccacggtgcctcctgcatgtcct

SEQ ID NO: 457683 - DNA, 90 bp, Homo sapiens
gatggagcactgtctgaaacatggcttgaaagcccaccccagcatcactgaaggggacaacagccacctccgctcaggccaactccaccc

SEQ ID NO: 457684 - DNA, 83 bp, Homo sapiens
caggaatacatggaagtccgggagagaatacacagagccaatttacaaccctgaagaatctccctatccctattttgtccccc

SEQ ID NO: 457685 - DNA, 83 bp, Homo sapiens
tcaacttcgatgttcttctaatactcctcctctaacatgtcagcgttattgtaatgcaaagcctggcagagagcaggtgtgtg

SEQ ID NO: 457686 - DNA, 97 bp, Homo sapiens
tctaaggtcgcccgggtcccaccgccgccaccatgcctcggggaagccgcagcgcggcctcccggccagccaggttgacaggactgaggtgattcgc

SEQ ID NO: 457687 - DNA, 100 bp, Homo sapiens
cacctcgtggagtcgggccggagccctgcagtggctcagacggttgcagggaccgccagagggtggcctggaggagatggtggaggagctcaacagcggg

SEQ ID NO: 457688 - DNA, 96 bp, Homo sapiens
gccatgtggaaaatgatgcttaatatcgatggatcagttcgacagcttagacaagcatacacaatggggaattgacttcttggaaagatatgccaa

SEQ ID NO: 457689 - DNA, 100 bp, Homo sapiens
cagaaaaacaacgatttatggatggagataagttcactttatccaaatgcatagatgccgtgatggtgctgggaaattcgcatttattcatgaatcgttc

SEQ ID NO: 457690 - DNA, 90 bp, Homo sapiens
tcctggacatgaagaccgaggggaccctgtttgggaagatgatggactacctgcagggctctggggagaccccacagacagatgttcgct

SEQ ID NO: 457691 - DNA, 101 bp, Homo sapiens
cagaacagcacgtaccagaggtggaagtccaagtcaaacgcagaaggactgcctcactgagcaaccaagactatgatacttgggtccatagtaatgatgtt

SEQ ID NO: 457692 - DNA, 110 bp, Homo sapiens
tggctgccctttaggatttgttagaaaggagacccgactgcaactgctggattgctgcaaggctgagggacgagaacgagcactattggaaataattatgaaaaatggaa

SEQ ID NO: 457693 - DNA, 97 bp, Homo sapiens
tcctggtgcgcattgtctttccatcgagagccaagcgacaaggagacatctggaacaaactggtacctattatatgctacttcttacatacagtgga

SEQ ID NO: 457694 - DNA, 100 bp, Homo sapiens
cccctacacgtctcggggcagcaccccctactctcaggactctgcctactccagcagcatccacaggatttactctaaataatttgggtgggacaacagc

SEQ ID NO: 457695 - DNA, 100 bp, Homo sapiens
tatgagtacctttgtcatttggaagaagcgaagagcctcagaagaggaaagtggaaagcctttccagtgtccaatatgtggtttggttattaaaaggaag

SEQ ID NO: 457696 - DNA, 82 bp, Homo sapiens
ccagaatgaaaaggtcactgccatctggagtggatggacacacctggttgctcagacagcagatactttctgagtgcctact

SEQ ID NO: 457697 - DNA, 90 bp, Homo sapiens
gccgggaagacgcggggaagaggaggcggaaaaggacgcaaagttctccggcgaggaatgctgaaatacttttaaagctgataaacctag

SEQ ID NO: 457698 - DNA, 75 bp, Homo sapiens
ctcgcacacagcaggatttaagagtggactgtggccaggctcccctggaccctgtctacctgccggcagccctgg

SEQ ID NO: 457699 - DNA, 75 bp, Homo sapiens
taatagctggcaaatttctgttccatcagcgtttgtttgagatccgtgctcagctcacagagcagatgaaatgcc

SEQ ID NO: 457700 - DNA, 98 bp, Homo sapiens
cccttctccacttgaccaggctggtggccttggataagggctgctcccaattccgcctggccgtcctggactggaaccagagggccatggacttgtac

SEQ ID NO: 457701 - DNA, 127 bp, Homo sapiens
ggccatcctggataacccggtggtgcagctgggcctgaccaacccgaaaacattgctagatgacagatttgaagatctggaagaggcaaatccattctcttttagagagtttctgaagaccaagaac

SEQ ID NO: 457702 - DNA, 100 bp, Homo sapiens
gtcatggtcctcactactctcattctcatattagtgtgtgcttggcactggagaaacaggcaaaaaaggatccacctgcagactctgagggcactgtcag

SEQ ID NO: 457703 - DNA, 100 bp, Homo sapiens
ggcggggggtgctcatcgcagtcctggacacgggggtcgacccgggggctccgggcatgcaggtttattaatgccagaagaagaatagtacagcccatga

SEQ ID NO: 457704 - DNA, 86 bp, Homo sapiens
gggacctgctggagacctgccatttccaggccttctgggcctgtagtggtggagacacgcccagtggatgatcctactgctcccag

SEQ ID NO: 457705 - DNA, 76 bp, Homo sapiens
ggctgagcagaggacgacatgttgcttttcgtggaggtcctgaggcacgtgaatggccaggatcagattgtgcccg

SEQ ID NO: 457706 - DNA, 82 bp, Homo sapiens
ttggcgctgcagaaccagatccgggagcacgtcatctccatcgaggcacatggattaattgatgtatgttgagtttatggag

SEQ ID NO: 457707 - DNA, 74 bp, Homo sapiens
gagagataacagcctcctccaacaaatccctcaacttgctaaaaatcaagtaactaggatttctacctcaaccg

SEQ ID NO: 457708 - DNA, 82 bp, Homo sapiens
ctttgatgtgcagaccgcccagatcttcttcaccaaaaatgggaagcggtgccaagacccggcagggtgctcttgagagcct

SEQ ID NO: 457709 - DNA, 100 bp, Homo sapiens
tatgacttctggccagatgtggaaccatatccgtggacctccatatgctcataagaacccacacaatggacaagtgtggacagaggactgcagaaaatca

SEQ ID NO: 457710 - DNA, 97 bp, Homo sapiens
tgaaggaccagagagggagccctgcctacatcagtcccgacgtgctcagcggctggtaggggagctgccccccagagcagcatggatgccccgcgaa

SEQ ID NO: 457711 - DNA, 75 bp, Homo sapiens
ggcgcaaccagccttctagggcggcggaggaattgaatgatctggcacgggaccctccagcacagtgttcagcag

SEQ ID NO: 457712 - DNA, 124 bp, Homo sapiens
ctgatttgcgtcttctgtcctggcataaggatcccttcactctcggaagtgttccgctatactgacttctgttgaaaccattcaaagctaaagacatggaccttcagcagtgtaagaagatatt

SEQ ID NO: 457713 - DNA, 111 bp, Homo sapiens
ttccaaagagatacagggcagaggaaaatgcaagaagactgatggagcaggcttgcaatattaaaagtgaaccagaggaaatgcctccagaagcaaagatgaggatgaaga

SEQ ID NO: 457714 - DNA, 98 bp, Homo sapiens
gaaagtggcttcaaagatccttccagcgactgggaaatgtcacagtcttcaacttttggaacagcgatcgtaatcaatcctgagaaagacaaagacat

SEQ ID NO: 457715 - DNA, 90 bp, Homo sapiens
acttttaaagatgcagaggatgctttgcagaaacttcataaatatatgcagttgattatggaagattcccacaagagtaccacgtcagag

SEQ ID NO: 457716 - DNA, 101 bp, Homo sapiens
caacctgtcaaagccttcttaattatgtctgagaaaaggcagctgcattcagcctcagcggaggacacgcctgtggtgcagttggcagccgagaccccaac

SEQ ID NO: 457717 - DNA, 90 bp, Homo sapiens
cctgctcagcttctagcaacaattttgcaaggcagatccagcgccgacaggatcttgctacattgcccaggctggcctcgaactcctggc

SEQ ID NO: 457718 - DNA, 97 bp, Homo sapiens
gcactctagatgccctcaactatgctctccgctgtgtccacagcgttcaaggggctgtttagaaatatatggccaaatctgtaacccggaaacagca

SEQ ID NO: 457719 - DNA, 100 bp, Homo sapiens
tttcttcaaacgctaaatcaagcttggaatgatcatcaaacagctatggtgatgattagagacatactaatgtacatgaggaggctgcggaggaggagga

SEQ ID NO: 457720 - DNA, 96 bp, Homo sapiens
aggggctcatgcagccgccaaggtcaaaatgcagatcttcgtgaaaacccttaccggcaagaccatcacccttgaggtggagcccagtgacaccat

SEQ ID NO: 457721 - DNA, 100 bp, Homo sapiens
ggtgcgggccctctggaccctggagtacaccccgcagcacagccgcgacttcaagatgagctttgatccaaaccttctccacaacaatggacataatggg

SEQ ID NO: 457722 - DNA, 97 bp, Homo sapiens
aaaggcctgggcctgagaactgaatcaggtgccgctacctggctgttcagctgtctcctgccatccctgtatttgctgccatgctcttccttttctc

SEQ ID NO: 457723 - DNA, 98 bp, Homo sapiens
agagactacaggagtttagccagaagatggaccagaccatcggcaattccggttctgcaaacggcatccaccagcaggacaaagctcagaaacaagag

SEQ ID NO: 457724 - DNA, 82 bp, Homo sapiens
aaaaaaacagatatcccaacatccttcccatttggtgccctggttgtcagatgttggaaagcagtaggacggaacatactct

SEQ ID NO: 457725 - DNA, 100 bp, Homo sapiens
cgtatcctgactctgatgctgcaggcctggagctgctgaagactgctattgggaaagctggctacactgataaggtggtcatcggcatggacgtagcggc

SEQ ID NO: 457726 - DNA, 100 bp, Homo sapiens
tttcaaggagtttgggaaaaaccgcgaagtcatggggctctgtcgggaagattgcccgtgaggcagaggctgccatctaccacttgcaattatttgagga

SEQ ID NO: 457727 - DNA, 100 bp, Homo sapiens
agagcaagcagggaaagagagcgccaggtgcttagcagagttttgcggcctccaggtggtggatccaatttttcattaggttttgatgaaccaacagaac

SEQ ID NO: 457728 - DNA, 82 bp, Homo sapiens
cagcgctctcgtcttctgcggctctcggtgccctctccttttcgtttccggaaacatggtaactaggatttctacctcaacc

SEQ ID NO: 457729 - DNA, 75 bp, Homo sapiens
gagatttttctcctatttcagcagttggccacaacttcattgctgggaaaagatgccttcaattaagttgcagag

SEQ ID NO: 457730 - DNA, 50 bp, Homo sapiens
ggaaatgtcatccgatggcacaatcaggacaatctctatgggaagcagaa

SEQ ID NO: 457731 - DNA, 82 bp, Homo sapiens
ggggtcttgcatctgtaagaatggaattgattttgcttttgcaagaatctcagcagtggccacagatgtctttaattccaaa

SEQ ID NO: 457732 - DNA, 83 bp, Homo sapiens
ccaaggaggagtacaaggacatcctgcgcaaggccgtgcagaagctggtacaggacgagaacgtgcgcggggtgatcaccatg

SEQ ID NO: 457733 - DNA, 104 bp, Homo sapiens
ccttctctccgccagcttgcccagaaatacaactgcgacaagatgatctgccgcaagttcctggagacggtggagttgcagatcagcttgaagaactatgatcc

SEQ ID NO: 457734 - DNA, 75 bp, Homo sapiens
gcgccgccgcccccgggctcgcggcctgcaggctgaccggttccctgatgtgttacctgcttctgctactgatcc

SEQ ID NO: 457735 - DNA, 90 bp, Homo sapiens
tacgcttcgaggacttcacggagctctggagaaacatgaagttcgggactatcttctgacctcccacctcctgccccccatgaggcagct

SEQ ID NO: 457736 - DNA, 90 bp, Homo sapiens
gttcttcgacattgccgtcgacggcgagcccttgggccgcgtctcctttgagaatgccagctgatgaagaccgagaggccgcgacccaac

SEQ ID NO: 457737 - DNA, 50 bp, Homo sapiens
ctagaattcacacagagccacctagaaatttgcctgtaatggtactgtga

SEQ ID NO: 457738 - DNA, 83 bp, Homo sapiens
agttatccaagatggcaataaaccacactggtgaaaaagaagttctaggttggaaagggcaaagaaattacaagaacagcgag

SEQ ID NO: 457739 - DNA, 100 bp, Homo sapiens
tgacacttcgggtctctcacagaggaaggtgcggctctatgagtggacaacagagaaggagctgcgcactgagtgcaaccactacaacaacatcatggcc

SEQ ID NO: 457740 - DNA, 100 bp, Homo sapiens
gcattacaagtgttacctgggactacacttgctgctttgaaggatgaagttgtatctgttgaaaatgaactctcagaattgcaagaagtagaaaaaaaac

SEQ ID NO: 457741 - DNA, 89 bp, Homo sapiens
gggatgtgagcgctgagcccttggcaggcagggtgcccagtctacccaggatgaggtcgctgcatctgccatcctgactgctcagctgg

SEQ ID NO: 457742 - DNA, 100 bp, Homo sapiens
acgtccactgcaccctgcgcgagaaggaagatgagaatgtgcctactgctcctgatcctccaagtcaacatttacgtgggcatgggacaggcttttgctt

SEQ ID NO: 457743 - DNA, 74 bp, Homo sapiens
gctcagggctgcggccgcccgaagaggagagagcgcgggcctctaggaaggtttggtgcacctcgatttggagg

SEQ ID NO: 457744 - DNA, 97 bp, Homo sapiens
gcacgcagctggagctgcagaagctggtcctctggcttctgtccctgctcagtcggccaagaagccctgcccagagcttgtggacaaatgtatagga

SEQ ID NO: 457745 - DNA, 75 bp, Homo sapiens
tggcggagaaggatgacaccggagtttgacgaagaggtggtttttgaggatcacctgctgttaccagctaccacc

SEQ ID NO: 457746 - DNA, 75 bp, Homo sapiens
tgaaaattgttctgctgatttacaggtttctgcaaagattgggtttttgaagtgtaaaacaaaggtgtatccaga

SEQ ID NO: 457747 - DNA, 95 bp, Homo sapiens
gcagaacagaacagataagaaaagagttgagcattaagggtcacctgtctgtgtgcccagtttgaagccgtcctgcagcatggcttgaagaggag

SEQ ID NO: 457748 - DNA, 100 bp, Homo sapiens
cccggccaacgacacatttgacattgatccgatggtggttactggccgattccgagcagctgtgcccagtggggcttccacgggtatctatgaggctctg

SEQ ID NO: 457749 - DNA, 75 bp, Homo sapiens
cttctgcctcttgatctccgccaccgtcttcaggccagccaccaaaaccctcaacaggggcatctctgagttcat

SEQ ID NO: 457750 - DNA, 50 bp, Homo sapiens
cagcctcggctacagtagctacagtagatggacttatgtcctttgctggt

SEQ ID NO: 457751 - DNA, 100 bp, Homo sapiens
tcagcatcgacagcagtggcagaaacgtcaggccgtagccgaagcctcggaaggagcggcccacggcaaagattggctctaccagtgcacctggacaggg

SEQ ID NO: 457752 - DNA, 100 bp, Homo sapiens
gagaacgtcagggctcgttcccaagtctctttccagaggccaggctttatgggagcatgggttaccagcgacgcaccctaaatggctattcctacaaagt

SEQ ID NO: 457753 - DNA, 100 bp, Homo sapiens
ctctcttacaacaaaatggttttccactccattgttgttagaagccaggcacgtgacacaagctgacctcaagagctccacgttttggcttcgagcaagt

SEQ ID NO: 457754 - DNA, 82 bp, Homo sapiens
cacgcaaccccagatccatttacactttacaaatatatacagccctgctctgggacacacctccattggatttaaaagacag

SEQ ID NO: 457755 - DNA, 82 bp, Homo sapiens
cgctgacggcgactgcgggaggccagaattttgaaaaccaacctggacaaggttcagatgccagtaacttcttacagcaatg

SEQ ID NO: 457756 - DNA, 100 bp, Homo sapiens
gccgagaaggagggaggggaaacacaaagccggctacgcgctgcgagagtgtgaacatggctacgcctcttcattcccgtccatgccgagcccccgactg

SEQ ID NO: 457757 - DNA, 100 bp, Homo sapiens
gtgaacaacccgttcttgcctcaggccagtcgcctccaggccaagagggatccttcacccgtgtctggcaaaacaacgagtggatgagaaacccagcctg

SEQ ID NO: 457758 - DNA, 100 bp, Homo sapiens
ccgggcgcagcgagaggatggtcatccgcgtgttcatcgcctcttcctcgggcttcgtggcggctcagtagatgaaggcgtttctgagggcttgcctaca

SEQ ID NO: 457759 - DNA, 98 bp, Homo sapiens
cggccgcggctgtggtggttcccgcagagtggataaagaactgggagaaatcagggagaggcgaattggtgcaacaccggaggatttcagcaacctcc

SEQ ID NO: 457760 - DNA, 101 bp, Homo sapiens
ctccaggtgcaggaccctgccatctatgactccaggtcttcagcacccacccaccgtggtacaggtgctggagaatctggtaaaagcaccattgtgaagca

SEQ ID NO: 457761 - DNA, 74 bp, Homo sapiens
ccggcgccgctctccgagctcgatccgctgctcgcacgggagccagctgggtgaggtcatggaagaagtgacaa

SEQ ID NO: 457762 - DNA, 101 bp, Homo sapiens
gagaattatcactttggctggacccactaatgccatcttcaaagcctttgctatgatcattgacaaactggaagaggaaccactcgttttgactattattt

SEQ ID NO: 457763 - DNA, 75 bp, Homo sapiens
gaaaaggagaaggcagagaaaaagaaacgaggaccaaagccttcaataaaccgagaaaactggtgtacaatagag

SEQ ID NO: 457764 - DNA, 76 bp, Homo sapiens
ccatgcacttgttgcagaaacagccaagattcacagtctgagaatgaggcttcaccagtaaaacggccacgactac

SEQ ID NO: 457765 - DNA, 74 bp, Homo sapiens
aaccttcgatctcctgacgaggagaatgaagttgaagaggtaaaagaggagggtccaaaagagatgactttgga

SEQ ID NO: 457766 - DNA, 74 bp, Homo sapiens
cagagacaacaccgagtatgagaagtgctgctacccccgtatgatgatgccactgtgaatggtgctgccaagga

SEQ ID NO: 457767 - DNA, 83 bp, Homo sapiens
ggcaagcgcagcaacaacagagagcacgtgttggaatcgaagcctcttaaaatggcagatgacttggacttcgagacaggaga

SEQ ID NO: 457768 - DNA, 76 bp, Homo sapiens
acctccaaggaagccacgtgcagacatctacaaccttcgatctcctgacgagccataggaaaaggatacagagtag

SEQ ID NO: 457769 - DNA, 104 bp, Homo sapiens
aacaagatcccgccgcggtggctgaactgtccccggcgcggccagccggtggcaggttttaaaatcaaagatgggaaaatcggagaaaattgcccttccccatg

SEQ ID NO: 457770 - DNA, 83 bp, Homo sapiens
gcgtcgggtgggctttcgcccgcggctcctgagggatcggtctcagccgcgcgggattctgaaagactaatggagcaacaagg

SEQ ID NO: 457771 - DNA, 100 bp, Homo sapiens
gcgccgcagctgcccaggccggaccgggccgggcgcccgcaggccgtcatttccctgatggagatggggttcgacgagaaagaggtgatagatgccctca

SEQ ID NO: 457772 - DNA, 82 bp, Homo sapiens
cctcgtctgaaatggctgcctcccagtgtctctgctgctcaaaatttctcttccaggcagcacacttctgcttttgttcctt

SEQ ID NO: 457773 - DNA, 75 bp, Homo sapiens
gggtgaagaagtatgatcgctcctccctgcggaccctggggtcagaaatggtggagtcaatgaagaaagtagcag

SEQ ID NO: 457774 - DNA, 75 bp, Homo sapiens
gaggcaaggagctaaagcagcgtgcgttcagccctgggaacaaaatccagtctcatagcagaggagaatataatg

SEQ ID NO: 457775 - DNA, 90 bp, Homo sapiens
tgtggtagaggcggaggctcaggcagcttgagaaagaacatactggtcgtcttgttataggagatcacaaatcaacatctcacttccgaa

SEQ ID NO: 457776 - DNA, 90 bp, Homo sapiens
atttgcctcagatggagttacaggctcatgctgaagattcggttatggaccatcatttccggaagccagcaaatgatataacgtctcagc

SEQ ID NO: 457777 - DNA, 98 bp, Homo sapiens
gttggcgagaatcctgcaagtcactcctatgtcctcaacaaaaccagggcagctgcagttgtggacttttggaacagcgatcgtaatcaatcctgaga

SEQ ID NO: 457778 - DNA, 101 bp, Homo sapiens
tggacagatgtgcctgtctgtcgcaggctgaggagcgccaggtcaacagcgacctcatttacattacagctaagaaagatggcactcatgtggtggaaaat

SEQ ID NO: 457779 - DNA, 100 bp, Homo sapiens
gactgcttattgataacagctaaggtattcctggaagcagagtaaataaagctcatggcccaccagctagaaagagtttgccagatccggcccggtgcct

SEQ ID NO: 457780 - DNA, 82 bp, Homo sapiens
tcaggcaaagaagttgggaatgcccttctaaatgttgtcctaaaaagttcagtgatgttgagatgggagaaattatcatggg

SEQ ID NO: 457781 - DNA, 90 bp, Homo sapiens
atctgcttaggattcactgcacatcgaattaagagagcagaaggatgggaggaaggtcctcctacaggttggaaagggcaaagaaattac

SEQ ID NO: 457782 - DNA, 74 bp, Homo sapiens
tcctgggccgcctggcggccatcgtggctaaacaggtactgctggcccagtacctcctgaccctgctggagaca

SEQ ID NO: 457783 - DNA, 75 bp, Homo sapiens
tggagaccatcatcaacaggctagtggaagcagaggttgatctttgccggaaaacagctggaagatggtcgtacc

SEQ ID NO: 457784 - DNA, 97 bp, Homo sapiens
aaacgtcagaaatccagtactaaactttctgagcttcatgacaatcaggacggtcttgtggcgtttgcaatggctgctactgtgaacttggaacttg

SEQ ID NO: 457785 - DNA, 50 bp, Homo sapiens
ctgactttcagctatggaatcgatgctgctgttaattctggagaactgtg

SEQ ID NO: 457786 - DNA, 87 bp, Homo sapiens
ctgcccgggccgccgtggccgctgctgctggcgctgtgcggctgcccggcccccgccgcaggaagctcttcgtgggcggtcttgact

SEQ ID NO: 457787 - DNA, 82 bp, Homo sapiens
caacaccgttcccccagccgggctgatggaaatcctgtatgaatgtggaagccattagcagagtaattgctgtctgttacca

SEQ ID NO: 457788 - DNA, 90 bp, Homo sapiens
gccgtgaagcaagtgcagatagatggccttttttaacagtgtatgccagggaacacacattctctttcgagaattcagcttcgtccaagc

SEQ ID NO: 457789 - DNA, 73 bp, Homo sapiens
gaggattacctttccaagccaatgcccaagacattataaacaaagtgactgagaccgaagatgatagtgatag

SEQ ID NO: 457790 - DNA, 102 bp, Homo sapiens
aaggatatcgacgtcgtgatccagaagtccagagctgaggactgcctgtttgcaggtgacttaagagattaaaattaatttggttgctgttggttctgaaca

SEQ ID NO: 457791 - DNA, 100 bp, Homo sapiens
tggacgtgctcgcgcccctggtcctgctgctcggggtccgcgcggcctccgcggagccagctggtgtcgaggacaagagaaccacaagccgtggccagtc

SEQ ID NO: 457792 - DNA, 82 bp, Homo sapiens
gcggacccagcacgcctgggccgggggctgcagcatggctgaaggggatgctaagggagataaagcaaaggtgaaggacgaa

SEQ ID NO: 457793 - DNA, 100 bp, Homo sapiens
ggtggttgccactcacctgaggatacttatcaccagaccccaccacccaccttctcctttcgagaaaggatgactcacaagagtcttgtctacctctggt

SEQ ID NO: 457794 - DNA, 74 bp, Homo sapiens
gctctcttggcagccttcctgatttctgcagctctgtgtgaaggctgaactcacgggaatcaaatggcgtaggt

SEQ ID NO: 457795 - DNA, 100 bp, Homo sapiens
aagcttgacggcttggacgaagatggggagaaggaagcgagactcatacgcaacctcaatgatgacaagagcacctcaaaggcagcagcctcaaggagca

SEQ ID NO: 457796 - DNA, 82 bp, Homo sapiens
attcaaaaatgatggcctttttggaaaagagtcaggaacaagaaaatcatgctacattagaaaacctcggatcaattctcag

SEQ ID NO: 457797 - DNA, 100 bp, Homo sapiens
tgggagtaggtcttcgaaacttgtgtggccagagctcccagcccctggttcctcaagccaggacctacgcacctgttgtgagtggtgttatagttctgca

SEQ ID NO: 457798 - DNA, 87 bp, Homo sapiens
agaagtaccttgcagagagaaatgaaataacctttgacaagattttcaatcagaaaattggtgacaaccaaagccaagcaactgaag

SEQ ID NO: 457799 - DNA, 98 bp, Homo sapiens
ggcaggagagtccggccgcgacaggacggttgctatcaagatcatagataagacccagctggatgaagaaaacttgaagaagattttccgggaagttc

SEQ ID NO: 457800 - DNA, 101 bp, Homo sapiens
tatttcagcacttatcaaaactgccagagtggaaataaaccgcaaggatgaagaaataagtaatcttcaccaaagggccaagaccagcttcaagtctccat

SEQ ID NO: 457801 - DNA, 98 bp, Homo sapiens
ttttactattagcccatcaagaaatgaagaacgagattcagacacagacttgtgtatgcggatacctgcttcagtaccatcaagttaaaagcagaaga

SEQ ID NO: 457802 - DNA, 88 bp, Homo sapiens
ggtcggcgccgagtgggaggatggcggaaggaccatcccgcggtcatcaagcgacgcttcaccagcgtcctggtggtgtccagtctct

SEQ ID NO: 457803 - DNA, 100 bp, Homo sapiens
tccatatcgtgcattcagagaactgggtggtggataccaagggtttggtggacttccgagatgtggcccttgcactagcagctctggatgggggcaggag

SEQ ID NO: 457804 - DNA, 101 bp, Homo sapiens
gaccagaaggcgctgctggagttccgcgacaccatcttcgacaacatcctcaaggtgctggagaatctggtaaaagcaccattgtgaagcagatgaggatc

SEQ ID NO: 457805 - DNA, 89 bp, Homo sapiens
ctgtgaggagctaatccctgaatatctgagacctgctggaactgggaaaacagagtctgtcaaagctcttggccatcagcttggacggt

SEQ ID NO: 457806 - DNA, 75 bp, Homo sapiens
aggagaggagccttggttctcagaggaggaattctcaaaccagagtcacccaagcatcagtgtcattccaggacg

SEQ ID NO: 457807 - DNA, 101 bp, Homo sapiens
aaggtggaagattcttccaaggaaccagtgcgaagggttaagtttagagcaagttgacatcttatggcattgtttagtagaagattctgaatgttatgatg

SEQ ID NO: 457808 - DNA, 97 bp, Homo sapiens
aagcagaaaaagagctaaagagaaaacaagatgacgctgaccaggacatgatgatggcagggatgtctacaggtgtatccagcagctccaaagagac

SEQ ID NO: 457809 - DNA, 98 bp, Homo sapiens
ttgaagtgggagcccagttggaagcccgggaccgtttaaaaaactgtttgtgatgtctggctggggtataggttattcatttcgatgtgacattgttg

SEQ ID NO: 457810 - DNA, 98 bp, Homo sapiens
aattgatataatgaagactagttttccaggccctggccaacgtcaacattgggagcctcatctgcaatgtaggggccggtggacctgctccagcagct

SEQ ID NO: 457811 - DNA, 51 bp, Homo sapiens
cctcccaagtagcttggattacagagcaaatttttcagaacataaaacaag

SEQ ID NO: 457812 - DNA, 82 bp, Homo sapiens
tatgaggccagcaagcggaggtgctgggagcgagttggctggtcaaaatgcagatcttcgtgaaaacccttaccggcaagac

SEQ ID NO: 457813 - DNA, 96 bp, Homo sapiens
atattcaccagatctgataaatgcaaagtagttattcaattcttctacagacatgcccatcatcttcgtttcggacagagcaaacagcaacaagga

SEQ ID NO: 457814 - DNA, 98 bp, Homo sapiens
cgccgccccgcgggggagggcggagctggcgcggcccctagctttctccttctggtgtggggcccgaggtgagcgtcctgaccaccctggagcgtagg

SEQ ID NO: 457815 - DNA, 82 bp, Homo sapiens
tctcttagcagcgcgcggagaagaacggggagccagctgcagccgctccggcctccttgctgttcctgggatacgccacact

SEQ ID NO: 457816 - DNA, 75 bp, Homo sapiens
agctgaggccctatgtgcccctcttctgcagcgtcctcaccaagcctcacaccttaaacagcaccagcacctcaa

SEQ ID NO: 457817 - DNA, 83 bp, Homo sapiens
gccggaagccctgagggcagctgttcccactggctctgctgaccttgtgccttggccaagtcctgtatctgccatgtctgtgg

SEQ ID NO: 457818 - DNA, 100 bp, Homo sapiens
ctctcatacaggcgggcgccagtgcatcttctagtttttcagaagaagtgaagtcaagatgaagaaccatttgcttttctggggagtcctggcggttttt

SEQ ID NO: 457819 - DNA, 74 bp, Homo sapiens
ctcccgcaccatggaggaggacgacagctacgttccagggtctccctccactgctgtagtaacccgggtccggg

SEQ ID NO: 457820 - DNA, 100 bp, Homo sapiens
cgtcgaggaggcagccgttctcgctctcgttcccgttccaaatctgcagaaaggggtgagcccctccagactccgaataggagatcaagagtttgattca

SEQ ID NO: 457821 - DNA, 83 bp, Homo sapiens
ctgagaactttgagagaccgaaaaagaaggacgtatgctctacaaggtttaccgacaagactgtgaaactttcgggatggtgg

SEQ ID NO: 457822 - DNA, 82 bp, Homo sapiens
ggcgcctcaggcacctcggcccgggttcgtgctggccgtgggcagcgccgtctttgatgccatgttcaacgggggaatggcc

SEQ ID NO: 457823 - DNA, 75 bp, Homo sapiens
gtggccaccgcggcggagcccgagtaccatgcggagaccatcaagaatgtgcgcacagccacggaaagctttgct

SEQ ID NO: 457824 - DNA, 90 bp, Homo sapiens
atttgctggtgtctacagagctgagtccattcacactggtttggaagttgcaatcaaaatggattcttctcatcgcagtgctccaggcag

SEQ ID NO: 457825 - DNA, 100 bp, Homo sapiens
ggggcgctgtgtgtacatcacccccatggaggccctggcagagcagccatgcctccgccgcagggtgacgtgaccgccttgttcctggggcctccgggct

SEQ ID NO: 457826 - DNA, 100 bp, Homo sapiens
gaggccatgctcaacttctgtgaaaaggagaccaagaaacttatgcagagggagatgtccatggatgccaaggcgaacctagacaagaataagcagacgc

SEQ ID NO: 457827 - DNA, 100 bp, Homo sapiens
ggacccatggtttccagtgcagcgcggagtgggcgatgccagcgtgccagggatgatcatggtgattttactgctgcttgtggctatcgtggttgttgca

SEQ ID NO: 457828 - DNA, 50 bp, Homo sapiens
tggaaaatgccaacgccgtgtctgaaggctgaccccgcactacatctacc

SEQ ID NO: 457829 - DNA, 74 bp, Homo sapiens
catgaagaaagacgtgcggatcctgctggtgggagaacatccttgccagcacattacagaatatttttgttgaa

SEQ ID NO: 457830 - DNA, 83 bp, Homo sapiens
gtcccagcgagggctgagccgggcggtgggaggctgttcggctcttgaatcccagcgatgaaaccaggaactcactttcccgg

SEQ ID NO: 457831 - DNA, 75 bp, Homo sapiens
gtattcttgaaggagagcttgaagcaagggaccttgttatagaagccttaaagatggattttggtatttggaaag

SEQ ID NO: 457832 - DNA, 101 bp, Homo sapiens
cagggaagaagcgcagaaaactcctccagcagatccggcttgcccagaaagagaagacagccatggaaggatctggttctgctgccggagaaggcaaaccc

SEQ ID NO: 457833 - DNA, 99 bp, Homo sapiens
cttacattaacattcttagcagaatggggtgatcgctctcaactaactacaattgtattggcagctagagaggctatggagttactagtagagaaagca

SEQ ID NO: 457834 - DNA, 75 bp, Homo sapiens
agtgctttgcaggactcctcaacaagcaccctgcagggcggagcagcatggtgtgtggacagcacgggactgcga

SEQ ID NO: 457835 - DNA, 82 bp, Homo sapiens
gccctagtgctcagataccatcctctcagctcctgccttacagcccggtaagcaagctgtgtgggaagtgcagccccactga

SEQ ID NO: 457836 - DNA, 90 bp, Homo sapiens
gaggaagcacaccctgtcctatgtggacgttggcactgggaaggtgaatgaaaactttgccattgatttgatagcagagcagcccgtgag

SEQ ID NO: 457837 - DNA, 100 bp, Homo sapiens
ctttcttcaaaatcactgcaccattaataaacaaaaggaaagaatattcagagagaagaattttagggagctcgtgtaaatgccaaggacaacatgtggc

SEQ ID NO: 457838 - DNA, 102 bp, Homo sapiens
gcacttcgtattcaaagtgggaaaccgcttccagacggcgcgtttctatcgggacgtcctggggatgaaggacagtcattttgtttactcattcagccctgt

SEQ ID NO: 457839 - DNA, 90 bp, Homo sapiens
cggggtttggtaccgagcggagaggagatgcacacggcactcgagtgtgaggtagaacgtcatgacatgaataccttaagcctgcccctg

SEQ ID NO: 457840 - DNA, 100 bp, Homo sapiens
catatgcaccagcacgcctggctaagtcacgaacgagatcacgccggtgctgtcgtactcctacctggccgtgctggtgcccgtgttcctgctcaccgac

SEQ ID NO: 457841 - DNA, 78 bp, Homo sapiens
gctgctccccggtgcacccgcaacaggcgttttgcaatgcagatgtagactcgctctccgtctccagcaatgacgcca

SEQ ID NO: 457842 - DNA, 91 bp, Homo sapiens
attggatttaaaagacagtcctcgtcagcactgactttcagctatggaatcgccccagtggacaggaaagctaaggcctcagcgatgccgg

SEQ ID NO: 457843 - DNA, 100 bp, Homo sapiens
acaataaagaccggaagctgagtttttatcctgctttctcctgctcaagacagccacacgaacacggatctccccccagtgtcagagcagatcatgcaga

SEQ ID NO: 457844 - DNA, 75 bp, Homo sapiens
cgagcccgaggacatggagatggaagatgttctcagtgcagctgagtcttggtgagcagacatgggaatccgaag

SEQ ID NO: 457845 - DNA, 100 bp, Homo sapiens
ccaccaccacctttcccagggtgatcatgcaggaagtagaacatgcattaagttcaggtccttccatagtgacgccccccaaggacatctggaatgtcac

SEQ ID NO: 457846 - DNA, 100 bp, Homo sapiens
gcggattccagccccgagcgggacagcgcggcggggagcgacgaaataaaagccgccctcattctaggggagaatataatgtttacagcacctttcaaag

SEQ ID NO: 457847 - DNA, 90 bp, Homo sapiens
ctgtattctaacttattcatctcctatggaaggtgggagtcaatcattttgacaagtctcctgaaaggaacagctagcaggaactgaaac

SEQ ID NO: 457848 - DNA, 74 bp, Homo sapiens
atttgggtccaactgtgaagccagatgataaggaaaactaggtgtctgtgttcactccaggctgaagttacagg

SEQ ID NO: 457849 - DNA, 83 bp, Homo sapiens
aacctcaacggagggctgcggagatcggtagcgcctgctgcccccaccaggtgtggaaacaggaagagaactagaactggaag

SEQ ID NO: 457850 - DNA, 83 bp, Homo sapiens
ctcccacacggattctgtgtagaaatccacgctgaagaaatcaggggagaaacccctgcttggtggaagcctgatggaatatg

SEQ ID NO: 457851 - DNA, 87 bp, Homo sapiens
cccaaggtcacgccatttccaggacagcaccctggtgactgagcgaggagccaggaggaactctctcccagtccgcctttgttgaat

SEQ ID NO: 457852 - DNA, 100 bp, Homo sapiens
ctgggtctcagccccgcgtacggcctttcacgagtcttcaagccttcaggagtcgatagcagcagttggtgacgagatggcactcagaaacggcgttgac

SEQ ID NO: 457853 - DNA, 120 bp, Homo sapiens
tgtttttctgttttgcctgaatacatgatttaaacaagagatttccacagaaggtgtctgacttccagcaactgctggcctgtgccagggtgcaagctgagcactggagtggagttttcc

SEQ ID NO: 457854 - DNA, 87 bp, Homo sapiens
agatttattgtgaacactctgaaagacggaagagaccatgaaacgtatggtgcaatagccctacttttggtgggaaaaatatacagc

SEQ ID NO: 457855 - DNA, 101 bp, Homo sapiens
gttaactttggtgatattttgatctgccgtgatcaatatcaggaaaggccccatcttcccttcacacctgaacccccagtcggatcttcaggcccaggata

SEQ ID NO: 457856 - DNA, 110 bp, Homo sapiens
cgaggacctgaaggacgcgcaggagaagctggagctcacggagaagaaggcctccgacgaggcaagtgaggcctatctggttggcctttttgaagacaccaacctgtgtg

SEQ ID NO: 457857 - DNA, 73 bp, Homo sapiens
agcaactggatggcagaagcagaggtggaagaagagcccgaagaagaacctgaagagacagcagaagacacaa

SEQ ID NO: 457858 - DNA, 82 bp, Homo sapiens
cggccggagcgggcggctgagacaaaggcgacgacaagttggatggcttgaggactggtactaaaaggaaacgtgactggga

SEQ ID NO: 457859 - DNA, 100 bp, Homo sapiens
actttttctactccagtggcgagaagcccagggccttgctgccgccatgactgaggaatcagaggagacagtcctgtacattgagcaccgctatgtctgc

SEQ ID NO: 457860 - DNA, 100 bp, Homo sapiens
tcaagatgatttatggtaataagccaatggtgatcaaaagcttcaggacgctggtgagtcactgcggaggagccgaacactgaccgcgccgtccccgcca

SEQ ID NO: 457861 - DNA, 75 bp, Homo sapiens
atcgaatattcagcaagggtgcatctgagataattctgaaaaaaaaagaggcacagttagatgaagaaggacagt

SEQ ID NO: 457862 - DNA, 100 bp, Homo sapiens
gaaataccagtccccagtgagggtgtacaaatacccctttgaattaattatggcttaagagatgctaaaaaccttgtacctatggaccccaatggcctgt

SEQ ID NO: 457863 - DNA, 74 bp, Homo sapiens
ttattactgtcctcctgcacttgtaaccattacaaacagacctgtcatttactccatcctttatagtgatgcta

SEQ ID NO: 457864 - DNA, 102 bp, Homo sapiens
gcttaagtccctcaccagcaagttcatgaccacattcagtcagctccgaggttccgctgcatcgtgcaccctttccgcgagaagctgaccctgcggaaggcg

SEQ ID NO: 457865 - DNA, 99 bp, Homo sapiens
cagcacttccggtcacgccatcgttgctgccttcttcgtcaaggtatcctacctcctggaagggggcagcatggcccatgaagacttctgtggacacac

SEQ ID NO: 457866 - DNA, 100 bp, Homo sapiens
ggcaggcgctggttggacagacaaaaaatgatttggtggtcagcttgcctgaggaggcaacggacagccaagacgtagatccatccaagacttgactgta

SEQ ID NO: 457867 - DNA, 82 bp, Homo sapiens
tccttcagtgagcaaggcatcaacgagtttctcaggaacaagcacatcatgattgacttggggactggcaacaacaacaaga

SEQ ID NO: 457868 - DNA, 75 bp, Homo sapiens
gtggaatctgcagaaatagaagtggaatccgcaggctggaggctcccaggggaggcaaacgcctggccctgccct

SEQ ID NO: 457869 - DNA, 75 bp, Homo sapiens
ttgcaaagggcacgtatagcattggtaaagaacgatcgtccagtggaggtcagcttttgccaactgttttcaaat

SEQ ID NO: 457870 - DNA, 96 bp, Homo sapiens
atcagtcttcccgcgtccgccgattcctcctccttggtcgccgcgtccttggctggcgtgctgtgtataagatggcagacgtagcctgcaaatgcc

SEQ ID NO: 457871 - DNA, 75 bp, Homo sapiens
ccggaaggttgcagccgcaggagccccggaggcccaggacacaggcaattaccagctctggctgggtcgccacaa

SEQ ID NO: 457872 - DNA, 100 bp, Homo sapiens
ggcggcgtgggcatgggcatgtacaacaccgacgagaaggaatggatgaagggaaggaaccgcagaagcagttggaaggagattgctgtagtttcatcac

SEQ ID NO: 457873 - DNA, 97 bp, Homo sapiens
ggaggggggcagctggagcctcaggcggcagcgcttctagaatatgcttttaaggctattaaccagggtggccttacatcagtagctgtcagaggga

SEQ ID NO: 457874 - DNA, 139 bp, Homo sapiens
acggctcgatgctggacatacttgaccggggtcatcctagggaaaacactatcctctgagatcccagatcatgaggtgatcagcgagtttgaggcctctcccgactcgttttcctacagaattcccaacctgagtagga

SEQ ID NO: 457875 - DNA, 74 bp, Homo sapiens
gaaatcccagatggattattagctgatgggagcaaagaaggatggctgatcactgggaaactgcacctcgtcac

SEQ ID NO: 457876 - DNA, 100 bp, Homo sapiens
gaacagcctccgcggctccggggagaaggaaataatgaagatgtttcattttcaagaccagcagatcttgaccttattcagtcaactccctttaaacccc

SEQ ID NO: 457877 - DNA, 100 bp, Homo sapiens
tcttcctcttcgcttgcagatacccccgagatcggaatgggtaccacagaccatgtcatcgtcctggcgtccacgaaccgagctgacattttggacggtg

SEQ ID NO: 457878 - DNA, 100 bp, Homo sapiens
ctgcagaaggtctctggagacatcttcagcaggtccttttggtgtgaaccatggggtggaacttcactcagatgtgatagagtatgcaaagcagaaactg

SEQ ID NO: 457879 - DNA, 98 bp, Homo sapiens
cagcgctgcagtgaattttccccccaaactgcaataagccgccttccaagtattaaaggtggaagaaggtccatatctttttctgtgggtgcttcaag

SEQ ID NO: 457880 - DNA, 90 bp, Homo sapiens
ggtacagctccatgctcctcgatatcagtctatgagaaggtgttgacctaaccaatgaagaaacaactgattccaccacttctaaaatca

SEQ ID NO: 457881 - DNA, 75 bp, Homo sapiens
atcaatgtctggaacatctgtcccttgttcaaaggaggagctcaagcacttcgaagccaaaatcgagaagcacaa

SEQ ID NO: 457882 - DNA, 101 bp, Homo sapiens
agatggagctttgtctggacatctgggtgaagttttaataagagatggatttataaaagctattggtcctgctgatgttattcaaagacagttttctggag

SEQ ID NO: 457883 - DNA, 82 bp, Homo sapiens
cgccgcctccccgcggccccggcgagcagccgccgcccgccgcacccatgagggggatatgagactttctactcggaatatc

SEQ ID NO: 457884 - DNA, 100 bp, Homo sapiens
agacgccgtccccgccttcattgagcccaacgtgcgcttctggatcaccgagcgccaaggagtggctggcgtgcccagctccaacccaacccccctgccc

SEQ ID NO: 457885 - DNA, 75 bp, Homo sapiens
gcttatcccagctaagctccagggttcaagcactgtcttcctgttggccctgacaatcatagccagcacctgggc

SEQ ID NO: 457886 - DNA, 50 bp, Homo sapiens
gaagaggaggttgcccagaagaaaaaggttcctcatcaagggaagtgtgg

SEQ ID NO: 457887 - DNA, 74 bp, Homo sapiens
tcgacgaccgacagggtggtgaaaggtcacaaggcacttaaagcattgttgaggtcattggtaggtcttcagga

SEQ ID NO: 457888 - DNA, 97 bp, Homo sapiens
ctggtctccattatttgagatgagttacatcttggaggtggagccgccaccaaaatgcagattttcgtgaaaacccttacggggaagaccatcaccc

SEQ ID NO: 457889 - DNA, 100 bp, Homo sapiens
tcgacttggtggaagcacacaagacaagaggagcagcagcggcaccgcccctcaccctggagggtcctgtacaatctcatcatgggactcctgcccttac

SEQ ID NO: 457890 - DNA, 100 bp, Homo sapiens
ttggtacccgagatgtgtgcacagaattactccctctaataaaaccccaagtgtgcagtttcctcaagggcagagattttgtccatcttgtccactacta

SEQ ID NO: 457891 - DNA, 82 bp, Homo sapiens
tgtggcatggcggacgaggggaagtcgtacagcggaaattatggaagtggaaattacaatgattttggaaattataaccagc

SEQ ID NO: 457892 - DNA, 101 bp, Homo sapiens
aagacacgggactcaccatccttcaagtgaacaattgttctttattggtgaaaacatgaatccagatggcatggttgctctattggactaccgtgaggatg

SEQ ID NO: 457893 - DNA, 75 bp, Homo sapiens
agtcaagttgctttgtggaaaaaactcactggggatactacacctggccaaatgatggaccagatgataaagatg

SEQ ID NO: 457894 - DNA, 99 bp, Homo sapiens
atcatctccagccagagggagcgcttccgtgcccggaaccaggagcttgaggcctggctccggaagcctggttggcattgacaacaaaatcgagcaagc

SEQ ID NO: 457895 - DNA, 100 bp, Homo sapiens
caagacattgtttctctccctctgcccccccttccccacgcaaccccagatccatttacactttacaacaacagtgagctgggacggagacaagctccag

SEQ ID NO: 457896 - DNA, 89 bp, Homo sapiens
atgggatttgctgctcccttcaccaacaagcgaaaggcttactcggagcgtagaatcatggggacttgctgaagcacactcctgccagc

SEQ ID NO: 457897 - DNA, 100 bp, Homo sapiens
tggcattgaatgatttatagctaagactccaggacacccctgaagccgagaaatgtttcagaggcggagcacagagagctgcggctgggacaaggagcac

SEQ ID NO: 457898 - DNA, 100 bp, Homo sapiens
gcggaagactccgagttctcggtactcttcagggatgagtcatgtggcagtggaaaatgcgctcgggctggaccagcagaacctaaaggcagacccagaa

SEQ ID NO: 457899 - DNA, 100 bp, Homo sapiens
ggcgcgctccaaaggcttccgcgtccttgacgcctgcaggaaggatttgatgccctggatccctttattcccatcctggtttccaactataacccaaagg

SEQ ID NO: 457900 - DNA, 74 bp, Homo sapiens
agttaatcctcaatttaagcctgatctaacccctagaaacagatgtgttcagagcaacattgttttgttgacac

SEQ ID NO: 457901 - DNA, 90 bp, Homo sapiens
cccgcccgacctgcgagcgccgcccgggcatgcgaagccgtccctccccggtgaccgaagctggctttggtgctgacatcggaatggaga

SEQ ID NO: 457902 - DNA, 100 bp, Homo sapiens
cattaacaataagcggcgttattccttcagagtcccagaagaggaaaggatgcagcagaggaggtgcggccgggtgtgtggcaacattacttcatgatgc

SEQ ID NO: 457903 - DNA, 100 bp, Homo sapiens
gccttgccttctggacaaaggaatgatgagcaccgtgacggaagttcgagccctcagccatgtacatcttcatgtgatcagccaggattttgattctcct

SEQ ID NO: 457904 - DNA, 74 bp, Homo sapiens
aagatttacttccttccctttccagcagaattacctgagacgaatcatggagctttgtggtgcaacaagacttg

SEQ ID NO: 457905 - DNA, 80 bp, Homo sapiens
ctcctgggtagcccctgtggcaaaggccagccctgcaggctccaagcaaggggatatgagactttctactcggaatatcc

SEQ ID NO: 457906 - DNA, 96 bp, Homo sapiens
atgttctacctgctcaagaccgccttccccagcgtccaggttggacgtgataagtatgagcctgcagctgtttcagaacaaggtgataaaaagggc

SEQ ID NO: 457907 - DNA, 74 bp, Homo sapiens
tgatgcccgtgtggcgctgattggatttccctctgtggtgacctgaccaacggtgcagatgggatgctggccac

SEQ ID NO: 457908 - DNA, 74 bp, Homo sapiens
ctacgaaacagaaatttcatgttgcaccctgtatctgaaaaggtttaaagtgatgaagatcaaagttctaagaa

SEQ ID NO: 457909 - DNA, 101 bp, Homo sapiens
agtttgagagaagtttaagagaagaaatggacatgattgcctaaatcagccaaacacagggtgatgatgaacagtctacacagatggctgcaagttgggaa

SEQ ID NO: 457910 - DNA, 83 bp, Homo sapiens
accaaatccaagatggcggccagcaggaggctgatgaaggccccttcccagctgcctgcctgccctagccagctcccaggtga

SEQ ID NO: 457911 - DNA, 75 bp, Homo sapiens
cagcatttttggtgtctcccagtgatcaaaaagagagtggttgtgggcatcgagcgcctcaaacgaaagaaccag

SEQ ID NO: 457912 - DNA, 83 bp, Homo sapiens
cctctgctcttcctcccttcgctcgcaccatgatggtcaaactactcttgtctagaggtgccaatattaatgcttttgacaag

SEQ ID NO: 457913 - DNA, 96 bp, Homo sapiens
cggcgggcggcagcatgtcggtggcggggctgaagaagcagttctacaaggcgagccaggtacggttcctggagcagcagaacaagatgctggaga

SEQ ID NO: 457914 - DNA, 82 bp, Homo sapiens
tgaaaacacagtttctgcaggaaaagatctctctacttctcctaagatatttagcttcctgtggtatactgatgagcagaac

SEQ ID NO: 457915 - DNA, 96 bp, Homo sapiens
gtggaaggagggtatgatgcaggtgccagatttggagctggggctactgctggcaacattcctaatttctacaagtgtgaaagaattagaaaactt

SEQ ID NO: 457916 - DNA, 98 bp, Homo sapiens
gcgccgcgttcgagttctcggaggggagggggcgttagccccgcgcagccgccggcgtcgccgccatggacctagcctcctgacaaggtgatccgggc

SEQ ID NO: 457917 - DNA, 88 bp, Homo sapiens
agccccactgtgcagacccggagagtcctgtgagcacgtggtgtgcccgcggccacagtcgtgcgtcgtggaccagacgggcagcgcc

SEQ ID NO: 457918 - DNA, 85 bp, Homo sapiens
gaaactggacaaccaacggctcaagaatttcaagaacaaaggccgcgacttggaggttggttcattctggctccggatgtcgatc

SEQ ID NO: 457919 - DNA, 83 bp, Homo sapiens
cgccccttcgcgtcccctgcaccatgagctggggcaccgagctctggattgggaaaatgaggtacgttagtgttcgcgatttt

SEQ ID NO: 457920 - DNA, 98 bp, Homo sapiens
aattagaactgcagaggttcctctacagcaaggtggtgaaggttgtcgtattgaactgtgagccatccaaagagaggatgctcttatccttcaagctg

SEQ ID NO: 457921 - DNA, 100 bp, Homo sapiens
ctcggcatggctctcctggtgctcgagacgtctcagagaggctgtgcagctgctggaggactataagcatgggaccctgcgcccgggggtcaccaatgaa

SEQ ID NO: 457922 - DNA, 82 bp, Homo sapiens
ctcctgcttcccatcgaagctctagaaatgaatgtttccatctcttcagagatgaaccaggcagttgtgaaaaacttcagga

SEQ ID NO: 457923 - DNA, 100 bp, Homo sapiens
ggagcctcgtggctgcgtcaccgccgcccccccagacaagatggacaccgcggaggaaggcatcaagcatgatggaaccatgtgtgatacctgccgccag

SEQ ID NO: 457924 - DNA, 75 bp, Homo sapiens
cttcacagtcctctccaccaagagcctcttccttggccagaagggagctcactcagtgggtttgatgtggtggat

SEQ ID NO: 457925 - DNA, 100 bp, Homo sapiens
cggcttgttgtcttcaattaaaaaatttattaaaggaagcacacctaaggtgggcacagggcccggcgtgggtttcaacgtcaacatggctttcaccggc

SEQ ID NO: 457926 - DNA, 98 bp, Homo sapiens
tcggacgaagagaagcagctgcagctcattaccagtctgaaggagcaaggcccagaataaagagaccagtgttttagctgctgcaaaagtgattgaca

SEQ ID NO: 457927 - DNA, 100 bp, Homo sapiens
ggctgcgattatgctactcactgttcggcacggaacagtcaggtaccgcagttcagcgctgttggcccgcctgaaaatgaaatttcttcagactgcaatc

SEQ ID NO: 457928 - DNA, 75 bp, Homo sapiens
gcagcctcttcgagcgccgcggacgcgtcatcgagtgtgacgtggtgaaagtattaaaggtggaagaaggtccat

SEQ ID NO: 457929 - DNA, 82 bp, Homo sapiens
ccttcctcggatgtggagaaggccaagaagcagctcctgcatctggcggaggagaagcaagagtgagccatggagctacgtg

SEQ ID NO: 457930 - DNA, 82 bp, Homo sapiens
ccgagttcaacatcctcctggccaccgactcctacaagcaaattgtggctactaatttgccccctgaagatcaagatggctc

SEQ ID NO: 457931 - DNA, 90 bp, Homo sapiens
actcagccactggttgccttggtaggcaataaaagatgtgatcttcgtggtggaaagctaaattttaaaaccaccccaatggatgcagac

SEQ ID NO: 457932 - DNA, 75 bp, Homo sapiens
aattatggcatagatcttgggaaaattgcggctaacatttccaatgatcactggccatctttggttcaagaggct

SEQ ID NO: 457933 - DNA, 100 bp, Homo sapiens
caaagtgttgggattacaggcgtgagctaccacgcccggccctaggctccacaactctaagaagctttgatatcagttttagagaatgtggcgtggagaa

SEQ ID NO: 457934 - DNA, 90 bp, Homo sapiens
ggccaaccatgggaaaggagagtggatgggactcagccaaaatgaagtttaatccctttgtgacttccgaccgaagcaagaatcgcaaaa

SEQ ID NO: 457935 - DNA, 88 bp, Homo sapiens
aagtgttaaagttagaagacatttgctaagtcaaatcacttcagaaaatatttacaccagcagctccagttcataccaataaagaaga

SEQ ID NO: 457936 - DNA, 50 bp, Homo sapiens
acatcttcctgcacatctctgaatgatgtctaccgtagaaaagcctcaga

SEQ ID NO: 457937 - DNA, 88 bp, Homo sapiens
gctgtgatagtgtcagccaaaaggcctccatcttccaagaagagcgatggttctgggacatatactaagttgcagaatacccaggtga

SEQ ID NO: 457938 - DNA, 97 bp, Homo sapiens
agccgtgaagcaagtgcagatagatggccttgctggaggcaaagctggaaaggacagtgggaaggccaaggctaaggcagtatctcgctcacagaga

SEQ ID NO: 457939 - DNA, 74 bp, Homo sapiens
tgcccacctccacaagggcttcctggccctctaccaaaccgtggctcagcaaagacccaaatatcgtcatagcc

SEQ ID NO: 457940 - DNA, 75 bp, Homo sapiens
cagccatgagggccgggcccagtcaccgaccggaagtcgagataacatgagtattgtactagtttgcttttcaaa

SEQ ID NO: 457941 - DNA, 75 bp, Homo sapiens
ctcactaaccacaggcatcagttggtactcgccatgaaactcaaagatcgagagatacagtttggaactttatca

SEQ ID NO: 457942 - DNA, 83 bp, Homo sapiens
cttggactgagtcctgcaggacacaggagatacaactcgtcaacgaatcaaattcagtgatgacagagtatgcaagagtcacc

SEQ ID NO: 457943 - DNA, 102 bp, Homo sapiens
ggaacatggactctgactcttgcgccgccgccttccacccggagttgcagagtgggcaggatcttaagacccgataggtgcagaacccatctggacacggag

SEQ ID NO: 457944 - DNA, 83 bp, Homo sapiens
caaacttaaaccattggttcctggtatggaagtaagcttctacaaaatacttcagacaatgcagatcttcgtgaagactctga

SEQ ID NO: 457945 - DNA, 100 bp, Homo sapiens
cggaggcaatggccggcaaccagctgtaagcgagatcttggccctgattgcattcatctgcatagagaccatcatggcatgctccccgtgtgaaggcctc

SEQ ID NO: 457946 - DNA, 100 bp, Homo sapiens
atatttgatgttgcaagtatcatcctgggctccaaggagaggcttgcattcacaagagatgggctctgtggtctgtggaatgaaatggttaaagatggag

SEQ ID NO: 457947 - DNA, 80 bp, Homo sapiens
cgtcctcatgtggggggtaaaccactcgagatgtggtatggtgtattcctgtgggcactggtgtcttctctcttctttca

SEQ ID NO: 457948 - DNA, 82 bp, Homo sapiens
gaaagaaagaaaacaaagaaaaacatactccagaattcctaatagaacatgtaagaagaagcttgggaagctgccacctcag

SEQ ID NO: 457949 - DNA, 100 bp, Homo sapiens
cttcaagccacaatggccctcaccagaacccagccatgtggtcagcctgatctcggacttcacagccagcagaactatttctccgtggacgatggcagcc

SEQ ID NO: 457950 - DNA, 75 bp, Homo sapiens
ctgcgctcatggcgtcgcccgggtactccaaagattcaggtttactcacgtcatccagcagagaatggaaagtca

SEQ ID NO: 457951 - DNA, 90 bp, Homo sapiens
ctccatcacccaccaacaacaccacaataatccacagccaaggatggtcgtctgcgaatgaatgaccagctgattgcagttaatggggaa

SEQ ID NO: 457952 - DNA, 96 bp, Homo sapiens
tttacgtctagatttccatgcccatggaagtcactggaggaggatccatggccaagggtgaattctaaggaccatatacctgccctggttcgtagc

SEQ ID NO: 457953 - DNA, 101 bp, Homo sapiens
gaagaatctcgaatccatgctacacttttggaatatggcagtttggcaatgaggagcagcagctggcgtgggccaagcgggagagcgagaaggcggaacag

SEQ ID NO: 457954 - DNA, 75 bp, Homo sapiens
ctacgtatcagctccatccaggccaccactgcggcgggctctgggtacaattttgtgatgctggccctgtcctcc

SEQ ID NO: 457955 - DNA, 90 bp, Homo sapiens
gtccctatctctgataccatcatcccagcagcagggaatacagcagacagcccctcctcaacagacagtgcagtattcactttcacagac

SEQ ID NO: 457956 - DNA, 100 bp, Homo sapiens
ccccccgccccgctggctgctgctcacatggtgtctgggcccttggcactctgtatgtaaagaattcttgaaccgattctacaagtcactgatagacaga

SEQ ID NO: 457957 - DNA, 90 bp, Homo sapiens
gcaagaaatgatcagtagcaccagtgtttatgttgtacaatggtagatggagtgatgattcttcctgtgcttatcatgattgctctcccc

SEQ ID NO: 457958 - DNA, 110 bp, Homo sapiens
agcatagctgctacactgaagatgaagcaaggcccaatgacccaggcggctgtattcatcaccaaagaaaaaacttacaccaatgcagaaatcggttagtccattagttt

SEQ ID NO: 457959 - DNA, 100 bp, Homo sapiens
tcaagctttcaaccacattgccaagttatgcagccttaaacgacttgttctctatcgaacaaaagtagagtgcctctgatccccaagtcgcatctccgcc

SEQ ID NO: 457960 - DNA, 90 bp, Homo sapiens
ggaagattcagagcccgagtctgatggcgaggctggaatcgaggcggtgggcagcgcggctggtggtgaaggtgggtctggttgaagact

SEQ ID NO: 457961 - DNA, 92 bp, Homo sapiens
cttccgccaggcggtgatgaagaatccccccgaaaggaccccccagcaattctgtggtgttcttggtcacacatttatggagtttctgaagg

SEQ ID NO: 457962 - DNA, 90 bp, Homo sapiens
gtgccactggccatcctagaaaaggtatagactatgtgatacctaaaacagggttttactgtaagctgtgttcactcttttatacaaatg

SEQ ID NO: 457963 - DNA, 85 bp, Homo sapiens
gagttcgcctcagacgcggtggagccgccggagtctgagaaggatggagagcaatacatcatcatctttggagaatttagcgacg

SEQ ID NO: 457964 - DNA, 88 bp, Homo sapiens
cttcctcccttcgctcgcaccatggaatgtatcctgtcaggtataatgtcagtgaatggcaagaaagttcttcatatggatcgaaacc

SEQ ID NO: 457965 - DNA, 75 bp, Homo sapiens
tgaagacacgcttcttctggaagaccagccaacagttctggagagtcttggcttctgggaggaagtcagagggat

SEQ ID NO: 457966 - DNA, 100 bp, Homo sapiens
cttaatcctactcagaagaacttgtacagagatgtgatgttggagaactatagcaatctggttttcttggatattgatgatgttaagaagttcaaaccgg

SEQ ID NO: 457967 - DNA, 85 bp, Homo sapiens
gtaagtataagaatgagcattgaactacaatcagtttctaatccagttcacagaaagggtcttgctacgtacgttgcccaggttg

SEQ ID NO: 457968 - DNA, 142 bp, Homo sapiens
tgaattctgcatttcaactctagaggaaaaaattgaaagagaaaaggaattagcagaagacattatgtcagatggagtgaaggtacctgagcgcaggaaccatggtcttcattgctgcctcagcattagcggaagtgccacg

SEQ ID NO: 457969 - DNA, 100 bp, Homo sapiens
aattaatcaaacttggacagctctctatggtcaaaatgcagatcttcgtgaaaacccttaccggcaagaccatcacccttgaggtggagcccagtgacac

SEQ ID NO: 457970 - DNA, 82 bp, Homo sapiens
gccagcggccgagcgggcggcttcctggcctgggcgctccggtggcggcggagatgagcagcaccagcagtaagagggctcc

SEQ ID NO: 457971 - DNA, 75 bp, Homo sapiens
gaggcggtgcaggcgttgaagcgcgcgggcaaggaagtgctgctggaagatggaatcagtgtgagtggctttccc

SEQ ID NO: 457972 - DNA, 104 bp, Homo sapiens
tgccgctcctaagcctgcacagccgcggcggcagcagcagtgagaggtggaaatgagttctcaacagtttcctcggttaggagccccttctaccgggctgagcc

SEQ ID NO: 457973 - DNA, 100 bp, Homo sapiens
cagggtggaggcacccagctccccttccacatcctctgtcaccacatgaggttcaacctgaaagagtgcagtgtgccctgaaccgccctgccttctttgc

SEQ ID NO: 457974 - DNA, 100 bp, Homo sapiens
ttcaaagattctttgtagcagacactgcaaatgaagctctcgaggctgctaagagactaaatgacttcctgaagccacagatcatcacccagccagaaac

SEQ ID NO: 457975 - DNA, 75 bp, Homo sapiens
agaaggtgcccaagatcccactccatgtcagtgcctaagaatcctggtgacaaaaagcctgtcaaatccgagacc

SEQ ID NO: 457976 - DNA, 100 bp, Homo sapiens
attctgtggccgtgccagagtgcatacggatttcacgccaagtccctatgacactgactccctcaaaatcaagatgaccctgatgatctgcaatgtaagc

SEQ ID NO: 457977 - DNA, 100 bp, Homo sapiens
aggaggcggcagaacattgcttatgaatatctgtgccacttagaggaagccaaaagagcctggagaaagttcttgtggaattcagtcacaaggagttgtt

SEQ ID NO: 457978 - DNA, 83 bp, Homo sapiens
gagaaggaggttgccgacgccatcaggctcaacgaggaactcaaagtggatgaggaaaggtttccaggcctgaggtgcccgcc

SEQ ID NO: 457979 - DNA, 87 bp, Homo sapiens
ctacaagcccatggaaggaaactttgaagagccagacgaggacagccggctgctgcccctgctggtctgcctgcggttcctgttcgt

SEQ ID NO: 457980 - DNA, 51 bp, Homo sapiens
aaagaagctgcagcggaggaaggcgagggagaaactctggaaaccttgaca

SEQ ID NO: 457981 - DNA, 51 bp, Homo sapiens
cccacccagaatctttaggtaaatgaggtgatcccattaagatactaatgc

SEQ ID NO: 457982 - DNA, 75 bp, Homo sapiens
gaatcggcaaactccctggtctctgttggtgtagaagccaaaatcaggtttaaggagttcatgagtaaacatgtt

SEQ ID NO: 457983 - DNA, 100 bp, Homo sapiens
cttggagtgttcttgttgtggatgaagctcacaggttgaaaaaccaaagctccctgctgcataagaccttgtcagagactattgggaagaagttacctgc

SEQ ID NO: 457984 - DNA, 75 bp, Homo sapiens
ggggttcgggcgatgctgcagggtgacgcatccaaagaagacattgacactgctatgaaattaggagccggttac

SEQ ID NO: 457985 - DNA, 98 bp, Homo sapiens
aagaactattcggttctctacttccaacagaagggaaatcctcattgacgattcaatttgttgaaggccaatttgtggactcctacgatccaaccata

SEQ ID NO: 457986 - DNA, 100 bp, Homo sapiens
ggagaagaacagcacaaccttgccaagagtgctgccctgcccaggaggtacatgctgcgggagcgggagggggccccagagcctgcatcctgcgtgaagg

SEQ ID NO: 457987 - DNA, 98 bp, Homo sapiens
agttggagtagtccttggctgcaataatttccggtgtgataaagcggaattgggaatatatatgtagccatgataaagaaaaaacgaagatcctagga

SEQ ID NO: 457988 - DNA, 50 bp, Homo sapiens
tcacacgtaccacctggatgttgtgggcagactgccagattcacttacag

SEQ ID NO: 457989 - DNA, 93 bp, Homo sapiens
gtgttactccattgctgaggagtgctaatgaaaataggttctgatgttgaattattactcagaacatctgttatacaaggtattcacacagac

SEQ ID NO: 457990 - DNA, 96 bp, Homo sapiens
tcatagactttcgacattggagtgcttcattaccacgagataggcaatacgaaagccaaaagaatgcaatggtgtaaagattccagttgatgccag

SEQ ID NO: 457991 - DNA, 100 bp, Homo sapiens
aataattccatccaaaaccggcagctgttagccgagcaagtgaaaggaaagcaagccaggatggatatttacgacactcaaaccttgggggttgtggtct

SEQ ID NO: 457992 - DNA, 100 bp, Homo sapiens
tcccactgagttacgccgagaggctctggccttacaggggtccctggagtttgatgatgctggaggtgaaggatcccccagaagaggcagaactgctgct

SEQ ID NO: 457993 - DNA, 99 bp, Homo sapiens
gaggagcaggctcgcctccttgatgaactggcaggcaagctacaaagcctagacctttcagccgctgccgaaatgcactctggcccccagaagcttctc

SEQ ID NO: 457994 - DNA, 100 bp, Homo sapiens
ctgtcaccccagatgtcctcatcatcccgtcagagctgaggtacttcgtgaagactcgggaagaggctctgtcgggattggccggaagcagaagggaggt

SEQ ID NO: 457995 - DNA, 137 bp, Homo sapiens
cggcttctcccctacgcgctacacaagtggagctccttttcctccacctaccttcccgatttctgatgaagaattgaaaagaagagtagctgaggagctggcattggagcaagccaagaaagaatccgaagatcaga

SEQ ID NO: 457996 - DNA, 110 bp, Homo sapiens
ttcacctgtgattgttctatgacctcttattctggaaaccagtgcaatgatcaactctatggctttgacgtgctcatagattctactctgaagccatggttgttggaagt

SEQ ID NO: 457997 - DNA, 100 bp, Homo sapiens
ggagacgcggctggacaacgacaaggccaagcatggggatcagcacgagggtcagcactacaacatctccccccaggatttggagactgtatttccccat

SEQ ID NO: 457998 - DNA, 87 bp, Homo sapiens
gaccttccggagcttctcagaagacagagggttttcttttgagccacctcctaagctgcccaacggtgtgttcacccccgacttcca

SEQ ID NO: 457999 - DNA, 100 bp, Homo sapiens
ctcctgtgtttccaaccagtctcggtgcgaggcctcaccaaaccccacggtcttcgccttgatcgtgttctcctgcatctatggtgagggctacagcaat

SEQ ID NO: 458000 - DNA, 100 bp, Homo sapiens
tcgtgttgcaaaatgacagatcttctagaagaaggtggccagacaagcacaaacctctcaggagccctaccacgacaaggccagagaacaccccgatgac

SEQ ID NO: 458001 - DNA, 88 bp, Homo sapiens
ccaggtcacacactgttgcagcgcagtggtacaggagctgcagcaggccatctccaagctggaggcccggctgaacgtgctggagaag

SEQ ID NO: 458002 - DNA, 50 bp, Homo sapiens
cagctccaatttttgatcaatgaggacatgggtgtggaggcaaagaacca

SEQ ID NO: 458003 - DNA, 90 bp, Homo sapiens
cgctctgcggcgggtgtccctaaactagcagtttagggtgtcagttttgcagaacactgaaatctatggactctaaaatggacttcattt

SEQ ID NO: 458004 - DNA, 100 bp, Homo sapiens
gaatacttttactactgtgacaacattaacgctatatgttctcctttcagccaagacctttcaccagtgcaggggatagaagattcattccacaaactta

SEQ ID NO: 458005 - DNA, 99 bp, Homo sapiens
gggaggcttgccaccttcagcccccccgcgaacgcccaagttcgatcctttggtacagaagacagaccgacagatcgtccaataccacctcgagatgaa

SEQ ID NO: 458006 - DNA, 78 bp, Homo sapiens
gctgcaccagcttctaaccgactctattatcaagtcctaaattttggaatgattgtctcatcggcactaatgatctgg

SEQ ID NO: 458007 - DNA, 100 bp, Homo sapiens
tgaacaacccgttcttgcctcaggccagtcgcctccaggccaagagggatccttcacccgtgtctggatatggaccctccacatcccttccccaaggaga

SEQ ID NO: 458008 - DNA, 78 bp, Homo sapiens
ctgttccttggccatcccaaagctattctgggggcaacagaggagctgcatgctgtttcccttgaacaacatcttcta

SEQ ID NO: 458009 - DNA, 75 bp, Homo sapiens
gttccaccagcaaccatgagtggttccatgatgggaagtgacatgtttgaacaaaaaagtggtgcagtttttgat

SEQ ID NO: 458010 - DNA, 100 bp, Homo sapiens
cgccctcttgcagtctgcagcttctcctgtcatcggaaatgccaggccaagttaaagaagagtgtaagagtcctaaagctgagtgttggtcccaaaaaat

SEQ ID NO: 458011 - DNA, 100 bp, Homo sapiens
tgcgcaggacttctcctggcggcgctgcggatccagggggtcggctgccaggtacagaaccacacgatgagccagcacgcacagtgagggatcgctcaac

SEQ ID NO: 458012 - DNA, 51 bp, Homo sapiens
gtgtttgctggctgcttgatgaagccaacagaagctgttcttccctctcct

SEQ ID NO: 458013 - DNA, 90 bp, Homo sapiens
tgacaccctgctctcaggcagcaccagtggttggaaggacatgttcaatgtccaccgggcatacttagtatctttggacaaataggaatt

SEQ ID NO: 458014 - DNA, 98 bp, Homo sapiens
ccacaagcacagactcgcccacatcaccaaccacggaggctccccctctgcctcctaggaacgccgggaaaggacccagatgatgtggtaccagttgg

SEQ ID NO: 458015 - DNA, 75 bp, Homo sapiens
gaatgtcgaagcaaatgccatggacatgggggccggatcgtggcacccagaggctgccaggactttggctgggac

SEQ ID NO: 458016 - DNA, 98 bp, Homo sapiens
agctccacgaaaggcagccgcggatcgccgcgctcagcgacaaacaagtgaatgaaaactttgccattgatttgatagcagagcagcccgtgagcgag

SEQ ID NO: 458017 - DNA, 100 bp, Homo sapiens
ccagcagcgtggaggagcctgaagattttgagatacagagtgaaaatggggagaactgtaatcaagacatgtttgagaatgaatcacgtaagatattctc

SEQ ID NO: 458018 - DNA, 100 bp, Homo sapiens
tgggcttgctttggcaacagagtgcctgacccaggtcagatccagacatttaatgtggatgcaccatgccagaccgtggaagatttaacgaatggggttg

SEQ ID NO: 458019 - DNA, 74 bp, Homo sapiens
gcagcaaatggaaagaaatcccactgggcagagcttgaaataagtggatgacaattgtgttgtgtaaagagttg

SEQ ID NO: 458020 - DNA, 98 bp, Homo sapiens
cgagctgcagctgcgatctctgtggtaggcccaggcgcagccagcagcagaatttgggaagactgtcccacccctcctactccctgtgtgctgacagt

SEQ ID NO: 458021 - DNA, 82 bp, Homo sapiens
gtgtgcctcggcagccttgcgctgctctaatggtccggacttccgtgtcgggctgacgcacgaggcacacaggaaggaggtg

SEQ ID NO: 458022 - DNA, 51 bp, Homo sapiens
gatgctctctggtggggcacagtagagtacagagagatggatgaaagcttg

SEQ ID NO: 458023 - DNA, 75 bp, Homo sapiens
cgtgggcaaggagggcacacgcatgaaggtggaggacgtgaaggcagttccttttagtcttgacagtgttgcaaa

SEQ ID NO: 458024 - DNA, 95 bp, Homo sapiens
cctggacgacggcccggacttcctctcagaagaggaccgcggactgagatctgtatctgtggacctgaatgttgatccctcgcttcagattgaca

SEQ ID NO: 458025 - DNA, 100 bp, Homo sapiens
tctattcaattcaattcacgagataataccagaagatttcagcatagcagataaaatacagcaaatcctaaccagcacaggttttagtgacaaacgggcc

SEQ ID NO: 458026 - DNA, 75 bp, Homo sapiens
ctgtgtgatgatgcctgagttcagccctcagcagaatcagcttaaaatggctcgtttcaccattgtggatgggaa

SEQ ID NO: 458027 - DNA, 75 bp, Homo sapiens
cgtctgttccggcgccggacccctatttgcaaaggaattatctatagagtaagtatgctaatcttgactaagact

SEQ ID NO: 458028 - DNA, 96 bp, Homo sapiens
tgagtgataatgaggaatggagcctgcaggcggtggagaagcatgttagcgaccccgagagtacagtggctgtggctttcacaccaaccattccgc

SEQ ID NO: 458029 - DNA, 83 bp, Homo sapiens
ctcttcctcatcatctcagccacgaagtacagccggaggtttttagaacttcagccataaaaatgggcagaattttccttgat

SEQ ID NO: 458030 - DNA, 100 bp, Homo sapiens
tgaagatgtttccagccctgcctcggcggaccaaagggcatcccgggcccaaatcctagacaaagccacagaatatatccagtatatgcgaaggaaaaac

SEQ ID NO: 458031 - DNA, 75 bp, Homo sapiens
ggatgaataaaattggactcagagtttccattgacactgatatggttcctggtagagttacacagttgtgccgcc

SEQ ID NO: 458032 - DNA, 147 bp, Homo sapiens
agcggttggaggcttcgcccggctttgcagcggggacttcggcggcggcgcctcaggcacctcggcccggcttagaccatgctcagcctccaagcagccttgtcatcgacaaagaatctgaagtttacaagatgcttcaggagaaac

SEQ ID NO: 458033 - DNA, 75 bp, Homo sapiens
tggcgtgtcacactgccccggcggggaggacgagaatcggtgtgaaattgcaggtgctgcagtgtctgaaatttc

SEQ ID NO: 458034 - DNA, 80 bp, Homo sapiens
ctgaagcgcccgtccattccaagtttggtgccctggttgtcagatgttggaaagcagtaggacggaacatactcttcgtg

SEQ ID NO: 458035 - DNA, 132 bp, Homo sapiens
tcaattttaggtccagaagtgtccaaaccacaagttctcaaaactctctgaaaaatggctccctccgagttaagaatatgacagatacctagcatctagcaaaataatggcagctgcttaccttgaccccaa

SEQ ID NO: 458036 - DNA, 75 bp, Homo sapiens
agatcaccacggacgagatgatcaaacgcctgaagctccttgctcggattgaacgtatggaaaggcggatgcagc

SEQ ID NO: 458037 - DNA, 85 bp, Homo sapiens
agatgtatcaaaaaatgcagtcccctcatgccaagggagaaacaaaggcagcgctgccctcgggggagcattggccctggcggaa

SEQ ID NO: 458038 - DNA, 74 bp, Homo sapiens
ggaggacccgggacaccgcacagccgggaaatgacaatgcagatcttcgtgaagactctgactggtaagaccat

SEQ ID NO: 458039 - DNA, 100 bp, Homo sapiens
ctgttcgccacctgggaggtggacggctccagccccagctgcgtgcccagcattgcagtgtcgagatggctatgaaccctgtgtaaatgaaggaatgtgt

SEQ ID NO: 458040 - DNA, 83 bp, Homo sapiens
cggaacagcagagacacagagggcagtcatgagcatcctgaggttagcattacacttctcccagtggagcccatgacttctga

SEQ ID NO: 458041 - DNA, 50 bp, Homo sapiens
gcccgccagcatgccccagtccaaagttagcagacttgaagaaagagaag

SEQ ID NO: 458042 - DNA, 83 bp, Homo sapiens
gtgcccacagctcctggagccccacagcaaacggggattcagcgtccgatcctttggaacagggactcacgtgaagcttccag

SEQ ID NO: 458043 - DNA, 101 bp, Homo sapiens
ccgccgcgtaggagcgtgcgttcgggccctcttctcccacctgttcggatcatgcggccagatgatgccaacgtggccggcaatgtccacggggggaccat

SEQ ID NO: 458044 - DNA, 60 bp, Homo sapiens
atggttgagggagactgtgatgagatcttcctcagaactgtgatcctaacattcccctag

SEQ ID NO: 458045 - DNA, 82 bp, Homo sapiens
aaaggctcagcccacaactcttgtcctaccacctcagtgagaaaccttaccactgtgactgggacggctgtggatggaaatt

SEQ ID NO: 458046 - DNA, 75 bp, Homo sapiens
gacgatcattctgcaagcaggcaacctgaatacaggatgattgccgccgtggacacagactccccccgagaggtc

SEQ ID NO: 458047 - DNA, 99 bp, Homo sapiens
cgacggcggaacccgtgggcctgtggactgcagcctcggcggtcagcaggcggttttggtgaataacatcaccacaggtgagaggctcatccgagtgct

SEQ ID NO: 458048 - DNA, 82 bp, Homo sapiens
cgggtgctgaaggctgcagccgcgaatgccgtaggaaaaccaattctgtgtcctcggaggaccacagcccagttgggcccca

SEQ ID NO: 458049 - DNA, 97 bp, Homo sapiens
cagaattaatgtaactacactgaaagatgatggggacatatctaaacagcaggtattctctactgccgctgatggtcaaacgcaagtggaaattaaa

SEQ ID NO: 458050 - DNA, 100 bp, Homo sapiens
ttgtgccaatggtggagaagaaaacttcggccgggaagatttccagaggattccagaacttgccatcaacccactgggggaccggatcatcaatgccttc

SEQ ID NO: 458051 - DNA, 76 bp, Homo sapiens
agcagcacaacacagggaagcttggggagggcagtcagggcgacagcaagaatgccaagaagaagaacaacaagaa

SEQ ID NO: 458052 - DNA, 99 bp, Homo sapiens
cggcggagcgagcgagcggccggcaggttgggaggagcggccgaaggccatccgttgcacactggtaaactgcacatgtgaatgttttcagccagggaa

SEQ ID NO: 458053 - DNA, 74 bp, Homo sapiens
aagtacctttatgaaccagtgtatcccaagttatcaagttatacccaaccagcagcaaaactaccaaggaatag

SEQ ID NO: 458054 - DNA, 82 bp, Homo sapiens
tcgagtcgaagcaccgcagcctggtgcagatcatctacgacgagaaccgggagaactacgatgacccgcacaaaacccctgc

SEQ ID NO: 458055 - DNA, 100 bp, Homo sapiens
agttgcagcctcccgacttataccctggtacttctagtctaaaacaggatttgactctactaatccagatgtgtatatctcatgattgatatggagaaac

SEQ ID NO: 458056 - DNA, 82 bp, Homo sapiens
ctacagtgacggggagatcagcatttgcatggaacacatggaacgaggcccagcaaaaagcagagacggtacagggccagaa

SEQ ID NO: 458057 - DNA, 98 bp, Homo sapiens
gagagggtccaccaggctggcagctcttctcaaagcagcaggaggtggagcccatgtgcaaggagagcgaccacatccacatcattgcgctggcccag

SEQ ID NO: 458058 - DNA, 85 bp, Homo sapiens
cctgcagcttctgtgtgctcctgagagggggatatgagactttctactcggaatatcctgagtgttgcgtggatgtaaaacccat

SEQ ID NO: 458059 - DNA, 100 bp, Homo sapiens
taagagtttggcgagtcagtgactgaagcgcccgtccattccaaggttggtttgttggaccttgaactcaatcggctgacgaaagcgctatttttggctt

SEQ ID NO: 458060 - DNA, 100 bp, Homo sapiens
ggaaagagccctggatggttgtgagggatgagaaaagaagatggactctagctggagctccgttactctcatggggactttgagaatggtatctgggtgt

SEQ ID NO: 458061 - DNA, 100 bp, Homo sapiens
aattgatctcgccaaaaaggacatctttggagccaggaccaggcagttaaatggcacttgtaccagctcggtggacatggagctcttccttcattattcc

SEQ ID NO: 458062 - DNA, 100 bp, Homo sapiens
ctgggttcccagtgctcctgggatgtttataactggagatagaatgagtccatttaagtcccaggacggtggaaactagctagtagattgcagccatgtt

SEQ ID NO: 458063 - DNA, 101 bp, Homo sapiens
aagtcgaaggggaaggcgcctgaagaggacgaaggtgctgctagctgaggaggggatagctcctctttcttctgcaggaccagggaaagaggagaaactcc

SEQ ID NO: 458064 - DNA, 50 bp, Homo sapiens
gcagcaagtcagggagcttaaggggcatatgatattttcctgaatgcaaa

SEQ ID NO: 458065 - DNA, 100 bp, Homo sapiens
acagtctctgacatcagctctcctgggaccctccaagagcactagtgtctagaaggcactaaggaaatgcactcggtgatggaaagagagccactattct

SEQ ID NO: 458066 - DNA, 100 bp, Homo sapiens
caccggctcacggaaaatgtctataagttctgggaagtcatcagtgatgagcatggcatcgaccccagcggcaactacgtgggcgactcggacttgcagc

SEQ ID NO: 458067 - DNA, 96 bp, Homo sapiens
gcacctcggccgtcccggcgcccctggggacgccgccctcccggcttccttcaaaatgtctactgttcacgaaatcctgtgcaagctcagcttgga

SEQ ID NO: 458068 - DNA, 75 bp, Homo sapiens
ttcttgcccattacctgctgggtttaccatggcaatggggatttatactggggaagggtagatgtctacccaaat

SEQ ID NO: 458069 - DNA, 100 bp, Homo sapiens
taaggccaaaaatgtgcatactcacagagttagagagagggatggtgcagggcactgtgacctttgaagatgtggctgtgaacttttcccaggaggagtg

SEQ ID NO: 458070 - DNA, 49 bp, Homo sapiens
ggagactgcatcaggctctcgggccaattcctgtccccccagcagcatg

SEQ ID NO: 458071 - DNA, 82 bp, Homo sapiens
gagcgcccctcgccaccccgtgtcccaggcccggcctttctgacaagaggttcccagaccagaggactgttgttaggtgatt

SEQ ID NO: 458072 - DNA, 50 bp, Homo sapiens
caatttcttcgagacactcatataaaggaggccatgctctaccacaacca

SEQ ID NO: 458073 - DNA, 90 bp, Homo sapiens
ttaacttctgatatcattgagtccatatttaggacctatccagcagttctcctgtgcctcctgttggctctctttgcatctggcctcatc

SEQ ID NO: 458074 - DNA, 88 bp, Homo sapiens
cgctcaagtgatctttgataagaatgattcagattttgaagctaaagttaagcaggcaatttcagaactggtcagcccagacatcttc

SEQ ID NO: 458075 - DNA, 107 bp, Homo sapiens
ggacccggttccccggcccacagtgggggtgtgcaaacccgagagaactggggaatgggtactgttcaaaaaggaatgccccacaagtgttaccatggcaaaactgg

SEQ ID NO: 458076 - DNA, 100 bp, Homo sapiens
ttaaaatatgctggggaccatcaccatcacaggtctggagcccggcactgtggtcataacagagcaggcagtggatacctgcttcaaggcagagtttgag

SEQ ID NO: 458077 - DNA, 103 bp, Homo sapiens
caaaagatgcttaccgaatccggagatcctgaggaggaggaggagaacggggctgaggaggaagaagaagaaactgccgaggatggagaggaggaagatgaag

SEQ ID NO: 458078 - DNA, 50 bp, Homo sapiens
caggaatcaatccattcaatgttgatgcggatgaaattaaaaggctagga

SEQ ID NO: 458079 - DNA, 124 bp, Homo sapiens
gcgcagcatggcggtggaggacgaggggctccgggtcttccagagcgtgaagatcaagatcggtcacggagctgctggacgtctccatggagctgggctgtttcctggctggagcgctcgtctc

SEQ ID NO: 458080 - DNA, 82 bp, Homo sapiens
aataaattgcaagcattctatccaaatggtgctcgcggtgaggatcgatgacctggaccacctcccggagaccaccaccatc

SEQ ID NO: 458081 - DNA, 95 bp, Homo sapiens
caacacagatgtccaagctgccaactctgcgtacgtgtcctatgggggcctgctcatgaggctgcagggggatgccaacaacctgcatggattcg

SEQ ID NO: 458082 - DNA, 75 bp, Homo sapiens
cccggtgttcccgcgctttatcaagattatcgaggcttcaccatcatcatcgagccctttgacgacagaaccccg

SEQ ID NO: 458083 - DNA, 101 bp, Homo sapiens
gcttgccctggtcttgctcggccgatgaagtgcagaggtttttttctgtggatatcaaagtattgcagagtgccttagcagccatccgacatgcccgctgg

SEQ ID NO: 458084 - DNA, 75 bp, Homo sapiens
gagctgggagacaagcccgcgcccaacaccttctatgtagactatacttgtagcaagcagaaacatcgatctaat

SEQ ID NO: 458085 - DNA, 100 bp, Homo sapiens
tgtgacagtaacagtacttgggatcccccagttccaaagtgtcttaaaggtattttacatggagctggactttctcagcttcccaaacagcgccatcagc

SEQ ID NO: 458086 - DNA, 51 bp, Homo sapiens
cgctcatcacaacaagcggaaggcagaagctcctcctggggtagagacaga

SEQ ID NO: 458087 - DNA, 88 bp, Homo sapiens
agcattgaagatcagtacaaaaattcttcaagaaatctaaggttcaaaccttgtactactcagctgatcacaagctgcttgatgggaa

SEQ ID NO: 458088 - DNA, 99 bp, Homo sapiens
caagatcatcagtgaggagtgtcggaaagaggttcatgtgaaatggattttggacactgatattttcaatgaatggatgaatgaggaggattatgaggt

SEQ ID NO: 458089 - DNA, 100 bp, Homo sapiens
gctgcctataatcaagtaaaaacaatagctcaaggaaacctttccaacacagatgtccaagctgccaagtgctgggtaggccaggtttcagcatcgcaga

SEQ ID NO: 458090 - DNA, 98 bp, Homo sapiens
ccaggcatgcgccactcgctccccaactcccgtatcatgatccaccagccctcaggaggcgcccggcgaccggtcctgtaccgtcctcaatgtagaag

SEQ ID NO: 458091 - DNA, 101 bp, Homo sapiens
gaggaaccaccggatcgaagacagtcaagtgtagactctcgccaaagccgctctgggcaaggaagtgtttggattgtgagctatttcagaactgttctcag

SEQ ID NO: 458092 - DNA, 75 bp, Homo sapiens
gagggcccacaacccgcagagacttctactggctgcgctcctttctggccggagatgcagacagacatgctgaac

SEQ ID NO: 458093 - DNA, 100 bp, Homo sapiens
ggatgcagttgggtgcattttatccgttttctagaaatcacaatggccaaggctacaagcttttggaaaagaagaagagagtccaactcaaagatatggg

SEQ ID NO: 458094 - DNA, 100 bp, Homo sapiens
ggctcctccagctaccggcccaaggccatctacctggacatcgatggacgcattcagaaggctcagcctctgaggaaagaacctgaaataatcactgtga

SEQ ID NO: 458095 - DNA, 83 bp, Homo sapiens
agacaggaggcagcagacggacatccaggaagggagtgaacaggcaccactaatgagtgaagatgaactgattaacataatag

SEQ ID NO: 458096 - DNA, 100 bp, Homo sapiens
gaaaaaattgcccttagccgaagagttgaaaaacactggcgccttaattttaaagaccccgaagcagtcagagctctgacgtgtactctcctaagggaag

SEQ ID NO: 458097 - DNA, 75 bp, Homo sapiens
ccatgaggggatgcagttatgggctctgtcgccgtgggtttggaattcacccagttgcaggccgaatgcctggtc

SEQ ID NO: 458098 - DNA, 76 bp, Homo sapiens
ctcagtgacacacacaactcgggcctccccagcgacagaccgtataatagacgctggccccaaaggaaactactct

SEQ ID NO: 458099 - DNA, 90 bp, Homo sapiens
gccgatcgccgcggggcagttcgggccggctgtcctggcgcggtaaaacttccttttcctgtagatcaaatcacagatcttccaaggaac

SEQ ID NO: 458100 - DNA, 80 bp, Homo sapiens
cagtacgccacctactattacccccagtatctgcaagccaagtacctggagtagaacagaaaaattattatgtctgtgtt

SEQ ID NO: 458101 - DNA, 82 bp, Homo sapiens
ggcaaatggccagtcaaagggattcagaaggtttgtaacaagaaactatgggaaagatacactcaccggagaaaagaagttt

SEQ ID NO: 458102 - DNA, 76 bp, Homo sapiens
atagtgcctttcagccctaccagatatcaatgatgtcaaacggctgaaacctggctacttagaagctactgtggac

SEQ ID NO: 458103 - DNA, 83 bp, Homo sapiens
gtctcttagcagcgcgcggagaagaacggggagccaggtcttgagtcaccacgtccgaatataattcttgggttagtaatctg

SEQ ID NO: 458104 - DNA, 100 bp, Homo sapiens
cccgcggccgcaccttcccgccttctcaggaaggaagcagccaccctcgccatggcctccccgcccgcctgcccctcggaggaggacgagagcctgaagg

SEQ ID NO: 458105 - DNA, 137 bp, Homo sapiens
catgactgctgttcttcttgcctgtggcataaacccggaaaaaagcatccttttccaacaatctcagattctgagcagagcactggttcagattctgaggtcctcactgagcggacttcctgctccttcagtactca

SEQ ID NO: 458106 - DNA, 108 bp, Homo sapiens
ctcgggaccggctgtatgattaggccacaatcttcaatgagtaaacatattcctgtttggtgcacctcgatttggaggaagtagggcagggcccttatctggaaagaa

SEQ ID NO: 458107 - DNA, 99 bp, Homo sapiens
ggccgagtcctcgccatgccggcccggcggctgctgctgctgctgacgctgctgctgcccggcctcgggagtgatcagcagctggactgtgccttggac

SEQ ID NO: 458108 - DNA, 50 bp, Homo sapiens
ctccgagccaggccgccgcaaagcagaacagctttgctgagccatcaagg

SEQ ID NO: 458109 - DNA, 75 bp, Homo sapiens
gctgaattagaactgcagaggttcctctacagcaagatggaggagatgtataagaaagctcatgctgctatacga

SEQ ID NO: 458110 - DNA, 74 bp, Homo sapiens
gcgtcgggtccaggtggcagaacatcctagaactacaagcagctgtcgaagagatactgccaagccttaaaaaa

SEQ ID NO: 458111 - DNA, 74 bp, Homo sapiens
tggacaccaaacatttcctgccgctcggcccgcgatgctcccagcccggtgagacctgcctgaatggcgggaag

SEQ ID NO: 458112 - DNA, 82 bp, Homo sapiens
taattgactgcttgtcccagaagcaatttaaggagcagctgtggagagggagtgtgtgtcatggcgccccaggccagggagg

SEQ ID NO: 458113 - DNA, 100 bp, Homo sapiens
gctgccgctggagagaatctctgaggtccccaggagagcctgcctgcacggaagagacgcctcctcggataaaagaatcagagtgtctcaacccttgaca

SEQ ID NO: 458114 - DNA, 101 bp, Homo sapiens
ctcagcctttgaaaaaatgtctgtcacatatgatgattccgttggagtagaagtgtccagcgacagcttctgggagattgccctgacattctcaatcgtct

SEQ ID NO: 458115 - DNA, 98 bp, Homo sapiens
tggagtatgtgaggagtggctgggacaactacgagtttgacatcaatgaaggttcgagaacttgtcttggacaattgcaaatcaaatgatggaaaaat

SEQ ID NO: 458116 - DNA, 75 bp, Homo sapiens
taaaagctgcaaccctggatattctaacagatagggatgaggaagaaatgaccaaacgagatgacaaaagagata

SEQ ID NO: 458117 - DNA, 75 bp, Homo sapiens
gtaaatcaggaccccaacaataacttacagccttatgccagcctggaccatcttggaggcagtgtaggatcatgg

SEQ ID NO: 458118 - DNA, 75 bp, Homo sapiens
gacaagggggagtcgctgggtatcaagcacgaggagtacgaccaaaactgccgcttttgaagattttgcatgcag

SEQ ID NO: 458119 - DNA, 74 bp, Homo sapiens
gaagatcatcgagcatttcaaacgtttctcttcagcaacgggtagcagaattggaaaaaattaatgcagaattt

SEQ ID NO: 458120 - DNA, 132 bp, Homo sapiens
ttcaaggcaagaccgaattcagaaggatatcgacgtcgtgatccagaagtccagagctgaggactgcctgtttgcagtaacagatcaactcctagcaatcatgatcggatacagcgtctgaggcaagaattt

SEQ ID NO: 458121 - DNA, 82 bp, Homo sapiens
acccaacagcttatgcattagctgaacatctttcagagttgtatcccaaaatgatgcttcaacacccaggccaggtctctgc

SEQ ID NO: 458122 - DNA, 75 bp, Homo sapiens
ggtttcgggatctcggtgctgcagacggcgagacctcctgcacagccacatgaaatgaagatcacctctgcctat

SEQ ID NO: 458123 - DNA, 75 bp, Homo sapiens
ctggtcatgagcttcgttaacatgggtacactgaggaggggacggctccgtcttcacattgtgcacagatctgag

SEQ ID NO: 458124 - DNA, 101 bp, Homo sapiens
tttgacaagatgtcacctgaaagtggtcacagccgcatctttgaagggctgatcccttatccaacatggttctaaccttcagtactaaagaagatgcagtt

SEQ ID NO: 458125 - DNA, 74 bp, Homo sapiens
atgatgtcctttctggaactctgcatcttcctcccgtgaggctggccgagctccacgctgatctgaagatacag

SEQ ID NO: 458126 - DNA, 50 bp, Homo sapiens
cgcagcccaggcgcgggggcgacgacagttcccaaagagaatattacgtc

SEQ ID NO: 458127 - DNA, 83 bp, Homo sapiens
tgccgcgcggctcggagccctggaagcagcagctcaccgaggacggggactcggaggaggtacaggagaactgtgtgcggtgg

SEQ ID NO: 458128 - DNA, 100 bp, Homo sapiens
aggagctcccctgtcctccagcctgggggagaggcatacacggaatacctgaggagcatccactatatctcccaggtgttactagaagaagtggaaacca

SEQ ID NO: 458129 - DNA, 75 bp, Homo sapiens
gacaaaagccaagaggaggacagttcgctacacagcaatgcatcgaggaggaagcactcaattgaacaagtgcag

SEQ ID NO: 458130 - DNA, 88 bp, Homo sapiens
aagacctattatcagatcaaccaccaaagtgggaaacattgaaatcaaggtggataagtggagcagctgtagtcaatgcattttactc

SEQ ID NO: 458131 - DNA, 101 bp, Homo sapiens
gagaataaactgccaccattcaagtgtttcaagagaagcttaaaggcagtaagctcctacaggacattttaaaactacataaatgtgccatccccagctca

SEQ ID NO: 458132 - DNA, 75 bp, Homo sapiens
ggaggagttaccgccgttcttcgctctcgtgctcattcccccatgatcgccgtaggaagtgatgacagtagcccc

SEQ ID NO: 458133 - DNA, 100 bp, Homo sapiens
tgtccaacagaacgacctagtatttgaatttgctagtaacgtcatggaggatgaacgacaggtggactacatcatgcagccgcccgaatttccggtgacg

SEQ ID NO: 458134 - DNA, 98 bp, Homo sapiens
aggaggcctgttcataaaagatatcgaggatttagccggaagggcccggcaggaagatgggctcccgtggacagggactcttgctggcgtactgcctg

SEQ ID NO: 458135 - DNA, 75 bp, Homo sapiens
acctcctgcctcaccacccccatcaagatcgccctgcgctggactggagactgatgcatgagggggctacggagg

SEQ ID NO: 458136 - DNA, 111 bp, Homo sapiens
tgaccatcatcctgctcctgggtgccgtggcatgtcgatttgtccttcactacaggatggatagaatgacagaagatgctcttcgcttgaatctgttgaagcggagcttgg

SEQ ID NO: 458137 - DNA, 76 bp, Homo sapiens
cccaaaagagacctcacccgctttgtgaaatggccccgctatatcaggttgccaaggaaagtgtactgcagtttta

SEQ ID NO: 458138 - DNA, 90 bp, Homo sapiens
tgcagctgctgctgaccctggccttcaaccccgagccgctggtgctacaggtcttccgaccccgaactccaccggaggcaattgcactgt

SEQ ID NO: 458139 - DNA, 87 bp, Homo sapiens
aagagaccatccatatttccaggatcttactcagtgtgttacatgccaagaaaaacacattactgtaaagaaggaaccacatgaatc

SEQ ID NO: 458140 - DNA, 80 bp, Homo sapiens
atagaggacaacgcagatatagaacatttcttttatcacagtttgatattaaactgctctcagaattttcctcttgccta

SEQ ID NO: 458141 - DNA, 74 bp, Homo sapiens
gagacattcgacagctaccccggtattgcactatgtggagaaacccagcacatttatcagtgacatcatcaact

SEQ ID NO: 458142 - DNA, 100 bp, Homo sapiens
gggagccgcaccacctaacgctggccgacaacagcctggcgtccgccacggtcgcaatggaagaagagatcgccgcgctggtcattgacaatggctccgg

SEQ ID NO: 458143 - DNA, 76 bp, Homo sapiens
caagatattgacactattattgatcatgctagtgttggagtgtttctcaggagctatcagaaactatcctcaccat

SEQ ID NO: 458144 - DNA, 75 bp, Homo sapiens
gcaagatcgtgtatcccacggagaaggtgaactgtctggataaggctatggaaagggcaaatggaatggagctgg

SEQ ID NO: 458145 - DNA, 80 bp, Homo sapiens
gggagttttccggggccctctcagcaagaacgggaacaaaactctgatggctctgagagattcctctgcgaatctgtttt

SEQ ID NO: 458146 - DNA, 96 bp, Homo sapiens
ctgcctgctgctcgccgcgatcctggacctggcgcgcgattgttctctggggccggactgagaaatgcctgaaggagacgacggaggagatccggc

SEQ ID NO: 458147 - DNA, 75 bp, Homo sapiens
atgagaccgggggaggcgacgctaagttgctgatcgtggcggagaactgtgtttatgaaactgtagttttgcctt

SEQ ID NO: 458148 - DNA, 51 bp, Homo sapiens
gagcacgcagacccgcttttaaagttactctttcaacctgatcagaacgca

SEQ ID NO: 458149 - DNA, 80 bp, Homo sapiens
tgccttctgctctccagcgctctcagcaccaactttcggcagctggggtaccccaggcagaggcagggctgccacctgtg

SEQ ID NO: 458150 - DNA, 75 bp, Homo sapiens
agaggaaggattttcccgccgccctccccgccccgaggtgagaagccctaccactgcaactgggacggctgcggc

SEQ ID NO: 458151 - DNA, 108 bp, Homo sapiens
tagaaaatcgtcatctttctgaaatggtgatgaaattggaattgggtttacatgagggtgactgtcgttcctacagttacgtgtgtggaatctccagtaaagatgaac

SEQ ID NO: 458152 - DNA, 100 bp, Homo sapiens
gccctgtgatctgcaggtccggagagacgcacagctaagatgtcaggacatcctggaagctgggaaaggttctaatacccgatttacaattacattgaac

SEQ ID NO: 458153 - DNA, 80 bp, Homo sapiens
ttaccgttgtcccaagcttccagcagtctgagcacaacaggtggtcaagtaccccctgcacgccatcatggagatcaagg

SEQ ID NO: 458154 - DNA, 83 bp, Homo sapiens
ccttctcgcggccccttagcgcggtcaggccgccctccttttccagttgagccccatatgggggttggcaggcagcagagagg

SEQ ID NO: 458155 - DNA, 97 bp, Homo sapiens
caagaaggtttcctggcctgttgcagccatggtgcattgcagttgcgtgttgttcagaaaggagatggaataaactgagactgcaggacaaagagaa

SEQ ID NO: 458156 - DNA, 97 bp, Homo sapiens
tttgttgtgacatggaggctcaagctgggtctactcaagccgataacagtagaactctgaacgtggattccactgcaatgacactacctatgtctga

SEQ ID NO: 458157 - DNA, 123 bp, Homo sapiens
cagcgtgcctggttacagctgtttccacgtgcggtgctcgtcgggagtgatcacctaccctacagggcactgtttgaagaagcaaacatggtagcatcaagcattccttgaaatatggctcca

SEQ ID NO: 458158 - DNA, 75 bp, Homo sapiens
cttgtggcgcgcccgcggagaggccgggggaacggcaggagcagctgatgggatatcggaagagagggccgaagc

SEQ ID NO: 458159 - DNA, 101 bp, Homo sapiens
aagtaggaggaaaaatgaccatgtccaagtgattcgcctttgccagtctcatctcgtgtctgctttgttaagttccatgatccagactcagcagttgtggc

SEQ ID NO: 458160 - DNA, 100 bp, Homo sapiens
tttggtaatgctgtttctgcttaagttggcaagacactccaagtttggcatgaaaggggggacacagcgattgccacgcgccattggaatgtccctggcc

SEQ ID NO: 458161 - DNA, 100 bp, Homo sapiens
gtactgttcaacaaagtagccatgggccaaagtggctgttgagcacttgaaagagcaaacatgaacgttggagttgcccacagtgaagtgaatccaaata

SEQ ID NO: 458162 - DNA, 97 bp, Homo sapiens
gaacactggacttcagaaatacttgcttattatgaaattcgatatcagttctacaagagagatcagcttatatggagtgttgttaggcattacagtg

SEQ ID NO: 458163 - DNA, 73 bp, Homo sapiens
gaggaggtcaatttaaatggttctggcaaactgctcaaggtggaatctccaactgataaatcaggaaacttct

SEQ ID NO: 458164 - DNA, 75 bp, Homo sapiens
aaactcctcaatgtcagcatgtcagtcctggcatgctaggttctataaatagggactgctgagatgtcctctatt

SEQ ID NO: 458165 - DNA, 100 bp, Homo sapiens
atttaagggctttgggactgaagttactgaaaaggaggtagaaatactcttcattcaagtcaatcagtttgcattggctggtccagggaccctcatcatg

SEQ ID NO: 458166 - DNA, 80 bp, Homo sapiens
tccgatcggaatcagccctgtccgagaggtttggttttcctaaacaaatcctttcacagggaccgacggcacttgataat

SEQ ID NO: 458167 - DNA, 82 bp, Homo sapiens
tgtctcctggtgaccgagcacccgcctccgggcatcttcaactgttctaaatggcttctaagaagttgggtgcagattttca

SEQ ID NO: 458168 - DNA, 82 bp, Homo sapiens
gcgcggaagaaggcctccgtggaggccagattgaagctctgatccagtatatacggcctgtgttcgtgtcccggtcagacca

SEQ ID NO: 458169 - DNA, 100 bp, Homo sapiens
actgagtctcggcaaagaaaatcttgcagagtcctccaaaccaacagctggtggcagcagatcacaaaaggcatccagtaccctgctgactctgacatgc

SEQ ID NO: 458170 - DNA, 100 bp, Homo sapiens
atgaggttgaaaaacctgacttttatcatcatattgataatctcaggagaactctatgcagaaggctttaaaagtaaagaatgtgtcccaaaacttgtgg

SEQ ID NO: 458171 - DNA, 100 bp, Homo sapiens
gaaaaaatggttgacctcacccaggtgattccttcaacacccagaatgagccagaagacatgatgaaaaaagagaaaaagtctgaagctctgaatatcag

SEQ ID NO: 458172 - DNA, 90 bp, Homo sapiens
gaatgaaactgaaacatacagtcagatctcaggaatggaagtttcctaccgcatttgaattcaatgagtattttctcattaccattttgg

SEQ ID NO: 458173 - DNA, 90 bp, Homo sapiens
cactatatcatcagttcgaagagcagcattggaaactctgtttacgttattatcaacacaggaccaggctctccagcagaactatctcct

SEQ ID NO: 458174 - DNA, 75 bp, Homo sapiens
aagaactcctaaacaggtggatccaggtcactcctggaagcaaggcggctctagctaatttatgtattggagatg

SEQ ID NO: 458175 - DNA, 90 bp, Homo sapiens
ctcttacattatctgggtttctgtgaaagagtaccctcttatatatggactgattcttattccctgctggtgttctctagtttgcctaag

SEQ ID NO: 458176 - DNA, 75 bp, Homo sapiens
aaaaaatggttgacctcacccagagagctggcggtcaccatggcaatgcgggagctggtggaggccgaatgcggg

SEQ ID NO: 458177 - DNA, 128 bp, Homo sapiens
gttccatcagtcaggtcattgagcagttacctcagccaaacaggacaagcaggctgaaaagaagggagccagcaatacaattatcggtatgatctttggatgttttgctttgttcgagttgctggcat

SEQ ID NO: 458178 - DNA, 100 bp, Homo sapiens
aggaggccgagccgggatctcaggtcctcgggggcggcggccacgccaaggacgggaatgttttaaaggaagttgggctactcacaagttactacataag

SEQ ID NO: 458179 - DNA, 95 bp, Homo sapiens
gccccctccctcatacaactggacacggatgtggccaccctgctgtaccgtgcgccccgcctcgcagtggactgcctcacacaagcccttccagg

SEQ ID NO: 458180 - DNA, 100 bp, Homo sapiens
cctgtgtggcgatggtcttcctgctggggctcatgtttgaggccaaacgtaccaagaaagtcgggatcgtcggtaaatacgggacccgctatggggcctc

SEQ ID NO: 458181 - DNA, 100 bp, Homo sapiens
tgacactttatttggaggattaaagaaggccaaagatgaagaggaagcctttctggattggagtgatgatgatgatgatgatgatgatggatttgatcca

SEQ ID NO: 458182 - DNA, 75 bp, Homo sapiens
gctgtatgaagaatatactagaacatcccagaaagttcaggagccctggaaaggagaaggaataagacggcagga

SEQ ID NO: 458183 - DNA, 75 bp, Homo sapiens
ttaggctaataggacagcacttgaatggcttagggctcaagatgacactcctgtccaggacactaaaatgtgaag

SEQ ID NO: 458184 - DNA, 96 bp, Homo sapiens
gaccacttaatagtgagtcttccaaccagagcttgtgtagcgtcagatccttgagtgataaaggagtagagcgctgtgcttcgccgtgagccgctc

SEQ ID NO: 458185 - DNA, 49 bp, Homo sapiens
ggagagcgactcagggacaaaatgtgagatggaagattttcgaggtata

SEQ ID NO: 458186 - DNA, 87 bp, Homo sapiens
acgttttgagcttcaacatggcctcgctgtgatatgtatgactactatactggcaattgctggagaagattttgcaattgttgcttc

SEQ ID NO: 458187 - DNA, 76 bp, Homo sapiens
cgacgtgggcggtgggccccagccccacagaccagcccagcattcagctgtttgcagacaaggtcccaaagacagc

SEQ ID NO: 458188 - DNA, 75 bp, Homo sapiens
cggcaaagtcatgggagcagagctcagacatgttctcaccacccttggccttctccacagtaggcactcctgact

SEQ ID NO: 458189 - DNA, 88 bp, Homo sapiens
taatggagctactgtactggctattggaaggaggagattctgaagataaggaggttgaccccctgtttacagtgccagcgccaccacc

SEQ ID NO: 458190 - DNA, 100 bp, Homo sapiens
gaagctttacctcgctgaccctatgaaggacttaaccaccaccatgtcgagcaaaagaacaaagaccaagaccaagaagcgccctcagcgtgcaacatcc

SEQ ID NO: 458191 - DNA, 80 bp, Homo sapiens
tggccgtgggcatctcctacattagcgtctacgaccaccaagatgcagattgagttcataaaacaaggaagcatgaattt

SEQ ID NO: 458192 - DNA, 75 bp, Homo sapiens
gacctactcacagataggaattgaaggctgaccggttccctgatgtgttacctgcttctgctactgatccaaact

SEQ ID NO: 458193 - DNA, 74 bp, Homo sapiens
ttctaacatccagaagatcacacagtgttgttcctaaagagaaagatgaaatggtagagcaagagtttaaccgg

SEQ ID NO: 458194 - DNA, 100 bp, Homo sapiens
ctcagccctggctccagaggatcatggcagctcctatgaggcgaggaaacgagacctctttcgttccttctagaaggtctggaggacgtagagttattga

SEQ ID NO: 458195 - DNA, 103 bp, Homo sapiens
cgcggagcccggctcccgcaccatggaggaggacgacagctacggattttttatcaagcagaaatgcatcgaacaacgagaatcaagatcactgagctaaatc

SEQ ID NO: 458196 - DNA, 100 bp, Homo sapiens
ggccaacttactgcttcctgaactgggcagtgccttctatgacatggccaggaaaacctcaattgctattgacacaatcattaaccagaaacgtttcaat

SEQ ID NO: 458197 - DNA, 97 bp, Homo sapiens
cttccagtggaggcattttggggcagaatacagagatatggaatcaggaatacggggtgctttgcattcaggaatacagaaaaaacagcaaagtgga

SEQ ID NO: 458198 - DNA, 100 bp, Homo sapiens
ctcgctctgagctgcgcctggacctggttctgccttctggacaatctttccggtggtgatctttgtgaagtctgtgcagcggtgcattgccttggcccag

SEQ ID NO: 458199 - DNA, 50 bp, Homo sapiens
accaaacttctcgaccgagaaacgtcccctccagggcaggtgactgaggc

SEQ ID NO: 458200 - DNA, 50 bp, Homo sapiens
gccgtgtggcacgacacaaaaatcagacttgtggaagaaagcaaactgat

SEQ ID NO: 458201 - DNA, 100 bp, Homo sapiens
acgcacgtctgctcggagatcatttgggagatccaagagattcagtatcactcgctcccttgatgatcttgaggcgtcctgcctctgcggctctgccccc

SEQ ID NO: 458202 - DNA, 75 bp, Homo sapiens
tgccagggtgctgaccgtgggagccgaccgagaatgaaactagtgatcgagaagatggcctccccaaaggacatc

SEQ ID NO: 458203 - DNA, 98 bp, Homo sapiens
tccttctatggctggacgcccgtgcactgggccgcgcatttcggcaagaacctaaaggcagacccagaagagctttttacaaaactagagaaaattgg

SEQ ID NO: 458204 - DNA, 100 bp, Homo sapiens
caggagcaggatgatatttctgatgatgttgaagaagtcaaagaccagtttgcaacccatgaagctccaggatgaaaccaacctgaggctggaagccgag

SEQ ID NO: 458205 - DNA, 50 bp, Homo sapiens
tggcgcgtcttctggagcaatgggagcccttgccagcatccagccatggg

SEQ ID NO: 458206 - DNA, 97 bp, Homo sapiens
caccaggaggccttggtccccgcgcagccccagctcaacgtgtgcaactgggcggtcatggacaaagcagttccaattccagagaaaatgagtgaat

SEQ ID NO: 458207 - DNA, 98 bp, Homo sapiens
caaatggaggaggaggaggacgacgacgatggggatatcggtacccaggctgaagtgcagtgtcacaatcatagctcaccacggtcttgaactcctgg

SEQ ID NO: 458208 - DNA, 100 bp, Homo sapiens
tccagtaccaggcggtccctcagattcaggcaagcaggcaaacacggaggagaggaaggctgccctcaaaacagcctctgacttcatcaccaagatggac

SEQ ID NO: 458209 - DNA, 100 bp, Homo sapiens
agggctgcagcccaggagcctcaaggcggcccggcgggcgactggacggccggacagcctcctgacaaggtgatccgggcgggccccgcaggaattttat

SEQ ID NO: 458210 - DNA, 98 bp, Homo sapiens
ctgccggatccaaatcccaggcataatgaatgatgaaaaatttaacctgaagttggtcatcaaaccaggcatttccggagagttcttttgaagtcact

SEQ ID NO: 458211 - DNA, 90 bp, Homo sapiens
ccgggatttaatggcttacctgggaacccaggtgtgcagggccagaaggaaacccagcgtttgctggcagaaccagttcctggcatcaaa

SEQ ID NO: 458212 - DNA, 98 bp, Homo sapiens
ctgttctagcatttccagatgagcatgcaagcggcaagatgtcctacagatgaattatctttaaccaattgtgcagttgtgaatgaaaaggatttcca

SEQ ID NO: 458213 - DNA, 98 bp, Homo sapiens
agtacaatgtcaccctcccagcaacagaatttaagggacgctgtgaagcaatcatggatgcaatgaagagagggctctgctgtgtgctgctgctgtgt

SEQ ID NO: 458214 - DNA, 75 bp, Homo sapiens
caccgtccttttgtctctgcctttgaggttggcgggaactgaaactggtttactagaaattcccaactgttccaa

SEQ ID NO: 458215 - DNA, 75 bp, Homo sapiens
ctgctctacgggaagtacgtcagacctatgaggaccagcacagcagtgaggaggaggaggaagaggaagaggaag

SEQ ID NO: 458216 - DNA, 98 bp, Homo sapiens
ctggaccgagttccacaagaaggactgcggggacctggtggccatcggatgctggagtatggtgagtacaaaggccacctgtatggcactagtgtgga

SEQ ID NO: 458217 - DNA, 97 bp, Homo sapiens
accggccacatcatcctctccaaagacgccacccacgtccgcgacttccggctcttcgtgcccaaccacaggccagaaatcagcgaggagctcaagg

SEQ ID NO: 458218 - DNA, 90 bp, Homo sapiens
ggcgaatccataactctgataagccgtacaggtttggaaagcagagtggagaacaaagagttgattccaatgcaacaaattttagaagaa

SEQ ID NO: 458219 - DNA, 75 bp, Homo sapiens
tgcagaaatgggtgccggaatctgtctcctgatcatcattcagtgcgccaatctgcagaacgccattgcggatgc

SEQ ID NO: 458220 - DNA, 84 bp, Homo sapiens
cagaatcctgtcggagttgtagccatgccctagtaactctcgaagtgataaaagctgtttctttgtgaaatatgggcccgaaaa

SEQ ID NO: 458221 - DNA, 90 bp, Homo sapiens
agctaatagtggttatcctgcctggaaagacaccagtatatggtgtcgcaaatgatgctggagagatcacactgatacctctttccatga

SEQ ID NO: 458222 - DNA, 75 bp, Homo sapiens
gcaacttctggatgaaacttctgcaattccaggtacaacctccttaggcatgtctgtttttaacctaagcaacgc

SEQ ID NO: 458223 - DNA, 100 bp, Homo sapiens
cgcgctgcgagactacgagacggagcgagaacccgagcagcgccatgagcaacactaccgtcgtccccagcactgcaggtccgggccccagcggcgggcc

SEQ ID NO: 458224 - DNA, 75 bp, Homo sapiens
gcccgatgagccagagaagcttggcatcctctggtatcacgattccaaaacccccaaagccaccagataagccgc

SEQ ID NO: 458225 - DNA, 83 bp, Homo sapiens
cggcggcattttgaggcggtcctcctagcggcctggttatacattggctcttcaaagacgttcacctcatcagagaaatccct

SEQ ID NO: 458226 - DNA, 50 bp, Homo sapiens
gtccagcccagcgattctcagtcagagcttaacttagatagcagtaattt

SEQ ID NO: 458227 - DNA, 100 bp, Homo sapiens
cacatctgaataaatcacttgaaggttatggaggttttgatgactatggtggctataataattacggctatgggaatgatggctttgatgacagaatgag

SEQ ID NO: 458228 - DNA, 97 bp, Homo sapiens
agtatcatgctggccaagaagatcatcattaaggacggaggcacggtgtccctggccagtgtccttccacctgtccacaagcatggggaacatcttc

SEQ ID NO: 458229 - DNA, 75 bp, Homo sapiens
ccacccaccgccgccgcctcccaggtagctcgtaagctggtcatcctggagggtgagctggagagggcagaggag

SEQ ID NO: 458230 - DNA, 78 bp, Homo sapiens
acagagtcttctgggtctctctgcctgaggccctggagggagagaagccctctggaccccgaggttggaccctactgt

SEQ ID NO: 458231 - DNA, 75 bp, Homo sapiens
atctagaatcaactgagagagatgcttaaaaatcaccagttactttaatgagtgcaagaaagcctttgaggtgaa

SEQ ID NO: 458232 - DNA, 96 bp, Homo sapiens
tatttgactgagagaaacccactgaagacgtctgcgtgagaatagagaccaccgaggtttggtgcacctcgatttggaggaagtagggcagggccc

SEQ ID NO: 458233 - DNA, 96 bp, Homo sapiens
gaaccaccaaagttaccacgaagccggaagcagaggttggcaaaagcagcttttgatgatgcaattgcagaactggatacgctgagtgaagaaagc

SEQ ID NO: 458234 - DNA, 98 bp, Homo sapiens
atttatgcattatggctaacttcagctgatattttgggggaagaaaaaggctttatttcaggctggagaacttaaatgggggacagatgaagaaaagt

SEQ ID NO: 458235 - DNA, 138 bp, Homo sapiens
aacaggggcaaatcgaagtagagagcgaaaccatcttcaagttagcagcgtttattttacaggatgtaatccctgttcattactacttaatacctccaccaacaaagactaagaatggcagcaaagataaggaaaaag

SEQ ID NO: 458236 - DNA, 83 bp, Homo sapiens
attacacactgctgaaccaggccccagacatgctgcatagttgccattgccccaaatggagccttacagttggcaagtccagg

SEQ ID NO: 458237 - DNA, 98 bp, Homo sapiens
gagagaagaggattggtcctgcttttaagcctagctgaaattcttttcaagctgtctgcttttctgtggagactgcgggttgcagacaccagcagccc

SEQ ID NO: 458238 - DNA, 74 bp, Homo sapiens
aaagcccccacgcccagccaggagcaccgccgaggactccagcacaccgagggatgccaagtttgtggaggaac

SEQ ID NO: 458239 - DNA, 100 bp, Homo sapiens
cagatcgtggaggccacacatctaaatcaagtggttcaactcataatgacaagagacagtgatggttatgaaaactcaacagatggtgaaatgtgtgaca

SEQ ID NO: 458240 - DNA, 102 bp, Homo sapiens
cagggctcgagtctacctggatgaaaactacaaatcccaggagcacttcacgacaatgcagatcttcgtgaagactctgactggtaagaccatcaccctcga

SEQ ID NO: 458241 - DNA, 100 bp, Homo sapiens
gtgagttctcccgccctcttggtgagggccacatctgccagagcctggagtctgcgaaggccgggacccggttccccggcccacagtgggggtgtgcaaa

SEQ ID NO: 458242 - DNA, 100 bp, Homo sapiens
acaaagtgaaaggcaccaatgaagacatggcagcacagcattctcagaagcagtctactgagctcttccagtgcatgtacttcaaagacaaagaccctgc

SEQ ID NO: 458243 - DNA, 98 bp, Homo sapiens
tcggacagcgaggacagcaacttttccgaggaggaggacagcgagcgcagcagtgacggcgaggaggccgaggtggattttcaagacacgaatgctcg

SEQ ID NO: 458244 - DNA, 82 bp, Homo sapiens
acagtttaggtctcaaggcaagcctattgagttaacacctctgccgctgctaaaaggtcccgctcccggtcccctcggagga

SEQ ID NO: 458245 - DNA, 100 bp, Homo sapiens
tggtgacggtgttttccttgtggaagtcggcagggagaagaggaggaaaaggccaaagcgtacaagaaagagaaacagaaggagaagaaaaggagggctg

SEQ ID NO: 458246 - DNA, 75 bp, Homo sapiens
aaactctggagtaattggagccaagaaatgagtatagctttcacagcattgaaaagatcattggctggtggctct

SEQ ID NO: 458247 - DNA, 100 bp, Homo sapiens
ccaccatccgcgaccgctcctcgggcacggcctccagcgtggccttcaccccactccaggtggccggcattcacaagaaggtggcccggaccatcggcat

SEQ ID NO: 458248 - DNA, 83 bp, Homo sapiens
ctactgagaagcccggcgacggaggaacgcaggtctgctgccagtggccaatccgccatggtatagttgaagattgggactta

SEQ ID NO: 458249 - DNA, 82 bp, Homo sapiens
actctgaaggccacattaaactcactgactacggcatgtgtaagatggttcccacagaactagtagaaaaggaattttggcg

SEQ ID NO: 458250 - DNA, 76 bp, Homo sapiens
ctattcagatcatccaagtggaggttcctacagagattcatatgagagttatgctgatgtagaaggccaatcctta

SEQ ID NO: 458251 - DNA, 75 bp, Homo sapiens
atgacccaattacaagttctaaatgcctgtaagattggaggaatggaggggccctttggtggtggtatggaaaac

SEQ ID NO: 458252 - DNA, 75 bp, Homo sapiens
cagcgtccagcaactccagcctgtccggctcgtcggtgtcctccgcacgtgtggagtgagagcgaggactgcctg

SEQ ID NO: 458253 - DNA, 82 bp, Homo sapiens
agacagcatatttgagtcatttccttcgtacccacagtgcttcatgagagttgtccagtggagccccaaaatagaagcaaga

SEQ ID NO: 458254 - DNA, 83 bp, Homo sapiens
agaaactagagcaaataaccgttttgaaattaaccaaaaacttttgctagaaaatcagcttttacgagagaaaactcatggcc

SEQ ID NO: 458255 - DNA, 74 bp, Homo sapiens
attcatttagagctgcggaacaggacgccctctgatgaatactcccccagttgcaagaggcgcaggaccgtgga

SEQ ID NO: 458256 - DNA, 82 bp, Homo sapiens
aaaaagaaggaatccacgttctagcccaggctgcaagcacaaaggaagtttgctcagtctcagccgaatagtcccagcacaa

SEQ ID NO: 458257 - DNA, 75 bp, Homo sapiens
tggtgggccagtacagcaccggcaagaccaccttcatcaggaagcggggagaggtggtgagagatgacccctgtt

SEQ ID NO: 458258 - DNA, 100 bp, Homo sapiens
tgaggctcattttgcagttgttgaaattgtccccgcagttttcaatcatggccctaaaggacagcaaggtggtggagatcgttgatgagaaagttcgtag

SEQ ID NO: 458259 - DNA, 100 bp, Homo sapiens
atcccgaagcgggagggtcttggagaggaggacacagcagttgccggacacgagctccattcccagaaaatctaagctggcagttcataggaatatcaga

SEQ ID NO: 458260 - DNA, 75 bp, Homo sapiens
ccggaatcgtgtgctgggctggtcccccttgcaattctgtggtgttcttggtcacacatttatggagtttctgaa

SEQ ID NO: 458261 - DNA, 117 bp, Homo sapiens
agagcaggtcttcagcccgtcagcaagtggcaagcctatggactcaaaggctatcctggttggatggcaagcatgtggtgtttggcaaagtgaaagaaggcatgaatattgtggagg

SEQ ID NO: 458262 - DNA, 75 bp, Homo sapiens
tcagagcagggaaaatcacctttgcagaaaaggatgcacatgatggggaagtcaacgctgtgcagttcagtccag

SEQ ID NO: 458263 - DNA, 80 bp, Homo sapiens
tcggatagacaataccacaacaacacattttgcagagatttcattcatacctgtgaaaagctctgccatgaaggagactg

SEQ ID NO: 458264 - DNA, 100 bp, Homo sapiens
tccgacaccatggtggcccagctcgtgcagcggctccagaggactctccatttctaagcccaacatgatctccttactggagcaagggaaggaaccgtgg

SEQ ID NO: 458265 - DNA, 100 bp, Homo sapiens
tggactccctcaagtacagtgacctgcagaacttagccaagagtctgggtctccgggccaacctgaggccgtgcagtcggaggtccttgtgcatgaagac

SEQ ID NO: 458266 - DNA, 100 bp, Homo sapiens
ctgtgtccagcgctgccggagccgcctgagctgctcaagatgaggaggtgcgcggggccggggcggagcagtcgcgttccccgcgtgtgagcccccaccc

SEQ ID NO: 458267 - DNA, 74 bp, Homo sapiens
ccatcaaatgtggaacctatggaaaagttgccagtagtcatcagagtaccaaaactgatctatttctcagtaat

SEQ ID NO: 458268 - DNA, 100 bp, Homo sapiens
cgagagatggtcaggtctggagctcgaccgggccaggtgaaaaaccatttcgctgtgatgaatgtggtatgagattcatacaaaaatatcatatggaaag

SEQ ID NO: 458269 - DNA, 101 bp, Homo sapiens
atggatttttcaaaaaaactaaacggaaggtagtgccaccttctcctatgactggtacaggtttgcagattccgccagcagcacagcaagctctacagatg

SEQ ID NO: 458270 - DNA, 96 bp, Homo sapiens
ttcgggggaggaggaggcagccaggctgtgctcagaggcatttctctttgctgagttcctgctccagcgtggctcctggactggcgccagatgctg

SEQ ID NO: 458271 - DNA, 82 bp, Homo sapiens
cttgaattcagtttgccagagtttgttagacaatctggatttggttagtcagcaacataaaatcaacctaatgacagcagac

SEQ ID NO: 458272 - DNA, 100 bp, Homo sapiens
agatggggttgtcctctttaagaagctggcagccaggaggcaggagcagcgggcgacagtgcgggccctgtggttctgggccttctcgctgcaggcaaag

SEQ ID NO: 458273 - DNA, 100 bp, Homo sapiens
cggcgacagtggcggcggcgccatggcagggcttgcagggagaaacaaaggcagcgctgccctcgggggagcattggccctggcggaacgcagcagccgc

SEQ ID NO: 458274 - DNA, 74 bp, Homo sapiens
agggctcggtcaacggcttcatcagcaccttgggacttaattcagtgcacaaatgagatgaatgtgaacatccc

SEQ ID NO: 458275 - DNA, 100 bp, Homo sapiens
tggatgaagttgttcattgtttgtcaccacaaaaaggacaggacatggatttgattgacatactttggaggcaagatatagatcttggagtaagtcgaga

SEQ ID NO: 458276 - DNA, 100 bp, Homo sapiens
caagggcaagcacagtgtcaaaggtaaatacggcatcatctgcatggaggatttgattcatgagatctatactgttggaaaacgcttcaaagaggcaaat

SEQ ID NO: 458277 - DNA, 82 bp, Homo sapiens
ttctccttttcatgagtgttcctgtggtctctgcacctcctttctgtacttcgtcagtttgtaagacatgagtccgaaacaa

SEQ ID NO: 458278 - DNA, 100 bp, Homo sapiens
cgacaggtgtcgcttgaaaagactgggcttgtccttgctggtgcatgcgtcgtcggcctctgggcagcaggcaaggggagagccagttgcgcagagccct

SEQ ID NO: 458279 - DNA, 88 bp, Homo sapiens
aaacccccaagctaggatttctgcagctcatgaagccttggagataaatgatgcatttgcacagtataacttggaccagtttactcca

SEQ ID NO: 458280 - DNA, 75 bp, Homo sapiens
tgaaaaggcgatcttcctgtttgtggataagacagtcccacagtccagtataccaacagatgttttaaagattgt

SEQ ID NO: 458281 - DNA, 82 bp, Homo sapiens
ccctatcgtcgcccccttcaccttggatcatgttcaagaagcatgtcgggccccaggcctgtggtgctgagcgggccttcgg

SEQ ID NO: 458282 - DNA, 76 bp, Homo sapiens
cgtaatgagcgtcaaaattatccgaaaccgcctcactgggtggaagcagggaaaggcctggagatgaggaagctgg

SEQ ID NO: 458283 - DNA, 100 bp, Homo sapiens
atgttccaagcaacaaggatgtcacatctctagattggaatttatttcaagtaccattggaagaggaaggacaacgtggtggacctatccttgcaccaga

SEQ ID NO: 458284 - DNA, 51 bp, Homo sapiens
atgtgtaatctgagtaatagaggttgctccttcaggctggctacgacccag

SEQ ID NO: 458285 - DNA, 100 bp, Homo sapiens
cgtgtattcccaactggaagcgctgtgacggccaccaagattgccaggatggccgggacgaggccaattgccacttaattcagtgcacaaatgagatgaa

SEQ ID NO: 458286 - DNA, 75 bp, Homo sapiens
gctttttgcttagcactgaaaattctggataatggtgaatgggggcctaatagccacaacagcaacacaccagga

SEQ ID NO: 458287 - DNA, 105 bp, Homo sapiens
gggagataaaatccattgctgctaagtactccggttcccagcttctgcaaaaggatgaactggacctcacagacaaacacagagaagccatgtttgcacttccag

SEQ ID NO: 458288 - DNA, 100 bp, Homo sapiens
acggtggcggctctcggagccggcgcgaatccggcccccgcagcgggacccggagagttaagaaagacgtggacaagggcacacggcactcagacatgtt

SEQ ID NO: 458289 - DNA, 80 bp, Homo sapiens
ttctcagccatctgttgaatcttcaagtccaggctggagtgcagtggcgggatctcggctcactgcaagctctgcctccc

SEQ ID NO: 458290 - DNA, 74 bp, Homo sapiens
tttgctctcatgaacatgcaatgagaagactgatcaatctggtggttatcactaggctaaaactggacaaagac

SEQ ID NO: 458291 - DNA, 87 bp, Homo sapiens
agaaccgtcagtttgagccagatggtggcaattttggaggtagccccggttatggaggaggaagaggaggatatggtggtggaggac

SEQ ID NO: 458292 - DNA, 100 bp, Homo sapiens
ctcagatctggagcatcggctgcaggggtcagtgatggagctgcttcaggtggacgtctgatttatgaagctccccatccacctatctgagtacctgact

SEQ ID NO: 458293 - DNA, 78 bp, Homo sapiens
atggagtcttgtgaaatcgcgtggactgcaacacccagcagcgcggtgaaagaaatcacccgtgatattaagcaatta

SEQ ID NO: 458294 - DNA, 83 bp, Homo sapiens
agctgtactggagccacccgcgaaaattcggccagggttctcgctcttgttaccagatgtatgctactcatggtgggtcctgg

SEQ ID NO: 458295 - DNA, 96 bp, Homo sapiens
aggatcttcaaggagcaggagcagctgcgcacggtcctggatgcctcatcccttagtttcaacaccagattgaaatggtttgccatctgcttcgta

SEQ ID NO: 458296 - DNA, 92 bp, Homo sapiens
ccggctccgtcgtggaagcaggactgcgccgcgtcttcctcaaggtgagaagccctaccactgcaactgggacggctgcggctggaagtttg

SEQ ID NO: 458297 - DNA, 74 bp, Homo sapiens
tcggagaagaccttcaagcagcgccgcaccttcgtgccctctggtggtcagaagatgctgtgctgtctcgttag

SEQ ID NO: 458298 - DNA, 97 bp, Homo sapiens
gaacggcagcggcgagggctccacgtgcagcgtctctccggattataagcgccatggctatggctagtgttaaattgcttgccggtgttttaagaaa

SEQ ID NO: 458299 - DNA, 75 bp, Homo sapiens
ctgaatgaatgttgcaacgtccgacccgaagaccctgttgattttctggagctgacatggacccaaatcctcggg

SEQ ID NO: 458300 - DNA, 83 bp, Homo sapiens
aagcccaccggtccccaacgcatcatgccagggagccaagcgtcctgcccggccccctgggcgctgcctatggcacagccaag

SEQ ID NO: 458301 - DNA, 82 bp, Homo sapiens
gagtccggaccggagactttggggcctaactagtcagactcagtcacatgcccactcgaagtcgcactgctatggaaagtgg

SEQ ID NO: 458302 - DNA, 100 bp, Homo sapiens
cctacccccaggtgacttcctggtgtgtggtgaccgccggggctctgtgctgctattcccctccagaccaggcgcagcagcttactgatctggaacaaaa

SEQ ID NO: 458303 - DNA, 75 bp, Homo sapiens
gggagataaagctgtgtactgccgttgttggaggtccaaaaaggtgacatctgttcccgagctgttcctgactgc

SEQ ID NO: 458304 - DNA, 100 bp, Homo sapiens
gcggcttcctagtgagtcggcggctgatttagaaggaggttcaggctacgaggaacttcctgaagtgctccgaagacaacccgctctttgccggcatcga

SEQ ID NO: 458305 - DNA, 51 bp, Homo sapiens
cacaattataaaatgtcagcttttaaggatgttgaaatgcttcaggccagt

SEQ ID NO: 458306 - DNA, 100 bp, Homo sapiens
gaaaaggacgagatcttgtctgatgtggcatctagactttggtttacatacaggaaaaactttccagccattggagtttatacagagaaatcctcttctt

SEQ ID NO: 458307 - DNA, 100 bp, Homo sapiens
gcacaagagcaccatactttgagggtctgtagcatctctgtctgttggagaaggcacaggtgtcagagcaccagtcagaacagcaacagatgataccaaa

SEQ ID NO: 458308 - DNA, 100 bp, Homo sapiens
ggagtcagcacagtgcgtcggggacgaattcctgaactgtaagctggctaccagggccaagacacaggcagccatgccgcgcagcccaacatccagcgag

SEQ ID NO: 458309 - DNA, 100 bp, Homo sapiens
tcctgggcaaggggacgtctgcagctgagatctttcgaagatggtttggctgccttggagatttggagatctgatgccacgatgaggactcacacacggg

SEQ ID NO: 458310 - DNA, 135 bp, Homo sapiens
ttggagcaagggaaagaaccctggctggggaaaagggaagtgaaaagagatctgttttcaggtagacccagtgtaatcacaagcatccttgtaagtggcaaagaggcagaggagacagcgccagagaggcagctg

SEQ ID NO: 458311 - DNA, 75 bp, Homo sapiens
aacagggactcccatctggacgtctcgcctgccccactgcgtttctacttttccaggtatgtgggagagaacaat

SEQ ID NO: 458312 - DNA, 90 bp, Homo sapiens
tcttctgggagctgaggaaccagatatcttgaaaagctgccagaaagatctttgtgaccatgccctgcacatatcgcatgatgagctatg

SEQ ID NO: 458313 - DNA, 75 bp, Homo sapiens
cgcagtggtcgcttcttctccttgcaaactgcctagttgggctagagctgttgtccccaaaatattttatgtgac

SEQ ID NO: 458314 - DNA, 100 bp, Homo sapiens
tcggctttttgtggtgattgtgatgtttgcctggtctatagttgctgaatccttcaaggaatttgctgaattgctcaacgaggtagaaaatgagaggatg

SEQ ID NO: 458315 - DNA, 101 bp, Homo sapiens
agaaggtgaagctgctcagcaagaaccagagcatggggaagacactattgctaaagtcaaaggtcctcagaatggttggaatgaccctccagctttgaaca

SEQ ID NO: 458316 - DNA, 101 bp, Homo sapiens
tctctgtctagtttattaaagcatgaagatcatcagggttacacatcattttggaatgactgtatatcatctggattacgtggctgtatgttaattgaatt

SEQ ID NO: 458317 - DNA, 75 bp, Homo sapiens
tgccacgttcaaacaagcagctttttgaattactttgttatgcagaaagtatgcaaaatgggcattataagcatt

SEQ ID NO: 458318 - DNA, 100 bp, Homo sapiens
ttttatttggattaatgctactctccattgcacgattatttcagaaaatatttacaccagcagctccagttcataccaataaagaagatcctgctaccca

SEQ ID NO: 458319 - DNA, 90 bp, Homo sapiens
actgagtggagtgatgccattgacatcaacagtcagggaacacaggggctaacaatggacacccagaaggacgttcaacctccaaagcag

SEQ ID NO: 458320 - DNA, 100 bp, Homo sapiens
ggagagaggtacctctccttttccctctccctttccctaaggtctagaggagtcccaggagcagccaggacaggcggaagcagtggctgccatggaggag

SEQ ID NO: 458321 - DNA, 83 bp, Homo sapiens
ggatatttgcttggaaaaacgtgtgggtacgaccttgccctggtacctgacagtgtaaagaaggagctcctacaaagaataag

SEQ ID NO: 458322 - DNA, 75 bp, Homo sapiens
ggtcttggagcgaagagctcggaccaagcgctcaggtaattcagtgtcattggattttcagaattccttagtgtc

SEQ ID NO: 458323 - DNA, 74 bp, Homo sapiens
aggagtacgacgtgatcgtgctgggcaccggcctgacgacaaagaaacagccttggtataatagcacgttagca

SEQ ID NO: 458324 - DNA, 82 bp, Homo sapiens
tgtgaggagagtaaaccaagaagaaatccacagatttagttctgtggtgatggcacttctcaaatactggccaaagactcac

SEQ ID NO: 458325 - DNA, 100 bp, Homo sapiens
tgccttcttacagcagtagcagccaggaaaccctgagtcaagacacaacaggcaccatactggacataccttttatgtgcactgggactttttatttacc

SEQ ID NO: 458326 - DNA, 51 bp, Homo sapiens
aattactattcgtctgagagaatggctgtctgtgctgagacctataaccct

SEQ ID NO: 458327 - DNA, 90 bp, Homo sapiens
acccagcctgtttcacttcttgaaggctgcagatccctgggccagttggaatttcctctcccggaagctggccacccagcctcacccgcc

SEQ ID NO: 458328 - DNA, 100 bp, Homo sapiens
ggagagtgatgctccaggcaacacggttctgagtcaccttctgacacgagctccctctgcttgctttccaggttttgagtttgatcgatggctgaatacc

SEQ ID NO: 458329 - DNA, 82 bp, Homo sapiens
tgaattgaagaaaattgcacgtaatcacccaaatgccaatttggtgccctggttgtcagatgttggaaagcagtaggacgga

SEQ ID NO: 458330 - DNA, 82 bp, Homo sapiens
tggaactgaacttagctcgacggggctgaccgctctggcccagggtgtcacagtcctttgagcggtcggtgcagctcctcga

SEQ ID NO: 458331 - DNA, 75 bp, Homo sapiens
ccggatccagcatctctccaccatcgactacgtggaggacgctttcctgctctgggaccctaccaaggtgccccc

SEQ ID NO: 458332 - DNA, 100 bp, Homo sapiens
tgaaacaagaggaggaaacatctggacagggtggatccataaagaacccagccaacccgcagagggaggggaggggctgagctgtgaggagagcggggcc

SEQ ID NO: 458333 - DNA, 75 bp, Homo sapiens
gtgtggtgaattcaacacttccagaaactggagcacccatcctaactgatgatgttagcctgcaggtgttcatgg

SEQ ID NO: 458334 - DNA, 50 bp, Homo sapiens
cccagatgcaagcgtggattggggatgggaaactattgtgggaacaagag

SEQ ID NO: 458335 - DNA, 88 bp, Homo sapiens
cccagaagggctatgaaaagaaaaggtccaaactcctatctccttacagcccgcagacacaagggcacctgtgctggttgcacttgct

SEQ ID NO: 458336 - DNA, 83 bp, Homo sapiens
ggcggagactagcgctccggagcacgggcacgacgggggcaccttctcggctgctagtgacacttaactccgccatctgcgtt

SEQ ID NO: 458337 - DNA, 95 bp, Homo sapiens
aagggcaccatcgacccgaagttgcggattgcagccgagaacgagctcaaccagattatgtttgagaccttcaacaccccggccatgtacgtggc

SEQ ID NO: 458338 - DNA, 98 bp, Homo sapiens
gttcgggctcctggaggacgaggttactataacaacagtaccaaggtggctgtgaaaaccctgaagccaggaactatgtctgtgcaagccttcctgga

SEQ ID NO: 458339 - DNA, 100 bp, Homo sapiens
ccgcggcgggaggagcctgttcccctgagaacccttaggagaaatcttgagagtggacagcaattgtgaagatcgccagagagttctgtgtttcatcacc

SEQ ID NO: 458340 - DNA, 74 bp, Homo sapiens
ctcttttataaattcgttcctttattgccagtggatccaaacttctacagcaaaaacttacttcttttaggaaa

SEQ ID NO: 458341 - DNA, 90 bp, Homo sapiens
gtgctcatggtcaccggcttcgtcttcatccagggcatcggaaaatgagcgtaccaaggatctaatcattgagcaaagatttcatcgcac

SEQ ID NO: 458342 - DNA, 50 bp, Homo sapiens
ccaagacccaccccaccatcaagaactgaagcaggcccagaccctgatga

SEQ ID NO: 458343 - DNA, 99 bp, Homo sapiens
aaaccactatgcttaccgagatgcggttttcctcgcagaacgcctttatgcagaagcttggtgctaacagtggtttgcacatcatcatctttgatgaaa

SEQ ID NO: 458344 - DNA, 100 bp, Homo sapiens
agaagaggtcccaatcccccactctttccgccctaatggaggtctccagtttcggcctgaccgccgctgcctacagagtcacactcaatcctccgggcac

SEQ ID NO: 458345 - DNA, 75 bp, Homo sapiens
accggggccgctggggtctggacgggggtcgccatgaaggtggtcttctgccctgttaaagaagccctggaggtg

SEQ ID NO: 458346 - DNA, 50 bp, Homo sapiens
ctcgctccggaaaggggacacctggacgcaaatcaatttcacagtggcta

SEQ ID NO: 458347 - DNA, 100 bp, Homo sapiens
cctggcttctgcagctgtgctgtttcacaaaataagaaaatgcaacatggcagcagcaatggaaacagaacagctgggtgttgagatatttgaaactgcg

SEQ ID NO: 458348 - DNA, 75 bp, Homo sapiens
aatcattagttcagtgcagtgtctgacttgtgacaggcgtatagctggcattacagccatgttacagcagtcact

SEQ ID NO: 458349 - DNA, 100 bp, Homo sapiens
cccacctttcgatctgactgaatgttcattcaaccctgataatttggatcatacagagaatgcagcttctggaagtggaccatcagctagaggtcgctca

SEQ ID NO: 458350 - DNA, 100 bp, Homo sapiens
aactgacttcctcacagagggatttagctgtaagctacacttctggaaaattcagtatggacagtctccgacttaggatttttcaactttaggatggtgt

SEQ ID NO: 458351 - DNA, 74 bp, Homo sapiens
cagaggccaattcgtcgcggcggcggtggagatcgcaggtcgctcagttactccacaggatccgctgaacatag

SEQ ID NO: 458352 - DNA, 82 bp, Homo sapiens
ctgcctcagcctcccgagtggctgggactacagaaagaaatttcagagcttccaagaccacaaacttaaaataagtaaagaa

SEQ ID NO: 458353 - DNA, 100 bp, Homo sapiens
gtggtcagctttttgtccctgtgtgtcatcctgcctgtcaacctctcaggggacttgctgggtaaattcgaaccaccattatttcacccgaatgtgtacc

SEQ ID NO: 458354 - DNA, 74 bp, Homo sapiens
ctcgggcggcggtggagcgggagcgcgcagcagggtgaggtggctttgaccccgggttgcccggccagcacgac

SEQ ID NO: 458355 - DNA, 100 bp, Homo sapiens
gcttccagtggaggcattttggggcagaatacagagatatggaatcaggaaaattgcctaagaattatgacccaaaagttaccccagatccagaaagatg

SEQ ID NO: 458356 - DNA, 122 bp, Homo sapiens
cgcagctgtaccgccagttcaccaccaccgtgcaggtcgtcatcttcataggctcgctgctcggttcggctttccagtttggcagcagcactacaaatttcaacttcacaaacaacagtcca

SEQ ID NO: 458357 - DNA, 100 bp, Homo sapiens
ccggatttcattccgcggcgggggctccgcgagcggaattccggcggctgccgtgactccagtgcaagatgtggagagcatcttgtgcgcaccatactgg

SEQ ID NO: 458358 - DNA, 100 bp, Homo sapiens
aaaaccaaacaccctcagctccacattgagagcaaaatctacaagatgatgcagggaggaggtactccaaagattcaggtttactcacgtcatccagcag

SEQ ID NO: 458359 - DNA, 83 bp, Homo sapiens
aaaagatacatgggtcttggaagataattactcaaaatatgcagggaagtttcaagtgtcgtcagatgtatcacgcacccaca

SEQ ID NO: 458360 - DNA, 83 bp, Homo sapiens
tcaatatctgtcttcggtggactccttcggcagtccacccaccgccgccgcctcccaggtacttgaactggcaggaaatgcat

SEQ ID NO: 458361 - DNA, 98 bp, Homo sapiens
taatgatggaaaataaattggaggttcataaggataagacattaaaggaagcagtagaaatggcttataaggattgttcaagtttagaagaatacaac

SEQ ID NO: 458362 - DNA, 78 bp, Homo sapiens
attatgtcactgttttgcatccttgttacataactcagttcctggtagattacttttgtgaatgatgtaaggattccg

SEQ ID NO: 458363 - DNA, 100 bp, Homo sapiens
acttggaagatgcggtgaatgaggggctggaaatagtgagaggacgtctgcaaaatgctgccctgtatgatgagattcgtcagtttcgcaaggcctgtgg

SEQ ID NO: 458364 - DNA, 98 bp, Homo sapiens
cagcgtctgcattgctccggactcagccaagttccccaacggctccccgtcgtcctggtgctgcagcggatcccaagtgatggtggtttcctcggagg

SEQ ID NO: 458365 - DNA, 71 bp, Homo sapiens
ggaagacatatggtgtggaatgacccagaaggactacatcacagcaaggctggagtgcaatggcatgatct

SEQ ID NO: 458366 - DNA, 75 bp, Homo sapiens
ctggatcacaatgaatgtctaattatcacagcggaagatccatccaaaagctatgtgaaattacgagactttgtg

SEQ ID NO: 458367 - DNA, 96 bp, Homo sapiens
caagcggcctcacagtcatggatctggaagctgagggcacgtgtttgcggttcagccctttgatgaccgcagcagatggagtcttgctctgttgcc

SEQ ID NO: 458368 - DNA, 101 bp, Homo sapiens
atattggaagcgctttgatttacagcagctgcaggttcatgatcaagagggcccaaggacggaagcgctttgggatgaagaattttaagaagagatggttt

SEQ ID NO: 458369 - DNA, 82 bp, Homo sapiens
acaagttccacaataactgttaccgccttgcaccagaatagagagatgatagacccagacaagttctgcagcctctgccatg

SEQ ID NO: 458370 - DNA, 95 bp, Homo sapiens
ggcaaagttcacgtgactgtggatctcaagtactaccggccaactgaagtggggatatcattttcaatgcccaatacccagaactgcctcccgat

SEQ ID NO: 458371 - DNA, 75 bp, Homo sapiens
aggataagtctcatgacacctatttcactggccttgaatgtggacataagttttgtatgcagtgctggagtgaat

SEQ ID NO: 458372 - DNA, 100 bp, Homo sapiens
cgagcggcgagccggagcgcggagcccggctcccgcaccatggaggaggacgacagctacggctggaagattatatctggatcaccaccagagcaagccc

SEQ ID NO: 458373 - DNA, 100 bp, Homo sapiens
caaaaccagtcacaagacctggagttgtctgtgcagatgtacgcccaagccgccctggatggagactcccaggcaggcagctatctctctagcagatgac

SEQ ID NO: 458374 - DNA, 100 bp, Homo sapiens
gtgggacccaaatctacaatgagccagagcccagaggtggagcagttagggagggttgtggaactggacagtgacatggtagatatcacccaggagccag

SEQ ID NO: 458375 - DNA, 104 bp, Homo sapiens
ccgggaggtgctctcccacctgcaggcgcagagagtggagctgcaggcacagataaagttgtctgattttggtttctgtgctcaagtttccaaagaggtgccga

SEQ ID NO: 458376 - DNA, 90 bp, Homo sapiens
cctttgtggacagattatcaacacgctttaaatcctatgtagcaatggtgatgtcttggcattgcccattttcaagcaggaagattccag

SEQ ID NO: 458377 - DNA, 96 bp, Homo sapiens
gagccctgttccaaagcctcctggaccgtccaagaagttaatttggagtggcccctggagtcagtttcctacaccatccgaggccccacccagcac

SEQ ID NO: 458378 - DNA, 75 bp, Homo sapiens
gcggacgaggccgggacttggccgagcggatcctaataaggggaaaatggtcgtcaaagtcctacattttagctt

SEQ ID NO: 458379 - DNA, 100 bp, Homo sapiens
ccgccaccaagatgagcagggcccttgcggagttccgcgtccgaggtgtgaagtgtccacaggatgaaatgtccgagtcaggccagtcctcggcggccgc

SEQ ID NO: 458380 - DNA, 100 bp, Homo sapiens
agtgccgtgcgccgcagcccgggcccaggccccggcagcgcctgggacaagattttctaccctagcaaggatggtacgaagattccaatgttcattgtgc

SEQ ID NO: 458381 - DNA, 98 bp, Homo sapiens
aaagcacaggaatctcactctgttaaagctggtctgttctaactgagattttaggtgatgggcaagtcagaaagtcagatggatataactgatatcaa

SEQ ID NO: 458382 - DNA, 90 bp, Homo sapiens
aagccgtggaataggtgtatcaagtaatggtgcaaagcctgaagcggcttacagggagaacacagttggcctccaccgtttctgccccac

SEQ ID NO: 458383 - DNA, 84 bp, Homo sapiens
taaatttgtgaatgctgtgtatgataccttacttaatactttttctggatatgccgcagaaggatccgtgccagaagcaagcct

SEQ ID NO: 458384 - DNA, 75 bp, Homo sapiens
atctcttctaacatccagaagatcacacagtgttaatgaggacctaatttgcttcaaagatatcaaaccagcagc

SEQ ID NO: 458385 - DNA, 90 bp, Homo sapiens
gcccaccgcgcactcggagatgcagccgctgggggggccctcagcctcttggccttgaacgggctgttcatcttgattcacaaacacaac

SEQ ID NO: 458386 - DNA, 83 bp, Homo sapiens
cgctgaatgggctgaaggaggaggacaaagagcccctcatcgagctcttcgtcaaggtcgggaaagaggttaaagaagacacg

SEQ ID NO: 458387 - DNA, 90 bp, Homo sapiens
tggctgacccggatcgtgctcctgaaggccctagccttcgtgtactggcagctggtggaatttttgaagaaaatggaatctcgaggcccc

SEQ ID NO: 458388 - DNA, 100 bp, Homo sapiens
acagaagctccaggatattatgaagttataaggttccccatggtaactctcgaagtgataaaagctgtttctttgtgaaatatgggcccgaaaagaaaac

SEQ ID NO: 458389 - DNA, 90 bp, Homo sapiens
gaccgcaacacggccttggagacgctgcaccagaatagcatcacgtcagccatgtcatctgagcctcccccaccaccacagccccccacc

SEQ ID NO: 458390 - DNA, 75 bp, Homo sapiens
gctctgtctcagcgccgcctccctgcttcttaacaggccacatccacgtcctccgagcctacatcaagacccaag

SEQ ID NO: 458391 - DNA, 96 bp, Homo sapiens
cggggacctgcaggctgccattgaggatgagatggagagtgatgagaatgaggacctcatcaacaggcccttgtagctggaatttctcaggcccag

SEQ ID NO: 458392 - DNA, 100 bp, Homo sapiens
tttttggacctgaaacagaaattctggaacacctatatgctgaatgccaagggaacagaagcacccgcagtagtgacagaggaggaggatgatgatgaag

SEQ ID NO: 458393 - DNA, 87 bp, Homo sapiens
gagaaagagcgcgagcgcgagaaggagcgcgagcttgaacgcagcgtggcgtccgagctgggccacagcctgaacgagaacgtcctc

SEQ ID NO: 458394 - DNA, 101 bp, Homo sapiens
cacacctctagtggacccctcagtatatggatacggagtacaaaaacggcccttggatgatggagcggaatggccaaagactatgacgggtcttcctagca

SEQ ID NO: 458395 - DNA, 98 bp, Homo sapiens
tcctataaccacccggtcctgggaatgtacgacgccaaagatgacttccctcttaggaaaacagtcatatttgatcagaaattggatgaaccttcggg

SEQ ID NO: 458396 - DNA, 100 bp, Homo sapiens
ctctttagctgaaatacttctgaagatgcttgtgaccacaccagaaaaatgggatgtagtgacaagaaagagtgttggggatgtagctctttcccagatt

SEQ ID NO: 458397 - DNA, 75 bp, Homo sapiens
gtgtacctcctggctgaggaggccgaaggcatcggggacaagggcaaactctttgattctacaatagctgatgag

SEQ ID NO: 458398 - DNA, 100 bp, Homo sapiens
gagcaattgaagctgactactaaggagaataagtttagcagccactgctgcatcaggggcttttgttccaccaccaagtgcacaagagatacctgtggtc

SEQ ID NO: 458399 - DNA, 51 bp, Homo sapiens
aggatctccactcggccctgacacagatgaagatgacgccaacagactcgg

SEQ ID NO: 458400 - DNA, 101 bp, Homo sapiens
gttgctgacccagaggagagttctccaaacatgatcgtttactgcaaactagaacgagtaaatctgtctgcagcccagacactgagagccgctttcatcaa

SEQ ID NO: 458401 - DNA, 112 bp, Homo sapiens
atgtttcattctggacagctggtaaaagtctgtgccccaatggttcgatattcaaaattttgaaaagccatggtaaagatgaagaatgtgttttggaagcagaaaataaaaa

SEQ ID NO: 458402 - DNA, 101 bp, Homo sapiens
ccaagacatccctgctgagagagccaagatcactctccgggcgcattgttggaggggtttggtggttcttcaccctgatcataatttcttcctatactgcc

SEQ ID NO: 458403 - DNA, 83 bp, Homo sapiens
gcaaccattgacgccatgtcgggttattcgagtgaccgagaccgcggccgggaccgaggcgaccccgataacgtggtgttgtg

SEQ ID NO: 458404 - DNA, 100 bp, Homo sapiens
tcatctttaactgcttggccgtgcttgccctgtcatcccacctgagaaccatgctcaccgacccttgttcctttctgccgaaattctccattcatataga

SEQ ID NO: 458405 - DNA, 74 bp, Homo sapiens
ggaggatcgacctcaacctggatatcagcccccagcggcccaggcccagtgacaacctcgtcaacaagccagac

SEQ ID NO: 458406 - DNA, 100 bp, Homo sapiens
aagttttccgtgaacatgccaacaaattgattgagaatccgaaagtcatctgagttggctatctgcacgttctctctgtaccagtgaacttgaactgtgg

SEQ ID NO: 458407 - DNA, 100 bp, Homo sapiens
atatccagagcctgctctttcatcccaagcaagaggactgggtgctggcctacagtttggatcaaaagggaggaggtacaggagaactgtgtgcggtggc

SEQ ID NO: 458408 - DNA, 75 bp, Homo sapiens
gtttcgggcatcgcagctgcccgccgagacgctgcaccagtaaattcctcatctatgcctgtctgctgctgttct

SEQ ID NO: 458409 - DNA, 90 bp, Homo sapiens
gcaaggggacgtctgcagctgagttatcttatgatgaggcttttgctatggctaatgatcccttggaaggcttccatgaagtaaaccttg

SEQ ID NO: 458410 - DNA, 100 bp, Homo sapiens
cttagagaagagcttcagaaacagagactgcatataggttgctgtagatgaatgttcttagctgtcatgtttaaaaatacttctgcttcgttacctcaag

SEQ ID NO: 458411 - DNA, 88 bp, Homo sapiens
ccgcgtcgtgatcgactcggacacagaggacagcggcagcgacgagaacctggatcaggtcctctcagggtgcgccatcattgtccga

SEQ ID NO: 458412 - DNA, 75 bp, Homo sapiens
catctctgctttttcccaagaagagcaggaaatggccaaaccccaggtattatacctgaagaaccttagccctcg

SEQ ID NO: 458413 - DNA, 75 bp, Homo sapiens
ccgtcctttcctttctccctcgcgttagttgatattcactgatggactccaaagaatcattaactcctggtagag

SEQ ID NO: 458414 - DNA, 88 bp, Homo sapiens
tggtggtggtggtgtcttcctgtctcaacgatacctattttctagtgctgagatcctgagacaatgaggcggggtttcaccatgttgc

SEQ ID NO: 458415 - DNA, 90 bp, Homo sapiens
caaaagacaggctcttcacctgaagatgggcttaggtcacgagcaaggatttggagccccttgtttaaaatgcaaagaaaaatgtgaagg

SEQ ID NO: 458416 - DNA, 82 bp, Homo sapiens
ttgataacaccctgtaacagctgatattggtaaaggttttcaaggtgtcatgaaaagatggggatttaaaggccagcctgct

SEQ ID NO: 458417 - DNA, 83 bp, Homo sapiens
ggagctcgatggcgagccaacagtcactcttcagaatggagccatctgccaccatcctgctgcttttggtccttcactgccca

SEQ ID NO: 458418 - DNA, 82 bp, Homo sapiens
tgtgttccatggcagggaacttttggcagagctcccactagctatcgagactcatttgatccgcaagtctagcagcggacta

SEQ ID NO: 458419 - DNA, 75 bp, Homo sapiens
ccgcagcacagccgcgacttcaagggcaatgtattccaagatgcagtcttcaatcaaacagttacagttattgaa

SEQ ID NO: 458420 - DNA, 96 bp, Homo sapiens
gatatcgacgtcgtgatccagaagtccagagctgagaaggactgcctgtttgcagttggtagctggcagtgttgtgatggcttttgaagaagtatg

SEQ ID NO: 458421 - DNA, 74 bp, Homo sapiens
tggactcatagtcactgccagaaaggtcaaaatgcagatcttcgtgaaaacccttaccggcaagaccatcaccc

SEQ ID NO: 458422 - DNA, 96 bp, Homo sapiens
ggaatattgctacatactatggtgcttttatcaaaaagaacccaccaggcatggatgaccaactttgggtgattgaagatagtactggagtccgcc

SEQ ID NO: 458423 - DNA, 100 bp, Homo sapiens
gaggagcagctcctgcccctgtccgggggatgactgattctcctccgccaggttttggctacgggcctccacctccaccgccagatcagtttgcccctcc

SEQ ID NO: 458424 - DNA, 83 bp, Homo sapiens
gacagcgggaggcagagggaggaacctggacgccggaagccgggaaatgaggtcagctggcggctccagtcctgaaggcggag

SEQ ID NO: 458425 - DNA, 135 bp, Homo sapiens
tgagccagccacaactcccagaggtttccgagcactgcccataacccaacccactccccggggagatcatgcacgccctgaagatgacctggcacgtgcactgctttacctgtgctgcctgcaagacgcccatcc

SEQ ID NO: 458426 - DNA, 98 bp, Homo sapiens
cggggtcggcaactacaagttaggtggctcgccctcccctacctgcggaagagtcaagggaatgtcatcaacatctccagcctggtgggggcaatcgg

SEQ ID NO: 458427 - DNA, 74 bp, Homo sapiens
gctggggagtctgtgtccttccagctgcagatacggaggatgatgatgacgacatgggagaggatgaagatgag

SEQ ID NO: 458428 - DNA, 90 bp, Homo sapiens
ccgccttccggcagaagctggtcagtcaaatgtgtatgcccacgcaggcgcgacgctggaggggaagatgtatatcacctgcggccgcag

SEQ ID NO: 458429 - DNA, 74 bp, Homo sapiens
ccgagttcaacatcctcctggccaccgactcctacaaggttaattatagaaaatgccaagtaggaaatttgccg

SEQ ID NO: 458430 - DNA, 49 bp, Homo sapiens
tgggcggcatgcaccacgcgctgagagaatttgccatctgccttagtaa

SEQ ID NO: 458431 - DNA, 75 bp, Homo sapiens
ctgcccgtcaacgagtcctttgctcgggttcatgacgctctcgatattcctgtgcagaaacctggaccacgtcta

SEQ ID NO: 458432 - DNA, 127 bp, Homo sapiens
gaagagcaaagggagtgacaaagactttgtgattgtccgcaggcctaagctaaatcgagagaactttccagatgcggcattccaaaagaactcactgtcctgattgggatagcagagaaagctgggg

SEQ ID NO: 458433 - DNA, 101 bp, Homo sapiens
taccgtgtgcctgactttggtgtctgggaaagaggaagcaaatataataatggcagcacagagctacattcgagatccagacatttaatgtggatgcacca

SEQ ID NO: 458434 - DNA, 83 bp, Homo sapiens
ggtggaaagaatagcacttggagtggaaacctaaagatttttcatgatgatggtgtattctgggtcactttctcttgcatagc

SEQ ID NO: 458435 - DNA, 102 bp, Homo sapiens
gagctatttcagaactgttctcaggactcattattttaacatttgggagaaacacagccagaagcgaagcagcagttttgggaatttcgatcgttttcggaa

SEQ ID NO: 458436 - DNA, 89 bp, Homo sapiens
tccagttggaattgaagaatattcccaagtccttcacccgggtggtgaaggcatttgtggtcctggcctcgcagttcctgtcccatgac

SEQ ID NO: 458437 - DNA, 106 bp, Homo sapiens
ccacctcctcctttagaaaactgatcttaatacagttcaaggagcagggacaagttacaggaatgttctccaagcagcaatccaaaagagtctcaaggatccttca

SEQ ID NO: 458438 - DNA, 100 bp, Homo sapiens
ggggggagccggagccgcctgggatgttcaggtgaatcatttgatgtaaaagacttgactccataatctgcatctgtcctaatgctgtcatctggagtag

SEQ ID NO: 458439 - DNA, 75 bp, Homo sapiens
agagggagccgcagctgatgtcaggtcaaaatgcagatcttcgtgaaaacccttaccggcaagaccatcaccctt

SEQ ID NO: 458440 - DNA, 98 bp, Homo sapiens
cagcactttgtggagaaagtcgtcttccacttgcacgaaagctttcctaggccaaaaagaggcgcatattaaatttcctattgactacccctattcac

SEQ ID NO: 458441 - DNA, 75 bp, Homo sapiens
cttcgagcgctacatggcccagctcaaatgctactactttgattacaagaatcagagatcattgatttcttcctg

SEQ ID NO: 458442 - DNA, 101 bp, Homo sapiens
aggaagggctctgctctacacactggtgtctcctgcggaagggcagctgggcacgccttccagaccgagtatacaattggaccgtggatgaggtggtacag

SEQ ID NO: 458443 - DNA, 100 bp, Homo sapiens
gtgtgagtgccctcaggggttccccaggaatatcgatacaacaccaacaggagagaagatgactgaggaggaggtggagaccgttctggcaggacacgag

SEQ ID NO: 458444 - DNA, 83 bp, Homo sapiens
ctcccgtcccgcggtggttgctgctgctgccgctgctgctgggcctgaacgcagtttggtgccctggttgtcagatgttggaa

SEQ ID NO: 458445 - DNA, 100 bp, Homo sapiens
actcagtttgtttctgctgattacacccgtgcccaggagcttgacgccttagataacagccatcctattgaatgtgatctgtccccttgggcagtgagcc

SEQ ID NO: 458446 - DNA, 75 bp, Homo sapiens
ggaggatagactacagtgccgctgtgtctcctttcctcttgggccgggcactttgggctgccagtcggttcactg

SEQ ID NO: 458447 - DNA, 125 bp, Homo sapiens
gctggacctgaaggaggccggtgactttcacttccagccagctgtgaagaaggatgaccatgaaagctgtggttctaattctaccaaccgtagtactgctgagagcacaaaatcatcaatcaaac

SEQ ID NO: 458448 - DNA, 90 bp, Homo sapiens
ggaagatccacttgctggagggagacttggacaaggccattgaagtctacaagaaagcagtggagtactttgatggaaacctggagaagc

SEQ ID NO: 458449 - DNA, 50 bp, Homo sapiens
ggaagatggcggctgggttcaaatagatgcaacgatcaggacacaaggac

SEQ ID NO: 458450 - DNA, 82 bp, Homo sapiens
acctgttttctgggagcttcgaagagttacactgttagaccttatgatagccaagataacgagtgatgagccactcaccaag

SEQ ID NO: 458451 - DNA, 83 bp, Homo sapiens
ccgcaaccattgacgccatgtcgggttattcgagtgaccgagaccgcggccgggaccgagggcacttccgttccggcgcccct

SEQ ID NO: 458452 - DNA, 71 bp, Homo sapiens
cttcctggacatgaccaactggcactcaaggagttgcccctggtcctgtaattggacttcaggcaccatct

SEQ ID NO: 458453 - DNA, 75 bp, Homo sapiens
gaaaacacagttattgttggtgtagtacgcagctcgggttcatgacgctctcgatattcctgtgcagaaacctgg

SEQ ID NO: 458454 - DNA, 100 bp, Homo sapiens
tatagagatgtgatgttggagaactacagaaacctcgtctccctggtgacaacactgcagctgaaggaggagttgctggatggagaggattataatttcc

SEQ ID NO: 458455 - DNA, 95 bp, Homo sapiens
tagtttctaaggatcatgtctgcgagccaggattcccgggcgtgatggtgggcatgggtcagaaggattcctatgtgggcgacgaggcccagagc

SEQ ID NO: 458456 - DNA, 75 bp, Homo sapiens
ggactttctgcagtgcctctgagaacttacgcagatcagccgagttgcactgctgtgatccatcctcatctccta

SEQ ID NO: 458457 - DNA, 98 bp, Homo sapiens
tttaccaagacctgtacacacattacatatgaagggcgccctaatggagatcatccagctcgccagcctcgactcggacccctgggtgctcatggtcg

SEQ ID NO: 458458 - DNA, 100 bp, Homo sapiens
cttttgcaaggagaaaattttggtggagaattatccaacaagaaaaagacctgtggctattaagataggtgagagtgtggaagaaaacgccagcgttgtg

SEQ ID NO: 458459 - DNA, 75 bp, Homo sapiens
cgcggcgcgcggcggtgtgaagttacagcccggccaggcttgggcactgtttaaaggaaagttccgagaaggcat

SEQ ID NO: 458460 - DNA, 100 bp, Homo sapiens
gattgttcctaaaccagaagaggaggttgcccagaagaaaaagagcctgatccggggatggcctctgcctccaccacaatgcatactaccaccattgcag

SEQ ID NO: 458461 - DNA, 100 bp, Homo sapiens
ggtacagtctctgcacctcgcgccccagcagtgccacaccagaggaatataatacagttgtacagaagccaagacaaattctgtgtcaattcattgaccg

SEQ ID NO: 458462 - DNA, 74 bp, Homo sapiens
ggaagaggaggaagaagcagaagccgaaaccgccaaagccagccaagatagccaggttaaccaaacgctttgaa

SEQ ID NO: 458463 - DNA, 100 bp, Homo sapiens
attggcagagacccactgtctggtcagaaagcaacattgaatgcagaagaaatggcggacttctacaaggaatttttaagtaaaaattttcagaagcaca

SEQ ID NO: 458464 - DNA, 97 bp, Homo sapiens
tccaggtggatgaagaccacagagaaaggatgggaattccacagtgactataagacctacttggactttgtccttgcattagaaaacagaaaggaac

SEQ ID NO: 458465 - DNA, 90 bp, Homo sapiens
gatagacctttccaaggggaggatgtccatggaatgtcttacccaatttcaggtttagtgaagatgtataaagcaaaggattacaatgtg

SEQ ID NO: 458466 - DNA, 75 bp, Homo sapiens
ttttactgtcaagacatttcttcggcattctgcaacagggttcagaatctcccatgatgattggtgagttgagaa

SEQ ID NO: 458467 - DNA, 107 bp, Homo sapiens
accagatggtgagagcgatgaggtcggagtgattcccagtaaacgcagaaccaccgggaggaactgggccattctaacacccgttgctaccatgctggccacccgcc

SEQ ID NO: 458468 - DNA, 100 bp, Homo sapiens
ccggcccggccgggtcgggcggcccaggtgggagagataaacgtggaggtcccattttaacgtttccggcccgcagcaatcatgacagaatacgacagga

SEQ ID NO: 458469 - DNA, 51 bp, Homo sapiens
gttccaggaggtggcaccaagagagcaagatggagtcccactctgttgccc

SEQ ID NO: 458470 - DNA, 74 bp, Homo sapiens
cgagggtcaacgagaaagagatcgaatgtcgtactctcaggaggctccaccatgttcagggatttcggacgccg

SEQ ID NO: 458471 - DNA, 100 bp, Homo sapiens
ataccgcaaacttccttcactggtgtagggacattggggttgatgaaacttacctctttgaatctgaaggtttagagctgtgtaccatggagtgtggtag

SEQ ID NO: 458472 - DNA, 75 bp, Homo sapiens
tgcgtcctcatcgggcttatgttcgagggattgaggagactgaagaatgctgaagacaggctgatgggctcagct

SEQ ID NO: 458473 - DNA, 75 bp, Homo sapiens
ggaacttgctcgactgagagactcagaaatcatcctcatcctttgataactgtgcttgaacacagacctgattgc

SEQ ID NO: 458474 - DNA, 103 bp, Homo sapiens
ctcggatacgatagaaaatgtaaaggccaagatccaggataaggaagggaagatcagttttcctgccatccaggctgctccctccttcagcaactcattccca

SEQ ID NO: 458475 - DNA, 90 bp, Homo sapiens
agttacaagactttgctgtagatgatccacatgatgacaagagagcacgttttcaatatcataggagcatttgatattccacgctttgtg

SEQ ID NO: 458476 - DNA, 90 bp, Homo sapiens
gaggactaggaaggtgccccgaaaagaattcagaagcccccctccatgcgcctgaaggcccgacccagcagccctggcttttccgtgctt

SEQ ID NO: 458477 - DNA, 83 bp, Homo sapiens
cttatcacccacacccacacgtgttcaatacacctcccacctgtcctcaggcatatcaaaggctgatcagctgaccgaagaac

SEQ ID NO: 458478 - DNA, 143 bp, Homo sapiens
agctccagatttgatggccttcacaatccaagttccacaatatattgactactgccacaattccggagtatgctgctgctgttccgctttgcgtcctcgctacaaacgcctggtggacaacatattccctgaagatccaaaag

SEQ ID NO: 458479 - DNA, 100 bp, Homo sapiens
ttttgcttttctttgggctggaggaagagcatcctatggtgtgtcaaaaggcaaagtgtgttttgagatgaaggtagttgatgtcacttggcgatattcc

SEQ ID NO: 458480 - DNA, 98 bp, Homo sapiens
gctcaagcaatcctaccatgtcagccttcccagtagctggaactacaggaatttttgagagatatcttcaatctcctgtttttgttgccaagtctaaa

SEQ ID NO: 458481 - DNA, 75 bp, Homo sapiens
aggagagtgcgaccatggctgtagtaaaagaaaatgtggacacagacttgccaggcagcctggggcagagtgaag

SEQ ID NO: 458482 - DNA, 74 bp, Homo sapiens
ggcgatccgctggcgctagtctgaccctccgccaggcaaaaggaagatggcccactgcgtgaccttggttcagc

SEQ ID NO: 458483 - DNA, 96 bp, Homo sapiens
ctgtttgacggtattaagaaacatcgagtcactttgcctggacaggaggaaccctcatcctgaggttagcattacacttctcccagtggagcccat

SEQ ID NO: 458484 - DNA, 101 bp, Homo sapiens
tccgctgctaaattacattggagctgggctatcagtagtaaggttcatctctaacaagtatttagtgaaacgacagagcagagactatgatgtggaatggg

SEQ ID NO: 458485 - DNA, 87 bp, Homo sapiens
agagcgtgaccgagagcgcgaatatcgtcatcgttagaagctcggtcaaggagtgtgatgactggcgagcagatggctgccttccat

SEQ ID NO: 458486 - DNA, 100 bp, Homo sapiens
gcttggttaaaacctgacacttttaacagttatcttcaggcagagtgagaagctgcagcaatgtctgattttgtggaaagcgaggctgaggagtcagagg

SEQ ID NO: 458487 - DNA, 96 bp, Homo sapiens
gccctaccttctaggtgtcaacaacctggaattcaattggctcttgccttattgggtgggaggacgctactcgctgtggtcggccatcggactctc

SEQ ID NO: 458488 - DNA, 83 bp, Homo sapiens
ccggagcctgggcccggagaagcgcgattatatctgtccaagatgcgagtctggttttatcgaggagcttccggaagagacca

SEQ ID NO: 458489 - DNA, 82 bp, Homo sapiens
cagctgttgaagttcttaacctagtagcccaggaatgtagtgctgggatggaagcttcctggcgccaggtggccggtggccg

SEQ ID NO: 458490 - DNA, 100 bp, Homo sapiens
aatgcataaaacattgaagttaaagtatgcagaggtaaagatgagcccagcagctacacatgtacaacttgcaaacagccattcaccagtgcatggtttc

SEQ ID NO: 458491 - DNA, 83 bp, Homo sapiens
gacaaggcaaagcgaaattggtcattctcgctaacaactgcccagctttgagctcatgatggagcagtccaagaagtcctccc

SEQ ID NO: 458492 - DNA, 100 bp, Homo sapiens
cggccggcctgggcaggtgtcttcctcgagaggcaggcaggggatcccggacgtgagtccgtgcagttgggattttcagtcaatgcatcatcggagcgac

SEQ ID NO: 458493 - DNA, 96 bp, Homo sapiens
ttctcgattcgctgtcggaggagaatgagaccctggtggagtttgctattgggtgaggtggctttgaccccgggttgcccggccagcacgaccgag

SEQ ID NO: 458494 - DNA, 90 bp, Homo sapiens
gggctgaccgctctggcccagggtggaacggaaaacagttcttccttcaaagcatgcagtacctgaagtaatagaagactttctctgcaa

SEQ ID NO: 458495 - DNA, 101 bp, Homo sapiens
ctgatttgtccctggggcggcagcgcggacccgcccggagatgaggattctaacattttcagagaaccttttggaaagaacaagcctacttcaataaatga

SEQ ID NO: 458496 - DNA, 90 bp, Homo sapiens
aacaggacggacctccatgcctttgagaacctagaaatcatacgcggcaggaccaagcaacagacttcatgtattttgaaagatctccac

SEQ ID NO: 458497 - DNA, 75 bp, Homo sapiens
aagtggacattttactggctcaagttgcccgaagctcagcagagagtcggaggctgctttttaaacctgatgcca

SEQ ID NO: 458498 - DNA, 80 bp, Homo sapiens
ccaggagcttggggctgcagacaagcatggtgttcccagtgacctgacagcagaggagcgtcaagaactggagaacatcc

SEQ ID NO: 458499 - DNA, 90 bp, Homo sapiens
caaggacaaggaggaaattgtgatctgcgatcgagcctcggtcaaggaggtggagatgacccctgagaagttcagtgtcttaatggagaa

SEQ ID NO: 458500 - DNA, 80 bp, Homo sapiens
cacgggcaaggcggagagtgacggagtcggcgagcccccgcggcgacagcggcagtacatacctgtgaaaatgaagagca

SEQ ID NO: 458501 - DNA, 50 bp, Homo sapiens
ctggagagcctctctacaatgctgtgggtgtgggcaataatagtgaaggt

SEQ ID NO: 458502 - DNA, 108 bp, Homo sapiens
caggctggattgagaacatcctctccgtgcagccctacagccaagaatgggagctgtttttcccaggtcatgagtctcgggctacagaagctttgtgctgggcagaag

SEQ ID NO: 458503 - DNA, 100 bp, Homo sapiens
gcggcggcggcggcggctgctgctgctgctgcccgcgtccgaggctcgcgggcggcgggcccggtgttctaagaacggaagcatctgggctggatggaat

SEQ ID NO: 458504 - DNA, 100 bp, Homo sapiens
cagattcgtggagctgccccaccgtacgtctatgctgtggggagaggtgctggagaatctggtaaaagcaccattgtgaagcagatgaggatcctgcatg

SEQ ID NO: 458505 - DNA, 107 bp, Homo sapiens
aggttggatttatgcaaacttgggccaaaggacagttagaagacagtaggtagagttggctttgtgggacacagctgggcaggaagattatgatcgcctgaggcccc

SEQ ID NO: 458506 - DNA, 51 bp, Homo sapiens
gaaagacatggagattctcttaaaaagaagtttcaggcacctgcaagagag

SEQ ID NO: 458507 - DNA, 96 bp, Homo sapiens
tctcagggggcatagacttcaaccagcctttggtcatcaccagggagatgcgctctgtgctgcggaaggcgggctccccgcgcaaggcccgccgcg

SEQ ID NO: 458508 - DNA, 99 bp, Homo sapiens
aaaaattcttgtcagacaagaacaatccagatgtttgtgatgaggtaatttcatctgtgccaaagcctccagaggacaagccagaagatgtacatacaa

SEQ ID NO: 458509 - DNA, 83 bp, Homo sapiens
ctcaatctctggaaaaacttcttgccaaccaaaagacatcatttcagctttccatccatttttatttatggacatactgctag

SEQ ID NO: 458510 - DNA, 75 bp, Homo sapiens
cttcccagagcggagacaacagcagtgagcaaggccctgggaggagcggggacactgaggacctctctccaaatt

SEQ ID NO: 458511 - DNA, 82 bp, Homo sapiens
ctcagttggaagcagccgatccagcctgcggagcctgtggggcagcctactttggggataaaggattatttggtcttctgga

SEQ ID NO: 458512 - DNA, 100 bp, Homo sapiens
ctcctgtagggctagattcagagagcagcttctgatatttggagggtgctcagaattttgatgtcatacgactatcaacttacagaacagcctgcaaatt

SEQ ID NO: 458513 - DNA, 134 bp, Homo sapiens
ctgcagctggccatggcctacagcctgtcagagatggaggcagctgggaagaaacccgcagctccaggatgttcacctgctccagtcagtgggaggggggacaagaaggccagtgctcgccccctgcctccgtg

SEQ ID NO: 458514 - DNA, 98 bp, Homo sapiens
gcgcaacaaaggagtcacccggcgatgagccccggcacccccggaccgaccatgggcagatcccagggcatgccgccgatgactcaggcgccccgcat

SEQ ID NO: 458515 - DNA, 100 bp, Homo sapiens
cggtgctggtggcggcggcggcggaggcgacggcagcggtcccagcggcagcagcagcggcgggaggagcctccgggcaatggcaccagcatgatatcat

SEQ ID NO: 458516 - DNA, 75 bp, Homo sapiens
ttcttcacccatttctcgtctctcatctacatcgccttcatcctgggcagatggaatttcactcttgttgcccag

SEQ ID NO: 458517 - DNA, 83 bp, Homo sapiens
atagccctgcctctagtccctgttccccaccactgaaggagaaggaggccactgtctgcagctcccgtgaagatgtccactcc

SEQ ID NO: 458518 - DNA, 95 bp, Homo sapiens
ctgtggccgctgctgctgctgctgctcctggaaaccgtacgcctgcctcacaccttgcgatgcgccaacatcaccatcattgagcaccagaagtg

SEQ ID NO: 458519 - DNA, 100 bp, Homo sapiens
gccagctgcagccccggctgcccactcgcctcacctgagcctgggatctgtacccagctctgaaaggtgtaaacacagttttccactgtgcgtcaccccc

SEQ ID NO: 458520 - DNA, 99 bp, Homo sapiens
catgaaagttttcagcctcatccagcaggcggtgacccgctaccggaaggccatcgccaagatgttccatttaagcagacctcttccatagctgtagct

SEQ ID NO: 458521 - DNA, 75 bp, Homo sapiens
ctgagacggtgtcccgccgaaagccatgaagactttgaatttatttcaggaacacgaatgcgcaaacttgctcga

SEQ ID NO: 458522 - DNA, 100 bp, Homo sapiens
cggcggcggcggcggcggcgtagccgtagaggggaccagtccaacgtcaggcggatgcacacggctgtgaagctcaatggcgtcgtcctcaacaagtccc

SEQ ID NO: 458523 - DNA, 88 bp, Homo sapiens
cagattcgcagtggtcgcttcttctccttgcccacctttgacacagttttttcttgattgtggaggactagctcgaacagataagaaa

SEQ ID NO: 458524 - DNA, 97 bp, Homo sapiens
ggatacttcgtcctgtgttgtagctggagtttcagacgtctgaacatgcgtcgggatgtccaggaaatttttcgcatgaccccccacgagaagcagg

SEQ ID NO: 458525 - DNA, 80 bp, Homo sapiens
atttcgcccctcgcgtccggagtccccgtggccaggttctgcggggagtgtctccagccctgcctgcaggtgccatcccc

SEQ ID NO: 458526 - DNA, 75 bp, Homo sapiens
gctcggcgggggagcgactcatggagctgccgtaagacgaagttatacggaagcgtctcctcattgatggagatg

SEQ ID NO: 458527 - DNA, 51 bp, Homo sapiens
ttgaaattctcttctgaattagacgtgaacttatgaattcaacaggtgaag

SEQ ID NO: 458528 - DNA, 50 bp, Homo sapiens
ccggcctggatctttctctccagaggctggctatgtggctacccccatag

SEQ ID NO: 458529 - DNA, 100 bp, Homo sapiens
cccgcgtccgaggctcgcgggcggcgggcccgggcaattttctggagtgtttgtgactggactttaacatttccaaaatgtggcgacagtgactgttaag

SEQ ID NO: 458530 - DNA, 100 bp, Homo sapiens
accgaatattatcaagggatgaatgtattgacccattttctaaaacgggaaaccttagcatcaaagctaagccagaagatttatcacattttcatcatca

SEQ ID NO: 458531 - DNA, 89 bp, Homo sapiens
aaactatcaaaatggtgccagctatgaccttgtgaccacagaggatgggacctctcttaggctggtggaggaagtgaaggagctgtgtg

SEQ ID NO: 458532 - DNA, 83 bp, Homo sapiens
ggccgcgaccgagtcatggctgagacctacgacctgcctagagctggaacgttacctccagagcgagccctgctatgtttcag

SEQ ID NO: 458533 - DNA, 100 bp, Homo sapiens
cggacggtgatggtggtcgccgcggcggcgtgtgcgcccctcagggccttattggaaggagaaagtaatccagagatagtgatctgggctgagcacgttg

SEQ ID NO: 458534 - DNA, 75 bp, Homo sapiens
gcacagtcacaggccacgtagaacgtgcccttgagactcggcacgagcaggaactttgatacaaccaagtcggat

SEQ ID NO: 458535 - DNA, 75 bp, Homo sapiens
agcttatggttctccattgtgatgaaagcacatggtacagttttcaatggttccagcaggtcaacacgggagaag

SEQ ID NO: 458536 - DNA, 98 bp, Homo sapiens
accctcatgaacacactcatggacgtccttcgccacaggccaggatgggtggaagtgaaggaatagaagagcgagcagaatttttgaataagtctgtg

SEQ ID NO: 458537 - DNA, 90 bp, Homo sapiens
ggacagcagattttggtttaatatctgattgggacaacattcagacccatttccagtcatgaccttgaaaagatcttttgaggtcgagga

SEQ ID NO: 458538 - DNA, 97 bp, Homo sapiens
acggagaggagctgcctgctcaaagagctgcaccgcttcgagtctattgccattgcccaaggagtcagaaataccatcagaggaggggtactgtgac

SEQ ID NO: 458539 - DNA, 101 bp, Homo sapiens
agtcaggggagtgttgaagactctgcctcctacaaatatatcccaagcactgcaagtccagatgcaacgggagcctggctcaagggacgacaagatccagc

SEQ ID NO: 458540 - DNA, 76 bp, Homo sapiens
agagcaaagactccagtaacactcaagcaaagaagagttgagcacaatcaggaagatgagaatgtgcctactgctc

SEQ ID NO: 458541 - DNA, 75 bp, Homo sapiens
tgaaccctgaagtcggtgtctgctgcgttcacggcaggattcggttagatctttgtagaatttgatggctgtaac

SEQ ID NO: 458542 - DNA, 75 bp, Homo sapiens
atgaagaaggcaagaaaaatccaggtgccggaggagcagaaggtatgtgcactgcgcgtgaccagccgggcccgc

SEQ ID NO: 458543 - DNA, 100 bp, Homo sapiens
tcactccctgtacagaatgggtgcccagagagtgccatggagatgaatggtacggctcctacctggtctggaaagagctgggaggcttcacagagaaggc

SEQ ID NO: 458544 - DNA, 75 bp, Homo sapiens
ctatttgtagtcatgtacagaacatgatcaagggtgttacactggaattaattggcctgataaaacatactaaaa

SEQ ID NO: 458545 - DNA, 75 bp, Homo sapiens
tggagtgaagattggcaatccagtgccctataatgaaggtactccaaagattcaggtttactcacgtcatccagc

SEQ ID NO: 458546 - DNA, 100 bp, Homo sapiens
cagcgggtcctggaggctgctaacctcttccaggagtcgatagcagcagttggtgacgagatggcactcagaaacggcgttgacgtaatttaggacgtgg

SEQ ID NO: 458547 - DNA, 80 bp, Homo sapiens
caactattcgcagtccgagcgacggagtctcactgtgttgcccaggctggagtgcagtggcgccatcttggctcactgca

SEQ ID NO: 458548 - DNA, 51 bp, Homo sapiens
ccaagacctcatcaacaattaaggatgctcacaactgtattcctgagctgg

SEQ ID NO: 458549 - DNA, 74 bp, Homo sapiens
cagaaagtagatgaagatgagattcagaagatgcagtggttgaagatggatatgaattttttgcaaagaggcag

SEQ ID NO: 458550 - DNA, 100 bp, Homo sapiens
acgattccgctctgcggcgggtgtccctaaactagcagtttagggtgtcagacttccaagtgctggccttcatctccccgcaagatgcgccccctccaac

SEQ ID NO: 458551 - DNA, 83 bp, Homo sapiens
ctcagttggaagcagccgatccagcctgcggagcctgtggggcaggtttattgggcacttcctagcaccaggcactgcaataa

SEQ ID NO: 458552 - DNA, 74 bp, Homo sapiens
gatcatccttggagagagatgttcatgaaccatcgagctccagccaatggccgctacaagccaacttgctatga

SEQ ID NO: 458553 - DNA, 139 bp, Homo sapiens
ttggagaaagaaattgaagaactcagatcaaaacctgttactgaaggaactggtgatattattaaggctgaagggtatgtgattggcagctgtattaaacacattccaatcgcaggacgagatataacatattttattc

SEQ ID NO: 458554 - DNA, 51 bp, Homo sapiens
gtttgttccctgacaactttgtaagagacctggtgtcaaagatgcttcatg

SEQ ID NO: 458555 - DNA, 88 bp, Homo sapiens
ccgtgcactgggccgcgcatttcggcaagaattcggttccctcaaaattataaaggcaggaaagctcaagacaaagaaatccaacaag

SEQ ID NO: 458556 - DNA, 82 bp, Homo sapiens
cgaggcagggccagcagcaggcgggagttgcagagtgggcaggatcttaagacccgataggtgcagaacccatctggacacg

SEQ ID NO: 458557 - DNA, 100 bp, Homo sapiens
cttcacctgctcctgctgctgcctttacaagacgtgccgccgaccacgtccaaatggcggatgacgccggtgcagcgggggggcccgggggccctggtgg

SEQ ID NO: 458558 - DNA, 97 bp, Homo sapiens
gaaaatatctgaaaacaccaccaggcatcccaggggtttgccaacttgttaataagatggaggagaatactggcaaggttaagcctttcaaccgaaa

SEQ ID NO: 458559 - DNA, 76 bp, Homo sapiens
ccccttcgcggacccagtggatgtaaaccccttccagtgctgattcctaaagaaaagcccccaatcacggttgtgg

SEQ ID NO: 458560 - DNA, 100 bp, Homo sapiens
gcagtgtggggagatgtagtccagacaaagactgaatcaggccaccaggaaaccctccccgaagaatgggtagaatcaatcatctgcgtggccctagtcc

SEQ ID NO: 458561 - DNA, 101 bp, Homo sapiens
gcggtctgcggccggcggtgtagacgccccttcgccgggacctggcacccgaatccggcctgccgggtgttgaaattccgtaaacttaacttcaatgggga

SEQ ID NO: 458562 - DNA, 100 bp, Homo sapiens
atcaccctgacacaaataaggatgatcccaaagccaaggagaagttctcccagctggcagaagcctatgagagtcatgctcgagccctgagtgaccccac

SEQ ID NO: 458563 - DNA, 110 bp, Homo sapiens
gtggagccggagctgggcgcggattcgccgaggcaccgaggcactcagaggagcaaattgtggctactaatttgccccctgaagatcaagatggctctggggatgactct

SEQ ID NO: 458564 - DNA, 102 bp, Homo sapiens
cccgagcacgccggccccgcgcgcgcctcgaggccgagtcaaggctttgtcttcaggatcaggttcacaagaaaccaagatcccaatcagtctagtactaag

SEQ ID NO: 458565 - DNA, 114 bp, Homo sapiens
gtcgacatgttaaaacgggtcagttggcagccatcaaagttatggatgtcactgaggatttttacctcctataactccaccagaaaagttttttctttcccagctgatgctggc

SEQ ID NO: 458566 - DNA, 75 bp, Homo sapiens
ggtggacagatctgagagatactgagatccagacaaagacggtagctcagtgcgttgagtattattacatctgga

SEQ ID NO: 458567 - DNA, 75 bp, Homo sapiens
gacccgggactagtggaccagctggtgaaggcagacagcgagtggcgacgatacacaactcatgtacaaatgggc

SEQ ID NO: 458568 - DNA, 98 bp, Homo sapiens
cgcaggatgggatccggctcctccagctaccggcccaaggccatctacctggacatcgatggacgcattcagaagttgcagatctgatctcttctgaa

SEQ ID NO: 458569 - DNA, 51 bp, Homo sapiens
gacaaggcactgctttttcatgacggaacagcccccaagcctgtgtcggtg

SEQ ID NO: 458570 - DNA, 98 bp, Homo sapiens
tattaattcttccactgatatctcaaaaggtgatctggacaaaggaacaggtatctcaggcgcatattaaatttcctattgactacccctattcacca

SEQ ID NO: 458571 - DNA, 95 bp, Homo sapiens
agatctgctgaatcaggatcacccaagggatccgtttgcacattaacgtctgagaagtactggcctagtgagttattctccccacctcagaagta

SEQ ID NO: 458572 - DNA, 99 bp, Homo sapiens
tttggggcagaatacagagatatggaatcagatcacccggaagttcaggctgaattctgaaggcaaacttgagcagacggtctccatggcaaccacgac

SEQ ID NO: 458573 - DNA, 100 bp, Homo sapiens
gccgtggaaaccgcaaccgagggaaccgaggcagcggaggtggtggtggaggtggaggtatcattgcccagtgcctaagatcttttatgttcagctcact

SEQ ID NO: 458574 - DNA, 74 bp, Homo sapiens
tcgacctgctctataaagcctatgggatgccaccttcagcctctgcagaccccccaaagacacacgtgacccac

SEQ ID NO: 458575 - DNA, 80 bp, Homo sapiens
cagtcggtgctccggggaggtcacctgacgaggagtgtcttgggacaaggtgcgcattcctggtgtgctgcagcgattgg

SEQ ID NO: 458576 - DNA, 95 bp, Homo sapiens
tcttcttctggggcctccacgagctggggagcaccagcgagacgctctttgctgaagagcaagcagagggtcccaaccgcctgctgtacaaagac

SEQ ID NO: 458577 - DNA, 75 bp, Homo sapiens
cccagagccacttctcaccgagatgattcatgaaggtgaaagattgtctgctggatattctccatcatatgacaa

SEQ ID NO: 458578 - DNA, 97 bp, Homo sapiens
gttaaggattccaagtaactcttatttggtgcaacagctgcagcccggaaagaggtgataaggaacaagatccgagcaataggcaaaatggccagag

SEQ ID NO: 458579 - DNA, 76 bp, Homo sapiens
caaggtcgccctcaaggccatgatcaaaacgccacgtgctgtacgccgacatcaagatggagaatgggaagtccaa

SEQ ID NO: 458580 - DNA, 97 bp, Homo sapiens
gcaagagaagaattcagaagaaacaaaagtgccaccgaagagaaaatgcttggacagaagagatgagtactatttccactaaggcctagaattgcct

SEQ ID NO: 458581 - DNA, 75 bp, Homo sapiens
gaagctttgtgagaagggcagaagccaaaactggacaagccaaggcatctgtagccaaagtaaacaaatctacag

SEQ ID NO: 458582 - DNA, 100 bp, Homo sapiens
cctgatgctgtgggacctattgttcagttacaagagaaactttatgtgcctgtaaaagaatacccagatgaactctattttaagaacctctcaaaacgaa

SEQ ID NO: 458583 - DNA, 100 bp, Homo sapiens
cggaaccgccgcctctagggatggacggatagaatcacttgaattcctggatgaaatggagctgctggagcagctcatgcggcattactgcctttgctgg

SEQ ID NO: 458584 - DNA, 80 bp, Homo sapiens
atgggctcgaccccccatttccatgaactttgagttacagagtgattatacagaagatgcaacagatactaaacctgata

SEQ ID NO: 458585 - DNA, 101 bp, Homo sapiens
tcaagattgtggagttggactgaatgctgcacagttcaaacagctgcttatttcggctgtgaaggacctgtttggggagatggagtctcgctctgtcaccc

SEQ ID NO: 458586 - DNA, 85 bp, Homo sapiens
atatcgggctgaacggtcaaagacattcacaacatggatgaattgaccttgctgttctgctggggaagacaccatctacaatgga

SEQ ID NO: 458587 - DNA, 50 bp, Homo sapiens
agcgcatacaggaccctaaacaggctggagtgcagtggcgtgatctcggc

SEQ ID NO: 458588 - DNA, 100 bp, Homo sapiens
cctttccactggagttgcttcacttagctctacaatcaacccatgtgaatttcacggtccctcatggtgtctcactccagcagacagaggattgtgtcgt

SEQ ID NO: 458589 - DNA, 95 bp, Homo sapiens
tattttgggagaacttagagaaaagggtggaacggccaccagacagagaggctttctgggctgcattcggtctctgcagttgaatgggatgaccc

SEQ ID NO: 458590 - DNA, 100 bp, Homo sapiens
agcacactgtgtagaatttctcaccaaacatcttagggcagataatgcctttatgttacttactcagcagtgtgtccccaagaaagtgtcagagccttta

SEQ ID NO: 458591 - DNA, 75 bp, Homo sapiens
cagagaaaaaaccaacaccttcctgtgcagtcctgttggaatttactgtcaagaacaagtatgccacatcgaagc

SEQ ID NO: 458592 - DNA, 100 bp, Homo sapiens
gaattatgaatgtccaaagtttgaagagcatggtgcctgtgtaaatgcaatggacttgtggcaattcactcctcttcatgaggcagcttctaagaacagg

SEQ ID NO: 458593 - DNA, 89 bp, Homo sapiens
ctggcctccagtgatccttctgcctcagcctcccaaggagcgaggaccacaggtgaaagaaaagatgttgtcccggttaagagtagttt

SEQ ID NO: 458594 - DNA, 50 bp, Homo sapiens
gttttccaatcttataaacctggagacatttttacaggaaggaatgccta

SEQ ID NO: 458595 - DNA, 88 bp, Homo sapiens
actcggcggccattagctgtgtgtagttgcccgggactaggagcttaagtgaagaggtgggtcctacgtgtatgaactcagcgcagtc

SEQ ID NO: 458596 - DNA, 96 bp, Homo sapiens
cccggaatcagacggtgccccatagatggccagctttcccccgagggtcaacgagaaagagatcggtgtcatggagaaactccagctgggcccaga

SEQ ID NO: 458597 - DNA, 88 bp, Homo sapiens
catcccagacgaagacagtccctggatcaccgacagcacagacagaatccctgctaccaacaattggcgggcaacgacctttctttta

SEQ ID NO: 458598 - DNA, 101 bp, Homo sapiens
agcgcaagtactggaagaacttaacttttgtggcacctatctatggtgcagatattaatgggagcatatatgatgagccaagctacatcagtgatgtggga

SEQ ID NO: 458599 - DNA, 75 bp, Homo sapiens
agtctcatgcttccagcctggataatgattgagccacctgtccaggtccccttcccctgagcccatctacaatag

SEQ ID NO: 458600 - DNA, 100 bp, Homo sapiens
ttcagcgaccggtgcacccccattagtgccagcagtagttcccaagggctgtctcagccatccacccagacgactcagtatctgagagcagacacgccca

SEQ ID NO: 458601 - DNA, 50 bp, Homo sapiens
tgggcccaaagagcctgttttgggtttccaaggcaagaccggccctccag

SEQ ID NO: 458602 - DNA, 98 bp, Homo sapiens
acaagcagcagaacttcgggtttttgtcagaggaatggctgtgaatggatgcctggaaggaccatcctctaattttctcagttgcctgttcattgtgg

SEQ ID NO: 458603 - DNA, 100 bp, Homo sapiens
ccaccactgcagccatgatctccttaacggacacgcagagtgtcacaacataatgaaagttgctcaagccaaactggaaatgataaaacctgaagaagta

SEQ ID NO: 458604 - DNA, 90 bp, Homo sapiens
gatccttcaggtgctggaaaggaatgaggagttacagagggccgagaaggacaggatcaggactcaagcacagagggttcggaaaccgcg

SEQ ID NO: 458605 - DNA, 100 bp, Homo sapiens
gggaaatcgggctgaagcgactgagtccgcgatggaggtggcagtagagaagagcatcacagaagttgctcaggagctgacagagctggtggaacatctt

SEQ ID NO: 458606 - DNA, 75 bp, Homo sapiens
ctgaggaccggcaacatggtgcggtcggggaataagttgccagagtctgccctccgagacctcatcgtagccacc

SEQ ID NO: 458607 - DNA, 73 bp, Homo sapiens
caggttgcaggtgaacatggccttgaggaagatgatccctatgatcttgaagatgtttctgcacagaaatgag

SEQ ID NO: 458608 - DNA, 100 bp, Homo sapiens
gttcggccgtgccctccgacagccaggcccgcgagaacgtttgcctcagcatggagggcggggccgcggcagccacccccacagcactgccttactacgt

SEQ ID NO: 458609 - DNA, 82 bp, Homo sapiens
agatggcggcagggaccagcagttactgggaaggaaagagcatctacggtgagcgcttccccgatgagaacttcaaactgaa

SEQ ID NO: 458610 - DNA, 82 bp, Homo sapiens
ctggagcctcagttggaagcagccgatccagcctgcggagcctgtggggcagcaatggcaccagcatgatatcattgatcat

SEQ ID NO: 458611 - DNA, 101 bp, Homo sapiens
gtatagcgtggcaacccagctgttcattggaggtgtcactggatggtgcatcatttctggcatggcttcaggaagcattgtgctattttacaacgacttta

SEQ ID NO: 458612 - DNA, 83 bp, Homo sapiens
ccaggagccaggggcccagaagctcaccaaccaccaggagctgtgggccttcatcgtcaccaacctggcgagtgtgtatatac

SEQ ID NO: 458613 - DNA, 74 bp, Homo sapiens
acacctgtggttcttgtgggaaacaagtcagacctcaaacagctaagacagctgctggagccagttctgcttct

SEQ ID NO: 458614 - DNA, 100 bp, Homo sapiens
cgcaatctctgccagcaccttgggaagagaaagaaaatgccgaaggcactcagacagaaaactgtggatttagttactccactctgccatgtctttccac

SEQ ID NO: 458615 - DNA, 100 bp, Homo sapiens
gcgactcaatggacggagagcttggattagactctggccctagcatcgactgggcccccgagagtaaccgtattgtgacctgcggcacagaccgcaacgc

SEQ ID NO: 458616 - DNA, 75 bp, Homo sapiens
aagtccagatatatggagctctacacgtatcctcctgcctagcgcaggtctaacttcaaacttgtggctgttaat

SEQ ID NO: 458617 - DNA, 106 bp, Homo sapiens
ggggagtcagttcctccccgggcccctgagccatgcccatcgcagccgccccgaaggagccagctcctgcagcaggccacctcctccagcaacctgggtgcgttca

SEQ ID NO: 458618 - DNA, 48 bp, Homo sapiens
ggattccaagtaactcttatttgtggtaagcatccgtggcattcaaga

SEQ ID NO: 458619 - DNA, 100 bp, Homo sapiens
agaggcttggacccagcactggcagtacagcagagggtgtgcctgtggcattaagtggtagagacatgattggtattgccaaaacaggtagtgggaaaac

SEQ ID NO: 458620 - DNA, 82 bp, Homo sapiens
atgattggcagagacccactgtctggtttggtgcacctcgatttggaggaagtagggcagggcccttatctggaaagaagtt

SEQ ID NO: 458621 - DNA, 90 bp, Homo sapiens
gccgctgcgggcccgctccgacgcggaagatgtccagaaggcttcttgggggaatattgtcaacatcgagacccctgtgagaagaaccgc

SEQ ID NO: 458622 - DNA, 100 bp, Homo sapiens
caacatctacaactgcaggttctgcattcagcttttctgccccaactaacacaggcactactgagctgtaactgaagttcgtgaagtcaccagaaaatca

SEQ ID NO: 458623 - DNA, 88 bp, Homo sapiens
ggccaaccgcctacgtatcagctccatccaggccaccactgcggcgggctctggcaggatcctaaggcctttgtagtccttcagccac

SEQ ID NO: 458624 - DNA, 101 bp, Homo sapiens
gaagatgaaatccacagtccagcccacccaggtaactataactacccaatattgcagccatggagtccatgcttaataaattgaagagtactgttacaaaa

SEQ ID NO: 458625 - DNA, 82 bp, Homo sapiens
cttcggtttgcacagctagaggccgcgcagcagcaaaggatgagcggaaccttggaaaaggctagagtgcagtggtgcgatc

SEQ ID NO: 458626 - DNA, 75 bp, Homo sapiens
cttcaccagactacagcagatcacaaatattcaagctgaaatctaccagatactttctggaccaaccctcagtac

SEQ ID NO: 458627 - DNA, 100 bp, Homo sapiens
gaggaaacacctgaaggtgaagaacatcatccagtggcagacactgaaaataagcagaagtcaattcatctggaaagactatctctgagtcagacttaaa

SEQ ID NO: 458628 - DNA, 98 bp, Homo sapiens
gcggggcacggagggcggtggcggcgggctcctgcgagaagcaagcggaacttcctgagacagcaaggccatcgtggacgggaacctgaagctgatcc

SEQ ID NO: 458629 - DNA, 82 bp, Homo sapiens
ggagaggagcatgaatggagcaaaatggcggatcatgtgcagccgcggcgagtcctttgcacatgttggcaacacacgcatc

SEQ ID NO: 458630 - DNA, 101 bp, Homo sapiens
tgctgaggaccgggggtggaggtggtgcctctggcagtgacgaggacgaagtgtccgagatcctggtgtcccagcactcgggagtggaagctcatagccac

SEQ ID NO: 458631 - DNA, 82 bp, Homo sapiens
ggatcccgagcgcggggaggcagaccggttatggaaacaaaggacatgctttacatcgtcactgaatttgctaaaaatggag

SEQ ID NO: 458632 - DNA, 73 bp, Homo sapiens
gccaagcagccttagccctagtgtagagttggtcgcattatgtttcagctcttctcagacatatgtccaaaaa

SEQ ID NO: 458633 - DNA, 100 bp, Homo sapiens
cgccggcggtggcgcggcggagacccggctggtatgtgccaagtgctctctgctgccccagcagagccagtatcctgacaggaaagtacccacataatca

SEQ ID NO: 458634 - DNA, 75 bp, Homo sapiens
tttctggtacagttagatgactacaggttttgatgatgatggttcagaatttcatgaacatatatttctggagaa

SEQ ID NO: 458635 - DNA, 98 bp, Homo sapiens
gcctttgttgattatgattggctacagtgatggaatgcaggtctggagcatccctggacgccagaccttccagcgttttgataagttcaatgacaaat

SEQ ID NO: 458636 - DNA, 82 bp, Homo sapiens
gggcaaccgggcggccacgttcccgctgcaggcatgtcgggccccaggcctgtggtgctgagcgggccttcgggagctggga

SEQ ID NO: 458637 - DNA, 97 bp, Homo sapiens
gaagcttgacgagttttcaagtacgttttctcaggtcctgcagctgggagacggcacaggacactaaaccagatttgggaatggatgatgaaggaga

SEQ ID NO: 458638 - DNA, 75 bp, Homo sapiens
aagaatgtggagagttttctagaagcctgtcgaaaaatgggggtgcctgaggataaaagaatcagagtgtctcaa

SEQ ID NO: 458639 - DNA, 98 bp, Homo sapiens
aggttgaaaaaccaaagctccctgctgcataagaccttgtcagagatacactgaagagatggtgccttggcacccttgcctggaactcgttagcaact

SEQ ID NO: 458640 - DNA, 100 bp, Homo sapiens
ccagaagttcaaggtggtgagagctggtgtccacgccccagaggaggtggggcctcgcgaagcagagcatctgttaagaacatcttcagccagccggcct

SEQ ID NO: 458641 - DNA, 97 bp, Homo sapiens
agaggggaagtgatttgcctcagcttgtactgctatcaagaattttaatggagctggatggaccaaattggcgggagaagctgtcacctattcctgc

SEQ ID NO: 458642 - DNA, 74 bp, Homo sapiens
caggaagtgagtcatcacaaactgggacctccaccacatctagcagaaaccatgctcgacagctgaccaaggcc

SEQ ID NO: 458643 - DNA, 80 bp, Homo sapiens
ctgtcatcatgtcgcgttacgggcggtacggaggaggtgcaatggatgagcttcatagtctggatccaagaaggcaagag

SEQ ID NO: 458644 - DNA, 90 bp, Homo sapiens
gcaactcttccccatcaacatcaaaagggacaggctggcctgacatggaaggtgaaacaaggcagcagcccctgcctccaggagaactct

SEQ ID NO: 458645 - DNA, 100 bp, Homo sapiens
gtgctggaattctacacggccttctcccattccttctcccggaacctgattctgacgtacaacttgaggaagagggcctttggacaagcacacacaaacc

SEQ ID NO: 458646 - DNA, 100 bp, Homo sapiens
caaatatcctcggaagagcgctcccaggagaaacaaagaacggagaccaacctgggctgaagaaagaagattaaatgctgaaacatttggaatcccactt

SEQ ID NO: 458647 - DNA, 111 bp, Homo sapiens
gtgccagtgctgagatagagattatgaagaagctgcgtgaggcctttgaaaatgatatgctggctgttaacgcaaatcctgatcctaactgttgtcttggagtatttgggc

SEQ ID NO: 458648 - DNA, 97 bp, Homo sapiens
tttctaaaactgaaggagaagcccatgaagagatggtggattctcactgagttttgactagcggaagaaaagtgtctgtgcactaatcatctcgacc

SEQ ID NO: 458649 - DNA, 98 bp, Homo sapiens
ggagagtgaccaggatgtgggcattcagctccgacggcccttgttccagaagagtacaggggctcaggtccaggtggcaggggatatgctacccaact

SEQ ID NO: 458650 - DNA, 82 bp, Homo sapiens
ggagctacagcgttgaacaaccacagctctattcccatggacccaggtgccctgctccagcctctgtgcagaaagtagtggg

SEQ ID NO: 458651 - DNA, 51 bp, Homo sapiens
tatttggctgaggagttttcaatcccagtcgtggattcacagataaagtag

SEQ ID NO: 458652 - DNA, 60 bp, Homo sapiens
atcgtagcgaacacggtgctactcaaggcccgggaaggtcatttcttcagatagctcccc

SEQ ID NO: 458653 - DNA, 75 bp, Homo sapiens
gtcttcctggtcttggtgtctgcctgtatccttcgatttggcaccaggtacggcatcagcccggacagcatcatc

SEQ ID NO: 458654 - DNA, 101 bp, Homo sapiens
gtccaggagtgacctggggctgtggagagcgacccgtggccttgtgtttcagatattcaagagaagcttatgtggagttagttcaccatattagagaatct

SEQ ID NO: 458655 - DNA, 74 bp, Homo sapiens
atggagagctggaatctatgggattttcagctcgatacaatttcacacctgacgtaaaattcatcctgatcaga

SEQ ID NO: 458656 - DNA, 74 bp, Homo sapiens
atcgcaaccaccgccctggccatctaccatgtgctgttccaaagacctaatgcgcttgctgtccagcagttgac

SEQ ID NO: 458657 - DNA, 88 bp, Homo sapiens
caacgcctggctcggagcagcagcctctgaggggacggcaaaacagaacagaaaggcggagataaaaagaggggtgttaaaagaccac

SEQ ID NO: 458658 - DNA, 75 bp, Homo sapiens
cgggaaaagaggaactaaggcggaggaactgagacgtttcgaattccaggatgttttgaataatttgggatcttg

SEQ ID NO: 458659 - DNA, 95 bp, Homo sapiens
acagggcttacacccgaggtccctctttggggtggctctttgctaagtgctgctgttgcttcccgtgtagaggctgatcaggctgccaaggtaga

SEQ ID NO: 458660 - DNA, 96 bp, Homo sapiens
tgttactccactgactctctcttttcctgataacatggccagcaagaaagtaattacagtgtttggagcaacaggccttggatggtatactgtaaa

SEQ ID NO: 458661 - DNA, 75 bp, Homo sapiens
gcatttccattatgagaatgttgagttcggcagcatacaggctccccttccctgcgggcatatccgctcctctcg

SEQ ID NO: 458662 - DNA, 97 bp, Homo sapiens
aacatgaagctaccggccagggttttctttactctggggtcccggctgccctgtggcctcgctcctcggagggtttccattctattatgaactaaaa

SEQ ID NO: 458663 - DNA, 90 bp, Homo sapiens
ctcctgaagctccttacacatcccctgataaactaaaggactgtaactcttgaccaggcaacagataatgcaaaaataattggaaaggcg

SEQ ID NO: 458664 - DNA, 82 bp, Homo sapiens
caaacaagcttcattgttttcagctaacagtaaccccagtaaacctatgatggacttgttgatattcctttgtgcacagtat

SEQ ID NO: 458665 - DNA, 100 bp, Homo sapiens
acacctactgtctcaagtgcattcgcaagtggaggagtgctaagcaatttgagagcaagatcataaaccctcccaggcccaatacttcaaagcatcctac

SEQ ID NO: 458666 - DNA, 50 bp, Homo sapiens
gtaggaagccggagacagcagggtgacagagcttcttcgagacaccttca

SEQ ID NO: 458667 - DNA, 75 bp, Homo sapiens
ctccaaatgagctcatcctgggctgaatttgaacctcccgctccctttgtcactcgctttttgaacacaagagca

SEQ ID NO: 458668 - DNA, 85 bp, Homo sapiens
agatgcggagaggtggctccatggacacagacctgctgtgtgtgcttctgcgccccagaattcagcttagagaactatcaacaca

SEQ ID NO: 458669 - DNA, 96 bp, Homo sapiens
gggagctagtggaagttactgccgcgccaccgagtccggaccggagactttggggcctaactagagtgtgaacatggctacgcctcttcattcccg

SEQ ID NO: 458670 - DNA, 75 bp, Homo sapiens
gagaattgtccagaagacttggctcaggttgtcttcaaccaccttactcctccaccgcccgatgaacacctggat

SEQ ID NO: 458671 - DNA, 100 bp, Homo sapiens
tgcgctgcagccagctggcccccagggccctgcaggagttcatcagggcagagcccccggactccttgaggacacctattcggaagaaagccatgctcac

SEQ ID NO: 458672 - DNA, 83 bp, Homo sapiens
caagatctggactactgttgaaaaaatttccagtgaggaccaggaatcaccttcaagcctatgtcgtgaggctttggcagaaa

SEQ ID NO: 458673 - DNA, 75 bp, Homo sapiens
gaaggttgtcatcattcccccgcatgatgactgcaccccgcggaggttcctgagtgggaagggcttggtgatcta

SEQ ID NO: 458674 - DNA, 74 bp, Homo sapiens
gttcaggcagtcctagcaaaatatgatgcaattaccagctctggctgggtcgccacaacttgtttgacgacgaa

SEQ ID NO: 458675 - DNA, 100 bp, Homo sapiens
ccacctgtcctcaggcatatcaaaggacccccgcagcaaacacaagtttaagatccacacgtactccagccccacgttttgtgaccactgtgggtcactg

SEQ ID NO: 458676 - DNA, 100 bp, Homo sapiens
cccctgcccccatggcatgcatgatccattagggaggaccgtctgcacaaaggtccctttcaatgcagtcgcactccggattacccactctgatgtcgcc

SEQ ID NO: 458677 - DNA, 100 bp, Homo sapiens
ttctcctgcctcagcctcctgagtatctgggatttagagggaaagatcattgtagatgaactgaagcaagaagttatcagtaccagcagcaaggcagaac

SEQ ID NO: 458678 - DNA, 100 bp, Homo sapiens
cctgggagaatgttgactctactgcagatttatgtgatcagtttggctgaaccccgtctgcccctgcagctggatgatgctgttcggcctgaggcagaag

SEQ ID NO: 458679 - DNA, 112 bp, Homo sapiens
tgggggtcagttccgggtggtcaaggagcccctcggctttgtgaaggtgctgcaatggctcatgccttgcctatgttccgtgagccccgccaacggagtacaaggaaacagc

SEQ ID NO: 458680 - DNA, 75 bp, Homo sapiens
ctcataatgaatcctctcaggacattgtgtagcctatggaagaagccatggatttaataaatagagaaacaatgt

SEQ ID NO: 458681 - DNA, 75 bp, Homo sapiens
gcggaagaccaaagaggatgagaaggacgacaagcccatccgagtgcagtcattggagaaatcgatgaagaaaca

SEQ ID NO: 458682 - DNA, 100 bp, Homo sapiens
cggcccggctgcagcgagcgctggacggagaggaaagcggtgactggtatagtggtcccgcaactgaacttgatactgaacctgatgatgaatgggtgaa

SEQ ID NO: 458683 - DNA, 97 bp, Homo sapiens
ttcccttcgctccggcccggtgaaactgaacttataatcgtcactggattggctctacggcctgccccggcggtccggcaagctgaaggacctgtct

SEQ ID NO: 458684 - DNA, 89 bp, Homo sapiens
ccactggtgtcagcgcaaactgggccccctgctgcgctggctcaaggtgaacttcagtgaagccttcattgcctggatccacatcaagg

SEQ ID NO: 458685 - DNA, 75 bp, Homo sapiens
tcatagtcaactgcgtggaagagaagattttaacagcttctctgtggatgatgagtgcttagtgaagttacttaa

SEQ ID NO: 458686 - DNA, 100 bp, Homo sapiens
atgagcgggaccaccctgggcacagcaggcatcggagaacaccttccaccatgaccacctcagcaagttcccacttaaataaaggcatcaagcaggtgta

SEQ ID NO: 458687 - DNA, 100 bp, Homo sapiens
atctgtccgcccccttggccactgatcccccgaagagcttctgtcgccgctctagggttactataacaacagtaccaaggtggctgtgaaaaccctgaag

SEQ ID NO: 458688 - DNA, 98 bp, Homo sapiens
tcactggaatgacctccttttctgcttgcgctgcaccaggtgtgattcagatgtgaacgagtgtgaaacactacagggtgtatgtggagctgccctgt

SEQ ID NO: 458689 - DNA, 49 bp, Homo sapiens
ctgggccagaggaagagaatgaggacagctggcctgaagctcagagccg

SEQ ID NO: 458690 - DNA, 90 bp, Homo sapiens
ggaggagttccccttcgagaggaggcagattcccctctacatagacgacaccctgacgcacccagtcagcttgaagagtttcaaatggac

SEQ ID NO: 458691 - DNA, 75 bp, Homo sapiens
gcaggaccaggctgcactgaagggacagaggtacctggaaagtctgcttagacaggcaagcagtgggaccatcat

SEQ ID NO: 458692 - DNA, 75 bp, Homo sapiens
gatcccagcaggacattgaaagccgaatttgccacatacctgaatttctgccgttccttgcgttttgacgacaag

SEQ ID NO: 458693 - DNA, 100 bp, Homo sapiens
cccagaagagtttgcacttcgagatcaagagaagtatctgtatcgatatcctggtggggaggcccagttggaagcaaggcgagatgacttttgtaagcag

SEQ ID NO: 458694 - DNA, 83 bp, Homo sapiens
ggtcaggagtccactcctggaattgttccagatggggtttcctggaagcaccttcatgtcatcctatcaaaaccataaatgag

SEQ ID NO: 458695 - DNA, 106 bp, Homo sapiens
atgtggccagttatttgcctcagtaaaagagtgagaagccatttaaatgtgatcagtgcagttatgtggcctctaatcaacatgaagtaacccgccatgcaagaca

SEQ ID NO: 458696 - DNA, 74 bp, Homo sapiens
tacacagtaccagaggtggggactgttgttggaggaacactttccagttcacagtacagagccagttgtccagg

SEQ ID NO: 458697 - DNA, 80 bp, Homo sapiens
cggggaagtaatggtatccggccaattgagattcggagttaaaacagacctgcctagagctggaacgttacctccagagc

SEQ ID NO: 458698 - DNA, 50 bp, Homo sapiens
tttgccagcactgagggccagtttgactttacacataaaaaacaatcagg

SEQ ID NO: 458699 - DNA, 100 bp, Homo sapiens
gcggtggcggcgggtggaccgattgtcgctcggcggcgggagtcgttcctggtccagaactttacacagaaaaggtgctcaaaggatatttgtttaatga

SEQ ID NO: 458700 - DNA, 75 bp, Homo sapiens
cagccagcatcaacccagccacagaatatcctccgaatcctaaatctagagctccaaggatgctggtcattaaga

SEQ ID NO: 458701 - DNA, 90 bp, Homo sapiens
gggccaaagaccctgaagagcctcaccagccacgaccccatgaagcagtgggaagtcactagcaggagctgaacttgtcattctgtgaaa

SEQ ID NO: 458702 - DNA, 77 bp, Homo sapiens
cagaggagatccggatgctcatccataaaactgaagatgtgaatactctgttttaccaacagactgcagtttcttca

SEQ ID NO: 458703 - DNA, 75 bp, Homo sapiens
agttctcccggtgtggccacgagtcggcacagtccagaagcgtgagctggtgaatcccgccagtatgaagcaggc

SEQ ID NO: 458704 - DNA, 74 bp, Homo sapiens
ccaaatacttggtcgtctacacaggcgcgggaatcagcacgtcttacctgctgatggtgactgtcatcctcctc

SEQ ID NO: 458705 - DNA, 82 bp, Homo sapiens
atccttaccaaggaatctgcttttcaagtatgccaccaacagtgaagagtctgagaataaaggattagaaactaccaagaac

SEQ ID NO: 458706 - DNA, 100 bp, Homo sapiens
tcactcctgacacagactgggcccgcttgctgcaggaccacccctggctgctcagccaggccagcaggaagaccaagaagaaggaagggggtgccctccg

SEQ ID NO: 458707 - DNA, 88 bp, Homo sapiens
gcgtccgccccgcgagcacagagcctcgcctttgccgatccgccgcccgtccacacccgccgccagcccctggtgtctgcagtggggg

SEQ ID NO: 458708 - DNA, 74 bp, Homo sapiens
gaagttcttccttgaagaaatacagcttggtgaagagttactagctcaagtgttcaagaaggaagtgtatcttc

SEQ ID NO: 458709 - DNA, 102 bp, Homo sapiens
gcgggtgtgacgttgaagatgtcggccttctgagccgactgcggtggtcaagaggtcactatcatatgacaaaggctttgccgcagttcatcttcctccctg

SEQ ID NO: 458710 - DNA, 101 bp, Homo sapiens
tggatttatttctcgattcgctgtcggaggagaatgagaccctggtggagtttgctattgaaaatgtggacacagacttgccaggcagcctggggcagagt

SEQ ID NO: 458711 - DNA, 100 bp, Homo sapiens
acatcaagcagaatgtgatttgcttgaagatatgagttacatgagcatgcagcataccttgtggatagcatgtgggactgtgctactgagctgctgaaag

SEQ ID NO: 458712 - DNA, 83 bp, Homo sapiens
taccctttctgtttatagaagtgtcaagaggctaggtattcctgacagaatgcttcagacatgcctgaaacaatcaccagccg

SEQ ID NO: 458713 - DNA, 80 bp, Homo sapiens
agctggacggcgagcgcgagcggcgcgagaaagccgacgcctccccccagggtcagctgcgggctcccaggcctaggcgc

SEQ ID NO: 458714 - DNA, 90 bp, Homo sapiens
gaaacagctggctaagctcatcattgttactggcgtatcgccatggtgaggaacctcctggcgccctatgagcagcggccctgggcccag

SEQ ID NO: 458715 - DNA, 90 bp, Homo sapiens
agcgagctgagtggttgtgtggtcgcgtctcggaaaccggtagcgcttgcagcatggctctgcggctaccctcctttttatgatgaaaat

SEQ ID NO: 458716 - DNA, 100 bp, Homo sapiens
tcatcattgttcatccatcttggttcatcagaacaatccttgctgtgacacgaccttttataaggtggtggagtctatggcccttctccttgaatctgag

SEQ ID NO: 458717 - DNA, 82 bp, Homo sapiens
tgggaagagctccctgctggctgccatcgctggagagctccacagcggtccggaggcagcagtgtccacctttcagacccag

SEQ ID NO: 458718 - DNA, 51 bp, Homo sapiens
attatccaaagctcagttgacaagttccaatacatatgaagaggcagctgc

SEQ ID NO: 458719 - DNA, 50 bp, Homo sapiens
gtcagtttctgaggaatttcatcagtgccaactacctcaggaaccgggag

SEQ ID NO: 458720 - DNA, 96 bp, Homo sapiens
agacaaagggccccttacacaccagacaggtttctctagaggactttctaaagaaaattcagcgagtggattttgatatattccacccatctttac

SEQ ID NO: 458721 - DNA, 98 bp, Homo sapiens
attctgcacacctcgcatccggggcaacacctgcttctgctgtgacctctacaactgtggcaaaagttccagggaccaaatctcaaaacaaacaaagc

SEQ ID NO: 458722 - DNA, 90 bp, Homo sapiens
ctatccatctttgtctcatcttgttgtttatgtaccatctgttcgtggaagtaagaagaggtgtggtggaaaggtcttccagaaccagag

SEQ ID NO: 458723 - DNA, 100 bp, Homo sapiens
tggaggctgagtgctaaactgtgtggggcgcggatgggatccagctgttagtcggctttccccacaaataaaccagagaaagatgcaagacatgtagtaa

SEQ ID NO: 458724 - DNA, 75 bp, Homo sapiens
aattagtgaaggagatgaagtagagggatggggaaagacaccatagtcataaaagaagaaagcaaaaaatataaa

SEQ ID NO: 458725 - DNA, 100 bp, Homo sapiens
cgcagctggtgggtgtacacactgctgtttaccttggcgaggcctttcaccaagtccatgcaacagaagaaccttgaaggctatgtgggatttgccaatc

SEQ ID NO: 458726 - DNA, 90 bp, Homo sapiens
aaaattcaacgacaacgcctggcatgatgtcaaagtgacacgcaacctccggcagattaatgatgttttgcagcagttttctacgtctga

SEQ ID NO: 458727 - DNA, 74 bp, Homo sapiens
gtgtataggataatcagtttagatggctcaaaggaacgaatgcaggaatttgggaactgagctgtgcaagtgct

SEQ ID NO: 458728 - DNA, 73 bp, Homo sapiens
cagatagcctctatacccgttgagtgctgaccttgcctcatagtattcgatcagattcagaagatatctgttt

SEQ ID NO: 458729 - DNA, 101 bp, Homo sapiens
ggccatgcggcccctgctgctactggccctgctgggctggctgctgctggccgaagcgaagggcgacgccaagccggaggttattaaagagggtgtacggg

SEQ ID NO: 458730 - DNA, 50 bp, Homo sapiens
atgaccttcacctcattaacagtggttatcactaggctaaaactggacaa

SEQ ID NO: 458731 - DNA, 100 bp, Homo sapiens
acagcaacatgaagcaattcatccgctacctcatctcctccaatgttggcgaggtcgtctggcacctacaaaggcagcacctaagcaaaagattgtgaag

SEQ ID NO: 458732 - DNA, 75 bp, Homo sapiens
ttgagttaacacctctgccgctgctaaaagtctattgaagacaatgaagtatatttgcctaatgatgaaatttgg

SEQ ID NO: 458733 - DNA, 50 bp, Homo sapiens
caacagactatgctgggcttattgcaatggtggcttgctatccgggaaat

SEQ ID NO: 458734 - DNA, 76 bp, Homo sapiens
cagacaccgtgtttgataaggaaacactctttggataattttccccagatggcccatcagaagcggttcatcgaac

SEQ ID NO: 458735 - DNA, 100 bp, Homo sapiens
cgcaaatgactggtcacgcgggactgaacaccgcacaggcaggaggcatggccaagtgatggaatggggagaagatattaaagcagtttcaaaagatgaa

SEQ ID NO: 458736 - DNA, 75 bp, Homo sapiens
caagaagctgactcgctacctcaactggattggcgtccccacaaaagtttccctgaaacctgggctcttgaagac

SEQ ID NO: 458737 - DNA, 75 bp, Homo sapiens
cagagggatggctgctcagctgctgactgatgaggcactggtttggaaggcgctttgagtccccgctgctgtggc

SEQ ID NO: 458738 - DNA, 90 bp, Homo sapiens
gcggggcagctgcaggcatggccctgcgctatgagggtggtgctgtgggtcggcctgggcgtcctggtggtgagcactgtcaccacactg

SEQ ID NO: 458739 - DNA, 75 bp, Homo sapiens
accagtctctacagttccgatccttcagatgccacaccacatgaagcccttgccatattacagctatgaccagcc

SEQ ID NO: 458740 - DNA, 50 bp, Homo sapiens
ttctgatgatgcccgtctcttcacagaggatttttacctcctataactcc

SEQ ID NO: 458741 - DNA, 51 bp, Homo sapiens
ggtgcggataagggacccgacactgatatttggagcaagaggtggtggtgg

SEQ ID NO: 458742 - DNA, 82 bp, Homo sapiens
agccggctgggctcggtattccccttcctgctagtcctggtggatctgcagtacgaagacctgcctagagctggaacgttac

SEQ ID NO: 458743 - DNA, 100 bp, Homo sapiens
cagcaactgcagatggagaaggagaggctgcggctgaaacagcaagaactgcttcggcagaagtctggcaagttgatgagcagatagatcactacaagga

SEQ ID NO: 458744 - DNA, 75 bp, Homo sapiens
cgctgccttcacaccccggacatccgcgccacacctgctggagccagttctgcttctcggcaaggagcgatttgc

SEQ ID NO: 458745 - DNA, 74 bp, Homo sapiens
tccacagccactgccgccgtcgccgcggagctggtttctgccgacaagctaaggtgattcaaactaaatcaacc

SEQ ID NO: 458746 - DNA, 98 bp, Homo sapiens
ggagatgccctcttcgtggaagccatccacacagacaccgacactcacagcgctccttcaccactattacccaattgagatcgacccacaccggaccg

SEQ ID NO: 458747 - DNA, 50 bp, Homo sapiens
tgaacaatgacctgggagaggcgcagctctatcgtccgagctttgtgcac

SEQ ID NO: 458748 - DNA, 82 bp, Homo sapiens
agactttgagaaatcccttagtgcccaggaggaaaagattacaccgagattcgggccctccaccctctacagtgagtgaagc

SEQ ID NO: 458749 - DNA, 100 bp, Homo sapiens
gtggtgaagggtacttttcatggtgcatggaaggaaagccaatgcgcaggactcagcccaggagagtgttattactcgagatattcatcgtacatttccc

SEQ ID NO: 458750 - DNA, 100 bp, Homo sapiens
gatgcaaacggacgggccaacgccgtggccagctccactgagagaaccccagattgaatacctgcttaagaagcttacagaagctatgggaggaggttgg

SEQ ID NO: 458751 - DNA, 109 bp, Homo sapiens
cgcagctcctggcctattacttcacggagctgaaggatgaccaggtcaaaaagctcctcagagaaattttgaaattgccttcaagatgtttgatttgaatggagatgga

SEQ ID NO: 458752 - DNA, 83 bp, Homo sapiens
caccattcgtggggacttctgcattcaggttggcagagtgtcacaccctccgcagattgttctgcccattcataactgggaac

SEQ ID NO: 458753 - DNA, 74 bp, Homo sapiens
ttggataacttctctgacatagtagaagggcatccttctttaaaagagaaatccacgttagctctccttgaggt

SEQ ID NO: 458754 - DNA, 74 bp, Homo sapiens
gcaggcagtgcttcaaaaaactatggaacaaaacagatccttggagaaggttgatactgcctctccaagcccaa

SEQ ID NO: 458755 - DNA, 73 bp, Homo sapiens
agcacccgccaccgtcgccggccgcccgcacgtccgtccgtttgcatttatgtcggatcctcagtgaaaataa

SEQ ID NO: 458756 - DNA, 74 bp, Homo sapiens
cgggactgcctggccgacgtggacaccaaggtgcatggctgcctcctaatcccatagtccagaggaggcatccc

SEQ ID NO: 458757 - DNA, 98 bp, Homo sapiens
aggagtaggtgcgggtgaagatggcggcagccgaggccgcgaactgcatcatggagaacatacggtccctaatgagcacagagaagaccaagggcttc

SEQ ID NO: 458758 - DNA, 98 bp, Homo sapiens
ctggcgattcgtgttcgtgagggccttttctggtgactctcctattccatctgtttcttcgggatcatcttcacctctttcagccacttctgccccac

SEQ ID NO: 458759 - DNA, 98 bp, Homo sapiens
tgtggttgtggtgatagcagttgttgctggaattgttgtgctggttaatcatgttatcagccctctgttggatatctactttcctgaaggatctggtg

SEQ ID NO: 458760 - DNA, 101 bp, Homo sapiens
taaaagccacccaggccttggtcctagcacccactcgagaattggctcagcaggtgcagcggaactgctgcctgacgctctgcaacttcagcatccccgag

SEQ ID NO: 458761 - DNA, 96 bp, Homo sapiens
actccaaggacaactgcaagggggaagtagagagataacaaaagctgctcagagtctcaatgaacttgagatgtggtactggatcttcctctgggc

SEQ ID NO: 458762 - DNA, 75 bp, Homo sapiens
aaccctttcagtaaatacttggaagataacagcgacctcttttctgaacaggcacggaatgttaacactggtgaa

SEQ ID NO: 458763 - DNA, 90 bp, Homo sapiens
gagattgcagatatatgtgagaaatataacctttggttgcatgtcgatcgctagtcctgctgatgggcaaagaaggtgtccacggtggtt

SEQ ID NO: 458764 - DNA, 80 bp, Homo sapiens
ccctggagcctcagttggaagcagccgatccagcctgcggagcctgtggggcagtccaaaccaggttgcagagaaggtgg

SEQ ID NO: 458765 - DNA, 113 bp, Homo sapiens
tgaccacttgctgtaggagaagttccaacgtgtcctacaaatactcaaaggtttggccgtaagctgtgtctcctgggaactgtgctggtcaacgcggtgtcgggcgtgctcat

SEQ ID NO: 458766 - DNA, 82 bp, Homo sapiens
ttagccactgctggctgcttccagtgttcgccgagagccctgggcgctgcctatggcacagccaagagcggtaccggcattg

SEQ ID NO: 458767 - DNA, 94 bp, Homo sapiens
tagatttttccctctaccttaaggatgtgcaggatcttgatggtggcaaggagtaaaaaagagtgtcaagtggacatgcaaagcttgtggagag

SEQ ID NO: 458768 - DNA, 101 bp, Homo sapiens
caaaggttgcattgatgaaattaaagatgcatgctgatggcgataagtcattaccacaggctgcaagaaagcgtaagattgccattcgaaaagcccagggg

SEQ ID NO: 458769 - DNA, 75 bp, Homo sapiens
agccattcggagctacatccagtgaataaggccacgaataccatgttctgtcccctaaggcggtcccaaaaggca

SEQ ID NO: 458770 - DNA, 100 bp, Homo sapiens
cgaagattgaggactactttccagaatttgctcgctacactactcctgaggatgatatcatggtggaagagtttgtggaagggggtcctctggatctctt

SEQ ID NO: 458771 - DNA, 140 bp, Homo sapiens
acactgaggtgtccagttgcagcccatggagatccagttcaattatgaatctcaggaacaccaccttctgtcaggtggccagcatcgaaatgttcagccttttagtgatgaagatgcatcaattgaaacaatgagccatt

SEQ ID NO: 458772 - DNA, 100 bp, Homo sapiens
gcaacaaaaatttttcaagaattggtagaaggtgtgttttacatacataacatgggaattgtgcaccgagatctgaagcatatattttgtgaagagtgca

SEQ ID NO: 458773 - DNA, 110 bp, Homo sapiens
actcagaggcccggagaacgatgaccaacgcccttcgcaaggcccctcagcacacagctgtcggcttcaaacagacgggacacggccaacacggtgaaggaaaagttcgg

SEQ ID NO: 458774 - DNA, 99 bp, Homo sapiens
cgtgctcaccctgcctccttcccgccgccccctgggtgggttgtatcccctgcagaaaaagctaaatatgatgaaatcttcctgaaaactgataaagat

SEQ ID NO: 458775 - DNA, 100 bp, Homo sapiens
ggaaaatgctggcgtcagcatcggaagatcattttattgacattgctgaagtggagacagaaactaaagttacagagtggagaggtaacaaaagaagaga

SEQ ID NO: 458776 - DNA, 85 bp, Homo sapiens
ccccaggagaagatgtgtctgcggctcttcaggtttggacatggcacctttctgctgtgcctggaaaccatttaccagaaagtga

SEQ ID NO: 458777 - DNA, 102 bp, Homo sapiens
cccgaaaacggaagcgcagggagaaggaagaggtgtttgaaaagaattaaacaaccaccatgtcgagcaaaaaggcaaagaccaagaccaccaagaagcgcc

SEQ ID NO: 458778 - DNA, 90 bp, Homo sapiens
ctccaaaaacacccatccaggcagggggatatgtatccctctgaagaagatatgatcgaatgggccaagagggaaagtgagagagaggaa

SEQ ID NO: 458779 - DNA, 101 bp, Homo sapiens
tgtactgctatttattgataacatctttcgcttcacccaggctggttcagaggtattatcgagacattgcaaagatggcatccatcagcgaccaggacatg

SEQ ID NO: 458780 - DNA, 97 bp, Homo sapiens
gggattgcctggcaggacgtgaaggggaagaggcccaccctggagtaaccctcactggagaatccagaggccctgacccacgtgtcagaggactgtt

SEQ ID NO: 458781 - DNA, 104 bp, Homo sapiens
ctcaattacacttcgactctcaaagcaataccaggatagctgttgtttcagagaaagttctctttcaacatgttcgaccaccctattcccagggtcttccaaaa

SEQ ID NO: 458782 - DNA, 51 bp, Homo sapiens
ctgactcacaatgactctgttgtggcgcctgcgcatcccagagctggagga

SEQ ID NO: 458783 - DNA, 50 bp, Homo sapiens
caatgatgggagaacgagaaggacagtttggcacatggaagcatgcacgg

SEQ ID NO: 458784 - DNA, 75 bp, Homo sapiens
ctcagagaccaataaaaataaactgcttgaacatcctttgactggttagccagtgggacacagcaggccaggaaa

SEQ ID NO: 458785 - DNA, 119 bp, Homo sapiens
tgaggtgggggtggccattcaggagaagctcagggagcaggtggtgaagcgtgaggagctcttcatcgtcagcaagtctaatactagtaatgagatgaagctaccgtcactgaaggata

SEQ ID NO: 458786 - DNA, 82 bp, Homo sapiens
cagaccctggagcctcagttggaagcagccgatccagcctgcggagcctgtggggcaggaactttatattgctgttggaata

SEQ ID NO: 458787 - DNA, 82 bp, Homo sapiens
gtgctagtatcggacatgatcctcatcttttatacactcttagtgctgtccaggaacgaatgcaggaatttgggaactgagc

SEQ ID NO: 458788 - DNA, 82 bp, Homo sapiens
cgcgtctcggaaaccggtagcgcttgcagcatgtgatgatgatgatgattttgatgatgaggaagctgaagaaaaagcgcca

SEQ ID NO: 458789 - DNA, 75 bp, Homo sapiens
tctccatcaggaaaacaagcctggttcagttaaacctactcaaactattgccattggaaaagaagtttgttcgag

SEQ ID NO: 458790 - DNA, 80 bp, Homo sapiens
aaggagaaacaaacttcagctctgaaatagaagatcttgcaaggcatgctacaagtgaaaactgatgagaaactgaatgt

SEQ ID NO: 458791 - DNA, 74 bp, Homo sapiens
ttggatgatgatggatccatttctcctattgaggagtcaacgtttccatgggtgaactatcaagatggcaacct

SEQ ID NO: 458792 - DNA, 83 bp, Homo sapiens
caagccgccgtggagaaggaagaactgtgctgagaacaccttccaccatgaccacctcagcaagttcccacttaaataaaggc

SEQ ID NO: 458793 - DNA, 83 bp, Homo sapiens
caggaggcctctgggtgaaggcagaggctaacatggggtcttgccccagaagctgcgggcacatccacgcctgaaatgcggcg

SEQ ID NO: 458794 - DNA, 75 bp, Homo sapiens
gtttgatgttgttgaaggagaaaagagcaactggaatgagattgttgataactttgatgatatgaatttaaagga

SEQ ID NO: 458795 - DNA, 83 bp, Homo sapiens
gtgaaagaccgattttctgcagaagatgaagctttgagtaacattgccagagaggcttatcaggagggcagacttcaaaagct

SEQ ID NO: 458796 - DNA, 100 bp, Homo sapiens
agaaagcataacatacactcgccaggaagagcctttgcctgactcagggcagctcagagtgtgggagataattgacgaccttgccaacctagtggagaac

SEQ ID NO: 458797 - DNA, 98 bp, Homo sapiens
gccaccatccgcgaggcaggagagaggaggaggagtgcggcgcggcggccccgggaccaaggaggcctccggtgtggctgtctctgatggtgtcatca

SEQ ID NO: 458798 - DNA, 90 bp, Homo sapiens
gtaattcttaaggagctccgaaaagcaagaaatcaaataacacagttggaatccttggatgaagatgcatcagggggcgatcaagatcag

SEQ ID NO: 458799 - DNA, 97 bp, Homo sapiens
gagtccccaaaattacattgccaagaataactgaagtgaagtgatggactccgatttggagagtagtaagacgtgaaaggaatacacttgtgtttaa

SEQ ID NO: 458800 - DNA, 100 bp, Homo sapiens
ctggcttccttgcttctcaacttacagatgggacttcacctatagatcatgtggggacccaaactgtatgcattgttccagatgcgctcttgccaaagca

SEQ ID NO: 458801 - DNA, 98 bp, Homo sapiens
tgcttctgaggggaagatccaggctgccctgaaactggaacacattgatggggtcaatctcctggggtccagaatggggctcgaatggctatgtaaaa

SEQ ID NO: 458802 - DNA, 75 bp, Homo sapiens
agagcctcattatctaccacccgagatgccccaaggtggagtaactaatacggcacaatatcagaacaggctaat

SEQ ID NO: 458803 - DNA, 83 bp, Homo sapiens
ttcagttgctgagaagcctgacataccaggactgcctgagacaagccacaagctgacagccagctaaaggtgtggatgagcaa

SEQ ID NO: 458804 - DNA, 100 bp, Homo sapiens
cgtgcagcccaacttccagcaggacaaggatgatcggctgaatgtaacagaggaactaacgtccaacgacaagacgaggattctcaacgtccagtccagg

SEQ ID NO: 458805 - DNA, 75 bp, Homo sapiens
gaacaggtggacctgattggtaaaaagactcagaaaacggcaataactgtggagttagtgattggcaactttggc

SEQ ID NO: 458806 - DNA, 117 bp, Homo sapiens
ggccgtggacatcggggcagctgacctcgcccacgcccagcagcagcagcaacaggattcagtggtcccaatttaaaggctattttattttcaaactggagaaagtgatggatgatt

SEQ ID NO: 458807 - DNA, 100 bp, Homo sapiens
catgtcagccatttaccagaaagtgcgtcaccgcatgaacgatgactgggcttacgggaatgaatgccagctgatgaagaccgagaggccgcgacccaac

SEQ ID NO: 458808 - DNA, 100 bp, Homo sapiens
atttgattcaggctaataaagagaatacttatctctggcgcacatcactatatttggctgcctctgccagtgctgaattctttgctgacattgccctggc

SEQ ID NO: 458809 - DNA, 136 bp, Homo sapiens
gcaagtaatactatccaacctactccacagactatacctgccattgatcccgcacttttcaatacaatttcccaggggttgaaaggaggagcaggaggtactgatggacaaggaggtaccttccggtacacctttc

SEQ ID NO: 458810 - DNA, 100 bp, Homo sapiens
ctggacaaatctatagataacaaggcactttatgatactttttctgcttttggaaacatactgtcctgcaaggtattctctactgccgctgatggtcaaa

SEQ ID NO: 458811 - DNA, 89 bp, Homo sapiens
gcgcacggacgagcgggagggacccttctccggcctgatgcgacccgctgcgattccttcaattcatttatgcttccgatagacgtccc

SEQ ID NO: 458812 - DNA, 83 bp, Homo sapiens
gtcaggagcagccgcagcgacggcggcgacagcagcacatggattaattgatgtatgttgagtttatggagctgccttttggt

SEQ ID NO: 458813 - DNA, 100 bp, Homo sapiens
aagccagagagggcttggtggatgacaaggaggcctgagtagaccgcagagaagatggcgaattagaagatggtgaaatagacgatgcaggatttgaaga

SEQ ID NO: 458814 - DNA, 100 bp, Homo sapiens
aggaagagctactgttaaccaggatacaagattagacaacagagtcattgatcttagggtgcagtggcttctatgttttgggttgatgctgaattaggga

SEQ ID NO: 458815 - DNA, 100 bp, Homo sapiens
ttgaacagaacgcggctcccagccacaccaagttcaggtgtgatgaatgcagactctgctaccattttggctgtttggatcctcctttgaaaaagtctcc

SEQ ID NO: 458816 - DNA, 82 bp, Homo sapiens
gggaggtgttcgagaacgaccccgagacggaccccgagacagacaagcacacagaggaccagagtccttcgacacccttgcc

SEQ ID NO: 458817 - DNA, 51 bp, Homo sapiens
aatgacatccagcgacaaggactttagatgatgaaccaggtggaagggcag

SEQ ID NO: 458818 - DNA, 100 bp, Homo sapiens
gtcatggatgggcacactgtgggggtgtcctggtgcacccccagtgggtgctcacagctgcccattgcctaaagaaagacagggtcttgttctattgtcc

SEQ ID NO: 458819 - DNA, 100 bp, Homo sapiens
tacttgctgaaaaggaagttttctggaatgggaacattttagtggacaaaccaaatgaccaatcttcaagatggtcttcagagagcaactatcctcccca

SEQ ID NO: 458820 - DNA, 51 bp, Homo sapiens
gaggaactcagccctgattgcgaacccttaggagaaatcttgagagtggac

SEQ ID NO: 458821 - DNA, 100 bp, Homo sapiens
cggcggcggcgatgcggggctgctggaggcggagaggcacggaggagccgctggggctgccgccacggccgcccggagaattcagcttagagaactatca

SEQ ID NO: 458822 - DNA, 83 bp, Homo sapiens
tgtaaacccaaaaggagcatgaaacgagacgacaccaaggttgatgataattagaagcatgctttccactgaacttcccgaca

SEQ ID NO: 458823 - DNA, 99 bp, Homo sapiens
cggcaacggggctccgggccctaagggctctgcttatgataatgtcaacaaagttcgagtagctatcaagaaaatcagcccctttgagcaccagaccta

SEQ ID NO: 458824 - DNA, 74 bp, Homo sapiens
tggtgagaaacattaagacctactaccagaatttaacacgtgaactggagaatggggaaaaacagcaactgcag

SEQ ID NO: 458825 - DNA, 100 bp, Homo sapiens
ctgcatcagccggcctgaagtcgcaccctcctcctccggagaagtagagaaataaatttctcccaccctaaaccagttgctctaggtcgtaaccagcctt

SEQ ID NO: 458826 - DNA, 100 bp, Homo sapiens
ggtcgctggcggcgtggacacctgagtcccggggtaggggtctcccgcgagaatttgccatctgccttagtaagtcatgtactaaatcctcaacctggag

SEQ ID NO: 458827 - DNA, 75 bp, Homo sapiens
acatcttcactaaagaaaacttaacagcacctggaagggctcaaaatttgggcggggaactggactcactcagcc

SEQ ID NO: 458828 - DNA, 100 bp, Homo sapiens
ggataggcctgtgacgaaggtgctaccatcgtgagagtaaggttgctttcacaaccaaaatttatcaccctaatatcaacagcaatggcagcatctgcct

SEQ ID NO: 458829 - DNA, 96 bp, Homo sapiens
aaaatcatgtcccagagtcaagtatcgaaaggggttgattttgaatcaagtgagatctcagccagcttttatgcaaagcagtttatcccagccatc

SEQ ID NO: 458830 - DNA, 80 bp, Homo sapiens
ctggtacttctagtctaaaacaggatttgactctactaatccaggtataatgggtctctcccaaatggcgatagaggaag

SEQ ID NO: 458831 - DNA, 73 bp, Homo sapiens
agctccaggattctgacagggatgttgcgaaggttaaatgggccagggaaaactatcaccataacattggctc

SEQ ID NO: 458832 - DNA, 90 bp, Homo sapiens
tgatattccaatttatgcagataaggcaagagcggtgagcggggcgcctatgcctccttcgggagagacgcaggcgtgggcggcctgact

SEQ ID NO: 458833 - DNA, 75 bp, Homo sapiens
gcctaggcattttgctgtctcctcctaatacggcatttataagacgctgtttggcatatcgaaaagaagatcgat

SEQ ID NO: 458834 - DNA, 100 bp, Homo sapiens
ttgcaaatgcagaggaagaatttttctatgaggtcctgggaactccaacaagggagcaaatcagagaaatgaacccaaactacacagaatttaaattccc

SEQ ID NO: 458835 - DNA, 100 bp, Homo sapiens
tgaactgcagtgggagaggagaagagatgctggcgtgaagggaacggtctttccaaatcatacagtgaagagagtggaggattccagtagcaatgggcag

SEQ ID NO: 458836 - DNA, 82 bp, Homo sapiens
caatccacttcctgtggcaactacagggggaaattgcaaagaagattctttggcaagttatgaattgatatgcagtttacag

SEQ ID NO: 458837 - DNA, 85 bp, Homo sapiens
gggccctacaagcagtctacgagcttgagagaattctgaacaggagctccttaataagcatttatagtcagtttttggcagcaat

SEQ ID NO: 458838 - DNA, 100 bp, Homo sapiens
gccgccgccgccgcgccgagcggaggaggaggaggaggcgaggaggagagactcttgccttgcgccatggactggcagccagacgagcagggcctgcagc

SEQ ID NO: 458839 - DNA, 90 bp, Homo sapiens
gaaaacttgaaactaatcctgatattaagccatcaaatgtggaacctatggaaaaggtggttaccctaacagctaatgataagacaagtg

SEQ ID NO: 458840 - DNA, 100 bp, Homo sapiens
gccgagcgcattcgcgctggagcttgcgaggagcgcagggtggagcgcgccagccggggtcctcggatctggcccagtttcagaggcggagcacagagag

SEQ ID NO: 458841 - DNA, 82 bp, Homo sapiens
ggcacagacggagaagacgagggggcgtctgaggaggaagacctggaagacagatctggtcttgggcgtctttggtactggc

SEQ ID NO: 458842 - DNA, 101 bp, Homo sapiens
tctgcttttgcggctctgcatagaggcagacctccagaactacctgtaaattatgtgaaacctccaaatgtggggaagagatggatcaagatggtgaaata

SEQ ID NO: 458843 - DNA, 74 bp, Homo sapiens
cgcgccggaccaagcgggcccagaagcgggttcatgatcaagagggcccaaggacggaagcgctttgggatgaa

SEQ ID NO: 458844 - DNA, 50 bp, Homo sapiens
ggggcgtttcgacaggcagatctttattgacatggagcagagtaaccctg

SEQ ID NO: 458845 - DNA, 82 bp, Homo sapiens
cttatgaatatctgtgccacttagaggaagccaaaagcatgatgccttcttctgtagagtgggcgctttgcagaatacgtgt

SEQ ID NO: 458846 - DNA, 75 bp, Homo sapiens
gatctgcttggagaagcccaaataccgctgtccagcctgccgcgtgccctaagtcttgctcttgtcgcccaggct

SEQ ID NO: 458847 - DNA, 100 bp, Homo sapiens
atcgccttcagccctgtctggtgcatccttggcagaaagtgaggaggaaaacacccccattgctgctctttggcgtaaattgcaatcgattagggatcgt

SEQ ID NO: 458848 - DNA, 100 bp, Homo sapiens
gtcagctagcaagaagaaacgaattagtaaacagtgcaagttgatgcgtcttccatttgcaaggttgggggccgtcccgctcctaaggcaggaagatggt

SEQ ID NO: 458849 - DNA, 85 bp, Homo sapiens
cttgggctacgcgtatgtgaacttccagcagccggcggacgatgccatggacaatattaccaggcagaaccaattctacgatacc

SEQ ID NO: 458850 - DNA, 98 bp, Homo sapiens
catggacgtgttccaggagggtctggctatggtggtgcaggacccgctgctctgcgatctgccgatccaggcatccgtgtacaagatttgcagagaaa

SEQ ID NO: 458851 - DNA, 74 bp, Homo sapiens
gatgacctagatggaacacatgctctgatgaattatatccagatcgagagacagaagattctgaaagggttcaa

SEQ ID NO: 458852 - DNA, 75 bp, Homo sapiens
cagctaccatgccagagccagtttattttcactgtgcagctgttacaccagatcgaatcatcaatttagttgttg

SEQ ID NO: 458853 - DNA, 90 bp, Homo sapiens
attggagatggggaccgccctggacatcaagattaaaagagcgaataaagtttatcacgccgggcatcctgaggttagcattacacttct

SEQ ID NO: 458854 - DNA, 75 bp, Homo sapiens
ggaggagtactcggtgaaatcctgtcctgaagactgtaaggagtctccccaggacagtgctatcacccgggatat

SEQ ID NO: 458855 - DNA, 100 bp, Homo sapiens
ttgtattaccattttcaatagcagtataaaagaaaactttagaaactgttcctttggagaggaaaaaggtactctgccagcaggtcacctcatatttaag

SEQ ID NO: 458856 - DNA, 107 bp, Homo sapiens
gacaaagccaggcgctacctccgagcggagtgcttccgggtagagaagaacctgctcatctttggcttagcagtgtctgcaaaaacgaatcttttcctacaacctgt

SEQ ID NO: 458857 - DNA, 88 bp, Homo sapiens
acagcaatgaggtgaacccaggggccgaagcccacccagggagttgatggacttaaccaccaccatgtcgagcaaaagaacaaagacc

SEQ ID NO: 458858 - DNA, 90 bp, Homo sapiens
tgcctacttggaaagaagaagagatagcgacttgccccagtccaaccccagagcggggcggaccccggaggcctgagcggcacctgcccc

SEQ ID NO: 458859 - DNA, 82 bp, Homo sapiens
cttcggcagtccacccaccgccgccgcctcccagctgatcttgcatctttaatggataaaacatttgagagaaagttgcctg

SEQ ID NO: 458860 - DNA, 96 bp, Homo sapiens
cacctgtctggagcaaggaaaagagccctggaatataaagagacatgagatggtagccaaacccccagaattgctggaatccacaaataccaaact

SEQ ID NO: 458861 - DNA, 98 bp, Homo sapiens
tctgctggtcttcatcctcatattcctggagtctcagatcaccactgttttaactcaaatgggtgatgaaaaggactcttggaaagtgaaaactttag

SEQ ID NO: 458862 - DNA, 100 bp, Homo sapiens
ttggaagcgctttgatttacagcagctgcagtgaatggataccacgcatcagggaccccagcgcaccctccagagactgcccacatgagtgtccgaaaat

SEQ ID NO: 458863 - DNA, 50 bp, Homo sapiens
gaaagttttgtgaagggtaaagatggagagcaacttatgactctcatctc

SEQ ID NO: 458864 - DNA, 114 bp, Homo sapiens
cgggaaagcaggaagggtgtcactgaccccaaagaactgaaattctgcgttcaaggaggatcccttttcccccagaaattactcaatgctgaaacctctcaaagtggtattaga

SEQ ID NO: 458865 - DNA, 83 bp, Homo sapiens
cagggagtgcaagcttagagcgtctggccaagaatcagaggaagtggggcatttgacactcttgcaaaagcattgaatcctgg

SEQ ID NO: 458866 - DNA, 98 bp, Homo sapiens
ggcagctgcggcaacgttgaggcagaatcaaaacctggggaaagaccttaggtattcaggtaacaaatatgtacctcgggccatcctggtggatctgg

SEQ ID NO: 458867 - DNA, 100 bp, Homo sapiens
gaaagagaaatggctgctttcatccaaaggactccagataattggcacctacgcccagacggaaatgggccacgatatcatgtccctgaaacgaatgctg

SEQ ID NO: 458868 - DNA, 90 bp, Homo sapiens
attaaggtggtattgaggatttctgaagcctatgaaaggtggcctccatgaaccagcgccgtgtggatttctaccttgcctccatcgaag

SEQ ID NO: 458869 - DNA, 73 bp, Homo sapiens
tggacgccgtcaacgccttcaaccaggaggcattcctgcatcgcatccggcagaacgtggccgactcagtgga

SEQ ID NO: 458870 - DNA, 100 bp, Homo sapiens
ggcagtcaagacgttattattaaagatgaagagagttcttcaagaggaacttacaatgtctcagaaaaatggtgggaatgttcttcagatgatgtatgag

SEQ ID NO: 458871 - DNA, 82 bp, Homo sapiens
caaagaatagagttgagcctgtgggacacttcggcatcaagatggtgctcatgtggaccagtggtgacgccttcaagacggc

SEQ ID NO: 458872 - DNA, 100 bp, Homo sapiens
gtatcagccgcagttgtgccgccatcatagcctacctcatgcatagtaacgagcagaccttgcagcttcgagagctgtgcccaggagtgaacaaccagcc

SEQ ID NO: 458873 - DNA, 75 bp, Homo sapiens
agagaattatgcacctgacagcatctattacctttgccttggaatacaggagaattctgcttggtcagaatcgtg

SEQ ID NO: 458874 - DNA, 118 bp, Homo sapiens
ccaaagcacacatgaactcagtgctcatggggatgaagaaccagctcgtgctcatcttcaaactctatcagcgggcaaagcatgtgtacagcgaggctgcgcgagtgctccagtttaa

SEQ ID NO: 458875 - DNA, 123 bp, Homo sapiens
ggtcacttaagttttccgtgtgcgggttgcaaggagcgtgcgtgcgtctggcatcgttggcttcacagtatgactgatgatcctccaacaacaaaaccacttactgctcgtaaattcatttgg

SEQ ID NO: 458876 - DNA, 100 bp, Homo sapiens
gggcagaatacagagatatggaatcagctctgaaatagaaaatgtctgcagacggcggaggcatccaggacacccaggacaaggagacacccccggaggt

SEQ ID NO: 458877 - DNA, 96 bp, Homo sapiens
tttggaaagaacggaaatcttaaaccaagaatggaaacagcgaaggatacagcctgtgcacatcctgacttctcatcgagagtaaacatgaggtta

SEQ ID NO: 458878 - DNA, 99 bp, Homo sapiens
ggaaaagtgcaaggaatttcaacttgccaatgtgcaaagctgcagaaaccacagtggtagagttggcaaacatgaattgactgggcataaagtagctgt

SEQ ID NO: 458879 - DNA, 100 bp, Homo sapiens
caaggaacaaaatgtttgtaaattctccttttaccaagatagccatccgagcttgtttcctggggtttgtgttcggctgcggcacgctgctaagttttag

SEQ ID NO: 458880 - DNA, 90 bp, Homo sapiens
agctgtcctttgttttggattacataaaccagtcacccaagtgcattgcctttggaaacgagtggtggacttgctttgtgaagagacagt

SEQ ID NO: 458881 - DNA, 100 bp, Homo sapiens
ctcatcaggcggctagagcaaggggaagtgccctggggagaagagagaagacgccggccaggcccctgtgcagatatgaggccccaggattcctggcgag

SEQ ID NO: 458882 - DNA, 75 bp, Homo sapiens
aggtgaacactgaccccaatggggtgtccgcaatgttgccagtgtctgtctgcagattggctacccaactgttgc

SEQ ID NO: 458883 - DNA, 74 bp, Homo sapiens
ccagtggcttccagatgtaaccagctatcagaggactcctgaaacctggagagctacctgctgtataaaggctg

SEQ ID NO: 458884 - DNA, 82 bp, Homo sapiens
gaagaagaagttgcgaaggatccccaacggggaggccaacgtgaagaagaaatggcaactgctgacaggaagtttggcatcc

SEQ ID NO: 458885 - DNA, 74 bp, Homo sapiens
tcaggagttcgattcctataccagtgccagtctatacagatcaaatgaatgcttcaggaccaattaaagagaag

SEQ ID NO: 458886 - DNA, 98 bp, Homo sapiens
gagcggcggcggaccacctccagtacatctttgcagacgcttatgcccagtacctctggatcacgtttgacttctgcaacactcttcaaggcttttcc

SEQ ID NO: 458887 - DNA, 100 bp, Homo sapiens
acctgtggctctttctgctgggcctgcccttcaccctctacatgttcactgagacttttttgacggagagggacaaacaatccaagtggagtggaattcc

SEQ ID NO: 458888 - DNA, 100 bp, Homo sapiens
acggggcgagcctggaggattgtcactccaacctcttttcgctgatctattaatgagatgaagcggttggaagaaatgtcaaatatgtttcagagctctg

SEQ ID NO: 458889 - DNA, 75 bp, Homo sapiens
tgaaatgctgtcccaaccttactggaaaatccattcctcgctgccgaagaattaacaggatgctctccaatgaat

SEQ ID NO: 458890 - DNA, 100 bp, Homo sapiens
gggcccccgagtctgcgccccttaagagcaaaatgatttatgccagctccaaggacgccatcaagaagaagctgacagggcctcagacctaaggcaggag

SEQ ID NO: 458891 - DNA, 76 bp, Homo sapiens
gcccgaagacagcccccccgtggaagaagtcaggactgtgatcagagctggtggagttgagatctataatggagat

SEQ ID NO: 458892 - DNA, 80 bp, Homo sapiens
tggcattggactcatggtgctgcatgcagagatgctgtggttcggggggtgctcgcacggggtcactctggtgcccattg

SEQ ID NO: 458893 - DNA, 100 bp, Homo sapiens
ccagttcaccaccaccgtgcaggtcgtcatcttcataggctcgctgctcgctctactgagatgaagaaagaaaaagaatacctgctcagctccagagaca

SEQ ID NO: 458894 - DNA, 75 bp, Homo sapiens
atttttcaagccaatctggaactggctcagctagaactgatcagtagagacggggtttcgccatgttggccagga

SEQ ID NO: 458895 - DNA, 75 bp, Homo sapiens
gaaaaactcgccaaactgcaggcacaagtgcgcattggtgggaaacttgaaataactgtgaatgtcccagatgta

SEQ ID NO: 458896 - DNA, 83 bp, Homo sapiens
gccagttccggcccgaggacaccgactaccagcagaacgtgctggccaaagcgctctatgacaatgtggccgagtccccggat

SEQ ID NO: 458897 - DNA, 75 bp, Homo sapiens
gagtgatatcagacaccgagcttcagcaagctctctccaacggtttatcttgcagattatggactttcctacaga

SEQ ID NO: 458898 - DNA, 129 bp, Homo sapiens
tgaggaagtggctgaaagctaggaagtttcaagattcaaacttagcgcctgcttgttttccaggacttgatgacacgtaccttcgctgcattgagctgcacagccacacccttattcagctggagaggt

SEQ ID NO: 458899 - DNA, 100 bp, Homo sapiens
ctcaattaactgtgtcaggaagtcgctcagattgacattttgctaaaggctgtgggagacactcctattatgaaaacaaagaagtgggcagtagagcgaa

SEQ ID NO: 458900 - DNA, 82 bp, Homo sapiens
aattcactgttcagtccataatattgtatccaaaccttgaaacctttgctctagatgtcaggcttgtttttgacaactgtga

SEQ ID NO: 458901 - DNA, 100 bp, Homo sapiens
cataacctctgggtgctggaaatggagtattactactgccccagcctgctgaagctcttgcgctacctctggatgtccaacatcacagtcacatacagag

SEQ ID NO: 458902 - DNA, 100 bp, Homo sapiens
cggcggacggctgcgtcgcccgaggcgaggaggagcgctggcgagttgtctgctggttctcagcttgaagaagattctgcagtccttattgatccttttt

SEQ ID NO: 458903 - DNA, 82 bp, Homo sapiens
ctccttttcgtttccggaaacatggtactccaaagattcaggtttactcacgtcatccagcagagaatggaaagtcaaattt

SEQ ID NO: 458904 - DNA, 83 bp, Homo sapiens
ggaagccctagtggatgagaatcttcaagtgtccccggcagctgccagacccggccatcgaggaccagggtggggagtacgtg

SEQ ID NO: 458905 - DNA, 75 bp, Homo sapiens
gcttaactgagaagtatttctctgtagaggtttgtcaagggctatttaatgagttactagaaaatgggatttctg

SEQ ID NO: 458906 - DNA, 80 bp, Homo sapiens
gaacgaatgggacaagatcccgtccatgaatcaggtctcggcgcggaagatggccggcggcgtggacggccccatcggga

SEQ ID NO: 458907 - DNA, 100 bp, Homo sapiens
atgaacccaacctagtgggtgtaatacatcatgaactgcaggattcacaatgacatcctttcaagaagtcccattgcagacttccaactttgcccatgtc

SEQ ID NO: 458908 - DNA, 98 bp, Homo sapiens
gagccatggggctccctggaatgagaggcccctcaggaccaggttaatgttgaagaaggaaaatgcggaagtcgtcatttgacaagttttataaatga

SEQ ID NO: 458909 - DNA, 80 bp, Homo sapiens
aatggactccctggctgctggagagttgaatgccagccaccagccatgggcccgatgagagaaagggaaagttaaggatg

SEQ ID NO: 458910 - DNA, 96 bp, Homo sapiens
atgattggtctcgtctggcgctccatggagcacccagggaagctactgtttgctcctaacttgctcttggacaggatgtgctgatggagctccttg

SEQ ID NO: 458911 - DNA, 101 bp, Homo sapiens
gaagtatatatgatgacatttctagcccaggacttggatcaacacctttaacttcaagaagacaggtgcgcttcccttcccacttcagctctgacttgaag

SEQ ID NO: 458912 - DNA, 75 bp, Homo sapiens
tgctcttgatcaggcagttgaaaatcaaagaggtcactctggggaagtttgtgcagatgttatcctggacatcaa

SEQ ID NO: 458913 - DNA, 100 bp, Homo sapiens
aacacatcaccttgatttttaatcccacggtcctgaggcacgtgaatggccaggatcagattgtgcccggcctgtacgcctgtggggaggccgcctgtgc

SEQ ID NO: 458914 - DNA, 75 bp, Homo sapiens
aacttaaaaagcagtctaaacctgtgaccacccctgaagaaattgcacagggtggagagattcaaccagttagcg

SEQ ID NO: 458915 - DNA, 90 bp, Homo sapiens
gcagtcatgagtcgcttcaagtttatcggttggcaaaagcagcttttgatgatgcaattgcagaactggatacgctgagtgaagaaagct

SEQ ID NO: 458916 - DNA, 83 bp, Homo sapiens
tagatgacagagcagcccggctagatattatgcagaaggggttaaaagataactttgctgatgtccaggtctctgtagttgat

SEQ ID NO: 458917 - DNA, 98 bp, Homo sapiens
aaacaatttctcctgctctgcagcttctgttcagcttgtagattttcagtggaaactgggtatggctgtgagctcagacacttgcagatctcttaagt

SEQ ID NO: 458918 - DNA, 85 bp, Homo sapiens
ctcgctgctcggcgtggaactgtcagatcccctctgagcagctgggagctcagaagctctgtccaaccctgaggagtgggtcagc

SEQ ID NO: 458919 - DNA, 73 bp, Homo sapiens
aactgccaaacccaagttggttggagatgtggattttgaagacaattgtggcaattaataaagacccagaagc

SEQ ID NO: 458920 - DNA, 99 bp, Homo sapiens
ccacattcttgcagctgcctacaaattcaagagtgaccagggatggagcttcatgaacaactgggaggtgtacaagcttctagctcatgtcagaccccc

SEQ ID NO: 458921 - DNA, 74 bp, Homo sapiens
catcattgatgtggtgcgatcggtggaagttgatgggtcgaaactaaatgtgaccagcacgtggaacctggctt

SEQ ID NO: 458922 - DNA, 75 bp, Homo sapiens
cggggatgagtccactctggccttccagcagtttgggaatacctgctactgcaattcagttcttcaagcacttta

SEQ ID NO: 458923 - DNA, 82 bp, Homo sapiens
tgctgctgctgctgacgctgctgctgcccggcctcgggcatttagcagaagagaaacctgatggccttatcaatgaagctac

SEQ ID NO: 458924 - DNA, 74 bp, Homo sapiens
ctggctgactgagaagatgcatgccagagacttcacagtttctgctctgacaccaacgtgattcggtatatcca

SEQ ID NO: 458925 - DNA, 100 bp, Homo sapiens
gacattattgcgcgtggaacggctgcttttggaagatgtgaagttcatttccaatccgccctccatggtggcagcggggagcgtggtggccgcagtgcaa

SEQ ID NO: 458926 - DNA, 100 bp, Homo sapiens
ctgatgttaagtgtgtgatacacatccatacccttgcaacagcagctataacggaggagatgatggatcaggcaaatgataaaaaagtggctgctattga

SEQ ID NO: 458927 - DNA, 100 bp, Homo sapiens
agcccgggcgccaccgctgccacctccgcgagatggtcatcatgggccagtgctactacaacgagaccatcggcttcttctataacaacagtggcaaaga

SEQ ID NO: 458928 - DNA, 100 bp, Homo sapiens
gtggggccttcagactgcaccctgcacggctttgtgcacggaggtgaggaaaatagcagctgaatactatgacaacctccctcactacaattcctggata

SEQ ID NO: 458929 - DNA, 100 bp, Homo sapiens
cgagcttttactaacctcgtgagaaaagctttacgtctcattcaagaaaccgaagtgatttccagaggatttacactatattaacctggctgcagagcca

SEQ ID NO: 458930 - DNA, 96 bp, Homo sapiens
ggtgggagtctttagtccttgtgctgatgtatcttatctacattgtcatcatgaaccttttccctggaaggctcaggaatcagtttcgcagattta

SEQ ID NO: 458931 - DNA, 100 bp, Homo sapiens
aaaacgagcgcgagagggggaaaagcgagcgatcgagcgagcgcgcgcgcgaaaactccgggcagcaaatgaagctcgtgaccgagaacctgaaggagga

SEQ ID NO: 458932 - DNA, 82 bp, Homo sapiens
gtgacgactgtgaagggggtcatcaaggctgtgctggatggagtgaagggcccccagatgccgacggccctctctacctccc

SEQ ID NO: 458933 - DNA, 75 bp, Homo sapiens
cttgaagtatttggctgaggagttttcaatcccagatttggagtggatcagttacgagatgacaatctagaaact

SEQ ID NO: 458934 - DNA, 101 bp, Homo sapiens
ctcttatggtaaccaatgatggtgccactattctaaaaaacattggtgttgacaatccagcagctaaagttttagttgctgtctgtgatcctggaaacata

SEQ ID NO: 458935 - DNA, 75 bp, Homo sapiens
gcgaggagaagcgagaaaagatgaaacggaccctcctttgaagtaaattttatggatgatgtaggtcagactcta

SEQ ID NO: 458936 - DNA, 80 bp, Homo sapiens
tgaaatgattcatttctggaagcattctactgtgtatactcttgatgtaccagatgcattctattactgttatagtccag

SEQ ID NO: 458937 - DNA, 98 bp, Homo sapiens
ctgaacaagactttcaataggggccagtatgcttcgcttcatccagaagttttctcaagcatcttcaaagtgcacagccagagaacaacacatcacac

SEQ ID NO: 458938 - DNA, 97 bp, Homo sapiens
cagcggagccctgggctggggcaggagccgtctgatcatcggatatcatggagtctggcaagacggcttctcccaagagcatgccgaaagatgcaca

SEQ ID NO: 458939 - DNA, 75 bp, Homo sapiens
cagcaagaacagagagagaggtggacagatctgagagatactgaggtctggtccgagagcaggaggctgggctgc

SEQ ID NO: 458940 - DNA, 98 bp, Homo sapiens
caagctgtggaccctcgtgagcgacccggacaccgacgcgctcatctgctggagcccggctcttgcagccaatgccggaacaggatttgctgttgctg

SEQ ID NO: 458941 - DNA, 103 bp, Homo sapiens
gggcttatccttttgtggcggatctagcttctcctcgccttcaggatgaaagctcagggggaaaccgaggatggtgtcctactcttctgtcctcacagccatc

SEQ ID NO: 458942 - DNA, 100 bp, Homo sapiens
cccggagccgaaacaccggtaggagcggggaggactcacagagcaggtaccaccttggaatttgctatgagaaaggccttggtgtgcagaggaatctggg

SEQ ID NO: 458943 - DNA, 100 bp, Homo sapiens
tacaggtgtgagccacggcgccgggccccctagggattttcagggatcatggcccaagttgcaatgtccaccctccccgttgaagatgaggagtcctcgg

SEQ ID NO: 458944 - DNA, 80 bp, Homo sapiens
gcccgacaagaataactatgctgccatgctgtcggaaaaggtaacagaagatggaactcgaaatcccaatgaaaaaccta

SEQ ID NO: 458945 - DNA, 100 bp, Homo sapiens
gccgccgcagcagctgatgctgagcgcggcgctgcggaccctgaaggcgggcgctaatattgacacctgctcagaagaccagaggaccccgttgatggaa

SEQ ID NO: 458946 - DNA, 50 bp, Homo sapiens
cccaggacaggtggcactctttcaggaggcaggtggaagtcatcataaag

SEQ ID NO: 458947 - DNA, 75 bp, Homo sapiens
gaggaaatggagacggtcatccctgtagatgtcatgaggcgagctggggcgttcaatgtcatcaatggcggttct

SEQ ID NO: 458948 - DNA, 100 bp, Homo sapiens
tcgtcttcaccaccaggtacctggacctgttcaccaacttcatctccatctacaacacagtaatgaaggactcagttgcctttgaggatgtggctgtgaa

SEQ ID NO: 458949 - DNA, 51 bp, Homo sapiens
cttcgggacaagattcgcttctatgaggatctacacacaatgagctggaaa

SEQ ID NO: 458950 - DNA, 75 bp, Homo sapiens
tcatggatgctgtcaacaagaagagcagttcccaggatctgcataaaggacgactgggtttggattcagaagagg

SEQ ID NO: 458951 - DNA, 117 bp, Homo sapiens
caggaacactgaagggcaggtcgtccccgaccttctatgaggattgcccagctcaagggtgctgaaaagtcacccaccacttcagctgaccttaagtcagacaaagccaactttaca

SEQ ID NO: 458952 - DNA, 100 bp, Homo sapiens
cggacactttgttattggagaaacatgcagattatatcgcatcctatggctcaaagaaagatgattatagagtgactcagacatctcctctacaagtacc

SEQ ID NO: 458953 - DNA, 51 bp, Homo sapiens
aaagcctcctacagcccaaaagcagggtgataaaagaaaatgtggctgaag

SEQ ID NO: 458954 - DNA, 100 bp, Homo sapiens
accccgagaaccgtcagtttgagccagatgaaataagcgggttttgaaaacaaaaaaaagaaggagtggaagagggggccaggatccaggcctccatccc

SEQ ID NO: 458955 - DNA, 83 bp, Homo sapiens
gtcatccgcggctacgtgggcaaccgggcggccacgttcccgctgcaggtgtttcccattaaacactaccaggacaaaatcag

SEQ ID NO: 458956 - DNA, 75 bp, Homo sapiens
ggaatatgccattgaggctatcaaggtttcccaggcagctgcagacttgaaacagttctgtctgcagaatgctca

SEQ ID NO: 458957 - DNA, 100 bp, Homo sapiens
ttcatgtctcagctcctgtcttccaataattttctgaaaaaggtatccatcatcccacgtggcaaaggactaggttatgctcagtatttaccaaaagaac

SEQ ID NO: 458958 - DNA, 95 bp, Homo sapiens
gcaccgggatgccggttgtgcgtgtcctcaggtgtcccgaacaagcgacctgctgtcctttgagctgttggatataaacattgttcaagagttgg

SEQ ID NO: 458959 - DNA, 100 bp, Homo sapiens
cgtgcactgggccgcgcatttcggcaagatgcctgtgaggagccaccaacatttgaagctatggagctcattggtaaaccaaaaccctactatgagattg

SEQ ID NO: 458960 - DNA, 100 bp, Homo sapiens
tctacaacccgcgcttctggccgcgggaaggagaggaatgtggacccccctgtctggtacgacaccgacgtgaagctgtttgagatacagcgggtgtgag

SEQ ID NO: 458961 - DNA, 144 bp, Homo sapiens
tgctcatggggctcctggagggctactttgtgcccctgcacagcttcttcctgaccccggacagctttgaacagaaggccgaatccacatatgtcgaagcaagacagaaaccaaagaccgtccagcatggtcagtgaaacatcc

SEQ ID NO: 458962 - DNA, 75 bp, Homo sapiens
ggaagccctgcggatggccaacgtggcagactgcgattcctactgcaaggcctccaaggggaagctgaagattaa

SEQ ID NO: 458963 - DNA, 78 bp, Homo sapiens
aatcaaaagaatatttagaatgcaggatggagagtacttcctcgcgtattgctaaaggaggagttgaccacaccaaaa

SEQ ID NO: 458964 - DNA, 100 bp, Homo sapiens
gcactactggcccctgatccggttcttggtgcccctgggcatcaccaacatagccatcgacttcggggagcagctggccctgaaggaccctgttcataca

SEQ ID NO: 458965 - DNA, 101 bp, Homo sapiens
gtggacgccgaccgtccgggacgaggtaatcattaccaaatgaggaggaaaggacgatgtcatcgaggctctgcagcgaggcatccttcttccccatgcag

SEQ ID NO: 458966 - DNA, 75 bp, Homo sapiens
cgcaaccccagatccatttacactttacatatacgctcaacggcaagaaagtggaagttgccgtcaaacagatca

SEQ ID NO: 458967 - DNA, 98 bp, Homo sapiens
cctatcagagaagcagaaggcacagtgcctctgaccagcatcgtctgtaaagtcactcagcctctgaagaagcttcgggttcagactcaggcagtcag

SEQ ID NO: 458968 - DNA, 82 bp, Homo sapiens
ggacagtacttggtccagtactgtaaggacaccggcatcagcagaagtcaattcatctggaaagactatctctgagtcagac

SEQ ID NO: 458969 - DNA, 101 bp, Homo sapiens
cacctggccaggcttggaagaaaaagactgtagatccaaaatgatacgggccaagaccagcttcaagtctccatggtaccagaaaacaacaacctcacagc

SEQ ID NO: 458970 - DNA, 101 bp, Homo sapiens
gccagcgaggctcgggagcccagggtaactaaggaagtggatgctacatctaaagaggccaaatccttcttcaagcagaatgagaaagaaaaaccacaggc

SEQ ID NO: 458971 - DNA, 87 bp, Homo sapiens
cgcgagtgtgcgccgtccgccgcccgccggatcccccggaccccccgacctgtggacgaatgtggaacctcgctctgtggctgtgtt

SEQ ID NO: 458972 - DNA, 74 bp, Homo sapiens
catcccaattagaggagctagctgacttcatggagcagttaaacagggtaaagatggtggaaaaggaaaaggat

SEQ ID NO: 458973 - DNA, 75 bp, Homo sapiens
cccgaggctagcatctctcgggagccgcaaggcgagagctgcaaagaactcaacagtgacaattgaggaattcca

SEQ ID NO: 458974 - DNA, 96 bp, Homo sapiens
aaaggactcttctaaaaggatatgtgttgctaatacccatctttactggcatcctaaagaaatgattctggggaccattctgaccacatgcattac

SEQ ID NO: 458975 - DNA, 96 bp, Homo sapiens
acagaaggcggctcggcccggtgattcaggtcgaaattcaagctgaacagcctgctgagaggctcagctgtcgcaggccctggaggagctgggagg

SEQ ID NO: 458976 - DNA, 97 bp, Homo sapiens
ctctggggcccaagggattgtttggaacagatggagtcggataactgttcaggaggagatgatgactggacccatctgtcttcaaaagaagtggacc

SEQ ID NO: 458977 - DNA, 100 bp, Homo sapiens
gagagcgcagaatatcaagtgctggctttcatgagaaggacaagaagccatattgccgaaaggatttcttagccatgttctcacccaagtgtggtggctg

SEQ ID NO: 458978 - DNA, 100 bp, Homo sapiens
cagcgtgggtgagcggcgcagcggcggcagcggagagcgagagaggggagcaggttagcactctacgtatatgaatatctgctccatgtaggagctcaga

SEQ ID NO: 458979 - DNA, 82 bp, Homo sapiens
gaaggaacgaggcaaggagctaaagcagcgtgcgttcagccctggggtggctattatcatggaaaactaatttttcccagag

SEQ ID NO: 458980 - DNA, 73 bp, Homo sapiens
cgtttcaataaaggggtccatgaggacacacacaagggtcacggagactcaccagttggcagaattaaatgag

SEQ ID NO: 458981 - DNA, 83 bp, Homo sapiens
agccagcgcacctttacatcaaaacaaaagctattttgaattcaaaatccagtccacaggatgctttggagtctgcaatgaag

SEQ ID NO: 458982 - DNA, 114 bp, Homo sapiens
aatgacatcagtttctggaagaagaagaagagcatgatcggcatgtccaccaaggcagacaatgcagatcttcgtgaagactctgactggtaagaccatcaccctcgaggttga

SEQ ID NO: 458983 - DNA, 83 bp, Homo sapiens
gcgcagccaatcaggcgtcgttgctacctcaagagtgagccatggagctacgtgtggggaacaagtaccgcctgggacggaag

SEQ ID NO: 458984 - DNA, 100 bp, Homo sapiens
atttttggagaaaattggagatttgataacactggagatcagcaccaaatcccacagaggcatctgagctcctcttttgacttggactatgactttcaac

SEQ ID NO: 458985 - DNA, 75 bp, Homo sapiens
cttggatttggctacacacttatagatcttctgcactgtttacaggcacaggtatcattgcccagtgcctaagat

SEQ ID NO: 458986 - DNA, 90 bp, Homo sapiens
ggaggctgtcctgcagagaagtgccgcgcacatgagatccagctccaggtcccacaggggctcttcttccccacgaaaaagatcttattc

SEQ ID NO: 458987 - DNA, 98 bp, Homo sapiens
ctgcctgccgggcggccgggcgcggcgagcccagaaaatgtgccagaggaacttcaagaaccattttacacagatcagtatgaccaggaacacatcaa

SEQ ID NO: 458988 - DNA, 82 bp, Homo sapiens
gaaagtgtcaaggcattacggctcccattgaggcggcttacagggagaacacagttggcctccaccgtttctgccccacaga

SEQ ID NO: 458989 - DNA, 80 bp, Homo sapiens
gactgaagatgcagagcccatttcagaacctgagaaagtagagactggcacaagaatagccgcccagtgactgccaagtg

SEQ ID NO: 458990 - DNA, 82 bp, Homo sapiens
tcgggagcgcaaggtcgccctcaaggccatgatcaaaacgccagaagaatgtttgaaggtgagatggcaagtttaactgcca

SEQ ID NO: 458991 - DNA, 75 bp, Homo sapiens
cggatggaaatcctaatgacagtctccaaattcgcctccatctgtaccatgcaattctgtggtgttcttggtcac

SEQ ID NO: 458992 - DNA, 75 bp, Homo sapiens
ctggatgggggaccacaagatcctcatcgacagattgtaaaccatggctgtgtggatacaagctcagcagctcca

SEQ ID NO: 458993 - DNA, 50 bp, Homo sapiens
aaatctgatttaagcttcacacataaaagaaggacacagtgttgcggcag

SEQ ID NO: 458994 - DNA, 100 bp, Homo sapiens
cccaagccttggcgggtccttgcggcgaataggagtctggtcaggcgtcaggctagtccgacgaagagtgggcaaatactctatctggatcttctctcag

SEQ ID NO: 458995 - DNA, 100 bp, Homo sapiens
gaactcccacctgcgacacatcgagcacatggagcatgattttgaagtcagaggagatgtggtcaatggaagaaaccaccaaggtccaaagcgagcaaga

SEQ ID NO: 458996 - DNA, 97 bp, Homo sapiens
tcggggacggagagaacacgagcccatcaggtgtcatggagaaactccagctgggcccagagattctgcagcgggaaaatccaaggcttatttatgc

SEQ ID NO: 458997 - DNA, 90 bp, Homo sapiens
tccagtaaaattaacaacactctgacagaatgtctgaacctcatcgaaggggttatggatgatgaatcagatgaaaaagaagcaaactca

SEQ ID NO: 458998 - DNA, 100 bp, Homo sapiens
cctgctgccctcttgcgcgcgggaagcagcaccaagttcacggccaacgccttggcactaggcattagtgccagcagtagttcccaagggctgtctcagc

SEQ ID NO: 458999 - DNA, 75 bp, Homo sapiens
agaccaggttctgaatcccatgctgggcaggattacagtttaaagacaatttctgtgatcaagttgtcatttgga

SEQ ID NO: 459000 - DNA, 51 bp, Homo sapiens
ttcagccctttgatgaccgcagcagtgcacagccagagaacaacacatcac

SEQ ID NO: 459001 - DNA, 74 bp, Homo sapiens
cagcttcggaacaagagaccctgttgcaggacgaggagcggaggcggcagcagcagttagaagagatgcgcaag

SEQ ID NO: 459002 - DNA, 73 bp, Homo sapiens
gagaatgtggtcttttgcaaaatgaaaagacttcacagagaatgcagttgtcttgacttcaggtctgtctgtt

SEQ ID NO: 459003 - DNA, 51 bp, Homo sapiens
tcaagttgtttggctaaattcttcaggagtggagtcaacatatcaatggag

SEQ ID NO: 459004 - DNA, 100 bp, Homo sapiens
cagatcgtggcaagcgagcccggggtagagaaaattttcgtgctctgagcactggagagaaaggatttggttataagggttcctgctttcacagaattat

SEQ ID NO: 459005 - DNA, 50 bp, Homo sapiens
agatcattgaactcctgattttgtcaggttgggaggtggctggagatcat

SEQ ID NO: 459006 - DNA, 50 bp, Homo sapiens
tgtagcctcacctcagcgcattcagatcaagaagctactctagaagtcgg

SEQ ID NO: 459007 - DNA, 83 bp, Homo sapiens
ggaatctaaaaagccctcagtaccagagacagaagcagatggattcgtccttttagacaatgcagatcttcgtgaagactctg

SEQ ID NO: 459008 - DNA, 50 bp, Homo sapiens
ctcccagatagctgggactacaggcatggtggtatgtgcctgtagtccca

SEQ ID NO: 459009 - DNA, 100 bp, Homo sapiens
tccgcgcccagcgagcgcttggagctgcacgtggacggatcggatgagaaggtattcgaggtacacgtgaggccaaagaagctggcggttgagcccaaag

SEQ ID NO: 459010 - DNA, 100 bp, Homo sapiens
tgtgacgctgctgctggggtcaggggctgctggagtcctctgcagagaaggcccctgtgtcggtgtcctgtggaggtgagagccccctggatgggatctg

SEQ ID NO: 459011 - DNA, 74 bp, Homo sapiens
ccaggacgagatgcaatgctcccccgaggagatgcaggtgttaagttggaggacgagtaagtcgtgaattaaat

SEQ ID NO: 459012 - DNA, 75 bp, Homo sapiens
atgagatgattgccaaacccccagggcaagaggattatgacagattacgaccgctgagttatccacaaacagatg

SEQ ID NO: 459013 - DNA, 95 bp, Homo sapiens
actgggtgtacctgctttgcttctctgcagcagagaccacgcagaggctgcctttggatcaagtccaggaagtgcttcccccaattccagaacta

SEQ ID NO: 459014 - DNA, 75 bp, Homo sapiens
atgaagaaagacgtgcggatcctgctggtgggagaacgcctactcccaggatgcctacctgaaagggaacgagcc

SEQ ID NO: 459015 - DNA, 96 bp, Homo sapiens
ggagctgaacgtggactggcgagatgagccagagaaggacagaataacgggctcccagattcacaagccccaccaagaggatcaccccaggaacgc

SEQ ID NO: 459016 - DNA, 74 bp, Homo sapiens
ctgaccatagccagagaacagccctccatcttgcagcccagaaggaaaacgactgtcttcttctgccaaaatgt

SEQ ID NO: 459017 - DNA, 100 bp, Homo sapiens
ggaatgtgatcacagagcctatttacccagaagtagtccatatggtgacttaagagattaaaattaatttggttgctgttggttctgaacaaataatgag

SEQ ID NO: 459018 - DNA, 83 bp, Homo sapiens
tcgtgcacgagaccggctacttctcggcgctgccgtctctggaggagtactggcaacagcctactcaatttgaagacattgag

SEQ ID NO: 459019 - DNA, 90 bp, Homo sapiens
cgcagaccccttcaagttctagtcatgaaaaagcttgtggtgaaggggggcaaaaaaaagaagcaagttctgaagttcactcttgattgc

SEQ ID NO: 459020 - DNA, 98 bp, Homo sapiens
cggagacggcggaagcggagagcaacagcgcgccgggtttgtgtttagtgaatcagagggatctgcattagaacagtttgaaggtggcccctgtgctg

SEQ ID NO: 459021 - DNA, 75 bp, Homo sapiens
cacctctgaggctagcagtgcgccagcaggggacaagggcctgtccgacacgccctacgacagcagcgccagcta

SEQ ID NO: 459022 - DNA, 85 bp, Homo sapiens
tgaggagaggagcgtcaacagcagcaccatggattgtgcttgagaacagtagtcgagaagacaagcatgaatgtccctttggccg

SEQ ID NO: 459023 - DNA, 80 bp, Homo sapiens
atggcttctggggacctttacgaggctactgcagcactggggtgtcagttgttggtccgacccagaacgcttcagttctg

SEQ ID NO: 459024 - DNA, 152 bp, Homo sapiens
gaacctccacaacagctactatagtgttcctgagctgccaacgatacctgaggggggttgttttgatgaaagtgaaaggagccctctggcacaaatggaagaagaaagaagggagcaagtagctaaaattaagaagatggagatggagatgg

SEQ ID NO: 459025 - DNA, 75 bp, Homo sapiens
tcaccacggacgagatgatcaaacgcctgaagggaaaatatttatccccaaacagaaacctgtacagacttttac

SEQ ID NO: 459026 - DNA, 98 bp, Homo sapiens
cccggggccctcatggacggttggatcagggccgaaggaggaggcctcggtggtaccagaagaggaggggctgatgtgaacatccggcattcaggccg

SEQ ID NO: 459027 - DNA, 100 bp, Homo sapiens
caggtgggcggccgcgggcgcgatgcggcactgcagaccttcacggcatggtgcaactcccacctgcggaaggcaggcacacagatcgagaacattgatg

SEQ ID NO: 459028 - DNA, 96 bp, Homo sapiens
gaccgagagcgcgaatatcgtcatcgttagaaggtttcaccaaaactcatgccaatgcagcagatcgcaaattgaaatatggatatttgtaccagg

SEQ ID NO: 459029 - DNA, 83 bp, Homo sapiens
tggagcgactctgggattcagacaccgcaagctgctttcggaagggcttcaggaggggctgcatggctacttggagaatgagc

SEQ ID NO: 459030 - DNA, 100 bp, Homo sapiens
gccaaagactgtgcaagtgctggagagccgagaccgacccgcccgcccgcggccccgcagcagctccaagaaggaaccaagagaccgaggccttcccgct

SEQ ID NO: 459031 - DNA, 100 bp, Homo sapiens
gctgtggattggcattaactttgacagactcacacttttggccctgtttgatagaacgtgctggccaaagcgctctatgacaatgtggccgagtccccgg

SEQ ID NO: 459032 - DNA, 100 bp, Homo sapiens
actcagctgcagtgagaatacacaggcatcttcaaggtatgatctcgtgaaaccttgagagaaactgaatgacgaatgaaactattgttcctgtttcaca

SEQ ID NO: 459033 - DNA, 75 bp, Homo sapiens
cggacagagcccgtggtcgcgcagctcttccaccaaagccacctaagccaatgacttcagcagttccaaatggaa

SEQ ID NO: 459034 - DNA, 100 bp, Homo sapiens
ccgagcgcaaggacagcgcgaggtccgcgcagcccagcgcagccatgctgtctgtccccagaccccagagcacgtccggcaccaccatgactgggctgtt

SEQ ID NO: 459035 - DNA, 75 bp, Homo sapiens
cacgggatcccagcctcaggcctgcacggacggtgttggttggggaattgaatgatctggcacgggaccctccag

SEQ ID NO: 459036 - DNA, 100 bp, Homo sapiens
aaaaaagaaaagttgtttcctccaacattgatgttcctccagcaagtgattacagtggcgagatcttgaacaactgctgcgtcatggagtaccaccaagc

SEQ ID NO: 459037 - DNA, 100 bp, Homo sapiens
cgggaggggggagcggcgttggaggccaccgtttccagactgctgttgtctgaggagctgactagcctgctggtcgtgcactggggtgggctgctgcttg

SEQ ID NO: 459038 - DNA, 74 bp, Homo sapiens
caaaaactacaatcataaagaaatccaacttaccttgtcagatggtcgtttgaagccaggagatcaacttgtct

SEQ ID NO: 459039 - DNA, 75 bp, Homo sapiens
gctgaggagaggagcgtcaacagcagcaccatggcacgtcagctaactgttcagatgatgcaaaatcctcagatt

SEQ ID NO: 459040 - DNA, 153 bp, Homo sapiens
tgctactagcgcgcttatcagctccgccaccgcccaagggggaaacttctgcagaaaccccaaccgagcttccgtcgatggaatccgacgtggtaggcccagagcagatactgtccgcgatttaataaatgaaggagagcattcatccagcag

SEQ ID NO: 459041 - DNA, 89 bp, Homo sapiens
tggcctccctcaccttggacacctcgcttgggttcaaggtgtttgcagactatgaagcctacatgcagtgccaggcacaggtggaccag

SEQ ID NO: 459042 - DNA, 120 bp, Homo sapiens
gccgccgctcaggaccgggcctcaaaatggccacacgcgtacccccgtagcggaaaaaccctcgaagcggaggatccctgtgtcccagccgggcatggccgacccccaccagcttttcga

SEQ ID NO: 459043 - DNA, 75 bp, Homo sapiens
tcacagaggaaactctgcattctcgcttcctggagggatgcaagacttcaattaccttagcagcaactgttttga

SEQ ID NO: 459044 - DNA, 100 bp, Homo sapiens
acaacacctgtgtggtggaattccagttcatgctgcccacatctcatccaaacagtggtgcctgtggagaggtaaagctggctttcgagaggaaaacatg

SEQ ID NO: 459045 - DNA, 90 bp, Homo sapiens
agccagggaatcattaacaagaggcagtgacatggcgcagaaggagggtacgacccggacagcgggcacgacagcggtgccgaggatgcc

SEQ ID NO: 459046 - DNA, 82 bp, Homo sapiens
ctatcgtctatcattggatgaagtggctccggagatatgcagcagcttttttatgagaattacgagcagaacaaaaaggggt

SEQ ID NO: 459047 - DNA, 82 bp, Homo sapiens
ctgtttttttcaacagagaatactggaatctcacaacaataccttagttgacccttgtcgagtaaccagctcataaatcaca

SEQ ID NO: 459048 - DNA, 101 bp, Homo sapiens
tgatattgagctttacatgcacttgaacagactagaaattgcaccacagatatatgggttgattttcaagaaagacatgtctgacaaaatgtctagcttcc

SEQ ID NO: 459049 - DNA, 98 bp, Homo sapiens
agtgatatctggtggactcttccccctgaacaacttcttccaaaagaagtcttatctgagggcaattgaaggaacagactaaaaatcgtgtcctggaa

SEQ ID NO: 459050 - DNA, 75 bp, Homo sapiens
cgcccccggagctgctggtttcattcgaggtttcgggccgtgatgtcttggcattgcccattttcaagcaggaag

SEQ ID NO: 459051 - DNA, 101 bp, Homo sapiens
cccagtctttttggagccatccaccacccccatgacctggcacggccttcaactttgttctctgccgctgacggagtcttactgtgtgaccaggctggagt

SEQ ID NO: 459052 - DNA, 119 bp, Homo sapiens
agcagatggctcgagaatacagagagaaaattgagacggagctaagagatatctgcaatgatgtactggtggcttcccacacttctgactcggacgttccttccggtgtcactgaggtg

SEQ ID NO: 459053 - DNA, 74 bp, Homo sapiens
gtccagcaggaggagatgctaaagaattagccaatgaatttccctgtttgccaaagcaagtggcttggatcctg

SEQ ID NO: 459054 - DNA, 90 bp, Homo sapiens
cagcctcctgagtagttgggattacagtatttagcatttacgtgtggcttaatcagaggtggcttatcaaacttgggaataaaaagtatt

SEQ ID NO: 459055 - DNA, 100 bp, Homo sapiens
ttagtcggcctgatggcttagaggactctgaggatagcaaaatcctgacgggagaggactggaatgcagtgatgtatcacgggatcgaatcgcaaggcgg

SEQ ID NO: 459056 - DNA, 100 bp, Homo sapiens
tgtgaaccttcgcattcagaatttgaccatcttggtgagaaacattaagacctactaccaggccctgatccttcaccagctaggccgctacagtctggcg

SEQ ID NO: 459057 - DNA, 76 bp, Homo sapiens
ctcccacccccgagctctcagccactccctagcactcacagtgaacagcagagaatttcaaaggaccttgctaata

SEQ ID NO: 459058 - DNA, 83 bp, Homo sapiens
gggcaaagaccgaattgaaatctttccctcgcgaatgactctccttcagcaactccagaagcttcagactttggtgatgggca

SEQ ID NO: 459059 - DNA, 78 bp, Homo sapiens
ctcagcgcgacgtcgtgtcgagttcccaaaaagctccgcaggggctgtagggaggcttctctctgggctccacagtgc

SEQ ID NO: 459060 - DNA, 90 bp, Homo sapiens
atctcactaaaagaatagatagtcttcctttaactgaaaatttaagtgggcagaccaacatccacctcagcaaaaacttcttcctgacga

SEQ ID NO: 459061 - DNA, 97 bp, Homo sapiens
gcgcgtcggcgagctcacccagcaggcgctgcagcggtacctgaagacccgggagaagcctctgaagagccaatccattcaggatgggaaaccacgc

SEQ ID NO: 459062 - DNA, 73 bp, Homo sapiens
aaccgtcagtttgagccagatgaagctccaccatgaggcgaggtggatggaggaagcgagctgaaaatgatgg

SEQ ID NO: 459063 - DNA, 114 bp, Homo sapiens
cagaagtcgcgtgtctaggtgagtcgcggtgggtcctcgcttgcagttcagcgaccacggttctgcggggagtgtctccagccctgcctgcaggtgccatccccgctgtgccca

SEQ ID NO: 459064 - DNA, 100 bp, Homo sapiens
ctgggaccttgcggtgaggctgcgcggggccgaggccgcctccgagcgccagacaaatttacatgtattggagaccagaccagaagcccttctgaattaa

SEQ ID NO: 459065 - DNA, 75 bp, Homo sapiens
acattttttgaaatttttaagacacgctgcaacaaagcaggtgcagacatggccaagtccaagaaccacaccaca

SEQ ID NO: 459066 - DNA, 82 bp, Homo sapiens
ctgcgcgctgctcctgctctgctacctgctgtggcggggccttcgtgggcccgcgatgccaggaccccaacccgtgcctcag

SEQ ID NO: 459067 - DNA, 100 bp, Homo sapiens
ctgcctctctcagtccgggtttggagactcctgcgtcctccgacttttcatggttaaacccatccagagtaatggctgcggccttacccaggaccctggg

SEQ ID NO: 459068 - DNA, 100 bp, Homo sapiens
attttgttcaaatgttcagactttgttgtggtacagtttaaagatatggactccagttatgcaaaaagaggttgtctgcattcaaaagagcattctatta

SEQ ID NO: 459069 - DNA, 100 bp, Homo sapiens
cagtgggtgctcacagctgcccattgcctaaagaacattagtgccagcagtagttcccaagggctgtctcagccatccacccagacgactcagtatctga

SEQ ID NO: 459070 - DNA, 96 bp, Homo sapiens
ggcctcctcagtgcgaagaagctgcagccgcacctggccaaggctcacagcgctccttcaccactattacccaattgagatcgacccacaccggac

SEQ ID NO: 459071 - DNA, 50 bp, Homo sapiens
cattcaacacctttacatttagcagggcccagcactagaagatttcagtc

SEQ ID NO: 459072 - DNA, 73 bp, Homo sapiens
ctgactcttctatgctgtgttcagtcggagccagtaaagcagacttctgtttcctgctctcgacaagggctgg

SEQ ID NO: 459073 - DNA, 89 bp, Homo sapiens
gtgcagcctggcagtgcagtgatccaggtccagagagcatcgcagacatcgatctcgctccatgtcacgtgaacgcaagaggagaactc

SEQ ID NO: 459074 - DNA, 95 bp, Homo sapiens
tgatgggcaggagatggacccgccaaatccagaggaggtgaaaacgcctgaagaagctgacctgaataatgtcagattctcagcttataggactg

SEQ ID NO: 459075 - DNA, 101 bp, Homo sapiens
ccggtgatcatagccatccagaccttctgctaccagaaaaccttctccaccagaatccagctcacgctgcatgaaacagttgatggctatagaagatattt

SEQ ID NO: 459076 - DNA, 97 bp, Homo sapiens
acactttcaagaaaatcctttgtattacccctgaattgtacccttgtttcagagcctaacaggttcctactatctgaccaccacctacggggccctg

SEQ ID NO: 459077 - DNA, 101 bp, Homo sapiens
ccggcggcagcgctggagcgagcttttcgctgtggcctgcagtttttaggcaacattgcctcacggaatgaagattcccagtctattgtttgggtgcatgc

SEQ ID NO: 459078 - DNA, 74 bp, Homo sapiens
ttttgatgtggatgatgccaaagttttattagacaacgactgaaagacctttcattcagaagctgtttcgtcct

SEQ ID NO: 459079 - DNA, 100 bp, Homo sapiens
cagaacggccgatctccagcccaagatgattccagcagtggtcttgctcttactccttttggttgaacaagcaggtgtggatgtggaagcagccaagcgg

SEQ ID NO: 459080 - DNA, 50 bp, Homo sapiens
gcgcacacgccccagacccaggctcagagagatatctatatctgaaagga

SEQ ID NO: 459081 - DNA, 100 bp, Homo sapiens
cgagccagcgcccggagcaagcggagctcccccaagagccggaaaggtcatgcaagacaagataatctgccttccgaaaagagtgcagcctgctcagaac

SEQ ID NO: 459082 - DNA, 97 bp, Homo sapiens
ggtggtcttccattgccggcacatgttccacaaggagtgcctgcccatgcccagcatgcttggatttacactgggcaacgtggttggaatgtatctg

SEQ ID NO: 459083 - DNA, 100 bp, Homo sapiens
ttccagactcggtgctgtacccgccgaatacaaacagaagcttgcacgagtaacccaggtccgcaaggaactgaaatcccatattcagagcttgccagac

SEQ ID NO: 459084 - DNA, 95 bp, Homo sapiens
agcgtcttggctgccgccctgctccacgcagtctgcttcagtgcagtgaaggtggataagattgtggaccagctgcagcagttaatgcaggtgta

SEQ ID NO: 459085 - DNA, 51 bp, Homo sapiens
cgtgcctttgggtgataagggatacaaactggactctcaggacaaaacgac

SEQ ID NO: 459086 - DNA, 100 bp, Homo sapiens
ggagtgttcaggatgggggaagtggaagtgaaattggcagtgctttcctcagtgctatttttcttgccttagcgacataccagtctctgtacccactcac

SEQ ID NO: 459087 - DNA, 50 bp, Homo sapiens
ttgaacagagtatctcatatcttgatcagctgcgttcctttgcctgcaac

SEQ ID NO: 459088 - DNA, 75 bp, Homo sapiens
gttttgaatgggcgcccgtaagagagggaaagcaggcaggatgggagagtcgccgatagaaccacctcttccctg

SEQ ID NO: 459089 - DNA, 50 bp, Homo sapiens
accattcgcctgatgaactctcaggtggtccagcatgacccatgtcgggg

SEQ ID NO: 459090 - DNA, 100 bp, Homo sapiens
tgttttcttatttagccggagtgagaagcaagaaggccctggacacagcaatatctctgggctttcacagcccgacggccatggaggctgaagagacgat

SEQ ID NO: 459091 - DNA, 82 bp, Homo sapiens
gccagtacagtggtgccttaaaaatggagtcagcctcactcctcccaaagatttcctcctctgatgctcctcttcagccttt

SEQ ID NO: 459092 - DNA, 83 bp, Homo sapiens
gagcgaggagaagcgagaaaagatgaaacggaccctacctgcctagagctggaacgttacctccagagcgagccctgctatgt

SEQ ID NO: 459093 - DNA, 100 bp, Homo sapiens
aagaagttcttctacaacaagaaaaccaaggactctacttttgacctccctgcagactccattgccccatttcagtctgccatcatggatgttctcgcag

SEQ ID NO: 459094 - DNA, 90 bp, Homo sapiens
tggacgtgctggtgtctgagtggatggggacctgcctgctggtgtccctggccagtgtccttccacctgtccacaagcatggggaacatc

SEQ ID NO: 459095 - DNA, 115 bp, Homo sapiens
gcggcgtctccagcctcggtaccatggccgggatcatcaagaaacaaatcttgaagcacctctccaggtttctgaaggattgtcattcttgcatagcagtgtgaaaatggtgcat

SEQ ID NO: 459096 - DNA, 90 bp, Homo sapiens
aaaaaccttggatgtctttaatataactatagctagacagacggcagaagttgagatgctgcagttggagaagaaacttgaacgtgaact

SEQ ID NO: 459097 - DNA, 100 bp, Homo sapiens
tgactcccttggatcacagtctttgcacactcggacttcaaaactgttccagggccagtatcggagtttggctgtggaaaatctctgttctcacaaagtc

SEQ ID NO: 459098 - DNA, 76 bp, Homo sapiens
ccacaactgcaaaacaacaccatcctccgccttctgcagcaggtgacctaccagttgaagattccgtgtactgctt

SEQ ID NO: 459099 - DNA, 83 bp, Homo sapiens
gggggaccacaagatcctcatcgacagggccactgtgcatgtgcgggtcaacgatgtgaacgagtttgccccagtgtttgtgg

SEQ ID NO: 459100 - DNA, 100 bp, Homo sapiens
ctcaaggctactcagccatcccttacagaactcaccacactcaagccaaaatcctgagcatgatggaagacaataagcagctcgcgctccgcatcgatgg

SEQ ID NO: 459101 - DNA, 100 bp, Homo sapiens
gttaccgaacatctcataaataaggacccagatgatgtggtaccagttggccaaagaagagcctggtgttggtgcatgtgctttggactagcatttatgc

SEQ ID NO: 459102 - DNA, 100 bp, Homo sapiens
gtgggccgctgcgccgcctcaccctacctgcggccgctcacgctgcattaccgccagactacgtctactttgagaactcctccagcaacccatacctgat

SEQ ID NO: 459103 - DNA, 100 bp, Homo sapiens
agctcttcagcatctacgggaggcaaacttgtaaaacctggaacagcagcatcattgtcaaaggctttacaggaagtatggtgctggcatctgcttggct

SEQ ID NO: 459104 - DNA, 75 bp, Homo sapiens
cagggtcaaaggagagcacaaccatcgcagttggaagcccatggggcagcctcccgcgacgatgcccctcaacgt

SEQ ID NO: 459105 - DNA, 98 bp, Homo sapiens
cacccgggagtcatcttcaaagccctgaaggcatcaactgtgaaatctgtgttagaattgattcctgaattaaatgaaaaggaagaagcatacaattc

SEQ ID NO: 459106 - DNA, 49 bp, Homo sapiens
gattttgataccaggatacttgagagcagcccgacggccatggaggctg

SEQ ID NO: 459107 - DNA, 83 bp, Homo sapiens
cactgatcaggacttgctgctgatgcaggaaggcatgccgatgcgcaagctctgactaccacccaaccttgaggcacagtgaa

SEQ ID NO: 459108 - DNA, 118 bp, Homo sapiens
aaagaagaagaacccgtgaagaaggttctggagaaaaagttccatactgtcagtggaagcaaggacctgggtgcagccgcaggctccaagcgccccacctgtgtgataatggtcaagc

SEQ ID NO: 459109 - DNA, 95 bp, Homo sapiens
ttaaaaagccaaagcaaatattcagaggctgcagctctcctaatacggttgaccagtgaggttcaagaacatgaagactcgggtgactcagaagt

SEQ ID NO: 459110 - DNA, 101 bp, Homo sapiens
cccaaccactgtctacgtggacatgagagccctgagacacgacagtttccctgaaacctgggctcttgaagacgcatcactggagcagatggataatggag

SEQ ID NO: 459111 - DNA, 100 bp, Homo sapiens
ggagggctcgcccgcggaggagccgcctgcgcatgctccatcgcctgggtatgctatacctccggagcatggaaaacgacttgaaagactagctcaaggt

SEQ ID NO: 459112 - DNA, 74 bp, Homo sapiens
cctcagcggcggcgccagctcctgtggtcagaagttgagtagcaggggcctaggagggctcgaagccttcacag

SEQ ID NO: 459113 - DNA, 98 bp, Homo sapiens
ggacggcgactccggggatggcgaagcgtatttataacagcaatgatgtagcagtatcgtttccaaatgtagtatctggctcgggatctagtactcct

SEQ ID NO: 459114 - DNA, 74 bp, Homo sapiens
cctcacggagctgggcgacgagctgaccctgggagacatcgacgagtcaatgcatgtgttgatgtggtgctctc

SEQ ID NO: 459115 - DNA, 100 bp, Homo sapiens
cgccgcggccgttagtcatgtcgggtaggtgacttcttcagcgagcagcggcagcgacgagaagtacaatgcttgcacactgcacggtggaaaaggccag

SEQ ID NO: 459116 - DNA, 75 bp, Homo sapiens
ttagataacagccatcctattgaaggagaggagcggaagaccttctggtgtgggctgggcagcaattcacttgaa

SEQ ID NO: 459117 - DNA, 75 bp, Homo sapiens
cttattaatctcagggaactggatgtcagcaagaatggtttgttacagaaggagaaagtggcagttgaagcattt

SEQ ID NO: 459118 - DNA, 74 bp, Homo sapiens
tgatgttttggggattccactctccagtgtaatgattattgacaacagagtatgtattcccgtgtgccagagtg

SEQ ID NO: 459119 - DNA, 115 bp, Homo sapiens
ggaaagcgggccgtgcaccggtggcgaggagctctacttgctctgcgacaaggtgcagaaagtgatcaacaaatacaagcgcagacgatttcagaaaaccaagaacctgctgaca

SEQ ID NO: 459120 - DNA, 97 bp, Homo sapiens
gaggtcgtggaggtggccgtggaggcagaggtggcatggggttttctgtctcaactggtctctgacaagcctctgactgaatgtatccgtgctggcc

SEQ ID NO: 459121 - DNA, 75 bp, Homo sapiens
gggtaacatggcggatgcggaaggaaaatcaggaaaatgtttccaacctggtgattgaggacacagagctgaaac

SEQ ID NO: 459122 - DNA, 74 bp, Homo sapiens
aggagcggaccgaccgctccaagcagaaaaatatggctcaggagactaaccagaccccggggcccatgctgtgt

SEQ ID NO: 459123 - DNA, 100 bp, Homo sapiens
tgcatatacactctacagtgctgttagaccttttggctgcaggcatctccttggaaacaatgccatctttgaatgtgagagataaacctagtttcagcat

SEQ ID NO: 459124 - DNA, 90 bp, Homo sapiens
ccaggagcccacacatgacatcctgcaggaggcccagaagattaacaatggctcaagccaggcggatggcactctcaaaccagtggatga

SEQ ID NO: 459125 - DNA, 83 bp, Homo sapiens
cagaaagagtcaacagcagtggcaacagcagaaaaatatggctcaggagactaaccagaccccggggcccatgctgtgtagca

SEQ ID NO: 459126 - DNA, 75 bp, Homo sapiens
gcatttcttccaggaggtcaccgttggagtcccacagatcaccattaacaaggacaccaaggtacccaatgcctg

SEQ ID NO: 459127 - DNA, 83 bp, Homo sapiens
atccaccgtgccaacctggacggctcgttccggtactctctgaagatggcagaagctcaccaagctgtggcctttcagttcac

SEQ ID NO: 459128 - DNA, 82 bp, Homo sapiens
tcggcagggaggatgacggagctgcagtcggcactgctactgcgaagacagctggcagtgcctccggagccagcgtggtggc

SEQ ID NO: 459129 - DNA, 100 bp, Homo sapiens
cccagccacccatcaaatcagagagaaggaatccaccttcttacgctatggcaggagctggctaaatatgaatacatggaagaacaagtaatcttaactg

SEQ ID NO: 459130 - DNA, 100 bp, Homo sapiens
acagacaacatcaaataccagcctaaaggggggcaggctgcaaggtgtgactgttgtaaatctcaaggaactcttaaagagcgagttcagtggcgtgggg

SEQ ID NO: 459131 - DNA, 99 bp, Homo sapiens
tcaaaataaaggaaacacatttcatatactgcagtattttcatctcagcctagtgacgatgaatcaagtagtgatgaaaccagtaatcagcccagtcct

SEQ ID NO: 459132 - DNA, 82 bp, Homo sapiens
gcccgcccgaccccgtcccgaccctggccgccccgagcggagcctggagaaggaagaggcccagcagaagggactcgctgag

SEQ ID NO: 459133 - DNA, 80 bp, Homo sapiens
agatagagcgtttggaagatctggatacctgtatggtgatggctgtggacacctagtgacttatcaggatagtggcacaa

SEQ ID NO: 459134 - DNA, 100 bp, Homo sapiens
agcgcgcgggcgcgcggctggagccggcgccgggcacggcatcgggggcctggactgcacggcccggcagcaggaacagatggagtcggataactgttca

SEQ ID NO: 459135 - DNA, 75 bp, Homo sapiens
tgccagcacctttcggcttctgagacggcggcagcagcggcattcagatttgaacatggaattcaatccttcaga

SEQ ID NO: 459136 - DNA, 82 bp, Homo sapiens
gcggcggggccgagcgcggccctgcaggcgatgtcgccgaaaccgggctgcaggcggaaatctttagagatggatcattttc

SEQ ID NO: 459137 - DNA, 100 bp, Homo sapiens
gttggaccttccggagcttctcagaagacagagggttttcttttgagaccatttaatttggcagagcggaaagctagcgcccattcaatagtagaatgtg

SEQ ID NO: 459138 - DNA, 98 bp, Homo sapiens
ccggcgccgcgcagaggcgggcgacgcggtagtggcgaagccgggagtgtgggcgcggctggtggaatgcagtagccctctgggcctgggatattgtg

SEQ ID NO: 459139 - DNA, 74 bp, Homo sapiens
gttgtgcctggaggtggaggggaagacatgttttagacaaatactcatgtgtatgggcaaaaaactcgaggact

SEQ ID NO: 459140 - DNA, 76 bp, Homo sapiens
tcaggaccactggagctatacagcttttctgcaaaagggaccctgaagtggctgatggaggagagctggtcctggg

SEQ ID NO: 459141 - DNA, 137 bp, Homo sapiens
caagtttccccacgcatcacttttaagccaatagctccgtcaggtcagaacgccacttgcacaagatacaggttaatagcaatgaacttacaaatggggtaataaatgctgccttcatgctcctgttcaaagatgcc

SEQ ID NO: 459142 - DNA, 98 bp, Homo sapiens
ctccggcctgccagcgcatgcatgcgctcagctgagtccaagccctattaagaaagctgttgtgaacttggataattctgtggttgacctggagaccc

SEQ ID NO: 459143 - DNA, 71 bp, Homo sapiens
ggatgatgccaaagttttattaggtgatgcagaagatggggaagaatatgatgacccttttgctgggcctc

SEQ ID NO: 459144 - DNA, 75 bp, Homo sapiens
cagaaacttacaggggataaagatatggaggtaccacatggttctcagagcagcgaaagttttcagtttcaacca

SEQ ID NO: 459145 - DNA, 75 bp, Homo sapiens
gtcatttctgttccgcacaggcctgctgaactgggtgctttatataggggaatggatttgtaaactcaagagctt

SEQ ID NO: 459146 - DNA, 74 bp, Homo sapiens
tggtgaaagattgccactggcagtaaaggctttgagagcactgtgggccagggttcagacacatacatctacat

SEQ ID NO: 459147 - DNA, 108 bp, Homo sapiens
tccaaaatggcgcgggtgctgaaggctgcagccgcgaatgccgtaggttcgatacaagaggctgttttcctagcgtggcttgctgcctttggtaagaacatgtcgtcc

SEQ ID NO: 459148 - DNA, 74 bp, Homo sapiens
gtgaaaggactgaccatgctggatcacgaacagcccgagggcaacatccttcgagaccggttcaagagcttcca

SEQ ID NO: 459149 - DNA, 81 bp, Homo sapiens
caggcttggagatctggggaggggagcagtatgaaatctccttcaaggtaaggcacctatatatctgtgattttcacaaaa

SEQ ID NO: 459150 - DNA, 98 bp, Homo sapiens
atctcttcgttcttcctggaacacttactatactaacacagagttaatatgatcctctgttgaagcaagaagacaaactgtatggtggagaaagaagt

SEQ ID NO: 459151 - DNA, 75 bp, Homo sapiens
aagagcaacctcacacggtgtgggctgaatgaagagctgccagatcccacaggttgagctttttcataaagatat

SEQ ID NO: 459152 - DNA, 80 bp, Homo sapiens
aggctgccctggatgggactcctgggaaatcctcattgacgattcaatttgttgaaggccaatttgtggactcctacgat

SEQ ID NO: 459153 - DNA, 96 bp, Homo sapiens
cctgttgctgctcctgctgccgccgctgctgctgggggccttcccgccggccgccgccgcccgagggcagctggtggaatttttgaagaaaatgga

SEQ ID NO: 459154 - DNA, 100 bp, Homo sapiens
ttatccatcccatctcttggacagatgatgccagttaattactttgaatgtccttgaatgggcaagagggcacatgaagtacggcgtcctccacattcac

SEQ ID NO: 459155 - DNA, 75 bp, Homo sapiens
tttgaaaaatgaagatgatgtagacactggactattagggaaatctaagttaatttcaaggcattcgaaatgggg

SEQ ID NO: 459156 - DNA, 74 bp, Homo sapiens
agaaatgaagaggccactaagcatttagaagaaagagccagacttctcagaggtcagtctgttcaacaagtggg

SEQ ID NO: 459157 - DNA, 100 bp, Homo sapiens
ttaaagaccagggagcccaaatggagccgctgctgcctacgctgttgaaaatggacagatagatgtgttaaggctgttgcttcaacacggagcaaatgtt

SEQ ID NO: 459158 - DNA, 140 bp, Homo sapiens
gagaaattcgataagtcgaaactgaagaagacagagacgcaagagaaaaatccactgccttccaaagaaaatattgatgatgttaagaagttcaaaccgggttacctggaagctactcttaattggtttagattatataa

SEQ ID NO: 459159 - DNA, 83 bp, Homo sapiens
agccccaagacccagcaggcgtctgaggtggagacctttggcgacttggcctttggcgacatcttcctccacctgctcacggg

SEQ ID NO: 459160 - DNA, 101 bp, Homo sapiens
ctatcccaggaatacagctttgcattaggaatagccaggccagaagaaggaaggcctgtggtgagtgggacaggaaatgacatcaccaccccaccgaacaa

SEQ ID NO: 459161 - DNA, 100 bp, Homo sapiens
gcgaagcaagcacatgtggatgtgaaatttcagttgccaatatgatctgaaaacccagtggatggctgaagggaacttatagaaatgctggcaatttcaa

SEQ ID NO: 459162 - DNA, 83 bp, Homo sapiens
ctggccgactctgtaggccaccacctcaaccagccgctgtccccgccctactccggaccgccccaaagactccatgggatgga

SEQ ID NO: 459163 - DNA, 101 bp, Homo sapiens
cttcaggcttgggtgactacctagaactgcatatacttgtagaccctggagttaaggcatggacacccactaaaggaaaacaaaatgtgattatgtttgtt

SEQ ID NO: 459164 - DNA, 100 bp, Homo sapiens
ttgaagcaaaagtttgatgagattttttcagcaacaagggtccaatgtgtgacttgctgtggtcagatccagatgaccgtggtggttggggtatatctcc

SEQ ID NO: 459165 - DNA, 75 bp, Homo sapiens
aaggaggaggagatgagttggaaggattggcatctcctgtctttttcctgcttcttggcattttagcatatctcc

SEQ ID NO: 459166 - DNA, 90 bp, Homo sapiens
agagaatatgatacagatgtattcaaatggatcttcaaagtattctaccttgtaaatactgttatttgtatatactgtaaatgatgacat

SEQ ID NO: 459167 - DNA, 100 bp, Homo sapiens
ctccaccaagcatcccattacagatagaagagcatacttccacaggctgcactcgaggagatccacaaattctcaggaacctacacctgcatgaacactt

SEQ ID NO: 459168 - DNA, 82 bp, Homo sapiens
gccctctttgcaacatttcaggaaaacagagaaagaagtgataggagggctctgtagccaaaacagagtggagtacgagaaa

SEQ ID NO: 459169 - DNA, 100 bp, Homo sapiens
gtaagaagaggtcccaatcccccactctttccgccctaatggaggtctccagtttcgttctctgtggacattgactcggagctggtggaggagctgccgg

SEQ ID NO: 459170 - DNA, 100 bp, Homo sapiens
ctttaacagaactcaacaaatgctgtggcctttgtgtctgcccatgtaataggctcgattatttgatgaacctcagcttgctagtctttgtctagataca

SEQ ID NO: 459171 - DNA, 85 bp, Homo sapiens
cctggaattacttcaatcaagagtatgctgctgctgttccgctttgcgtcctcgctacaaacgcctggtggacaacatattccct

SEQ ID NO: 459172 - DNA, 90 bp, Homo sapiens
tatcagtgctgcgagaaaggaaagaaacaagtttgctctcagcggagtcgacttcaatgttcctatgaagaacaaccagataacaaacaa

SEQ ID NO: 459173 - DNA, 100 bp, Homo sapiens
accatgggctgtttgaggggccaacatcattaactgcatctacttgtttccaaagttatttgggtcagcattttcctccacccaccacttaaaactgatt

SEQ ID NO: 459174 - DNA, 76 bp, Homo sapiens
gaacttccccttacctcctctctctggctcgggagctgggcttccagctggtctttttaccctttgctgatgataa

SEQ ID NO: 459175 - DNA, 96 bp, Homo sapiens
ggaacacctcgccaaagcagagaaatagtggacgacatccttggagaaggcagcgacgacagcgacagcgagaagaggaggcctgaggagcaggag

SEQ ID NO: 459176 - DNA, 117 bp, Homo sapiens
gttccttgtggagccggagctgggcgcggattcgccgaggcaccgaggcactcagaggagggggatatgagactttctactcggaatatcctgagtgttgcgtggatgtaaaaccca

SEQ ID NO: 459177 - DNA, 50 bp, Homo sapiens
gtgccgcggaactacttcggggtgtgaagcttacactctctgctctggta

SEQ ID NO: 459178 - DNA, 75 bp, Homo sapiens
gggccaggggagagagaagaggatcagcagtgcagccccaggatgcctcgcagatgttctcaaatagtgatgaag

SEQ ID NO: 459179 - DNA, 99 bp, Homo sapiens
attccgacatcgaaggtggaactgcagcactgtggataacacctctgtttttggcagggtgatgcagataggatcataaaaggattcctctgtactagc

SEQ ID NO: 459180 - DNA, 100 bp, Homo sapiens
cgggaaagtgtatctggggcagaaaggcggcaaattgtatgcagtaaagtgggagctggtgaggtggccaacttcgctgcgtatgcgtttgcaccagcca

SEQ ID NO: 459181 - DNA, 80 bp, Homo sapiens
accctgttgtggctctataagcaggtgacctaaagaattaatgaccattcagaaataaagcaaaaagcaggccacaacct

SEQ ID NO: 459182 - DNA, 75 bp, Homo sapiens
aaattatcgaagctgatgaagtacttctttttgagagagctacttttctggaattacatgaacgacagccttcgc

SEQ ID NO: 459183 - DNA, 74 bp, Homo sapiens
gagaaacaccagacactggaagtctcactgtctcgatatgacgccgtgcccatccagtccagcgtggtgttatg

SEQ ID NO: 459184 - DNA, 100 bp, Homo sapiens
catccagccttagcaaaccagagcagccagactgccttccgggtcactgccatggaggagccgcagtcagatcctagcgtcgagccccctctgagtcagg

SEQ ID NO: 459185 - DNA, 75 bp, Homo sapiens
cgctggcagccgcggatctcaccgccgctcagggtgtgaatgacagaggtggtgccatccagcgcgctcagcgag

SEQ ID NO: 459186 - DNA, 83 bp, Homo sapiens
tgaagagttgtcccagctcggcccgcgggggagccccgggagccgcacgatgcctttgacaatgaactcattctcaaaacact

SEQ ID NO: 459187 - DNA, 74 bp, Homo sapiens
ggaattcaagaatgatgaaactgtatcacagattctgctggccatattctctactccaaagaggatgcaaccaa

SEQ ID NO: 459188 - DNA, 90 bp, Homo sapiens
cagcttttggactccctattgtatttgccagagcacatctggatgttttagaagaatgtatgtctcttcccaagctatcttcttattctg

SEQ ID NO: 459189 - DNA, 83 bp, Homo sapiens
ccgcactgtcgctgcccgcctgccctgaggagtccccgctgcttggctttgcttcacctctgggtcatgattgttctgttgac

SEQ ID NO: 459190 - DNA, 100 bp, Homo sapiens
tggggaactgaaagatcagatagcagagctgaatcatgagctatttgtcgtagatgtccagacaagccagatcaccaagatccccattctgaaagaccgg

SEQ ID NO: 459191 - DNA, 99 bp, Homo sapiens
caacccactgctagcaccccagagagtgaggagtggagcagcagccagcctgggaagtcttctgaccaactggccctccgtccctcctaccataaagga

SEQ ID NO: 459192 - DNA, 76 bp, Homo sapiens
acccattcagataacccactaagatcccagatgcagtgactggttactacctgaaccgtgctggctttgaggcctc

SEQ ID NO: 459193 - DNA, 100 bp, Homo sapiens
tcacagggaagtcgcctggaaaaaccaatagtcagcgtcaccctttacaccagaaagctggcgggcactatggggaaaaaacaaaacaagaagaaagtgg

SEQ ID NO: 459194 - DNA, 82 bp, Homo sapiens
ggctgagactcggggcgccagtccgggcaggggcagcgggagccggccggccgcggcgagtcctttgcacatgttggcaaca

SEQ ID NO: 459195 - DNA, 98 bp, Homo sapiens
ttccaggatgtcctgaaggagccctcaattgcattggaaaagctgcgggaactcagctttagtgggattccagcagaagttcaccttccacagcaagg

SEQ ID NO: 459196 - DNA, 89 bp, Homo sapiens
gctcaggagtcagtattttagcagtccattccaaagacaactataaacgagtgactgggacaagggaatgtgtggcagtagaagcgctg

SEQ ID NO: 459197 - DNA, 102 bp, Homo sapiens
aagaggaggacatggagatgaagaagaagattaacctggagttaaggaacagatccccggaggaggccgccatggcatcagatgaaggcaaactttttgttg

SEQ ID NO: 459198 - DNA, 75 bp, Homo sapiens
ttcagtcactggtttgcagagtccagctgtctgcgagcctggctgtggtgcacatggaacctgccatgaacccaa

SEQ ID NO: 459199 - DNA, 100 bp, Homo sapiens
ttgtgcttccctggtggtgctcagcttccctgagctcgaggccctgggaggagcggggacactgaggacctctctccaaattggcctctcaactcacagg

SEQ ID NO: 459200 - DNA, 83 bp, Homo sapiens
cggcagaagggctacgaagaagtgcttcagcgggccaggaagcgcatccaggagtggttggatttcatcccttactggtctca

SEQ ID NO: 459201 - DNA, 82 bp, Homo sapiens
ttgttccccaaacaagtgctcctacattctggtgatctgcaactctttcaccatctgtaatgcggagatgcaggaagttggt

SEQ ID NO: 459202 - DNA, 99 bp, Homo sapiens
cttaaagctgccagcaaggatgactcaatcatcactgttttaacaggtggtccagctgctcacctgtgacctgctactgtcgctacggacagcgctctg

SEQ ID NO: 459203 - DNA, 88 bp, Homo sapiens
ttcactcacgccatgcagctgctgacggcagttgtcgagatgtccacagaaggaggatttggtggtactagcagcagtgatgcccagc

SEQ ID NO: 459204 - DNA, 76 bp, Homo sapiens
gtcaccaccatcatcctccaggcatttggcaaataccacgacggggacttcaagtttgggaagtattcgcacgacg

SEQ ID NO: 459205 - DNA, 100 bp, Homo sapiens
gcgggcggcggcgccggcaggaaggctgaagccgacgtagcttctctgaacagacgcatccagctggttgaggaagagttggatcgtgcccaggagcgtc

SEQ ID NO: 459206 - DNA, 85 bp, Homo sapiens
gtatctgcccctgtcaaatcattccagtctctgttggatgaacccaatcccaatagtccagcaaacagccaggctgctcagctgt

SEQ ID NO: 459207 - DNA, 100 bp, Homo sapiens
aaacgggactggctagttaaacaaagaggctggcaggagcgtctgcagcaggagcgtcctcagctggaccggctgaaaacccagctctcagatgccattc

SEQ ID NO: 459208 - DNA, 100 bp, Homo sapiens
gaagacgttatttaccatatccagtatgatgaatattgtactccaagatacttggattacgaagatttggagcgcaagtactggaagaacttaacttttg

SEQ ID NO: 459209 - DNA, 50 bp, Homo sapiens
attccaagtaactcttatttggtatatttgaaggctcccatgattctgaa

SEQ ID NO: 459210 - DNA, 75 bp, Homo sapiens
gaaggcacggagtcgccgcggagcgcagccgtccagaatgagcgggaccggatcagcactcgaaggtcaagctat

SEQ ID NO: 459211 - DNA, 100 bp, Homo sapiens
gcggtccctgcatgatgccatcatgatcgtcaggagggccatcaagtgttgtacatcagtacacagaagagacggatgtgaagacaccaagagagcaacg

SEQ ID NO: 459212 - DNA, 100 bp, Homo sapiens
gcaaagggaaggtggtggacctgctggcgcaggacgccgacatcgtgtgccgctgccagataattgtatggaagagatacagtgattttaagaaactaca

SEQ ID NO: 459213 - DNA, 100 bp, Homo sapiens
tgttaagaaatttctcatgtatgggaagaggatgaaatggattctggcacgatggttcgagcagtgggtgatgagatgggcactgtccgagtagccagca

SEQ ID NO: 459214 - DNA, 101 bp, Homo sapiens
aaggaacttacgcacttaaaataattgggcagaagagaagcagtgaaggagtgcagaggcatcacctgaaagtacgtagagaaatcgacactcttaatgaa

SEQ ID NO: 459215 - DNA, 101 bp, Homo sapiens
gccggttttgaccgccacattaccattttttcacccgagggtcggctctaccaagtagaaagatcattgctcctcttgtaactcgtcatggaaagctgtgg

SEQ ID NO: 459216 - DNA, 75 bp, Homo sapiens
ctcgccatggccgacgaaaagcccaagttgagccccatatgggggttggcaggcagcagagaggcccctttcaag

SEQ ID NO: 459217 - DNA, 90 bp, Homo sapiens
ggaagccgggcgcgtgctgccgctcgtggcgggccgaggtattctgagagaagcctcacaaagtgtattggaattactattgaaaccaga

SEQ ID NO: 459218 - DNA, 108 bp, Homo sapiens
tgggcgtctgttccggcgccggacccctatttgcaaaggtggacccaagtggagagattgtggaactggcgaaaggtgcatgtccctggaaggagcatctctaccacc

SEQ ID NO: 459219 - DNA, 100 bp, Homo sapiens
ggcacaagggacatgaaccagaatctgtggatgttcttgctttcgtggtccactggccactatgaacagcctcgcctgcaggggcctggacaagctggaa

SEQ ID NO: 459220 - DNA, 96 bp, Homo sapiens
atctctcaaggcaaatggcgtgcaggcacagatggctaaggtatcattaatgggattggaaattttaagtgcctttgtggacagattatcaacacg

SEQ ID NO: 459221 - DNA, 134 bp, Homo sapiens
gacaggaccaaagccgtcctgtgtatggtggtggcaggggccatcgctgccgtctttcacacactgataggtgtcatggagaaactccagctgggcccagagattctgcagcgggaaaatccaaggcttattta

SEQ ID NO: 459222 - DNA, 90 bp, Homo sapiens
cgcgcggttcccctcccggtgtctgctccatctggacacaagcatctgacggtagaagagttatttggaacctctttgccaaaggaacaa

SEQ ID NO: 459223 - DNA, 82 bp, Homo sapiens
ccctggagcctcagttggaagcagccgatccagcctgcggagcctgtggggcagcctggagatgcccaaagatgagctgccc

SEQ ID NO: 459224 - DNA, 100 bp, Homo sapiens
ctgatggagctggtgtggggcaccaagagcagccccggtctctcggacaccattttctgccgctggacgcaaggttatccaaatgtgaaacatttttctt

SEQ ID NO: 459225 - DNA, 98 bp, Homo sapiens
gaggttcaggctacggtgagccgaagatgggtgttcctgataaagaagggttaccaagacgtcgacacctccctgcagagtgctgtcatcaccaaagt

SEQ ID NO: 459226 - DNA, 144 bp, Homo sapiens
atgtaccctggcattgccgacaggatgcagaaggagatcactgccctggcacccagcacaatgaagatcaagcccgagatgatcggccactacctgggcgagttctccatcacctacaagcccgtaaagcatggccggcccggc

SEQ ID NO: 459227 - DNA, 119 bp, Homo sapiens
ggaaggcgatggcggatttagataaactcaacatcgacagcattatccaacggctgctggaaggtcacagtcaaagtgcctcagaagaactcataagaatcatgcaagcttcctccctc

SEQ ID NO: 459228 - DNA, 74 bp, Homo sapiens
ggcaagacaagctcagaactgagaagctgtcaccacaggaaaatgttggggcttttcaggaagcataataagat

SEQ ID NO: 459229 - DNA, 74 bp, Homo sapiens
cagcgcggcagagtcatggggggtttggttttcagataggagttaggtatgagaacaagaagagagaaaacttg

SEQ ID NO: 459230 - DNA, 113 bp, Homo sapiens
cttttcagggcccccaaactgtcacagaaagagctgttaacacttcctagataacggacaatgcagatcttcgtgaagactctgactggtaagaccatcaccctcgaggttga

SEQ ID NO: 459231 - DNA, 82 bp, Homo sapiens
ccacatggaaatgaattctaaggtgcagcctgatcttcctcttctcccttgccagccagcactctgccttctgtatccacca

SEQ ID NO: 459232 - DNA, 100 bp, Homo sapiens
acattgaattcagggacctttcctattcggttcctgaaggaccctggtggaggaagaaaggtcccttcaccgatgttgtcaccaccaacctaaagcttgg

SEQ ID NO: 459233 - DNA, 100 bp, Homo sapiens
ccacagatggcactgccaacagaacctgcacttgttgccaagtcttccatcttactagatgtgaaaccttgggatgatgagacagatatggcgaaattag

SEQ ID NO: 459234 - DNA, 83 bp, Homo sapiens
ctggaatttagcgctcgcccagctagccgcaggtgtggatgaggtcaccattgtcaacattttgaccaaccgcagcaatgcac

SEQ ID NO: 459235 - DNA, 100 bp, Homo sapiens
ctgctgccctcaaggtcgtgcgtctgaagcctacaagaaaggtttttcatttctaacaaccagatggccccacctggacctgccaaccagttctgtggcc

SEQ ID NO: 459236 - DNA, 80 bp, Homo sapiens
agctgccgccgcctgcagtcggtgaccgcgcgactcggcgcccgcccgcggagcctcacagtctactcagagaaaaataa

SEQ ID NO: 459237 - DNA, 116 bp, Homo sapiens
ggtgccgccatttcatctgtcctcattctctgcgcctttcgcagagcttccagcagcggtgccagctgctgcccgtgctggtgccattgccccatgtgaagtcactgtgccagccc

SEQ ID NO: 459238 - DNA, 100 bp, Homo sapiens
attccatcgatttatgcagtcagccaaatatttcaattatactgtgaagcagtagacattgaaaccagagattgtcttcagaatacatataatctgaata

SEQ ID NO: 459239 - DNA, 98 bp, Homo sapiens
ccattgtcaagatccctccacatgtactgagtactatactggcaattgctggagaagattttgcaattgttgcttctgatactcgattgagtgaaggg

SEQ ID NO: 459240 - DNA, 75 bp, Homo sapiens
tccggacacttgttttccagtgtgatcttacccttaaagctttctgtggctcctgatggatctgagaagatggac

SEQ ID NO: 459241 - DNA, 83 bp, Homo sapiens
ctttctatctcgagatcttcgatgaggtcccgcagcccccggaagccaatagactccctcagggactctcggtccctcagcta

SEQ ID NO: 459242 - DNA, 75 bp, Homo sapiens
ggtggaaacactgcctgggaggaagagaatttgtccaaatacaaagacaggcagcctgcttctgcaaagtggtac

SEQ ID NO: 459243 - DNA, 75 bp, Homo sapiens
ctgccaatgatgataacgttactcaggtgcgggaatggaaggagcagggtagcaagaccttcatgtgcacggggc

SEQ ID NO: 459244 - DNA, 100 bp, Homo sapiens
tgtacaagtcattacacaccacatgcagcgatatgcagtttggtttggaggatcaatgctggcttccacgattttgaaatcagaatggacactaacagga

SEQ ID NO: 459245 - DNA, 100 bp, Homo sapiens
cggaaaatagctgaactggaaaagaacattgttggtgaaaagaccaagaggctgcctaccacaaggactttagcttactttttaaagattgaagaaaaaa

SEQ ID NO: 459246 - DNA, 75 bp, Homo sapiens
gtttaagcaggagcatcgcattggaggctacaaggttctcagaggcactgtgactgacttccctggatttgatga

SEQ ID NO: 459247 - DNA, 75 bp, Homo sapiens
ctagcccagaggatcggaatgacagatacaagcagaatgatgtggagatcccatctcctacccagaaagacaggg

SEQ ID NO: 459248 - DNA, 51 bp, Homo sapiens
tggcccaggcgcacacggaagtggaaggagtcaagactgagaacaacgatc

SEQ ID NO: 459249 - DNA, 98 bp, Homo sapiens
ctggttggaaaacccaagatatttatcattcaggggtttgccaacttgttaataagatggaggagaatactggcaaggttaagcctttcaaccgaaat

SEQ ID NO: 459250 - DNA, 100 bp, Homo sapiens
ttactttgccacttcttcacggaccagtttcagttcgccgatgggaaacccggagaccaaatccttggttgtatttaaaaggtcacactgggacagcagg

SEQ ID NO: 459251 - DNA, 74 bp, Homo sapiens
tcgcgtctcggaaaccggtagcgcttgcagcatggtagcccagccatgacccataggaatctgacttcctccag

SEQ ID NO: 459252 - DNA, 74 bp, Homo sapiens
gaggctcatggcccaggagccccggaggcccgggctcgagtcccccagccagctccaggcccctctgcggcggt

SEQ ID NO: 459253 - DNA, 83 bp, Homo sapiens
atgcagctgatgcagtccgagagctagatggaagccatcactggtgcaagctatatttaacggagatcctgatgaagttcgag

SEQ ID NO: 459254 - DNA, 100 bp, Homo sapiens
agcagaggacttctatgactgcagggtggagcactggggcttggaccagccgctcctcaagcactggggtgtcacctggggcccagtgacagaagcagcc

SEQ ID NO: 459255 - DNA, 100 bp, Homo sapiens
aagagcttcatctgcgatggacagaataactgtcaagacaacagtgatgaggaaagctgtgaaagttctcaaggatgtggagagcatcttgtgcgcacca

SEQ ID NO: 459256 - DNA, 97 bp, Homo sapiens
tggtggtgaaccctgggcgaaacctcagcaccggggaggtgttgacccaaaattcagggttactccattgccgctaaaatcactggtccaacaacag

SEQ ID NO: 459257 - DNA, 117 bp, Homo sapiens
cagagccgccatcttgtgggagcaaaaccaacgcctggctcggagcagcagcctctgagcaaaatgatgcttcaacacccaggccaggtctctgcctcggaagtgagtgcttctgcc

SEQ ID NO: 459258 - DNA, 100 bp, Homo sapiens
cgcgtaggagcgtgcgttcgggccctcttctcccacctgttcgccctggaagaaagcgggacttttcccctgttccttggagtcagtattttgagtccat

SEQ ID NO: 459259 - DNA, 80 bp, Homo sapiens
ttctgctgctgaagtaatgcaatggtctcaatctctggaaaaacttcttgccaaccaaattacctggctacagaaagaag

SEQ ID NO: 459260 - DNA, 95 bp, Homo sapiens
ggtgcgggatccttgtctttgtcctgtactttgtgcagtcaggagctcttcttgcctgtggcatagtgaactctggggtccggaatgagtgtgac

SEQ ID NO: 459261 - DNA, 97 bp, Homo sapiens
cgagcgggcgctgctggatgccgagcgcctcaagcgcgaggtagagttggctttgtgggacacagctgggcaggaagattatgatcgcctgaggccc

SEQ ID NO: 459262 - DNA, 90 bp, Homo sapiens
gattaactcattcaaggttacccagttggttaatgacccagagactgcagtaaaggaattagaagctctcttgggttttacattgagagt

SEQ ID NO: 459263 - DNA, 74 bp, Homo sapiens
ggcaagaggcagcctgggggccacagctgcttcaaggctgccattcgctgcaaggttgaacacccccatgggcc

SEQ ID NO: 459264 - DNA, 75 bp, Homo sapiens
ttcacacaaagaaaattgctcactttgatctcaagattcaacctagaatgacactgagcaaattgcctcttcaag

SEQ ID NO: 459265 - DNA, 75 bp, Homo sapiens
ccgagccgggatctcaggtcctcgggggcggcggccacgccaaggacggatcaatgaactgagccatgttcaaat

SEQ ID NO: 459266 - DNA, 50 bp, Homo sapiens
caaaaacagaccagaagattaccaagaagagtcaagtaccattggccagg

SEQ ID NO: 459267 - DNA, 97 bp, Homo sapiens
tcccactggtttggacatattcctctcctgatctggcctcatctgttccagggaggtgggattgagtctctagaagaaactgtcagtgccagtgaag

SEQ ID NO: 459268 - DNA, 100 bp, Homo sapiens
accgtacccgctggagtggcatcactcggcagcacatgcgcaaggctgtccccttccaggtggcccagaaagagccgattacacctcaacaagaaggcaa

SEQ ID NO: 459269 - DNA, 50 bp, Homo sapiens
acagaagttagtggttcctggttctgaaaatccagaatggcttgatgttt

SEQ ID NO: 459270 - DNA, 73 bp, Homo sapiens
gctcaagaaggtgaagatgatacctttctaacagcccaaatccccgtcgaggtcaagatcaagatccaggtct

SEQ ID NO: 459271 - DNA, 100 bp, Homo sapiens
gaagtatctccgtcaagaagaagaaaaatgtcccccttgacatctggagagaaagtgggcaaactcagcctggtggatttagctggcagtgaacgagcaa

SEQ ID NO: 459272 - DNA, 100 bp, Homo sapiens
catcatttacggcatgtacttctgcatgaacatctccagccaggagcaaacgccctggaggagcagctgaaggagcaggagctgagagcctgcgagatgg

SEQ ID NO: 459273 - DNA, 75 bp, Homo sapiens
gctgcctgtagagctggcgagggacatgcagacagacacgcagggaccatgcagtgctggaggccgagaggcaga

SEQ ID NO: 459274 - DNA, 100 bp, Homo sapiens
aagacaagtcctggcgcgtccgctacatggtggctgacaagttcacagagcaccctggaggagaagaggttctgctggaacaagctggtgtagatgcaag

SEQ ID NO: 459275 - DNA, 100 bp, Homo sapiens
gcctagcgtcctggaattacttcaatcaacgagttggaagactttgttgaagacttgaagaaggactccacggcagccagccgattggttactctgaaag

SEQ ID NO: 459276 - DNA, 100 bp, Homo sapiens
cagcggaaaatgatccagtcacagtgtgaagcctcagtttaggtcatctggtggttcagaacactcaacagagggctctgtatccttgggggatggacag

SEQ ID NO: 459277 - DNA, 100 bp, Homo sapiens
aagctctccaagacctccggccagcccagtgatgcgggcagcaggcccctcctgcgcacaggtgctgtccttattcccagcccagtcaagagctaccggg

SEQ ID NO: 459278 - DNA, 101 bp, Homo sapiens
tccagcagcagaccttcaagatagacattgaccccgaggagacggatcaaaatacttgctggatggtggactcagagaccaataaaaataaactgcttgaa

SEQ ID NO: 459279 - DNA, 51 bp, Homo sapiens
ctgcggggaggcagcggaaggcggcagattctgcttctcagaagatgcact

SEQ ID NO: 459280 - DNA, 75 bp, Homo sapiens
cgttacaatggtggagttggcaggtgtgcgcaggaccgccgggagagcctgcccacctccccaccctggacgccg

SEQ ID NO: 459281 - DNA, 75 bp, Homo sapiens
cgacttcttgtatgcatactccacagcacctggttctcagatactttacgaattcttacatgtgagccatctcag

SEQ ID NO: 459282 - DNA, 83 bp, Homo sapiens
gttcgcgtctctctgctgcggcgcggggaccgctgtgctctcgaccagagtctcactgtcgcccaggctgcagtgcagtggtg

SEQ ID NO: 459283 - DNA, 83 bp, Homo sapiens
gtacctgcagaaggtctctggagacatcttcagcaggagcaggccgggctctcgccatgggtcactgtcgcctctgccacggg

SEQ ID NO: 459284 - DNA, 75 bp, Homo sapiens
actcttttctctcgggcttcatctcttgtgtggggagtttcatcctagcgggatgaaattgattctgcagtaaag

SEQ ID NO: 459285 - DNA, 97 bp, Homo sapiens
atccctgcgcgggctcgagagctcgccccgaacgggggtcttcctcctccgccgttgacagggcgaactttctgaccaagtatacaactacccagag

SEQ ID NO: 459286 - DNA, 76 bp, Homo sapiens
aggattttgatgcccgaaaggcctacctggctggctccatcaaagggactatgcagccatcgtcttctttgctaac

SEQ ID NO: 459287 - DNA, 122 bp, Homo sapiens
ggagcagtaggcacccgagcagcgccagcggccgagcgggcggcttcctggcctgggcgctccggtggcggcggagacaccattcgcttttcacccaagatgatttgatgtcttataaaact

SEQ ID NO: 459288 - DNA, 90 bp, Homo sapiens
ttcttctctacagaagagcttctcctcatcaactggggatgattacagttcttcctaaaaaaggaatatgatgaagaatgggctaagaaa

SEQ ID NO: 459289 - DNA, 98 bp, Homo sapiens
gaggagtgtcacttccgtcaggagaggttttttattggcacctcagtctcaacattttcttttcggattcatgaggaaagagaaatcctggggttgga

SEQ ID NO: 459290 - DNA, 83 bp, Homo sapiens
tgcagaagcctgtagaaaacaggaagaatttgatgttgccaacaacggctcttctcaagttttgaacgaagaatgtgatcaga

SEQ ID NO: 459291 - DNA, 80 bp, Homo sapiens
cacagttccatggatcagaaggcagacaagcagcttttcagatgcaaatgaggactcaggagagtgcagcttgctctgtg

SEQ ID NO: 459292 - DNA, 50 bp, Homo sapiens
ctgcaacctcaccagacatctgatgacatctgaactggagagcagcctaa

SEQ ID NO: 459293 - DNA, 100 bp, Homo sapiens
ttgtcccgctgcagccgagatgccgggggagcggggccttccacaccccctccgtgggtgtgtggttgcatcataaatacaaaggactgaagttataaaa

SEQ ID NO: 459294 - DNA, 78 bp, Homo sapiens
tggctctgaaggcgaacgcttcgctggccatttaggagctctgctcaaagccagacgagacagagtctcactgcgttg

SEQ ID NO: 459295 - DNA, 97 bp, Homo sapiens
gtgcagcttcttcagttccaggaagatgcctttgggaagcatgtcaccaacccggccttcaccaaactccctacgaagttatacggaagcgtctcct

SEQ ID NO: 459296 - DNA, 100 bp, Homo sapiens
cgactgctgcctggtctgcaaagaagtcctttcaagtctctaggactggactcttcctaagcaagtccgctttcctgctctgggaccctaccaaggtgcc

SEQ ID NO: 459297 - DNA, 51 bp, Homo sapiens
ccttcgagcagctgcagaggtcccggacactggggttgggaaatcaagcat

SEQ ID NO: 459298 - DNA, 100 bp, Homo sapiens
ctgagctgaaggtgcgcagggacccccaggtgagccccatgcactgcctggacgaggaaggcgatgactcagatggggacctggcgcaggtggtggacga

SEQ ID NO: 459299 - DNA, 98 bp, Homo sapiens
cccagtcggacggttccgaggcgttgccgggagccgggcgcggctctgtgtggactcggagaaacgcgggttcagggtcggagggagaagatggcttt

SEQ ID NO: 459300 - DNA, 100 bp, Homo sapiens
tttgaatccctattgtgtattgtgggatgactccaaaacgagcggcctattgccaattcatggacatgctcttccctggctgcattagtttgaagaaagt

SEQ ID NO: 459301 - DNA, 100 bp, Homo sapiens
cagcattgcatcactatacgctggagtctgtcttttcgtctgcagatgactatagagaacatgaaccatttgaaattcattccccacaaagactacacag

SEQ ID NO: 459302 - DNA, 75 bp, Homo sapiens
gccagagtggagcgtaacgcagtggtgaaagaccttttatgtgtgaaacatgtggcaagagttttgcttctaagg

SEQ ID NO: 459303 - DNA, 100 bp, Homo sapiens
cttggagcacttcctattccactggattgggaaagaccatggcaggctcctacccagagattctacccagtgaaactcccacagcaacgcaggtagatgg

SEQ ID NO: 459304 - DNA, 95 bp, Homo sapiens
gtataatgatccaaatagtaacccaaagatcgtgcagctcttggcaggagtagctgatcaaaccaaggatggcatccgcacttccactaatagcc

SEQ ID NO: 459305 - DNA, 100 bp, Homo sapiens
gaaggagggcagaaatgaatgaacttatggagcagacctcggagatcatcacgtttgccgagtcaggagaactccatctagaacaaaatgtgcattcagc

SEQ ID NO: 459306 - DNA, 100 bp, Homo sapiens
tgaagctgttcagaagttcttccttgaagaaatacagcttggtgaagagttactagctcaaggatgctgatatgctaactggtgatgagcaagtatggaa

SEQ ID NO: 459307 - DNA, 90 bp, Homo sapiens
ccctggtggacgtgcacccagaggaccaggcggcgtaagagttccctatttcattgatttgaaaaaaccacaggatcaaggtttgaatca

SEQ ID NO: 459308 - DNA, 100 bp, Homo sapiens
caagtttgaagagaagtttttccaaacctgtgaaaaagaacttgccaaaatcaacacattttattcaggaagaattcctttggctaccggaagaaaaggg

SEQ ID NO: 459309 - DNA, 100 bp, Homo sapiens
gaaaagcacatggcggccgccagcgccgagtgccagaactacgccaaggaggtggcaggggtccgtttattaatggttagtcgaatggctaaaccagagg

SEQ ID NO: 459310 - DNA, 115 bp, Homo sapiens
ctctttaaaagtgatccaggaagatggattatctgtggaacaaaagagattttgaaacattgtagtcggtatatacatgacttatttccttcactcatcaagaatttggatcccg

SEQ ID NO: 459311 - DNA, 82 bp, Homo sapiens
ttcccaaaagacaggctcttcacctgaaggcatatgttgaaacaattagactaaaagatgatgaaatactcaaggtacaaac

SEQ ID NO: 459312 - DNA, 83 bp, Homo sapiens
gtagtttgaacctggctgttcctccaccaagatttggtacagctcgcagaaagaagaaggtggtacatagaacagccacagct

SEQ ID NO: 459313 - DNA, 97 bp, Homo sapiens
acgaactgtcatctttgtggcaactggagaaggcaaggcagctgttctgaaggctcctggccagaagctggagggggcttggccaaaaagagggaga

SEQ ID NO: 459314 - DNA, 124 bp, Homo sapiens
ggagttcatgtgggccctgaaaaacggagacttggatgaggtgaaagactatgtggccaagtcctctgtgatgtcggtctgcttcgcccgtttccatcctaacttggtggttggtgggacttac

SEQ ID NO: 459315 - DNA, 100 bp, Homo sapiens
accgggatcgtgaccgagaccgtgaccgagagcgtgaccgagagcgcgaatatcgtcatcgttagaagatgaagcccggggcaagaactgtggtgtcttg

SEQ ID NO: 459316 - DNA, 75 bp, Homo sapiens
cgtggacttctacaaggcccgcatggagagaaacttttccatgtctgtaaatagtgctgctgtcctgcgattgac

SEQ ID NO: 459317 - DNA, 100 bp, Homo sapiens
aagaactgtgaagagaggagttgagaacatctctgttgacattcattgtggagctgaccagtgctttggtgcatctaaaactgcatctttttattcagat

SEQ ID NO: 459318 - DNA, 100 bp, Homo sapiens
cgaagcccgtggacaaagtgaagctgatcaaggaaatcaagaactacatccaaggcatcaacctcgtccagataagatttgtgaccaaatcagtgatgct

SEQ ID NO: 459319 - DNA, 100 bp, Homo sapiens
ctgctgccccggcgcaccgactggaccgggaaggagcatcccaggacctaccagaatctgaatgccacccagaggatgtttgaaattgactatagccggg

SEQ ID NO: 459320 - DNA, 100 bp, Homo sapiens
gtcacatgtctagacgtctcggccaaccaagttgcttttggtgtacagggtctgggatgggtgtacgaaggaagcaaggatgagttccacccgttcatcg

SEQ ID NO: 459321 - DNA, 75 bp, Homo sapiens
ctctgctgcggcgcggggaccgctgtgctctcgcggagctggagtttgttcagatcatcatcatcgtggtggtga

SEQ ID NO: 459322 - DNA, 80 bp, Homo sapiens
gaaaaagaagaatcagcaaatactactgaaagtgcaatatttgagtatcactgcgagccagtaaatgacctgcgacataa

SEQ ID NO: 459323 - DNA, 100 bp, Homo sapiens
aaagctttggcaaggagtgacacccgccatttacagacacaatctccctggaaaaggagacatgaatgtctgcaatgatacttcctgacaagaagttgat

SEQ ID NO: 459324 - DNA, 74 bp, Homo sapiens
tgaactaaagcctttagtgcattctcctcatgctattgtggtgaccaagaatatggcccaggtgaccaaagccc

SEQ ID NO: 459325 - DNA, 99 bp, Homo sapiens
gcgaaacgaggaggagataacgcggccttgggctctgaggcaccttccactagcaacagtctccccaggcacaacacagctaacacaaggccccgcagg

SEQ ID NO: 459326 - DNA, 90 bp, Homo sapiens
gcaggactctagtaacccgcgaaatgatgggatagcgttgcaaatccttaaaagagtcttaacggcctcattcacacttgctttcctggg

SEQ ID NO: 459327 - DNA, 87 bp, Homo sapiens
ttggcttctcgactcggtcctgtttcgacagcgaacatgtcgcggcctgtcaggtctggtccatcgaactcatatgtcatcctgtcg

SEQ ID NO: 459328 - DNA, 105 bp, Homo sapiens
ctgtctcccgctccgcagccccgggcacggcggaggcagcggagccctgggccatcgacaatgcagatcttcgtgaagactctgactggtaagaccatcaccctc

SEQ ID NO: 459329 - DNA, 82 bp, Homo sapiens
atacaaggagctggacatcgagcctgagggaggggaaaggcgcaggatgacattagcccagggaaggagagcctggggcccg

SEQ ID NO: 459330 - DNA, 126 bp, Homo sapiens
cctgggcttcggggccaagctgcccccggatggcagagtgtcccacgagttcccactggacctcagcagccatgtcgaagccccatagtgaagccgggactgccttcattcagacccagcagctgc

SEQ ID NO: 459331 - DNA, 49 bp, Homo sapiens
cgaggacaccgactaccagcagcttggttccagtgtcagaagcaagcat

SEQ ID NO: 459332 - DNA, 90 bp, Homo sapiens
cctccgcgttttggtccttttggaccgtgcccctttccggggggagctttcccatggtttggcatggacattgggggaactctagtaaag

SEQ ID NO: 459333 - DNA, 82 bp, Homo sapiens
ggctgaggctacctgtgaacagtacgcagtgaatgttgttctcctgcgctgcccaacagcatggtgtattttggaagctctc

SEQ ID NO: 459334 - DNA, 73 bp, Homo sapiens
tgggacggaagatcgggagcgggtccttcggagatatctacctggatcccataaaaactgcccaaggatctct

SEQ ID NO: 459335 - DNA, 133 bp, Homo sapiens
agaagaagaaacgggccgcgaaccgcagtatcatgctggccaagaagatcatcattaaggacggaggcacgtgttaagtccaaaagtgctgggcattgccatcgctcggtatgacttctgtgcaagagatatg

SEQ ID NO: 459336 - DNA, 50 bp, Homo sapiens
attacaggcccagcccactgggaggctttccttaaagtttcccatgtctc

SEQ ID NO: 459337 - DNA, 100 bp, Homo sapiens
ctccaggatccccagcggccccccagtccagggggaacgcagtgcgccccgcttcggtgttacttccctcaggaatagccaggccagaagaaggaaggcc

SEQ ID NO: 459338 - DNA, 75 bp, Homo sapiens
taacagtccactttggaaagaagatttctcagcttcttggacacttaatgattgttggcaagaaatgtgctgctg

SEQ ID NO: 459339 - DNA, 102 bp, Homo sapiens
atgtagctgatgtcactcaggagcacgagcgaagtacagcttatggatgggctggagcattggatttgctaaaggagcttaagaatattcctatgaccctgg

SEQ ID NO: 459340 - DNA, 83 bp, Homo sapiens
gttcgcgtctctctgctgcggcgcggggaccgctgtgctctcgactgttgatcccacacaagagtgtttcatcccacaggcta

SEQ ID NO: 459341 - DNA, 74 bp, Homo sapiens
caaatagagctgccagaggttccctccgagccccttcctgagaagatcccaggaagcaggagctggccaacagc

SEQ ID NO: 459342 - DNA, 50 bp, Homo sapiens
ccggaatactctgactcgaatacggccatatatgtctcttggaagtcttc

SEQ ID NO: 459343 - DNA, 50 bp, Homo sapiens
ggagtatgtcaagcgagccctggacagtcattttgtttactcattcagcc

SEQ ID NO: 459344 - DNA, 83 bp, Homo sapiens
cttagttgaattttcaccagttgaaaaattggaggtttctgctttgggacaaccatacatctaattccttaaagtagttttat

SEQ ID NO: 459345 - DNA, 103 bp, Homo sapiens
attttgatgacatcaagcacacgactcttggtgagcgaggagctctccgagaagcaatgaggttgtgtgcgtggtgaataatttcaaagggagacaagcagaa

SEQ ID NO: 459346 - DNA, 49 bp, Homo sapiens
aaggaggtgctgaagagcgaggaggactttctgcagggcgactgcacca

SEQ ID NO: 459347 - DNA, 100 bp, Homo sapiens
gggacccaaatgtcaaactaccaaatgggcgagacacacctgcactcttcaacttcaccactcaagagatcctggcaaaattaccaacaatcaatgatgg

SEQ ID NO: 459348 - DNA, 125 bp, Homo sapiens
aaattattagaaattccgcgggcggtgtagaggcggcggacgggccggagggaggatgttaaagccccgcgaccctggaagctgtcctgaatttcaaatactctggaggcccgggccacactgaa

SEQ ID NO: 459349 - DNA, 96 bp, Homo sapiens
actggacagtgacacctgagcacgtcttgcctgagtcccagcatgtgcagtctttgccaacaaaaaaaattaccaagaaacctattccagatgagc

SEQ ID NO: 459350 - DNA, 86 bp, Homo sapiens
cttatagtggaggctgctaggagccggtcagagggtatcattggaacatttcaagatcatcaaatcaaattccacagggattggtg

SEQ ID NO: 459351 - DNA, 100 bp, Homo sapiens
cacacaggtagccctggacggcattcagtgttttgcctcggtgtctggatgcccagcctaaccaagtcagcttcccatctttggctgagacaaggagaac

SEQ ID NO: 459352 - DNA, 75 bp, Homo sapiens
ccactgtgtgtgtgactaatgtcaggcatgaaaccagatttaaacaacgtatgctggaactgacggatacaaaca

SEQ ID NO: 459353 - DNA, 75 bp, Homo sapiens
gcttcatccgggaagtgcttggggatggagtgcctccaaaggttgctgagggtgaagaaggtgaatacagtgaag

SEQ ID NO: 459354 - DNA, 51 bp, Homo sapiens
gcctgctccaggatggtgctgcgctcgggttcatgacgctctcgatattcc

SEQ ID NO: 459355 - DNA, 101 bp, Homo sapiens
caggcgcccagacagcgcggagcgtctactgtcagcagaaatgacctccaccttcaacccccgagaatgtaaactgtccaagcaagaagggcaaaactatg

SEQ ID NO: 459356 - DNA, 100 bp, Homo sapiens
aggactgcgccgcgtcttcctcaaggtggggttcggggggccaccgaatcgctgtcacgccggcagggcgtctctggccgagcctctttttgtggaaaac

SEQ ID NO: 459357 - DNA, 75 bp, Homo sapiens
ctcgggagggagactgttgttcccggagatgcggcgcgcagtgccagggcaggggcccttggagtgacttggctg

SEQ ID NO: 459358 - DNA, 82 bp, Homo sapiens
gcaagaagcagatgcgcattttgatgggagcttactccacgggaacagcctctagataatctgagttgttgaaaatacgaag

SEQ ID NO: 459359 - DNA, 100 bp, Homo sapiens
ctgcaggcacctgctggcgtgcgggacctaccagctgcggcggccggaggaccggcctgccggcccccagaacaaggctctggggtctacatcacacgcg

SEQ ID NO: 459360 - DNA, 75 bp, Homo sapiens
cactgctgctccgtggagatcgtcccgcgcctgccggtatcacctcttctgggctcaagatggacaacaagaagc

SEQ ID NO: 459361 - DNA, 82 bp, Homo sapiens
cttgctgctgctcaaagctgctgccgccccttgggctaaaaggtgagaagccctaccactgcaactgggacggctgcggctg

SEQ ID NO: 459362 - DNA, 115 bp, Homo sapiens
aaggaaagtcagaaagaagaaaaagaagggaaccattacagcaaatgttgccgggacaaagtttgaaattgattgccccagtggaaaatgacaatagctacgatgaactgaaaag

SEQ ID NO: 459363 - DNA, 99 bp, Homo sapiens
gcctgggtacaagcattcctcgtcagcaacatgctcctagcagaagcctatggatctggagatcatgctgtcacctgaagcaaggaacacagcatgggt

SEQ ID NO: 459364 - DNA, 75 bp, Homo sapiens
cggaaacgctggggccagaacactcaggtctgcagactcgtgaatgacgtctaccgcgtgtataatcgacaccag

SEQ ID NO: 459365 - DNA, 100 bp, Homo sapiens
cggagatctctctcatctcgctcggctgcgggaaatcgggctgaagcgactgagtccgcgatggaggtttgaagatgccgcatttggattggatgaattc

SEQ ID NO: 459366 - DNA, 98 bp, Homo sapiens
ctgaacaaagacaacattgttcctggaacgccctctttttaaaaaaggtgcttcagaactgggccctttttcagaccccaggcagttcccaagcattt

SEQ ID NO: 459367 - DNA, 98 bp, Homo sapiens
cgagatggccccagtgtgtgcggtggttggagggattttggcacaggaaattgtgaagacttcacagagaatgcagttgtcttgacttcaggtctgtc

SEQ ID NO: 459368 - DNA, 107 bp, Homo sapiens
ttcccgaacaggcgcttgccctctcttttatgtaatctatgccagcaattatgacaatgttagcagaccatgcagctcgtcagctgcttgatttcagccaaaaactg

SEQ ID NO: 459369 - DNA, 75 bp, Homo sapiens
aaatggcacttcattggccacctacagaaacaaaatgtcaacaaattgatgggtgcagcctttgtgaaggagaac

SEQ ID NO: 459370 - DNA, 75 bp, Homo sapiens
cagccttctacttgtcccatgagtcatccgtccttggctcaggatttggagagcttgcaccaccaaaaatggcaa

SEQ ID NO: 459371 - DNA, 50 bp, Homo sapiens
gccagcccagaacagagaatcaggtggagtctttcattttggatcaggat

SEQ ID NO: 459372 - DNA, 82 bp, Homo sapiens
tgtctacttcgaagactggcaagcacggccacgccaaggatctgccactgtgaaggagatgatgagagccccctgatcaccc

SEQ ID NO: 459373 - DNA, 100 bp, Homo sapiens
gatgatttgaagatattagcctaacaagatggaagcaggtttaaaattttacataagaagttacctttttcaggttctgatctacaatggccaactggac

SEQ ID NO: 459374 - DNA, 75 bp, Homo sapiens
acaaggatgtgatgatggggacctatgggaacctactctcattagaaccttcatcaccctggtgttgtaaatttg

SEQ ID NO: 459375 - DNA, 98 bp, Homo sapiens
ggaaaagtccaagcatagcaacagatttcttgataaccggctgtttgctacctgctctgatgacactacaatagcactatgggatctgagaaaattga

SEQ ID NO: 459376 - DNA, 75 bp, Homo sapiens
acccagcctgtgggtgtgttggtggactgctgtaagactctagaccagaggttgaaggctgcattgactcaccac

SEQ ID NO: 459377 - DNA, 102 bp, Homo sapiens
tttctgctcacctggagaagggatggaaatacttcaacaagctgaactaccagcagaaagtaggcatcatgtactgcaaagctggacagagcactgaagaag

SEQ ID NO: 459378 - DNA, 75 bp, Homo sapiens
ttggctgcagatttgtggtgcgttctgagccgtctgtcctgcgccaaggtagaagaagcagatgattggctcaga

SEQ ID NO: 459379 - DNA, 75 bp, Homo sapiens
gtggcacacactggagagatatcaatcaatgtccgagttaccaccatggatgcagagctggagtttgcaatccag

SEQ ID NO: 459380 - DNA, 50 bp, Homo sapiens
tgaacttcagttatcctgcaggcacagtagagacagggtttcgccgtgtt

SEQ ID NO: 459381 - DNA, 75 bp, Homo sapiens
ctgccaagtacctgaagtcttcccacaactctagcagattgccacggcagtgaagtttctacagaattcccgggt

SEQ ID NO: 459382 - DNA, 87 bp, Homo sapiens
ctctccacacctaggcaataattacgttgaaaacgacatatctgctttcacctacgagaggacactaatgatggagcagaggtcgca

SEQ ID NO: 459383 - DNA, 75 bp, Homo sapiens
gctgttgctgccgccatacgcgctctccctgtttagatatgcaaagcagaaaccctcgtgcaggcccgaaagaga

SEQ ID NO: 459384 - DNA, 50 bp, Homo sapiens
aaggaaatggcacaagcgcagtgggtaatattaacggctgctatttgaac

SEQ ID NO: 459385 - DNA, 100 bp, Homo sapiens
gggtctctgcgtctgtagttcatttgaccaaacggggtgcacagagcgttttgtatgtagtccagatgaagttatggataccatagatgaaggaaaatcc

SEQ ID NO: 459386 - DNA, 100 bp, Homo sapiens
ccgatggctctgtgcaacggagactccaaggaagatgtctcaggagccatatcacatctgtcccttggggagatcccagctatggcacagccgtttgtat

SEQ ID NO: 459387 - DNA, 100 bp, Homo sapiens
ccccttctcccagctggtgctgcttctcgagagactgttgggcgaaggttacaaaaagaaccccagcaccagggaggcagaggaagagacaaccaacgac

SEQ ID NO: 459388 - DNA, 104 bp, Homo sapiens
aggaggaggaggaagcggccgccgcggggtccgcggcgcgcccggcccggcgccgacaccatgtggatccaggttcggaccatggacgggaggcagacccacac

SEQ ID NO: 459389 - DNA, 74 bp, Homo sapiens
ggaccgtgcccttctgggcccacgcggggagccacgcccagatttcttctaccgctgcttccctgatgggctag

SEQ ID NO: 459390 - DNA, 90 bp, Homo sapiens
acccgcaccaagctctgctccacactgccaaccggccagaggacgagtgtgattccctcccaggctgtccctcgccgccttgctacagcc

SEQ ID NO: 459391 - DNA, 100 bp, Homo sapiens
caaaggcaggggaggaagccacctcgagtgcatgcaagatatgggaaatactaaagcaagactactctatgaagccaatcttccagagaactttcgaaga

SEQ ID NO: 459392 - DNA, 76 bp, Homo sapiens
tttgttcaggacctggctacaagagttaaaaaggattcagtgcgcctccttgctgtggaagcttgtgtcagtattg

SEQ ID NO: 459393 - DNA, 82 bp, Homo sapiens
ccgagaggaacctctatgccgacatcgacgccgcctggcaggccctgcgcaccaggtgcacattcaggttcccgagcacaaa

SEQ ID NO: 459394 - DNA, 95 bp, Homo sapiens
aatcaagtgggctgtgctgctaccctgcctcattcttctgccttcacgcctcttaagatatcctgctggatgacattgtccttacccattctctc

SEQ ID NO: 459395 - DNA, 82 bp, Homo sapiens
ttttggggagacaattacaaacatgttttatcaatgcagctaaggctgatcccaaagttgtcagatggagagtaaatacaag

SEQ ID NO: 459396 - DNA, 98 bp, Homo sapiens
gggaaatcgtgcacttgcaggccgggcagtgcggcaaccaaatcggcgccaagacaatgcagatcttcgtgaagactctgactggtaagaccatcacc

SEQ ID NO: 459397 - DNA, 98 bp, Homo sapiens
catctcctcaacatggaaactaaggacatggtccggcgaggagagatcatcgacaatgacaccgaggaggagttctacctccggcgcctggatgcggg

SEQ ID NO: 459398 - DNA, 80 bp, Homo sapiens
cagaaacaaaatgtcaacaaattgatgggctttatcctgtggataaacgcagagtgaacgagtttggggagtcctacgag

SEQ ID NO: 459399 - DNA, 100 bp, Homo sapiens
gaccgctcctccaactaaccaacgcaaacatgcagatctttgtgaagaccctcactggcaaaaccatcacccttgaggtcgagcccagtgacaccattga

SEQ ID NO: 459400 - DNA, 75 bp, Homo sapiens
tcgcgcacagagacctgaaatccgacaacatccttgtggagctggacccaggtctctgtgcgcgatgccctgttg

SEQ ID NO: 459401 - DNA, 75 bp, Homo sapiens
ctgcagaatttctaaatgacagagttcctaattgcaatgtagttccattagaaaacgcacttaggaactttgcct

SEQ ID NO: 459402 - DNA, 100 bp, Homo sapiens
ggaggctccaagacctcatcaacaattaagtacgaattggagcaatgttggcttatacacctctggatgagaagagccttgctttattactcaattatct

SEQ ID NO: 459403 - DNA, 90 bp, Homo sapiens
caggaggacgaggaaagcacagacatagggcctgattacattccaacagaggaagaaaggagagtcttcgcagaatgcaatgatgaaagc

SEQ ID NO: 459404 - DNA, 98 bp, Homo sapiens
cggaccattaatggacaaaaacatgagtcaatatgtattgtggcattcaaatcctagcactctgggagagcatcgagagtaaacatgaggttacgatc

SEQ ID NO: 459405 - DNA, 51 bp, Homo sapiens
ggacctctctgggctggctattaaggcctcgggggacacccccaccactcc

SEQ ID NO: 459406 - DNA, 100 bp, Homo sapiens
cctctcattatttattgatgataagctgaaaaagggagtcaaaggggataaagatggtgatagagcagttcaccatgcagcttttggagatgaaggcgct

SEQ ID NO: 459407 - DNA, 132 bp, Homo sapiens
tcgccatgccggcccggcggctgctgctgctgctgacgctgctgctgcccggcctcggggtttggtgcacctcgatttggaggaagtagggcagggcccttatctggaaagaagtttggaaaccctggggag

SEQ ID NO: 459408 - DNA, 100 bp, Homo sapiens
agtatttggggtctacctcctgtggtttttgattcaagtcctgttctacctactgccaattggaaagagtgcaatagagtctctttttggagcatcatta

SEQ ID NO: 459409 - DNA, 97 bp, Homo sapiens
caaaatagcagagaaacctgactgggaggcagaaaagaccactgaatctagaaatgaggtgtatgcaacagcgttattgcaacaggctaacgaaaac

SEQ ID NO: 459410 - DNA, 100 bp, Homo sapiens
aattgggatgatgacaatgtagaggatgacttctctaatcagttacggaattttgtgacaggctctgttagtctgttcctcccttatttgaaggacaggc

SEQ ID NO: 459411 - DNA, 50 bp, Homo sapiens
gattttggccggaaacttgcttgcaggacataagcagctctatgaccaat

SEQ ID NO: 459412 - DNA, 82 bp, Homo sapiens
aaggagagagctgggctttccaagacttcctgggaatgaaaatggttggtgagctgctacgaatgtcgggtgcctttttcat

SEQ ID NO: 459413 - DNA, 82 bp, Homo sapiens
cagcgcccactggggatggcaaagacgacatccggtgcgccgaggctgctcacaaaaatcatggaagggaagtggttgctgt

SEQ ID NO: 459414 - DNA, 99 bp, Homo sapiens
tgtgatgttggagaactatagcaatctggttttcttggggaaatcctcattgacgattcaatttgttgaaggccaatttgtggactcctacgatccaac

SEQ ID NO: 459415 - DNA, 85 bp, Homo sapiens
aaaatccacctgctgacgaatactttggcacattgcaagcaacccgtgccttgatggtggttggcatcctcctgggagtgatagc

SEQ ID NO: 459416 - DNA, 83 bp, Homo sapiens
cggggatgtatttggaacattatctggacaacaatgcagatcttcgtgaagactctgactggtaagaccatcaccctcgaggt

SEQ ID NO: 459417 - DNA, 75 bp, Homo sapiens
agcttccagttagtggatatagcacaccatccccagccacaattctgtggtgttcttggtcacacatttatggag

SEQ ID NO: 459418 - DNA, 101 bp, Homo sapiens
cggacgcgcgcagcccgcccgcccggcgaccagcaaggtactccaaagattcaggtttactcacgtcatccagcagagaatggaaagtcaaatttcctgaa

SEQ ID NO: 459419 - DNA, 90 bp, Homo sapiens
tccagaaagcggcttatcgaacagagccgggagttcaagaagaacactccagagtcttcgagtgcttcgactgaccatgatcccctgggc

SEQ ID NO: 459420 - DNA, 82 bp, Homo sapiens
ggtatggaccagctgtggttgctcacattttaaggcgcctgtgtctggcagagctggtgtgagacgagacaatcctgccccg

SEQ ID NO: 459421 - DNA, 82 bp, Homo sapiens
agcgggggactctttgaagctgcacattctgattcagcaggcctgagattctacatttgtatgtctcctcagaaacaatcgg

SEQ ID NO: 459422 - DNA, 100 bp, Homo sapiens
ggtgcaaagatcatagctacgtgattgctggttattatcaagctaatgagcgagtaaaggatgccaggtacatgtcccagagcaagcacacggaggcccg

SEQ ID NO: 459423 - DNA, 117 bp, Homo sapiens
ggtgggggccggccccggcctggtcctggccccggagctgttgctggacccctggcagggttggatggcaagcatgtggtgtttggcaaagtgaaagaaggcatgaatattgtggag

SEQ ID NO: 459424 - DNA, 95 bp, Homo sapiens
ggtcttcatcctacagctcctactccagccgctcttccagacacagctcgttctcaggaagccggtccaggtcccagcatttgagggtgatgatg

SEQ ID NO: 459425 - DNA, 50 bp, Homo sapiens
agcgtcatcacggcattttattgcaaatgcagccctgaggatttggctac

SEQ ID NO: 459426 - DNA, 96 bp, Homo sapiens
tggccaccgcctccagcttgccaccaaagacctgcgactttgctcaggtgagaagccctaccactgcaactgggacggctgcggctggaagtttgc

SEQ ID NO: 459427 - DNA, 103 bp, Homo sapiens
gggtgctgcggctctgcgcggtccccgccagcgccccatcctgagccggtttactcctggcttgggggcattaggaagcactggaggctcttcgggaactaat

SEQ ID NO: 459428 - DNA, 83 bp, Homo sapiens
ggccggacccgtgcaggcggtgcccccgccgccgcccgtgcccacggagcccaaacagtaaccctccactgagtgaagaaatg

SEQ ID NO: 459429 - DNA, 75 bp, Homo sapiens
ggtcgcagttcttgtttgtggatcgctgtgatcgtcacttgggccgcgatgggcctcttggaacattggtgtgtt

SEQ ID NO: 459430 - DNA, 75 bp, Homo sapiens
gagggacggacacgcggacgtctagcggaggtgatggctggaccggcggaggaggcgggagcccattgtcccgag

SEQ ID NO: 459431 - DNA, 74 bp, Homo sapiens
attttggcttctaggaaagaaggaggatgttacagggttactattgaacatgctagggctcggtcacgaggtgg

SEQ ID NO: 459432 - DNA, 100 bp, Homo sapiens
ctgtcccttccggatttggctttactttaagaggagattcagacatagacaagaatgattacccagttaccttatcccatatcacacaactggtcctcag

SEQ ID NO: 459433 - DNA, 100 bp, Homo sapiens
tggctggtctcctactcccagatgcatccgtgtcagtcaaggtgaagatgttcttaaagggtcccagattacgtatgttacaggtgtagaaggggacgac

SEQ ID NO: 459434 - DNA, 75 bp, Homo sapiens
gtcacactgtgtatctcctggtaacgcctcgtgttgttgaccggccagccttgcagctgtatgatccaggagctc

SEQ ID NO: 459435 - DNA, 98 bp, Homo sapiens
gcagaaatcacattggaccctcctcccaactgtagatgagggttactaccagggtggaaaatttcagtttgaaactgaagttcccgatgcgtacaaca

SEQ ID NO: 459436 - DNA, 100 bp, Homo sapiens
attcaaaagaactgctgcccagtgactccgtgctgcacggaagaatatcagctccaggggttgtgtttgcacattatggtcccgtctggagacaacaaag

SEQ ID NO: 459437 - DNA, 51 bp, Homo sapiens
ggagaagagaatggatcttggaacaggttcttcccaggagactctgccggc

SEQ ID NO: 459438 - DNA, 87 bp, Homo sapiens
caccgccacactcatcatagccttcacctctgcagggacaccatgtggcggatctttactggatcgctgctggtagaggagaagtca

SEQ ID NO: 459439 - DNA, 97 bp, Homo sapiens
atcagcctggtcaccagcttttcggaacagcagagacacagagggcagtcatgaggaacggaaaacagttcttccttcaaagcatgcagtacctgaa

SEQ ID NO: 459440 - DNA, 75 bp, Homo sapiens
aagacgtatcggacgatttaagccggagcatctcaggggctacacgctttgctggaggaacggattcacaactac

SEQ ID NO: 459441 - DNA, 74 bp, Homo sapiens
gccgtcgacggcgagcccttgggccgcgtctcctttgagtccatctcaggttttgcgcacagctgcttccagta

SEQ ID NO: 459442 - DNA, 100 bp, Homo sapiens
ggagattagtttccagctgggagaagagtttgatgaaaccactgcagatgatagaaactgtaagatgttctcaaatagtgatgaagctgtaatcaataaa

SEQ ID NO: 459443 - DNA, 75 bp, Homo sapiens
cgaagacagtgaaaatgattggagtattaacattggccataggaaaaggatacagagtagagtttcatgaacctg

SEQ ID NO: 459444 - DNA, 50 bp, Homo sapiens
caatgatggggcagcaagtggccaagtgaaacctttgtcctggggaatag

SEQ ID NO: 459445 - DNA, 50 bp, Homo sapiens
ttattcaagagctgaataattgccaggtggtagaggacattgaatacctg

SEQ ID NO: 459446 - DNA, 90 bp, Homo sapiens
tccagtaggatagaatgtgaaagcccaaacaatgacctcagcagattccgaggcttcctgaaaatgtttataggaggccttagctgggac

SEQ ID NO: 459447 - DNA, 101 bp, Homo sapiens
tgggatgaacagctaactgtactttgagaatcactacaagaaaaactccttgtggtgaaggttctaagacgtgggatcgtttccagatgagaattcacaag

SEQ ID NO: 459448 - DNA, 100 bp, Homo sapiens
ctttgagcatacaccgagagagtgaggagccagacgacaagcacacactatggcgctgaaacggattaataaggctggagtacagtggcgcaatctcggc

SEQ ID NO: 459449 - DNA, 75 bp, Homo sapiens
cggattcaggattcagatgaaccagtaaggaagagcccaacactgctggaagtgagcatgccccatttcatgaga

SEQ ID NO: 459450 - DNA, 82 bp, Homo sapiens
aactttgcgacggaaatgtgtcatcgaaagccagaatcccgcccattgtcagttcctgttaaagccatgttgaatatatctg

SEQ ID NO: 459451 - DNA, 51 bp, Homo sapiens
agctgcctcagttcttagcgcagggcgaccattgacgaggtggagacggac

SEQ ID NO: 459452 - DNA, 98 bp, Homo sapiens
catagtacctacagcagcactccagcagcatctccctctcatcagcactgttgaaagaagaaaaaatgtcagtgctatctcctgaaatcaaatgtgag

SEQ ID NO: 459453 - DNA, 99 bp, Homo sapiens
ggataacccagcatcaggggaaaagtttgcctatgtgccatttggagctgaatgtgaaagatgttgcagaagtgttccagaagtggctgaagatagaag

SEQ ID NO: 459454 - DNA, 100 bp, Homo sapiens
gtaaagtgactgagctggaagacaagtttgatttactagttgatgccaatgatgtaattctggagagagtgggcctcctgcaaaacatccttccttgaag

SEQ ID NO: 459455 - DNA, 75 bp, Homo sapiens
ggagaaacatgcagattatatcgcatcctatggctcaaagaaagatgattatgctaaaacactgtcttatgaacc

SEQ ID NO: 459456 - DNA, 100 bp, Homo sapiens
tgggccggttttatgagtgggaaccatttgcagaaggaataggaggccttcaagattttgtgctgaaatctgcaacactgtgtagcctgccatcctgccc

SEQ ID NO: 459457 - DNA, 83 bp, Homo sapiens
tgaaaatggacgagtaatcgcctgctttgattcattgaaagttatggaggttttgatgactatggtggctataataattacgg

SEQ ID NO: 459458 - DNA, 90 bp, Homo sapiens
ctttcccgagccctggaggtggggagaaaagcctctaaagagagcaatcactacacttatggctgggattttgcgcttagtagttcaatg

SEQ ID NO: 459459 - DNA, 100 bp, Homo sapiens
ctgagaagttccagcgcttcacacctttcaccctgggcaaggagttcaaagaaggacacagctactactacatctgtaaatttttccataaccttatgga

SEQ ID NO: 459460 - DNA, 151 bp, Homo sapiens
gtcgaagttttctaaagaagaatctgaagtgaaatgacatcaagagacctatcaagacctgtatccaggaaaaggtgtctgacttccagcaactgctggcctgtgccagggtgcaagctgagcactggagtggagttttcctgtggagagg

SEQ ID NO: 459461 - DNA, 90 bp, Homo sapiens
tgacatccagaagttccccaagctccgggtgccgtcagaacaaaatctgcttcatcccaggcatggtaggacctatattagagatgacac

SEQ ID NO: 459462 - DNA, 75 bp, Homo sapiens
gcgacggtcgccgcccacggcgaggagagaatgggcagccctgggaaacatgtctaaagaggatgccatggtgga

SEQ ID NO: 459463 - DNA, 100 bp, Homo sapiens
ctttccttgacctgaagaagcctcctgcctccaaatgcccccatcgctatacaaaaattttaccaaatgttgcaagaactctggagttcttatggtagta

SEQ ID NO: 459464 - DNA, 96 bp, Homo sapiens
agagtttcaagatgcaggtgaacaggagctgctaagacacatggttgcacagaaggtgaaaccaaatcttcagacttttaataccattctgaaatg

SEQ ID NO: 459465 - DNA, 75 bp, Homo sapiens
gaccacagacttcgccatgcaggaattggcatgtaagatggctctggaactcctcacccaagagtttggcattcc

SEQ ID NO: 459466 - DNA, 100 bp, Homo sapiens
atgaaaatcttcacagtgctgttactaaagcctgcctttccagctttgaaatatcagtgatgtataatgaatctgacctgcatacactcgtgaaatcaag

SEQ ID NO: 459467 - DNA, 75 bp, Homo sapiens
aaaatcgctgctaaacattaccagattacatcgtcagcccaaacatctccttgcatttttgttggctgaattggg

SEQ ID NO: 459468 - DNA, 99 bp, Homo sapiens
gccgctgccgctatggatgatcgagaggatctggtgtaccaggcgaagctggccgagcaggctgagcgatacgacgtattctaccttgtaaatactgtt

SEQ ID NO: 459469 - DNA, 82 bp, Homo sapiens
ttcctaccttatgagctcggttttcttatgcttataagagtggaacaggtattgcactctcagtctcgccatgttgaagtca

SEQ ID NO: 459470 - DNA, 75 bp, Homo sapiens
ggctctgcgaaggacccgcatccgcgccgtcatggtgacaggtggtctgtttttctggggggccaccaacacctc

SEQ ID NO: 459471 - DNA, 100 bp, Homo sapiens
ccagttgcaagtgcgagcactatggagtagcgcagggtctcgagctgtggccgtggacttaggcaacagtaggccaaccttgtctatccagcatcctcca

SEQ ID NO: 459472 - DNA, 74 bp, Homo sapiens
cggagtgtaggcggcagaggattcgctcccagagcagctgcggccaggtatgatctcgtgaaaccttgagagaa

SEQ ID NO: 459473 - DNA, 98 bp, Homo sapiens
tccgggagggtggcggccggctgctttaaagccattgctaatgttttccagaacagttacagaatgtctgaaggggacagtgtgggagaatccgtcca

SEQ ID NO: 459474 - DNA, 126 bp, Homo sapiens
ctttttctgcatggtggatattatttttcattatccttttctgggtgctatgggtgatcattccaagagttgattcttcaccacactgaaaccattaggaaaaatccttgtggttaacagcagagg

SEQ ID NO: 459475 - DNA, 100 bp, Homo sapiens
tgaaaattcacccttgtagagtcattcctgcctttgagcggactcccttttaagatttattcaggagattgagcatgctctgggtcttggcccagccaaa

SEQ ID NO: 459476 - DNA, 82 bp, Homo sapiens
ctcggctgcgccgcgtgtcctcggagcgcggtccctgtattggtctcctgctcctagaggttctgccggagacttccatttg

SEQ ID NO: 459477 - DNA, 87 bp, Homo sapiens
gttgtgtaaaagagctctggaaatccgagaaaagggtgcagcccggaatcccgaggatgtggaccgggagcggcgagaacacgaacg

SEQ ID NO: 459478 - DNA, 100 bp, Homo sapiens
cacagttttcgaaggaggatgccctggagacacacaggcagacccatactggtgatgggcagaatctgtttacgaaagacgtgacagtgatcgagggaga

SEQ ID NO: 459479 - DNA, 83 bp, Homo sapiens
ctcacaccagacctacggagggagctggaaattcctgacgttcattgatctggaagctatgaagcagataacccagctcctac

SEQ ID NO: 459480 - DNA, 90 bp, Homo sapiens
aaaaacttccgtaacatccaggttgatgaagctaatttattgacttggcaagggcttattgttcctctctgctcgccccccatctcaccc

SEQ ID NO: 459481 - DNA, 100 bp, Homo sapiens
ctagactgggacggtggggttcctgccggctgtattcgggccttggactggactgagaagctacgaccaagaggatgctggtggaaaagatgggccgaga

SEQ ID NO: 459482 - DNA, 100 bp, Homo sapiens
ctagaattacctggaacttcatcatcatctacttcacaggaattgccatttgtggagccccctgagctgcccgctgatctgcagcactggatctcctaca

SEQ ID NO: 459483 - DNA, 74 bp, Homo sapiens
ttaattttagggtcctttatatagaagggagagtaggataggatttttgggccttggtctcatgggaagtggaa

SEQ ID NO: 459484 - DNA, 75 bp, Homo sapiens
ctcagcctcctaagtagctgggactacaggctggaggacgtgtgccagtgttagacacactcatagaacttgtta

SEQ ID NO: 459485 - DNA, 110 bp, Homo sapiens
tgagtcttctggcaaacagtgtttgcctctggttcagctcatacaacagcttcttagacatgcagtcgaggtgtcagaccaagaagttattaccaaaaaatggcattttt

SEQ ID NO: 459486 - DNA, 75 bp, Homo sapiens
ggcatataatcgaatagttgatgccctaaatgaattcaggtgcactttacaggtccccgatgaaccaagagaacc

SEQ ID NO: 459487 - DNA, 85 bp, Homo sapiens
acagcccaacccaaggagtgaggggcaagattcttgccaagagaattaatgtgcgtattgagcacattaagcactctaagagccg

SEQ ID NO: 459488 - DNA, 99 bp, Homo sapiens
caatccagttccaaggactccacgggcaagagaaattgggtgatatctgcttctcccttcgctacgtacctactgctggtaagctgactgttgtcattc

SEQ ID NO: 459489 - DNA, 100 bp, Homo sapiens
agtgcgacaggacagttgtaaacggcatcatcgcaaccgtcgtggtcagtgatcagaatcatccagataatcaacagctgaagaatgaacaagaagaaag

SEQ ID NO: 459490 - DNA, 100 bp, Homo sapiens
aagagctacaaaacagtggaaagactgattcggaactttggaaaaactgtgagataatacatatgtgtcaagttcagagaatgatgaagatgtgctagtt

SEQ ID NO: 459491 - DNA, 74 bp, Homo sapiens
caagcacacgactcttggtgagcgaggagctctccgagaagcaatgagagaggacatgtactcccaggattcca

SEQ ID NO: 459492 - DNA, 75 bp, Homo sapiens
cgatggtcggcggcgcccggatgggcagctgaggaatactcccccagttgcaagaggcgcaggaccgtggaagac

SEQ ID NO: 459493 - DNA, 86 bp, Homo sapiens
gctggctcagccgcaagtacccgtccatcatagtcaactgcgtggaagagaaggtgacattccaagcctgcagtatatctgaggcc

SEQ ID NO: 459494 - DNA, 73 bp, Homo sapiens
tcatctaggatatgtagatgagtttttgctacagaaagtctcaggggatccagaactgcagccagtccttgct

SEQ ID NO: 459495 - DNA, 97 bp, Homo sapiens
ctggagtcactcaaattagaaaatcgtcatctttctgaaatggtgatgaaattggaattgggtttacatgaggttctccagcatttggctcaaggcc

SEQ ID NO: 459496 - DNA, 100 bp, Homo sapiens
cacggcttcccccaaggaatatacaggccacagttgtaagggatcttgtggctgtcaggatggcagaggagcaggagttcacccagctctgcaagttgcc

SEQ ID NO: 459497 - DNA, 83 bp, Homo sapiens
aatgaaatgaagagttattctcaagctgtcacaggaacacactacctcatctatggggaagggtttcagacttgggaatattc

SEQ ID NO: 459498 - DNA, 100 bp, Homo sapiens
agactacattatgaacccaccactgggcaaagaaagtatccctttttgcctgtgtccctggagtgttacacagtgcctcctgaagacaacctggccctcc

SEQ ID NO: 459499 - DNA, 90 bp, Homo sapiens
acagcaagaaagaccatcaagtttaccagatcttttgccagaaatgagggcatactggcctgacgtaattcactcgtttcccaatcgcag

SEQ ID NO: 459500 - DNA, 73 bp, Homo sapiens
cccggtcgaccatatctccttgatcctggctgtggactggctagtgctgcgggcctctcgggtgcttcttgtc

SEQ ID NO: 459501 - DNA, 50 bp, Homo sapiens
tccggtacaggttgaggctactaaggtctctaattaacagaagatggcaa

SEQ ID NO: 459502 - DNA, 75 bp, Homo sapiens
ccaggtccctgctgaatcacacgccgccatccgggaggcccagggaagcctgaactctttgcttccggaatccgg

SEQ ID NO: 459503 - DNA, 75 bp, Homo sapiens
ggcctcagaccagaaagtgaaggctctaaaaatagtcatccagtgtggggtgatcagccccagatttgacgtgca

SEQ ID NO: 459504 - DNA, 85 bp, Homo sapiens
gagccgcatggagccccgggcggcggacggctgcttcctgggcgacgtggatactctcagcccctgcatgaagaaatagcattgc

SEQ ID NO: 459505 - DNA, 100 bp, Homo sapiens
tgttgccggagctgagaccgggcggccacagtccgcagggatgaacctcgagttgctggtgagatggaagattttcgaggtatagcagaagaatcatttc

SEQ ID NO: 459506 - DNA, 100 bp, Homo sapiens
gcgctgccgagaagctttacctcgctgaccctatgaagagtttgctgaaaacactgaaaacttgaaaaccaaaatgtcagaactaagactctactgtgac

SEQ ID NO: 459507 - DNA, 101 bp, Homo sapiens
ctgtcggcctatgagcctaatgaccacagcaggagcccagaggaaatgcaagggtggataaacaaaatcaattgtgtggcagctgtattttctgcaccacc

SEQ ID NO: 459508 - DNA, 100 bp, Homo sapiens
cggggccgcgctgcccgggccgcgaggacgaggcggcgccgccgggctgtggaggtgatgtgtccaatctagatcccaacttctcatttgaaggcaccaa

SEQ ID NO: 459509 - DNA, 74 bp, Homo sapiens
tgcacgaaataaagctcctgggcaaggggacgtctgcagctgaaattgtattcctattgaagagcagcttcagt

SEQ ID NO: 459510 - DNA, 100 bp, Homo sapiens
tgctgaacaaataatttttcatggcggcaccctcatcacatgtgtggattctgggattctcagagtctggcatgacaaggacaaggacacatcctctgac

SEQ ID NO: 459511 - DNA, 76 bp, Homo sapiens
agagaccactggattagcagaccctgctgggaaaacggcaatggattaataacaagaaattaatggtgaagtggtg

SEQ ID NO: 459512 - DNA, 107 bp, Homo sapiens
atatgacaaaggctttgccgcagttcatcttcctccctgtgtactttccatttgccttcctgggtaagaatgattgatgttggctgatattggagtgctcattcaca

SEQ ID NO: 459513 - DNA, 78 bp, Homo sapiens
gccatggcgtccaacatggaccgggagatgatcctggcggattttcaggttatgaagacagtatggagtttccagacc

SEQ ID NO: 459514 - DNA, 100 bp, Homo sapiens
gttcggctgcgcgagcggagggaggcggaaaatgtgccagaggaacttcaagaaccattttacacagatcagtatgaccaggaacacatcaaaccacctg

SEQ ID NO: 459515 - DNA, 90 bp, Homo sapiens
ccgggacttcgtcgccaagctggccaacaacacgcaccagcaatatggcttttgtaaggcaacactcagtgagaagcttggtggggcaga

SEQ ID NO: 459516 - DNA, 96 bp, Homo sapiens
ctgtatcgtgtcgccggcagggaggcatagcgcctctctgatcttcctgcatggctcagcttcatcgcagtaggaatggcagccccatctatgaag

SEQ ID NO: 459517 - DNA, 96 bp, Homo sapiens
ttcagaaggatatcgacgtcgtgatccagaagtccagagctgaggactgcctgtttgcagggatgctctcaaacttgtccagttgaaacaaacggg

SEQ ID NO: 459518 - DNA, 100 bp, Homo sapiens
agggattcgtggtgaaggtccggggcttgccctggtcttgctcggccgatgaagtgcagaggtttttttctgatgaggacggggacttggttgccttttc

SEQ ID NO: 459519 - DNA, 75 bp, Homo sapiens
gaaagaaaaaagagaagacttaccaagtttgagtgatgcttcttggacacttaatgattgttggcaagaaatgtg

SEQ ID NO: 459520 - DNA, 83 bp, Homo sapiens
ctccattggatttaaaagacagtcctcgtcagcactgactttcagctatggaatcgagcggttctggtgaggttggaaggatg

SEQ ID NO: 459521 - DNA, 121 bp, Homo sapiens
ccgaagcaaaaagaccagttttcatctttgaatggttgcgatttcttgataaagtcttggttgctgccaacaagcagcagcagctccaggcgcagcacctctcccatgccacacacggccc

SEQ ID NO: 459522 - DNA, 122 bp, Homo sapiens
ttgcagtgttgatggtggtggtgctggtcatcaatgttactcaggtagaggtatattgaagcaagtcaaagattacattaaacagtgtagcaaatgccaggagaaactagatcgatcccgtc

SEQ ID NO: 459523 - DNA, 50 bp, Homo sapiens
agctgttagccagcatcaatagcacgatgtatggtggcatgagaggcatg

SEQ ID NO: 459524 - DNA, 90 bp, Homo sapiens
gagctgcgctcacctcaggggcgggcccccgcctgcgttcgcggcgccaatatgaggccccaggattcctggcgaggtcctcctcccctt

SEQ ID NO: 459525 - DNA, 96 bp, Homo sapiens
gtcaggaccgcgacggcagcagagcacttggtgctaacagtggtttgcacatcatcatctttgatgaaattgatgccatctgcaagcagagaggga

SEQ ID NO: 459526 - DNA, 82 bp, Homo sapiens
ggctccgcgcccggccggacccgggcccgagacgagctccgagacagtgacagtgtctgcgacagcggcgtggagacatcct

SEQ ID NO: 459527 - DNA, 73 bp, Homo sapiens
gaacctgagtcaggacgtaaatggaaccctggttcaaaccttgtactactcagctgatcacaagctgcttgat

SEQ ID NO: 459528 - DNA, 101 bp, Homo sapiens
accggcctggagcgcgccgccaaggcggcgcgcgagctggagcactcgcgtctcctctgagcctccggcctccataagacccaaaacagatgacacctctt

SEQ ID NO: 459529 - DNA, 83 bp, Homo sapiens
atcctgtaagaatgttgcaaactgttgcaaagaaattcgacttcagtaatttgagtagtagatgtacagtgggagaaatcaca

SEQ ID NO: 459530 - DNA, 83 bp, Homo sapiens
ctgaaccatccacacatcataaagctttaccagcactgaacctaccagatgtatttgggttggtcgtcctcccattggaactg

SEQ ID NO: 459531 - DNA, 75 bp, Homo sapiens
tactcacctcccatccagcctggaaggacagaataacgggctcccagattcacaagccccaccaagaggatcacc

SEQ ID NO: 459532 - DNA, 100 bp, Homo sapiens
gcccatggaatcggtcctggaggacaggggaacgcccttttgcttgtgactggcagggctgcgacaagaagttcgcccgctccgacgagctggcccgcca

SEQ ID NO: 459533 - DNA, 100 bp, Homo sapiens
cagcctgcaggcctcaactcctccacagtggcctttgatgaggctgatatctacctcaacataacgggggccgtggagcccatgcagatcgacgtggacc

SEQ ID NO: 459534 - DNA, 100 bp, Homo sapiens
ccaggatgtactgatatagacgatgctctacattgtcgagaactcgaaaatggaaatttggaggttgatctttgctgggaaacagctggaagatggacgc

SEQ ID NO: 459535 - DNA, 82 bp, Homo sapiens
gaaagcacaaagcatggagaccctccctccagctgctctgttaaaagcgaaaatgaaacaattgcctgcggcaacagttcga

SEQ ID NO: 459536 - DNA, 90 bp, Homo sapiens
gtccggctaccacctccagctgactataataaggagatcacagaaggggatgaagtggagttctctgtggacattgactcggagctggtg

SEQ ID NO: 459537 - DNA, 99 bp, Homo sapiens
aggcatcctccttgaagtatttggctgaggagttttcaatcccagaggcaggtggaagtcatcataaagtttctgtttcacccgtcgtccatgttcgag

SEQ ID NO: 459538 - DNA, 73 bp, Homo sapiens
ccagctctgtctatcctaccaagaatgtgacagtgatgataacatgggtgccaaaaatacttcaataggagaa

SEQ ID NO: 459539 - DNA, 100 bp, Homo sapiens
gtggagaccttctcagagttcctcgatgtggccggtatgatgccgggcgggacggcttcatcgacctgatggagctaaaactcatgatggagaaacttgg

SEQ ID NO: 459540 - DNA, 100 bp, Homo sapiens
tgcattggcccgatcaagcctgacttctagccaaggtcaaaatgcagatcttcgtgaaaacccttaccggcaagaccatcacccttgaggtggagcccag

SEQ ID NO: 459541 - DNA, 105 bp, Homo sapiens
acggtgacacgcttccctggattgggccctggccaacgtcaacattgggagcctcatctgcaatgtaggggccggtggacctgctccagcagctggtgctgcacc

SEQ ID NO: 459542 - DNA, 75 bp, Homo sapiens
gagaccgcggccgggaccgaggggctttctctacgtgctgttgtctcactgggtttttgtcggagccccacgccc

SEQ ID NO: 459543 - DNA, 122 bp, Homo sapiens
gattggaggtgtcagtgttaaaggaacctctacaacgaaggtgaagccacggaagataagcatttgacattgtgcagcaaagaaatggttatggagaagcccagtccgctgcttgtagggcg

SEQ ID NO: 459544 - DNA, 105 bp, Homo sapiens
aacttccctcttagaactgcttttgtggcatcccataagttttgcaggaacgaatgcaggaatttgggaactgagctgtgcaagtgctgaagaaggagatttgtt

SEQ ID NO: 459545 - DNA, 100 bp, Homo sapiens
atggcagatgaggaagaagaccccacgattgagatggccatcctgcggttcccttacgagtcctgggggaccccgttccagcagctgaagcaggtggtgg

SEQ ID NO: 459546 - DNA, 100 bp, Homo sapiens
tttacaggcgctgcaaactggaggaaatgggctttacagatgtgggcccagaaaacaagccagtcaggtcatttcttcagatagctccccagctgtggaa

SEQ ID NO: 459547 - DNA, 90 bp, Homo sapiens
gcagcccgcggcgaccaagatcaggaacctgccctgtgctgccgaagtttaaggtggaagtggtggaacccaaggagttatcaacggtgc

SEQ ID NO: 459548 - DNA, 101 bp, Homo sapiens
cgctgttcgcggtgacggtggcgccgcccggggcgaggcagggccagcagcaggcgggagcttcggaaccaaaaagaagcttcccagagccggggccagga

SEQ ID NO: 459549 - DNA, 98 bp, Homo sapiens
ctgatttcctgcttctccttttcatgagtgttcctgtggtctctgcacctcctttctgttgtctgcattcaaaagagcattctattaaagctacctta

SEQ ID NO: 459550 - DNA, 101 bp, Homo sapiens
tgggcggccagagcgccggcaagagctcggtgctggagaacttcgtgggccggtctcggcgcggaagatggccggcggcgtggacggccccatcgggatcc

SEQ ID NO: 459551 - DNA, 100 bp, Homo sapiens
cgggcattgcctgcgaggctggccgagaaatcccgtattccagactccatcatttctcgtggtgttcaggtgctcccacgagacacagcctccctcagca

SEQ ID NO: 459552 - DNA, 75 bp, Homo sapiens
caggatcctgggcaggagcgaaggccggtctaattgaagccaacggagaactcaaggtcttcatagaccagaacc

SEQ ID NO: 459553 - DNA, 82 bp, Homo sapiens
caacaactgtactgggagagctaggatggaaaacatatccattaaatgggggcctgctttcttccccgggcgatgtgcagag

SEQ ID NO: 459554 - DNA, 74 bp, Homo sapiens
cagaaaacagaaatcgaaacagatacagagatgtaagcccatgtggatgaaaatactaggaaaagtttatttaa

SEQ ID NO: 459555 - DNA, 50 bp, Homo sapiens
acactgaaattcatcctgagatgaggtgtatgcaacagcgttattgcaac

SEQ ID NO: 459556 - DNA, 102 bp, Homo sapiens
ttttggggattccactctccagtgtaatgattattgacaacagaccaagatcactccatggatgaaatgacagctgtggtgaaaattgaaaaaggagttggt

SEQ ID NO: 459557 - DNA, 117 bp, Homo sapiens
tcagcgatgcaaatctgcaaacactaacagaatatttaaagaaaacacttgatcctgatcctgccatccgacgtccagaaactggcgatggaatatgagaggagccctctggaaaga

SEQ ID NO: 459558 - DNA, 75 bp, Homo sapiens
gcccggtgcccgaggaggcagccaagctcgtagcctgccactccgtgcatcttcaacttgctgctgagcttggga

SEQ ID NO: 459559 - DNA, 95 bp, Homo sapiens
agacggccatgtccgaaacctacgggccggtgcataaacttctcccgagttccatctcagtaaaagggaagcaggaagaccaagaaggtacgaag

SEQ ID NO: 459560 - DNA, 75 bp, Homo sapiens
aatagagttgagcctgtgggacacttcggatccagctatgggacacagcaggacaagaacgattcagaaagagca

SEQ ID NO: 459561 - DNA, 110 bp, Homo sapiens
gcaatatgccttcaccagctatggcattagcccacaggccaaggctgttgcttaccgtcagatgtctctgttgctccgccgaccccctggtcgtgaggcctatcctggtg

SEQ ID NO: 459562 - DNA, 50 bp, Homo sapiens
attactgatggctctccttccaaagcaccagagaaggaggaattcctggc

SEQ ID NO: 459563 - DNA, 100 bp, Homo sapiens
cggcgttggaggccaccgtttccagcttgatcatgatttaaaacatgctcacgaactccgccaggctgcattcaagctctatgcctctcttggagcaaat

SEQ ID NO: 459564 - DNA, 98 bp, Homo sapiens
tgcaacctttagactaatgactgtccgaaacatcgcctccatctgtaatatggagaaaatgcagaagtctccatggacgtttccctggcttaccgtga

SEQ ID NO: 459565 - DNA, 75 bp, Homo sapiens
ccgtcacctccgctcccccgatcctattcccagtcgtgtgctggagaatctggtaaaagcaccattgtgaagcag

SEQ ID NO: 459566 - DNA, 76 bp, Homo sapiens
gctggagaccttgacacttatatcctccctgggcccggaggctgtttgatgtcctgcacgagcccttcttgaaagt

SEQ ID NO: 459567 - DNA, 82 bp, Homo sapiens
cggactggaagatcaaaagaggatgtccctggtagatttgggaaagaagcttttagaagcggcacgagcaggtcaagatgat

SEQ ID NO: 459568 - DNA, 96 bp, Homo sapiens
ctcaggcgcctcttcttagttgatgatttagttgattctctgaaggtcgggaactacaagcggactgtgaagcggatcgacgatggccaccgcctg

SEQ ID NO: 459569 - DNA, 82 bp, Homo sapiens
aaagatatcgaggatttagccggaagacggtctggaaaatcccgaagcagaagcccgtattcatctaggcattcaagatctc

SEQ ID NO: 459570 - DNA, 83 bp, Homo sapiens
attgaagctgactactaaggagaataagtgagaaagatcagtctaaagaaaaggagaagaaagtgaaaaaaacaattccttcc

SEQ ID NO: 459571 - DNA, 100 bp, Homo sapiens
gcggtgcctgtggcagtgactttcttggatcgggtcgcctgtgtggcaagagtagaaggagcatcgatgcagctaatgctgcctaccttgggggccaaga

SEQ ID NO: 459572 - DNA, 86 bp, Homo sapiens
accatgtttgacaagacgcggctgccgtacgtggccctcgatgtgctctgcgtgttgctgggcagcataattcgttgtatgaggcg

SEQ ID NO: 459573 - DNA, 82 bp, Homo sapiens
tggacggcgagcgcgagcggcgcgagaaaaccctgtattcagtggatcagctggcaccacccaaatagataaattggcccat

SEQ ID NO: 459574 - DNA, 100 bp, Homo sapiens
attttaggaaaattccatctctttttgaaatagttgtaaaacctactgtggatttagcgcataaaattgggaggaagatgaagcagcaaaggaatttcag

SEQ ID NO: 459575 - DNA, 73 bp, Homo sapiens
aaaatgtgctgcctcgagagccgctggtaccattgttggatactggtgacatcatcattgacggaggaaattc

SEQ ID NO: 459576 - DNA, 100 bp, Homo sapiens
ctacatcctgcgggtgcctttgaaaatcaacgacaacttgagcacagagtgcagcagctgccccgagccccgtgcttggcaacattccccccaacgatgg

SEQ ID NO: 459577 - DNA, 96 bp, Homo sapiens
ctactgcagcagtgaagatgctgcccacctttgtgaggtccactccagatgggacagaaatttccatcgtgaagcctttaatcatcttacccaagg

SEQ ID NO: 459578 - DNA, 75 bp, Homo sapiens
ttcattgcaagttcttatttgtaaggaaggctcccctgttcctttttgctgacgtgtcatttctaagtactttct

SEQ ID NO: 459579 - DNA, 82 bp, Homo sapiens
gccccctacccgcttctcgtagtcctgggagcacagcagaagtccaccaaccgctaaaatgcacgccatcatcgagcgcacg

SEQ ID NO: 459580 - DNA, 83 bp, Homo sapiens
gcttctgtctcgactgcactttgagaagttcgcaacaaagatatgagttggcctgaggagatgtcttttatagcaaatagtag

SEQ ID NO: 459581 - DNA, 100 bp, Homo sapiens
gattgaaagcaaattattagctaagaaagcagaggttaatacaatccctggctttgatggagtagtcaagaaatgagccgtcagactgctacagcattac

SEQ ID NO: 459582 - DNA, 97 bp, Homo sapiens
gggaatgcaggaaagctaagaagaatcacacctcattgcaggatgatcgtggagctacatcgaaaggtctccagcctcatcgaattcttgaagcaga

SEQ ID NO: 459583 - DNA, 74 bp, Homo sapiens
tcatatgacattaacagacaagacacttttcagaaagacaggagtcgtaagaaagcagtgggagttgaagtcat

SEQ ID NO: 459584 - DNA, 90 bp, Homo sapiens
ccctggaacaagttgccggccaacgtgagacaggacaacagtagtagcagcagctgccttcttggacgcctttcagaaagtggctgacat

SEQ ID NO: 459585 - DNA, 83 bp, Homo sapiens
aaccgactaagaccccatttggagctgttagcaaacattgaccctagtccagtctggatgtggatagtgaagctaagaaacta

SEQ ID NO: 459586 - DNA, 90 bp, Homo sapiens
tttccacttcctaagggaagaaaagttttgggtgatggggacaacaagccaaagagaagggaatttggagaatttggatggagagacccg

SEQ ID NO: 459587 - DNA, 75 bp, Homo sapiens
cgcgctgctgggcacccacggagcctccggggctgcttgccttgcgccatggactggcagccagacgagcagggc

SEQ ID NO: 459588 - DNA, 74 bp, Homo sapiens
agaaggaagaggtgtttgaaaagttctaccaagatgtaaaggactggtggctcttcgggttctatttctgtatg

SEQ ID NO: 459589 - DNA, 75 bp, Homo sapiens
gtggactgcagtgaagcagagcttcctgaccgaggtggagcagctgtccagaaggtacatgaagcacaagcgcga

SEQ ID NO: 459590 - DNA, 75 bp, Homo sapiens
tgtcagccttcccagtagctgggaccacagaaaccatcatagcctttgcctgggaaccaaatggaagtaagtttg

SEQ ID NO: 459591 - DNA, 100 bp, Homo sapiens
atttttcttctctgggaaggtgaacatttgtagcattgatttcccggatctggtaacatggcaaaagatgtgacttaagagattaaaattaatttggttg

SEQ ID NO: 459592 - DNA, 100 bp, Homo sapiens
ctggggaccgaagaaagatcagccctttttggaaacatacaggatatctaccacttcaatagttcgagataagttgcgggagatagtaggagcatccaca

SEQ ID NO: 459593 - DNA, 103 bp, Homo sapiens
attagctgtcctgaggtcaaaacagacaaaatccactataggagtcatggtaacagcgtcccacaatcctgagattggtgctggtgaagagaagcaaaaggaa

SEQ ID NO: 459594 - DNA, 83 bp, Homo sapiens
aggagatggtggaggaggctgaagcgtccgtctccaagagagtatgaagagagtgcgtctgtagggcagggaagatggcggac

SEQ ID NO: 459595 - DNA, 83 bp, Homo sapiens
aaagggcagagcaaagactccagtaacactcaagcaaagaagagttgagcacaatcagccaaaacctattgatgtacaagtca

SEQ ID NO: 459596 - DNA, 75 bp, Homo sapiens
ctcaagtacaactcccggcacgagcaaaatgatgcttcaacacccaggccaggtctctgcctcggaagtgagtgc

SEQ ID NO: 459597 - DNA, 100 bp, Homo sapiens
ccgtgctggaccgcttttacaatgcagttgaccagatataccatctggcatctccagcctcccctccaaactacatgtataatcctatcaagacattaaa

SEQ ID NO: 459598 - DNA, 101 bp, Homo sapiens
cggaaggctccctcggtcgcgagtatctccgtttcctggatgtgaacgaacgtcaaggtcgtgggaaataaaaggcagttctacacagactgcagcaacgg

SEQ ID NO: 459599 - DNA, 100 bp, Homo sapiens
cacccatctggagcaaggaaaaaaaccttcgactatgcagagacatgagatggtagccaacccctcagaaacctctgtagaggagcaggatgcaaccgac

SEQ ID NO: 459600 - DNA, 101 bp, Homo sapiens
ggcggacaaaacgccaggcggatctcagaaggccagttcaaagttctatatccatttacagtcccaaggagaatccaaatgcatttgatgccgcagcattc

SEQ ID NO: 459601 - DNA, 82 bp, Homo sapiens
cggaggcggaggcagaggtggaggcgctttgaaagccgccaccggcacggccaggccagcatggtggaccacttacttccag

SEQ ID NO: 459602 - DNA, 100 bp, Homo sapiens
tcttccagaaacgcaagaagtacaacgtgccggtccaggtatcttggagatggccgcttccatctggagtctgtcatgattgccaaccccaatgtccccg

SEQ ID NO: 459603 - DNA, 100 bp, Homo sapiens
gatatgggcaggacttttgcctggggataacaggaggatttgacaacaaaatgatgttttctggcaaaggccttcctgcatttatgaattctctctcaag

SEQ ID NO: 459604 - DNA, 83 bp, Homo sapiens
cgcagtggtcgcttcttctccttgaactgggcacctccgggctgtgaaaagttagggaagtgtctgacacctccagaatccat

SEQ ID NO: 459605 - DNA, 83 bp, Homo sapiens
accaaacatttcctgccgctcggttgtgcagcctgactctgaagaagctggtggtcttcaaggagctggagaaggagctgatc

SEQ ID NO: 459606 - DNA, 100 bp, Homo sapiens
cgcagacggaggcggcggagccgggagcgcagttcagaggaatatccttgacttcccccagcatgtttccccctccaaggacatccggacagccagcaca

SEQ ID NO: 459607 - DNA, 82 bp, Homo sapiens
attttttggggttctctatggaaaggaagaggagagattatggttcttgatatggccaggaggacatctctagacttcgcag

SEQ ID NO: 459608 - DNA, 100 bp, Homo sapiens
agacagtcctcgtcagcactgactttcagctatggaatcgatcatgagcgtcttgttgttcatcgagcactcagtagaggtggcccatggcaaggcgtcc

SEQ ID NO: 459609 - DNA, 90 bp, Homo sapiens
tgggatccagcgatcctcccgcttcagcctctagagtagccgagaccacagttttgagtatccgaggagcccaggaggaggaacccacag

SEQ ID NO: 459610 - DNA, 50 bp, Homo sapiens
gccgatgaagtgcagaggtttttttctgcatctggaatcaagagacccat

SEQ ID NO: 459611 - DNA, 51 bp, Homo sapiens
cagctcaacacggcacttccacagggggctgaggccatggttctggagagc

SEQ ID NO: 459612 - DNA, 97 bp, Homo sapiens
agaggttagacttgtttcttatatgtgatgccattccagcactggactcatggaggctgagcatttattcaggtaactataactacccaatattgca

SEQ ID NO: 459613 - DNA, 75 bp, Homo sapiens
gccacgccttcctctgcaccaagcggaagatggttcatcatgcctagtggcgtataagaagaccccgccaccggt

SEQ ID NO: 459614 - DNA, 88 bp, Homo sapiens
cgcggggcccgcgcccggagctggcgccagacaagttggatggcttgaggactggtactaaaaggaaacgtgactgggaggccattgc

SEQ ID NO: 459615 - DNA, 90 bp, Homo sapiens
cgcgccgcagtcggtcgtccgctggacaagcacgagggcgcgctcgagacgctcctgagggttatatcctgtgttgtgacctcatggttt

SEQ ID NO: 459616 - DNA, 75 bp, Homo sapiens
ctgaaaacagaagttcacctgcacatcttgttttccctaacatcaagaatgcatttaaatcaaacggtattgaga

SEQ ID NO: 459617 - DNA, 89 bp, Homo sapiens
ctgagacccttgtgcctggtcacttccgctcccaggatccttgagatgcatcctttcctgagcccgaagctgccgcccatgctgtcgcc

SEQ ID NO: 459618 - DNA, 100 bp, Homo sapiens
cggaggacggggccgggcgacctgggcaccagcaggacccgaggccaggagccaggggcccagaaggagccaaggaggtcctgctgctggcccggtagac

SEQ ID NO: 459619 - DNA, 73 bp, Homo sapiens
actcttcactgggtttggctcaatggaggaattggtgctcctattgtacagacatttctcttgggaagttgtg

SEQ ID NO: 459620 - DNA, 75 bp, Homo sapiens
cgcatctatagtttccagatggctctaacctcagtggtttatcttgcagattatggactttcctacagatattgt

SEQ ID NO: 459621 - DNA, 101 bp, Homo sapiens
caaacccaaaagcttatgggagctggcacgtcacatataaagatgaagcgcagctgtataaagaagagcacctgaggaatcggcagcaccctcactgctac

SEQ ID NO: 459622 - DNA, 83 bp, Homo sapiens
tctaaaaatgtatgaacaccttttccctgagcttgttgatgattttcagacgcaaacatgcagatctttgtgaagaccctcac

SEQ ID NO: 459623 - DNA, 75 bp, Homo sapiens
cctggcctcgcttctgtcccatgagaaagatcagtctaaagaaaaggagaagaaagtgaaaaaaacaattccttc

SEQ ID NO: 459624 - DNA, 100 bp, Homo sapiens
agaggactctatacagggacgtgatgctggagaattataggaacctggtctccctgggagccaaaaacctgtatatcatctccgtgaaggggatcaaggg

SEQ ID NO: 459625 - DNA, 100 bp, Homo sapiens
gctgcccctggccctgcacctggtggattttcggaaaagacatatgaatggagctcagaagaggaggagccagtgaaaaaggcaggaccagtccaagtcc

SEQ ID NO: 459626 - DNA, 82 bp, Homo sapiens
aaggacttcggcgcgggactcaagtacaactcccggcacgagagctccacgcaggagatcggtgaggagctgatcaacggag

SEQ ID NO: 459627 - DNA, 101 bp, Homo sapiens
cgataaaggaactcaggcgcctcttcttagttgatgatttagttgattctctgaagagggttgaagaggaagcattggtcaagaatagcagtgcttgcaaa

SEQ ID NO: 459628 - DNA, 100 bp, Homo sapiens
ggcagcagagattaaaacagaatatcctgagaaagaggctttgatgacagtagggaaagaaccatttcctaccatttacgtagattcacaaaaagaaaat

SEQ ID NO: 459629 - DNA, 100 bp, Homo sapiens
cgtaagtgcgggcagagcactgcgccgtttgggaacgcaactttgaggagacagtgcggtgggccccccaaagatggcggacaaggtggtcccacggcag

SEQ ID NO: 459630 - DNA, 75 bp, Homo sapiens
tctggatctccgattgtcaagttctcgagcagcttctatgtccaggagagcctcagattattttttgtagaagtg

SEQ ID NO: 459631 - DNA, 98 bp, Homo sapiens
ccgcggcgtctccagcctcggtaccatggccgggatcatcaagaaacaaatcttgaagcacctctccagacatacaacagctgtgccagactctgctt

SEQ ID NO: 459632 - DNA, 80 bp, Homo sapiens
cctgtgacctgtggagacacggccagatctgccctccaacttcccagactcccggccagccatcgaggacctcaagtact

SEQ ID NO: 459633 - DNA, 99 bp, Homo sapiens
attgttggtctgctggtgggactcaatgttctcgatgccaatctctgcttgaaaggagaagacttggattctcagggtctcctatggacagaagtgcgg

SEQ ID NO: 459634 - DNA, 75 bp, Homo sapiens
ccaactactcgctggccagacatacttatgtagaagacagaagtagctcagggtcctgggggaatggaggacatc

SEQ ID NO: 459635 - DNA, 100 bp, Homo sapiens
ccggggacccttccgtatctgcctaggcattttgctgtctcctcctaatacgctgacgaagaatttgatgaactatgttttgaatttggtctggagcttg

SEQ ID NO: 459636 - DNA, 82 bp, Homo sapiens
ccagcctcagtcggacgggcgcggagacgcttctggaaggaccatcagcacgtgcccatcgacatccagaccagcaagctgc

SEQ ID NO: 459637 - DNA, 90 bp, Homo sapiens
atacacctctgattttaatcagttctgcgtttgaaaggaaacccggttatgaagacagtatggagtttccagaccatagtagacatttgc

SEQ ID NO: 459638 - DNA, 100 bp, Homo sapiens
caagtggacatgcaaagcttgtggagagaagcagtcctttttgcagatgccttcaattaagttgcagagttctgatggagagatatttgaagttgatgtg

SEQ ID NO: 459639 - DNA, 75 bp, Homo sapiens
tcaagagcttcaaggaaatgaagtttcctgcagtgacctcctccagccgccaaatccgcaccaaggtcatggatg

SEQ ID NO: 459640 - DNA, 100 bp, Homo sapiens
cgggacccagggaaggcagcggccggagcgcgcaaggtaccaggatcatctatgaccggaaattcctgatggagtgtcggaactcacctgtgaccaaaac

SEQ ID NO: 459641 - DNA, 100 bp, Homo sapiens
atggaatccaagggggccagttcctgccgtctgctcttctgcctcttgatctccgccaccgtcttcaggccaggttgatggacggatggctacatggatg

SEQ ID NO: 459642 - DNA, 88 bp, Homo sapiens
cgcggacgcgtcatcgagtgtgacgtggtgaaagtgtctccagaacgctatagctatggcacctccagctcttcaaagaggacagagg

SEQ ID NO: 459643 - DNA, 75 bp, Homo sapiens
cttcttatggccagagccagaacagtggggcaggggtttcgggctggtggagcatgtgctgggacaggacagcat

SEQ ID NO: 459644 - DNA, 75 bp, Homo sapiens
ggagacgacgctgctgggtccgctgagcggggcgacccgaggtgactgctgaggttggaaagctcttgggtgaag

SEQ ID NO: 459645 - DNA, 95 bp, Homo sapiens
cagcttccggcgtgacgcagtagaaaaggtggcgtggctggcgattcgtgttcgtgagggccttttctgctccggaccaaaatttaacagtgcca

SEQ ID NO: 459646 - DNA, 75 bp, Homo sapiens
gaatgacaaacaaccagctcttcagacatatctgaagagatggattaagaatgctttggattaaggattgtggag

SEQ ID NO: 459647 - DNA, 100 bp, Homo sapiens
gaaagatttgacagcaactgtattacaccaatccttcaaacatgatgtgagaggaaatgcgcgagccatgatgaaattaacgaacagtgctgaagtagcg

SEQ ID NO: 459648 - DNA, 123 bp, Homo sapiens
tccgaaatgttagaaaccctctcagatgatgatttcgtgaatgtagcttcagtaaaagagtggctctgtttgaactgtcaaatgaaaagagctctaggcggggatctggctccagttccgtca

SEQ ID NO: 459649 - DNA, 74 bp, Homo sapiens
actcagcagcaagcacagagtatgaccaccactattaactggctccaaggctgcatctctccactggactagcg

SEQ ID NO: 459650 - DNA, 100 bp, Homo sapiens
tgcaagtcctgacagattcagcaacactacgcagtaaaacgcaggactcttcccgcttggattcgcgaaggtcttgaaaaaatggaacgtgaaaagcaga

SEQ ID NO: 459651 - DNA, 51 bp, Homo sapiens
cgcctcccgagaagaagttgaggcgctatgacccagatgatgtggtaccag

SEQ ID NO: 459652 - DNA, 99 bp, Homo sapiens
cgccatctggcatctctttgtagcatttggtgctggtacccactactatgccatctggagaaatcaacgaccgggagcagaagttgcatgcccttaagg

SEQ ID NO: 459653 - DNA, 74 bp, Homo sapiens
ggatcgaagtggtatcaccccaaaaggattagggccggtgcataaacttctcccgagttccatctcagtaaaag

SEQ ID NO: 459654 - DNA, 100 bp, Homo sapiens
aggcagtgaagcgaagaaaaggatcccagaaagtttcaggacttggcctttaccctggaagagagacagcaattgaacattcatggattgttgccacctt

SEQ ID NO: 459655 - DNA, 100 bp, Homo sapiens
ggaaaagatggcggctgccgcacaatcccgggttgtccgggtcctgtcaatgtcacgtctcgaatttatttggaagggaaaatagactatggtgaataca

SEQ ID NO: 459656 - DNA, 75 bp, Homo sapiens
cccggatctggtaacatggcaaaagatgtgtggaagatttccttacaagggccgtgttacatgacactgttaatg

SEQ ID NO: 459657 - DNA, 98 bp, Homo sapiens
gtggacacccagcctgagcaagcgccacagaagcctcgtctcctggaggaaaatgctttctctcctttgaaaacactaagaataatgtcactgcatca

SEQ ID NO: 459658 - DNA, 100 bp, Homo sapiens
catccctgtggagattgatggggtggtccaccagaaggaagcccggtgccagccagccttcctgaaagaccaagcccgcgccatccggcttcctccagtg

SEQ ID NO: 459659 - DNA, 101 bp, Homo sapiens
ggtggagccaccagcctctccctgttctggatgacgccccccctggcacacaggaatacattatgttacgacaagattccatccaatctgcggaattaaag

SEQ ID NO: 459660 - DNA, 100 bp, Homo sapiens
ggaacacttcagtgcattcaaggtattgggagagttgctgctacatctttaggaaatttgactaaccatggttctgaagatttaccccttcctcctggct

SEQ ID NO: 459661 - DNA, 144 bp, Homo sapiens
cggcgcccagtgcacggccgcaccatggggtcccgccacttcgaggggatttatgaccacgtggggcacttcggcagcttttgcgagaattgaagcaccctaatgtgattgcattgcagaaggtgttcctttctcacagtgaca

SEQ ID NO: 459662 - DNA, 87 bp, Homo sapiens
ggcattggaacttcctgttctgatagcgtggaaggattgatttccagagacttatgttacttgaggaagacaccaagaaggcaaaga

SEQ ID NO: 459663 - DNA, 100 bp, Homo sapiens
atggcggcggcctgaactcacctaacaccgcagcagcaaccgggcccggccaggttcggcgttccgtgagtgaacgtactatactggcaattgctggaga

SEQ ID NO: 459664 - DNA, 75 bp, Homo sapiens
tctcttgtcacagcttaagctgggcatggatttaacaagaaccaagatcactccatggatgaaatgacagctgtg

SEQ ID NO: 459665 - DNA, 90 bp, Homo sapiens
ctgcgggactgcggcggcgccggcctccggggagaaacgtttgcagctcaccttgtgaagatgaaatatccaagaatctgtattctagat

SEQ ID NO: 459666 - DNA, 82 bp, Homo sapiens
tcgggacggaggacgcgctagttaagactttgaccccgacgcaggcttcagtgattgccgcggatcagaagcctgagcactt

SEQ ID NO: 459667 - DNA, 153 bp, Homo sapiens
tacccaccccaaactggatcctacagccaagctccaagtcaatatagccaacagagcagcagctacgggcagcagactgcatcaggagatatgcaaacatatcagatccgaactacaccttcagctacttctctgccacaaactgtggtgatg

SEQ ID NO: 459668 - DNA, 95 bp, Homo sapiens
cttgaagatgatttacttggagaagatttgctatctggcaaaaaggtgaaaagccatacaagtgtacctgggaaggctgcgactggaggttcgcg

SEQ ID NO: 459669 - DNA, 82 bp, Homo sapiens
tcagagcggtatccctgtctcagcgaagtggtgaaagagcatcaggatttttagactctgaggagcagttggagctaatcca

SEQ ID NO: 459670 - DNA, 75 bp, Homo sapiens
ggagcaatgatgtagccacctcctaaccttcccttcttgaacccccagccaacagaagctgttcttccctctcct

SEQ ID NO: 459671 - DNA, 83 bp, Homo sapiens
ggttgtcaaaccgcaggcatttcaatcacattatgcctttctgagaaaagtctacagcattctttctctgcaggttctcttaa

SEQ ID NO: 459672 - DNA, 75 bp, Homo sapiens
atctgatgaaaattctcttcattctcttggactgaacttaaatactgataggtgaggcttgtaccattgttttgc

SEQ ID NO: 459673 - DNA, 90 bp, Homo sapiens
acctaaagtcgcacctgcggacgcacacagggtttccaggcctgaggtgcccgccctggccccaggagaatgaaccagccgcagaggatg

SEQ ID NO: 459674 - DNA, 83 bp, Homo sapiens
ataaccgtccccgccagtcagaagttgagtttgccagggtttggatacctgatccagaggaagtctggaagtcagcagagctg

SEQ ID NO: 459675 - DNA, 100 bp, Homo sapiens
aagatcgcttaccctccgggggtaaaagagatcaccgacaagatcaccacggacgagatgatcaaacgcctgaaggtggatttgtttaaaaagagtcttc

SEQ ID NO: 459676 - DNA, 83 bp, Homo sapiens
cgcagtttctcacgacgggccgagcctgccactgtttgtcctggttgtggtcaagactggatgatgtaactggctctctagga

SEQ ID NO: 459677 - DNA, 50 bp, Homo sapiens
tggcaaagatgagggggattcttaagatgttggggatcagccaggtgagg

SEQ ID NO: 459678 - DNA, 75 bp, Homo sapiens
cttcagaagaccgaagcgttcgtatctggaaggtcaatgagctgaaggagaaaggcaacaaggccctgagcgtgg

SEQ ID NO: 459679 - DNA, 98 bp, Homo sapiens
ggcgacccagcccccgcccgcagcctggacgacatcgacctgtccgccctgcggaacgtggtgaagctgatgcgaggtcttctccagtgcatgatgag

SEQ ID NO: 459680 - DNA, 102 bp, Homo sapiens
gaaggaacgaggcaaggagctaaagcagcgtgcgttcagccctggggtagagaatggagccgaatacatcttggagaccatcgactctctgcagaagcactc

SEQ ID NO: 459681 - DNA, 144 bp, Homo sapiens
agatatgggatgctggaggacatctgggggccacaaatgctccttctcctggagacgcaactcaaggattcaaaagattcttctcttttggagagtgatatgaaacggaaaggcaagctaaagaataaaggaagcaaaaggaag

SEQ ID NO: 459682 - DNA, 97 bp, Homo sapiens
attaacagtgcgtatttgcctgaagaaggtcagtgtgcttgcttggagatcaggacgcaaagacgtactctggcctcttctgcgtggtggtcaaccc

SEQ ID NO: 459683 - DNA, 101 bp, Homo sapiens
gggtccacctcaccatcaacggtgtacacttaaagcgttctgggaatatgaatcccttctgcaccctggaatcaccagtccagccatgcatggagctgggg

SEQ ID NO: 459684 - DNA, 83 bp, Homo sapiens
cttcggcagtccacccaccgccgccgcctcccagtgaagtacctggctttcctccgcaagcggatgaacaccaacccttcccg

SEQ ID NO: 459685 - DNA, 100 bp, Homo sapiens
atgtatcccatagctgtgagtggcgatcacgagaacaataagtgtctgcagaacccatccagcgacatcaggctggtggctgagaagatgatctggtggg

SEQ ID NO: 459686 - DNA, 100 bp, Homo sapiens
cgaagtgtactagccaaggagttgaagtttgtgactttgggaggaataagtttttttcatctgtaatttggaagccaagtcagtaacaaaatgaaaccag

SEQ ID NO: 459687 - DNA, 100 bp, Homo sapiens
cctcccggagcagcatggacggcgcgggggctgaggaggtgctggcacctctgaggctagcagtgcgccagcagatgatgattattccccaccttctaag

SEQ ID NO: 459688 - DNA, 82 bp, Homo sapiens
gacgggcatgccaagaagatgagaccgggggaggcgacgctaagttgctgatcgtggcggaatactcccccagttgcaagag

SEQ ID NO: 459689 - DNA, 90 bp, Homo sapiens
ccaggagctggcatgacgtgcaggtctctagcgcgtagtgtcccagaagcttttgttgacaattccagtttccgaacaaaacatttcggc

SEQ ID NO: 459690 - DNA, 50 bp, Homo sapiens
gctgctttaaccctgatgagctgataagacttaatgaacaagccagtgag

SEQ ID NO: 459691 - DNA, 82 bp, Homo sapiens
cttcaggtcacgctggtcgactgccccgggcacgcctccctcatccggaccatcatcggcgtgcagagcagagcgggcggag

SEQ ID NO: 459692 - DNA, 100 bp, Homo sapiens
gcagaagcggcagcggcggcggcgcggcgcaggcaccggcccggggagaggcaccatgagcggtgcccctgtagacaatggccctcgtgtctgccgattc

SEQ ID NO: 459693 - DNA, 51 bp, Homo sapiens
tggacttcaccaggatattgaagaggggctaaactgcacggtcaagaatag

SEQ ID NO: 459694 - DNA, 75 bp, Homo sapiens
gttacccaacagcactatctacgtggtcgaacctggatacctaggacagaaactggtgagtgactgcacagagtt

SEQ ID NO: 459695 - DNA, 100 bp, Homo sapiens
caagttttgagagatcccggttttctagcaggtcatcttccaaacagcaatcatttggggaagaatctacagttgctgatggacagagtggatgaaatga

SEQ ID NO: 459696 - DNA, 83 bp, Homo sapiens
gcaagtttgtccggctgcgcaacaagtccaatgagctgcgggtcagattccagccactgctcttctccccaccatgacccctg

SEQ ID NO: 459697 - DNA, 100 bp, Homo sapiens
cggcggcggcaccaacggcaccaactattcgcggagctggaatgactggcaacccaggtcatcatcagatttgaaatatttaaagtggatacaaaactat

SEQ ID NO: 459698 - DNA, 100 bp, Homo sapiens
tcctagttgcagtcaggcttcatacgctattgtcctgcccattctctaaccatggcacaggtagagaaacgtggaggtttgctccggaaatcttcagcct

SEQ ID NO: 459699 - DNA, 100 bp, Homo sapiens
ctcaaagagtaccttgttccaatcccagggggaccgccgactggtttggagtgagcaaggacagtgacagcacccagaaatggcagcgcaagagcatccg

SEQ ID NO: 459700 - DNA, 100 bp, Homo sapiens
cggacagctcaattagccaagataaaatgggtgataagtgtcgctttctacgtattgcaggaagtgtttggattgtgagctatttcagaactgttctcag

SEQ ID NO: 459701 - DNA, 100 bp, Homo sapiens
ggccgacgaggctgccgaagacagtggtgaggagggcgcccctgaacctgcaccagctcttttaaaggatctgtcttctcaaggagcctagttggctatg

SEQ ID NO: 459702 - DNA, 75 bp, Homo sapiens
accacagtggaccagctcgagtctcaagtggacaatggtgcatcatttctggcatggcttcaggaagcattgtgc

SEQ ID NO: 459703 - DNA, 100 bp, Homo sapiens
cgcaggcggccgcacaggttccaggtctttaacgtgagcccgctgcaggtgtgcggcccagtccgagacagcagcctgaagagttgagagaaatcattga

SEQ ID NO: 459704 - DNA, 90 bp, Homo sapiens
atgctcagagatgccaagaagaatctagacagacaggcctttctaggtggaatatgtgatcaagtgtgacatgtcagctctgcagaagat

SEQ ID NO: 459705 - DNA, 76 bp, Homo sapiens
ggccgggttgccagattacggattccagaggggtgactaccatattgatgtctgtatcaatgactacctggatgtt

SEQ ID NO: 459706 - DNA, 100 bp, Homo sapiens
ggatctccttcccagccttcagaaattgccggtctgggagttgggggcaaggagaagatcctggatagcagtgagattcacttcaaagtgaaaatgacaa

SEQ ID NO: 459707 - DNA, 83 bp, Homo sapiens
gctgcggttgctcctgcctcgagtgcgggattattcactgaccagcgctgacctgtcagcccttcaaggcttcaactcgccag

SEQ ID NO: 459708 - DNA, 107 bp, Homo sapiens
ggagggtccgagccagccgctgttttgccggaggagcccctcaggccgtgtcgtgaaaactacccctaaaagccaaaatgggaaaggaaaagactcatatcaacatt

SEQ ID NO: 459709 - DNA, 100 bp, Homo sapiens
ccgccatggcgtccaacatggaccgggagatgatcctggcggattttcaggaaaagagcactggttgccattggtacccatgatttggacactttgtcgg

SEQ ID NO: 459710 - DNA, 71 bp, Homo sapiens
ggagcgcaaaggcatgagcaagaggcgactgcaagagctgggctgaagctgccctcgaggacctggtctcc

SEQ ID NO: 459711 - DNA, 90 bp, Homo sapiens
aagaggaccccgctgctaactcggctacaacatttggcagagacgccctgctggcggacttggagtctaccacctcccacatctccaaac

SEQ ID NO: 459712 - DNA, 74 bp, Homo sapiens
ctgtttctcatcatcaccaaacgaaatgcactcggtgatggaaagagagccactattctgaagaacacttggcc

SEQ ID NO: 459713 - DNA, 100 bp, Homo sapiens
tacattctctcggccagcgcctccgcggaaagaccacagcaagattctttcattcgtctcctcctagcctgggggaccaggctcgaactgaccctggaca

SEQ ID NO: 459714 - DNA, 100 bp, Homo sapiens
cggcggcaggcggcagaggggaggcattgaagttgatatcgatgtggagcacggagggaaaagaagccgcctgacccccgtctctccagagagttccagc

SEQ ID NO: 459715 - DNA, 82 bp, Homo sapiens
gaacaggactgttttattcttggggactggagatggccagttacttaagaattcagaaggagctggcggacatcactttaga

SEQ ID NO: 459716 - DNA, 82 bp, Homo sapiens
agaagagttggaggctgaaattggcagatacccatttaagcaccactgggagtctgagtgcgattcagaagatgacgcgggt

SEQ ID NO: 459717 - DNA, 75 bp, Homo sapiens
cctggaccccaaaattaccgaacaacaagggaggtgtcacagttttccatttagatcaacaacttcaagttctta

SEQ ID NO: 459718 - DNA, 97 bp, Homo sapiens
cggaggatcgactgggaaaaactggagaacagggagatccagccaccattcaagcccaaagtggatgattgtcttttgaaagtgtggtatcctatga

SEQ ID NO: 459719 - DNA, 75 bp, Homo sapiens
gcctctcagaagaaaaaagagtcaagacctggcctaggaagctgtggatcggaaaaggaccacttttattctgat

SEQ ID NO: 459720 - DNA, 100 bp, Homo sapiens
ccggcccgggcgagcgggtgcgtctgccgcagagtcggcacctgaaggacatggaggccaagaagacgctggagggaggctgttaggagggactctgagc

SEQ ID NO: 459721 - DNA, 101 bp, Homo sapiens
atcgatgtttcaatattggaagcgctttgatttacagcagctgcagcacaacaagccgctctactcctttgaagacaatgcagactatgtgtacgatgtca

SEQ ID NO: 459722 - DNA, 100 bp, Homo sapiens
gtagaagttctcttccctacatctgtgagatgacagctttcaggtttccagattaggacagtcctttgcactgagttgatgcagttcttaatgaagctgc

SEQ ID NO: 459723 - DNA, 100 bp, Homo sapiens
cagggcagacgttagcgtgagtgatcactctcaatcccgggaggagtatttgaagacttctgagcggaggagtcgcatgtcagagctgtccttcagaaag

SEQ ID NO: 459724 - DNA, 82 bp, Homo sapiens
ggactcgatggaccgcggctggcaaacaatgcagatcttcgtgaagactctgactggtaagaccatcaccctcgaggttgag

SEQ ID NO: 459725 - DNA, 76 bp, Homo sapiens
gtccagcccagcgattctcagtcagggaactctaatgatccaggacaaagaagttaccctggagtatgtatcaagc

SEQ ID NO: 459726 - DNA, 101 bp, Homo sapiens
ttgggggcagtcctctacgagatgctccatggcctgcttcagcgcctgctcctggtcatcactaaccagatttacttggagtacatgtgaaagaaaacgtc

SEQ ID NO: 459727 - DNA, 83 bp, Homo sapiens
gccgccgtcggcagcaagaacagagagagaggtggacagatctgagagatactgagagcccaaatcttgtgacaaaactcaca

SEQ ID NO: 459728 - DNA, 87 bp, Homo sapiens
cggtacagtctctgcacctcgcgccccagcaggacctagaagaatcccttaggatgaagctgagtcttaccaaggtagttaatggct

SEQ ID NO: 459729 - DNA, 75 bp, Homo sapiens
tagaggagtttcaaggacaagagtatctggtcatcatcatttcgaccgctccccacaggtgcaggaagccgccgc

SEQ ID NO: 459730 - DNA, 82 bp, Homo sapiens
agagactaccacgtggagtgttaccactgcgagtgcctccggagccagcgtggtggccatagacaacaagatcgaacaggcc

SEQ ID NO: 459731 - DNA, 90 bp, Homo sapiens
attgactggaaacaatggcatttacagaaagagtcaacagcagtggcaacagcatgttggcagataaattgaacatgactccagaagaag

SEQ ID NO: 459732 - DNA, 96 bp, Homo sapiens
tggtgaaaaaggaagaattgacccttgaaggaatcaaacagttttatattaatgttgagagagagatggctgatcactgggaaactgcacctcgtc

SEQ ID NO: 459733 - DNA, 82 bp, Homo sapiens
ctctcggactgagaaacgcaagccactgttccatccctgacccatctttgtcgtttggaaattcggtccagtctaaaatcag

SEQ ID NO: 459734 - DNA, 75 bp, Homo sapiens
agcttcccagcctaccactggaccctctgctgcctctccaggatctgtgccagttcagaagcaggcgagcctctt

SEQ ID NO: 459735 - DNA, 75 bp, Homo sapiens
cagcggctctttgtatgatgacgtttacccaaggtccagcctagcccctaggcaccatgtcggacagtgatctag

SEQ ID NO: 459736 - DNA, 108 bp, Homo sapiens
cacacgggcgagaagccctacgagtgcaacatctgcaaggtccgcttcaccaggagccttcacgtaaatgggtccagtcatgcctcccagtaagaagccagaaagctc

SEQ ID NO: 459737 - DNA, 123 bp, Homo sapiens
ggagtcagcaaagacagccgcccagaacctgtacgagaagacatacctgcccgctgtagatgagaaactcagccatggccaacactcctcaagaactggcagctcctggcagtcaaccaccca

SEQ ID NO: 459738 - DNA, 100 bp, Homo sapiens
cggaatccccctgccatcctatgtctttgcattattgcctcactaccacatatgatcttcagaagaaaacctggcagtaacagccctcatgggagcccca

SEQ ID NO: 459739 - DNA, 78 bp, Homo sapiens
tgttcaggaaatggctgaagttcgtaaagatgatgttgtaacagtgactgcatcaagcttctagctgtgcaagaactg

SEQ ID NO: 459740 - DNA, 90 bp, Homo sapiens
caagagccttggggaagacagttggaagctcagacatgaacattgatgatggcacctcagatcgcccctacagccatgctctggtggctg

SEQ ID NO: 459741 - DNA, 100 bp, Homo sapiens
tttcatgatattcctctgaaggtgaactctaaagaggagcaatgttcctttagttgggactgggggccttcctttcctacccagggaatctggaaagatg

SEQ ID NO: 459742 - DNA, 75 bp, Homo sapiens
gaacgtgctcttcgctcacctggatgacaacgagaggaggcagtttcccagctacctcgagacggtgacaaagga

SEQ ID NO: 459743 - DNA, 90 bp, Homo sapiens
ttggcttggtacagatggaaaagaccatcaatcaggttaaaaagatcaagtggcatgagcagccttttggggaaaattggtgccaagaag

SEQ ID NO: 459744 - DNA, 101 bp, Homo sapiens
acagagaagggagctctatagtcggagtggagaactgcaagattattgctcagttgtaactattgtggaccagacaaatgtaaaactaacttgcctgctct

SEQ ID NO: 459745 - DNA, 100 bp, Homo sapiens
ggcaaggatttggacggtttctcattgatttcatactatactggcaattgctggagaagattttgcaattgttgcttctgatactcgattgagtgaaggg

SEQ ID NO: 459746 - DNA, 51 bp, Homo sapiens
ggcagccaccccatctgggaagcccagagccatggctatctcctcttcctc

SEQ ID NO: 459747 - DNA, 78 bp, Homo sapiens
tttttgaaatgtttcttgcccttcctggagcagaggagccattatttatgcagatatccgccaggcatcgtgggtgtg

SEQ ID NO: 459748 - DNA, 100 bp, Homo sapiens
aaatgcaggagcaggaggaattgctggtgccttcattcatgaaaagcatgcccatacgattaaacctgcatttggagcaagaggtggtggtggccttccc

SEQ ID NO: 459749 - DNA, 80 bp, Homo sapiens
ctctgcgctggccgggggcgcgggcggcggcgccggcaggaagatgatcacggaagccttggcccaaggtgggatgcaca

SEQ ID NO: 459750 - DNA, 101 bp, Homo sapiens
gaaatcttcacctcagatgatgttgatctcgttttgagaaagtcagctgctgaacagttagctgtgattatgcaagggctacattgggctcccagggctct

SEQ ID NO: 459751 - DNA, 83 bp, Homo sapiens
ctgcggtggcagctgctgagttctcggtgaagaaatgcactcggtgatggaaagagagccactattctgaagaacacttggcc

SEQ ID NO: 459752 - DNA, 116 bp, Homo sapiens
gccgtgcccgccgaccccacaggaaggcctggacgacggcccggacttcctctcagaagaggaccgcggacgtgtgaaggcaaagaagaatgctgctccattcagaagtgaagtct

SEQ ID NO: 459753 - DNA, 75 bp, Homo sapiens
aaatgggtctgaaatggcatctgccacattatttaagaaggtggccgacatgaaaaagaagatggaggacagtgt

SEQ ID NO: 459754 - DNA, 95 bp, Homo sapiens
tccaccagaaaacttgatcacatcaatatctgcagttccaatttcccaaaaagagcgtgcaatggaattgagttttgccctggtaaatgggaata

SEQ ID NO: 459755 - DNA, 90 bp, Homo sapiens
ggaagaggcattgaggactttccttacctgtttttccagctcacccactgccagcagagatcatgcatgcattttcagttgctccttttg

SEQ ID NO: 459756 - DNA, 74 bp, Homo sapiens
ccgacgcgactgggcccctcaggagccaaaaacctgtatatcatctccgtgaaggggatcaagggacggctgaa

SEQ ID NO: 459757 - DNA, 100 bp, Homo sapiens
atgaaatcaaaaggcagaaccagtcccttgtgtatggcaaagtggatagcttctggaagaacaccttccaccatgaccacctcagcaagttcccacttaa

SEQ ID NO: 459758 - DNA, 102 bp, Homo sapiens
agctgaaggagcacctgcgtcttgccatggccgccctccaggagaaggagtcgatgcgcaacagcctggctgagtagagccgcctgccttggcctcccaaag

SEQ ID NO: 459759 - DNA, 76 bp, Homo sapiens
catgtattggagaccagaccagaagcccttctgaattaagtgtgtgagaactgcatggagatggatgtgatgtcgg

SEQ ID NO: 459760 - DNA, 74 bp, Homo sapiens
agaagcgcttcgtacccagccagcactataattaaacaaccaccatgtcgagcaaaaaggcaaagaccaagacc

SEQ ID NO: 459761 - DNA, 100 bp, Homo sapiens
ctaaattattctgcaagacaaagggaagaaataaaattttcccatactgagatcatccagcagctcgtcaacggcatcatcacgcccgccaccatcccca

SEQ ID NO: 459762 - DNA, 82 bp, Homo sapiens
gcagaacccgggagtaggagactcagaatcgaatctcttctccctccccttcttgaaaactttagaaactgttcctttggag

SEQ ID NO: 459763 - DNA, 88 bp, Homo sapiens
atctaccagtgcttcgtgtggagcggcacggctgaggcccgcaagcgcaaggtgctactcgtgagcagtagtcgccatccagacagat

SEQ ID NO: 459764 - DNA, 100 bp, Homo sapiens
cgcaacaagttcaaccaggtggagagtgataagcttcgaatggacagagccatccctgacacccggcatgaccactgagtccacctcaggacgaggccag

SEQ ID NO: 459765 - DNA, 100 bp, Homo sapiens
ctatcaatgccatatgtgttaattccacccacatttttactgcagctgagtgtgaaaatgaaaccaagttcaaaacagaagatatattttgggcttacaa

SEQ ID NO: 459766 - DNA, 89 bp, Homo sapiens
tataaatacgatgttgcagctcagccctgaagaaaagggaaaacttgctgcggttgctcaagaatcccgtcacggggctgctgtcagcc

SEQ ID NO: 459767 - DNA, 75 bp, Homo sapiens
ccgagatctacgagttccatatatcccagaggcatccttcctggaggaagaggatgaagaccccatcccacccag

SEQ ID NO: 459768 - DNA, 100 bp, Homo sapiens
ggcgggtgtgcgcgactcggggtgattcacgccggggaccccaaggagccacaatggtgcgcatgaatgtcctggcagatgctctcaagagtatcaacaa

SEQ ID NO: 459769 - DNA, 50 bp, Homo sapiens
gtggagatatggcgcaactgcggcgcataacgaaggaggcccaacttcat

SEQ ID NO: 459770 - DNA, 75 bp, Homo sapiens
tgcgtcaagtacactgaaattcatcctgagatgagggacctgaagttggacaatttgctcctggacaccgagggc

SEQ ID NO: 459771 - DNA, 75 bp, Homo sapiens
catggaggacgaggagagacagaagaagctggaggccggcaaagccaaggatcaccccttctgtgtcattctctg

SEQ ID NO: 459772 - DNA, 83 bp, Homo sapiens
atatgacactcctcccggacccctggacacacacagccctggagactggaggtcttccccagggaggtcctgaactacacagc

SEQ ID NO: 459773 - DNA, 99 bp, Homo sapiens
gcacgggctgtctgattctccttcgctgtggcgggaagatggccggatttgaaggaacccaagacagaccaggatgaggagcattgccggaaagtcaac

SEQ ID NO: 459774 - DNA, 83 bp, Homo sapiens
gagttggaaaatgaaaggaatcagtatgaatggaagctaaaggccactaagctgcgtgacttcctgttggtctacaatcggat

SEQ ID NO: 459775 - DNA, 74 bp, Homo sapiens
gtgctggaaaagtgagaggtcagactcctaaggtggcaaattacatcaaggagcagtcgacttgcaacttccag

SEQ ID NO: 459776 - DNA, 90 bp, Homo sapiens
agccctttctcctcggcactgtattctttacctgcttcccaatcccactgatgaggatcagcccatggaccgtataatagacgctggccc

SEQ ID NO: 459777 - DNA, 101 bp, Homo sapiens
ctggcagatattatcatagttgctgcaggaactgcaagcacatgttgaccagataactgaaatggcagcagtaatgaggaaagccattgaaattgacgagc

SEQ ID NO: 459778 - DNA, 100 bp, Homo sapiens
gatgttgtcaactctgtgggaagaacagcagctcagatggcagcctttgtgggtctcagtggcccttagcagcagctccattcgtgtggccatgctggag

SEQ ID NO: 459779 - DNA, 75 bp, Homo sapiens
tgcctggaggagaatcaagagctccgagctctgtgggcaccttcgcacgggccctggactgcagcagctccgtcc

SEQ ID NO: 459780 - DNA, 95 bp, Homo sapiens
tcccaccgccagctggaaccctggggactacgacgtccctcaaaccttgcttctaggagataaaaagataatgttaattcaagactctcgaagag

SEQ ID NO: 459781 - DNA, 82 bp, Homo sapiens
aagacgaagttgatggcctggagaagaaagatgttttgcctactgttgatccgacctcttcttgggtgaatttggtattgtg

SEQ ID NO: 459782 - DNA, 82 bp, Homo sapiens
tcctggttctggaatcctcagttcaaggaggatacgaagcgttttcggcttcctgcccggagctgtgcagcaaacagtcgac

SEQ ID NO: 459783 - DNA, 82 bp, Homo sapiens
cggctgcagtgctgacaccactcagggcaagggtgtccgacggctggagcgctcagctcacctatgaaccccgtcagcagca

SEQ ID NO: 459784 - DNA, 75 bp, Homo sapiens
tgtggcctgcaggtgacatgctgcctaagagaagcaggcataattatgataagacatttctcatctggataaatg

SEQ ID NO: 459785 - DNA, 90 bp, Homo sapiens
ggagaattataggaacctggtctccctggatgatgaacaacatgggtggtgatgaggatgtagatttaccagaagtagatggagcagatg

SEQ ID NO: 459786 - DNA, 82 bp, Homo sapiens
ccagtcggtgctccggggaggtcacctgacgaggaggggatttgggagcagcttgtcttacacaaggacgaaggaaaaggtc

SEQ ID NO: 459787 - DNA, 75 bp, Homo sapiens
gctagtcctggtggatctgcagtacgaaggtatacaaaactaggatatgctggaaatacagaaccacagtttatc

SEQ ID NO: 459788 - DNA, 50 bp, Homo sapiens
ttgagggactatcccagcagtcgaggaaggctttgtgatacctgatgaag

SEQ ID NO: 459789 - DNA, 100 bp, Homo sapiens
ctcagggagccgggacgcgctgcctgggctccgcgcagccgaatgattacggacctgaagccaaagaacaagatgcgctagtggacagattgctgaccag

SEQ ID NO: 459790 - DNA, 50 bp, Homo sapiens
gttcgctacacagcaatgcatcgagaataccgtagcagtaggcaggacag

SEQ ID NO: 459791 - DNA, 51 bp, Homo sapiens
ctggaggtggatctgaagaacgggtaagaatgattgatgttggctgatatt

SEQ ID NO: 459792 - DNA, 83 bp, Homo sapiens
cttttcaagacaccaagtgagaggccaaccagtggtatgtgtgcaacagagagaaattatgcgaatcactccaggctgtcttt

SEQ ID NO: 459793 - DNA, 75 bp, Homo sapiens
tggaaaaaacttgtttaatgggtgttggggatgtcctttgcactgaccctgaactgccagattgacaaaaccagc

SEQ ID NO: 459794 - DNA, 75 bp, Homo sapiens
ccccaccatgtcagacgcagccgtagacaccagctccgaaatcaccaccaaggacagctggcctgaagctcagag

SEQ ID NO: 459795 - DNA, 82 bp, Homo sapiens
tggctccctcagaagcatcgtgaaaagcctccttctggttccaaatggtcaaaatgcagatcttcgtgaaaacccttaccgg

SEQ ID NO: 459796 - DNA, 100 bp, Homo sapiens
tgtggatgctttgaaatctgataagaaagtacggaccataataatcaggagtgaagtcccagggatattctgtgctgttacatcatgctgatgacagctt

SEQ ID NO: 459797 - DNA, 87 bp, Homo sapiens
cagttagaggaggcagaagatttctggccagtggagagaggaattcctcaagacaccattccaggtcgctcaagccctcagttagac

SEQ ID NO: 459798 - DNA, 75 bp, Homo sapiens
ggtgaacccaggggccgaagcccacccagggagttgatgttcccagtgacctgacagcagaggagcgtcaagaac

SEQ ID NO: 459799 - DNA, 74 bp, Homo sapiens
aaaacaaaagctgctacttatggaagatacaaagggtgctggagaatctggtaaaagcaccattgtgaagcaga

SEQ ID NO: 459800 - DNA, 97 bp, Homo sapiens
gtctttgacaagtgatgagaagctgtcggagcttcccaaggacatggtccggcgaggagagatcatcgacaatgacaccgaggaggagttctacctc

SEQ ID NO: 459801 - DNA, 83 bp, Homo sapiens
ctccgctcgtcccgctcgtcatggcctacccgggatacggaggaggggtgtagtcgccgccgccagccgccatgggcaaacag

SEQ ID NO: 459802 - DNA, 75 bp, Homo sapiens
agcccttgcctgcccgacggctctcctctgactgcagcgtcactcaggtgatgatgaacagtctacacagatggc

SEQ ID NO: 459803 - DNA, 100 bp, Homo sapiens
cctggacatcaagattaaaagagcgaataaagtttatcacgccgggatcatcacgggggaattctaccggatctattacctgaagaagtcgcggtcgacg

SEQ ID NO: 459804 - DNA, 50 bp, Homo sapiens
ccaggagaagccgcccaaagaactgatgatgattattccccaccttctaa

SEQ ID NO: 459805 - DNA, 96 bp, Homo sapiens
ggtgaccccctccccggctgccgccgccgccgcctcggccgaccagggacctgcccgcctgcggctgctccggccaggcccagacatgtccgtcct

SEQ ID NO: 459806 - DNA, 100 bp, Homo sapiens
gatgaacacagtattgaaatgcatttgccttatacagctaaagccatggaaaggccctggccaacgtcaacattgggagcctcatctgcaatgtaggggc

SEQ ID NO: 459807 - DNA, 74 bp, Homo sapiens
tccaagctccctgcggggaagaacgtgctactgctggctggtaagcgggcccctcagtgctaccccagttccgt

SEQ ID NO: 459808 - DNA, 90 bp, Homo sapiens
aatagataatttcatgtcacatgataaacagcttggaatccacgaagactccactaaccgccgccgcctgtctgagctgctgcgctatca

SEQ ID NO: 459809 - DNA, 119 bp, Homo sapiens
atcaagtaaaaacaatagctcaaggaaacctttccaacacagatgtccaagctgccaagttctgtacagagtaatgagatgtgtgacggctgcaaaccaggtgtttttttctgaggctg

SEQ ID NO: 459810 - DNA, 98 bp, Homo sapiens
tgcgaaggccgggacccggttccccggcccacagtgggggtgtgcaaacccgagagaactgggaaacaattgaagatgttgaagaaatgctcaacaac

SEQ ID NO: 459811 - DNA, 80 bp, Homo sapiens
cctggatattcctgcaaacccaacagagtctctggacaagtgggaacgtcttacggtagctgatgcattggaaccagtgc

SEQ ID NO: 459812 - DNA, 90 bp, Homo sapiens
gctttgtacggcttagaggacttccctttggatgtagcaaggaagaaattgttcagttcttctcaggttttgcggctagttggctattca

SEQ ID NO: 459813 - DNA, 74 bp, Homo sapiens
gtccccgctggcgggcttccctgtcgccgttcgctgcgctgccgggagtgagctgttgccgcagaatgggctgc

SEQ ID NO: 459814 - DNA, 90 bp, Homo sapiens
accacttcaaatgaggaaccagatccaaaaggtaattctggcacttggagactatatgggagccacttgtcatgcctgcattggtggaac

SEQ ID NO: 459815 - DNA, 75 bp, Homo sapiens
gaactgtctcctggtgaccgagcacccgcctccgggcatcttcaacttatctggagtccatctttcaccatcttc

SEQ ID NO: 459816 - DNA, 83 bp, Homo sapiens
gactgtttccggaagactctttttagagagacttctgctggatgtgtctaggagattggaagactcatggcagtgaatactat

SEQ ID NO: 459817 - DNA, 100 bp, Homo sapiens
tataattcagtggataaaactaccacaggtggcgacatgtctaagaatgtgagccagtcacagatggcaaaattgaaccaacaaatggccaaaatgatgg

SEQ ID NO: 459818 - DNA, 82 bp, Homo sapiens
ccactgctgggccctgaggctgcaccaagtggcgaaggagccggctccaagatgctgtacccctcaaggatttaaactaacg

SEQ ID NO: 459819 - DNA, 98 bp, Homo sapiens
acctacgacgatcgggcctacagcagcttcggcggcggcagagggtatggcacagtcacaagggtgggtgaaaagatacatcaaggccttttgtaaag

SEQ ID NO: 459820 - DNA, 115 bp, Homo sapiens
tttggctttgcctttctggacacagaagtatttgtgacaggtccagagggggcaaacctctttatttaccaccttccacaggaatttggagaccaggacattctgcagatgttca

SEQ ID NO: 459821 - DNA, 74 bp, Homo sapiens
gtcttcctccagatattgatgaaggtcctggacccaagccagaagcctctgcaaagcttccttccagacctgca

SEQ ID NO: 459822 - DNA, 75 bp, Homo sapiens
ggcactatggggatccgtcgcacacagcatctccaacaggcagggcaagaatcctttcgttccatcacaaggtcg

SEQ ID NO: 459823 - DNA, 122 bp, Homo sapiens
ccagggcgccgggttagggcagacgctgtgctcgctggcaccccgaacgggttgcttcccccgctgcgaggggacggcaaaacagaacagaaaggcggagataaaaagaggggtgttaaaag

SEQ ID NO: 459824 - DNA, 118 bp, Homo sapiens
ttgtgggccgccgtcggcagcaagaacagagagagaggtggacagatctgagagatactgaggaaaataccaagcccggattctttccgagagccttctcactcctgcggagtaccag

SEQ ID NO: 459825 - DNA, 97 bp, Homo sapiens
aagcttgaaatgctacatttccaagaaataagcgggttttgaaaacaaaaaaaagaaggagtggaagagggggccaggatccaggcctccatcccca

SEQ ID NO: 459826 - DNA, 98 bp, Homo sapiens
gagaaggtcaatgctttacaggctgaactgactgagaaagaggttgatttataccaattacaagtaaatacacttaggagatacaaaagacacttcaa

SEQ ID NO: 459827 - DNA, 75 bp, Homo sapiens
gcagcccatcgtgtggatcactccctatgccttctcccatgacaaatttggagagcttgtaatgaccaaagaatc

SEQ ID NO: 459828 - DNA, 75 bp, Homo sapiens
gcagacagatgggaaaaatatttgatcaagaacgtgctggccaaagcgctctatgacaatgtggccgagtccccg

SEQ ID NO: 459829 - DNA, 101 bp, Homo sapiens
tcagctagattcagccaccagatcccagaaacatgacccttgctgaggcgtgcaaagactccagaattggaggcatgatgaagactctgctgctgtttgtg

SEQ ID NO: 459830 - DNA, 75 bp, Homo sapiens
tcaacgtcaccctggacctgggccaggcaagcacgaggagcggcaggacgagcatggctacatctcccggtgctt

SEQ ID NO: 459831 - DNA, 75 bp, Homo sapiens
gaccgtggacggaccccgggagcccagacacagcacccaagaaaacctcatttggctcgctgaaggatgaagacc

SEQ ID NO: 459832 - DNA, 75 bp, Homo sapiens
ggtggcctgcaaagatcgcctgcaccttcaaggccaaactatgcagagcccccctccatgcgcctgaaggcccga

SEQ ID NO: 459833 - DNA, 75 bp, Homo sapiens
caggggatcacctaatgccagaagccccccgagcctggagatgagggggagccggggcggtcgggactggagctt

SEQ ID NO: 459834 - DNA, 71 bp, Homo sapiens
catctgcctgtaccagtacctcaagatgtcaagaatatgaacacgtggctgctgttcctccccctgttccc

SEQ ID NO: 459835 - DNA, 50 bp, Homo sapiens
ggaagcgtcgggattaggtgaaatgaagatagtgatccggggagacagga

SEQ ID NO: 459836 - DNA, 98 bp, Homo sapiens
tccaggacagcacctagtcgtggccggaggagtctcagagctgtcagaaagataaggatgacattcggctgctgccgtcagcattgggtgtgaagaag

SEQ ID NO: 459837 - DNA, 80 bp, Homo sapiens
cccttccccacgcaaccccagatccatttacactttacaatcctttcccggagttcagttatgggtgtgagaggtttgca

SEQ ID NO: 459838 - DNA, 100 bp, Homo sapiens
ctggacctccaaggaagccacgtgcagacatctacaaccttcgatctcctgacgagatatggttaataggagaattgccatggacttgatactgaagatg

SEQ ID NO: 459839 - DNA, 97 bp, Homo sapiens
tacttcacactgcagaactgggttctggactttgggcgtcccattgccatggtgtcatggagaaactccagctgggcccagagattctgcagcggga

SEQ ID NO: 459840 - DNA, 100 bp, Homo sapiens
caggacatcaattcttcaaggcctgttttactaaatgggacctatgatgtgcagaacatccatgatagcagtcttctgtaaatcgaacttttcaagaatt

SEQ ID NO: 459841 - DNA, 101 bp, Homo sapiens
atagccttagctcaagcaataggctaatagctcgtcagcttgctaaaatccatgctattcatgcacacaatggctggatccccaaatctaatctttggcta

SEQ ID NO: 459842 - DNA, 76 bp, Homo sapiens
gaagacctgatcaacaacttcagggtgaaggaatatgtctccaaaaaggccctaccagaagaagcccctgctcgga

SEQ ID NO: 459843 - DNA, 75 bp, Homo sapiens
acacagaggacagcggcagcgacgagaacctggatcaggatgacgacagatatgagcaggcgagtgacgtccggg

SEQ ID NO: 459844 - DNA, 100 bp, Homo sapiens
cctgaagcggcggtaccggtgctggcggcggcagctgaggccttggccgaagccgcgcgcctgtgacattctggccattgataagtccctgacaccagtc

SEQ ID NO: 459845 - DNA, 100 bp, Homo sapiens
tgggactgcaccgcaccgagggcgagctccagctgacagcagccatggcgagcggcagtggagacagcgtcacccgtcggagcgtggcatcacagttttt

SEQ ID NO: 459846 - DNA, 75 bp, Homo sapiens
aacttaaagagagacaacgctatcacatcaggctcagcaggagacacagaaggcagcgctgcggtacgagcgggc

SEQ ID NO: 459847 - DNA, 75 bp, Homo sapiens
tccagcatgcaggggctgctcaggtctctaattaacagaagatggcaaagcccagccacagcagctatgtccttc

SEQ ID NO: 459848 - DNA, 100 bp, Homo sapiens
cgcgatacgctcctcagcggcggcgccagctcctgtgcttcggaaccaaaaagaagcttcccagagccggggccaggagccccaagcgccctctagcagc

SEQ ID NO: 459849 - DNA, 75 bp, Homo sapiens
gaagaattcatgctcatccgggtcaatgtgacggtggactacattagaccagccagcccagccacagagacagtg

SEQ ID NO: 459850 - DNA, 102 bp, Homo sapiens
acttgcggcctgtacccagaatcaggcttcagaagctgatggcatagttatgagaggggtgaagactgcgactgcatttccaacagaccctgaggacaattg

SEQ ID NO: 459851 - DNA, 96 bp, Homo sapiens
aaaaagctgctgatgagagtgagaggtacgtgctctactccctggacctgtacaatgacagcgcccactacgcgctcaccaggttcaacaagcagt

SEQ ID NO: 459852 - DNA, 143 bp, Homo sapiens
aggccttcgagttgcgcttcaaacaatacctcaggaacccacccaaactggtcacccctcatgacaggtgacggtcctggtcatgtgccacacgagggagctggccttccagatcagcaaggaatatgagcgcttttccaagt

SEQ ID NO: 459853 - DNA, 75 bp, Homo sapiens
cagcggcaaggtctccaagtcccagctcaagacttcccaagtaagaagcggaagaggagccgctggaaccaagac

SEQ ID NO: 459854 - DNA, 75 bp, Homo sapiens
cggaaggagaagatgtgccgccgctgccaacgtcgagcggcgacggctgatgtgaatttcttcggagtaagaaat

SEQ ID NO: 459855 - DNA, 95 bp, Homo sapiens
gcagtggcgcctaaagtctgagagagggaagtcgcctctgtgctcgtgagtgcatggggtataaggcaatggtggcttgctatccgggaaatgga

SEQ ID NO: 459856 - DNA, 75 bp, Homo sapiens
cggtgaccggatattcagttgcacatccccacatcaatgcactgccaatggtgtgactgaagaaatatcaaatgt

SEQ ID NO: 459857 - DNA, 83 bp, Homo sapiens
ctggccacttgcttgggatcctttatcctggtcatcttctatttccaaaatctgggacatgacacctgtggtgggctgcagtc

SEQ ID NO: 459858 - DNA, 100 bp, Homo sapiens
atactgatgcggttgagattgctatcgacaacacggcttttatggacgagttcttttctgagggtaagcttgatgattaccaggaacgaatgaacaaagg

SEQ ID NO: 459859 - DNA, 83 bp, Homo sapiens
gatcactccccagacgtggtcagcaacgcacagctatcttgacccacccttggtgaaaggtgtagcagtcactcggcctacac

SEQ ID NO: 459860 - DNA, 100 bp, Homo sapiens
gggagacctaaccgccgaatgcgttcggagccctcttggaacagagatcatgatgacacggcatctactcgttcaggaggaaccccaggcccttccagcg

SEQ ID NO: 459861 - DNA, 74 bp, Homo sapiens
tcttgattatgatagttcagatgacagtgattttaaagttggagatgcctcagctgcagaaccttggcctgaaa

SEQ ID NO: 459862 - DNA, 100 bp, Homo sapiens
aaagcgtgtgtaggggagcggaaaaggaagtcaccaccgtggcctgcgacgaacccttaggagaaatcttgagagtggacagcaattgtgaagatcgcca

SEQ ID NO: 459863 - DNA, 50 bp, Homo sapiens
atttgatttcacaaaagtgaagagaggagagatgcaggtcagctcctcca

SEQ ID NO: 459864 - DNA, 100 bp, Homo sapiens
agccgctggggctgccgccacggccgcccggaggtgcccactggctggtgatgacattctggcttgtcgcccagcagagtgacatcatcgacagcacctg

SEQ ID NO: 459865 - DNA, 98 bp, Homo sapiens
ggtctgggccttttgggcagcttttccggcctgacaacttcatctttgatggaatcttgctctcttgctcagactggagtgcagtggcatgaccttgg

SEQ ID NO: 459866 - DNA, 95 bp, Homo sapiens
tgcgcgccctggcgggtccggaccaagcttatgtccctgatgccaaaaatgcacctactctttcctctaactctggtgaggtcattctggagtga

SEQ ID NO: 459867 - DNA, 82 bp, Homo sapiens
tcttatctggagcagtacatgaccggttacttaatgtctgtacgaggatgtcgtccaggaaagattgtgcagatgactgaag

SEQ ID NO: 459868 - DNA, 50 bp, Homo sapiens
cgcagggatacggcgcccagcgggtaagactttgaccccgacgcaggctt

SEQ ID NO: 459869 - DNA, 100 bp, Homo sapiens
gacgtggtgtgcaccggctggctgaggaaatcgcctcccgagaagaagttgaggcgctatatctgaagaagacacttgaatcatgggtgacgttaaaaat

SEQ ID NO: 459870 - DNA, 96 bp, Homo sapiens
ccagcaggctctcaccagcgcacagttgcagcaacacgccgcgttcattccaacagggacccgagtgtatagccctccagagtggatccgctacca

SEQ ID NO: 459871 - DNA, 101 bp, Homo sapiens
aaaataggaaccaatttgaaggactacaaggtggactgcttgctcagctcagtatcaacacttatgaatgttcgcatcttaccacatacagttctttacat

SEQ ID NO: 459872 - DNA, 100 bp, Homo sapiens
ggccagtcgcctccaggccaagagggatccttcacccgtgtctggaggagcttgcctttgttttcgagatgctgcagcagttcgaggacgccctggtgca

SEQ ID NO: 459873 - DNA, 100 bp, Homo sapiens
ctgtcaagaaggtgccggtggtgcgagtcttcggagcgaccccggcagatgagaatcccaagcagcacattcccctggaggagtacgctgcgaacctaaa

SEQ ID NO: 459874 - DNA, 83 bp, Homo sapiens
cacgcgggtctgtcatcatgtcgcgttacgggcggtacggaggaggtgcccgtggttgacacgagctgtgtccccagctgttc

SEQ ID NO: 459875 - DNA, 102 bp, Homo sapiens
cgaaaaaacttccagaacatctgggagaatatttaatggaaaatcgcttggttaaaacctgacacttttaacagtgaataccagggcctggtgaagcacaca

SEQ ID NO: 459876 - DNA, 82 bp, Homo sapiens
ggaggagcggctgctgctgctgctgctgctgctggtggcccctttgcagattctgaaaaagagttccacgtcctcccttatc

SEQ ID NO: 459877 - DNA, 50 bp, Homo sapiens
ggaccagtacctgcccaggaaactgttaagtgggcagaccaacatccacc

SEQ ID NO: 459878 - DNA, 100 bp, Homo sapiens
cacatttgcagctcattgaaggaaagtccctctgtcgtgaaatcaagcaacgacgtcgaggagttgcctccattctgcgactatgccagcatcttttgga

SEQ ID NO: 459879 - DNA, 99 bp, Homo sapiens
aagggattgctggctacagcttcagaagaccgaagcgttcgtatctggaagatgtgaagttcatttccaatccgccctccatggtggcagcggggagcg

SEQ ID NO: 459880 - DNA, 85 bp, Homo sapiens
aacagcagaaaatcaaaacaagctctttatgagaatggcatctaagaccttcttcaggaacaatttttaatgatgctttctggct

SEQ ID NO: 459881 - DNA, 76 bp, Homo sapiens
accctacatttagcgcatcatgtgatccgggtcagctgttgccagcaaaccgcaatacaccaagtcccattgatcc

SEQ ID NO: 459882 - DNA, 100 bp, Homo sapiens
gcatgatggacctaaggaggtacccactggatgaacaaaactgcaccttggaaattgagagctgttgtccgggtgccaaaaagcatgagtttctgaccag

SEQ ID NO: 459883 - DNA, 80 bp, Homo sapiens
ccaaagaaacaagccgtggaataggtgtatcaagtaatggtgcaaagcctgaacaagttaaggtgaactgcacagctgaa

SEQ ID NO: 459884 - DNA, 89 bp, Homo sapiens
catatactactttttccagaattcatacaaagagtgagaataaacttaacacccttaaagacggacactccaccaagttctgtaccaac

SEQ ID NO: 459885 - DNA, 104 bp, Homo sapiens
ctgagcggcggaacccttcgctggcgggagcgcggttcggggccgcagaggtcatcatcagatttgaaatatttaaagtggatacaaaactatttcagcaatgc

SEQ ID NO: 459886 - DNA, 90 bp, Homo sapiens
gacctctcgctgcttcaggaggacctgcaggaggacgcagacggatggcagctggtggaatttttgaagaaaatggaatctcgaggcccc

SEQ ID NO: 459887 - DNA, 75 bp, Homo sapiens
aggcggctgaggtgcgagccggtgctggagaatctggtaaaagcaccattgtgaagcagatgaggatcctgcatg

SEQ ID NO: 459888 - DNA, 90 bp, Homo sapiens
ggaaacccaaattgtagctgacgaagcattttgcaacgcagttcggagttattatgaggaagatgagaatgtgcctactgctcctgatcc

SEQ ID NO: 459889 - DNA, 101 bp, Homo sapiens
gaacgcggggcctccgtgttctgctgtcttcatcagcgtgggccgcgggtgaatatgaccatctcccagaacaggccttctatatggtgggacccattgaa

SEQ ID NO: 459890 - DNA, 90 bp, Homo sapiens
cccgcagagcgcatccatcaaagctttgcgcaacgccaacctcaggcgagatggtgtcagctgtgatgcatgtttaaaaggaaattttcg

SEQ ID NO: 459891 - DNA, 83 bp, Homo sapiens
ctcagactccagctcagactcagacttcgagccatcccagaaccacagccaagcagcctcccgcgacgatgcccctcaacgtt

SEQ ID NO: 459892 - DNA, 100 bp, Homo sapiens
ccaagaaaaccttatcagcactatttgaaacttttatctcatctggcttggcgcctgaggttctcccattagaccctcaaactgacacaagacctacaga

SEQ ID NO: 459893 - DNA, 82 bp, Homo sapiens
caaacagcccagctcgcgcttcagcgtcccggcgccgtcgcgccactcctccgaggcgaactttctgaccaagtatacaact

SEQ ID NO: 459894 - DNA, 98 bp, Homo sapiens
tccggagtaacttggccaggctggccccgagcggaactggagaaagctgaggctctggaggctggaagtccatgatcgaggtggcagcaaggctggtt

SEQ ID NO: 459895 - DNA, 100 bp, Homo sapiens
cttggagcagctgaacgtcattaacggcatcctcttcattcctctcagatcatggaagggaagtggttgctgtgtatgttactggtgcttggaactgcta

SEQ ID NO: 459896 - DNA, 100 bp, Homo sapiens
agctcggccggggccgcagtctggccacccgcttccatgcggttcgggtccaagatgatgccgggaaatcctcattgacgattcaatttgttgaaggcca

SEQ ID NO: 459897 - DNA, 99 bp, Homo sapiens
agatgatgacagagaagatctttttgcaggtgctggagaatctggtaaaagcaccattgtgaagcagatgaggatcctgcatgttaatgggtttaatgg

SEQ ID NO: 459898 - DNA, 98 bp, Homo sapiens
ttcggtgcagctgccagatccgctgatctagtgcttctcgaaaaaaaccttcaggcggcccatgggttcctcatgccatgcacctgctgtcacccagc

SEQ ID NO: 459899 - DNA, 97 bp, Homo sapiens
acacagcagttgcaccctgttttgcaaaaaccatcagtgtttgggaatgattctgatgatgatgatgagtgtgagccactgccccatgttgtgttga

SEQ ID NO: 459900 - DNA, 100 bp, Homo sapiens
gagagcatccccaaggactcgctccggatggccatcatggtgcaggctgaagccgacgtagcttctctgaacagacgcatccagctggttgaggaagagt

SEQ ID NO: 459901 - DNA, 139 bp, Homo sapiens
ccgacaggccgggtccagggactgcaacccagcgagggacgcgggcagccatggccgaagcggcgcctgcccggcctccggcctctcctcctctccgtcaacacccacccaagtgaccaagcagcacacgtttcccctg

SEQ ID NO: 459902 - DNA, 50 bp, Homo sapiens
gctgccatgagcgagcgcctccgtcccagttacacaacagccaatgcgga

SEQ ID NO: 459903 - DNA, 78 bp, Homo sapiens
gtggacggcacggacgacagaagcgactttggtgagactctggtgcctcgagtctttattggtaaagattgtataggc

SEQ ID NO: 459904 - DNA, 98 bp, Homo sapiens
agctggacaagccacgtacagaaccacctgtcaggacttcagaatccttgaccgataccagctgagatctgtatctgtggacctgaatgttgatccct

SEQ ID NO: 459905 - DNA, 51 bp, Homo sapiens
tgggatcccggccaccagcaattgtccggaactgcaagcacatgttgacca

SEQ ID NO: 459906 - DNA, 151 bp, Homo sapiens
cttttgacccgtctcctcaccttctgatacacaccaaccaaccagtcaaccagccattgctgtttactggatacctgggttctgagcaaggttcaaccagtcaagaacaggccttatctgctcagcaagctgctgttattaaccttactgg

SEQ ID NO: 459907 - DNA, 100 bp, Homo sapiens
cctgctcttcgctctcttcctggctgcgtccctagtgtcttgggacaaggtgcgcattcctggtgtgctgcagcgattgggagtgacatactttgtggtt

SEQ ID NO: 459908 - DNA, 51 bp, Homo sapiens
ggagggatctacagccagaccagtgggtgattattgaacaaggatgctttg

SEQ ID NO: 459909 - DNA, 105 bp, Homo sapiens
tcgaggtcgtatgaacgcacaggccgtcgctatgagcgggaccaccctgggcacagcaggcatcggagggcagctggtggaatttttgaagaaaatggaatctcg

SEQ ID NO: 459910 - DNA, 74 bp, Homo sapiens
tctgcctcacacggctcaagtcaccaccgtgaacaaggcccggagaaataggggagtgggggcccaagaacgag

SEQ ID NO: 459911 - DNA, 101 bp, Homo sapiens
acatggggcacccggtgtaccgcggcgagaagccccagctgcactacgcgagtaatcaagtcagaggattatatgacttttatctgcctagagaagaacta

SEQ ID NO: 459912 - DNA, 97 bp, Homo sapiens
gcgtcggtgctggaagacgaggccacagacacttctgatagtgaaggcttacagatactttttacactcttacaaaatgttgcacaagaagaagctg

SEQ ID NO: 459913 - DNA, 98 bp, Homo sapiens
ctcctgcacgtgcaactgcaaacgctctttgttccagagcatggagatcagtactccaaagattcaggtttactcacgtcatccagcagagaatggaa

SEQ ID NO: 459914 - DNA, 100 bp, Homo sapiens
tggcgttcctgttacctctcatcattgtgttaatggtgaagcacagcgattcccacttaattcagtgcacaaatgagatgaatgtgaacatcccacagtt

SEQ ID NO: 459915 - DNA, 90 bp, Homo sapiens
gcttcaagcttaggaccacccaccatgcctatccaggtcctcttcctgatggatgggaacaagccatgactcaggatggagaaatttact

SEQ ID NO: 459916 - DNA, 74 bp, Homo sapiens
gggccttcaggtgcggcgtgagaggacacaactcagatgggaagttcatcgcccgggcacagcggatagagtac

SEQ ID NO: 459917 - DNA, 100 bp, Homo sapiens
agggacctgagtgttgcaaggtgcgagaggggagcgccgcggggagcgccgcgggaagcgcatgctgagttacgcagcgtgacaaatggtcagtctaacc

SEQ ID NO: 459918 - DNA, 75 bp, Homo sapiens
gaggcagaaaagaccactgaatctagaaatgagaacaatgctaaagtagctgtgctaggggcctctggaggcatc

SEQ ID NO: 459919 - DNA, 89 bp, Homo sapiens
gcctcctcccaccctgagcagagccgccgaggatgataaacacccaggacaggtgtggatgaggtcaccattgtcaacattttgaccaa

SEQ ID NO: 459920 - DNA, 74 bp, Homo sapiens
tgggtggtcctcctgtcccggatcattatgaaggagaagcagagcaccaaggggcttgcttctgacatgtctga

SEQ ID NO: 459921 - DNA, 95 bp, Homo sapiens
ttgcacacccagggcgaccccggtgaagacggaaagccgggaaaagatgccgttccaccatgtgaccgccggcttgttgtacaaggggaattacc

SEQ ID NO: 459922 - DNA, 97 bp, Homo sapiens
cgtgggcaagtcggcgctcaccatccagttcatccagcaccttctagccaccatggcaacctcatctgaagaagttttgctgattgtaaagaaagtg

SEQ ID NO: 459923 - DNA, 106 bp, Homo sapiens
ggaagacgcggggaagaggaggcggaaaaggacgcaaagttctccggcgaggtgtccctggccagtgtccttccacctgtccacaagcatggggaacatcttcgcc

SEQ ID NO: 459924 - DNA, 96 bp, Homo sapiens
cttgtcccctcctccaactaaggaaggagaataaaggcagccccgttgatgactgaaaatgacaaagcatccacctaacagacgaggaatcagctt

SEQ ID NO: 459925 - DNA, 100 bp, Homo sapiens
cgggcaaccggggaccccggccactggagcaggtcacctgttacaaggccaccccagcagacatgtttgccaaggcctttcgggtcaagtccaacacggc

SEQ ID NO: 459926 - DNA, 100 bp, Homo sapiens
caccaatggagatctgcctcaatggaacccctgctctggcctacctggcgggctgacaaagaagagaaccaaagtccagaagaagtcactgcttctcaag

SEQ ID NO: 459927 - DNA, 95 bp, Homo sapiens
aagggaatcttctggtcactgttaccttcctccgtacttacctgcctcatggatgatcctgccatgaagcagtttctgctgtacttggatgagtc

SEQ ID NO: 459928 - DNA, 90 bp, Homo sapiens
tggaggtggactacagcgccacggtggatcagcgcctacccgagtgtgcgaagctagccaaggaatcccagtcagaagttccagcctgcc

SEQ ID NO: 459929 - DNA, 75 bp, Homo sapiens
ggggccgccatggagcccgactcggtgattgaggacaagaccatcgagctcatgccggatcgagctgggagatgt

SEQ ID NO: 459930 - DNA, 115 bp, Homo sapiens
cagggcaaggcagtggctgctgcacatgttttgttgtgtggggagccaggactcctatcatcatgctcgagacttaattcagtgcacaaatgagatgaatgtgaacatcccacag

SEQ ID NO: 459931 - DNA, 95 bp, Homo sapiens
aacttcctgcctgaggccctggacttcgtgggtgtccaccaggagcggaccttacagactacagtggtagtggaggccgaagcggcgggaacagc

SEQ ID NO: 459932 - DNA, 80 bp, Homo sapiens
cagcgccgtcccgtccgacagccaggcccgggagaatactatactggcaattgctggagaagattttgcaattgttgctt

SEQ ID NO: 459933 - DNA, 82 bp, Homo sapiens
ctgccactctcaccgtgaaggaacctgtggcatattccttggagtatctccaggttgagaattcatgatccgcttggaatgg

SEQ ID NO: 459934 - DNA, 75 bp, Homo sapiens
ctgggacaaggagccagtgctggtcgtgtccttcgtcgtcgggggcctcgactgcggcatgaatgtgcaccataa

SEQ ID NO: 459935 - DNA, 75 bp, Homo sapiens
ccactgatgaggatcagcccatggacagtcattttgtttactcattcagccctgttgcaggtcccaataaactct

SEQ ID NO: 459936 - DNA, 50 bp, Homo sapiens
cgttgtcacagggaagaccaaggccctgtctctgcccctggtggtcatcg

SEQ ID NO: 459937 - DNA, 74 bp, Homo sapiens
gagatttacctgtgagatgtttcatcccaacagaggagatgttaaagtaacccatcttgcaggacgacattgaa

SEQ ID NO: 459938 - DNA, 100 bp, Homo sapiens
gtttgtgccccatagctgcacagacgtttgatgcaaatgatttgtatcaggggcagaattttaacaaggtcctcagttccttagtgactctaaataaagt

SEQ ID NO: 459939 - DNA, 83 bp, Homo sapiens
caaggccaagttcatctcctccgtcaccagccacatctaccaggagaactacgatgacccgcacaaaacccctgcctccccag

SEQ ID NO: 459940 - DNA, 75 bp, Homo sapiens
gtaattaagcctcgcacaatatgggggacagccgcgccgctgctgcttttccgaagaggtgacttcgaccgagct

SEQ ID NO: 459941 - DNA, 75 bp, Homo sapiens
ctggattttttaactgaagatagtgcctttcagccctaccagcttgatccagctggaggccttcctgagccgcct

SEQ ID NO: 459942 - DNA, 98 bp, Homo sapiens
tcagactcttgatcccacagccacttcttgagtgagagatacaactgctataagcatcactggagtgactcaagaaaacctgtaattttggaagtaac

SEQ ID NO: 459943 - DNA, 88 bp, Homo sapiens
cgctgcgcactggacccgctctgctctcggtggacagtttgcggttgtgaagaaatgccgtgagaaaagcaccggcctccagtatgcc

SEQ ID NO: 459944 - DNA, 75 bp, Homo sapiens
cagatcaagatcaagaccggcgtggtgaagcgatttgagttttgtcaccggctcccacgtcggagagctgatcat

SEQ ID NO: 459945 - DNA, 91 bp, Homo sapiens
ttctgttgtgacagacacttcacatactgctgatgtcttatggtgaaattgaaggtaaattcttgggacctagagaagaagtaacgagtga

SEQ ID NO: 459946 - DNA, 75 bp, Homo sapiens
tttggacttagctgcctgtggagctgtttggaactgagtacttggaccatgagactgtttcagccactttcatcg

SEQ ID NO: 459947 - DNA, 97 bp, Homo sapiens
tggaatagacatgaccaaaggccaggtggaagtggaaggatgaggatatcagtcagaaggatatgtataatatcattagaattcacaatcagaataa

SEQ ID NO: 459948 - DNA, 80 bp, Homo sapiens
aagtgcagctgcctcagttcttagcgcaggatcctggtgcacctgagccgtggaggggctgaagtccagatctttgctcc

SEQ ID NO: 459949 - DNA, 75 bp, Homo sapiens
cggcgagcagaactacggcgagcggggtaaaggagctggaagtgcgaaaattgatgcatgtgagaggagatggac

SEQ ID NO: 459950 - DNA, 83 bp, Homo sapiens
cccaccgggatggagaaggaggaggaatcggtgaggaaaatagcagctgaatactatgacaacctccctcactacaattcctg

SEQ ID NO: 459951 - DNA, 100 bp, Homo sapiens
ggaagaggaaaggagacggatagaagaagaaaggcttcggttggagcagcaaaagatgatgaagtggttctgcagtgcaccgcaaccatccacaaagaac

SEQ ID NO: 459952 - DNA, 100 bp, Homo sapiens
aagtattttctaccaagctgggacttccaaagctgggaatcctattttttattatgttgcacggagcaacatggccaatctttcctaagctgctcagctt

SEQ ID NO: 459953 - DNA, 158 bp, Homo sapiens
tattcttcatgggaacagaggtgtttaccatgacgataagcaaccagcatttagagctgtttatgaagcactgagaaatcagcaggaagatagcctggagaaggtgattaaagatacggagtccctgttcaaaacccgggagaaggagtatcaggaga

SEQ ID NO: 459954 - DNA, 97 bp, Homo sapiens
tgactggaggctggcggacaggcgacagcgacctgcggcagccggccaagagccactgcacaatgaggagctggcaggagcaggccgggtggcccag

SEQ ID NO: 459955 - DNA, 75 bp, Homo sapiens
aaggaaatgctgcttggggatgagcataacagttcctctccccactctggggtgtccagacaggtgcggatcaag

SEQ ID NO: 459956 - DNA, 48 bp, Homo sapiens
cgtcttatttaatccacatcataggatccggaaagtatggcagaggag

SEQ ID NO: 459957 - DNA, 75 bp, Homo sapiens
ggaggacggcgagagcacggacagactcatggggaagggccaggtccagaaaaagcttgtggtgaaggggggcaa

SEQ ID NO: 459958 - DNA, 98 bp, Homo sapiens
agttaattgaagagtcttgtccacagctggcaaattcagtgcagatcagaagtctgggccaacggtcacaaaagttgtcactgttgtgacaaccaaaa

SEQ ID NO: 459959 - DNA, 50 bp, Homo sapiens
gaagcagatggattcgtccttttagactctcagcgttctcatctctcttc

SEQ ID NO: 459960 - DNA, 76 bp, Homo sapiens
atggacatatgcagcaaatgttggggaacatgatctgttaaagctgtatgccactgggtatggtgcaggtggcaga

SEQ ID NO: 459961 - DNA, 83 bp, Homo sapiens
cgctggaggagcgaggcagctgtactaggactgggaacggacctgcctagagctggaacgttacctccagagcgagccctgct

SEQ ID NO: 459962 - DNA, 100 bp, Homo sapiens
gggtctccaggcccgcgaccgtccgccagtcgtcccgagtgtgtcccggcatggatatccggaacaacctcactaggttgcatgagctggagaattgctc

SEQ ID NO: 459963 - DNA, 95 bp, Homo sapiens
tcattcaaaggataaccaaatgtgccgtgatgtatgtgaacaggaaagtaatggtccaacagacagttatgcagctatttcacaagtggatcgat

SEQ ID NO: 459964 - DNA, 100 bp, Homo sapiens
gtcgccgccatggcccgctggatcccgaccaagaggcagaagtacggggttggtaccaggatcatctatgaccggaaattcctgatggagtgtcggaact

SEQ ID NO: 459965 - DNA, 82 bp, Homo sapiens
cctcccccgcctgtcgcgatacgctcctcagcggcggcgccagctcctgtgccgcggcgagtcctttgcacatgttggcaac

SEQ ID NO: 459966 - DNA, 100 bp, Homo sapiens
atgaaggcggagtatggaaagttagagtggacctacctgataaataccctttcaaatctccatctatagaagaagctcattcacacagaagacccattta

SEQ ID NO: 459967 - DNA, 100 bp, Homo sapiens
agcatctggctttatcgacaccgcaagaagagaaacggacttactagtacctacgcgggtatcagaaaaggatctgtctggctccattgatgacctcccc

SEQ ID NO: 459968 - DNA, 100 bp, Homo sapiens
agaaccgcgacctgcgcaaagccagcgtgaccatctttgtagactatgaagatcttgtggaactggccccaggcaaatttcaattggtggcagagaaccg

SEQ ID NO: 459969 - DNA, 90 bp, Homo sapiens
gttacaagcccaggaaggattgtctaatgatggagaaacaatggtaaatgtgccacatattcatgcaagcttgaagaagaatacccacac

SEQ ID NO: 459970 - DNA, 98 bp, Homo sapiens
tgggagcttgctgcagcttcaggtgttcaggcgcttcgtggaggttggccgggtggcctatgtctcctttggacctcatgccggaaaattggtcgcga

SEQ ID NO: 459971 - DNA, 89 bp, Homo sapiens
ctccacgctgccctccatctgtgctccctaccctcacctcaagacgaccatggccaccatcccagactggaagctacagctgctagccc

SEQ ID NO: 459972 - DNA, 88 bp, Homo sapiens
ggataattatccaaataaattgcaagcattctatccaaatggttcattgcagaagaggccgcggcttctggggccaagtgtgtgctca

SEQ ID NO: 459973 - DNA, 100 bp, Homo sapiens
gcaatattagaccatcaacagtttgactacataataaggatgatgaattgtactctacagacatatgaacaggtatttaaaatgcaatgtgatattcgtt

SEQ ID NO: 459974 - DNA, 96 bp, Homo sapiens
gccggtccgagtcactgtgcgtcgcctgggcccgttcctggtcttctcccccagagtattgggaaagggtcgttgtggtgcatagacccagagtat

SEQ ID NO: 459975 - DNA, 100 bp, Homo sapiens
ctcctaggtgccggccgggagggcggccgcagcagtcaagttcatccgagaagtaacaccatatatcaagaagccatcattagtatcagatctgccgtgg

SEQ ID NO: 459976 - DNA, 100 bp, Homo sapiens
caaggacattggtctttgatttgattcagcagtcctgtcaagtataaataaataagcgggttttgaaaacaaaaaaaagaaggagtggaagagggggcca

SEQ ID NO: 459977 - DNA, 75 bp, Homo sapiens
aagagatatctgcaatgatgtactggtattttgaccaacgtgatttagctgatgagccatcttgatgtagctgat

SEQ ID NO: 459978 - DNA, 50 bp, Homo sapiens
ggactctttcttaatgcagcctgagggaacactgactatgccaaatggag

SEQ ID NO: 459979 - DNA, 100 bp, Homo sapiens
actttgaaagaaaaaggctacaaagctgctttcattggaatagttcacagaagaaaagcttggccaggctgagaagacagaattggatgctcacttagag

SEQ ID NO: 459980 - DNA, 75 bp, Homo sapiens
ccaagagggtgttcgactgctagagccgagcgaagcaacatccagtcatggataaaaatgagctggttcagaagg

SEQ ID NO: 459981 - DNA, 50 bp, Homo sapiens
aacctccaaggtagctgagactacagtcataccctaatgatcccagcaag

SEQ ID NO: 459982 - DNA, 51 bp, Homo sapiens
ggaaaaccccaaaagtgtacataaggatgttaaagtctttagtgaagatgg

SEQ ID NO: 459983 - DNA, 139 bp, Homo sapiens
gtgcggagagactccttgggggtcgagcacataacggggttcgggtgtctcgtgtgtgaacatcacagaagatggcagtgaacgtatactcaacgtcagtgaccagtgataacctaagtcgacatgacatgctggcctg

SEQ ID NO: 459984 - DNA, 82 bp, Homo sapiens
cagagggaatttaagaaacatccacagcagcgactggcccaagttctttgaaaagtacagacggggtttcaccatgttggcc

SEQ ID NO: 459985 - DNA, 82 bp, Homo sapiens
ccgcagccttgggcctcgcgccggctatggccgtgccctggggctgagccctcagccgcggcgagtcctttgcacatgttgg

SEQ ID NO: 459986 - DNA, 82 bp, Homo sapiens
gtggaccgagcccggtactcagccttttaaaaactggagtgtgcaacttgctttggtgtttgctgttttattgccacagatg

SEQ ID NO: 459987 - DNA, 100 bp, Homo sapiens
gaggtgacctgactctctgaggctcattttgcagttgttgaaattgtccccgcagttttcaatcatgcaatggtacaacagctccatgaacgtgatctgc

SEQ ID NO: 459988 - DNA, 100 bp, Homo sapiens
catggagcccagctgaaatggactggcccccttgagcctgtcccaagccctggtgccaggtgtccatccccgtgctgagacacagagattgactggaagg

SEQ ID NO: 459989 - DNA, 80 bp, Homo sapiens
cacctgtggactctgaccgcaaacaaggagagcctactgagcagcctgagtggtttgtgatggacgcctctgaccccacc

SEQ ID NO: 459990 - DNA, 101 bp, Homo sapiens
ggcaacggccaacttcggcaagatccagatcgggatttacgtggagatcaagcgcagcgatgtaaaggcatgacttcctggcaccacagggaaaatcgggt

SEQ ID NO: 459991 - DNA, 75 bp, Homo sapiens
ggggagcataatccaccatcaatatatctggagtgggttgaccacacaggtgcagcctcacagaagaaggctttc

SEQ ID NO: 459992 - DNA, 74 bp, Homo sapiens
gcccggagcaccgagctcgcggcacggtaggaggaacatggcaacccgtgtgtgtctcatcccagaaagagaag

SEQ ID NO: 459993 - DNA, 75 bp, Homo sapiens
caggatctcaagaaccagctgaaacacatgtctgtatcctcaatcaaagacgagttgtactgctgtcacaggaaa

SEQ ID NO: 459994 - DNA, 90 bp, Homo sapiens
gctgtttccagtcatgaggctgtggtggatctttctgatactgtggatggtagggaagaaaagtctgcttctgattcttctggaaaacag

SEQ ID NO: 459995 - DNA, 83 bp, Homo sapiens
tgtgctgatattgatattattacagcttcatatgcaccagaaggagatgaaggtggaggatgcgctatcttatcttgaccagg

SEQ ID NO: 459996 - DNA, 100 bp, Homo sapiens
cttgcagatctattccggccacccattgatttgatgcataaaggcagctttgaaacagaaatgggcctgagtttacagtggctgtattctgctcgtggag

SEQ ID NO: 459997 - DNA, 75 bp, Homo sapiens
gcattttttaaccctagatctcggtgctggagaatctggtaaaagcaccattgtgaagcagatgaggatcctgca

SEQ ID NO: 459998 - DNA, 132 bp, Homo sapiens
accaccactctcattagtgagaatggtcatgctgccgacaccctgacggccacgaacttccgagtggtaggatatatctgcatcttgaaaggaagataaaacaaaagccttctttggaatagatggattttt

SEQ ID NO: 459999 - DNA, 50 bp, Homo sapiens
agcagaaagtttgcaagtaatcctatttgatggctttgcagatggactag

SEQ ID NO: 460000 - DNA, 101 bp, Homo sapiens
aaactaaaagatgtcacaaaggaaaacgaggaaagtcccaggatgactactgtgtcaagacccagatgatgtggtaccagttggccaaagaagagcctggt

SEQ ID NO: 460001 - DNA, 100 bp, Homo sapiens
cacctccaatcgctggtagaagcaccacaccaacatctagtcccttccggttaaaaggcttggaacaagttactaaggctactatgcttggtcaccttct

SEQ ID NO: 460002 - DNA, 88 bp, Homo sapiens
gatgaaggcacaggcccgggaggagaagcaccagaagcagatggagcgaaaaccatgagctgttttccaagagcttcatctccatgga

SEQ ID NO: 460003 - DNA, 50 bp, Homo sapiens
gtgcttggagtgcagaactgaaagagaaagctgacttcatgagaccgagg

SEQ ID NO: 460004 - DNA, 100 bp, Homo sapiens
gcccactggtggtcccccgctcccggggtccccggccggccaagcagactctttttgatcagaacaatgctgcaaaaaaagaagagtcagaaactgccaa

SEQ ID NO: 460005 - DNA, 98 bp, Homo sapiens
tcagagaggccccttaatataccttctctactatgaaaaatcaggtagtaagcattaataatgtctttcatctttgagtggatctacaatggcttcag

SEQ ID NO: 460006 - DNA, 100 bp, Homo sapiens
ttgcacatcaatgatatcatcccaggtgtggatgaggtcaccattgtcaacattttgaccaaccgcagcaatgcacagagacaggatattgccttcgcct

SEQ ID NO: 460007 - DNA, 96 bp, Homo sapiens
cgcgaggaggcgcgggaggtgttcgagaacgaccccgagacggatttttagactctgaggagcagttggagctaatccacattatggaaatggaaa

SEQ ID NO: 460008 - DNA, 76 bp, Homo sapiens
gaaaggcgttttgatgccatgccgtttactttaagatctgttcagcctgtgtgcgctgtaagagctgtggggcaac

SEQ ID NO: 460009 - DNA, 98 bp, Homo sapiens
gccgcagacgagcttccccatgaagctgctgggccgccagcagccggacacggagctggagatccagcaggcaactacacagccagtggtgggaaagc

SEQ ID NO: 460010 - DNA, 94 bp, Homo sapiens
gcagccttgggcctcgcgccggctatggccgtgccctggggctgagccctcaggtttttagaacttcagccataaaaatgggcagaattttcct

SEQ ID NO: 460011 - DNA, 75 bp, Homo sapiens
ggggatcattcacagtgaggacagacacaggtcacgtcactcctcttcatgtcaccagcccttcctcagcatcca

SEQ ID NO: 460012 - DNA, 82 bp, Homo sapiens
ggataacctatgaaaccactcaagagatgctgaattatgccaaaaccagggccaagaagcttgagagaagaaaaatttcaga

SEQ ID NO: 460013 - DNA, 75 bp, Homo sapiens
agccaaggtccagggggcaaggtcgtgtctcttcaagaaaatgaggaggaggagattgggaacctagagcttgcc

SEQ ID NO: 460014 - DNA, 83 bp, Homo sapiens
caaagttgcatttcctcgtcgagcgcaacccaagaagtccccacgagaagaagaagaagaggcggtcccggtcgcggaccaag

SEQ ID NO: 460015 - DNA, 51 bp, Homo sapiens
gtcgatttgtccttcactacaggatgtatcaggacaaactggcttctctca

SEQ ID NO: 460016 - DNA, 75 bp, Homo sapiens
tggagaccctcacggagctgggcgacgagctgaccctgggagacatcgacggattgtcagtggcttcgccccgag

SEQ ID NO: 460017 - DNA, 98 bp, Homo sapiens
gatgatgatgaagaggatgatgatgaagaggatctgaaacttgcccacccttcgggatattgcaggacgctgcatcatgagcgacagtaaatgtgaca

SEQ ID NO: 460018 - DNA, 101 bp, Homo sapiens
cgagtgcagccggtgacccggcgagaggcggcgccgctcccaagatgtcgcagacggccatgtccgaaacctacggtgaatccgccatactacatcccgct

SEQ ID NO: 460019 - DNA, 90 bp, Homo sapiens
tgtgaacgtgctgtggaatatatgaataacctgggtatcttgtggtctgaaagagaagaaattgaaactgcacaggcttacctagagtca

SEQ ID NO: 460020 - DNA, 82 bp, Homo sapiens
gcaacaagaagggcaaggtccctgtcacctacttggaactgctcagctaggtcagcccaagactaccccgtcggtcattctg

SEQ ID NO: 460021 - DNA, 76 bp, Homo sapiens
ggcgacgagctgaccctgggagacatcgacgtgatgggaccagtggaggccgcgcctgaataccgcgtcatcgtgg

SEQ ID NO: 460022 - DNA, 82 bp, Homo sapiens
ggatcctacatgtgccatagggaaaatcctgccttgcttcgttgggcctatgcaagaacaataaatgtctatcctaatttca

SEQ ID NO: 460023 - DNA, 83 bp, Homo sapiens
cccattcatgtgcctccaggttatatctcacagactctttttgatcagaacaatgctgcaaaaaaagaagagtcagaaactgc

SEQ ID NO: 460024 - DNA, 74 bp, Homo sapiens
ccttctgcatctggatctcttgttggaagagaaaatgaggtgacaatctccaatagacttgtgtcttcaccttg

SEQ ID NO: 460025 - DNA, 100 bp, Homo sapiens
agatggcggacagtgcggaactaaagatatccttggaacagaagatcttattgtggaagtgacttccaatgatgctgtgagattttatccctggaccatt

SEQ ID NO: 460026 - DNA, 83 bp, Homo sapiens
caacactattgtcgtgccgcttttggaggatgggagaggccatggcaaaggtgaacacacagtgttcatcccctcaggaggac

SEQ ID NO: 460027 - DNA, 89 bp, Homo sapiens
gtaaatgcaccaatcagcatgctgtgtctagctcaagaatgaatggcagatgtggagctattcttgctgatgaaatgggtttagggaag

SEQ ID NO: 460028 - DNA, 100 bp, Homo sapiens
aagctttcaagaaattggcattgaagttacatcctgataaaaacccgtgtgctggaattgatgttcgtctgtgtgatgttggtgaggccatccaagaagt

SEQ ID NO: 460029 - DNA, 83 bp, Homo sapiens
ccggcagctccaaccatgggaggccgcgtctttctcggtggtataagttgaaatccaaaccaggaaagaaggacaaggagcga

SEQ ID NO: 460030 - DNA, 83 bp, Homo sapiens
cttcaggatagtatcttggccagggaactcaaacagcagatgcaggttgtaaagaagaaagttctaccctttctgtcaaaatg

SEQ ID NO: 460031 - DNA, 100 bp, Homo sapiens
cgaggacagtggcacttcagctgccagctcccctaccatcatgcggaaaagcagcggcagccccgactctcagcactgctcgtgtgggcgctcgtccaca

SEQ ID NO: 460032 - DNA, 100 bp, Homo sapiens
ctggctagactggaggagagggtatctcagatgaagacatcatcaacattactcttcctactggagtccccattcttctggaattggatgaaaacctgcg

SEQ ID NO: 460033 - DNA, 82 bp, Homo sapiens
agaggaaggaattcctggatgacttgttcagcttcatgcagaagcgagattagaagcccaggacccaggaaggagacacagg

SEQ ID NO: 460034 - DNA, 100 bp, Homo sapiens
gaagaatttcgatctccgccctggggtcattgtcagcatataggttgctgtagatgaatgttcttagctgtcatgtttaaaaatacttctgcttcgttac

SEQ ID NO: 460035 - DNA, 82 bp, Homo sapiens
agggaaccctggtcaccgtctcctcagaaatcatgagtggaggatctcaagtccacattttttggggtgctccaattgctcc

SEQ ID NO: 460036 - DNA, 82 bp, Homo sapiens
ggggaggatatgacacgcgatatcgcagattggatgactgattattggacagaatggcatcttgtcaacacctgcggtctcc

SEQ ID NO: 460037 - DNA, 82 bp, Homo sapiens
ctgaaggctgcgcaggaggagtatgtcaagcgagccctggcattttttactgtctacagaaacttattgtaattcatttttc

SEQ ID NO: 460038 - DNA, 101 bp, Homo sapiens
cttggaccctggaaaacctggccctcttcaatttctgacaaaagagctgtaggtaaaacttgcctactgatcagttacacaaccaatgcatttcctggaga

SEQ ID NO: 460039 - DNA, 50 bp, Homo sapiens
ggtctatggactttccgaagacgaggagctctgccagtgccggccgggag

SEQ ID NO: 460040 - DNA, 57 bp, Homo sapiens
cggggatggacctccagatttccttactgtttccacctggatgtttgaggttgtgta

SEQ ID NO: 460041 - DNA, 97 bp, Homo sapiens
ggctgcgggagccgggctaggacgccgagcggtgactccccgccgctcccgggggccgtgacgatcttcttcagcagtatcgttctgctgtgtgcaa

SEQ ID NO: 460042 - DNA, 100 bp, Homo sapiens
caaatacaactggaaaacagctttttgatcagaatcttgtggaagaagaatgaagttgctgattatgaagctacaacattttccatcttctataacaaca

SEQ ID NO: 460043 - DNA, 100 bp, Homo sapiens
cttcctccctgtgtactttccatttgccttcctgggtaaacactacacgtgaagagtggtgaaagggaacattgattactgaagtgccctggagagggaa

SEQ ID NO: 460044 - DNA, 75 bp, Homo sapiens
gactggtgacttcacttttgagtgcaactgccttccagtctcctgacatcgacaaccaccatgcactcattgaat

SEQ ID NO: 460045 - DNA, 108 bp, Homo sapiens
cagaccctggagcctcagttggaagcagccgatccagcctgcggagcctgtggggcagggatcatggcccaagttgcaatgtccaccctccccgttgaagatgaggag

SEQ ID NO: 460046 - DNA, 84 bp, Homo sapiens
gattccaagtaactcttatttggtgtttcccattaaacactaccaggacaaaatcaggccttacatccagctgccatcgcacag

SEQ ID NO: 460047 - DNA, 75 bp, Homo sapiens
ccgtgctggaaaagtgagaggtcagactcctaaggttatcatggctactaataggattgatatcctggactcggc

SEQ ID NO: 460048 - DNA, 83 bp, Homo sapiens
gtcaccgtggggggcaagcagtacctcctaggactctatgacacggccggacagcaataatgacgatgaggacctgacaccag

SEQ ID NO: 460049 - DNA, 82 bp, Homo sapiens
gctgatgtgaaaaataccacgacaaaaccaccctagactcgggtcaagctggaaagcctggaagacgcctacattctgcggg

SEQ ID NO: 460050 - DNA, 97 bp, Homo sapiens
tctgctttcatggagttcacagaagagtcgaggagttcaaacgatatgtcaataaacttcgaagcaagagtacagttttcaaaaagaagcatcagat

SEQ ID NO: 460051 - DNA, 100 bp, Homo sapiens
agagtaaagcaaagagaaaggaagcaggcccgttggaagtggttgtagctctcaacgaaatgtggaagtgtcagaacatgcttcggagccatgtacgcga

SEQ ID NO: 460052 - DNA, 82 bp, Homo sapiens
tctgctcctcggtcgcccacccgcctgcccgccatgtgctcacagaacatttcctgcctgttgctcacactctgttgtccac

SEQ ID NO: 460053 - DNA, 100 bp, Homo sapiens
atctagaaaataccaaaagagaaattttagcacaactccggacacttgttttccagtgtgatcttacccttaaagctgttcgatctggggctaatgttct

SEQ ID NO: 460054 - DNA, 111 bp, Homo sapiens
ggctgatcttgaaggtttacacttgtcaacttcctcttcagtcatcagttttgagattacgggaaatgatgagacgttcgttgagagcagctggtttgggtagacatgaag

SEQ ID NO: 460055 - DNA, 51 bp, Homo sapiens
ctcatagcagattcaaatccaatgaaaactttagaaactgttcctttggag

SEQ ID NO: 460056 - DNA, 75 bp, Homo sapiens
ctgcctcgccgcgtctcgccacggtcagcccaaggccaaccccactgtcactctgttcccgccctcctctgagga

SEQ ID NO: 460057 - DNA, 75 bp, Homo sapiens
gctgcccatctgcctggcagtagggaggttcccctgaaggatgctaaggaatacgctgaatccataggtgccatc

SEQ ID NO: 460058 - DNA, 74 bp, Homo sapiens
gagattcagccagcacactcctcgcgagcaaggtgtcgtgaaaactacccctaaaagccaaaatgggaaaggaa

SEQ ID NO: 460059 - DNA, 110 bp, Homo sapiens
cccagggcctcggcggccgctctgcctgcgcgctgctcctgctctgctacctgaatatatacagccctgctctgggacacacctccattggatttaaaagacagtcctcg

SEQ ID NO: 460060 - DNA, 50 bp, Homo sapiens
gagagaaaacttgtcagttcctctcagtgggtcatgataactgggtacgt

SEQ ID NO: 460061 - DNA, 90 bp, Homo sapiens
tggaaacaaagggaggaactgtttgtagccctcgtccagacgccccaaacaaacagccatgacgctgatggagtacctcatcaagaccgg

SEQ ID NO: 460062 - DNA, 98 bp, Homo sapiens
ttcaggaaattctggaaaccgaaaggacttatgtacaagatttaaaaagcatcgtagaggtgcagcggaactgctgcctgacgctctgcaacttcagc

SEQ ID NO: 460063 - DNA, 100 bp, Homo sapiens
gcccagtgtgagggtgcaggcagcaggaaacccacagccagcagctcccggctaaaactggacaaagaccgcaaaaagatcctcgaacggaaagccaaat

SEQ ID NO: 460064 - DNA, 100 bp, Homo sapiens
gggcaagtgagagccggacgggcactgggcgactctgtgcctcgctgaggcactgccagtgaaagatgtagaagataaacctgaacaacaaaccagaaca

SEQ ID NO: 460065 - DNA, 75 bp, Homo sapiens
ttccacctcctgacacaacaccactcagtaaagtcagtgataaatcttttgtttgctgcatatactggagatgtg

SEQ ID NO: 460066 - DNA, 100 bp, Homo sapiens
tcctcggtcgcccacccgcctgcccgccatgtgtgttggagcgggccggagagaagtagagtgggctgcgaggagaaggaaacaggcctttcggaggctc

SEQ ID NO: 460067 - DNA, 90 bp, Homo sapiens
gtggttacggcaacagcagaggatttggtggagatcatgaagactatgatccacaaacagtgaggcttggaagtcgatacagtcatgttc

SEQ ID NO: 460068 - DNA, 82 bp, Homo sapiens
atgggatatagcagaagcagcagcagcaactcctgatttaggggcaatcgatgattcactggcaaaatttgctggcagaaaa

SEQ ID NO: 460069 - DNA, 75 bp, Homo sapiens
aggattccaagtaactcttatttggtgttgattgagacactctgtgccctgggggctcagtgccgctggtctgct

SEQ ID NO: 460070 - DNA, 101 bp, Homo sapiens
cctgaaggcaccttggccaggtccccgtccattgatagcattcagaaagatcccaggtgaaaggtgtagcagtcactcggcctacacccacagcatcgacc

SEQ ID NO: 460071 - DNA, 97 bp, Homo sapiens
ggatgatcccaaagccaaggagaagttctcccagctggcagaagcctatgaggcccctggccccaacatggcccgtcgctctcagagctcctcgcag

SEQ ID NO: 460072 - DNA, 74 bp, Homo sapiens
cactctttgtgccgcagcttcgcaggaattgcattttgtgaaaaaagaacaagaattttctgcaaggatcatat

SEQ ID NO: 460073 - DNA, 100 bp, Homo sapiens
ggagattccctgggcctgcaggaagcccttccgcggaccgaaaggaaaagcttttgacatcacctatgtgcgtctcaagttccacaccagccgcccggag

SEQ ID NO: 460074 - DNA, 75 bp, Homo sapiens
cattggggtgcagcagctgcaccccaccttgatccagcggacttacggtataaccccgttttcacacgaatggcc

SEQ ID NO: 460075 - DNA, 50 bp, Homo sapiens
ctggtttggaagttgcaatcaaaatgaaagtgaagtcactgcttttgctg

SEQ ID NO: 460076 - DNA, 100 bp, Homo sapiens
tatcatgggacttcatgatgaattcctagatgggcaaagatggattgaagacaaccttgatttcagtgtgtcagccataatggcaggtgaagaaattaat

SEQ ID NO: 460077 - DNA, 100 bp, Homo sapiens
tgagagcggacgggccatacccaataaccaggtgcttggcaaaatcgagcgggccattgacctcctgccccccgaggtctgcagtctcctgaacccagca

SEQ ID NO: 460078 - DNA, 83 bp, Homo sapiens
tggagcctccagaaatgctgtggagcactcaacatcagtgatagaaccatacctcagccccccattcttcagctttcagtgga

SEQ ID NO: 460079 - DNA, 97 bp, Homo sapiens
gctgcagctcctcctgtgcggagaagctgctcgagaatgtcgcagaaagaagaaagaatatgtgaaatgcctggaaaaccgagttgcagtcctggaa

SEQ ID NO: 460080 - DNA, 75 bp, Homo sapiens
cggtggccgcgctgctactgggcgccgcgggccacctgtaccccggagaggcctcgctcaaggagcacccccggg

SEQ ID NO: 460081 - DNA, 98 bp, Homo sapiens
ctacgtctgtgcggctgcgtggggctcggccgcgcggactgaaggagactgaaggaagcctgcctggaaagatgggtccactgccacgtgtgttctgg

SEQ ID NO: 460082 - DNA, 98 bp, Homo sapiens
tgagagcctgaggagccattttgagcaatggggaacgctcacggactgtgtggcaaaatacatatctcagtgcattgatgagatcaagcaggagctga

SEQ ID NO: 460083 - DNA, 101 bp, Homo sapiens
gaaaaatggaccaacttctttggcaagtggacattttactggctcaaatagttttgaggcagctgtgccatcaaatagccacattgtttcggaacctggaa

SEQ ID NO: 460084 - DNA, 90 bp, Homo sapiens
cggcatggctctcctggtgctcgggccgcgttcgcaccaaaaccgtgaagaaggcggcccgggtcatcatagaaaagtactacacgcgcc

SEQ ID NO: 460085 - DNA, 83 bp, Homo sapiens
ttgaagaagtcggctctgggctccagtgcgggaatcacacacatacctcaggttggtcaaagaaaaagtgatgtatgaaaaag

SEQ ID NO: 460086 - DNA, 100 bp, Homo sapiens
tcacctctatcatgtttctagtagcgcttagtgaatatgatcaagttctcgtggagtcagacaatgaggtgttccattgcctaaagaggagaacatttct

SEQ ID NO: 460087 - DNA, 100 bp, Homo sapiens
ttgaacagtcctgtatcaaaactgaagatggtttgaaacagcttcacaaggctgaagtacagtggtgtgatctcggctcacggcaacctctgtctcccag

SEQ ID NO: 460088 - DNA, 155 bp, Homo sapiens
atacatttaggagccgggatgcttcatctggggtttaagagatccccattgagcaaatgaggaaaccgaggctcagtggccaaggtggaatacgtcaggaagaagccaaaattaaaagaagtccaggtgaggttagaggagcatttggagtgcgc

SEQ ID NO: 460089 - DNA, 100 bp, Homo sapiens
ccgagatttgggagagacgctctgaactgactgccccgcatcaccggagcgtcccagctgcgaggagtgtggggctgccttccaggaggatgatgtcatc

SEQ ID NO: 460090 - DNA, 74 bp, Homo sapiens
aagactttccaggaagaggaacagcatcttcagggtttggatccagctcgagtcaacgtccctgtcattggtgg

SEQ ID NO: 460091 - DNA, 85 bp, Homo sapiens
cacactgccacctgattaaaggaattgatttctctatgaatcatcatcaagaactctgggagaacttttgaattcataaccaagc

SEQ ID NO: 460092 - DNA, 90 bp, Homo sapiens
ttacgacagcccggtcggatcatggggttgcccagggggccggagggccagggtctcccggagctggagcagatccgcagggacatccga

SEQ ID NO: 460093 - DNA, 98 bp, Homo sapiens
tcagccttcctgcataccctggaccagcagaaacctagagtgttcccagtgacctgacagcagaggagcgtcaagaactggagaacatccgacggaga

SEQ ID NO: 460094 - DNA, 100 bp, Homo sapiens
tggcttccccgacgcagcccagcggcacggagaaaggtctcggcgcggaagatggccggcggcgtggacggccccatcgggatcccgttccccgaccaca

SEQ ID NO: 460095 - DNA, 90 bp, Homo sapiens
tcgccatggggaagaattacgagaaggcactggcagcgccgtgccgtccctgcagtgacaccgaggtgctcctagccgtctgcaccagcg

SEQ ID NO: 460096 - DNA, 100 bp, Homo sapiens
cttggctgtacagctcgatctaggttctgcggcacgggatggcggaggcgcctcctgtctcaggtaagaatgattgatgttggctgatattggagtgctc

SEQ ID NO: 460097 - DNA, 75 bp, Homo sapiens
gagcaagatcaccgtgacatccgaggtgcctttctccaaaagctgaagtacacaaagtttcaaggccagaaaatg

SEQ ID NO: 460098 - DNA, 96 bp, Homo sapiens
ctggaccccagcactggccggcggttctcggagcacaaactctgcgcggacgacgaatgcagcatgtcacatttgaagacgagcactgaggatgag

SEQ ID NO: 460099 - DNA, 74 bp, Homo sapiens
ctttacctgcttcccaatcccactgatgaggatcagcccatggctgcacatggtccgtctaatgctgttggaga

SEQ ID NO: 460100 - DNA, 97 bp, Homo sapiens
cgcgaggacccgagccaggcggggacaggacggcggggcgagccaggtttattaatgccagaagaagaatagtacagcccatgattgaccagtcaaa

SEQ ID NO: 460101 - DNA, 83 bp, Homo sapiens
ggggaagcagcacgggatcccagcctcaggcctgcacggacggtgttggttgggggcgaccattgacgaggtggagacggacg

SEQ ID NO: 460102 - DNA, 100 bp, Homo sapiens
gaggagcaagaggaccctgcggactactgcaaagatcatccactctggatgtcatccaaatggctttccatgaatgtcttaatgctagatgaaaaacgtg

SEQ ID NO: 460103 - DNA, 98 bp, Homo sapiens
agccaagaggaggacagttcgctacacagcaatgcatcgaggaccctgctgccgaagctgattccctccggtgcaggccgggagtggctggagcggcg

SEQ ID NO: 460104 - DNA, 78 bp, Homo sapiens
ctcgagtccctgaagagagaaggcaaagaacctctggtgttgaaagacgctgaccggaaaggagattgagattgacat

SEQ ID NO: 460105 - DNA, 100 bp, Homo sapiens
cagcctcctgagtagctgtgattacaggaacctgaagaaagatctagctcagcattggagcattgctgatattgttggaattccacagcaattatccaaa

SEQ ID NO: 460106 - DNA, 82 bp, Homo sapiens
agtgagaagcaagaaggccctggacacagcaatatctctgggctttcacaggtgatttgaagatattaaagctagaaattgg

SEQ ID NO: 460107 - DNA, 82 bp, Homo sapiens
actgtccgcctggagcgttacaaggccttctacattaccggaaggagggagccccaggaacaggagtcccaccgaagaactg

SEQ ID NO: 460108 - DNA, 82 bp, Homo sapiens
aagatgtataagaagtcttaacggaactgtggctgcaccatctgtcttcatcttcccgccatctgatgagcagttgaaatct

SEQ ID NO: 460109 - DNA, 74 bp, Homo sapiens
cgttgtctaaatttcggtagccatggcacaagaatatagccataaaattttgagtagaaaaatccagaaatttg

SEQ ID NO: 460110 - DNA, 98 bp, Homo sapiens
gttcagttgtggcggttgctggtcagtaacagccaagatgctgcggaatctgctgctggatgaaaaagaaagtcggcgtctgttccaacagatccttt

SEQ ID NO: 460111 - DNA, 100 bp, Homo sapiens
ggacatctgaaagccaggaaatgaggtgctcagcacagtggactttgtcgcccctgatgatcgagttgtcttccgcacctgtgaaagagagcagaacagg

SEQ ID NO: 460112 - DNA, 100 bp, Homo sapiens
cgggagtattatgaaaagatcaccttcacggcatggtgcaactcccacctgcggaaggcaggcacacagatcgagaacattgatgaggacttccgagacg

SEQ ID NO: 460113 - DNA, 88 bp, Homo sapiens
tctgcacgacgatgaggtgacagtcacgggtctgcggaagagggagctgctgaaggagctgctaccagtcatcgggcagaacctccga

SEQ ID NO: 460114 - DNA, 141 bp, Homo sapiens
ttgcaaaagttttggaattagacagtgtgaaaagtgaaattgttccactgttcactagtctagcttcagatgaacaggacttatcaaactggtttcaaagcacagagctcaagtaatttacaccagaaataccaagggtgg

SEQ ID NO: 460115 - DNA, 83 bp, Homo sapiens
gagcgcttctttaagggctacgggaagatcctggaggtggatctgaagaacgggcagcctgcttctgcaaagtggtacgatcg

SEQ ID NO: 460116 - DNA, 82 bp, Homo sapiens
ctggggctgaatcttcaacctgtcaaagccttcttaattatgtctgagaaaaggatgaaaactttcggaagagaaagttgcc

SEQ ID NO: 460117 - DNA, 90 bp, Homo sapiens
gggctatggccggagcttgagatacgccgctctgaatcttgccgccctgcactgccgcttcggtcactaacttcacagagaatgcagttg

SEQ ID NO: 460118 - DNA, 100 bp, Homo sapiens
tagcttcagaaatcagaaaaacatttgggaggtgtctagcccagtggaccttctgaaggtgttcttcagatgatgcagacgagaattggggctttacagg

SEQ ID NO: 460119 - DNA, 50 bp, Homo sapiens
acaccagtggggcagtgcctcgagtattggaacagttgtgctgctgccag

SEQ ID NO: 460120 - DNA, 100 bp, Homo sapiens
aatcttctgggagctgaggaaccagatatcttgaaaagctgccagaaaggtttggacttctcccactgagcatgacaagcactcgaaaggctaaatcaac

SEQ ID NO: 460121 - DNA, 101 bp, Homo sapiens
gctttcaacatgattgaccagaaccgtgatggcttcattgacaaggaggacctgcacgacatgctggcctcgctggattaccagagactgatgactgtggc

SEQ ID NO: 460122 - DNA, 98 bp, Homo sapiens
ctttgtgacagcgttggccagcatctgcagcagtgcagccatcgcatgggggcgttatcaccactactgcacccagtctcactctgttgcccaggctg

SEQ ID NO: 460123 - DNA, 100 bp, Homo sapiens
aaaccagttattgaatatcaagaggaggagttgttgattgagaggatccagaatccagatctctggaatagctaccaggcaaagaaaaaaactatggatg

SEQ ID NO: 460124 - DNA, 98 bp, Homo sapiens
agcaatggatgcacaggaagctttagctagaaggaatgatgatgtctcagtataaactttctcagaattccatgcacagtagtcctgcatcttccaat

SEQ ID NO: 460125 - DNA, 74 bp, Homo sapiens
tgagcatgaggttttccaatcaggaggagacatcacagctttcccagatcgggaggaaaaatatggaatgtgtt

SEQ ID NO: 460126 - DNA, 73 bp, Homo sapiens
ttcaagccctggctcaaaatatggtagtcgctcttctaaaacttttaaaccaaagaagaacattccagagggt

SEQ ID NO: 460127 - DNA, 100 bp, Homo sapiens
catctgtcctccacagaggctttttgtgtgttttatcatctaaaatccaatccctcggacatggatttgattgacatactttggaggcaagatatagatc

SEQ ID NO: 460128 - DNA, 100 bp, Homo sapiens
agaggtagaggacgatactctgaccgttttagtagtcgcagacctcgaaatgatagacgacacaaatgccagaccctaagaccttcaagcagcactttga

SEQ ID NO: 460129 - DNA, 82 bp, Homo sapiens
cagagagtctacctgcccgacgcgttcgtggagaggagcagcggttgctgttggaggaggaaacatttactagggacaactt

SEQ ID NO: 460130 - DNA, 80 bp, Homo sapiens
tggggttggtgtgattagcttcgcagtctggaaagctttaggagttcacagtgaggagatgttaaagtaacccatcttgc

SEQ ID NO: 460131 - DNA, 83 bp, Homo sapiens
ccgggacagtctccgaagtctcgagcagacctgcctagagctggaacgttacctccagagcgagccctgctatgtttcagcct

SEQ ID NO: 460132 - DNA, 75 bp, Homo sapiens
aaagaagacaagagagaacgcaaacagtttgaagctgaggattttattgggaaaatgaggtacgttagtgttcgc

SEQ ID NO: 460133 - DNA, 100 bp, Homo sapiens
ttgacaactatgcagtcacagttatgattggtggagaaccatatactcttggactttttgatactgcagggcagtctgcggcggtgttctggtgcacccc

SEQ ID NO: 460134 - DNA, 75 bp, Homo sapiens
gatttgcaaatacacacactgctccagccacagtggttcttgtgtcaagtgctcaaaaatgtgataactttgctg

SEQ ID NO: 460135 - DNA, 100 bp, Homo sapiens
gaagagtcaataactgaagacttaagtggcggcctggtcctcctgaaggtgaaggcaaaggtgcgacagtgcctgcaggagcggcggacagtgcccattt

SEQ ID NO: 460136 - DNA, 100 bp, Homo sapiens
agatttccacagaaggactgggatgatacaccttttccacagggaattgagttggctcttgatggaaatgtgtatgatcatctcaaggattatttaatag

SEQ ID NO: 460137 - DNA, 80 bp, Homo sapiens
cgacgtcttgcctgtgtcccacttgttcgcggcctatagctccctagatctttagcttctactcccactgctcctaccac

SEQ ID NO: 460138 - DNA, 88 bp, Homo sapiens
agaggatcatggcggatggccccaggtgtaagcgcagaaagcaggcgaacccgcggcgcaataacgcttagaccatgctcagcctcca

SEQ ID NO: 460139 - DNA, 100 bp, Homo sapiens
attccggacacactgtttgcagggaggtgtagacgctgatcaccgtttccagtcattttaaaaattcagactgtgccctgtccacggtgcctcctgcatg

SEQ ID NO: 460140 - DNA, 100 bp, Homo sapiens
aaaagattacctgcagcagcttcaggagggacgtccatctgcagcgggcttcgatcggcatttactgttgcaacaaggacagtgtcagagcaggctgtaa

SEQ ID NO: 460141 - DNA, 75 bp, Homo sapiens
cgccgaggcgcttctgcatctgtgggccgaggaatccccttctggtcgaaggaaagctcttgctactagcagcat

SEQ ID NO: 460142 - DNA, 100 bp, Homo sapiens
ctgcctaccgacaagattgatgctgctctcttctggatgcccaatggaaagacctacttcttccgtggaaacaagaggcgctctggcccatccagaccgg

SEQ ID NO: 460143 - DNA, 100 bp, Homo sapiens
cagaaactctttgtgtctctaaggccgatgaggaatttggaaacacatgtgggacatacaagcgttggatatagagtggtggtgaccgcggtggcttcaa

SEQ ID NO: 460144 - DNA, 50 bp, Homo sapiens
gacacagcaatatctctgggctttcacagatctccagcaccctgccggtg

SEQ ID NO: 460145 - DNA, 100 bp, Homo sapiens
ttctcccccaattcatacctgctcagagcatgctcagggccccagcaagcctccagcagtgatatgaggccccaggattcctggcgaggtcctcctcccc

SEQ ID NO: 460146 - DNA, 74 bp, Homo sapiens
agcagcgcagtaccaccttccagagatgttttgcgtgtgaagctgtgtggaaatgtgaaatactaccagtcaca

SEQ ID NO: 460147 - DNA, 75 bp, Homo sapiens
ccgcgatggaataatgcccagcggcccgccaggtcccgtgggtaattccagaattgattggccataccattgtca

SEQ ID NO: 460148 - DNA, 100 bp, Homo sapiens
caggctggtacggaggagactgcatgcatttgaatataacctgccgctttgcaggtgtattccacgtggagaaaaatggtcgctacagcatctctcggac

SEQ ID NO: 460149 - DNA, 108 bp, Homo sapiens
agagatgaaacaattgttgatctgcatttgagttggtattatctgtttgcttggggtccagccattcaggatctggacgttggtggttggctatgtgttgactgtttc

SEQ ID NO: 460150 - DNA, 75 bp, Homo sapiens
catcttccaccacagcttagaggacctgagggcactcgctttgctcctgtcagtacacactcccaaacagttaaa

SEQ ID NO: 460151 - DNA, 75 bp, Homo sapiens
aaacaactagcaaaacccaaagagaaaattcccatcattgaggaagaacgtgcaaaacgtgaggagctagagcga

SEQ ID NO: 460152 - DNA, 50 bp, Homo sapiens
tcaaaatccatagatggaaaagatgaatgtccctcttccagtggaaagcc

SEQ ID NO: 460153 - DNA, 101 bp, Homo sapiens
aggccgcctccagcgccgcgggatgtagcgcgggggaccgcggcccccagcagagcccgcctgcccggctcatgaacaggctgaacactttgccacgaggc

SEQ ID NO: 460154 - DNA, 75 bp, Homo sapiens
ggctaccatggtctacaagactctcttcgctctttgcatcttaactgcaggggccaccaaggacatggggaagat

SEQ ID NO: 460155 - DNA, 75 bp, Homo sapiens
attcttcagaaagtgaacttggcattttagatctaattcaactcccagggttgctagagctccttgtagaatatt

SEQ ID NO: 460156 - DNA, 82 bp, Homo sapiens
atgccacaggtgttcaagagctagatgaagatggagtgaaggtacctgagcgcaggaaccatggtcttcattgctgcctcag

SEQ ID NO: 460157 - DNA, 85 bp, Homo sapiens
tgcgcagacagagctattccagcaccagcagagatatgagtaaaattagcctaatcagaatgttagttcctgaaaacattgacac

SEQ ID NO: 460158 - DNA, 98 bp, Homo sapiens
gtgaggcgatccgctggcgctagtctgaccctccgccaggcaaaaggaaggaatcacctcctcatgtagaaaattactgtctaccagaagctatttca

SEQ ID NO: 460159 - DNA, 100 bp, Homo sapiens
gggccctcctcagtgttgacctatgcctctccgccactcatcaccaatgtcacggctgtggtccaaggccatttttgctggctataagcggggtctccgg

SEQ ID NO: 460160 - DNA, 100 bp, Homo sapiens
cacaacccgggccaggacctggttatccaccgcacctcggtgcccgcaccgctcaacagctgtctcctcaaattaaatccagatgtgaatgttttccaac

SEQ ID NO: 460161 - DNA, 50 bp, Homo sapiens
ggcggacatggacgtggtgaatcagcacgggctgtatattgggagttgga

SEQ ID NO: 460162 - DNA, 82 bp, Homo sapiens
accttatagagtagtagaccagccccttaaacttatgcctcaagactggacttgcaattgtgaccaaatatattacaaaggg

SEQ ID NO: 460163 - DNA, 100 bp, Homo sapiens
ggggcgggcccccgcctgcgttcgcggcgccagtaaccacctgctgttccaacaagtgcccatggttgaaattgacgggatgaagttggtacagacccga

SEQ ID NO: 460164 - DNA, 50 bp, Homo sapiens
ggaccaggttgagctgcgcgcaggctttccaagatgagatgggattctcc

SEQ ID NO: 460165 - DNA, 51 bp, Homo sapiens
tgccttcatcctctataacaagtatatcacataaacttattggtgtccact

SEQ ID NO: 460166 - DNA, 100 bp, Homo sapiens
cagggtctcagcgcgggggacgactcagtgtggggtgatcagccccagatttgacgtgcaactcaaagacctggaaaaatggcagaataatctgcttcca

SEQ ID NO: 460167 - DNA, 88 bp, Homo sapiens
gcgtcttcctcaaggtggggttcggggggccaccgaatcgctgtcacgccggcagcctcccgcgacgatgcccctcaacgttagcttc

SEQ ID NO: 460168 - DNA, 88 bp, Homo sapiens
cagccagtggtggatacattaaacgcctacgaggacaagcagaaactcaagcggaccgagatcatcagccgctcctggttcccctctg

SEQ ID NO: 460169 - DNA, 75 bp, Homo sapiens
gtttgggaaacaaggcttccagtgccaaggtctgctgagaacagacccagtccctgaggaaggagaagatgttgc

SEQ ID NO: 460170 - DNA, 100 bp, Homo sapiens
ctttcatcattcacccttggcacagatttggtgctatggagaaatttttggtagaatataagagtgcagtggagaagaaactggcagagtacaaatgtaa

SEQ ID NO: 460171 - DNA, 98 bp, Homo sapiens
ttgccgcggcctgccgcaatggaaacatctatattctgagaaggaggcactgtctcacccccaccggggacatcacgctctgctcctggcaccccagg

SEQ ID NO: 460172 - DNA, 100 bp, Homo sapiens
caaaaattcagcagcagaaattccagtgactagtaatggagaagttgatgactctcgtgaacatagctttaatagggatgggaagcacaaaatgcaagag

SEQ ID NO: 460173 - DNA, 137 bp, Homo sapiens
aaatgctgtcttgcttaaaagaagagatgcctccccaggagctcacccggcgactggccacagtgatcactcatgtcgtttgaaggatgacctctaggaagaaagtgttgctgaaggttatcatcctgggagattct

SEQ ID NO: 460174 - DNA, 112 bp, Homo sapiens
gctattcctggtctacatcctgcgggtgcctttgaaaatcaacgacaacttgagcacagggagttcccattagacttgaagttgggccacgtgatatgaagagctgtcagtt

SEQ ID NO: 460175 - DNA, 100 bp, Homo sapiens
accgccctggccatctaccatgtgtaccaaaagaattggtggagctccatttgaagctgatgaggaaaattggcaaatctgttactgcagacagatggga

SEQ ID NO: 460176 - DNA, 90 bp, Homo sapiens
cccgctgcctgcctgcctggcatctctctctcccgttctgaagttgttgataagaagatagaagagtttctttctagctttgaggagaag

SEQ ID NO: 460177 - DNA, 90 bp, Homo sapiens
ctcggctcctcccaggtggcctcccgcgtgctggccatgaaggtcattgattacaacggggaacgcacgctggatggttttaagaaattc

SEQ ID NO: 460178 - DNA, 100 bp, Homo sapiens
agggctcttacctgcggaacggctggaacgtcatggacttcgtggtcgtcctcacaggagtgcgctagatgttggaccgagtatggaatccgccatttcc

SEQ ID NO: 460179 - DNA, 83 bp, Homo sapiens
gccgcaccaagaaccaaccctgccagcacctggaccttggacattcagacttcagaatgtgattacagtggcgagatcttgaa

SEQ ID NO: 460180 - DNA, 83 bp, Homo sapiens
ctgtccgggggcctggctaaggaaaccctattacctccagtgtggacgaatgtggaacctcgctctgtggctgtgttcccttg

SEQ ID NO: 460181 - DNA, 82 bp, Homo sapiens
ccgaatcgctcctgcagcagaggaatatattaaaggaatctgtgaacctgaactagaagaaagagaatgttaccccaaggac

SEQ ID NO: 460182 - DNA, 49 bp, Homo sapiens
ggagctccaggcccgtcggcgcggaggtactccaaagattcaggtttac

SEQ ID NO: 460183 - DNA, 101 bp, Homo sapiens
caccaggactcagaggccgccatcaaccgccagatcaacctggagctctacgcctcctacgtttacctgtccatgatgctgggctcttgcactgtttggtg

SEQ ID NO: 460184 - DNA, 82 bp, Homo sapiens
cgcagccccctcgggaggcccgacgcgactgggcccctcaggttagagcagccagcgggtacagaatggattttggaagagg

SEQ ID NO: 460185 - DNA, 82 bp, Homo sapiens
aaggcttcactacccttatcccggagagctgacaatgatgaatctcagacctagatgtgaaggctggtggaggctgtgtaat

SEQ ID NO: 460186 - DNA, 75 bp, Homo sapiens
ggcggaacatccggaggctgggaaatgccaaaactggacaagccaaggcatctgtagccaaagtaaacaaatcta

SEQ ID NO: 460187 - DNA, 97 bp, Homo sapiens
ctcaggaccgtggggagttggctgaaggacttggggagcccagaagctgccaccgaaccaaggcatatctttttcttgcacatcaaggaggccctct

SEQ ID NO: 460188 - DNA, 75 bp, Homo sapiens
gaattcgccgtgcccgagaatagctccgtccagcagatctcgatttattaatgatgcataccaggaagtactgga

SEQ ID NO: 460189 - DNA, 97 bp, Homo sapiens
tctctacaagtgcccctgatgagccccttctggcaacattaaatatcattcacagtgttgttctctcagttcttgacaaaaaccaaaggactagaga

SEQ ID NO: 460190 - DNA, 74 bp, Homo sapiens
cgcgtccgccgattcctcctccttggtcgccgcgtccttggctggcgtggggccgtggagcccatgcagatcga

SEQ ID NO: 460191 - DNA, 100 bp, Homo sapiens
ttccaccatgattgtgaggcctccccagccatgtggaactgggagctatccagtttgggaagatttcataaacaaagcaggaaagctgcagtcccagctt

SEQ ID NO: 460192 - DNA, 100 bp, Homo sapiens
tggagatttacagatggattcgggatgctctgagacccccattacaaaatataaactctgttcagatttctcgaatgctggcagccaaaaccgttttggc

SEQ ID NO: 460193 - DNA, 87 bp, Homo sapiens
accggccttgatgaggcaatggaatggagcttgcagagctagaaagtgccctccaagagcagcatgaggtgaatgcatctttgcagc

SEQ ID NO: 460194 - DNA, 82 bp, Homo sapiens
ctgacaacaaactcgaagactggcatgagtgctcaacaggaaccttggattatattttacaacgctgtcagttggctctgca

SEQ ID NO: 460195 - DNA, 100 bp, Homo sapiens
ccttccttctctgcagcttccccgcagggccaattcctgtccccccagcagcatggcatcgtgtgctgaaccctctgagccctctgccccactgcccgcc

SEQ ID NO: 460196 - DNA, 90 bp, Homo sapiens
cgataatgcagttcttattactaggagtctgcactatggaaacaacctgtcaatccagctcaaggcacacatagcccagacacccatgag

SEQ ID NO: 460197 - DNA, 75 bp, Homo sapiens
ggctcaccaaccatgcaaggacagggcaggagaagaggaacctgcaaagaggagctctacggtgactttgaagac

SEQ ID NO: 460198 - DNA, 74 bp, Homo sapiens
tctcttcgcctcgcctcgggacccgcggtccccgctcttgctgtgacagccccaatgctgttcatgaggtggag

SEQ ID NO: 460199 - DNA, 75 bp, Homo sapiens
tctacaccatcgacaccgaaaactccaccgtagcccttgccaaagcatttcttatactgaagcagtggagatctt

SEQ ID NO: 460200 - DNA, 80 bp, Homo sapiens
agaccctggagcctcagttggaagcagccgatccagcctgcggagcctgtggggcaggtgtttaagatagaagtgctaat

SEQ ID NO: 460201 - DNA, 100 bp, Homo sapiens
gcaaatggatacatcttgttttttcatattacatctacaagaggggacaagtacctttatgaaccagtgtatcccaagtgttgactttaaggtgaaaaca

SEQ ID NO: 460202 - DNA, 101 bp, Homo sapiens
caagcggcgccgcgccctcggcctgcacgggtttctggcatttgaagtcaaagagtattcagcgttggatgaattacaaaaggaatttgaaactgcaggac

SEQ ID NO: 460203 - DNA, 87 bp, Homo sapiens
gggaagtgtctgtagcgtccctccctctcaaccacaataacaggcggagggtcggcgtaggtgctcctgatccaacagcaggtgcta

SEQ ID NO: 460204 - DNA, 108 bp, Homo sapiens
agcacgctggactgcgagacggcccggctgcagcgagcgctggacggagaggaaagcgggtgataaaagaaaatgtggctgaagttacccgaagttcagcttgcagtg

SEQ ID NO: 460205 - DNA, 114 bp, Homo sapiens
gccccgcgagcacagagcctcgcctttgccgatccgccgcccgtccacacccgccgccagcaattctgtggtgttcttggtcacacatttatggagtttctgaagggcagtgga

SEQ ID NO: 460206 - DNA, 98 bp, Homo sapiens
atcctaaagaaaatcatttgtgatgggtcagctagtatgcaggctaggcaaactgagcgagagagggtttgggacacgtacagtggcctggagcagga

SEQ ID NO: 460207 - DNA, 100 bp, Homo sapiens
agaatacttttaaaggaacctgttgataaatgcaaaacagtggctgttgcaggcaccagaatttcctgagtttgccactaaagtccaggaagctatcaat

SEQ ID NO: 460208 - DNA, 90 bp, Homo sapiens
gctgtggaggaagaacatgcatatttgggtccaactgtgaagccagatgataagagccatccaaaactctgtttgtcaaaggcctgtctg

SEQ ID NO: 460209 - DNA, 83 bp, Homo sapiens
atgttcaagtttaccaaaagagaggcaccgctggaacactaatgaggtcacgagaagagaatgccttctagatgcaaaatcac

SEQ ID NO: 460210 - DNA, 100 bp, Homo sapiens
tgctacttcctcgtttgacaccttcctgggtgtcatggagaaactccagctgggcccagagattctgcagcgggaaaatccaaggcttatttatgccagg

SEQ ID NO: 460211 - DNA, 83 bp, Homo sapiens
cgcaaggtcgccctcaaggccatgatcaaaacctcgcaaaggatctccttcatccctctccagaagaggagaagaggaaacac

SEQ ID NO: 460212 - DNA, 82 bp, Homo sapiens
cacgaccagctgctcctcaacaaccatgtccaagggacctgcagttggtattgatcttggcaccacctactcttgtgtgggt

SEQ ID NO: 460213 - DNA, 97 bp, Homo sapiens
gctcaccatgtctctctcagaacttggtgctgctagaatgcaggaacagcagctttgggccagattatgttgtatgtggatggaatgaatggagtaa

SEQ ID NO: 460214 - DNA, 100 bp, Homo sapiens
ctgggtgcagatgcagtgtggctctggatagcaccttatggacagagccagatgaagtcagagctggcagcggtggcctcggagtttgggcgactgacac

SEQ ID NO: 460215 - DNA, 50 bp, Homo sapiens
cataaaagtatcaacatcagatcaatatataacaacgaacttgatgcaag

SEQ ID NO: 460216 - DNA, 83 bp, Homo sapiens
atcgtgatcccggcgacatactacctctggccccgagatcagaatgccgattcacagtctgagaatgaggcttcaccagtaaa

SEQ ID NO: 460217 - DNA, 98 bp, Homo sapiens
gaaattatagccagctgcagttccaagctagagagtattctggagcaccttattcccaaagggttatcaatactctggctgaccatcatcatcgtggg

SEQ ID NO: 460218 - DNA, 75 bp, Homo sapiens
tcctggcccagaaatacaggcttgtcaatgcctcacagaatgaggttcctgcggcacccctggaagaactggcct

SEQ ID NO: 460219 - DNA, 100 bp, Homo sapiens
ggcgtacgcctatctcttcaagtacatcataatcggcgacacaggaacttccagcaccattacttgatgataaatgtaaaaaggaatttgatgaagatgt

SEQ ID NO: 460220 - DNA, 100 bp, Homo sapiens
ggcattccggaactgctcaacaaacttcgccaggccttttccctcagaggagaccacagagaatgacgatgacgtctaccgcagcctggaggagctggcc

SEQ ID NO: 460221 - DNA, 75 bp, Homo sapiens
gctcataaggattgtcctctttctacaaaaggcccagctgtgagatacagtaagttcaagatgtcagaggccagg

SEQ ID NO: 460222 - DNA, 98 bp, Homo sapiens
ttggacagtacatctgtggacaaagcagtacctgaaacagaagatgtgcaggctggagaatgctggaggagaccttaaggatggccaccaccactatg

SEQ ID NO: 460223 - DNA, 100 bp, Homo sapiens
gagactttgaaccgtatcctgggcgacccagaagccctgagagtcatacaggagtggcagaagagaggcggacagccctggcagctcatcgagcccgtgg

SEQ ID NO: 460224 - DNA, 121 bp, Homo sapiens
ccgctcctccacaaaccgagcaagtagagagcaagaggaagtcagggggaaatgaggttgaaagaagctcaaaggcaagaatgttacttttgaattcccaaagtttcaattgtaaacaaaa

SEQ ID NO: 460225 - DNA, 100 bp, Homo sapiens
agcagctcaactgcccagcgtgaccagtggccacctctgcagtgtcttccacaacctgggagagaagaccaagaggtcggagaagaggtagaaaatgtgg

SEQ ID NO: 460226 - DNA, 74 bp, Homo sapiens
cgaaatgagactccctcagatccagtgataattgacagttgtcactcagcccagtccatcagtttctcagccca

SEQ ID NO: 460227 - DNA, 100 bp, Homo sapiens
gaaagactcactgctcacagctgcccagctgaaagccaaggcgtctgtagaggcttctggtgaaatcgcattatgcaagactggatttcctgaagatgtt

SEQ ID NO: 460228 - DNA, 83 bp, Homo sapiens
cccgcggccgctcaaagccgggagatcgactgtttgagcccggaagcgcagaagctggaccaagaatcgccttcagccctgtc

SEQ ID NO: 460229 - DNA, 75 bp, Homo sapiens
caaatggaaagtttttccaaatattcatctgtacaggtttccactgtatccaaaaggaggggagaagttgcagtt

SEQ ID NO: 460230 - DNA, 99 bp, Homo sapiens
ggacaacagacctctgtttggggagacgtccgccaagggcagcttttggcaaggagtctgaagttcttattgggaacctgggtgataaattaatccctc

SEQ ID NO: 460231 - DNA, 75 bp, Homo sapiens
gaaatgcccagtctttgggatttaagatcaacttcctttgtaaggccataggaaaaggatacagagtagagtttc

SEQ ID NO: 460232 - DNA, 90 bp, Homo sapiens
atctgcgccgggtcgccacatactgctttaaggatttttatgaactggagccagagaagttccagaataagaccaatggcatcacccccc

SEQ ID NO: 460233 - DNA, 75 bp, Homo sapiens
gtttcctgaggccttcccagccatgcagaactgtgtctccacattagaagcatcctatgtagctgttctgcttgc

SEQ ID NO: 460234 - DNA, 84 bp, Homo sapiens
ataaactccaacacgatcccggggctcaagtggcttaacaaggaggatttgacagctaaggatattgaagaaattattgatgag

SEQ ID NO: 460235 - DNA, 83 bp, Homo sapiens
gagcccaaggcaattgatcccaagttgtcgacgaccgacagggtggtgaaagattgtcactgctgttccaagggcacacgcag

SEQ ID NO: 460236 - DNA, 83 bp, Homo sapiens
caactttcccatggaaattcggcatctgttggcccaatggattgaaaatcaagactggtcagtcttcactgtttccaatggaa

SEQ ID NO: 460237 - DNA, 75 bp, Homo sapiens
tgatcatcataggagtggagaacatgcacaagttgcaagaaagctcaagtagcctatggagaggatgcaaggctt

SEQ ID NO: 460238 - DNA, 74 bp, Homo sapiens
cgtggcgccacaagctcattcactgtgtaggttgccaagctgttctgcctttctggaatggtgcatggagaata

SEQ ID NO: 460239 - DNA, 102 bp, Homo sapiens
aaataaaaagaagtgttaagaattgcctttgggactctgaaggctgaagccgagcccctgccactgatggacctgtgccggagatccatccgctcggccctg

SEQ ID NO: 460240 - DNA, 100 bp, Homo sapiens
gcagtggaggccacatcaactcggcgccttgggaaccgctcgagcctaccaggaaccaacgtccaagaggcccagaagatactcaacaacagcggactcc

SEQ ID NO: 460241 - DNA, 82 bp, Homo sapiens
ccgagatgccgggggagcggggccttccacaccccctccgtgggtgtgtgggagtgcatccgccccaacccttttccccctc

SEQ ID NO: 460242 - DNA, 75 bp, Homo sapiens
gccccgccgatcgcgggcaccggagccagccccgcagcgggtgctggagaatctggtaaaagcaccattgtgaag

SEQ ID NO: 460243 - DNA, 96 bp, Homo sapiens
tggagagctgaacattactcttccagaagagttataggtgggcatttattccagaagtggacacagagggccctgccttcctgtcggatgtagagg

SEQ ID NO: 460244 - DNA, 51 bp, Homo sapiens
ggattccaagtaactcttatttggttacgaggcaaatgcaagaacatgagc

SEQ ID NO: 460245 - DNA, 96 bp, Homo sapiens
aggtcctggcgatcagcaccaagaacccactgcaggttgcttatggaaccacagagaacagtcccgtgacattcgcgcacttccctgaggacactg

SEQ ID NO: 460246 - DNA, 100 bp, Homo sapiens
gcatggcggagaaggatgacaccggagtttgacgaagaggtggtttttgaggtgtcgtgaaaactacccctaaaagccaaaatgggaaaggaaaagactc

SEQ ID NO: 460247 - DNA, 113 bp, Homo sapiens
tggagcccgcgcagcgccccgcagggcgatggacggccgaaccccgcgcccgcaggacgccccagccaggctttggaagatcgggtatgggaactcttgcaggaagcagacaa

SEQ ID NO: 460248 - DNA, 114 bp, Homo sapiens
gcgcccgggaggaaggaacgaggcaaggagctaaagcagcgtgcgttcagccctgggggagtgcatccgccccaacccttttccccctcgtctcctgtgagaattccccgtcgg

SEQ ID NO: 460249 - DNA, 100 bp, Homo sapiens
gaaacatctgtagcatcaatgagtcagacaagcggtggtgaggcaggctcgcctcctccagctgttgttgctgctgacctgggatgacgaactggagaag

SEQ ID NO: 460250 - DNA, 97 bp, Homo sapiens
gctccagcttcagcacctcacccactggacagagcccatacacctaccagatgcacggtgactctgacatcattagaagcatgccagaacagactgg

SEQ ID NO: 460251 - DNA, 100 bp, Homo sapiens
agcacacggaggccgtgatgaagacctcctgccccccgaggtctgcagtctcctgaacccagcagccatctacgccaacaacgagatcagcctgcgtgac

SEQ ID NO: 460252 - DNA, 100 bp, Homo sapiens
ggcacctgcaggaaacaagctcctacttccagaaaaagtgctcctgggactccaggataccaggttcttctgtgtggcagttcagaatgatggatcaagc

SEQ ID NO: 460253 - DNA, 125 bp, Homo sapiens
ctggaagcgattaatgataaaatttcatggagaagaaggccttgactacggaggggttgccagagaattcggtcaacagtggatgaaaaagaacaaaaacaacttcttatggatttggatgtagt

SEQ ID NO: 460254 - DNA, 100 bp, Homo sapiens
ctggaggcgcaggccctcaagctggtggaggggccggacgtccggaaagctctgggtgtgcggcagtaccatgtggcctcagtcctgtgccaacgggcca

SEQ ID NO: 460255 - DNA, 82 bp, Homo sapiens
gcagctcagcgcagcgctgcggcctttcggcagccgaacggccgcggcagacgcccagcggcagcaggatgagtgcggaggc

SEQ ID NO: 460256 - DNA, 75 bp, Homo sapiens
gtgagcaagcccaggcacagccgacgccgcgggggaacggcaggagcagctgatgggatatcggaagagagggcc

SEQ ID NO: 460257 - DNA, 82 bp, Homo sapiens
atcacctggagcactggacaagtgcatgcaagaccatgactgcaaggattgggtgcataagcactgctcagcacgcaggcat

SEQ ID NO: 460258 - DNA, 75 bp, Homo sapiens
tttattgtggtggagtccaccccgctgtggacgcaatgagcccctgaagaaagagcggcttaagtggaagagcga

SEQ ID NO: 460259 - DNA, 100 bp, Homo sapiens
agaattaagacgcatggaagaacttcacaatcaagaaatgcagaaacgtaaagaaatgcaattgaggtaccaagaggcactttcctacctggtatatgcc

SEQ ID NO: 460260 - DNA, 101 bp, Homo sapiens
ggacgccgagcggtgactccccgccgctcccgggggccgtgacggttgttcctactgaaggattggtctccatattaaagaagaggaatgatactgtagga

SEQ ID NO: 460261 - DNA, 82 bp, Homo sapiens
acatatgatttcagctgcaatggcagtaccataacagcttgggggaaagaccatgaaaaagatgcttttgaacatattgtaa

SEQ ID NO: 460262 - DNA, 83 bp, Homo sapiens
tatgccgacatcgacgccgcctggcaggccctgcgcaccagcgtcgagggcgaggcccccagcagtgagactggcacatccct

SEQ ID NO: 460263 - DNA, 82 bp, Homo sapiens
tcaggcggcaccctgtccccgaggaggggaccatgacacaggctctgcttcaaaaacaacgaccacctcaggtaggaatata

SEQ ID NO: 460264 - DNA, 100 bp, Homo sapiens
ctgttgtccaacagaacgacctagtatttgaatttgctagtaacgtcatggaggatgaacgacaggattccagtggaatgacactggtgatgcttgccgc

SEQ ID NO: 460265 - DNA, 90 bp, Homo sapiens
caggcaggcgctgagaaggacgcgcagtccatctctctcaggttatggaattccactgaaagacggagatgagaaaacagatgaagaagc

SEQ ID NO: 460266 - DNA, 100 bp, Homo sapiens
attctgctggaattattcatcggaaaccaccatcatgggttcgggtcccatagaccccaaagaacttctcaagggcctggacagcttccttaaccgagat

SEQ ID NO: 460267 - DNA, 76 bp, Homo sapiens
gttcagccctttgatgaccgcagcagacctgttaccctccaaatcttctgtgaccaagatttgcagagacccacag

SEQ ID NO: 460268 - DNA, 100 bp, Homo sapiens
ccagctctgcagccacatactatccgtttgttcaggaaccaccagtgacagagggccatttgctacctttaagatgcagtatgatcgaacttgtgagtgg

SEQ ID NO: 460269 - DNA, 90 bp, Homo sapiens
gtgcccatcgggcgctgcatgtgcaaagcaggcttcgaggccgttgagaatggcaccgtctgccgagattctggacaatcaggaagtcca

SEQ ID NO: 460270 - DNA, 80 bp, Homo sapiens
cgtggcttcggaggcaagtttggtgtccagatggacagagttgatcagcaaaagtactttgactcaggagactacaacat

SEQ ID NO: 460271 - DNA, 82 bp, Homo sapiens
tcccaggcagcagaatctgcccacagagttcgggtgcccgtggttgacacgagctgtgtccccagctgttcccgtctacaat

SEQ ID NO: 460272 - DNA, 73 bp, Homo sapiens
agcggctgaaggtgctggaggccaaggtgttcttccagagagcaaagccctgaggactggatttccctgtgcc

SEQ ID NO: 460273 - DNA, 89 bp, Homo sapiens
atggctcatattctacttcattcagaagatcaggtacacaaatgcacgcgacaggaaccagaccccatatcatgtgaacctcctcctgg

SEQ ID NO: 460274 - DNA, 149 bp, Homo sapiens
gaaacttctggctggtagggatgccagctaaaccagatggcatcaaacagtgaaatacaggcctggctttcagacttgacctactgaacgtgaacgaacagaaaggctaattaaaaccaaattaagggagatcatgatgcagaaggatt

SEQ ID NO: 460275 - DNA, 100 bp, Homo sapiens
tctcgatcctccttcaggggagacaccaatttctatggcaaacagatgtacgatcgggcgatcagtgcccctaccagccccacccgcctgagccattcgg

SEQ ID NO: 460276 - DNA, 100 bp, Homo sapiens
ctggttttgccagtcaaacacagcaagatgcaaaagccttcttgtggaatagagggaatctggaaaaattgcaatcaaaacatcatttctctaagaaaat

SEQ ID NO: 460277 - DNA, 100 bp, Homo sapiens
ctgattgaatgcaacttggaccaagaactcaaactttttgtatctcgacactctgcaagattctctcctgaagtcccagctgtttttgcagcagtgttgc

SEQ ID NO: 460278 - DNA, 75 bp, Homo sapiens
cttgccctcatcctggttctggaatcctcagttcaagaaggacagaataacgggctcccagattcacaagcccca

SEQ ID NO: 460279 - DNA, 100 bp, Homo sapiens
cgggctctgacccaggcgtgcgggtactcagaaggtgtggatgtggaagcagccaagcgggcagaagaggaattgctccttcatgacacgaggtgctggc

SEQ ID NO: 460280 - DNA, 96 bp, Homo sapiens
aactgaagtttgccataaaagttgatggagattacctttggatgtgttcagagcaacattgttttgttgacacaagcatttagaagaaagtttgtg

SEQ ID NO: 460281 - DNA, 96 bp, Homo sapiens
gtgctggtggaaggagggtatgatgcaggtgccagatttggagctggggctactgctggcaacattccttgccgtgttcacatggaccaacttgct

SEQ ID NO: 460282 - DNA, 83 bp, Homo sapiens
agatcatcgagcatttcaaacgggagcatcgagtacagctgtccggcctccaacgagtgtgagatcaccaagcggagacgcaa

SEQ ID NO: 460283 - DNA, 96 bp, Homo sapiens
actgacaacgacagtgatttttctgcaaatgagcttctccagcgttcccgacaagttcaaaataagactgaaaaagaaagaatgttaagggaatca

SEQ ID NO: 460284 - DNA, 88 bp, Homo sapiens
ggtcccgcgcgagctttcccgggataagtagctttagcgatcgggagacagccgggcgctgcaagttgaggagctcaagcttgggaaa

SEQ ID NO: 460285 - DNA, 75 bp, Homo sapiens
tgggattccagatctgcgtttgaatccaggaaagggaggcaggagcgggccaggagctgctgggctggagcggcg

SEQ ID NO: 460286 - DNA, 82 bp, Homo sapiens
cgctgcggcctggcggcttccaggcgcactaccgcgaggctgggaggcggcagaatgcagccagaggagggcacaggctggc

SEQ ID NO: 460287 - DNA, 100 bp, Homo sapiens
aaaatttctacccagctagattttgcttctaaacgatgtggaagatgtcaagtttgtgatcaactatgactatccaaacagctcagaggattatgtgcac

SEQ ID NO: 460288 - DNA, 88 bp, Homo sapiens
cattgtgaaagaaggttgggttcagaagagggggtcccttgccagctccatctttgacccactcagatatcttgtgggagcttcagga

SEQ ID NO: 460289 - DNA, 88 bp, Homo sapiens
gatgacggcactgttagaatctgggactttcttcgttgccatgaggaaagaattctccgagattgctgtcgtggctgtgatgtgcaaa

SEQ ID NO: 460290 - DNA, 100 bp, Homo sapiens
gtccagtttgaagatggagagaaaattgtggtccagggagagcctggggacgacttttacatcatcacggaggtgcctctgggaaagggaagacgctgtg

SEQ ID NO: 460291 - DNA, 75 bp, Homo sapiens
gacatcgcgacgctgctcaaaacctcgctccggaaaggggacacctgatcctgcccggcctgtacatcggcaact

SEQ ID NO: 460292 - DNA, 75 bp, Homo sapiens
taacacatattgtagcaaaaatgatgactactgaaatgggtgttgaaagcagcaggggcctagaagacattaaac

SEQ ID NO: 460293 - DNA, 100 bp, Homo sapiens
ccgcaagtcccccccggagaaaaagttgaagcgttatatgccttcaattaagttgcagagttctgatggagagatatttgaagttgatgtggaaattgcc

SEQ ID NO: 460294 - DNA, 120 bp, Homo sapiens
tgcccaacatccaggctgtactgctccccaagaagactgagagtcaccacaaggccaagggtatcgtgatttccgatacccacctggacacccccaggagtataaacacaacatctacta

SEQ ID NO: 460295 - DNA, 99 bp, Homo sapiens
ctcttggctcaaggactcatactacactttcttggtagaggtcctatggccgggctccgaagatgattcacctagagtctaactttgttcaattcaaag

SEQ ID NO: 460296 - DNA, 100 bp, Homo sapiens
actgtcatgacacatacggacaagccttagcaaatatccttacggcccttcagcatactggagcatagtgaaagagtctattttgaagcttcaaacttag

SEQ ID NO: 460297 - DNA, 91 bp, Homo sapiens
cggacgggcactgggcgactctgtgcctcgctgagggtgtcgtgaaaactacccctaaaagccaaaatgggaaaggaaaagactcatatca

SEQ ID NO: 460298 - DNA, 75 bp, Homo sapiens
gccgcatggaggccggctgaggagcgccgctgcctcgcctcggtgaaagaaaatggcccgaaccaagcagactgc

SEQ ID NO: 460299 - DNA, 83 bp, Homo sapiens
cagagagctattattccctgtattaaagggccgttgctccagggagaactgcaaatatcttcatccacccccacatttaaaaa

SEQ ID NO: 460300 - DNA, 90 bp, Homo sapiens
cctatgcttgtgaaaatggacatacggatgttgcagatgttttacttcaagcaggggctgatttagcgcatattaaatttcctattgact

SEQ ID NO: 460301 - DNA, 98 bp, Homo sapiens
atgacttcaaagctactgcagacgacgagctgagcttcaaaaggggggacatcctcaagggagtgacaagcccacaaggataaatgggcactcggtgg

SEQ ID NO: 460302 - DNA, 83 bp, Homo sapiens
gtggaaagtgtgttcctacccagataacgaaggaggcccaacttcattcaataaggagcctgacggatttatcccagacggta

SEQ ID NO: 460303 - DNA, 74 bp, Homo sapiens
ccgggccggagtacgtcgttcccgctgcgctaggggaagcgggcaggtacctactgtcaacaacgggaagtgga

SEQ ID NO: 460304 - DNA, 83 bp, Homo sapiens
cccagctgcagctgtggctgcagtttgaggctctgaacaagtgcctccggagccagcgtggtggccatagacaacaagatcga

SEQ ID NO: 460305 - DNA, 90 bp, Homo sapiens
cagtgccatttccaaagcagtatctggagccagtgcagttctgatacaacaccccttttaaatggatcaagccaagacagaatgtttgag

SEQ ID NO: 460306 - DNA, 90 bp, Homo sapiens
gtaactatggccggcctgcggaacgaaagtgaacaggagccgctcttaggcgacacacctggaagcaggaaagaccacagcaagattctt

SEQ ID NO: 460307 - DNA, 82 bp, Homo sapiens
gcgcggaggaccgggaggctcccgggcttgcgtggcaattctgtggtgttcttggtcacacatttatggagtttctgaaggg

SEQ ID NO: 460308 - DNA, 100 bp, Homo sapiens
ttgggagcggaggtttgaccacatgcagcagcattcagaccttgaaaatccaaactgtgggcatcccaatctatgtaagttttgcattcatcttcccagc

SEQ ID NO: 460309 - DNA, 75 bp, Homo sapiens
aaggagatcgctcggacacagaagaacaagggagaaggccatcagcatttgggagtcaaagaatttcttttttga

SEQ ID NO: 460310 - DNA, 95 bp, Homo sapiens
gtggtttatgaagggaaagacgatggagggcagcgaagagagtcaccgaccatgacgggtgtcatggagaaactccagctgggcccagagattct

SEQ ID NO: 460311 - DNA, 100 bp, Homo sapiens
gcacggcgtccagggcagctagggcctgggccgcggttcggccgcgccggccggagttccgattctgaagaggcatttgagaccccggagtcaacgaccc

SEQ ID NO: 460312 - DNA, 90 bp, Homo sapiens
gcagaaggacgtcctaaacaaggacatgggacctcggcggctcttctcccacccacgggaaccagcccttgggcctcacggacccagccg

SEQ ID NO: 460313 - DNA, 82 bp, Homo sapiens
ggctctgatccccccctgccggggagggcccagcgcatccgacagaaacttcagtgctctcaagaaggaaaatatttatgaa

SEQ ID NO: 460314 - DNA, 75 bp, Homo sapiens
atgacaaccaggcaatgctggatagataccgaattcttatcacaaagttaattccatgtaccatgaaacttccag

SEQ ID NO: 460315 - DNA, 82 bp, Homo sapiens
ggcccttgttcccccaaatgtctgactctgactctcggactgagaaacgcaagacccttctcaggtgcagccagagagacac

SEQ ID NO: 460316 - DNA, 87 bp, Homo sapiens
cttacattctcatactatgattcatagtcggaattgagatgggcgattggcaggaagtctgggatgagaacacgggatgttattatt

SEQ ID NO: 460317 - DNA, 97 bp, Homo sapiens
tctgtatgtctttgctctgatgttcttgtatgcaccatcccataaaaactatggagaagaccagtccaatgccgttcttggaacacctcacagcttg

SEQ ID NO: 460318 - DNA, 82 bp, Homo sapiens
agggaaccctggtcaccgtctcctcagatgatgataattccgaagaaggcttccacactattcattcaggaaggcatgaata

SEQ ID NO: 460319 - DNA, 100 bp, Homo sapiens
ggatatgtcaggaatgtgattcttcatcttccaaggaaagaccacagcaagattctttcattcgtctcctcctagcctgggggaccaggctcgaactgac

SEQ ID NO: 460320 - DNA, 100 bp, Homo sapiens
gtggaccccaagaagaccattcagatgggatctttccggatcaatccagatggcagccagtcagtggtggaggactccctggaggaaaagcggaagcggc

SEQ ID NO: 460321 - DNA, 100 bp, Homo sapiens
cccgcggaagccggcatgctggagaagctggagttcgaggacgaaggaggaaaaggcttctcttttacatcgtactcaggaagaaagaagaaagagagag

SEQ ID NO: 460322 - DNA, 100 bp, Homo sapiens
cccagcccgggtgcccacactggccgtcccggccatctcgctgcccgacgatgtccgcaggcggaatatgaagacaaggctggaagacctagcaagccac

SEQ ID NO: 460323 - DNA, 90 bp, Homo sapiens
cagataatgaagaaaactttattgatctcaacgttttaaaggcccagacatatcacttggacatagctcgccttttgcaagaaaaggagt

SEQ ID NO: 460324 - DNA, 80 bp, Homo sapiens
agatactctgactccacctttacttttacctacgttggcggccccagaagtcgtgagatggagaataaagaaactctcaa

SEQ ID NO: 460325 - DNA, 101 bp, Homo sapiens
gtcggggccgcagccgcttccggagccgcgggcgagtacagaacctgctaaggccatcaaacctattgatcggaagtcagtccatcagatttgctctgggc

SEQ ID NO: 460326 - DNA, 87 bp, Homo sapiens
cgaggcaaggagctaaagcagcgtgcgttcagccctgggggtgaggtggctttgaccccgggttgcccggccagcacgaccgaggag

SEQ ID NO: 460327 - DNA, 50 bp, Homo sapiens
ggggacccctggctgaaagacaaaaatcttttgctctgcatgcctgcagg

SEQ ID NO: 460328 - DNA, 100 bp, Homo sapiens
catggacgtgggcgaacttctgagctaccaggtccaggtgcaggtacagcagtctccgcaacaggtctcggctcagctctccccacaactcaccgttcac

SEQ ID NO: 460329 - DNA, 74 bp, Homo sapiens
ggagctaaagcagcgtgcgttcagccctggggacgagattgaggagctgcgggccgagatgctggagatgcggg

SEQ ID NO: 460330 - DNA, 100 bp, Homo sapiens
ggcggtaaggatttcaacatgcctctgacaatctctagtaatgaagagcttcgaaacttgtctttgtctggccatgtgggatttgacagcctccctgacc

SEQ ID NO: 460331 - DNA, 82 bp, Homo sapiens
cacggcccactccgacgtgtgctccgcccagggggtgcgaggataccccacaacccacctggctttcaaccaacttgggtat

SEQ ID NO: 460332 - DNA, 100 bp, Homo sapiens
cttggatatgctgacgactgtgcaggaagaaaacgagccagtgatttacaatagagcaagtgctgtccccggcataggtccatctctgcagaagccattt

SEQ ID NO: 460333 - DNA, 83 bp, Homo sapiens
agaagtgcttcagcgggccaggaagcgcatccaggaggtagttgatgtcacttggcgatattcctgcaaacatgaagaggtga

SEQ ID NO: 460334 - DNA, 50 bp, Homo sapiens
gggatccacggacccctgctgatacaatgtctctttgctatatgaccttg

SEQ ID NO: 460335 - DNA, 83 bp, Homo sapiens
gcgggagctggacggcgagcgcgagcggcgcgagaaaagtaactggaatgagattgttgacagctttgatgacatgaacctct

SEQ ID NO: 460336 - DNA, 97 bp, Homo sapiens
cagagggaaacctggataagcagctgagctttaagtgcaatgtttcaaatacattttcgagtctggcactaaagattctgtttctggcgtctgcata

SEQ ID NO: 460337 - DNA, 90 bp, Homo sapiens
cgctaccgaggactgcagtctggagttggagcccttgtcccaaccagggctggataagaagtttcgttggataccactagctgggaatat

SEQ ID NO: 460338 - DNA, 86 bp, Homo sapiens
ttctgctcggcgtgcgcccggaaggcgtcgtcttctcttaaaatgaccaaactcttacccaggatctactggagcagctgttggag

SEQ ID NO: 460339 - DNA, 73 bp, Homo sapiens
gtacgccctcatggggaaaatctccccggtgactttcaggagtggctaagcaggttcggttacctgcccccgg

SEQ ID NO: 460340 - DNA, 122 bp, Homo sapiens
tatgcctgctaacatggataagcatgccctgaaaaagtatcgtcgagaagcctatcatcgacaatgcagatcttcgtgaagactctgactggtaagaccatcaccctcgaggttgagcccag

SEQ ID NO: 460341 - DNA, 75 bp, Homo sapiens
cagaattatgagaacctggtctctgtaggggctcttcagagcagcaggacacctgctcaaacccagggccctgct

SEQ ID NO: 460342 - DNA, 106 bp, Homo sapiens
tctatcccaggaatacagctttgcattagattgttgtgtccactgtatcctggcttgcttgttctgcgaattcctgaccctttgcaacattgtcctgggacaagcg

SEQ ID NO: 460343 - DNA, 90 bp, Homo sapiens
accagctccatctgtgaggattcctttgatggcaggagcctgtccaagctgaacctgtgtgaggatggaatggtcctcgtccgaagtgag

SEQ ID NO: 460344 - DNA, 100 bp, Homo sapiens
tcctgaaggaggggaagggacgtgggggcggccacggcagagtaaacatcagtctccaaagataactacatcccttcttcccatcaacaatggctccaaa

SEQ ID NO: 460345 - DNA, 74 bp, Homo sapiens
ggcaacagaacttgaacactatcacctatgaaactccagcgggaggaagaagaggcctttgccagcagtcagag

SEQ ID NO: 460346 - DNA, 73 bp, Homo sapiens
gcgcctcgcccaggacagttacacttagaggccttgaactgaaggctatttacgagcagactcacaagagccc

SEQ ID NO: 460347 - DNA, 100 bp, Homo sapiens
cagccacatactatccgtttgttcaggaaccaccagtgacagatcaggccttgaaaagaggatagaccaggctgtggaggagtggaatattgagaaggct

SEQ ID NO: 460348 - DNA, 101 bp, Homo sapiens
gatgagagtgatgaagaggaggaggaggaagaagaggaggaggaggaagaagattatgaggtggctggtttgcgatcaaatcgcagtcttctccaggctga

SEQ ID NO: 460349 - DNA, 98 bp, Homo sapiens
aggcactgaggaggccgagagatgaggccggagcccaccaagttctgggaaagatcctgaaggagctagacgagtgctacgagcgcttcagtcgcgag

SEQ ID NO: 460350 - DNA, 90 bp, Homo sapiens
ctcacggccggcgcttacctctgctacaggaaaccaggttgttgcaagaggtcttctttcaggcaatcctgcttgctgtgtgcttaatca

SEQ ID NO: 460351 - DNA, 100 bp, Homo sapiens
ttgctaatgagatgattgaggcagccaagggcttgctctcaattttgcgcaagttgaaaagtgcaccagaccaggaggtgagaatacttctcctgggctt

SEQ ID NO: 460352 - DNA, 89 bp, Homo sapiens
cggcgagcgggcggagagcgggggccgcactggggagtgtgggctgggccgcagtcatatttgatcagaaattggatgaaccttcggga

SEQ ID NO: 460353 - DNA, 75 bp, Homo sapiens
ctcaaggcatcaaagctgacagagaaactgttgcagtgaagctttggacatcagacagtgcaggagaagaatgtg

SEQ ID NO: 460354 - DNA, 51 bp, Homo sapiens
cagaattttacgggatcactccattagttaatgttggagaagattgtccag

SEQ ID NO: 460355 - DNA, 75 bp, Homo sapiens
cgccgcgcaccaccaccaccgttaggaccatccagagcagcacggaattaaacaaccaccatgtcgagcaaaaag

SEQ ID NO: 460356 - DNA, 89 bp, Homo sapiens
gaagataatcgtcaagcacgtgacggtcatcggcggcgggctgatgggcgccggcattgcccagaatgtgacagtgatgataacatggg

SEQ ID NO: 460357 - DNA, 88 bp, Homo sapiens
ggtgagatcagccgcccggccaagctatcttctcgctagcagaattaaacaaccaccatgtcgagcaaaaaggcaaagaccaagacca

SEQ ID NO: 460358 - DNA, 98 bp, Homo sapiens
tcagaatgagctcaccagggagctgaaactcaaaagaaagatctgtcagatcctttcaatgacgaagaaaaggaaaggcataaagtagaggcccttgc

SEQ ID NO: 460359 - DNA, 75 bp, Homo sapiens
cagaatctagaagagccatccagatatgaagtagaccagttgcgtttggagagattacaaattgatgagcagttg

SEQ ID NO: 460360 - DNA, 100 bp, Homo sapiens
gccacccgccagcgcctgagcatccccgtcatggtggtcaccctggggagcgggaacgccgagagaaggagagagaagagtgggaacgccagtacagccg

SEQ ID NO: 460361 - DNA, 90 bp, Homo sapiens
ctctgttcagccacttgcaacacaatgtttccaactctctaacatgtttaaccctcaaacagttgtggaaagtaaaaatgtagccctacc

SEQ ID NO: 460362 - DNA, 101 bp, Homo sapiens
ggggtgcgtgggtgcctggagatgaagctggaaaggtttggtgcacctcgatttggaggaagtagggcagggcccttatctggaaagaagtttggaaaccc

SEQ ID NO: 460363 - DNA, 100 bp, Homo sapiens
cccgacacacgccggaggagccggaatgttgtaccatctttgggtaggcagacttccctgacgacatcagtgatacccaaagctgagcagagcgtggctt

SEQ ID NO: 460364 - DNA, 99 bp, Homo sapiens
ttgccttgagtcagtgcgccgctctccagcccgcttgaacggcgccatgtcagaaccggctggggatgtccgtcagaacccatgcggcagcaaggcctg

SEQ ID NO: 460365 - DNA, 96 bp, Homo sapiens
gctcgcctcgactccaaatggttgaaaacagatatacagagccctatgagtttgtctctctggaatggctgcaaaagtggttggatgaatcaacac

SEQ ID NO: 460366 - DNA, 100 bp, Homo sapiens
ggcagcgcagtgcagatccgcaggcgcaaggcttcaggcgacccgtactgggcctactctgtgctggacccaaaggagacaacatttatgaatggaggtc

SEQ ID NO: 460367 - DNA, 100 bp, Homo sapiens
tgaccccatgactggacgctgtgttcccccacgaacttctgctgaaaccatcatagcctttgcctgggaaccaaatggaagtaagtttgctgtgctgcac

SEQ ID NO: 460368 - DNA, 100 bp, Homo sapiens
atgaaacagttcatccgctacctcatctcgtccaacgtcggggaagttgtctggagtacttttcgtcagggtttggtgattggaagtaaacctgtaattt

SEQ ID NO: 460369 - DNA, 100 bp, Homo sapiens
atcttggcaattgcttcagaaaaaatgaaagaagcagtcagattggtatgttgagtctaaaaaggacagagtcacagtagtcttcagcacagtgtttaag

SEQ ID NO: 460370 - DNA, 101 bp, Homo sapiens
gttcgcagaaaggtggggcagagctcatctgacgtggcatcaggtgtgatgaatgcagactctgctaccattttggctgtttggatcctcctttgaaaaag

SEQ ID NO: 460371 - DNA, 98 bp, Homo sapiens
ccgactcggtgattgaggacaagaccatcgagctcatggaatacaggagtttccagaaaatataaaaaattgtaaagttttgacaattgtggaggcca

SEQ ID NO: 460372 - DNA, 98 bp, Homo sapiens
ctggatccagagacaagactattaagatgtgggatgtcagtactggcatgtgccttatgaccctcaacctttcagctcttggggcattggtgagtctc

SEQ ID NO: 460373 - DNA, 83 bp, Homo sapiens
cagctgggctgcagtgaccccgctttcctcacgcccagggagtgcatccgccccaacccttttccccctcgtctcctgtgaga

SEQ ID NO: 460374 - DNA, 101 bp, Homo sapiens
gctgctaacccgacccggattggcgctgaggtggcccgtggggcagtggaatgcagtagccctctgggcctgggatattgtggttgataactgtgccatct

SEQ ID NO: 460375 - DNA, 83 bp, Homo sapiens
cagctgagagccgagcgggcggcgcgggcaggtccacgggaagcctacacgcccaaggtcaaaatgcagatcttcgtgaaaac

SEQ ID NO: 460376 - DNA, 75 bp, Homo sapiens
ttggacccccgcctcgtcatggcctacgaggagaaggagcagagagaccccatctacctgagggacaaggtgact

SEQ ID NO: 460377 - DNA, 100 bp, Homo sapiens
tggggagcttgaggacacttaccacgaaggacccgtgacattaaaggatgttattgtggaattcaccaaggaagaatggaagttactgacccctgctcag

SEQ ID NO: 460378 - DNA, 97 bp, Homo sapiens
gtatatatctgggatccacataatggagacattctgatggaatttgggttgcactccaggacttgcagacgaactccaagattggggcactcctgcc

SEQ ID NO: 460379 - DNA, 75 bp, Homo sapiens
catgagcccccgctgctctatgacctgtccaaggaccctgactgatgatgcttcggatgcacaatctgcatggga

SEQ ID NO: 460380 - DNA, 50 bp, Homo sapiens
gtgctgacgtcgcaaaaaaattggataagccccacagtcttcgttacaac

SEQ ID NO: 460381 - DNA, 100 bp, Homo sapiens
ctgaggagtcgccgccgccccgagtcccggattttttatcaagcagaaatgcatcgaacaacgagaatcaagatcactgagctaaatccccacctgatgt

SEQ ID NO: 460382 - DNA, 50 bp, Homo sapiens
tctggacgcacagaacacatcaaatctttgaccatcagtctgtgacctgc

SEQ ID NO: 460383 - DNA, 98 bp, Homo sapiens
cccagtcagacgcaggcagccccaaagcctgaacaggcagggccagacccagctctgattgcattgttaaatgaaggtgaggaactagaggagctgat

SEQ ID NO: 460384 - DNA, 100 bp, Homo sapiens
aggtgacagtctgcatgtgcagttttcaggtacttgttttggctccaacaagggaactggcaaaccaagtagccaaagacttcaaagatataactaggaa

SEQ ID NO: 460385 - DNA, 100 bp, Homo sapiens
cattttggaacgcccgtgccgcgtctccgcgttcccagcccgggtccccgcgttcacagccccagcgcagcacttgcacctcctgcgccgccgcccccca

SEQ ID NO: 460386 - DNA, 87 bp, Homo sapiens
ccccacgcaaccccagatccatttacactttacagtacatgtgaagattttttggcagcttagcgtggaaaccattgatcaccctgc

SEQ ID NO: 460387 - DNA, 99 bp, Homo sapiens
ctcctgttctcctcagagcctggctatgaccagggccagagcactcagatctcagtcagaggagtctgcttctgcctttagtgctgatgaccttatgag

SEQ ID NO: 460388 - DNA, 100 bp, Homo sapiens
ccgggagaagaaaaagggactattccgacccattgaaaacaaggacgatgcatttacagattctctacagaggaacactgacgagaagaccttatgaacc

SEQ ID NO: 460389 - DNA, 50 bp, Homo sapiens
catattctgccttttcaacactacacagcgctttgaacttcaagattcag

SEQ ID NO: 460390 - DNA, 100 bp, Homo sapiens
gcggcaaagatctgcaacaacatgctgttagctattagtatgattggaactgctgaagctatgaatcttggaatcagataccatttatgagacattcttg

SEQ ID NO: 460391 - DNA, 82 bp, Homo sapiens
atgccctgcagtacctgcagaaggtctctggagacatcttcagcaggattcactttaagagatttggaaactcttccctttg

SEQ ID NO: 460392 - DNA, 101 bp, Homo sapiens
gttttgattcatcatggataatctgtcatcagaagaaattcaacagagagctcaccagattactgatgagttggtgcttcccgtgctgctgttgatgctgg

SEQ ID NO: 460393 - DNA, 73 bp, Homo sapiens
ggcagtctgaagtgctcatcaacagcaaggagtttgcctggcgtgatcctgagttgcctgaggtcattcacat

SEQ ID NO: 460394 - DNA, 88 bp, Homo sapiens
ccccaatgcggccgcgagaagcagcgggggggcaggcgatcgaagggaatacagtgagtaacctgatcatgattatacctccaatgtt

SEQ ID NO: 460395 - DNA, 96 bp, Homo sapiens
tgcctgtccagacagttcttgaaggtgacaacttagagacgtgatcagactctgagaatatgggatgtgaaggcagcaggagtaagaatcgtgatt

SEQ ID NO: 460396 - DNA, 51 bp, Homo sapiens
tccggagagtggacaagaaagcatacttttttgatgcaccagagatggacc

SEQ ID NO: 460397 - DNA, 82 bp, Homo sapiens
ttacactgaagaagtagagtatttcaaccataaagacatcttaattgggcacgaaagagatggtcagtaggacagaaggtaa

SEQ ID NO: 460398 - DNA, 51 bp, Homo sapiens
gggattacaggcacccgccaccacgcccagctacttgggaggctgaggcag

SEQ ID NO: 460399 - DNA, 98 bp, Homo sapiens
atccctaagggtcctaaccggggtgccggtggtggtgtgcacattgagccccggtatagacagttcccccagctgaccagatcccaggtgttccagag

SEQ ID NO: 460400 - DNA, 51 bp, Homo sapiens
aggattctgacagggatgttgcgaaggtgacaggaactccctcgaaaggct

SEQ ID NO: 460401 - DNA, 82 bp, Homo sapiens
ccaccgctgccctcagctccgagtccagggcgaggtctatcagccacagtctctgcaagtttccaagagcagcagaaaatga

SEQ ID NO: 460402 - DNA, 82 bp, Homo sapiens
ttgaggatgcagatgttgatcactgaaaatgatttatgcaagtttaagggaagaggaagaacgtctgagaaataaaattcga

SEQ ID NO: 460403 - DNA, 90 bp, Homo sapiens
gggaggctccaagacctcatcaacaattaaggttccagcaacagatagaaatgctttaagttcactctggggaaagctggcctctgaaat

SEQ ID NO: 460404 - DNA, 82 bp, Homo sapiens
cgcctcgggtctcgggggccgctctgggatcccggccaccagcaattgtccgacaacagtgattgactacgtgaagccctcg

SEQ ID NO: 460405 - DNA, 98 bp, Homo sapiens
ctgaagcccctcagagcctgccctgcagtgctgctgccctcgtctaccagataatttctgctgctgaaacattgacattgcatccatctagtaaaatt

SEQ ID NO: 460406 - DNA, 100 bp, Homo sapiens
cagtccagaaccagaagatggtgataaagtatataagtcacccacaaaagctgtatataatgccagacattggaatcatccagattcagaagaactgcct

SEQ ID NO: 460407 - DNA, 88 bp, Homo sapiens
tattgtggttcctgctgtggttttgatcatgttgttaccctcggacgtagcccggcttgtattggctgctgtgacttactcgaagcct

SEQ ID NO: 460408 - DNA, 75 bp, Homo sapiens
ggagggattctggcatcagggaggctttcagccggagaagcgagtttcagctggaaataatgcaaaaggtgtccc

SEQ ID NO: 460409 - DNA, 75 bp, Homo sapiens
gcctggacaggaggaaccctgtccaggttcacactagaaggccaaaacttccgcaaacatctgatgatgaaaaga

SEQ ID NO: 460410 - DNA, 98 bp, Homo sapiens
cgaagatcggatcattaccattacaggaacacaggaccagatacagaatgcacagtatttgctgcagaacaggaggttgtcgggacatttcactctcc

SEQ ID NO: 460411 - DNA, 74 bp, Homo sapiens
gaagccaaagctgataaaattctgagagatcaaccagctttcactcctagtggaatattaactcctcatgcctt

SEQ ID NO: 460412 - DNA, 100 bp, Homo sapiens
gcctgctgcgccacggcggccggacggtggagaacatgagtgcaagagaagcctgagccagtgccgctggagagccgctcctgcgtcctcatccgccgcg

SEQ ID NO: 460413 - DNA, 100 bp, Homo sapiens
aggaggcggtggccgtggtgcgggctctgcagcgagcgctcgatggaacctcatcccaggagtcagtggatcggtggggaaaatgctgcttaccctgggc

SEQ ID NO: 460414 - DNA, 98 bp, Homo sapiens
gctgctcccatcattgatgtggtgcgatcggacgagattgaggagctgcgggccgagatgctggagatgcgggacgtctatatggaggaggacgtgta

SEQ ID NO: 460415 - DNA, 98 bp, Homo sapiens
tgctgcttctaaatctgatgtttcacccataattcagccagtgcctagtataaagaatgttccacagcccagccgaggcactgaccgcctggatctac

SEQ ID NO: 460416 - DNA, 100 bp, Homo sapiens
acaagactggcacgcagtacttgcttaggatggccaacaggctctttggggaaaagtcttgtgatttcctctcacactattccaggcatacagaaaattt

SEQ ID NO: 460417 - DNA, 90 bp, Homo sapiens
aacttcagacagaccaggccgaagcctcaaggccacaaatatgacagatacctagcatctagcaaaataatggcagctgcttaccttgac

SEQ ID NO: 460418 - DNA, 100 bp, Homo sapiens
tcaaagagaccaattcagagtctgaaatggaaaattgggttgattatgttaatgataggttcagattgcacttaatgaagctaagcttagtgaagagaag

SEQ ID NO: 460419 - DNA, 82 bp, Homo sapiens
acatcctgtcacaggccatgctctggcaaaaacaacaagttgaaatcatcgcagaaggataaagttcgtcagtttatgatct

SEQ ID NO: 460420 - DNA, 98 bp, Homo sapiens
atggcatcctggccgatgccacggagcaagtgggccaggtggcttgctttggtgaaggtattcatacagccttcctaaaggcaatgctttccacagga

SEQ ID NO: 460421 - DNA, 90 bp, Homo sapiens
cagattcagatgtgccggagcagagggatagcaagtgcaaggtcaaatggacccatgaggagggattcccctgaaaccaatgttggccca

SEQ ID NO: 460422 - DNA, 91 bp, Homo sapiens
ccgtggagtcggctgagggaaaagcgaggcaaggcaggcggatgccttcaattaagttgcagagttctgatggagagatatttgaagttga

SEQ ID NO: 460423 - DNA, 143 bp, Homo sapiens
tatatgatggaagtgtcttggcaagttatggcaatgtgatcgtcatcacagtcaactatcgacttggagtactcgggaaatcctcattgacgattcaatttgttgaaggccaatttgtggactcctacgatccaaccatagaa

SEQ ID NO: 460424 - DNA, 74 bp, Homo sapiens
attggccacctacagaaacaaaatgtcaacaaattgatggttgaggagctcaagcttgggaaaatggtgtgcat

SEQ ID NO: 460425 - DNA, 88 bp, Homo sapiens
tgacctcaccgcgcccgtggccgccgtgcaggcggccgtcagcaacctcgtccgggtttatgaactgacgttacatcatacacagcac

SEQ ID NO: 460426 - DNA, 75 bp, Homo sapiens
tgttgactcacaaccacaatccaaatcaaaaaatacatggtacattgatgaaggagcgctatagttatgtctgcc

SEQ ID NO: 460427 - DNA, 98 bp, Homo sapiens
tcacctgtgcgggatggaacaaaaggacttgcatgggtattaggagatgctgaagaactgccctttgatgatgacaagtttgatatttacaccattgc

SEQ ID NO: 460428 - DNA, 100 bp, Homo sapiens
cctcagctcactcccactgctgtccctggcagtgcagaagtccagggaatggctggcccagcagctgagatcacagctatcagttgagggatttgcagtt

SEQ ID NO: 460429 - DNA, 75 bp, Homo sapiens
attggccatggaagctttggagcagtgtattttattgaatttagtggaagcttttgtagaagatgcagaattgag

SEQ ID NO: 460430 - DNA, 82 bp, Homo sapiens
cctacgagtgcaacatctgcaaggtccgcttcaccaggtggatccataaagaacccagccaacccgcagagggaggggaggg

SEQ ID NO: 460431 - DNA, 90 bp, Homo sapiens
caaactcgaagaacagctgtggaaagaagttgcaaaacactgggtatcttctcagtcctcagcttggcctctgagtgcacaacccttgcc

SEQ ID NO: 460432 - DNA, 116 bp, Homo sapiens
cttcgtctctcctgccctggagctgagtggggcgctccgcttctacgacagatccgacatcgacgcagtctacgtaatcccgtttgttggcaccattcctgatcagctggatcctg

SEQ ID NO: 460433 - DNA, 90 bp, Homo sapiens
gactacaaggacagcagcgactttggggcccgtcaccctcaggttgaaatcacaaagattagacacctttttagataggtgttcttcagc

SEQ ID NO: 460434 - DNA, 100 bp, Homo sapiens
ataaaatttgtgacccttacgcctggcttgaagaccccgacagtgaacagactaagatggagaacatcattgcaacagtaagagattccaacctcaagct

SEQ ID NO: 460435 - DNA, 87 bp, Homo sapiens
catgaaaccccttggtgaaggccctccagacccaaaggctgctcacagtatttggggccagagcctacgtgaatatatgtgtgtgga

SEQ ID NO: 460436 - DNA, 90 bp, Homo sapiens
tttccttgcggaaaggatgttggcggtccctgtgacctgtggagacacggccagatctgccctccagctctagaccaagatagaacagcc

SEQ ID NO: 460437 - DNA, 83 bp, Homo sapiens
ggacactttgctcagcctgcttcatgcttctaatgaatgagtccctggaacgccagatgcgtgaaatggaagagaactttgcc

SEQ ID NO: 460438 - DNA, 96 bp, Homo sapiens
gttttgccgcgatttggcgttaacttattgacccatggggaggagggtcacttcccgtgaaaaggtagttagaaacaaacctgtggcaaggcaggc

SEQ ID NO: 460439 - DNA, 89 bp, Homo sapiens
aaagttctgccgggaagcaagaggcaaagagaatcggttggactggagtccagagttgccaccagatgggatattcaaaaatacgccag

SEQ ID NO: 460440 - DNA, 75 bp, Homo sapiens
cggctgggactgaagagggacgggtcccgcggcgagcgagctcctgaggtccatctgaactgtttactgtttgtt

SEQ ID NO: 460441 - DNA, 50 bp, Homo sapiens
ctacgctattacacgggagtaccaatgttttcagttgcaccaagcttagc

SEQ ID NO: 460442 - DNA, 100 bp, Homo sapiens
cctttgaaaatcaacgacaacttgagcacaggagcccatgaaatcaagagcaccacagctacatttggaatacagattctataagcagttaggatctgga

SEQ ID NO: 460443 - DNA, 50 bp, Homo sapiens
ctgcctcgccgcgtctcgccacgtgctattacttcatcccggaatttcct

SEQ ID NO: 460444 - DNA, 100 bp, Homo sapiens
cccagtactttggcatcaccaacagtcagctcaagccagacacatccctaccacttatgtcttggatgaagatgaacctcgattccttgaagaagttgat

SEQ ID NO: 460445 - DNA, 100 bp, Homo sapiens
ctggatcaaggtgctggccatgtcccagctggtggaatgcgtccccaacttttcggaggggaagaaccaggagttcatggcctcccacgggaacgacgcc

SEQ ID NO: 460446 - DNA, 111 bp, Homo sapiens
atcagtgcagagaagcattgggggaaccagtgggccccacgtgggtaaaaaggatgtaattggaaaatcgatgaatcaagcaatctgtattccattgtatagagataccag

SEQ ID NO: 460447 - DNA, 82 bp, Homo sapiens
ctcaggaacagggacagcacctcatcccctggatgggggaccacaagatcctcatcgacagaacaagttgaaatcatcgcag

SEQ ID NO: 460448 - DNA, 87 bp, Homo sapiens
ttttacaggaaaactccagtgattttcaatcaaacattgcatagagctgttgcgcagccattggtacctgtattggggaaacatagc

SEQ ID NO: 460449 - DNA, 100 bp, Homo sapiens
caacctctttgaaattgtaacaacgtctcgaactttctatgtgcagatgatgaggagtctgatgaggaagctgtgaagaaaaccaacaaatgtgtactag

SEQ ID NO: 460450 - DNA, 75 bp, Homo sapiens
cggcagtgagctcggccggcaaccgagggacccgcgtccaggtttttggattcaaagcataaaaaccattacaag

SEQ ID NO: 460451 - DNA, 100 bp, Homo sapiens
cctaaatgcactctttcgaaagaaaggagagcctgacaaggagctgaatcctaagaagaagatttgggagcagatccagcctgatcttcacactaatgat

SEQ ID NO: 460452 - DNA, 75 bp, Homo sapiens
ttggatttggctacacacttatagatcttctgcactgtttacaggcacagatgcctctagatttatcccctcttg

SEQ ID NO: 460453 - DNA, 90 bp, Homo sapiens
tcaacgcgggagacttccacggcctgcagcagcaggaagatagcctggagaaggtgattaaagatacggagtccctgttcaaaacccggg

SEQ ID NO: 460454 - DNA, 100 bp, Homo sapiens
aagcacctggatgagacatttgctacagcatcccacattaagtcaacggctggagcattggatttgctaaaggagcttaagaatattcctatgaccctgg

SEQ ID NO: 460455 - DNA, 82 bp, Homo sapiens
gcaagttcctgcttctgggacagctctactgacggaacgtcaaggtcgtgggaaataaaaggcagttctacacagactgcag

SEQ ID NO: 460456 - DNA, 100 bp, Homo sapiens
cggcgactcaacaagcggcgcttcccggggctgcggctcttcgggcacagatggcccactgcgtgaccttggttcagctgtccatttcctgtgaccatct

SEQ ID NO: 460457 - DNA, 101 bp, Homo sapiens
caccactgggaggacgtggagaggacagtgaacttccagcttcgagagctgtgcccaggagtgaacaaccagccctacctctgtgagagtggtcactgctg

SEQ ID NO: 460458 - DNA, 99 bp, Homo sapiens
ctccattccaaaaaaataagaaaaacagaaaaataataattacatctgcaaagaccttatttccaggcagttccttttagtcttgacagtgttgcaaat

SEQ ID NO: 460459 - DNA, 100 bp, Homo sapiens
gaagattgatcatcatatgggttgctgaagggtatgtgattggcagctgtattaaacacattccaatcgcaggacgagatataacatattttattcagca

SEQ ID NO: 460460 - DNA, 100 bp, Homo sapiens
ctgaaatgccatgccaggcattagtgaggatgctagccaagaaacctggatggaaagaaactaattttcagacaactcgagagatgatcgctcgttctgc

SEQ ID NO: 460461 - DNA, 75 bp, Homo sapiens
cagcatcaactacctgcactttggggagcctaagtcctggtgaggcggaaccaaccctcctggccatgggagggg

SEQ ID NO: 460462 - DNA, 97 bp, Homo sapiens
gcggagcagaaccccctttcgcttaagtgaaaaaggacttcaaacaagtgtgaagaggctgtgtggcgagattgtggaactgaagcagcacctggag

SEQ ID NO: 460463 - DNA, 100 bp, Homo sapiens
tgtttgtcctaaacccgtgtttgccttccatcatgctaacttcccacggaagaaggagaaagggccaacccctgaagaagcaatacagaaactgaaggag

SEQ ID NO: 460464 - DNA, 83 bp, Homo sapiens
ggcggccgcggggcccgagcgcagccgccaccggcacggccaggccagcatggtggaccacttacttccagtggacgagaact

SEQ ID NO: 460465 - DNA, 95 bp, Homo sapiens
tcacatccgatgcaccctttttgtcagattatcaggatgagggcaatggaacccactatgaagtttagcctggcatcagtgttaaggcctctgca

SEQ ID NO: 460466 - DNA, 83 bp, Homo sapiens
accacctcacagattccagcttcggaacaagagaccctggcatggattccgtgaaggaacaacacctaaacccaagagggcag

SEQ ID NO: 460467 - DNA, 75 bp, Homo sapiens
gtctgctcgtggccagcggcgccgccgaagtgtggacgaatgtggaacctcgctctgtggctgtgttcccttggc

SEQ ID NO: 460468 - DNA, 100 bp, Homo sapiens
ggaaaatggttcccactgccgggcgagatctgttacctaaagcaataaaaaatggccagaggatcagtgtccgatgaggaaatgatggagctcagagaag

SEQ ID NO: 460469 - DNA, 75 bp, Homo sapiens
tgcaacagctcacgggagcaagaacggccctaaaggacagcaaggtggtggagatcgttgatgagaaagttcgta

SEQ ID NO: 460470 - DNA, 100 bp, Homo sapiens
atgtggaccaacgtgaggctcccctcaacaacttctctgtggcgcgcttgggcactgtttaaaggaaagttccgagaaggcatcgacaagccggaccctc

SEQ ID NO: 460471 - DNA, 99 bp, Homo sapiens
atgattgtgaggcctccccagccacgtgaaactgcctgtatccggtgtccgaggcgaactcagtaagatgatgttaagaggaaacctgaagcaagtgcg

SEQ ID NO: 460472 - DNA, 85 bp, Homo sapiens
tgtttatcatcccaatgtcaaagttgtgtccaattttatggattttgatgaaactgtggtgatggcacttctcaaatactggcca

SEQ ID NO: 460473 - DNA, 75 bp, Homo sapiens
gcgggaacaacgcgagtcggcgcgcgggacgaaggggagttgctgagtcagcccagaccggaaggagtggcagag

SEQ ID NO: 460474 - DNA, 100 bp, Homo sapiens
ggacgaactcatcaggaagcgcggggcggcggcgaaaggacgaggagaggagacgccgtgagcgggacgaccagatgtaccgagagcggctgcgcacctt

SEQ ID NO: 460475 - DNA, 74 bp, Homo sapiens
tggagcggtacatcgcctcggtgcagggctccaccccgtcgcctcgacagatatgagcttccagccccctcctc

SEQ ID NO: 460476 - DNA, 73 bp, Homo sapiens
tgctgctggccacaaagaactcccacctgcgacacatcgagcacatggaggaaatggccagtgatgaactgag

SEQ ID NO: 460477 - DNA, 75 bp, Homo sapiens
ccaaggatggcgttaagctgccttacttcttccacgccggagaaacagcttctgacaaggcttctaaagagcaac

SEQ ID NO: 460478 - DNA, 75 bp, Homo sapiens
tcgctagaactcagttgtgcgttgcggccagtcgccactgctgcctcgaaaaagcccaagacagcagaagcagac

SEQ ID NO: 460479 - DNA, 99 bp, Homo sapiens
gctgctgtggccgctgctgctgctgctgctcctggaaaccgactggccaatcacaggcaggaagatgaaggttctgtgggctgcgttgctggtcacatt

SEQ ID NO: 460480 - DNA, 98 bp, Homo sapiens
tgtcctgtggaccttattcctgcactttattctgttggagctagacagaaacgtcaaggttacagcaaaaagatcggacagctggcttttaaaggaat

SEQ ID NO: 460481 - DNA, 96 bp, Homo sapiens
gagaacccagtcaagtgtgtccagacgtccaacctacagaactagctttcattgttgaggttcctcagtgctgaactaacaagagggtacttcctt

SEQ ID NO: 460482 - DNA, 98 bp, Homo sapiens
agccgggtggccgccctgttccccgcgctgcggcctggcggcttccaggcgcactaccgcggtgtgaccatgaagctcatggatgaggtcgccgggat

SEQ ID NO: 460483 - DNA, 100 bp, Homo sapiens
gcctcagccgcttggggcccgcacggaccctctacttcagtgtggccgacgacgatgccctcgctgaggagcgcatgcggagaggccagaacgccctgcc

SEQ ID NO: 460484 - DNA, 90 bp, Homo sapiens
gaccaccgttaatccagatcgcatcaaacaagtacgttcttcagatgtgtcatggtctgatactcgtaggaccctccgaaaagatcaccg

SEQ ID NO: 460485 - DNA, 100 bp, Homo sapiens
agggggaagcggcggcggcaaaggatgtgaatgaatgtgaactgctcagtggggtgtgtggtgaagccttctgtgaaaacgtggaagggtccttcctgtg

SEQ ID NO: 460486 - DNA, 50 bp, Homo sapiens
caaaagcctttcatgattatgcacagtaaccttggtgcacgaccgaaagg

SEQ ID NO: 460487 - DNA, 148 bp, Homo sapiens
ttggaagctagatttactggagttgcaagtgggagcactggaagtacgggcagttgcagtgttggagctaaagacatggatttgattgacatactttggaggcaagatatagatcttggagtaagtcgagaagtatttgacttcagtc

SEQ ID NO: 460488 - DNA, 74 bp, Homo sapiens
gaacacagcagagggtgtgtaataaaatacagccagatgaattatactttgaggaaggtgatattatctacatt

SEQ ID NO: 460489 - DNA, 74 bp, Homo sapiens
gctaattagactcatgccacttgaggtccgtttattaatggttagtcgaatggctaaaccagaggaagtattgg

SEQ ID NO: 460490 - DNA, 85 bp, Homo sapiens
cccaggaagagagacaagctggagccagaagccccagggggaggcctctacctgctggcagctcacagtgagggtcctggaggcg

SEQ ID NO: 460491 - DNA, 90 bp, Homo sapiens
acagcattcctgaaatacatccaggaaagacatggagattctcttaaaaagggcaattgaaggaacagactaaaaatcgtgtcctggaag

SEQ ID NO: 460492 - DNA, 100 bp, Homo sapiens
ccctgcattttgggaaactcgactttggagaaaccaccgtgctggaccgcttttacaatgcagattcacggcccttccacagtaccttccacaataccag

SEQ ID NO: 460493 - DNA, 83 bp, Homo sapiens
gcgtgccctacttcaaggataagggcgacagcaacagctctgccggctggaagatgagcgggatcgtgtgcagaagaaaacct

SEQ ID NO: 460494 - DNA, 50 bp, Homo sapiens
ccttgaacaaggcaaatatggttttgacaaagaaacagccttggtataat

SEQ ID NO: 460495 - DNA, 100 bp, Homo sapiens
agacaaggaagatgagctgtcctttcaggaaggagccattatttatgtcatcaagaagaatgacgatggtgacagagctgaatgaacctctctccaatga

SEQ ID NO: 460496 - DNA, 82 bp, Homo sapiens
tctgctcttcctcccttcgctcgcaccatgagatcctgaaggagctagacgagtgctacgagcgcttcagtcgcgagacaga

SEQ ID NO: 460497 - DNA, 90 bp, Homo sapiens
gttccaggacacctgccatcatggagggttatccagcacctggaggatacctgctacctctgtgtcagcgtgttatgatgccgtcccgta

SEQ ID NO: 460498 - DNA, 124 bp, Homo sapiens
aaaatgcggagtggcaagatggcacccaagccccagtctcgctgcacctctacccgctcagcaggtgtgctccatcctctggtctccccattacaaggagctcatctcaggccatggctttgca

SEQ ID NO: 460499 - DNA, 76 bp, Homo sapiens
tttagagctggcagcagcatctcagcccaagagaaggtgactctcctattccatctgtttcttcgggatcatcttc

SEQ ID NO: 460500 - DNA, 75 bp, Homo sapiens
ggagattgacagtcacaattttgtaataagcatcttatacaaaaccaagctgcctttcattgtggtcatgaataa

SEQ ID NO: 460501 - DNA, 51 bp, Homo sapiens
cagctcacattctgggaggccagccaggaattactcaaggtgatgaggaca

SEQ ID NO: 460502 - DNA, 100 bp, Homo sapiens
ccgagaccgtgaccgagagcgtgaccgagagcgcgaatatcgtcatcgttagaagaggggcttctgaacaatgccagggatacaagtgtcatggatactc

SEQ ID NO: 460503 - DNA, 88 bp, Homo sapiens
ttttacagtctgttccacatgatcattgtaataaggaaccagtgaccttccgggatgtggctgtggactttacccaggaggaatgggg

SEQ ID NO: 460504 - DNA, 139 bp, Homo sapiens
gagaagcttccatccttttggaataataacaaagcctcattaattgaatatataaagcaggtgcacctagcaggtagcatctaaaggaactggtttaaatcctaatgccaaagtatggcaagaaattgctcctggaaat

SEQ ID NO: 460505 - DNA, 83 bp, Homo sapiens
gaagggatgtcgtctcagcagtgctcgggcgcagaaagtttcctacactactgaggtttaggggcactgtgaagcaaaagcca

SEQ ID NO: 460506 - DNA, 100 bp, Homo sapiens
ctctgttcctcctgctcttacttgtcctgctcctgctgctcgaggacgctggagcccagcaaggtgaagacaggctcactgctaaaccagcccaaagctg

SEQ ID NO: 460507 - DNA, 111 bp, Homo sapiens
gcgagcacagagcctcgcctttgccgatccgccgcccgtccacacccgccgccaggtcgcgtggggcaggcagtggcgctgcgggccaaggccttcggcttcaacgtgctc

SEQ ID NO: 460508 - DNA, 82 bp, Homo sapiens
cgcgtctcggaaaccggtagcgcttgcagcatggttgggttaacggcatggagaacagtcaccccccccaccaccaccacca

SEQ ID NO: 460509 - DNA, 95 bp, Homo sapiens
gcgctcccggcggggcggccccggggggacccggcttccgcgcctcccggaggaaccacccccgccctcctcagcctgatcctggaagagactcg

SEQ ID NO: 460510 - DNA, 82 bp, Homo sapiens
ctgtgctcgcgctactctctctttctggcctggaggctatccagcgccatgtagggcaggaccgggtggactttggccagac

SEQ ID NO: 460511 - DNA, 99 bp, Homo sapiens
gcagtttgaagacttgctagttaggattttattactggcagcatgtatatctttttgcaagaagaaacacacgctgctgtgccccgactttgcccgcag

SEQ ID NO: 460512 - DNA, 50 bp, Homo sapiens
gccaagctcatggcctgccactgcgtgcgctctgtacaactcaatcaaga

SEQ ID NO: 460513 - DNA, 60 bp, Homo sapiens
tcgctttctgctcttccacaccagataagtgccatagagttcatttccatttgccgtatc

SEQ ID NO: 460514 - DNA, 74 bp, Homo sapiens
cgatttgaacaaagcgctagcaacttctaccaacaacagaaagccttgagccgggccatgcttctcacatctta

SEQ ID NO: 460515 - DNA, 96 bp, Homo sapiens
ctcaaggaaacacaagagaaattctatggcctaccatatgttccaaatactgaatgtatcctgtcaggtataatgtcagtgaatggcaagaaagtt

SEQ ID NO: 460516 - DNA, 74 bp, Homo sapiens
gctcacctgagagacggagccccggctcgcccgtgtgcagagtatggtttgaagtggtgaacatggatttttct

SEQ ID NO: 460517 - DNA, 100 bp, Homo sapiens
accgggtttctttgatgcgacctcaggaaggagatgaggtgggtttggaggatttgggacaacatctacaactgcaggttctgcattcagcttttctgcc

SEQ ID NO: 460518 - DNA, 100 bp, Homo sapiens
tgcagctgaagagacgtggccgtgagatgtttgaggtcacgggcctccacgacgtggaccaagggtggatgccaggacagccagctccgggagcagcgtg

SEQ ID NO: 460519 - DNA, 100 bp, Homo sapiens
cgagctgccactgcccccgggctgggagatgaccttcacggccactggccagaggtacttcctcaacttgtctccaatgttctcattttctcctgcacca

SEQ ID NO: 460520 - DNA, 100 bp, Homo sapiens
ctccgcggtggaggtctgcgttgctcttgcttttcctcgctggggtgtacggagcagcatttctttctattactactatctatgctgagactggttcagg

SEQ ID NO: 460521 - DNA, 75 bp, Homo sapiens
gcctaggcattttgctgtctcctcctaatacgatgttcggttactgcttaataatgacaatcttctcagggaagg

SEQ ID NO: 460522 - DNA, 75 bp, Homo sapiens
ggctataaaagcacagttttaagagagagataaggtctcaccatgttgtccagactggacttgaactcctggctt

SEQ ID NO: 460523 - DNA, 75 bp, Homo sapiens
gaagaatcataattcacttattccaaggaaagatacagatccttttatcctgccacaccagcaggttgataaagg

SEQ ID NO: 460524 - DNA, 75 bp, Homo sapiens
catcgcggccttcttccgatccggtattatagctgcaaatgtccttgtattctgtttatggagagtaccttctct

SEQ ID NO: 460525 - DNA, 49 bp, Homo sapiens
agctgcctcagttcttagcgcagaatcctcactatggatgggctcattg

SEQ ID NO: 460526 - DNA, 83 bp, Homo sapiens
cccctcccactgccatctttaactgggaagatggcagcaatatgaaaacgtttcccttgggggctttgaaataacaccaccag

SEQ ID NO: 460527 - DNA, 75 bp, Homo sapiens
gccagggaaccctggtcaccgtctcctcaggcagccagataagctggtggtggtatggacccgtcggaaccgacg

SEQ ID NO: 460528 - DNA, 98 bp, Homo sapiens
cgcctggcctgcgcgccgctgcccgcgccacagattgataggcagcagtttgaagaaacagttcgaactctaaataacctttatgcagaagcagagaa

SEQ ID NO: 460529 - DNA, 75 bp, Homo sapiens
gtggaagcggccaccgactactgtcagcagctgtgccagctggtgaattctatagccaagacgtatgttggaaca

SEQ ID NO: 460530 - DNA, 115 bp, Homo sapiens
cgacggtggtggtgactgagcggagcccggtgacaggatgatttcaacactacacttgcacaatgtctttgaaaccaagagtagtagattttgatgaaacatggaacaaactttt

SEQ ID NO: 460531 - DNA, 83 bp, Homo sapiens
ctcgactcagacgtggataaagataatcccgggacccagacatggagctgcgggaagaagcctggtctccggggccgctggat

SEQ ID NO: 460532 - DNA, 75 bp, Homo sapiens
cagcagcgcagtaccaccttccagagataacagttcctctccccactctggggtgtccagacaggtgcggatcaa

SEQ ID NO: 460533 - DNA, 99 bp, Homo sapiens
aagagtcagactggggggccccgcgaggccctggaggctgccgagcgtgaggagactcagcagaaggtgcagggagccatttgtgcaggccaagctgcg

SEQ ID NO: 460534 - DNA, 75 bp, Homo sapiens
cgaaggtctcagagctttacgatgtcacttgggaaggatgggtcatcagttaaggaagttgaaacctaccaccgg

SEQ ID NO: 460535 - DNA, 90 bp, Homo sapiens
aaaccgacgaatctttacctacactgactctgatagatacaccaatttggaggaggctctcaataaacaagactgggtagatggtgagcc

SEQ ID NO: 460536 - DNA, 83 bp, Homo sapiens
ccgcactttactgctactgctgatgccttcaaagatgaccgaaagacaatgcagatcttcgtgaagactctgactggtaagac

SEQ ID NO: 460537 - DNA, 99 bp, Homo sapiens
ggcaacaccgcaaggtccggctgcatcagaggctgcagctgtgtgttttccagcaggacgttcagcagttcggcagaaggttctggagagaaaaaatca

SEQ ID NO: 460538 - DNA, 75 bp, Homo sapiens
agaaaaaggattctcgatttcagacttttgtgcaagacctcagcagccatgtcgaagccccatagtgaagccggg

SEQ ID NO: 460539 - DNA, 98 bp, Homo sapiens
acagagatggaagacatgattgctgaagaattcctggaaaactcaagcaattcgtatttgacttacattctggaaaactgcacagagaattccatcat

SEQ ID NO: 460540 - DNA, 90 bp, Homo sapiens
cttcccgcgtccgccgattcctcctccttggtcgccgcgtccttggctggcgtggtgtgggccgaagatatgctcatgtggtgttgagga

SEQ ID NO: 460541 - DNA, 74 bp, Homo sapiens
ggaagtgcagctgcctcagttcttagcgcaggtcattcctgtcccaatcagctgctctactactgatgacatta

SEQ ID NO: 460542 - DNA, 82 bp, Homo sapiens
agtatacaccatgagcaaagctcaccctcccgagttgaaaaagggaccagatgtgcagaggtaatgaataccagggaatcag

SEQ ID NO: 460543 - DNA, 100 bp, Homo sapiens
aatgtacttagaattattaatgagccaactgctgctgctattgcttacggcttagacaaaaaggggacggcaaaacagaacagaaaggcggagataaaaa

SEQ ID NO: 460544 - DNA, 98 bp, Homo sapiens
aagagccttgggagcctatgaggagacatgaaatggtagccaaacccccagatcactttgggaagcagtgacatccaacctgtatcaagtcttctaat

SEQ ID NO: 460545 - DNA, 76 bp, Homo sapiens
gaaggcatctctactaagagctggggtctatcctgacaaatctgtatgtttcaggctgcatgtaccaagtagttca

SEQ ID NO: 460546 - DNA, 101 bp, Homo sapiens
ccgggagttacaccgccaccgccaggtgattcgcaaggggtggctcaccatcagcaacattggcatcatgaaaggcggctcgaagggatactggttcgtcc

SEQ ID NO: 460547 - DNA, 100 bp, Homo sapiens
cagggccctgcgccttgctccttttgtctaccttcttctgatccagacaggactgaaagaggtgtccccactgcctctaaatctcaaacgtttatacaaa

SEQ ID NO: 460548 - DNA, 98 bp, Homo sapiens
tgactgtgaaacctcagggccccagcgccgacggcgacgtcggggccgagctaacccggcctctggacaagactgcactgggtgttcaacagccatca

SEQ ID NO: 460549 - DNA, 100 bp, Homo sapiens
agcggagcctgagcaaggagcgggtccgtcgcggagccggagggcgggaggaacatgacatcgcggaggttgcgacctttccttccccagcaataaactg

SEQ ID NO: 460550 - DNA, 90 bp, Homo sapiens
tcgagatcctgccgttgcctgtcatgggagggcaggtctcgaagtgctgcagctaaaactcatacaactgccttggctgggcgaagtcct

SEQ ID NO: 460551 - DNA, 98 bp, Homo sapiens
gcgcagaggcggcggtggcgagaggtgcggcgaaggaggcagaggcacttatgcttgtcaggtctgccatcatggatgttctcgcagaagcaaatggc

SEQ ID NO: 460552 - DNA, 49 bp, Homo sapiens
ctggcttgtatggaagagttccagaagcaagacaggtggatctactgga

SEQ ID NO: 460553 - DNA, 75 bp, Homo sapiens
caaaggagcagttgctagtggccatttacaggaatcagccacttcagttcaggtggtttgttctggatgcagaaa

SEQ ID NO: 460554 - DNA, 100 bp, Homo sapiens
gatgagttgagtggagatgcttctgtggaagatgatgcttttatcaagaaaattcatttgcaaattgcccgacaaaggtaaaaagatctttgactctttt

SEQ ID NO: 460555 - DNA, 83 bp, Homo sapiens
ccggagagccccggagtgagcggagtagcgagtcggcaacccggaggtcagtcatatcatttggatcaaaaaatagaacaatc

SEQ ID NO: 460556 - DNA, 51 bp, Homo sapiens
gatccagaagctgtcaagccagatgactggactgtggtctggagctcaatg

SEQ ID NO: 460557 - DNA, 82 bp, Homo sapiens
ggatatttgcgaagaagctccctttcccacctaggctcacgaggcccagggaatcctctggaccatcagattaccaatgaaa

SEQ ID NO: 460558 - DNA, 100 bp, Homo sapiens
agcaacctagtcagtctgcatttggctctggaacaactcctaattctaaattagacctttacgagaagcacagttttgtcttcagtttcctctcccccca

SEQ ID NO: 460559 - DNA, 100 bp, Homo sapiens
cggcaggggccggagggcccacaacccgcagagacttctactggctgcgctcctttctggccggagggcagctgcaatgactctccgcacggtattattg

SEQ ID NO: 460560 - DNA, 100 bp, Homo sapiens
atcctgatgtgcagttaaaaaatctgcccttttatgatgtccttgatgttctcatcaagcccacgagtttaggtcatttggatccaggattcctagcaag

SEQ ID NO: 460561 - DNA, 100 bp, Homo sapiens
aaggagctagccctgggccaggaccggagatggatctagaaagcctggaggctgctaaccagagcctgcaggctgacctaaagttggcattcaagcgcat

SEQ ID NO: 460562 - DNA, 74 bp, Homo sapiens
ccgagtggtctaaggcgccagactcaaggtgtgatgaatgcagactctgctaccattttggctgtttggatcct

SEQ ID NO: 460563 - DNA, 100 bp, Homo sapiens
aaagatgttttaatgattcttccatatgtggcaattgtccaagaaaaggttcaaaccttgtactactcagctgatcacaagctgcttgatgggaacctac

SEQ ID NO: 460564 - DNA, 73 bp, Homo sapiens
cggggcgctcatctggctctgctacgacgcgctggtgcacttcgcgctggttgtaggtcataaagaaggtctg

SEQ ID NO: 460565 - DNA, 100 bp, Homo sapiens
ggcggaagcagagtctgggggagctcatcggcactctgaacgcggccaaggtgccggccgacaccgtgtaatgttcaagctcagaaatgccttatgtgga

SEQ ID NO: 460566 - DNA, 88 bp, Homo sapiens
aaagaccatcaagtttaccagcagacatctggtccctgggcataacagctattgaacttgcaagaggggaaccacctcattccgagct

SEQ ID NO: 460567 - DNA, 143 bp, Homo sapiens
cgtcgctctgtgacctgcgggtattggatgattcgtagctaagactctacgacatccctgaagccgggaaatggtacatcgagtacatgtgtgacatggtggcggaggagcccatcacaccccacagcaagcccatcctggtg

SEQ ID NO: 460568 - DNA, 148 bp, Homo sapiens
cagaaattggtcgtctgagagctttacgtcatcttcgattagctaataaccaactgcaattcctacctccagggtattcccagcctgtgagagaacatattgccgatttcaacacacagcagaacatgcagctggggaggctgtgtga

SEQ ID NO: 460569 - DNA, 90 bp, Homo sapiens
tgatcacaaagcccagttggctcgaacccagaagctgcagcaggaacttgaggctgccaatcaggcttcccgggcaactacagcaacaac

SEQ ID NO: 460570 - DNA, 76 bp, Homo sapiens
gacaagaagtgtgaggcaaacttgagagtgtccttctctcctgcaagctgctggagccagttctgcttctcggcaa

SEQ ID NO: 460571 - DNA, 75 bp, Homo sapiens
gagaactatagcaatctggttttcttggcagcagccgctcttctaaaacattcaaaccaaagaagaatatccctg

SEQ ID NO: 460572 - DNA, 83 bp, Homo sapiens
ggcgacggcggcggtggcggcttggacgactcggagagccgcaagagtgagccatggagctacgtgtggggaacaagtaccgc

SEQ ID NO: 460573 - DNA, 88 bp, Homo sapiens
cagccctgaaatcagctcgagacatgtgggctgattacatcctgttacacaacagccaatgcggagtctgacaatgagcgggactctg

SEQ ID NO: 460574 - DNA, 96 bp, Homo sapiens
ggcagcggaaacgcactttgggtttgagactgtgtcggaagaggagaaggggggcaaaggtcagaagacatctctaacccaagaaacagagctttt

SEQ ID NO: 460575 - DNA, 90 bp, Homo sapiens
cgtctccgcaggtcagctccgccgaaggcgccgccaaggaagagtgctctgtgacctgtgggcaaggtagggcaacccggcaagtgatgt

SEQ ID NO: 460576 - DNA, 50 bp, Homo sapiens
gcgaatctacgatggcgaggagaaggggtagaaatatttctgtcatggct

SEQ ID NO: 460577 - DNA, 104 bp, Homo sapiens
gtggaagatggagctacagaaatcgacgtggtaattaacagaagcttggtgctgacaggccagtgggaaggagagaagtatggctacctttcacttccaaagcc

SEQ ID NO: 460578 - DNA, 100 bp, Homo sapiens
atccaaatactgcatatcagaaacaacaggtagaagacgccctcacctatctggaccaggtgaagatccgctttggcagcgaccctgccacctacaacgg

SEQ ID NO: 460579 - DNA, 142 bp, Homo sapiens
cgaatgctggccccagagggagccctgaatatacacgagaaagcctggaatgcttacccctactgcagaaccgaaatggtggagtcaatgaagaaagtagcagggatggatgtggagctgacagttgaagaaagaaacctcc

SEQ ID NO: 460580 - DNA, 143 bp, Homo sapiens
cgacttatcacccagagtgctctgcacagagctccccactataacagttgctgccgccggaagtacaggcatccgtgtcattctggaccttactcccaactaccggggtgagaactcgtggttctccactcaggttgacactg

SEQ ID NO: 460581 - DNA, 50 bp, Homo sapiens
gtatactacatggcaaaatgggaaagttgctgccaaacaaggtgaatccg

SEQ ID NO: 460582 - DNA, 83 bp, Homo sapiens
ctccttcttctcttctctgcttggaggggatgtggtttccgttaagctggacaacagatcatgtttgagaccttcaacacccc

SEQ ID NO: 460583 - DNA, 83 bp, Homo sapiens
catcaacgatatatgtcagatctaaaggtacgacaacaattccacgatgccaaattcatggcagacattgatctggatccagg

SEQ ID NO: 460584 - DNA, 100 bp, Homo sapiens
agcctatcagctggggctggatgagtatctgccttctggagactgcgccgtcctcccgggagagccagaaagaggacatggctgctgggcagcgggaagc

SEQ ID NO: 460585 - DNA, 75 bp, Homo sapiens
tttgactgctctgctcctctatgctggacatcaaatttccaggtttattcttcagtccaaggaagcaattcacag

SEQ ID NO: 460586 - DNA, 50 bp, Homo sapiens
tcccaagtagctgggattacaggctcctcttggctatggtggtttcccag

SEQ ID NO: 460587 - DNA, 100 bp, Homo sapiens
cattaacctgccgccgcccctcaccagacagatcgctgtcaaaaccctagtctgcgggccaggcatcgacatccgcaacgactatcagcagctgaagcgc

SEQ ID NO: 460588 - DNA, 75 bp, Homo sapiens
ttctccctgcagcagtcagcccaaaggaaggtgcagtagacattgttgcaatcatgatcggcaatctgaaaggca

SEQ ID NO: 460589 - DNA, 75 bp, Homo sapiens
tggtgaccagccagatatccgctgtccaattcccaggaggcggacactgttgtgaaggaccaggctcgaatgggt

SEQ ID NO: 460590 - DNA, 90 bp, Homo sapiens
ccagctgtcactgcaggagctgcagaccatcaggaaacatgatgaaagtattgagggggcatcagaattgggtgtacagctgtgcattct

SEQ ID NO: 460591 - DNA, 100 bp, Homo sapiens
gtcgctagaactcagttgtgcgttgcggccagtcgccactgctgctggacgtaaagaaagaagtgatgcactcaattctgcaatagataaaatgaccaag

SEQ ID NO: 460592 - DNA, 83 bp, Homo sapiens
ccctggtcttgctcggccgatgaagtgcagaggtttttttctggaagatgttaccgagtacttcagtgaattccttagtgcag

SEQ ID NO: 460593 - DNA, 75 bp, Homo sapiens
gtcttgggtcctgctgcctgtactttggctcattgttcaaactcaagtgagaaagatcagtctaaagaaaaggag

SEQ ID NO: 460594 - DNA, 80 bp, Homo sapiens
ccgagctccagccgaaggagaaggggggtcaaaatgcagatcttcgtgaaaacccttaccggcaagaccatcacccttga

SEQ ID NO: 460595 - DNA, 90 bp, Homo sapiens
ggcagaggtggaggcgctttgaaaggtcaatgagctgaaggagaaaggcaacaaggccctgagcgtgggtaacatcgatgatgccttaca

SEQ ID NO: 460596 - DNA, 80 bp, Homo sapiens
cggtgacagagtggagccatggctagagtgcagagcagagcgggcggaggaccccgggcgcgggcgcggacggcacgcgg

SEQ ID NO: 460597 - DNA, 99 bp, Homo sapiens
ctgagacttacgacgaattgcgacagagcgggatgccaccagcttgtccaaagggaagttccaggagctcctggtgggcatcgttgtggagaatgacgc

SEQ ID NO: 460598 - DNA, 98 bp, Homo sapiens
tgaatgtgaaggacagaaatggaaagacgccccttatgaggaatgcaggcagtagttcagatggaaccgaagattccgatttttctacagatctcgag

SEQ ID NO: 460599 - DNA, 60 bp, Homo sapiens
cccacggacaccacctcaacggaatacggttggacagaatgaactgaagattacaagtga

SEQ ID NO: 460600 - DNA, 101 bp, Homo sapiens
gcaggcggcggcggcggaacgccaggcaggtgctccatacttgcttgcagtgcctacgtggctctggctttgggtgataacctcatggctttgaatcatgc

SEQ ID NO: 460601 - DNA, 100 bp, Homo sapiens
agaggcatacaccacttagtaaactaatgaaagcctattgtgaacgacaggtgccaagtctagtggtggcagggaagacttggagtcatctggactgcag

SEQ ID NO: 460602 - DNA, 82 bp, Homo sapiens
tccctgcagaatgcctctcaccacttagaacccaacatggatttgatcaacctgctcacgagaaagagatgacttgatgtct

SEQ ID NO: 460603 - DNA, 90 bp, Homo sapiens
gattgatatatatgctgacgaggagttcaaccagctccctggaattcccatgccaccaccacctttgggactcccccctctgcagcctcc

SEQ ID NO: 460604 - DNA, 75 bp, Homo sapiens
gaacaacttagaatggagtataaagggcaagtgtccagagaatggctgggatgaaagtacacttgaactcttttt

SEQ ID NO: 460605 - DNA, 100 bp, Homo sapiens
ggacaggtgccggagcagctcgtgcagctaagcagccaactgcagaaacgtcagattccatttggagcttttgcaacatgcaaagttctgcagaagaagg

SEQ ID NO: 460606 - DNA, 131 bp, Homo sapiens
cgggggttgctcggctcctgtgtgcagctaatggtcgtcgtcggcatcctcctggcctacctggcagaagtgtcggaggaaggcttccagattccagctacaataacagaacgatataaagtcggaagaac

SEQ ID NO: 460607 - DNA, 90 bp, Homo sapiens
aaagatctccagagtgaagaagagattgatcatccactgatgattctaaaagcaatcttattagagatatggctttcagttgatggcggc

SEQ ID NO: 460608 - DNA, 100 bp, Homo sapiens
agtctggccttagcacatgcagatgagaagtccttagatatttcacagttcttgccgagtgcttcactttttcactagaagtaaacgactttttacagcc

SEQ ID NO: 460609 - DNA, 82 bp, Homo sapiens
ttcgtctcttacgtctgcggaagtgcagctgcctcagttcttagcgcagagcccagccctgaccctgctgctggtggacgag

SEQ ID NO: 460610 - DNA, 80 bp, Homo sapiens
acaccacaataatccacagccaagaatacagttatggccacccaggtaatggggcagtcttctggaggaggagggctgtt

SEQ ID NO: 460611 - DNA, 103 bp, Homo sapiens
aggtcccaatcccccactctttccgccctaatggaggtctccagtttcggttgacatcatggacatatgtgagtccatcctggagaggaagcggcatgacagc

SEQ ID NO: 460612 - DNA, 110 bp, Homo sapiens
tatataaagtcaagtgtccattttctttcaactatatttgagcatacccagtgccggtggtggtgtgcacattgagccccggtatagacagttcccccagctgaccagat

SEQ ID NO: 460613 - DNA, 75 bp, Homo sapiens
aaggaagaaaacacaggagccggagcagaagcaaagaggagaactcctggaagccccgtcttcctcctcatgccc

SEQ ID NO: 460614 - DNA, 98 bp, Homo sapiens
ttacaagcagcaagtgcgcggttggggccactgcgaggccgttttagtggaagatagatgataagcctgtaaaaattgacaagtgggatggatcagct

SEQ ID NO: 460615 - DNA, 100 bp, Homo sapiens
cgcgcttcctgaacgtgattgagcgccaccctgtggacatcagcgccatccccgagcagcggtggaagctgaaacgcttcgttaagggactcaggcagta

SEQ ID NO: 460616 - DNA, 90 bp, Homo sapiens
ctcgtgggagctgcgctggccgctggcctactctggaagttcaccagagtcctggtggaggacgatgagatcatgcagggattcatcagg

SEQ ID NO: 460617 - DNA, 100 bp, Homo sapiens
aatagactttgggtcggccagtcatgtatcaaagactgtttgttcaacatatctacaatctcggtactacagggatatcagtatgaacaacattactcag

SEQ ID NO: 460618 - DNA, 50 bp, Homo sapiens
ctcagatgtgaagtccattaaagtgttatgtgccaagaaccttgcaaaga

SEQ ID NO: 460619 - DNA, 100 bp, Homo sapiens
gtccacagctggcaaattcagtgcagatcaggtttattcactggatctctgaatacccaggccccctccaccatggccagccggggtgggggccggggtc

SEQ ID NO: 460620 - DNA, 76 bp, Homo sapiens
gggcacgttctcatcagcatgtctgaccagtgcacaggacttcagggcttcctggtgttccacagctttggtgggg

SEQ ID NO: 460621 - DNA, 75 bp, Homo sapiens
tgcgagccggcggcccggagtggggcggcgggcaggaatttgtggatgcttatgtgaattatgtcttccaaatct

SEQ ID NO: 460622 - DNA, 74 bp, Homo sapiens
gggagaggccacagcccggactccatcgactcccccggctcttagactagagaacctcatgctttccatcctgc

SEQ ID NO: 460623 - DNA, 83 bp, Homo sapiens
atattggtgggccagcaatcctcagacgcctcacttaggacaaataagcaacgatgtgctgagctgaagaaagccttgtgtac

SEQ ID NO: 460624 - DNA, 100 bp, Homo sapiens
aaggtttactgcaacttcacagccggggggtcgacatgcgtcttccctgacaagaagtccgaagggcccgtggaccgggagcccgtggaccgggagccgg

SEQ ID NO: 460625 - DNA, 50 bp, Homo sapiens
gaggaaaacaacttcgagggcagagaagcaattttggaggtggtggaagc

SEQ ID NO: 460626 - DNA, 100 bp, Homo sapiens
ttaaatattaagaaagaaatcccaacagatgtgaaacccagactcagtccgctagtagcacactccagaaacacaaatcttcctcctcctttacaccttt

SEQ ID NO: 460627 - DNA, 100 bp, Homo sapiens
gaatgtggccagtaaaaatattgaggtacatggactatatcgcacaacaggtgctagttttgagaaggcccaacaggagtttgcaacaggtgtgatgtcc

SEQ ID NO: 460628 - DNA, 75 bp, Homo sapiens
agacctaaagccacagtcttcaagagcccacggacaccacctcaacgttgtgctgaaagacattatgacaccgcc

SEQ ID NO: 460629 - DNA, 100 bp, Homo sapiens
cctcagtgctgtgggcagtgcccagctactgatgtcccagaaattccagcagttccggggcctctgtgagcaaaacttgtgctgaggtgcctgggcatcc

SEQ ID NO: 460630 - DNA, 100 bp, Homo sapiens
tgtaactataagcagcttcggaaaggagccaatgagggctaccggctctctgaccagttccacgacatcctcattcgaaagtttgacaggcagggacggg

SEQ ID NO: 460631 - DNA, 100 bp, Homo sapiens
ccagaaccagggcacctgccacaacgacccccttgaggtgtacaggtgcgcctgccccagcggctataaggtgctatgcttacatttgaaaagatttcat

SEQ ID NO: 460632 - DNA, 98 bp, Homo sapiens
caagacctcatcaacaattaagagtcttgctgtgtggcccaggctggagtgcccggctggtctcaaattcctgacctcaagtgatctccctcccaaag

SEQ ID NO: 460633 - DNA, 89 bp, Homo sapiens
gggcgagccagagagggcccacacgactagaaggacgactgcctggcgcgatacaaaaatagcccccctccatgcgcctgaaggcccga

SEQ ID NO: 460634 - DNA, 82 bp, Homo sapiens
ccagctgcacactcttggggctctacctctttttcaaagaccctcactacgtccagcaggcgctgaccaacgtcttgctgat

SEQ ID NO: 460635 - DNA, 75 bp, Homo sapiens
gatactaccaactacaaaagctattggttagatgcagaggccaggatgtgggcccagccctgtgccaggaggctg

SEQ ID NO: 460636 - DNA, 75 bp, Homo sapiens
cgctctggccagggtgcttttggaaacagtggaagtttccagagaaaacagccatcaaagaaggttgagagtgag

SEQ ID NO: 460637 - DNA, 87 bp, Homo sapiens
tccgagcctttgatttgagtgggagaactttgaggtctttctttcatttgaagattatagcaatagttccctggtagcagatctccg

SEQ ID NO: 460638 - DNA, 100 bp, Homo sapiens
tcccgccgcgccccgccatgccgctctactccgggccggtgcataaacttctcccgagttccatctcagtaaaagggaagcaggaagaccaagaaggtac

SEQ ID NO: 460639 - DNA, 100 bp, Homo sapiens
tgaggatgaagattcaccaaataagctatatactttggttacctatgtacctgttaccactttcaaaagtgaacacacagtgttcatcccctcaggagga

SEQ ID NO: 460640 - DNA, 98 bp, Homo sapiens
tgccgccgcccgcctccgcctgccttctgccgccggccggcgcgtcgtccccacaggttcctggtagagttacacagttgtgccgccagtatagcgac

SEQ ID NO: 460641 - DNA, 100 bp, Homo sapiens
tcgaccttgcagataagctgctacagctggaaaggaactgtttggcctcgacactcttcagaaaagcttgtggatccagctgctggaggaaatgttcctg

SEQ ID NO: 460642 - DNA, 82 bp, Homo sapiens
ctgaaagcattaccgggttcgctaggctcacaggtaaggggcctggataccaagaagtgactgctcatctaatccataaagc

SEQ ID NO: 460643 - DNA, 90 bp, Homo sapiens
tggaagccatcccatgcgtggtgggggatgaggaggtgtggacgtcggacgtgcagtaccaagtgtcgggggcaatggcggcttcctgtg

SEQ ID NO: 460644 - DNA, 75 bp, Homo sapiens
ggagatgaagaagaagattaacctggagttaaggaacagatccccggaggagccacataaagaagatccctaata

SEQ ID NO: 460645 - DNA, 75 bp, Homo sapiens
tgcatatttgagacaacatctggatggttggggagaacgatattttgagaaaactccagccttgtcattcttctt

SEQ ID NO: 460646 - DNA, 90 bp, Homo sapiens
gcagcatattgtactggcctgctgctggcccgcaggcaaattcaacacccaacagcttccttaatagcaaaggtagcaacagcccaggat

SEQ ID NO: 460647 - DNA, 98 bp, Homo sapiens
ctgctggattactggccctcttcaccctcagacatcacaaatatggtgtgatgaatgcagactctgctaccattttggctgtttggatcctcctttga

SEQ ID NO: 460648 - DNA, 75 bp, Homo sapiens
catccctaagcaggagagaagctactaaagcaagacactaagggcgactaccagaaagcgctgctgtacctgtgt

SEQ ID NO: 460649 - DNA, 49 bp, Homo sapiens
cgcacgggagccagctgggtgcaatgcatgagagctggaagtggaagag

SEQ ID NO: 460650 - DNA, 74 bp, Homo sapiens
acgattcaacccgggggagctcagaagtcaacgaaaggttccgttgtccttgaccacgtattccatcacgtaaa

SEQ ID NO: 460651 - DNA, 82 bp, Homo sapiens
gccgatccagcctgcggagcctgtggggcaggtccgcgggagagctgtggggcttggtgagtgtttcgtggcctctcgggtt

SEQ ID NO: 460652 - DNA, 100 bp, Homo sapiens
gttgcgggggccggacttcaagacttaattcagtgcacaaatgagatgaatgtgaacatcccacagttggcagacagtttatttgaaagaactactaata

SEQ ID NO: 460653 - DNA, 102 bp, Homo sapiens
actcatcacagatcggaacggaggcctgtgggagtcgggccccgggccgccaccgtcacctcggccgctgccgctgtcgccatcgccttgtttccccatccc

SEQ ID NO: 460654 - DNA, 100 bp, Homo sapiens
ccgatacaaaatggtggtgcaagtagtgattggagaacaaagaggtgaaggagtattggtgaatttgtaaatgaatacgtcggtgaattaattgatgaag

SEQ ID NO: 460655 - DNA, 73 bp, Homo sapiens
ccgcggtgcgcaagcgcaaccgtcggtgggtcggggatcggtcgcctgagagcccgagcgggaagaagttccg

SEQ ID NO: 460656 - DNA, 100 bp, Homo sapiens
gaaactgaaggtagccgaggggcagtaaaagcatctactgggggacatcctgttgtgaagaactgccattggatgtccagaatcccctgtagttgataat

SEQ ID NO: 460657 - DNA, 98 bp, Homo sapiens
cgcggacctccctgcgaccgtcgcggaccatgggcgacaaagggacccgatacaaattcaaagcacgtgaacttgatcccagaatacttgaaggtggg

SEQ ID NO: 460658 - DNA, 75 bp, Homo sapiens
acgaggattatggatgaacgtaacagacagacctgcctagagctggaacgttacctccagagcgagccctgctat

SEQ ID NO: 460659 - DNA, 90 bp, Homo sapiens
ggagcatgtcgaccccggcccggaggaggctcatgcgggatttcaagcgttaaacttgtggttccgtgggttgatatccagaaattagaa

SEQ ID NO: 460660 - DNA, 82 bp, Homo sapiens
gacaaggcaaagcgaaattggtcattctcgctaacaactgcccagctttgagatgacgaagatgatcctgcagaagctgaaa

SEQ ID NO: 460661 - DNA, 100 bp, Homo sapiens
atgaagatggacaaatatgttttgtggaatattactgctgccctgatgaagaagttcctgaatctgagtcttgagtacatggactatatcgcacaacagg

SEQ ID NO: 460662 - DNA, 75 bp, Homo sapiens
atcacagtcaactatcgacttggagtactcgggtctccaactgaattccttgaagagaaaatggcctaccaggaa

SEQ ID NO: 460663 - DNA, 88 bp, Homo sapiens
agaatgaacaatccgtcagaaaccagtaaaccatctatggagagtggagatggcaacacagactaaatgtgttaaatgggcttgccaa

SEQ ID NO: 460664 - DNA, 82 bp, Homo sapiens
ccgggaccctggcccctgtcgagcagcctcccgcgacgatgcccctcaacgttagcttcaccaacaggaactatgacctcga

SEQ ID NO: 460665 - DNA, 97 bp, Homo sapiens
gaagccatgtaaaaatctgatgaacacactgaataatttgcatcagcaattggcaaaatatgatggtggtgctaccccagtacaggatgaacgggat

SEQ ID NO: 460666 - DNA, 75 bp, Homo sapiens
tgccaaccggccagaggacgagtgtgccgcttacaaacacgcagatggcaagaagattgatggcaggagggtcct

SEQ ID NO: 460667 - DNA, 80 bp, Homo sapiens
ccatgacaacaagtcccggctccggaagatgaagacaatgcagatcttcgtgaagactctgactggtaagaccatcaccc

SEQ ID NO: 460668 - DNA, 90 bp, Homo sapiens
aaaagttcaaaaactgaaggactctgaagctgagggtcctgctggagagcgtggtgctccaggccctgcagggcccagaggagctgctgg

SEQ ID NO: 460669 - DNA, 50 bp, Homo sapiens
ccaactcgtcctcctactgcccttcaggaatcccagtcagaagttccagc

SEQ ID NO: 460670 - DNA, 75 bp, Homo sapiens
ataagccatggcatctaagaaatttgctgttaaaatttcggtaccaggaccacacatttttaaagatgctcctca

SEQ ID NO: 460671 - DNA, 74 bp, Homo sapiens
ctggaagtaaccccttccgggagcctagatcctgtgctttactctgaagactcttacctagaaaagtacgagaa

SEQ ID NO: 460672 - DNA, 74 bp, Homo sapiens
tctgcttggagaagaagttgcccagtatgatggggcatacaagggaaacaaaggacccatcgcaaatgttttcc

SEQ ID NO: 460673 - DNA, 82 bp, Homo sapiens
atggcgaggagtctctgtccgggggcctggctaaggaaaccctattacctccaggtgagcgagtgctgtgctttcatgggcc

SEQ ID NO: 460674 - DNA, 100 bp, Homo sapiens
agccaggaagagggactggaaccatctcagaagccatgcccctcaggctggaacttgccctgtctcctcgcagatgagaattctcaatcgcaatcctctg

SEQ ID NO: 460675 - DNA, 100 bp, Homo sapiens
ctatatactttggttacctatgtacctgttaccactttcaaaaacatatctgaagagatggattaagaatgctttggattaaggattgtggagcacattt

SEQ ID NO: 460676 - DNA, 80 bp, Homo sapiens
tgaaggttgaagtctgggatgtagtagacaaagatataacacgtgggaaccggaggagaacatcctggaccccaggctgc

SEQ ID NO: 460677 - DNA, 82 bp, Homo sapiens
acgcggatttggctggcgtcccgcgatcctgatggtgaacatgccaggagagcaatgcaaaaggtgatggctacgactggtg

SEQ ID NO: 460678 - DNA, 100 bp, Homo sapiens
cgtcgccatgaaccgcttcagggtgtccaagttccggcacaccgaggctcggccgccccgccgcgaggaaactactttgcttcgcactttttcatgggag

SEQ ID NO: 460679 - DNA, 98 bp, Homo sapiens
tcgccgagcgcacgccttgccgccgccccgcaggtgacgcggcgcacggcgcggatggtggccgagtggcagtgtgtgggcttctgccacggcgtgct

SEQ ID NO: 460680 - DNA, 74 bp, Homo sapiens
cggctgtgaaggacctgtttggggagtacagctttatggcggtcatccactttgcggggctcaaggccgtgggc

SEQ ID NO: 460681 - DNA, 75 bp, Homo sapiens
cccaggacactgtccggatcttccctccctgttagagatgtttatgattacttccgagctgtcctgcagcgtgat

SEQ ID NO: 460682 - DNA, 83 bp, Homo sapiens
tggcgctgctgctggtctccggggttctggcccctgcggtgctcacaggtgtgagatgcacaatgcgaaacctaggccccagc

SEQ ID NO: 460683 - DNA, 83 bp, Homo sapiens
gcccgcactcctggtcctgctcggggctctgttcccagggccttgatacaaagcatgcttgaaaaatgcgatcggtttctctg

SEQ ID NO: 460684 - DNA, 50 bp, Homo sapiens
gttttgccagcgataatacgcctcagaaattgaaaagtttcaaggttctg

SEQ ID NO: 460685 - DNA, 98 bp, Homo sapiens
gtggctgaatccatgggcatcgcccagattcaggaggagacctgccagctgctaacggatgaggtcagctacatggagatttactgtgagcgcgtccg

SEQ ID NO: 460686 - DNA, 100 bp, Homo sapiens
actgtgaaagccatatgtatccctgaaggagcagagcatggcttgaacttccagagactcctggacaccagcacctacaaggaggcctttcggaaggaca

SEQ ID NO: 460687 - DNA, 90 bp, Homo sapiens
agtgacatgctcaagacaacactgctgctaaaccaggtggacaggtgaaatgtcagtatatctctgctgtggataaagttatatttgtgg

SEQ ID NO: 460688 - DNA, 76 bp, Homo sapiens
gggctgcacaagcccgaaccctactgtatcgtcagccacttgcagtgggatcatgaaacctggtctcaacgccatc

SEQ ID NO: 460689 - DNA, 89 bp, Homo sapiens
aaaccaagatagatgtgtcctatgaataccgcttcctggagttcacgactctgagtgctggaaaaccgtcttcagatacagtccctaag

SEQ ID NO: 460690 - DNA, 71 bp, Homo sapiens
atcacccaccaacaacaccacaataatccacagccaagatgaagactggcccatttgcagagcactccaac

SEQ ID NO: 460691 - DNA, 100 bp, Homo sapiens
agttgactccacagatccggggtgtacattccaagcagagtggccctcatccttcagaatgtggatctgccgaattgaagaggcctgatttcagctccac

SEQ ID NO: 460692 - DNA, 100 bp, Homo sapiens
gccaggcggtccgtgcgagaggaccaacggagcgctgaggcgggcgttttcttggatgaattgcttgctttggagatgcggtgacctgccagcacctgcc

SEQ ID NO: 460693 - DNA, 75 bp, Homo sapiens
cagtacacttactactatcctcattatctccaaaccaaggcctcggcaagacgcgcaggaagaccagcgcgcggg

SEQ ID NO: 460694 - DNA, 100 bp, Homo sapiens
cgggccggtcgcggaggccgcgccgggccctgtcgcgaacctccggcgcgctgccccgccggaccgtggaattgaatgatctggcacgggaccctccagc

SEQ ID NO: 460695 - DNA, 100 bp, Homo sapiens
gagatccaacagcaaagtgctttaagtttattaaatggcacttttgatttccaaaatgacttcctgcggctccttcggagagcaaagcagttagagttca

SEQ ID NO: 460696 - DNA, 100 bp, Homo sapiens
gggggagcggggccttccacaccccctccgtgggtgtgtggtaaagtcagtgataaatcttttgtttgctgcatatactggagatgtgtctgcacttcga

SEQ ID NO: 460697 - DNA, 75 bp, Homo sapiens
cttactactatcctcattatctccaaaccaagtgtaaacaggaacatcgataagtagtgtaaaaacttgcacaat

SEQ ID NO: 460698 - DNA, 100 bp, Homo sapiens
caagaagcatgctggattgtaatcagacatccacagttatttcaggaaattcttctagtgccagcgtttcctcgtcagtaactagtggcttaactggatg

SEQ ID NO: 460699 - DNA, 100 bp, Homo sapiens
tccggaaggactttggcgagggtgtctcccagtctgctaaagccctaaggccatcaccatggacttccagcatcgccccgggggcaagaccgggagcggg

SEQ ID NO: 460700 - DNA, 51 bp, Homo sapiens
cgacctcctatgactctgcagttaaaaaggtgtgagcggtactgggcccag

SEQ ID NO: 460701 - DNA, 100 bp, Homo sapiens
cttactcttatcaatttctatgagagcatgtttcgccaagggatgcatgacttgaaagtctggcctaatgtagaagcagatggatcagaacccacaaaaa

SEQ ID NO: 460702 - DNA, 82 bp, Homo sapiens
gagctctgatcgccgggaacccttgccgctgctgtcctgcgaccccaagcagcaattctgtggtgttcttggtcacacattt

SEQ ID NO: 460703 - DNA, 90 bp, Homo sapiens
ccaagctctgccacgaaggtgccaccggcagtgacatcagtgtctggcccaggtgagcacctccgaaatgccctgtggcatactggccac

SEQ ID NO: 460704 - DNA, 51 bp, Homo sapiens
tacacgccgccgcttgtgctgcagccatgggacaagcatgaggagaaccac

SEQ ID NO: 460705 - DNA, 83 bp, Homo sapiens
tctgcccaccctggccattgcgtatttcacaggagatgcacaaaagggtatttatggcacaatgaaaaatttcatctttccca

SEQ ID NO: 460706 - DNA, 98 bp, Homo sapiens
aaaaggctgtgttaagtgattctctgacaaggaaaagaatacttgagatccatttgtaaggaaagaaaaggaagcaacaacataatgcccagagttgg

SEQ ID NO: 460707 - DNA, 75 bp, Homo sapiens
atctactcaagagtggaagttttcacaggataaaatggaccagttgctacagatgctgcaaagtacagaccccag

SEQ ID NO: 460708 - DNA, 109 bp, Homo sapiens
gaaagtctacttggcagctcggggagtcctaccctatgtgggcaacctcatcaccaaggaactgcaagcacatgttgaccagataactgaaatggcagcagtaatgagg

SEQ ID NO: 460709 - DNA, 74 bp, Homo sapiens
ccttttgttccaggaatcacaaatgatatgcaaagccttctagacaagctcagtggaatctgaagggcccaccc

SEQ ID NO: 460710 - DNA, 83 bp, Homo sapiens
gcccgctcacctgcgctgtgatgcctgcagagctgtggcttaccagaaactaatctggattcactccctctggttgataccca

SEQ ID NO: 460711 - DNA, 100 bp, Homo sapiens
actgccggctctgccggcacccacagcaacgcttttcatgcaacacccaacacttataagcggaagaacacagaaacagctctagacaacaaaccttgtg

SEQ ID NO: 460712 - DNA, 75 bp, Homo sapiens
ctcaggccagttcgtcggctgccagcaacaatcaccagtgatcctgccatgaagcagtttctgctgtacttggat

SEQ ID NO: 460713 - DNA, 75 bp, Homo sapiens
gccagcttcttcttggggaaggtgtgtttcctcgccacaggtgcttctgcgcaacgtctgagcacaggagcccat

SEQ ID NO: 460714 - DNA, 90 bp, Homo sapiens
gaagaagcctgttgccttcagtgactacattcaccctgtgtgtctgcccgacagggagacggcagccagtggagatggggtttcaccatg

SEQ ID NO: 460715 - DNA, 50 bp, Homo sapiens
caagaacaagggccgcgatgtggaagttgaactcccaccacctgatcttg

SEQ ID NO: 460716 - DNA, 82 bp, Homo sapiens
ccgggccatgtcggtgggcgagctctacagccagatgatgataattccgaagaaggcttccacactattcattcaggaaggc

SEQ ID NO: 460717 - DNA, 80 bp, Homo sapiens
atgtacacgataattaaagagtaaagttgtgctcaacgaaactgattcagcagtacagaaagaacttagaaaccagacac

SEQ ID NO: 460718 - DNA, 98 bp, Homo sapiens
caggagagtccggccgcgacaggacgaacatgttcttcaagtatacatggaataactttttgcatacacaagtggaaatttgtattgcactgattctt

SEQ ID NO: 460719 - DNA, 75 bp, Homo sapiens
cagcctcccacagcagcccaactcctgagagatattgatgatgttaagaagttcaaaccgggttacctggaagct

SEQ ID NO: 460720 - DNA, 75 bp, Homo sapiens
cgggtcatcttttccccagaggcgtcggaatggacctgtgccacccagcttttcaggctgcctttcgagctcagg

SEQ ID NO: 460721 - DNA, 75 bp, Homo sapiens
aagaaaaagaaaacagattattattgcaacaaagtcacattgcttccatgctgtcaagccaagacctgaagatag

SEQ ID NO: 460722 - DNA, 83 bp, Homo sapiens
ctgatatcaacacggtcaacgtggacggcttgacagccctgcaccaggggtattccctcagcggatactacacccatccattt

SEQ ID NO: 460723 - DNA, 119 bp, Homo sapiens
gggaaaataatccagagatttccacagaaggactgggatgatacaccttttccacagggaattgagttggtgccaatgggtcatgtttggttagaaggtgacaatctacagaattctac

SEQ ID NO: 460724 - DNA, 82 bp, Homo sapiens
gcgacggcgtcgggagagcgcgcctagccggctcgcgaaccaatgatgcgagctcagagtcaatagcatccttctctaaaca

SEQ ID NO: 460725 - DNA, 90 bp, Homo sapiens
cgacccgggcttctgtgaaacatggcggtaggctgggaccataacacaaggtaaagctttccagtttgaatttagatgatcacgcaaaga

SEQ ID NO: 460726 - DNA, 110 bp, Homo sapiens
ggcaaacagggaaactgaggaccagagaggcattttgtgaccgacttattcttagatcattggttttccaaaggctttgtggccatgaagccctttgagtgaaaactgtg

SEQ ID NO: 460727 - DNA, 75 bp, Homo sapiens
cggctccatcaagacccagccccacacgaagatgctgacatcagaaggaacacagcctcaagcagcaaatccttc

SEQ ID NO: 460728 - DNA, 100 bp, Homo sapiens
ttcagtggggctattggactgacttttcttatgctgggatgtgccttagaggattatgggagaagtgccagaaagcccggaagcaaggaaggaaagtgac

SEQ ID NO: 460729 - DNA, 99 bp, Homo sapiens
cccgcttgccgcagccgcctcagaacccgaccaacatccagaacttccagctgcccccaggctgaccccgcactacatctacccaccagccatcgtgca

SEQ ID NO: 460730 - DNA, 82 bp, Homo sapiens
agagcgcgacatcctctccaacggccagcagggttgctgcttttgctcagaggacatccatgaccctaatggtctttttgtt

SEQ ID NO: 460731 - DNA, 100 bp, Homo sapiens
tacaagtgaacatttcagatttcgaaggacattccaatccagaggggaccccagtatttgcagatcgccctggcttgaaaaacagtccaattgatgaaag

SEQ ID NO: 460732 - DNA, 128 bp, Homo sapiens
cggaaaaccgaagttggaagtgtctcttagcagcgcgcggagaagaacggggagccaggtttggtgcacctcgatttggaggaagtagggcagggcccttatctggaaagaagtttggaaaccctggg

SEQ ID NO: 460733 - DNA, 100 bp, Homo sapiens
caggaatggagacacggcttcccccaaggaatatacagttcgatatctcaatgcctatactggaatagtgctacttcgatgcagaaaagaattctatcag

SEQ ID NO: 460734 - DNA, 88 bp, Homo sapiens
gggcttaagcccagacttgacgtaacagaaatgtgccaatagtgtactaatggtcacttgatgtgcgctggctgttttatccacctac

SEQ ID NO: 460735 - DNA, 75 bp, Homo sapiens
cccgtggccaccgcctccagcttgccaccaaagacctgcgactttgctcaggcccagctgagagccagcctggag

SEQ ID NO: 460736 - DNA, 90 bp, Homo sapiens
aggagtttcatgaagagcccaaaacctattacgaactcaaaagtcaaccgctgaagagcagacaatgcagatcttcgtgaagactctgac

SEQ ID NO: 460737 - DNA, 98 bp, Homo sapiens
ggaggagccgcagagctcgtaattgctgcggggaggacaggccagctctggaagaaaacaggttcgaagtcaacaataccattcttcacccagagatc

SEQ ID NO: 460738 - DNA, 100 bp, Homo sapiens
gttttctgcttttcttctcccccagacagtgagtttgtggaagcctcgcccgcatcctacagcccagacgagttaggataaaagaatcagagtgtctcaa

SEQ ID NO: 460739 - DNA, 74 bp, Homo sapiens
gaaccattgaaaaatttgagaaggaggctgctgagcagggaaaaggggtcgaggccggtcctgacctgttacaa

SEQ ID NO: 460740 - DNA, 73 bp, Homo sapiens
atgatcatctcagctgctggccctaagacatgcaagaaagcacttcagccaagcagaagggagccagctggac

SEQ ID NO: 460741 - DNA, 99 bp, Homo sapiens
tcaccccttatgagatgttaatggatgacattcgctgcaaaagatacaccttgcgaaaagtgatgagcaccaattttgcggggggcggctggagaaggc

SEQ ID NO: 460742 - DNA, 98 bp, Homo sapiens
cgcaacctccgccagcgtcggtccctgggcaggtgtggacaaaacttacctggggtccctacttatggttttacatgcttcgggctgctacatcaact

SEQ ID NO: 460743 - DNA, 75 bp, Homo sapiens
ggagagtcgaagcagcagctctcgctccagaagcttcactttggagggttctgataatgatgatgatgagggaga

SEQ ID NO: 460744 - DNA, 82 bp, Homo sapiens
ggggcttagcgcactggaggagcggcgggcttcagacaggactatgacttgagccagctgcagcagcctgacactgtggagc

SEQ ID NO: 460745 - DNA, 49 bp, Homo sapiens
cgaaagcggtgcagacgggaggaagggtccagtgtccatcaaagtccag

SEQ ID NO: 460746 - DNA, 75 bp, Homo sapiens
gaggggctgggctcctactgttcttagagatgtacctttctcagtaatgctacagccctttgactatgatccgaa

SEQ ID NO: 460747 - DNA, 85 bp, Homo sapiens
tttctgtcgtggcaatgttttgaaactggcaaaatcaggtgctggagaatctggtaaaagcaccattgtgaagcagatgaggatc

SEQ ID NO: 460748 - DNA, 100 bp, Homo sapiens
gataatgaatgtcgaatgtgactgactagcagcttcattttgaagtgatttgaagatattaaagctagaaattggaactagaaaatcaaaagaattcaag

SEQ ID NO: 460749 - DNA, 73 bp, Homo sapiens
ctggctcggagcagcagcctctgagttcagaatgaccgaagaagcatgccgaacacggagtcagaaacgagcg

SEQ ID NO: 460750 - DNA, 100 bp, Homo sapiens
gtctttctatgcgaacggattgaagaaacgttccatgccattgcagtgtcaactaggcctcagttacttttcagtttgcccaaattgagcccatctcaac

SEQ ID NO: 460751 - DNA, 82 bp, Homo sapiens
tctccatgcccgagttcatggccaacctcaggctcaggtcaaaatgcagatcttcgtgaaaacccttaccggcaagaccatc

SEQ ID NO: 460752 - DNA, 75 bp, Homo sapiens
cagatttgtggtgcgttctgagccgtctgtcctgcgccaaggtgaatgagtggcaggatgactggccgacctttt

SEQ ID NO: 460753 - DNA, 50 bp, Homo sapiens
ctctgtagcaccttctgcttctatgccagtgattacccaaagaaggagga

SEQ ID NO: 460754 - DNA, 90 bp, Homo sapiens
agagctacacgttcacggtgccccggcgccacctggagagaggccgcgtcctgggcagaggaaactactttgcttcgcactttttcatgg

SEQ ID NO: 460755 - DNA, 75 bp, Homo sapiens
aaggggccagtctggagacagtcaagattgacgagatgcctgaggctgccgtgaaatcaacagccaacaaatacc

SEQ ID NO: 460756 - DNA, 75 bp, Homo sapiens
taatgatgctaccatatttaaacttgaattacctttgaagcagaagggggtctcgctctgtcgcccaggctggag

SEQ ID NO: 460757 - DNA, 100 bp, Homo sapiens
ctttataagtgtcagctgtgagcctttgaagaagatggtggagagaattcgcaagttccagattctcaatgatgagatcatcaccatcctggataagtac

SEQ ID NO: 460758 - DNA, 50 bp, Homo sapiens
ggacaccccggaagctgggaaatgtactatactggcaattgctggagaag

SEQ ID NO: 460759 - DNA, 100 bp, Homo sapiens
agatgtggtggaatatgccaaggaaaaactggagagcttcatcaaaaatagtgatagctttgataatcaggatggctaaaggtgaccccaagaaaccaaa

SEQ ID NO: 460760 - DNA, 96 bp, Homo sapiens
aggaaactcagaagacagatcctgctatggaaccacggttcaaagtggtggattgggacaaggttaaaaagatcaagtggcatgagcagccttttg

SEQ ID NO: 460761 - DNA, 100 bp, Homo sapiens
caaaagatgtttctgacgaatatcaatattttctctcttctttggtcagcaatgtcaggatccagatgaagaaatggccaaaatcgacaggacggcgagg

SEQ ID NO: 460762 - DNA, 75 bp, Homo sapiens
cctaaaccagaagaggaggttgcccagaagaaaaaggaaccagcacctatgacagaagatctgctagaagagcag

SEQ ID NO: 460763 - DNA, 97 bp, Homo sapiens
gcactgcagaaagtgggcctgagcctcgaggatgacggtgctgcaggaacccgtccaggattggcagccaccatttgcatgtgatgttgataaactt

SEQ ID NO: 460764 - DNA, 97 bp, Homo sapiens
gccgccctcagttgctgctccgacgcggaccccagtaccaaggtagatgatgagctggagatcaaggcctactatgcaggccacgtgctgggggcag

SEQ ID NO: 460765 - DNA, 100 bp, Homo sapiens
aaaattgctacctgcatttcatactccctctggaataccttgggcattgctgaatatgaaaagaaaatgcttggacagaagagatgagtactatttccac

SEQ ID NO: 460766 - DNA, 98 bp, Homo sapiens
ctaagaaagtggtgaatcccctgtttgagaaaaggcctaagaattttggcattggtattagaaaactactcggatgctccaatgacaccaaaacagat

SEQ ID NO: 460767 - DNA, 73 bp, Homo sapiens
tttagggtcctttatatagaagggagagtagaggctaagaatattgtacacaaagattcttgatgttcttgag

SEQ ID NO: 460768 - DNA, 100 bp, Homo sapiens
ccgccaagagtgagcgagcggacccgcgatgggctcttgtcaggatggtgaagctgttcatcggaaacctgccccgggaggctacagagcaggagattcg

SEQ ID NO: 460769 - DNA, 75 bp, Homo sapiens
gatgttcttcttcgagtatttgtagaaggaatgcatacacagccacagctatcaacagcaccaacttctgcacct

SEQ ID NO: 460770 - DNA, 75 bp, Homo sapiens
ttcatttaccctttggtcggaacggttcattcatagtgcagcatacatcagaacttcgttccttgttattgctga

SEQ ID NO: 460771 - DNA, 51 bp, Homo sapiens
aagagctgcacaagtctctccggtgtgttctaggtcagtggcttcaaagac

SEQ ID NO: 460772 - DNA, 49 bp, Homo sapiens
cttcgtagggaggctggaaaaggccaagtttcttcctaacagtggtgat

SEQ ID NO: 460773 - DNA, 75 bp, Homo sapiens
tggaagcggcaagcagagaaaacctgccaatcaagatgagtatggaatcctaatgtacctggctagctggtggtg

SEQ ID NO: 460774 - DNA, 76 bp, Homo sapiens
aatgggaatgtacacgataattaaagagtaaagttgtgctcaacgtgtttcaatgcatcaaagctactgacatctc

SEQ ID NO: 460775 - DNA, 75 bp, Homo sapiens
cgtagcttccatccgccagctgccatgagcgagcgcctccgtcccagcagcgtcaccctttacaccagaaagctg

SEQ ID NO: 460776 - DNA, 100 bp, Homo sapiens
cttaagggactttcagaactgagacagagtctccacagcctattggctcacttggacatgatgctgacttgaggcggcagcagcaggatacctgtaactc

SEQ ID NO: 460777 - DNA, 100 bp, Homo sapiens
tgcgtgctcatccgaaagcgggggaagctgccaggccccactctgtgggcctcctattccctggagtacgggaaggtaatagcctgcagctggtgttttg

SEQ ID NO: 460778 - DNA, 90 bp, Homo sapiens
tggagaagtgggacggtaatgagggcacctcagcttttcacatgcctgagtggatgtcttcgagtgcttcgactgaccatgatcccctgg

SEQ ID NO: 460779 - DNA, 96 bp, Homo sapiens
aaatagacgatagcttggatcaagaacagtccactttggaaagtgaagaatggaatccttgggaaggagatgaaaaaaatgagcaacaacacagat

SEQ ID NO: 460780 - DNA, 155 bp, Homo sapiens
gcagcaggaacttcttcagtgttacttgaaggatttcattctcttgaccatgcgtgtgtcaacggaggaggaattaaagaccatcatggagcagttcaaccctagcctccggaacttcatcgccatggggaagaattacgagaaggcactggcag

SEQ ID NO: 460781 - DNA, 101 bp, Homo sapiens
gatgctgcagatgccgttaaacaaatcctggaggcagttgctctattgacctgaaaagtggttctggaaaagtgtaccaaggccctgcaaaaggtgctgct

SEQ ID NO: 460782 - DNA, 100 bp, Homo sapiens
gctcggatctgtgaaccaatagacggaattgatgctgtcctcattgcaacgtggttggacagaacaatggcagcccgagtacttataattggcagtggag

SEQ ID NO: 460783 - DNA, 90 bp, Homo sapiens
gaaaccactcaagagtcataggattagatgatccaagtcaccaagaaattactgtctcaagtgatacgggccgttgctccagggagaact

SEQ ID NO: 460784 - DNA, 50 bp, Homo sapiens
tggagatgacaagcacgagtttctggtcccgtgggagtagggctgaatga

SEQ ID NO: 460785 - DNA, 88 bp, Homo sapiens
ggcccggcgcacgcccccacctcctcccgcgcgggcgctgggcgccggcccagctgcagtcaggatggctaaaggtgaccccaagaaa

SEQ ID NO: 460786 - DNA, 82 bp, Homo sapiens
cagggcctgcagcgggagctggacggcgagcgcgagcggcgcgagaaagcaggtacttcccggagcgagcggggaacgcgac

SEQ ID NO: 460787 - DNA, 75 bp, Homo sapiens
gattacccacttcgagtcctttattgtggaggtaagaatgattgatgttggctgatattggagtgctcattcaca

SEQ ID NO: 460788 - DNA, 74 bp, Homo sapiens
gtcatagagatggtgactggcaaggatcttttgccagaaatgagggcatactggcctgacgtaattcactcgtt

SEQ ID NO: 460789 - DNA, 101 bp, Homo sapiens
gcccagattcctttttgcaccatccgtactaccaggtgaatctggattgggaaagtcgacattaatcaactcattattcctcacagatttgtattctccag

SEQ ID NO: 460790 - DNA, 50 bp, Homo sapiens
ggatgctctactaccagacagagaatgctgtccccggcataggtccatct

SEQ ID NO: 460791 - DNA, 76 bp, Homo sapiens
ggggcttcattgcaaacctggaggtgttcattgaggatgtcagcagggagtttgtggaggagttcatctggccggc

SEQ ID NO: 460792 - DNA, 99 bp, Homo sapiens
tgggactttcttcgttgccatgaggaaagaattctccgagatgagggttactaccagggtggaaaatttcagtttgaaactgaagttcccgatgcgtac

SEQ ID NO: 460793 - DNA, 100 bp, Homo sapiens
attccctgcaggccatcaaactgcagtgcattggcaaaaccgtggaaagccagctttataccaacccagttgaaaacaatcctcgaacaggaaatcttgg

SEQ ID NO: 460794 - DNA, 87 bp, Homo sapiens
gcgggagaagcggcgctccaccggcgtggtcaacatccctgccgcagagttacagaatgtctgaaggggacagtgtgggagaatccg

SEQ ID NO: 460795 - DNA, 83 bp, Homo sapiens
gcccgaggaggcagccaagctcgtagcctgccactccgtgcctctccttcctccactaagagcggaaaatgaacaaatcccag

SEQ ID NO: 460796 - DNA, 97 bp, Homo sapiens
ggccaatacaaaaagacacaatgtgtcccagccacttttcccctggtcttcaatgccagaatggtgtttgaaaagcttcttggacacttaatgattg

SEQ ID NO: 460797 - DNA, 100 bp, Homo sapiens
gattatgctttccagtatgttcaggataatggaggcctggactctgaggaatcctatccatatgaggcaacagaaaacggacgatgtattactaagctgg

SEQ ID NO: 460798 - DNA, 83 bp, Homo sapiens
gtgcatttcacagcactctgggcgaaaattggatgtgaaaatgaagccagaccgagaaagaagcttccggttctgaggtcctg

SEQ ID NO: 460799 - DNA, 83 bp, Homo sapiens
ctttacgataaaacgtgtcaattccttagcattggccgaagagttaagtggatggcattcccaatgacagtagtgatagtgaa

SEQ ID NO: 460800 - DNA, 100 bp, Homo sapiens
ggcgccatcatgctgcttctgccaagcgccgcggacggccggggcaccgccatcacccacgctctgacctctggcttcagggatgacttcttagggggca

SEQ ID NO: 460801 - DNA, 75 bp, Homo sapiens
ctgacgggcctgcgagggttgaagattgtgaagcaatagcctaaggagaaatacgaatgtgctttaaagcgagca

SEQ ID NO: 460802 - DNA, 100 bp, Homo sapiens
acctggccaagatctacgccatgcactggggcacagactccagatgcctgctctgtgcctgtatctgagatcatcgccgttgaggaaacagacgttcacg

SEQ ID NO: 460803 - DNA, 100 bp, Homo sapiens
ggcgtgcactccgcacctcggggacattattgcgcgtggaacggctgcttttggaaggatgaaacaagtgaagatgctaactgtcttgctttgagtggac

SEQ ID NO: 460804 - DNA, 75 bp, Homo sapiens
cccttttggatcttcatgccctgggttctgcccgcacggacccccattctgatcatcggatatcatggagtctgg

SEQ ID NO: 460805 - DNA, 116 bp, Homo sapiens
ggcaggccatgggcaagatatctcagtgttctccgctctcataggtcaggttaaagctgaagctcaacaaagatatagtgatctctgtgggcatttataatctggtccagaaggct

SEQ ID NO: 460806 - DNA, 89 bp, Homo sapiens
accgccctgcgcttcgtgcaccggggcggtccgttgccaaagccagggtgtgggccgaagatatgctcatgtggtgttgaggaaagcag

SEQ ID NO: 460807 - DNA, 56 bp, Homo sapiens
aaagccgtggccccgagggcggatccgagcctcgaagcggaggatccctgtgtccc

SEQ ID NO: 460808 - DNA, 83 bp, Homo sapiens
ggaatgcagacctcctgaaaaccaagccgaggactgcggggtccggtgtccacgcagaccgactgactgctgcagaccaccgc

SEQ ID NO: 460809 - DNA, 100 bp, Homo sapiens
ggacaagccagtgctaccccattcacagacatcaaggtggaggagaagatcaagcagacccaccgtaagtacctgctgcaggagcagctaaagatcatca

SEQ ID NO: 460810 - DNA, 75 bp, Homo sapiens
caacaatttgtgctctttgtaatgactctgctttggattacaatgagggcgtggactccctggtgctagaaagcg

SEQ ID NO: 460811 - DNA, 100 bp, Homo sapiens
ggccacggcgctggtcaccggggtctgcctgggtgctggcatcggccccaccattcagattggggaggagacggtgatcactgtggacactaaggcggca

SEQ ID NO: 460812 - DNA, 100 bp, Homo sapiens
gcacctgactacgaagtgctatccgtgcgagaacagctattccacgagaggatccgcgagtgtattgttgtgaccgagattcccgacgagagagactgag

SEQ ID NO: 460813 - DNA, 50 bp, Homo sapiens
tcaagagcaagactcccaagcagcttatgtctggatttggaatgaacagg

SEQ ID NO: 460814 - DNA, 96 bp, Homo sapiens
cccggtttccctcggcgtgctactgtgcgctcgatccagcaccatggggaagcgggacaatcgggtggtcacacagcggcagtgataaagagcaca

SEQ ID NO: 460815 - DNA, 104 bp, Homo sapiens
ccagcgtctcctctgccaaaacccagggctggaagatgtggcagccggccacggagcgcctgcagacctccaatggaagtccgggcacatggcggagagcctca

SEQ ID NO: 460816 - DNA, 88 bp, Homo sapiens
gcttggccaagtccatccaccacgctcgcgtgctgatccgccagcgccatatcaggatccagtttgtgtgttctctgtgcaaataccg

SEQ ID NO: 460817 - DNA, 50 bp, Homo sapiens
caggaggcggaggcggagtggagttagttgtcatggatgcactggtagaa

SEQ ID NO: 460818 - DNA, 75 bp, Homo sapiens
agctgggtcagtccgccgctcaccccgcggccgcaccttcccgccttctcaggttgatatccctgaaagtactta

SEQ ID NO: 460819 - DNA, 98 bp, Homo sapiens
gaacgacctgatgggcacggccgaggacttcgccgaccagatgtccagctcgccgctgtccaagaaacgtcgcgtgtccgggcctgatccaaagccgg

SEQ ID NO: 460820 - DNA, 75 bp, Homo sapiens
cttccctacagatatcaagaatacttcagtcaccaacgtgccaaatatgagtgatcagcagctggactgtgcctt

SEQ ID NO: 460821 - DNA, 82 bp, Homo sapiens
agcagctgccggagcccgagtggatcggggacggagagaacacgagcccatcagggcaccctcatccagcatctgaaggagc

SEQ ID NO: 460822 - DNA, 100 bp, Homo sapiens
tctttgtggatgaggcccaggactgcacaccaggtccccagtcccaagcggaagttggaagaaccagttctggagttcaggcctccccgaggagcaatca

SEQ ID NO: 460823 - DNA, 50 bp, Homo sapiens
atgagaaggacaacacctacttaggtgcggccgggtgtgtggcaacatta

SEQ ID NO: 460824 - DNA, 97 bp, Homo sapiens
tgggcgatgacatattctgttattatttcaaacttttccagatattgatgatgttaagaagttcaaaccgggttacctggaagctactcttaattgg

SEQ ID NO: 460825 - DNA, 100 bp, Homo sapiens
atggagcaattgctgctgccttgctgatgtttggtgatgcagataacaacgaacttgatgcaagtgataggtttgccaaggtcagacctctcatcatccg

SEQ ID NO: 460826 - DNA, 96 bp, Homo sapiens
tgtggaagctgcagcagaagctgtaaaactgaactgcagaattttgggagtagaagggacaatggagaacattgcagcccaggctctggagcacat

SEQ ID NO: 460827 - DNA, 60 bp, Homo sapiens
atctggaaagttacgactctactgcaaaggagctattcaaccctatgaaaagataaaggc

SEQ ID NO: 460828 - DNA, 50 bp, Homo sapiens
aggacctgagaatctgagaaactgcagggattacatctactacaacgacg

SEQ ID NO: 460829 - DNA, 90 bp, Homo sapiens
gcacgcttgaccctaagcaggaggcagtgcatgacacccccaaccatggttgtgaagatgctagcgacacatcgctgttgggagttcttc

SEQ ID NO: 460830 - DNA, 100 bp, Homo sapiens
tgaaaaagtacggcaagtcctttagaaaattactttcactgtgtcttcagaaagatccttccaaaagtcgggaacatgccctgtgtgccgccgtcatttc

SEQ ID NO: 460831 - DNA, 50 bp, Homo sapiens
gggcagccccttgcccttggacagaaactggcgatggaatatgagaggag

SEQ ID NO: 460832 - DNA, 74 bp, Homo sapiens
ttggagatgtcgtcggatggggaacccctgagccgcatggactcggaggacagtatgtctggatttggaatgaa

SEQ ID NO: 460833 - DNA, 54 bp, Homo sapiens
tcggctcactgcaagctctgcctcccggggtcacaccattctcctgcctcagcc

SEQ ID NO: 460834 - DNA, 100 bp, Homo sapiens
catccaccgagatctgaaagctggcaacgtgctgatgaccctcgagggagacatcaggctggacaaggcgcctctgtcgaagagccttctgctggtcccc

SEQ ID NO: 460835 - DNA, 98 bp, Homo sapiens
cctgaaccccttacttcgaaggatcataagattcacagagccctatgagtttgtctctctggaatggctgcaaaagtggttggatgaatcaacaccta

SEQ ID NO: 460836 - DNA, 83 bp, Homo sapiens
cagaatttatatagagatgtgatgttggagaactacagaaacctcgtctccctgggtaaaatgtcggttccaggaccttacca

SEQ ID NO: 460837 - DNA, 101 bp, Homo sapiens
gaggggagtggaaaggctctcagtgaaaaagatgtgtggagttggctgttacgacatccctgtgtgatcccagaggaggggcagtagctgggcagaaactg

SEQ ID NO: 460838 - DNA, 100 bp, Homo sapiens
gagggattcgtggtgaaggtccggggcttgccctggtcttgctcggccgatgaagtgcagaggtttttttctgcaaaaccggttcccactcctaaaaagg

SEQ ID NO: 460839 - DNA, 51 bp, Homo sapiens
gttcccaaccctggctccaatcaggcagcacatggtctcctacagcgttca

SEQ ID NO: 460840 - DNA, 100 bp, Homo sapiens
ttgatactatcttaacagttgtagaagatcataaagaggaacctctttcaggagctataaaagaaagggaggaatcatgtccacaattgcagctttctat

SEQ ID NO: 460841 - DNA, 100 bp, Homo sapiens
cctaacatagccattgtagaaatgaagtcagaaaaaaaggatcctcctcagcttactgtgcaggattcagctgtggaaatggctatgtcaaaacaacttt

SEQ ID NO: 460842 - DNA, 100 bp, Homo sapiens
aaagaggtcgatcttcctgagatagaagcagattccgggtgtcctcagccagttcctccagaaaatggatttatccggggccatgctatgatagtggaag

SEQ ID NO: 460843 - DNA, 83 bp, Homo sapiens
ggaagatggcggccggcaagagcggcggtagcgcaggggagattacttttctggaaggttttaaaatcaaagatgggaaaatc

SEQ ID NO: 460844 - DNA, 74 bp, Homo sapiens
acagacttcaatgggcagaagctaaagctatattttgcacagggaaacttctctcctccacccacgcctgtctc

SEQ ID NO: 460845 - DNA, 98 bp, Homo sapiens
aggcctcctcttccaccccgagtgggtggtcaaggagtcgggcatcctggtgctgggcgccattgctgaggccctggcctcccacgactacatcctga

SEQ ID NO: 460846 - DNA, 100 bp, Homo sapiens
cagtggcacagtcctctccgattatgtgggctcggggcctcccaagggcacaggtgccgtgagcgatgtggagatgcaggaacactatgatgagtttttt

SEQ ID NO: 460847 - DNA, 98 bp, Homo sapiens
gaatacctttcagtttttctccattgattatgatagcagtgggcttttcacagtgggctttactgtgttgagggtctcattctgtcacccaggctgga

SEQ ID NO: 460848 - DNA, 50 bp, Homo sapiens
ttttgggttacaaaaatccagaccagagcttcttcgagacaccttcactt

SEQ ID NO: 460849 - DNA, 98 bp, Homo sapiens
tgacaccagcacagcaaacccgccgggatcaaagtgtaccagtcggcagcatggggcgccctgcgtccggcagaggaggcgagcatcccgctcaggtg

SEQ ID NO: 460850 - DNA, 50 bp, Homo sapiens
cgatgaagtgcagaggtttttttctgattatttgcatgggtgcaaaagaa

SEQ ID NO: 460851 - DNA, 100 bp, Homo sapiens
cggatgctcatccataaaactgaagatgtgaatactctgtgttcagactgcatcacagtgcttccgatacaagcgacaaaaatcgagttaaaagcagatt

SEQ ID NO: 460852 - DNA, 80 bp, Homo sapiens
cttttttatccgtggagagcgactcagggacaaaatgaacccttaggagaaatcttgagagtggacagcaattgtgaaga

SEQ ID NO: 460853 - DNA, 74 bp, Homo sapiens
gctgccctcggggctcctgcccggccgggatctcctcggggatgtacagttacccagcacgtgtacctcctcct

SEQ ID NO: 460854 - DNA, 90 bp, Homo sapiens
cagaatctcagtccaacaaaagtgtgtatgtacagagaaccatcgctacatgaaattggagaaaaacaagggcgttcaaggaaaagttct

SEQ ID NO: 460855 - DNA, 87 bp, Homo sapiens
gatttgttaaggattccaagtaactcttatttggagaataaaggcagccccgttgatgactgaaaatgacaaagcatccacctaaca

SEQ ID NO: 460856 - DNA, 100 bp, Homo sapiens
ttcatcccatcagcctggattggtgaaactgaatcacaggagatatttccagggattaaagcctgtggtttccacagaagcaccacctatcatatttgcc

SEQ ID NO: 460857 - DNA, 100 bp, Homo sapiens
tgtttgagtacgaagggtgcaaagtgggacgcggcacctacggtcacgtctacaaggcgaggcggaaagatggaatgttggctcaattaagaaacatcag

SEQ ID NO: 460858 - DNA, 137 bp, Homo sapiens
atcagaagtacttgagaatggttcctcagttttggtctgtttggaggaaggctgggacatcactgcacaagtaccaggcacctgacatcgacgtgcagctgagctcggagctgacagactcgctcaggaccctgaag

SEQ ID NO: 460859 - DNA, 121 bp, Homo sapiens
cttttccagcagccataattttaaaagttgctttgaatatggcaagagggttaaaggtcatatatcagttatgtgcatgctctgatacatctggtcctactatgaggtacttgagaaccag

SEQ ID NO: 460860 - DNA, 75 bp, Homo sapiens
ttctcagttttgctggaggccgcaaccaggcccgcgccgccaccatggtcaaaatgcagatcttcgtgaaaaccc

SEQ ID NO: 460861 - DNA, 78 bp, Homo sapiens
ctgtcagcaactaaggaacaaaagtaatgaagatttacacaaactttggatgaggagaagcagcagcaggcccatgac

SEQ ID NO: 460862 - DNA, 122 bp, Homo sapiens
cattgcccgaagacacaaacaacaagggcagcccctatacaaggacagttggctcctaagggagggactaaatgttgattgcactgccaacactaacacctgtaataaatatggagtcagtg

SEQ ID NO: 460863 - DNA, 82 bp, Homo sapiens
cgaacttttgacacggctttggaaacgacgtcatgtgttagttcttccctgtggaacagtagagacctagtctgccttcttt

SEQ ID NO: 460864 - DNA, 75 bp, Homo sapiens
attgaaaggcttcaaagctagcagaattcagaaggagctggcggacatcactttagaccctccacctaattgcag

SEQ ID NO: 460865 - DNA, 75 bp, Homo sapiens
cttggcctgggggtcctcctcttctcaggactccatgttttcgttggccctgaaatgccttatcagtctgtccac

SEQ ID NO: 460866 - DNA, 100 bp, Homo sapiens
atccttccttgtctaccaccaaccaacagatgtcacccatcattcagtcagaaacacagtgctctgtgcctatacagtgtacggataaaacagataaaca

SEQ ID NO: 460867 - DNA, 85 bp, Homo sapiens
gagacaggaggcagtagccaaacacccaggaattacatgaacgacagccttcgcaccgacgtcttcgtgcggttccagccagaga

SEQ ID NO: 460868 - DNA, 75 bp, Homo sapiens
aaggaaaatagagatcctcacaccagaagttaacaaggattccccagctttccgttgcacaaacagtgaagtgac

SEQ ID NO: 460869 - DNA, 100 bp, Homo sapiens
tatcatggaaccagcagcaaagaagtgctatctggaaagagagctgagatctgtatctgtggacctgaatgttgatccctcgcttcagattgacatacct

SEQ ID NO: 460870 - DNA, 98 bp, Homo sapiens
agtttaatgtccaggctcttgtggcggtgggagaccatgcaagcaagcagatggttaaatttgctgccaagtcatttgattgcccgcctcagaacgat

SEQ ID NO: 460871 - DNA, 100 bp, Homo sapiens
tggccttagcacatgcagatgagaagtccttaggctcatcttcaggtggaactaatctggttaagattcctacagaaaaaagaactcggagaaaactaat

SEQ ID NO: 460872 - DNA, 99 bp, Homo sapiens
gaagaaggtcagtgtgcttgcttggagatcaggacgcaaaggacttcactgaggatgtcaactgtgcttttgagttcctgctgaagctcacccccttgt

SEQ ID NO: 460873 - DNA, 100 bp, Homo sapiens
gcatctcagcaacggacactttcgcaacatcaagggagttttccggggccctctcagcaagaacgggaacaaaactctgaccctgagacagggaagacct

SEQ ID NO: 460874 - DNA, 100 bp, Homo sapiens
gaagacaccgctgccacctctccacagccttgttcaagagcactggaaattggctccttcacctaccaaacgcaaagaccgctcagatgagaagtccaag

SEQ ID NO: 460875 - DNA, 100 bp, Homo sapiens
atgacggcactgttagaatctgggactttcttcgttgccatgaggaaagaattctccgaggtggccattaaacgggaaaattttgtggctgaaattcaga

SEQ ID NO: 460876 - DNA, 82 bp, Homo sapiens
ccgaccctggccgccccgagcggagcctggagatgatatcatcaagttgaatcgaaaggaagggaagaagcagaattttcca

SEQ ID NO: 460877 - DNA, 101 bp, Homo sapiens
ctccactgactatgacctatctgacaagagcatcaaccctctggttttggctacgggcctccacctccaccgccagatcagtttgcccctccgggggttcc

SEQ ID NO: 460878 - DNA, 48 bp, Homo sapiens
agtaccaccccctgatcctggttgtggacatcggatacccaaggagac

SEQ ID NO: 460879 - DNA, 83 bp, Homo sapiens
tggcggatggccccaggtgtaagcgcagaaagcaggcgaacccgcggcgcaataacgaaagaagcttccggttctgaggtcct

SEQ ID NO: 460880 - DNA, 90 bp, Homo sapiens
gcagtgcagatccgcaggcgcaaggcttcaggcgacccgtactgggcctactctgactttatattcagagcaccaatcaaattaagcaag

SEQ ID NO: 460881 - DNA, 100 bp, Homo sapiens
actcaagttcgctgacaggtccagttgcagatacaaacttggattttttccagtctgatccttttgttggcagtacgaatgtgaagaatcttttacgacc

SEQ ID NO: 460882 - DNA, 75 bp, Homo sapiens
cttgttttgtgggaagtggccaggcggatggtgagcaatggtcttcatcctccaggtccacctttagcaagacct

SEQ ID NO: 460883 - DNA, 99 bp, Homo sapiens
atcaggatattaatgattataaccggagattctcagggcaacccagatctgaattacatgaacgacagccttcgcaccgacgtcttcgtgcggttccag

SEQ ID NO: 460884 - DNA, 100 bp, Homo sapiens
gtggatctgtgcgaagccggtattcagggacctggatttttgaccaagcattgagatatgcatctgaaatgaagctgttgtcatttctggaaggaaactg

SEQ ID NO: 460885 - DNA, 82 bp, Homo sapiens
gcgcgtcgtggggcgagcggcaggtgtccctggccagtgtccttccacctgtccacaagcatggggaacatcttcgccaacc

SEQ ID NO: 460886 - DNA, 75 bp, Homo sapiens
ccataggacaggctgaggctgagtctcagtgttgccctgttcagtctgaggttttgctgttactgctcagtgtag

SEQ ID NO: 460887 - DNA, 75 bp, Homo sapiens
aagccttctatagacgagctctggctcataaaggactcaagaacatccatgatagcagtcttctgtaaatcgaac

SEQ ID NO: 460888 - DNA, 87 bp, Homo sapiens
aagatgaaatttgctctgctaaaaggctccttcagtgagcaaggcatcaacgagtttctcagaaagaatcttcaagagggagacata

SEQ ID NO: 460889 - DNA, 50 bp, Homo sapiens
ctcctgaatagctgggactacagggacccagcctccaacactgccccgct

SEQ ID NO: 460890 - DNA, 95 bp, Homo sapiens
ccaggaccggccgaacgcagagtatggtttgaagtggtgaacatggatttttctcggcttcacatgtacagtcctccccagtgtgtgccggagaa

SEQ ID NO: 460891 - DNA, 100 bp, Homo sapiens
aagaaaggtattgaagaactggaaaaaggaatagctgttatagttacaggacaaggtttggtaccatgtatgtagcagccgtggaaaagggtgttataac

SEQ ID NO: 460892 - DNA, 100 bp, Homo sapiens
tggtcccataccttggcaccttcctgaaggaccttgtgatgctggatgcagcctccaaggatgagttggaggatttcaaatatgcgtgcattagagaatg

SEQ ID NO: 460893 - DNA, 83 bp, Homo sapiens
tccacccaccgccgccgcctcccagggagaagtggtgccacatgacccaggaggagcgcgacgacagcctccggttcaacgag

SEQ ID NO: 460894 - DNA, 75 bp, Homo sapiens
ctgtccccgctggcgggcttccctgtcgccgttcgctgcgctgccggatctgaacataaagtctggtctcctctg

SEQ ID NO: 460895 - DNA, 74 bp, Homo sapiens
gcccttcctagttggcattgaaggttcactcaaaggcaggtcttggtcttgatgccaagtttgggaaaggagct

SEQ ID NO: 460896 - DNA, 100 bp, Homo sapiens
acatcccagccggtgactgcagtgaggttttgatgatgatggttcagaatttcatgaacatatatttctggagaaacacctggagagctttccaaaacaa

SEQ ID NO: 460897 - DNA, 75 bp, Homo sapiens
attgggcaaaaacttgtgagggcgaaggtcgtattgaatggtgttgtagagatgtggtatggtgtattcctgtgg

SEQ ID NO: 460898 - DNA, 74 bp, Homo sapiens
ttttgtgaaaagcaactttgatgcagcacgcaggcaacaagaatgggtgaatcagcaaagggaagatattgaaa

SEQ ID NO: 460899 - DNA, 111 bp, Homo sapiens
cgggccccgggacctgggctgggaacccgcggtggagcgggacacgaacgtgggggggccctcagcctcttggccttgaacgggctgttcatcttgattcacaaacacaac

SEQ ID NO: 460900 - DNA, 75 bp, Homo sapiens
agtttccagcttcaggtgtgaaccagacccccgtggtagacgaccctgatgctcccataagacagaaaatgcccc

SEQ ID NO: 460901 - DNA, 82 bp, Homo sapiens
attcaggagatgtacgccgcgatcaaggctgaccctgatggtgacgggagttgaccacatttggccatttcccagaagggcc

SEQ ID NO: 460902 - DNA, 101 bp, Homo sapiens
attccctgttgttgggctcagacaaacaaaatgattttatgcaatcgatacttcacactatggagagggaagcagatgggaagacttcctgtcccaaagga

SEQ ID NO: 460903 - DNA, 82 bp, Homo sapiens
ccatgaaagtggtgaagaaagagctggtgcatgatgacgagatgaaggatttgggggcagagcacttggcaggtcatgaagg

SEQ ID NO: 460904 - DNA, 51 bp, Homo sapiens
accttcaatccgctctactggaatgtgataacgaaggaggcccaacttcat

SEQ ID NO: 460905 - DNA, 75 bp, Homo sapiens
ctccgcgccgcggccgttagtcatgtcggccattgagacccagagcagcagttctgaagagatagtgcccagccc

SEQ ID NO: 460906 - DNA, 83 bp, Homo sapiens
agaagatcatcattaaggacggaggcacgaaaacctcggatcaattctcagctggtggcacaacaagtggcacaacagtatgc

SEQ ID NO: 460907 - DNA, 51 bp, Homo sapiens
cctggctgtgctcatatacacctgggaagacaccctctctggacccccatc

SEQ ID NO: 460908 - DNA, 98 bp, Homo sapiens
agcagcggtaccgttacgcggagctctcggaggaggacctgaagcagctggaatggcggcgctagatagtaaggcatcagggaagatgggaatgcgag

SEQ ID NO: 460909 - DNA, 82 bp, Homo sapiens
aaccaacggccaccccctcagcactcctcgccgagcacgagtgtgccaggtgattgggatgtacgactacaccgcgcagaat

SEQ ID NO: 460910 - DNA, 98 bp, Homo sapiens
atttgatagaggaaatgtatgatgaaggaataactcaagtcacctgtactggaaatcagtttgctgaaattaatcaacgattcttgaagttgaagaaa

SEQ ID NO: 460911 - DNA, 80 bp, Homo sapiens
cgacgagctgaccctgggagacatcgacgggtttccaggcctgaggtgcccgccctggccccaggagaatgaaccagccg

SEQ ID NO: 460912 - DNA, 100 bp, Homo sapiens
gtgggcagtgattcacattgtggaccaacgggtgcgcttctacccagtggccttcttttgctgctggggcccagctattggaatcagatgcaaagatggt

SEQ ID NO: 460913 - DNA, 123 bp, Homo sapiens
cgcccggcccgcggcccggcccctgcggcccgcgcggagcggacgcgcgtggcgctgcccggtgctggagaatctggtaaaagcaccattgtgaagcagatgaggatcctgcatgttaatggg

SEQ ID NO: 460914 - DNA, 97 bp, Homo sapiens
ctgctgaacggggctgggcctggggctgcgcgccaggatcaacttgcagcagacatgtacaactttatggccaaagaaggggagtatggcaaattct

SEQ ID NO: 460915 - DNA, 100 bp, Homo sapiens
ggagataaacccccagattttcttggaaaagttgccattcccttgctgtccgtgagaacaacagctccagaaaaatacagagtcaagccaagcaatagca

SEQ ID NO: 460916 - DNA, 83 bp, Homo sapiens
gagcgacaagccgctggcagccgcggatctcaccgccgctcaggggatgtttcagcagcccctgagaaggaagaggaggaagc

SEQ ID NO: 460917 - DNA, 75 bp, Homo sapiens
caccatgggggctgtgctgggtgtcttctccctcgccagctgggagtttccagatgtcttggaatgcactgtatc

SEQ ID NO: 460918 - DNA, 100 bp, Homo sapiens
caataaagcttctcctttgggttgtactcatagattgtgtaggcgttggtcttctgatagcaactttaatgtggagaatttgtgaagtaattaatgaagc

SEQ ID NO: 460919 - DNA, 99 bp, Homo sapiens
gctgtagagaggaccccggtacatctgaaagccgggaaatggcatgagccatgagcccaagtccccttcgctagggatgctttccaccgcgaccaggac

SEQ ID NO: 460920 - DNA, 100 bp, Homo sapiens
cacgacggcgccatcaccgagcgcttgatgtgcgcggagagcaatcgccgggacagctgcaagacctgcgaccgcatcaagcagtccgccagcggaacca

SEQ ID NO: 460921 - DNA, 95 bp, Homo sapiens
acgagaggctcaccgcagtcgtgcaggatctgaaggaggaattgttacgatttcctaaacttcatgatgccatagttgaagtggtgacttgtctt

SEQ ID NO: 460922 - DNA, 50 bp, Homo sapiens
cccggtgctgacggacccccggtgaccaagaatatggcccaggtgaccaa

SEQ ID NO: 460923 - DNA, 74 bp, Homo sapiens
ctgtaatacttctggaatccagacagaatgtgcacttgccggcggtcccaacccagcaggagaagtggacatga

SEQ ID NO: 460924 - DNA, 75 bp, Homo sapiens
catgcccagtccacctcgtgctcctgcagaacctgctgacctgtggagaatgcggattgtggatgatgatgtgag

SEQ ID NO: 460925 - DNA, 102 bp, Homo sapiens
gagggcttcaagcccatcttggacttcagaacacctcacaactttgtgaaatgagccgtcagactgctacagcattacctaccggtacctcgaagtgtccac

SEQ ID NO: 460926 - DNA, 100 bp, Homo sapiens
ttttctgggctatttaaagcaacagaacctcgctgtcagtgagaggacccacaaattccttgaaatatgtccctttagtaacaggcttagcctctgcccg

SEQ ID NO: 460927 - DNA, 100 bp, Homo sapiens
gtttgaaggagaagagagcaaggtattctttaggtgatgctagaaggcctcttcatgaaacagcagttttggtagaagatgtggtacacactcagttaat

SEQ ID NO: 460928 - DNA, 100 bp, Homo sapiens
gccgaagcccaaaaagctgaaggtggaggcgccgcaagcgctgagcctgccacagtgactcaggtcactcaaggaactatccgaccagctgccaacttcg

SEQ ID NO: 460929 - DNA, 118 bp, Homo sapiens
ggaaaccaggcatctctgggtgggcaacttacccgagaacgtgcgggaagagaagatcatcgagcatttcaaacgctgttgagtggaatgtcatggccagctcctcggacagtgaaga

SEQ ID NO: 460930 - DNA, 51 bp, Homo sapiens
tgagacccggacagtggcagtgaaacaggtcacagagatgcggcggaccct

SEQ ID NO: 460931 - DNA, 75 bp, Homo sapiens
gtccgcgcagcccagcgcagccataatccacattcatctcaatggaaggatcctgccttaagtcaacttatttgt

SEQ ID NO: 460932 - DNA, 52 bp, Homo sapiens
agcaaattcgtcagatcaaagaacaagttgtaatcgtaaaatgaaaccacct

SEQ ID NO: 460933 - DNA, 82 bp, Homo sapiens
taggagagacgagcagccttcagggagcgtggagacagattaatcctaccatatgaaagatttattaaaggagaagaagata

SEQ ID NO: 460934 - DNA, 90 bp, Homo sapiens
ggccgatgaagtgcagaggtttttttctggcctcaggcccaggcccaaggccaagtgagagagcccaggccacaggacatgctgccattc

SEQ ID NO: 460935 - DNA, 98 bp, Homo sapiens
gtcgccaactccatggctttccagagggaaggctcctgcatggctgaggatgatgctgtggacatcgagcatgagaacaacaaccgctttgaggagta

SEQ ID NO: 460936 - DNA, 82 bp, Homo sapiens
ggatcgttacgaaattgactccttgataggcaaaggttcctttggacagaaactaatctggattcactccctctggttgata

SEQ ID NO: 460937 - DNA, 73 bp, Homo sapiens
gacgcctttggcggtaaattcgggtgtggccgacgacgatgccctcgctgaggagcgcatgcggagaggccag

SEQ ID NO: 460938 - DNA, 101 bp, Homo sapiens
atgaaaacaacatccaacttcagtgggaagatcatagaagaagatgctgctcttgtagaaataggacctcgttttgtcttaaatctcataaagattttcca

SEQ ID NO: 460939 - DNA, 100 bp, Homo sapiens
gattgctttgcatgactgcaatggagatgtcaacagagctatcaatgttcttctggaaggaaacccagacacggaagcacaagcctatgcagacgacaac

SEQ ID NO: 460940 - DNA, 82 bp, Homo sapiens
gggagcttccgggagggcggctcgcaggcagcaatgaatgtggatcacgaggttaacctcttagtggaggaaattcatcgtt

SEQ ID NO: 460941 - DNA, 75 bp, Homo sapiens
cgcgcgcgcctgtagctcgcgggcctcgcagaacttgaaggtgcacattcttgatactgaaagttttgaaactac

SEQ ID NO: 460942 - DNA, 75 bp, Homo sapiens
aggaggagtcctccacctcgtcgcaggcattgatctggagaacattgtgtactacaaggacgacacccactactt

SEQ ID NO: 460943 - DNA, 76 bp, Homo sapiens
cggggcccgcgctgcagccggagacccggagaaaggattgcagcaggagagaagattcctttgagccaggaagaaa

SEQ ID NO: 460944 - DNA, 83 bp, Homo sapiens
ctcggccgaacccctccgcagcaggaaatccacaggaaagtgatgtcacaaaacttcaccaactgccacaccaagattcgcca

SEQ ID NO: 460945 - DNA, 75 bp, Homo sapiens
gacccccaggaggtgaccctgcaggtgtgttctactccctcttctgggaatgaagcctccccagcaaagcctata

SEQ ID NO: 460946 - DNA, 82 bp, Homo sapiens
ccagtatgggaaagatctaccttctggaagctactactacgtggtgcttggaaagccttacgaaggatgaatccaaaaggcc

SEQ ID NO: 460947 - DNA, 89 bp, Homo sapiens
ctggcgtgcactccgcacctcggggacattattgcgcgtggaacggctgcttttggaaggtagaacgtcatgacatgaataccttaagc

SEQ ID NO: 460948 - DNA, 100 bp, Homo sapiens
atggcgtttggcaagagtcaccgggatccctacgcgacctccgtgggccacctcatagatcttatgccttcattcatccggcatggtccaacaattccaa

SEQ ID NO: 460949 - DNA, 82 bp, Homo sapiens
cgggaagcgtcgggattaggtgaaaacctgcgtcatgcgggcctgggaccgcagcaagcccctgctcttctgcccggccatg

SEQ ID NO: 460950 - DNA, 95 bp, Homo sapiens
agccagagaattaccttcagctgtatcacgagacaagatataatacattgccaagcagaagaactctgaaaaattcaagattagtgagtaagaaa

SEQ ID NO: 460951 - DNA, 100 bp, Homo sapiens
ctcggagctaatccacaatctccgcaggaagctgcccgggagtgtcgcaggaagaagaaagaatatgtcaaatgtcttgaaaatcgtgtggctgtgcttg

SEQ ID NO: 460952 - DNA, 97 bp, Homo sapiens
ttccaaaccagacccctgtgtcatcctcaagatgcagtctcatgggcagtggtttgaggttcgatacaagaggctgttttcctagcgtggcttgctg

SEQ ID NO: 460953 - DNA, 75 bp, Homo sapiens
caagatttgatgctcttgtgctcagtgacatcattcaggtatcgaaggatgatcgcagtgatgtggagagcagct

SEQ ID NO: 460954 - DNA, 100 bp, Homo sapiens
cgagaggaggccgtccagcagatggcggatgccctgcagtacctgcagaaggtctctggagacatcttcagcaggttaaccccaaagattggctttcctt

SEQ ID NO: 460955 - DNA, 83 bp, Homo sapiens
agctgagaagctccagctgctgaaccaccggcctgtgactgctgtggagatccagctgatatctgcacctcaggagagactgt

SEQ ID NO: 460956 - DNA, 100 bp, Homo sapiens
cgaggcccggctggcgcacctgggcgtgcagatttctcgaatgctggcagccaaaaccgttttggctatccgttatgatgcttttggtgaggattcaagt

SEQ ID NO: 460957 - DNA, 100 bp, Homo sapiens
gtggctatgagggagagctggctgaatgagaaccagcgtctggtctcccagcaaactgactcgggaaagtggtaccgacttccccatccctgctgtccca

SEQ ID NO: 460958 - DNA, 75 bp, Homo sapiens
ccggccccagccttggcttcagcagctaccaaggaaagctccgtggatggccgcgtgagacgctatgacctaagg

SEQ ID NO: 460959 - DNA, 90 bp, Homo sapiens
tgcactctggacggctgcttggaggtcccatgggaacaggagggagcagtttgtttcgacgccggaccgcgtaagagacgatgatgttgg

SEQ ID NO: 460960 - DNA, 110 bp, Homo sapiens
gatcatattccttcatctaccatggctcagccgggaactctgaacctcaataacgagtggccacagatgtctttaattccaaaaacctggccgttcaggcacaaaagaag

SEQ ID NO: 460961 - DNA, 82 bp, Homo sapiens
ctggggccagggaaccctggtcaccgtctcctcagaaacgtatgtcaaacgaggatacagtgtctggaactattggttctaa

SEQ ID NO: 460962 - DNA, 83 bp, Homo sapiens
catgggttatatttggaaccttcgggcaaacaggattccacagtgtcctctggaaaatgcctcttctgaaacagtctccctgg

SEQ ID NO: 460963 - DNA, 100 bp, Homo sapiens
ccaaacccaccatcttctggtttcattggtgctggagaatctggtaaaagcaccattgtgaagcagatgaggatcctgcatgttaatgggtttaatggag

SEQ ID NO: 460964 - DNA, 75 bp, Homo sapiens
ctcgagttggaagaggcgagtccggtctcaaaatggaggtttgtcttgtgaccgcgggcggccgctgcttctttc

SEQ ID NO: 460965 - DNA, 83 bp, Homo sapiens
cgcggattcgccgaggcaccgaggcactcagaggagatgacagtcatgtccctttccagggacctcaaggacgactttcacag

SEQ ID NO: 460966 - DNA, 98 bp, Homo sapiens
tcagtgcgaagaagctgcagccgcacctggccaaggcaaaatgcattgatcactacaccaaacaatgtgtggaaaatgcagatttgcctgaaggagaa

SEQ ID NO: 460967 - DNA, 90 bp, Homo sapiens
gattgagtgggccccaaacggctgtgtgctggcagtgtgggacacctgcttggagggcactgttcatggagcccacactgctgatgctgg

SEQ ID NO: 460968 - DNA, 75 bp, Homo sapiens
cgcaccgcggcttaaatgatgtattttgtgatcgcagcgatgaaagggtatttgaagtataccatacaactgttt

SEQ ID NO: 460969 - DNA, 74 bp, Homo sapiens
ttgaagcactccaaggagagcttaaaattgctgttttacagaaggtgctgctggtgagtagcagccggtaccca

SEQ ID NO: 460970 - DNA, 100 bp, Homo sapiens
tactctgtattcagatcttcatgtgtctcttctaagctgaataaagctgttttggaactgtcaggtacctcaaagcgaactctaatgaatcattgattga

SEQ ID NO: 460971 - DNA, 83 bp, Homo sapiens
cgtggagatatggcgcaactgcggcgcgatgaaacaggcgcctatttaatcgacagagaccccacctactttgggcctgtgct

SEQ ID NO: 460972 - DNA, 75 bp, Homo sapiens
ctgaagatagtgcctttcagccctaccaggctatgaaaatgattctgtagaagacctgaaggaggtgacttcaat

SEQ ID NO: 460973 - DNA, 100 bp, Homo sapiens
gggaattgccaaggagaagagtaccaaggctgctagtgaacagcgacgtggcgccaagcccatctttgtgtgcttgcatccaactgtgatgagcctatgt

SEQ ID NO: 460974 - DNA, 82 bp, Homo sapiens
aggacctggagtgtactggaagaaatggtgcagtccagggggatatgagactttctactcggaatatcctgagtgttgcgtg

SEQ ID NO: 460975 - DNA, 75 bp, Homo sapiens
ccccggtacatctgaaagccgggaaatggtttccacttgagcggcacagtgacagaacctgcaatacaatcggag

SEQ ID NO: 460976 - DNA, 96 bp, Homo sapiens
aggccgtccagcagatggcggatgccctgcagtacctgcagaaggtctctggagacatcttcagcagtttgacaagtatgcgcccaagctggacag

SEQ ID NO: 460977 - DNA, 100 bp, Homo sapiens
cccggcctgcgctcccatccacacgctcggttcctgcgtgaagaccagctgggagcccactgcctgctgccacctccaactccggccccctcaccatgca

SEQ ID NO: 460978 - DNA, 97 bp, Homo sapiens
gaggaaggaacgaggcaaggagctaaagcagcgtgcgttcagccctggggtttacccaaggtccagcctagcccctaggcaccatgtcggacagtga

SEQ ID NO: 460979 - DNA, 74 bp, Homo sapiens
cctacacgccgccgcttgtgctgcagccatggctggtcgtctgatgataaggaaattagttgcagagaaattga

SEQ ID NO: 460980 - DNA, 104 bp, Homo sapiens
cagagatgtgatgttggagaactatagcaatctggttttcttggatggatcctgtgcaaaaagcggttattaaccatacatttggagtatccattcccccaaag

SEQ ID NO: 460981 - DNA, 124 bp, Homo sapiens
ggggctcagccaggcctgcgcgggcccgaggccggaggaacccggactccggcgtagcggttcagccgtctgtatatctccccagatacctgaaactgaccacctgagtacgttttcccattgc

SEQ ID NO: 460982 - DNA, 100 bp, Homo sapiens
ccaagtatccgccagtcaataggaagtacgagtccaacagaatcctggatttgagtctgtcctttgaaagcatctctgctagagttcccacttccaaacc

SEQ ID NO: 460983 - DNA, 100 bp, Homo sapiens
gacctgcatgtgtgtgcgcgcgaaggagcggaagaatggcagtgctcaaactcaccgaccagacaagagtgagaatggtgaggcatatcagagaaagaag

SEQ ID NO: 460984 - DNA, 75 bp, Homo sapiens
ctaccgtggagagatcataatttggggttcaagattccaggcaggagatggacagcctgcagcgccagatggagg

SEQ ID NO: 460985 - DNA, 82 bp, Homo sapiens
gctcccggaggcgtccgcagctgctggctgctcatttgccggtgaccggagggtttggaaatcccttgtctccaggttgctg

SEQ ID NO: 460986 - DNA, 75 bp, Homo sapiens
tgctgtccacgtatcagacagacttcatcctggctgaccccgcactacatctacccaccagccatcgtgcagccc

SEQ ID NO: 460987 - DNA, 87 bp, Homo sapiens
tttatcaaaatcccaggctgtcggaagcaaggttgatttataccaattacaagtaaatacacttaggagatacaaaagacacttcaa

SEQ ID NO: 460988 - DNA, 90 bp, Homo sapiens
accttaaggcccatcttcgcactcacacaggtgccactgattaatgaacttgaatcagcaatacatcagctgtacaaacagcgagcttcc

SEQ ID NO: 460989 - DNA, 98 bp, Homo sapiens
caggtcctcaccggagctgtcaaccctggagacaactgctactccgtgggcagcgtcggggatgtccccttcacggaaaaacagaagcctatttggaa

SEQ ID NO: 460990 - DNA, 100 bp, Homo sapiens
actcgggacgctgcacctcccgcgccgcacggtggacgaggtcgcgtggggcaggcagtggcgctgcgggccaaggccttcggcttcaacgtgctcttct

SEQ ID NO: 460991 - DNA, 89 bp, Homo sapiens
ccggaggagacatcggcctctgcaggcttgccgaagaagggaggtggtacagaagttggtcctgccctttgggcgactgaactacctgc

SEQ ID NO: 460992 - DNA, 75 bp, Homo sapiens
ttctgaagaatctggaaagtaaaaagcttatcaaagctgttaagtctgtagcacttcgagcaaatgctctcatca

SEQ ID NO: 460993 - DNA, 95 bp, Homo sapiens
aagctctgagtccacacttggcccccaggcgctggagctggtgagtaatagctctggagagacccttggagctgacagtgacttgagcagcaatg

SEQ ID NO: 460994 - DNA, 101 bp, Homo sapiens
cgcccacccagaggcccagggtacgactcagtgccagagaaccgagcatccagtcatctcctataaaggtgcctcactcctgatgcggaagctcgtccaga

SEQ ID NO: 460995 - DNA, 75 bp, Homo sapiens
caccagggacccccgccagccagctgctgcaggagttgcatgctaaggagccacaaaccactgtggtacacaacg

SEQ ID NO: 460996 - DNA, 98 bp, Homo sapiens
ttttggatcggcatctagtctttccgcttcttgaatttctctctgtaaaggagacatttctcttgggaagttgtgcatctgacaggaatatagtactg

SEQ ID NO: 460997 - DNA, 100 bp, Homo sapiens
tcttgattttatacatcatttcaatgaaggctatggccactcggacgcagatgttctgcaccagtcattacttgaagccaacattgctactgaggtttgc

SEQ ID NO: 460998 - DNA, 75 bp, Homo sapiens
tacccttcaaaaatttaaacaagaatccactgttgctactgaaaggtgttccatcgagtgtgggagcgggacgca

SEQ ID NO: 460999 - DNA, 100 bp, Homo sapiens
ctctgattagagccactgttggtctatgtgctctctctatcaaccattccaattcttacctggcctatcctggaagcctgacttcaggggagattgtgct

SEQ ID NO: 461000 - DNA, 98 bp, Homo sapiens
aaaagagcaaagataagaagagaaaaagagaagatgaagaaacccagcttgatatgttggtaatctgtaagtcagatgctccaacaggggatgttctt

SEQ ID NO: 461001 - DNA, 50 bp, Homo sapiens
ctccgggcaccaggagcatatcaaggatatctgcattacctccacctcct

SEQ ID NO: 461002 - DNA, 97 bp, Homo sapiens
ctccgtggggctggttttggtccacagcataacagctatgaagtcttacactccatatttcattctcctgtggagtgctgttgggatagcgaaggct

SEQ ID NO: 461003 - DNA, 100 bp, Homo sapiens
gaccagaggctgctgacactgtcgctggacaaggacgatcaacgcactttcagggatgtggtcagccccatggctgggggttatggagtgatgggtgacg

SEQ ID NO: 461004 - DNA, 75 bp, Homo sapiens
ttttgccacctttccctttatttccggagcgtgagtgcatctccatccacgttggccaggctggtgtccagattg

SEQ ID NO: 461005 - DNA, 76 bp, Homo sapiens
ccgacgccgtcgcggtggactgcaagtttgacggtgagaacatgtatatgagcatgacagagccgagccaggacta

SEQ ID NO: 461006 - DNA, 75 bp, Homo sapiens
cttcgcggtggtcaagcgggccacgcacctcgtcaccaaggccaagattggcggcagtaagcacacaatgaatga

SEQ ID NO: 461007 - DNA, 75 bp, Homo sapiens
agtgagatgcgttatgggatcgagatcctgccgttgcctgtcatgggagggcagatgggcactgtgccccgactg

SEQ ID NO: 461008 - DNA, 75 bp, Homo sapiens
agaagttggcaggagcatgggcttcggaggcctatagcccgcaggtgtggtcactcacctgtctaccactcccgt

SEQ ID NO: 461009 - DNA, 101 bp, Homo sapiens
caccgccgcccgccgggaggaccgagcctaagagggcagccgcctgaaggaacgcgacggcggcgcccgcagactacgtctactttgagaactcctccagc

SEQ ID NO: 461010 - DNA, 100 bp, Homo sapiens
cgacctcatccacgccatgccagggccggtgcataaacttctcccgagttccatctcagtaaaagggaagcaggaagaccaagaaggtacgaagatggca

SEQ ID NO: 461011 - DNA, 99 bp, Homo sapiens
gaaaggaacaggccgaactgctgtatgggctctgtatctcagcgtttgagtcagccaggagtagcaataggtttggcttggactcccttaggtggagaa

SEQ ID NO: 461012 - DNA, 90 bp, Homo sapiens
gggtgctgctataggctcagccctcagtggatttggttcatcagatggaagtggagaaagaggcgaaaaggatgcaagcaaaatcacaac

SEQ ID NO: 461013 - DNA, 100 bp, Homo sapiens
acaaagaggaggagatacaagatattattcttagatccggattcaccattgttcaggaaaggcagactacaagttactgagcacctccctgagaaaattg

SEQ ID NO: 461014 - DNA, 96 bp, Homo sapiens
agcatgtgggacctggttctctccatcgccttgtctgtggggtgcactggtcccgcagcccccggaagccaatagactccctcagggactctcggt

SEQ ID NO: 461015 - DNA, 75 bp, Homo sapiens
tcatctgttccagggaggtgggattgacctcctgctcttcatggatgaagcagacgccttccttcggaagcgagc

SEQ ID NO: 461016 - DNA, 50 bp, Homo sapiens
accccaacagcaggaatagctcccggtgatcccattaagatactaatgcc

SEQ ID NO: 461017 - DNA, 75 bp, Homo sapiens
agcgcgtttggctgtgacctgacggagtatctggaaagctcgggacaggatgatgtgagcgacatcaggcgcttc

SEQ ID NO: 461018 - DNA, 75 bp, Homo sapiens
gccgtgtctaaggagctggttggagagtttttgcaatttgttcaacttgatgactcgggggactatcctctgaca

SEQ ID NO: 461019 - DNA, 98 bp, Homo sapiens
tagctacctgaataaactaccagtgaaaagcgaatatccctctgagctgtatgcggccggggagaaccgcctgggaacagacgagtccaagttcaatg

SEQ ID NO: 461020 - DNA, 100 bp, Homo sapiens
aggccggctgcagccccaagacagagcgctactcctggcagtgcgtcaatcagagcgtcctgtgcgcaaccttggccatggaccagccggctggcctgca

SEQ ID NO: 461021 - DNA, 50 bp, Homo sapiens
ccatggacttccatggggaagtcacccacggatgataccatcggggacct

SEQ ID NO: 461022 - DNA, 75 bp, Homo sapiens
tggactcttttcttgacttagctaccaggtttagcttcttctcccgagataagaagcgcctggccaacacacaga

SEQ ID NO: 461023 - DNA, 82 bp, Homo sapiens
agagaagggagctctatagtcggagtggagaactgcaaggtttgcctgcaatgagatttcattctctacatttaaaggacat

SEQ ID NO: 461024 - DNA, 100 bp, Homo sapiens
ctcaggaagctcagcaagactggagtccctgatggaattatgcagtttattaaggacctgaaggagaagaaggagaaggtggaggagaaggcaagccgga

SEQ ID NO: 461025 - DNA, 50 bp, Homo sapiens
tttctacctatggctttcgaggtgagttaacaagcacaagccctggctgg

SEQ ID NO: 461026 - DNA, 100 bp, Homo sapiens
gcctgggccgccgctgctacctgcagcgccgtgtggcacgacacaaaaatcaggttctttcagagcacggcttcggccccatcactaccgacatccggga

SEQ ID NO: 461027 - DNA, 96 bp, Homo sapiens
gccttccgagtagctgggactacagacactcttgcactcctgtaatgagcctggcactgtgatgaaacacttttcccgtgtcgtttgagtgcatct

SEQ ID NO: 461028 - DNA, 89 bp, Homo sapiens
gcagtgtcttcagcgcattgctacctaccggctagccggtggagctcacgtttattcaacactggttatattctgggcactaaatgaag

SEQ ID NO: 461029 - DNA, 90 bp, Homo sapiens
ggccacgaaagctcagagaaagcagcagatggcagaggagtcgatagcagcagttggtgacgagatggcactcagaaacggcgttgacgt

SEQ ID NO: 461030 - DNA, 82 bp, Homo sapiens
cgccagagagagaagatcggggggctgaaatccatcttcatcctaccgctccgccctggtggggtcagatgctgtggactct

SEQ ID NO: 461031 - DNA, 100 bp, Homo sapiens
gaggacctggatgatgatgtcatcctgacagaagtatgccattgcattggccttaagggaaaagcagcgtgtaatatttaccagcccaattaaggctctg

SEQ ID NO: 461032 - DNA, 82 bp, Homo sapiens
acgtcttcaccttcggcagccggctgtacgcacacaccatcgcaggtgttgacttcaaaatcaaaactgtagagctaagagg

SEQ ID NO: 461033 - DNA, 82 bp, Homo sapiens
aagaagtgcttcagcgggccaggaagcgcatccaggaggccctatgatgccaagtagagaaatccagcaataaaaggcagat

SEQ ID NO: 461034 - DNA, 75 bp, Homo sapiens
cagctgtttgcacaagcaaaggcctgcaaggtgctggtggagaaatgctgtcttgtcgacggtctcactgatgcc

SEQ ID NO: 461035 - DNA, 92 bp, Homo sapiens
gtggccttagctgtgctcgcgctactctctctttctggcctggaggctatccagcaattaaatgtgagggagtctgacgtaagagtttgtga

SEQ ID NO: 461036 - DNA, 98 bp, Homo sapiens
cgaatctgcccacccctcctgtaacccagcctgtttcacttcttggggtcggcaccaggaattattatagaaagatcggctacagattacaaggcccg

SEQ ID NO: 461037 - DNA, 78 bp, Homo sapiens
gcaaccctatcatcgtctcctgtggctgggacaagctggtcaagcttctcagcagtggaagccgatacctcattcgat

SEQ ID NO: 461038 - DNA, 73 bp, Homo sapiens
gaccagttcgcagtagcagtggaatgggaggaagaggatggagatgaagatgaggaagctgagtcagctacgg

SEQ ID NO: 461039 - DNA, 89 bp, Homo sapiens
agctaagcaattaactcagttagaaagaacacgtcagcgaaacccatctgatcgacatgttattggagcgctgacccagctgatccagc

SEQ ID NO: 461040 - DNA, 96 bp, Homo sapiens
tgatggcagcagttactcgcacaaccccagttaagctgcgctccgggagatgtcctaaacgatgctatatttgatgaagatcatgatgagatggtg

SEQ ID NO: 461041 - DNA, 101 bp, Homo sapiens
ggaacatcatcaaaaatgaagctctctttgacagtggtctccacccagctgttaaagctgcaataggatctgtggctttggacacagcaaggtcacatgga

SEQ ID NO: 461042 - DNA, 80 bp, Homo sapiens
aacctttctaattccatgacctcacttgcaacttcccagcattccccagcacttgctctgaaatttggggactgagtaca

SEQ ID NO: 461043 - DNA, 75 bp, Homo sapiens
tggacctaggggaggattacccctctggcaagaagcgtgcggggaccgatgggtgaaaggtgtagcagtcactcg

SEQ ID NO: 461044 - DNA, 75 bp, Homo sapiens
gttgaaagtaaaaggacaatttttctcctccataggattacaaggctttggatgaagagtatttaaaagtagatg

SEQ ID NO: 461045 - DNA, 96 bp, Homo sapiens
tcttctaacatccagaagatcacacagtgttattcacaatgacatcctttcaagaagtcccattgcagacttccaactttgcccatgtcatctttc

SEQ ID NO: 461046 - DNA, 82 bp, Homo sapiens
tttaaacttaaggaagattgctttggaaggagcaaatgtaatttataaacgtgatgttggaattatgagcctcaaacaattt

SEQ ID NO: 461047 - DNA, 83 bp, Homo sapiens
ccgcgacgacgagtacgactacctctttaaaggcttcaacggaccacaccaaaatgccatctcaaatggaacacgccatggaa

SEQ ID NO: 461048 - DNA, 100 bp, Homo sapiens
gcagacccatggccgagcgcggggaactcgacttgaccggcgccaaacagaacacaggagtgtggctagtcaaggaacttgcatcagcactgaagtcagc

SEQ ID NO: 461049 - DNA, 75 bp, Homo sapiens
agccgatccagcctgcggagcctgtggggcaggtaggagcaacggtgggaatgccctctgaggaatgcagtgatg

SEQ ID NO: 461050 - DNA, 100 bp, Homo sapiens
tcgtggctgcgtcaccgccgcccccccagacaagatggacaccgcggaggaagagatcctgaaggagctagacgagtgctacgagcgcttcagtcgcgag

SEQ ID NO: 461051 - DNA, 97 bp, Homo sapiens
cagccccacaacatggcctcctccgcctcctcctctcccgcgggcaccgaggactccgctcctgcccaggccgtcatgattggggacgatatcgtgg

SEQ ID NO: 461052 - DNA, 50 bp, Homo sapiens
cgggactctgaggaaaagctcgcaccagactacgcgtttgttcacatgga

SEQ ID NO: 461053 - DNA, 82 bp, Homo sapiens
gaccttcgagacaaggctgtcagcccctagagaggaggttcagatgagcccctgctgacttgagagagacagagagaccacg

SEQ ID NO: 461054 - DNA, 100 bp, Homo sapiens
gcagacctcgaaatgatagacgctacacagtctcaccagtggtattcttggggcccacctaatatgcagtgtagattatgtgcaatttgttggctttatt

SEQ ID NO: 461055 - DNA, 83 bp, Homo sapiens
cgcgctgctgctgttcttcgtaggcggagtcgccgagtcgcgctggccgcgcgccgaacccgagtccggcggcaccgacgacg

SEQ ID NO: 461056 - DNA, 75 bp, Homo sapiens
cggacatggccgccaacatgtacagggtcggagatggagtcatcagaacccactgtgaggaagtgacttctcctt

SEQ ID NO: 461057 - DNA, 90 bp, Homo sapiens
cagagcaacaacggtgtgcctcctgtgcaggtcttttggctaaaaaggctgttgaagctggtctgcgtgttaaaccttatataagaacaa

SEQ ID NO: 461058 - DNA, 50 bp, Homo sapiens
agctgtgcgacgtgaccctcaagcaggcgcggggcgaaggagctgctaga

SEQ ID NO: 461059 - DNA, 100 bp, Homo sapiens
gtgtcattatctccatcccattgacagaaagtaaaaatgttgtacatcagctctcagtaaccctagaagacttatataatggtgcaacaagaaaactggc

SEQ ID NO: 461060 - DNA, 75 bp, Homo sapiens
tcctctctatagtcaactccttcaagcatataagtggtcaaacaaggttcgagaacttgtcttggacaattgcaa

SEQ ID NO: 461061 - DNA, 101 bp, Homo sapiens
cccagcccccaacgccagcttcctgcaggcccagagccggcatgaactctcccaacgagtcggggcccagggatcatcctgatattgttgattcatttatg

SEQ ID NO: 461062 - DNA, 99 bp, Homo sapiens
atggatattacatgagaccttgtgtattaagctctgaaactgcggagcggccaccggacgccttctggagcaggtagcagcatgcagccgcctccaagt

SEQ ID NO: 461063 - DNA, 114 bp, Homo sapiens
cccccatcctccccgccccatcggttgttgtctgggcgggaatgtatcctgtcaggtataatgtcagtgaatggcaagaaagttcttcatatggatcgaaacccttactacgga

SEQ ID NO: 461064 - DNA, 73 bp, Homo sapiens
taaaagtcctccaaaaatgagcaagtggtctggaactgaaagtgatgcgtatttctgagttatgcctgtattt

SEQ ID NO: 461065 - DNA, 96 bp, Homo sapiens
atgtggaaccctcaaaaatgcctccaccagagctgaccggttccctgatgtgttacctgcttctgctactgatccaaactgcagaacttctcattc

SEQ ID NO: 461066 - DNA, 82 bp, Homo sapiens
ctattctttacaactgtacccggacagcgaccgtcaagagcctccgaccagggagaccttccatcctcctccacctgttcca

SEQ ID NO: 461067 - DNA, 74 bp, Homo sapiens
ctgaaccggcggctctcccaccctggacacttctggaagtcagctgactaccaagatgaatgaactaatggaga

SEQ ID NO: 461068 - DNA, 100 bp, Homo sapiens
tcaagagactcttcatttagattggattctgaatatcaggcaatggtcgagacagttaacaacctccttcagccacaagctttgaatgcatggagagacc

SEQ ID NO: 461069 - DNA, 88 bp, Homo sapiens
acttgcttttcatgattggagaacttgtagggtgctgacacctttacggcaaaagttaatattgaagtacagttggcttcagaactag

SEQ ID NO: 461070 - DNA, 85 bp, Homo sapiens
gcttgcaacaagtgttgttaaacacaaaccaccctttaaattttcaagggaaggacaggacttcaaggacagcaaggaagaaaag

SEQ ID NO: 461071 - DNA, 100 bp, Homo sapiens
cgtggcccgggccctggtccagcagggactgaaggtggtgggctgcgcccgcactgtgggcaacatcgagttagaacctggcccattagatgaaacccag

SEQ ID NO: 461072 - DNA, 75 bp, Homo sapiens
ccgtggcctcgcccaggccgacgggtgctgatgtatggacagccgtatcgtgttaccttagagcttgagctgcca

SEQ ID NO: 461073 - DNA, 75 bp, Homo sapiens
ggaggatgtcgggacaccccggaagctgggaaatgataagcaacgatgtgctgagctgaagaaagccttgtgtac

SEQ ID NO: 461074 - DNA, 100 bp, Homo sapiens
ctgacgctcctggcgcatctggtggtcgtcatcaccttattctggtcccggatgcacagtctctgacatcagctctcctgggaccctccaagagcactag

SEQ ID NO: 461075 - DNA, 89 bp, Homo sapiens
gatggatgccaccaatatgccagctgtcaaagccatcatatatcagtatatggaagagaaaggagaagatgagtatgccaacgttgatg

SEQ ID NO: 461076 - DNA, 100 bp, Homo sapiens
gttttgctcctggatgaatccaagttaacccttaccacccagcagcagggcatcaaggttgggggccgtcccgctcctaaggcaggaagatggtggccgc

SEQ ID NO: 461077 - DNA, 88 bp, Homo sapiens
gagcagccccggctctgggctacggactatgggcgaatagctctgaccacccggcgaagatgggagtgagtgtcgtggactcttctgt

SEQ ID NO: 461078 - DNA, 74 bp, Homo sapiens
cccacttgttcgcggcctataggtctgggaagatccgaggtatctcctggagaagccatctatgatgtcattgg

SEQ ID NO: 461079 - DNA, 100 bp, Homo sapiens
accgtcaccaactggttcaaatattatgccttagaagtctcatatttcaaatcctctttggatcgcaaattgcttgagctgttgtggaataaatactggg

SEQ ID NO: 461080 - DNA, 100 bp, Homo sapiens
tcgagtggctgatatcaccagctgataatcagaaggtggatcaagtggtgactgtaggacgaggatttggtgtcacataccaactggtatcaaaaatctg

SEQ ID NO: 461081 - DNA, 88 bp, Homo sapiens
aaggattccaagtaactcttatttgaataaaatacagtgttggatccctttctcctgtttctgcaagtgtcctgaaaaagactgaaca

SEQ ID NO: 461082 - DNA, 100 bp, Homo sapiens
ctggcttattcacaagacaacgaaaacagtccacaggaagaggttgaactaaagaagttgaaacatttggagaagtctgtggagaagatagctgaccagc

SEQ ID NO: 461083 - DNA, 100 bp, Homo sapiens
ctggatgtgttgtgttcctggcttccctctggatgctgacagaaacaaggagagagtctacagggagattgaacaggtgattggcccacatcgccctcca

SEQ ID NO: 461084 - DNA, 105 bp, Homo sapiens
ccgacggcagccccggcgcctcccgaggacgcagaggctggggagtagctgctgaggtccggcctctttggcctacccccgttggctccgctgccccaggtcgat

SEQ ID NO: 461085 - DNA, 100 bp, Homo sapiens
actgaaggagctctggcgcgtggtgatgaacacaatggagaggatgattgttctgcccccactcactgaccagacggagctggtggtgcagaaaggctgg

SEQ ID NO: 461086 - DNA, 51 bp, Homo sapiens
gatgaatgcaaggaaaaggaggttttcatacagtctcggggttttaaaact

SEQ ID NO: 461087 - DNA, 100 bp, Homo sapiens
agcttcgcagtctggaaagctttaggagttcacagtgagttgatccctgaattttattatctccctgagatgtttgtcaacttcaataattataatcttg

SEQ ID NO: 461088 - DNA, 100 bp, Homo sapiens
ccacgaatctgcccacccctcctgtaacccagcctgtttcacttcttgggtcaaggaggaggtcaagttggcctgaatggacctctccagctctggcttc

SEQ ID NO: 461089 - DNA, 98 bp, Homo sapiens
gctatgcagtatttctttggcatcactgcagctagtaatttgccttctggattatatgtcttgtcgttcaagacttgcaacactaaacgagaaattga

SEQ ID NO: 461090 - DNA, 80 bp, Homo sapiens
ggcaaaggcaagagtaacagcagcgccgtcccgtccgacagccaggcccgggagaattgatattcactgatggactccaa

SEQ ID NO: 461091 - DNA, 75 bp, Homo sapiens
acaggaactgtggacagtgaagagaggcctctcccaaagcacctgcgcaggagaatgtactactcatcacctccc

SEQ ID NO: 461092 - DNA, 75 bp, Homo sapiens
ttctagtgctgagatcctgagacaatgcaggaacgaatgcaggaatttgggaactgagctgtgcaagtgctgaag

SEQ ID NO: 461093 - DNA, 51 bp, Homo sapiens
tcgcctttctggtgggaggcttgattggtactccaaagattcaggtttact

SEQ ID NO: 461094 - DNA, 50 bp, Homo sapiens
tccagggctcctgtctacgaccagatggtcagtaggacagaaggtaacat

SEQ ID NO: 461095 - DNA, 98 bp, Homo sapiens
gcgtgtaactatgctcatcattgttcttgtcaatgcctttgtgtctatcacagtggaggttggtgaccgttgttatgatgaaaaaatgtatgatgctg

SEQ ID NO: 461096 - DNA, 101 bp, Homo sapiens
ttgctggtctctggctccctcctcccagggccaggcgccgctcagaacggaactttatattgctgttggaatatctggagccatccaacatttagctggga

SEQ ID NO: 461097 - DNA, 74 bp, Homo sapiens
tgaggaccggcaacatggtgcggtcggggaataaggaaaaccagtagattcccagacatcgcgaagtgaatctg

SEQ ID NO: 461098 - DNA, 78 bp, Homo sapiens
gcagatgttgtcaaggtggcctaccaggaggccaggggtgtcgccatggtcaatggcatgcagctttatggaaaatct

SEQ ID NO: 461099 - DNA, 100 bp, Homo sapiens
aagaagccaggatatcatgcccctgtggcattgcttaatgatataccacagtcaacagaacaggctctttcattatcatcctcatcttgatatagttcca

SEQ ID NO: 461100 - DNA, 100 bp, Homo sapiens
caaagtctcgcttctgccgaggtgtccctgaattgaagaggagctgggcagcaaggctaagtttgccggcaggaacttcagaaaccccttggccaagtaa

SEQ ID NO: 461101 - DNA, 101 bp, Homo sapiens
cgcgcgcgctcgcgcaccacgcgccccgcgcggcccgcccggatcgtggcctctcgagagcaagatcgcccaggaccacaccgcagcgtaactgcaggcct

SEQ ID NO: 461102 - DNA, 75 bp, Homo sapiens
atacatgatttaaacaagagatttccacagaaggctttcacggagacgcagaagaaacggctgctatcctggaaa

SEQ ID NO: 461103 - DNA, 99 bp, Homo sapiens
aaaagccattgtgatttgtggagcagagggcaaattttctgcaggtgaccaagaatatggcccaggtgaccaaagccctggacaaggccctgagcacca

SEQ ID NO: 461104 - DNA, 82 bp, Homo sapiens
agacggacaccgaaggagacagtgaatcctgttcagccagagaacaagaatgtgagttcagagtcgtgacacttcaagaggt

SEQ ID NO: 461105 - DNA, 75 bp, Homo sapiens
tgaaacttaagttgcattcctttgagtcacataaggatgaaatattccaggatcactactcttggaatcaaagat

SEQ ID NO: 461106 - DNA, 96 bp, Homo sapiens
gatgagaagctgtcggagcttcccaagttgctctaggtcgtaaccagcctttgaaaaaggagaaaccaaaatggaaaagcgattatcctatgacag

SEQ ID NO: 461107 - DNA, 100 bp, Homo sapiens
tcttagtggaggaaattcatcgtttgggttcaaaaagcgagtctgcggacaccagaactgacctgggagcgagtgagatctcaagttgaccatgtgatat

SEQ ID NO: 461108 - DNA, 75 bp, Homo sapiens
taataatgacaatctcctcagggaaggggcagcacaagatggagtttcactgtgtcagccaggatggtctcgatc

SEQ ID NO: 461109 - DNA, 114 bp, Homo sapiens
ccatcctgccgtccttctccactttcgccagcccgtgccgcgagcgcggcctgcaggagtgtcaacagcatctccaccctggagcctgtgagccggtgccagcgcctgagtgag

SEQ ID NO: 461110 - DNA, 74 bp, Homo sapiens
gctcccggtggaagcaagggagcccagccggagccatggaactaagcgtcttgtagaaggaactattaatccag

SEQ ID NO: 461111 - DNA, 90 bp, Homo sapiens
atgggcgcccgcggtctggacaagcgaggaagtttctttaaggttacaggaaatacaggaggcagaggaacaaataaaagacaccacgag

SEQ ID NO: 461112 - DNA, 100 bp, Homo sapiens
gacacctggactctttcaggttctgaaagatgtggtctgaagctattaaaatcctgaaaggggagtatgctgtccgggcaatcaaggaacataagatgga

SEQ ID NO: 461113 - DNA, 87 bp, Homo sapiens
catcttcatgagtactccaagaagatggttcagttgactattgcaaaggggtaagaagatggggcatgatgtagattttttaattac

SEQ ID NO: 461114 - DNA, 80 bp, Homo sapiens
gacagaatcaccagcactggctgaaggacagaataacgggctcccagattcacaagccccaccaagaggatcaccccagg

SEQ ID NO: 461115 - DNA, 116 bp, Homo sapiens
tgcactgtgcctgtatggtgtcagatgctgactgtgtggagttacttctggaaaaaggagccgagataatccttcctcagacagttttcttggctcaggcgatttaagaacctttg

SEQ ID NO: 461116 - DNA, 100 bp, Homo sapiens
acctgaggttgaaaactatcttaaggaaggctttatgaataaggagcttgcattgaaaggctctagttacagtggacttcttgaacgacatcatattcac

SEQ ID NO: 461117 - DNA, 126 bp, Homo sapiens
gcctttgtcaactctgtgcacagccgatgtcgtccagtccgaaagaaaccaccttctccagcacttagaccatgctcagcctccaagcagccttgtcatcgacaaagaatctgaagtttacaagat

SEQ ID NO: 461118 - DNA, 99 bp, Homo sapiens
caagaatgtttgctgaccctcatggcaagactcagattgatggacaacttttcttaattaagcaccttttgatacttcgtgaacaaattgctccatttc

SEQ ID NO: 461119 - DNA, 100 bp, Homo sapiens
ctgttccttggccatcccaaagctattctgggggcaacagagatcatcactgttgaagaggcaaagcgcaggaagagcacatgcagctactatgaagacg

SEQ ID NO: 461120 - DNA, 75 bp, Homo sapiens
tgaaggttgaagtctgggatgtagtagacaaagctggcccggtgatcatgtccattgaggagaagatggaggctg

SEQ ID NO: 461121 - DNA, 75 bp, Homo sapiens
tcagcctccagagtagctggaaatacagcattccaaaatatgcccggtgctatccgcccagctgctcctagacca

SEQ ID NO: 461122 - DNA, 100 bp, Homo sapiens
actcttgattggaatgttctccctgcagcagtcagcccaaaggaagtcattgaagtcaacaagagagacatagtcttcctggtggatggctcatctgcac

SEQ ID NO: 461123 - DNA, 100 bp, Homo sapiens
agcagaggcactgcctggagctgcagaaatctcccaagcctaagaagaagaagcacaggaaggagaaggaggagcggaccaaaggcaagaagaagtccaa

SEQ ID NO: 461124 - DNA, 90 bp, Homo sapiens
gcggcggccgtggaaggcgacccggcggctgtggaggccacgctcagctcgccaggcggcgcagggctaggcagctggaagagaaagacc

SEQ ID NO: 461125 - DNA, 100 bp, Homo sapiens
tggctgcgagagagaatgagcctcccgccagacaggagggagcccagaccagaagagttccaccagcgatccaacgtcacactcactctacgcaacctta

SEQ ID NO: 461126 - DNA, 75 bp, Homo sapiens
cttgactcacccagcaaaaccatgtctattaaagaaaggcttctccagggaaagtgaccgaggcagtgaaagagg

SEQ ID NO: 461127 - DNA, 75 bp, Homo sapiens
gtggtgaagcttcatccccatgaactaaataatctcctgtctaaagaactgtggctgcaccatctgtcttcatct

SEQ ID NO: 461128 - DNA, 82 bp, Homo sapiens
catgaaccgggtcctcagcttccacagcgtgtctgttccagggtctccctccactgctgtagtaacccgggtccggggcctc

SEQ ID NO: 461129 - DNA, 98 bp, Homo sapiens
gaccggcaactactttggattcacccacagcggggcggcggcggcggcggctgcggcccaatatagagaaactccagaaaatcttgccaaacttctga

SEQ ID NO: 461130 - DNA, 101 bp, Homo sapiens
gacgggtcctgcagggggacagtgaggaaagggccgcctcgtctccgctcctgggggaccgcagcatgtagagcgcatgaagtacaggacaataaagcttc

SEQ ID NO: 461131 - DNA, 82 bp, Homo sapiens
acaacaaacaaatttccatcggaatatgtaccgactgggaaaaaagttgttccatgtagacatgactggcatcagactggag

SEQ ID NO: 461132 - DNA, 90 bp, Homo sapiens
agaaatccaggcaggcatctatcttgaaggctgaagaaatgtcaacaattgggagttttgaaggattccaggctgtgtctctgaagcaag

SEQ ID NO: 461133 - DNA, 74 bp, Homo sapiens
ggtgatgcaagcaacagccactagtgggtttgccagtggaaacactgtgcatcttagccaacatagcggatggg

SEQ ID NO: 461134 - DNA, 100 bp, Homo sapiens
ccggagcgaacgccacgccgttggcctttctgaagggcctgagtgacaagcagcgggaggaacattacttctgcaaggactttgtcaggctgaagaagat

SEQ ID NO: 461135 - DNA, 100 bp, Homo sapiens
catacctccagcagaaatggcaacaggacatgaaatctgctgtgatcacgccttgcagtcattttttccatgcaggctgtcttaagaaatggctgtatgt

SEQ ID NO: 461136 - DNA, 82 bp, Homo sapiens
ccccgcctagcccttccggatcctgcgcgcagaactcgggaagaggctctgtcgggattggccggaagcagaagggaggtca

SEQ ID NO: 461137 - DNA, 75 bp, Homo sapiens
agaccactggccttgtgggattggctgtgtgcaatactcctcacgagattttcttcaatcacatctgaataaatc

SEQ ID NO: 461138 - DNA, 100 bp, Homo sapiens
atgatactcgagtatatatctgggatccacataatggagacattctgatggaatttggtttgatgaaggccggaacaactttgaaggggaggtcaccaag

SEQ ID NO: 461139 - DNA, 82 bp, Homo sapiens
ctctccttttccctctccctttccctaagagctctcccagttattgctttgtgaccttatcctacattttaatcatcccatc

SEQ ID NO: 461140 - DNA, 51 bp, Homo sapiens
aaagaagttgcaaaacactgggttgcaaaagcttctcatttcagagagatg

SEQ ID NO: 461141 - DNA, 75 bp, Homo sapiens
tggaccagttgtacctggatgacgtaagactttgaccccgacgcaggcttcagtgattgccgcggatcagaagcc

SEQ ID NO: 461142 - DNA, 100 bp, Homo sapiens
ggtacatcgcctcggtgcagggctccaccccgtcgcctcgacagactttgtgtggacagtaatgacctcacgtttccgattgcctgctggcagaacctac

SEQ ID NO: 461143 - DNA, 90 bp, Homo sapiens
cgtatgggcatcatcgtgcggctggaaactgacaaactagctctcccgatgagccccagcccgcttagcccgagccccatccccagcccc

SEQ ID NO: 461144 - DNA, 90 bp, Homo sapiens
agcctttcctccaacagccacaccagtatgattcatccagccttccagctctgttatttaaagcaagaacacttctgggagccgaaagcc

SEQ ID NO: 461145 - DNA, 75 bp, Homo sapiens
gtccccgggggcgccatggcgaccggagcgaacgccacgccgttggtgtactaatggtcacttgatgtgcgctgg

SEQ ID NO: 461146 - DNA, 75 bp, Homo sapiens
aagaaactgaggcctggaatttgattaactcattcaaggttacccagttggctggcctgccactcctcctgctat

SEQ ID NO: 461147 - DNA, 89 bp, Homo sapiens
ctcatcttgtccagaactctgtcaaatgaagaacactttcaagaaccagagttttccagaaaaagaccttctgcactgtccatctaagg

SEQ ID NO: 461148 - DNA, 96 bp, Homo sapiens
aaaactcacacccggtctggacacagaaagagaagagttaacagagcagtttcataaagttgaatctcaactgaataagctaaatcatctcctcac

SEQ ID NO: 461149 - DNA, 90 bp, Homo sapiens
gaggctatgggcagccaggaggtgctgggccacgcggcccggctggcctcctccggtctcctcctgcagacaatattgactcacgcctac

SEQ ID NO: 461150 - DNA, 87 bp, Homo sapiens
caccagtgtggcatgggcatgtaaggtgcgcggagggactgcaccttctccatcaggtgcagaagtgttctaagaacggaagcatct

SEQ ID NO: 461151 - DNA, 99 bp, Homo sapiens
gccacatcgctcagacaccatggggaaggtgaaggtcggagtcaacgggaagcgcaacaggaaaggagagaagaatggcaagggcctacggcatttctc

SEQ ID NO: 461152 - DNA, 100 bp, Homo sapiens
aaccatggccacgtgtctcctggttgggaaaggtatcaaactggtttggaaataagcgaatccggtacaagaagaacataggtaaatttcaagaggaagc

SEQ ID NO: 461153 - DNA, 75 bp, Homo sapiens
gctccagttcactaactgccggatcctgcgcggagggaaactgctcagtatgacaatctcctgagccagtttggc

SEQ ID NO: 461154 - DNA, 90 bp, Homo sapiens
catggccactccagtcggtgttgagcacggcgagcagtctcaggcctttagtgatgatggaaacctatgagaatatcccaggccagtcaa

SEQ ID NO: 461155 - DNA, 100 bp, Homo sapiens
aaccagctcacagaaatagcaaccctgtcattgaatcctggaagcctactgatactgaaggtaagaagcagtatgacagggagtttctgctggacttcca

SEQ ID NO: 461156 - DNA, 143 bp, Homo sapiens
ttgtgtcctgagatcaaatggcacttcattggccacctacagaaacaaaatgtcaacaaattgatggggggtgcactatagccatctggagctgagccctggggagccagtgcaggagggggaccctcatttccgaagtgccc

SEQ ID NO: 461157 - DNA, 89 bp, Homo sapiens
gctggagaagctgggattggagattccacccaaacttgctggtcactgggagtttgtgatggacgcctctgaccccacccagctctctg

SEQ ID NO: 461158 - DNA, 96 bp, Homo sapiens
gtgccaagcccccgacgcacaaatatgtccgaaccaacatcccgggtaaccgggtggctgaaggacaggtgacgtgtccctacctcccccccttcc

SEQ ID NO: 461159 - DNA, 100 bp, Homo sapiens
gctggggacatgtccaaccccggaagccggaggaacgggcccgtcaagctgcacctgacaggtggtatgcaagattacaattatgtgtgggccaactgtt

SEQ ID NO: 461160 - DNA, 75 bp, Homo sapiens
tgcatcggcttcccggagctggtgctgcctgtggtcctgcagcaggttcaggagaagtggcacctggtggaggac

SEQ ID NO: 461161 - DNA, 100 bp, Homo sapiens
ggtacctctgcccgcggtcctcgctctcgggcggggcggcggcgacgcggacctgcggactagcgaacccggagctctgcctgcagttgaacacaaagac

SEQ ID NO: 461162 - DNA, 50 bp, Homo sapiens
cctggagttcacgactctgagtgctggctgaccccgcactacatctaccc

SEQ ID NO: 461163 - DNA, 75 bp, Homo sapiens
ctgacatcaacatccgagacaacggacccgagtgtatagccctccagagtggatccgctaccatcgctaccatgg

SEQ ID NO: 461164 - DNA, 73 bp, Homo sapiens
gcccaactcccagcggagagcaaggtttaaaagacgagtcctaattcagtaccttgagaaggtactagaaaaa

SEQ ID NO: 461165 - DNA, 50 bp, Homo sapiens
aggagctcgaaaatgcatcaaactgacaaaggatttgacaaagccacttt

SEQ ID NO: 461166 - DNA, 83 bp, Homo sapiens
ggagaaggcacagcggctgtatccgacgccgcgagttcgcgcattttgaaagcgaagcagaagccgtagaatcagcggcgagc

SEQ ID NO: 461167 - DNA, 83 bp, Homo sapiens
ccaggagtcatcggacgccagaatctgcattttgaaagcgaagcagaagccgtagaatcagcggcgagcctgttgaaagaacc

SEQ ID NO: 461168 - DNA, 74 bp, Homo sapiens
cccctgggaataggactgtggacctcttcccagcgtctcgcccttttgcccaggctagagtgcagtggtgcggt

SEQ ID NO: 461169 - DNA, 90 bp, Homo sapiens
gtttgtctgttcgacacaggcttggggccgacgggggagacggagccccaggtgccccctgataagtgccgatgtgccgtgggcagcatc

SEQ ID NO: 461170 - DNA, 82 bp, Homo sapiens
acagaagaaactctacagagatgtgatgcaggaaacattcaagaacctggcatctataggtcagcagcaaggacaagatgga

SEQ ID NO: 461171 - DNA, 75 bp, Homo sapiens
cctgcgctatgaagacacgcttcttctggaagaccagccaacaggaaaggccgagggggacggcaagatgcacat

SEQ ID NO: 461172 - DNA, 83 bp, Homo sapiens
tgtttgtcccagaatctacgtctaaactgcagaagtttacaagtttaatggatcgagaagtggcgttgcttgctgaaatggac

SEQ ID NO: 461173 - DNA, 90 bp, Homo sapiens
gagaaaagttatgattcattgcccaattttactgctgctgactgttctgccgatgatgagaggatcttgaggttcttggaattggcaggc

SEQ ID NO: 461174 - DNA, 83 bp, Homo sapiens
cacggccagttttgaaatcgacacacaaagaatagagttgagcctgtgggacacttcggtgcctacaccaactaatgttacaa

SEQ ID NO: 461175 - DNA, 83 bp, Homo sapiens
tcgacgtcttgcctgtgtcccacttgttcgcggcctataggaactcgaatcatttatgacagaaagtttctgttggatcgtcg

SEQ ID NO: 461176 - DNA, 74 bp, Homo sapiens
cggttctggtgtttggcgtcgggtcattcaacatttattcaaccaaaaatactaagtcagctctatacaaacta

SEQ ID NO: 461177 - DNA, 75 bp, Homo sapiens
tgtaaaggccaagatccaggataaggaaggttattcaccagcacctccaacctgctttattctgtgtggtaattt

SEQ ID NO: 461178 - DNA, 83 bp, Homo sapiens
acttgctcgtgccttagacaagaaactcctttccttaaaggaactgtggctgcaccatctgtcttcatcttcccgccatctga

SEQ ID NO: 461179 - DNA, 90 bp, Homo sapiens
ggggggcacgcagctgaagctcatcatgaccttccagaattacgggcaagcgctgttcaaacccatgaaccacacccactcgcccgggtc

SEQ ID NO: 461180 - DNA, 101 bp, Homo sapiens
gcgagtatctccgtttcctggatgtgaacgggcatatctctctccaggatttcattatcctgtttatgggaagatgtcagggagagaagagacagagaaag

SEQ ID NO: 461181 - DNA, 75 bp, Homo sapiens
ccttccggagcttctcagaagacagagggttttcttttgaggtactatgcgcctgcaggacctacctcagcccaa

SEQ ID NO: 461182 - DNA, 100 bp, Homo sapiens
ccaggactcagaggccgccatcaaccgccagatcaacctggagctctacgcctcctacgtttacctgtccatgagttcttggagtctctgcggagtccct

SEQ ID NO: 461183 - DNA, 80 bp, Homo sapiens
cccgcggaccgcggcagcccagagcagaatgatatggaacctagcaaagctgttccactgaatgcatctaagcaagatgg

SEQ ID NO: 461184 - DNA, 75 bp, Homo sapiens
acgagcaggacctatcaaagcccagaagatttccaaatctgaagtctgtccgagaactcattttgaaacgtggac

SEQ ID NO: 461185 - DNA, 100 bp, Homo sapiens
ctggaaccaagaaggttgtgtcccccttcctctgggtgtccttgtctcctgctatcagcatgcaatgatgctacctgttctgacccatcatatccgctac

SEQ ID NO: 461186 - DNA, 100 bp, Homo sapiens
cactcggtgtgcgacgtggagatccgaaggaatgaaatccgggtcagtcatatcatttggatcaaaaaatagaacaatcggagttgcagccaaaaatcag

SEQ ID NO: 461187 - DNA, 100 bp, Homo sapiens
ggggagcagacggttgacagtgttgagtttgattgaagagacagggtcttgctttgtcacccaggctggagtgcagtgccacaatcagagcttactcctg

SEQ ID NO: 461188 - DNA, 100 bp, Homo sapiens
caagaccttcctgagccgccacagcatggacatgaagttcacctactgtgatgacagatattctctaagccgctttcatcatgggagaaatagagcagag

SEQ ID NO: 461189 - DNA, 83 bp, Homo sapiens
cccagcagtcacgcaaacaacttatcagtagtgacttacagtaagcctggtccgacccccagtggcactaacgtgggatcctc

SEQ ID NO: 461190 - DNA, 100 bp, Homo sapiens
aagggacgaatgggacccccaggccgggacagctcttctctgggcctcgaaggagctccagcaagcccagacaaccagaccagaatcgacacaaatccag

SEQ ID NO: 461191 - DNA, 100 bp, Homo sapiens
atgtgatgctggagaattatggaaatgtgacctccctagatgctggcccgcgagagacattgatgcattttgctgtgcggctgggactgctgaggttgac

SEQ ID NO: 461192 - DNA, 83 bp, Homo sapiens
cggcgggagccagcgagccacgggagcgagccagaacagcggagcgttcgtgtacggctccatgagcttcttggataaggtgg

SEQ ID NO: 461193 - DNA, 87 bp, Homo sapiens
ccaccgccctggccatctaccatgtgtcccagccatcaagacggagcccacggatgaatatgaccccactctgatctgcagccccac

SEQ ID NO: 461194 - DNA, 95 bp, Homo sapiens
atggagaagactcaagaaacagtccaaagaattcttctagaaccctataaatacttacttcagttaccagggccagtgcctcagtttcaatccag

SEQ ID NO: 461195 - DNA, 100 bp, Homo sapiens
ccgggctccaaggccgtcgccgaccgctacgctgtctactggaacagcagcaaccccaggtcaacgaagtgacggtggaacagctggtgcagcagtaccc

SEQ ID NO: 461196 - DNA, 100 bp, Homo sapiens
caatgcatcttcccaccaccttaaaccactgacaacattctggaagacagacctgaaaataaatcatgtaatgacaagcttcagtttgaatataatgaag

SEQ ID NO: 461197 - DNA, 100 bp, Homo sapiens
cggcggaaaacagactccattgagaagaggttttgctttgatgtggaagcagtagacaggcagaaccacagagaggctacagccgtcctggcctccctcc

SEQ ID NO: 461198 - DNA, 75 bp, Homo sapiens
ctagtgagaaccgagtcagtgctcttacccagggctcaaaatctccttcgccaagaccaaacatgcctgttcgat

SEQ ID NO: 461199 - DNA, 73 bp, Homo sapiens
tttgagatgagttacatcttggaggtcgatggccaggtggtcttcataaactatactgccttgtgatgcctcc

SEQ ID NO: 461200 - DNA, 100 bp, Homo sapiens
cacaaggcatattggattacgtagtagaaaccaccaaaccaatttctcctgcaaaccagggtatcagagattgttgccagcaaaggaggttttgaaatgg

SEQ ID NO: 461201 - DNA, 100 bp, Homo sapiens
gcttgtccactgtccgccagacctgctgctgcttcaatgtccgcatcgcaaccaccgccctggccatctaccatgtgcagttggaattgatcacaccttt

SEQ ID NO: 461202 - DNA, 80 bp, Homo sapiens
ccaaggatagccaatcggaccaaaaattcactcactttgcaatggaaggttgccaacttggcctgttccatctcaaataa

SEQ ID NO: 461203 - DNA, 75 bp, Homo sapiens
accaattcatcaagaagcaagagttttgctgtcaggagagaagatgactgaggaggaggtggagaccgttctggc

SEQ ID NO: 461204 - DNA, 83 bp, Homo sapiens
tctcgcctcgggtctcgggggccgctctgggatcccggccaccagcaattgtccgtgagaaagatcagtctaaagaaaaggag

SEQ ID NO: 461205 - DNA, 86 bp, Homo sapiens
ttcctgttctgatagcgtggaagttttaagataaaattggctgcagcattggcaagatgtcgaatcaagcatgatgccctttcaat

SEQ ID NO: 461206 - DNA, 82 bp, Homo sapiens
cggagctgtctcgagctgagccccctaccgggccggatcccgagtcttccgtgtgtgctaagatcgtgcagctcctggggca

SEQ ID NO: 461207 - DNA, 100 bp, Homo sapiens
acccattggaaatgtccatccagttgggagctatgagtcctctgaaatgaacagcatagttcttacgtctgttgctagattatcgtccaaaagtgttaat

SEQ ID NO: 461208 - DNA, 100 bp, Homo sapiens
aactgtttgatgcacaccaggatttacattcagagggcccttgccttgtccacaccatcactggagatttgctgagagcccttgaaggaccagaaaactg

SEQ ID NO: 461209 - DNA, 74 bp, Homo sapiens
ggatacggtcactttctacaaggattgtaagtggaaaatgtatatggagatggatggggatgaaattgcaataa

SEQ ID NO: 461210 - DNA, 100 bp, Homo sapiens
ccaaaactgtgcacccctggatgaaagtttacaggtacatacattacacccctatttctacaaagcttggctattagagcattatgaacattaatgacct

SEQ ID NO: 461211 - DNA, 100 bp, Homo sapiens
tatggacactagaagatgaaatccacagtccagcccacccagtcctcaggtcctggctcccagaagcaaaataactcaagtgaagcaatgaaggaagaag

SEQ ID NO: 461212 - DNA, 75 bp, Homo sapiens
aaaatggagctcactttctagtacaggttccttttttgccaggagattcagaccttgatcagctaacaagaatat

SEQ ID NO: 461213 - DNA, 113 bp, Homo sapiens
ggaactgatagcttatggttctccattgtgatgaaagcacatggtacaggcccgccatgttcatagaggataaagcagtagacaccctggcttacctcagtgacggtgacgcc

SEQ ID NO: 461214 - DNA, 83 bp, Homo sapiens
ctcacaatgaggctccctgctcagctcctggggctgctaatgctctgggtctctggctttccttaaagtttcccatgtctcaa

SEQ ID NO: 461215 - DNA, 50 bp, Homo sapiens
cagggcaaggaaactggccacaagtggcgggacaggcttcattgggacag

SEQ ID NO: 461216 - DNA, 87 bp, Homo sapiens
aatttttaataaagaaaaaagcaaatgtaaatgcagtagataagttggaaaggggccagtgtcattcaaagatgtggctgtggattt

SEQ ID NO: 461217 - DNA, 100 bp, Homo sapiens
tgtatttgtggcttaaactcttggcatttggctttgcctttctggacacagaagtatttgtgacaggttgctgatcagctctgtgccaagtatagcaagg

SEQ ID NO: 461218 - DNA, 83 bp, Homo sapiens
cgagcaggacttcatccaggcctacgaggaggtgcgcgagaagtacaaaggagcatcagatccatgctgctgctgactcggag

SEQ ID NO: 461219 - DNA, 95 bp, Homo sapiens
tttgaaagtgcgattgtggaagctgctcggatgcaaagtacagttcgagagcacagagatggaggtcatgcaggtggaatcttcaacagatacaa

SEQ ID NO: 461220 - DNA, 98 bp, Homo sapiens
cgcctccgcccagggccacctaaggagcggaccccgcatcttcgccgtctggaaagtaactcctgctcagactcctgcatgcccagggaggaaggtgg

SEQ ID NO: 461221 - DNA, 81 bp, Homo sapiens
catctactgggtcagcttcatcctcggcggcggtggccgctagctccaaggaagagatggggtcttgctgtgttgtccagg

SEQ ID NO: 461222 - DNA, 82 bp, Homo sapiens
ggacaccatccgttcaattggtacaaagctggtacatgtgctccctgtcattgttccactattctgaatacttggtgacagc

SEQ ID NO: 461223 - DNA, 75 bp, Homo sapiens
tgcccccgcaggcccacggtctcggcgtagacgcttgctgagcgagagcgagaagcggcccttcgtggaggaggc

SEQ ID NO: 461224 - DNA, 100 bp, Homo sapiens
ctcagatagggtccacagaatggtcagaaaccctccataacctgaagtggatgattcaacagccacacaaagcagcaacattttttggatgcattgggat

SEQ ID NO: 461225 - DNA, 82 bp, Homo sapiens
cgcggcggcggcggcggaggatgagcctgcagagcgcgcagtacctccgatcctgtggtattgtggaaattcccagaggact

SEQ ID NO: 461226 - DNA, 74 bp, Homo sapiens
tccttgttctgccctggttttcagaccgtcaacaaagatgtggacgcacaggctgaaggagaagggagccgccc

SEQ ID NO: 461227 - DNA, 83 bp, Homo sapiens
cgctcacctgcgctgtgatgcctgcagagctgtggcttaccagggttctccaaaaaatgtggaatcctttgcatctatgctga

SEQ ID NO: 461228 - DNA, 75 bp, Homo sapiens
aagctcagggctcccacggattctacattatggtcaaaatgcagatcttcgtgaaaacccttaccggcaagacca

SEQ ID NO: 461229 - DNA, 100 bp, Homo sapiens
gctgaggcacctggagaccttcgagcaccccaacgtggtcaggaagaagaatttggtgttgatgattcttattctgaacaaggagcacaagacagtccga

SEQ ID NO: 461230 - DNA, 100 bp, Homo sapiens
gaagtcattttaaactatggacgactccgaggaacattgagagttttccgtctgatgaaggttggccatttgcaaagtatcttggagcttgtggaagaat

SEQ ID NO: 461231 - DNA, 88 bp, Homo sapiens
tctatgttaggtcaactgatccaactatgatcaagacactgaaggtaatctgtaagtcagatgctccaacaggggatgttcttcttga

SEQ ID NO: 461232 - DNA, 73 bp, Homo sapiens
ggcgacacatagtggctgcaggcttcctgatagtggacgttggatggcaagcatgtggtgtttggcaaagtga

SEQ ID NO: 461233 - DNA, 90 bp, Homo sapiens
gcttttgatcaccattggctgggaaggaaaaacagaatcagctgttccctgcgaaaggcttcagggatgacttcttagggggcaggggag

SEQ ID NO: 461234 - DNA, 75 bp, Homo sapiens
ggaacaatagttttaatgggaacatacgatgatggagcaaccaaatccaagtattttagaacatgctcaagaggt

SEQ ID NO: 461235 - DNA, 90 bp, Homo sapiens
ctacactgtcaccgagccccagcgacacccgaggggctacacagtatataaggtcaccgcccggagtgatcagcagctggactgtgcctt

SEQ ID NO: 461236 - DNA, 96 bp, Homo sapiens
gaaggtctccggagagtcgccggcggtgccaggtgctggagaatctggtaaaagcaccattgtgaagcagatgaggatcctgcatgttaatgggtt

SEQ ID NO: 461237 - DNA, 83 bp, Homo sapiens
cagtcatcgagaggaccttccacgtggattctccagacgagagcgaggagccacccctggatctgacaggcaaggtgtaccag

SEQ ID NO: 461238 - DNA, 100 bp, Homo sapiens
tggcgaaggaacggctctcctttgtttgcagactatatttctcagtgcaagctcgtggagagactgatagagaaaagttgctgttaatgtatcagacaaa

SEQ ID NO: 461239 - DNA, 96 bp, Homo sapiens
ccacagaaggactgggatgatacaccttttccacagggaattgagttggtcctgggaactccaacaagggagcaaatcagagaaatgaacccaaac

SEQ ID NO: 461240 - DNA, 75 bp, Homo sapiens
aatgccattgaattctccaacaatggaggccagtggctggtctcaggcacttctggatccagctgtgtgatagcc

SEQ ID NO: 461241 - DNA, 74 bp, Homo sapiens
cggctcacctgtgcgggatggaacaaaagctctatgagagtgctctgactgaaaaccaaaaactgaaaacaaaa

SEQ ID NO: 461242 - DNA, 82 bp, Homo sapiens
caggataaaaggcttcattgcgtgttttgctataggaattctctgctcactgctgctggtagcagtgtttgatgagcaggat

SEQ ID NO: 461243 - DNA, 82 bp, Homo sapiens
ccccggctcagcccccggagtgcggagccgaccagacggatgtaatgcaccagaacatttatgactacatccacgtggacga

SEQ ID NO: 461244 - DNA, 83 bp, Homo sapiens
ccgaagaccagccagaccatggagctcgcccccaacttccaggccctgatgcaaagtttcagagcatgaccagcaagtggcca

SEQ ID NO: 461245 - DNA, 50 bp, Homo sapiens
agatctgggtgactgtgatctggagatgcctacatagaagagtgacagca

SEQ ID NO: 461246 - DNA, 100 bp, Homo sapiens
ctcgggccgggctgcgtgagggaggaggcttcccatcgacggtcagtgcgcacgttgtaatcagctgaggccatgtcaggagacggagccacggagcagg

SEQ ID NO: 461247 - DNA, 100 bp, Homo sapiens
ccggtcatgcccaacatggtcttcattggaggtatcaactgtaagaagaggaaagacttgtctcaggacaggcgacactaacaggtgaagatctcgggag

SEQ ID NO: 461248 - DNA, 74 bp, Homo sapiens
atgaaagacgtccgtggaggatatgtgtgttggcatgcatcagcccagaagcagtgatctctggattaaactgc

SEQ ID NO: 461249 - DNA, 90 bp, Homo sapiens
aataatttctttctcgctgatcgcctaacttctactgacgaagcttggaagttgcagaaggattcactccttctccagttgcacagccac

SEQ ID NO: 461250 - DNA, 75 bp, Homo sapiens
ctgtggtttatcattgtaatcagcttcttaccaaatacagaagatttgaacatggaattcaatccttcagatcat

SEQ ID NO: 461251 - DNA, 51 bp, Homo sapiens
aagttccagccggttcgagagctagctgttaagaagaaatcctgaacggcg

SEQ ID NO: 461252 - DNA, 100 bp, Homo sapiens
gagcaagtttgggaggagctattatccattcctgagttacagcttaaagaaagtggttattgtacaggtcatgaaccagattccctggagttcagtactg

SEQ ID NO: 461253 - DNA, 51 bp, Homo sapiens
ccgagaatatattcagctacacaggtgcttcctgggtgagttggggtttag

SEQ ID NO: 461254 - DNA, 82 bp, Homo sapiens
tacatcaggatatgcctgaggagagctctgaggaggattcactcaggaggaactgtggctgcaccatctgtcttcatcttcc

SEQ ID NO: 461255 - DNA, 100 bp, Homo sapiens
ctcaacaccaacatcgatgggcggcggaaaatagcctttgccatcactgccattaagatgccctccaaatccttggttatggaatatttggctcatccca

SEQ ID NO: 461256 - DNA, 75 bp, Homo sapiens
ctcctgagtagctatgactacggccgcagaaaggaaagaaggtcgtggctctggacccctctccgcctccgaagg

SEQ ID NO: 461257 - DNA, 100 bp, Homo sapiens
gccaccaagtatggcaacatgacagaggaccatgtgatgcacctgctccaggtcgaagtggttctggaaactttggtggtggtcgtggaggtggtttcgg

SEQ ID NO: 461258 - DNA, 50 bp, Homo sapiens
ggaggacgagcggaaaaacggagcctacgattgtgaataagtggaataca

SEQ ID NO: 461259 - DNA, 50 bp, Homo sapiens
tggagagttccttcacaaaaagtttggtgcacctcgatttggaggaagta

SEQ ID NO: 461260 - DNA, 132 bp, Homo sapiens
ggcggagggggcggcggcagcgacggcagcggcggcggctggactaaacaggtcacctgcaggtcaaaatgcagatcttcgtgaaaacccttaccggcaagaccatcacccttgaggtggagcccagtgaca

SEQ ID NO: 461261 - DNA, 75 bp, Homo sapiens
gccgaggacgactgagggcctctgggccaccctcccggctggagagctcaggtgagccccaggtgtatcccagag

SEQ ID NO: 461262 - DNA, 75 bp, Homo sapiens
cctgtaacccagcctgtttcacttcttgatcccaccaaatattttggttgtgagctgggagcacagacccagttt

SEQ ID NO: 461263 - DNA, 118 bp, Homo sapiens
cgggctgacgctgctgctcgccgcgctgcgcccttcggccgcctacttcggtaagactttgaccccgacgcaggcttcagtgattgccgcggatcagaagcctgagcactttggctcg

SEQ ID NO: 461264 - DNA, 80 bp, Homo sapiens
ccacccgagagcaacaaagcaggcgactacagccacgtgaagggtggcccagttgaaatccttcccttcctctaccttgg

SEQ ID NO: 461265 - DNA, 75 bp, Homo sapiens
ccacatttgagactcagtcactcaagttgtggacatcggatacccaaggagacgaagctgaagcaggagaaggag

SEQ ID NO: 461266 - DNA, 100 bp, Homo sapiens
cccggcttcaggatttacacagacgtggggcgatgcttgtgaccctgcagctcctcaaaggcgccctgcgtccggcagaggaggcgagcatcccgctcag

SEQ ID NO: 461267 - DNA, 82 bp, Homo sapiens
cttgagttggtcgggggcagcggcaggtcagcccaaggccaaccccactgtcactctgttcccgccctcctctgaggagctc

SEQ ID NO: 461268 - DNA, 100 bp, Homo sapiens
ctgtctgagcaggtgcaggaggagctgctcagctcccaggtcacccaggaactgaggttttgacaacaattcgttcagggcaccgagcaaacatatttag

SEQ ID NO: 461269 - DNA, 98 bp, Homo sapiens
gttcagtatagatttctaaaccctgatcattgcttaagagatattcactgaggtttaatggatcgagaagtggcgttgcttgctgaaatggacaaagt

SEQ ID NO: 461270 - DNA, 82 bp, Homo sapiens
tggcatcgagaaggaggtgcgcgtgtgtgagccctgctacgagcagctgaacaggttaatttggagtggcccctggagtcag

SEQ ID NO: 461271 - DNA, 98 bp, Homo sapiens
gagcgcgatgtggagcgcttctttaagggctacgggaagatcctggaggtggatctgaagaacggggctaaggaatatgagagtttaatggaaaccaa

SEQ ID NO: 461272 - DNA, 75 bp, Homo sapiens
caggctaccaagtccgtgctgtttgtgtgtctggtgtggacaacagtgagtatatgcggaatggagacttcttac

SEQ ID NO: 461273 - DNA, 82 bp, Homo sapiens
gatactcctcctgaggctccggatgggttctgatgactgtcttgtgaaaatatgggcaacagatgatgggaggttgttagct

SEQ ID NO: 461274 - DNA, 100 bp, Homo sapiens
cttccctctacccgcccggcccgcggcgcgcaccgttggcgctggacgcttcctccttggaagcgcctctccctcaggatgtaggctatccggaattcct

SEQ ID NO: 461275 - DNA, 100 bp, Homo sapiens
ttttccgacgtcttatcatgaatcccagaatcatttgctgtttcaaatagagaactgtgcgatgatgagaaagagttcatacattttccagtatgtgagg

SEQ ID NO: 461276 - DNA, 75 bp, Homo sapiens
gctgatcttgtacttggattcagcaaggaaccttccggaagcagttcaggtacttttgaagcattctgcagatgt

SEQ ID NO: 461277 - DNA, 82 bp, Homo sapiens
tgctgtgggtgctgggacttcccgtccgcggcgtggaggaggagaaggcagagcccccccaggctatgaatgccctgatgcg

SEQ ID NO: 461278 - DNA, 73 bp, Homo sapiens
ctcaccagccctcgcctcccgagtcactgcagccaacccttcagcaagttagagatgtttatgattacttccg

SEQ ID NO: 461279 - DNA, 88 bp, Homo sapiens
ggccgccgggcccgggcatggtggtctggggcaacgcggaagggccatccagagtagagatgtggcccagttcagaaatgttgtcaca

SEQ ID NO: 461280 - DNA, 74 bp, Homo sapiens
ataagaccatttatttctttggagacaaaactatgccatacgccctgcatgtatacaatgaagtgatgagtgtt

SEQ ID NO: 461281 - DNA, 74 bp, Homo sapiens
tttgttccctgcagccctcccacggataccatggccaagcggaatacagtgataggaacaccattttggatggc

SEQ ID NO: 461282 - DNA, 100 bp, Homo sapiens
ccggggccgggacgccatgtccatggaggaccccttctttgtggtgaaagggtacatgtcccagagcaagcacacggaggcccgggagctcatgtactcg

SEQ ID NO: 461283 - DNA, 90 bp, Homo sapiens
gcggactcttgttcttgcactggtggacctagatgtgaaggctggtggaggctgtgtaatgaccattggagaaatgctacgatcttttct

SEQ ID NO: 461284 - DNA, 100 bp, Homo sapiens
ctgaagaagtctgcctacctgtcagccgtgggcaccttcacctgggtctgcacgccctttctgagcaaatttttcagaacataaaacaagaatatagtcg

SEQ ID NO: 461285 - DNA, 75 bp, Homo sapiens
gccgcgagggcggctacacctgcgagtgcttcgaggacttcactggtgctggagaatctggtaaaagcaccattg

SEQ ID NO: 461286 - DNA, 102 bp, Homo sapiens
tcaacggaaactagctcatctgtagagactgatttgcaacccttccgggaagccatagctctgcatggagagattaaacagattctagaaaatgaacttcag

SEQ ID NO: 461287 - DNA, 76 bp, Homo sapiens
gaggagcactggcgtctgtttccttcgttcgaggtcaggaaaatggattggatggcaccaagagtggagggccttc

SEQ ID NO: 461288 - DNA, 122 bp, Homo sapiens
cttttccagtgacgaggaattgacaatggccatgtcctacgtgaaggatgacatcttccgaatctacattaaagctgcgagcaagtcacaccagcctacaagccagatataatgaagccaag

SEQ ID NO: 461289 - DNA, 75 bp, Homo sapiens
acctcaggacttgagtaacagcaacatgctaacaatgcccagtccaatgccagagtacctcaacgtgcactacat

SEQ ID NO: 461290 - DNA, 75 bp, Homo sapiens
cgtgcttttcagtctagaagaggcatgttatttgaaagcaattgagacgcaaccgaactttgcagtagcttggag

SEQ ID NO: 461291 - DNA, 75 bp, Homo sapiens
actacagcagccaaaacgagaagaagaagaagtgttagaccagggctctgcattagctgctaatgtatgtaaaaa

SEQ ID NO: 461292 - DNA, 100 bp, Homo sapiens
cccaccgccagctggaaccctggggactacgacgtccctcaaaccttgcttctaggagataaaaaggtagccgggctgagaggccctgtgctgcgcctgc

SEQ ID NO: 461293 - DNA, 98 bp, Homo sapiens
ggaccaggagtgcttatagggctcttcctgctgttgcttctacttttaattttcgctcagctctcttcagctctagatggaggtttgctcttgttgcc

SEQ ID NO: 461294 - DNA, 100 bp, Homo sapiens
gaagagtgacttgtttctggatgattctaagaggtgtttctagctgtgtacagggactgattggctgaggactcacattggagagctgcagacaacataa

SEQ ID NO: 461295 - DNA, 100 bp, Homo sapiens
cggctgcgccagtgccagctgcgggcccggacccctttgctgatgcaagtaagggtgatgacctgcttcctgctggcactgaggattatatccatataag

SEQ ID NO: 461296 - DNA, 110 bp, Homo sapiens
ccaagttagatgccgattacccacttcgagtcctttattgtggaggctttaccgccagcacctgttcagaatcacacaaataagcatcaggtattcaatgcatctcttca

SEQ ID NO: 461297 - DNA, 101 bp, Homo sapiens
tggtcagtgaacctatcgaaggacatgaagactaccacatgatggatatgacagcgcgtgatctgctacagcagagatacacccttccaaatggagacact

SEQ ID NO: 461298 - DNA, 75 bp, Homo sapiens
cgcttttcccctggccttctgtatcttcatggtgcggctcatcttcgagagacaggggcaagtgtccgagtggtg

SEQ ID NO: 461299 - DNA, 147 bp, Homo sapiens
gctgattactatatcattgctggagtgatctatcaggcaccagacttgggatcagttataaactctagagtgggtggttctcttcccaaagtggaagccaaattcatcaattatgtgaagaattgcttccggatgactgaccaagag

SEQ ID NO: 461300 - DNA, 74 bp, Homo sapiens
tgacggacagtgcagggaagcaactgcagagaaaactgtcgctgaaaagcaggagaagagaaatcaggatcgct

SEQ ID NO: 461301 - DNA, 101 bp, Homo sapiens
ttttcacctcctgtgagcagtgggaaaaatggaccaacttctttggcaagtggacattttactggctcaagtgaccaagaatatggcccaggtgaccaaag

SEQ ID NO: 461302 - DNA, 98 bp, Homo sapiens
ggagaatcccagtgaagaagatgcagccattgtagacaaagtgctttctatgcggattgtgaagaaggagaagccaaaaatgtttgccaagggaactg

SEQ ID NO: 461303 - DNA, 75 bp, Homo sapiens
tctcagatgttggatatttgcttggaaaaacgtgtgggtacgaccttggaacgtcaaggtcgtgggaaataaaag

SEQ ID NO: 461304 - DNA, 74 bp, Homo sapiens
ctgaagcccacacttatggctgctgttccgatgattcacctccagcagaaagggaaccaggagaagttgtggac

SEQ ID NO: 461305 - DNA, 75 bp, Homo sapiens
caaaaatcaccaactaccttttagagtgggatgagtggtgtgtggttgactctgtttctcgccatgtcttctcac

SEQ ID NO: 461306 - DNA, 95 bp, Homo sapiens
actgacttacctaggaatgagagggacaggagtatctgaggatggagaactcagcaaaatcttcttgacagagacacattttctaaatctgatcc

SEQ ID NO: 461307 - DNA, 90 bp, Homo sapiens
gtgatgagaagctgtcggagcttcccaaggaaacctgaaactgccattgagcagaaggaaaacatccctttccagaacctttctcgtttt

SEQ ID NO: 461308 - DNA, 83 bp, Homo sapiens
ctggtggttgccactcacctgaggatgattttgacattgctggtcagtttgaccctatgatccccgatgcagagtgtttgaag

SEQ ID NO: 461309 - DNA, 100 bp, Homo sapiens
gaccgtgggcagccagggtcggtgaaggtggatccataaagaacccagccaacccgcagagggaggggaggggctgagctgtgaggagagcggggcccaa

SEQ ID NO: 461310 - DNA, 118 bp, Homo sapiens
ctcaatgaaggttgatttcatcagactaaaaagttacagggtaaaataccatgaagattttgaaaaaacaaaggggagaggctttactcccgtcgtggacgatcctgtgacagagaga

SEQ ID NO: 461311 - DNA, 98 bp, Homo sapiens
gtttcccaacagtgatgtcacaagattgaccacattgatcacaattcttcagcttgtctctaaccgaggaagcattgattgggagctactcattcaga

SEQ ID NO: 461312 - DNA, 75 bp, Homo sapiens
gcttcccctactgcgtggtgtggacgcccatcccggtgctcacgttcgacgaggtgctttataaatcatctcagg

SEQ ID NO: 461313 - DNA, 100 bp, Homo sapiens
atcaggggccttgataacacagagtttcaaggtcttcaaagcttcacctttctccaaaggcagatgtgaagaacttgatgtcttatgtggtaaccaagac

SEQ ID NO: 461314 - DNA, 51 bp, Homo sapiens
cgggacaagaaaattcatgcgccgtgctatcaagactaatcaggaccttct

SEQ ID NO: 461315 - DNA, 82 bp, Homo sapiens
gacgtggctattgtgaaggagggttggctgcacaaacgagcattccacgcctacgggaaggcaggcaagatgctggtggaga

SEQ ID NO: 461316 - DNA, 74 bp, Homo sapiens
acaagatgttgtcctgtgctggggctgacaggctaaatttattgtgaagaaatcagaagatgaagaagacgccg

SEQ ID NO: 461317 - DNA, 74 bp, Homo sapiens
gccagagtcacacacggtcctaagagctgggcaccaggaagcgaaggctgcagatataatttctacagtagaat

SEQ ID NO: 461318 - DNA, 83 bp, Homo sapiens
aataaaggagctcttcacagcacctgtttcggtctaagtaccacccagatgaggtggggaagcgtcggcaggaggcccggggg

SEQ ID NO: 461319 - DNA, 90 bp, Homo sapiens
cttggccaggctggccccgagcggaactggagaaagctgagggaaaaacagcactggaggcaatgtttctataaatcaaagaagagacag

SEQ ID NO: 461320 - DNA, 100 bp, Homo sapiens
attttgagtcctcgagtgaatgggcggatctcatatcttcacttggcaaactcaacaaggtctacttccccagcaggacagcatcattctcctatatctt

SEQ ID NO: 461321 - DNA, 100 bp, Homo sapiens
catttgagaactatgagatgaattcctttgaaattctgatgtacaagaagaacaacttgatcctgctccctcggtgtctgcattgactcctcatgctggg

SEQ ID NO: 461322 - DNA, 119 bp, Homo sapiens
cttcaatgaagggctgtgggagatccagaacaacccccacgccagctacagcgcccctccggaattgaatgatctggcacgggaccctccagcacagtgttcagcaggtcctgttggag

SEQ ID NO: 461323 - DNA, 100 bp, Homo sapiens
cagaactgttccttcagccaaagaaacaagccgtggaataggtgtatcaagtaatggtgcaaagcctgaagccttttcagatattaatggcaaagttcag

SEQ ID NO: 461324 - DNA, 74 bp, Homo sapiens
agtatcgctacttcaaagggtactttttagaaccaaaggttctgcagctgattcatgagagagataacatctgt

SEQ ID NO: 461325 - DNA, 82 bp, Homo sapiens
ggcgccctgcaccgcgcctcgcaaagagttggcgatttcagcgtgtgggagttctctggaaatcctgtgtatttctgctgtt

SEQ ID NO: 461326 - DNA, 100 bp, Homo sapiens
gggaagaggcggcagacagcggggttgttgaggcatcttcattaagctggagtaccaggataaaaggcttcattgcgtgttttgctataggaattctctg

SEQ ID NO: 461327 - DNA, 83 bp, Homo sapiens
ccatccctgcagcatgaacaagcatggggtaaccttggaaatgttctgaagagtcagagcaaaatttctgaagctgaaagcgc

SEQ ID NO: 461328 - DNA, 76 bp, Homo sapiens
ctggttctggaatcctcagttcaagacctattcaggcctgttctgtgtggtcatcaatccttacaagaacctgccc

SEQ ID NO: 461329 - DNA, 100 bp, Homo sapiens
aaaacgaattcgacttgatctccctattttacatgaagattttgttagcaataatgttcccagtgacctgacagcagaggagcgtcaagaactggagaac

SEQ ID NO: 461330 - DNA, 100 bp, Homo sapiens
cgcaggtacctgtggactcagcagcagcaactgtgggactttttgactacaattctcaacaacagcaaatggttatgagccttagagtttctgaactcca

SEQ ID NO: 461331 - DNA, 75 bp, Homo sapiens
acctttggtaatatcgcatcaattgggagtcaccaggagactaaagtccatcaaaaacatccagaaaattaccaa

SEQ ID NO: 461332 - DNA, 87 bp, Homo sapiens
aatagggatattgtagaaactgtctttaacctggtatccaaaccttgaaacctttgctctagatgtcaggcttgtttttgacaactg

SEQ ID NO: 461333 - DNA, 82 bp, Homo sapiens
tccggagccttggcacagctcgcttctaaagacaatgcagatcttcgtgaagactctgactggtaagaccatcaccctcgag

SEQ ID NO: 461334 - DNA, 100 bp, Homo sapiens
atggaggcgaggtagagttggggtcgcaggcataatcaccagcaacacccgggacaataatacgggggccacctacccccacctgaacttcagcattccc

SEQ ID NO: 461335 - DNA, 100 bp, Homo sapiens
aagcaagaaggccctggacacagcaatatctctgggctttcacaggacagaagttaatcgcatcccttatacccatgacatccagagacagaattaaagc

SEQ ID NO: 461336 - DNA, 100 bp, Homo sapiens
tccctttggtgtggacatctgctgccggaaggggtcccgaagccccctgcaggaactctacaacccaatccagtgatacgggaacaacacctccagagag

SEQ ID NO: 461337 - DNA, 90 bp, Homo sapiens
tacagatgtttcacagcctccacatgtttatcttctggaagatggtttagaattatgtgatggaggcctaagccaatcacaagatgacag

SEQ ID NO: 461338 - DNA, 82 bp, Homo sapiens
catttcatcaatgttggagtggcaagaaaaaggaggaacagatttggggtgaaaagttattttaccaagaaaatggtttgca

SEQ ID NO: 461339 - DNA, 100 bp, Homo sapiens
acggagcaatgttcttccactggcgacgtgcagcggaggagggcaaggactacccctttgccaggttcaataagacataaccagtgcggtgcaatccaag

SEQ ID NO: 461340 - DNA, 100 bp, Homo sapiens
tagcaagtggtcaggacgctgattgttctgcgcaggttggaggtttgaagatgccgcatttggattggatgaattccaaattctgcttgcttgcttttta

SEQ ID NO: 461341 - DNA, 83 bp, Homo sapiens
cctgccagagactgtactgcttaggggttggggtgactcagtgggaacgccatctgagcggggcatgacctatgacgcactcc

SEQ ID NO: 461342 - DNA, 100 bp, Homo sapiens
aggtggcatacctggatacatattacttctgagaacaagttgaaatcatcgcagaaggataaagttcgtcagtttatgatcttcacacaatctagtgaaa

SEQ ID NO: 461343 - DNA, 50 bp, Homo sapiens
ggacccaggagaaattcgccctcaaatgccctctggtggtcagaagatgc

SEQ ID NO: 461344 - DNA, 82 bp, Homo sapiens
cgagctgagtggttgtgtggtcgcgtctcggaaaccggtagcgcttgcagcatggcttgccgctgttccgtaacccagtgat

SEQ ID NO: 461345 - DNA, 124 bp, Homo sapiens
gcccgccgcgcggagcgccccttcgcgtcccctgcaccatgagctggggcaccgagctctggcaaccttggccatggaccagccggctggcctgcaggtggactacgtcttccggggtgtggag

SEQ ID NO: 461346 - DNA, 87 bp, Homo sapiens
tgcaagaaacctcaggacttgagtaacagcaacatggtctcggcgcggaagatggccggcggcgtggacggccccatcgggatcccg

SEQ ID NO: 461347 - DNA, 98 bp, Homo sapiens
tcagcgacccgcgcaagcgcgagatcttcgaccgctacggggaggaagagtgtgaacatggctacgcctcttcattcccgtccatgccgagcccccga

SEQ ID NO: 461348 - DNA, 100 bp, Homo sapiens
gcagatcctgagacccggacagtggcagtgaaacagggtttctatgttgcactgagactggtggcctgtgcacagagtggccatgaagttaccttgagca

SEQ ID NO: 461349 - DNA, 71 bp, Homo sapiens
gccaacctgaccgggcacgaggagaaggttgggggccgtcccgctcctaaggcaggaagatggtggccgca

SEQ ID NO: 461350 - DNA, 100 bp, Homo sapiens
cgaagctcggggacgcgaggagccggcgtggccctggacaatgcagatcttcgtgaagactctgactggtaagaccatcaccctcgaggttgagcccagt

SEQ ID NO: 461351 - DNA, 83 bp, Homo sapiens
tacaacagtttggcgtgcaacatggggcttgagaaagggcttgggcactgtttaaaggaaagttccgagaaggcatcgacaag

SEQ ID NO: 461352 - DNA, 97 bp, Homo sapiens
ctgggactgcaccgcaccgagggcgagctccaggtgttgtgtaacggaccaggaacatgtgttcctatctgtgtatctgcccttctccttgggatac

SEQ ID NO: 461353 - DNA, 100 bp, Homo sapiens
cgaggaacgaagaaacagacattcaacatgattgcatttgaacttcctgcctgacacagctcacttcaagaagtgcacaatgtcagaacgtggaattaag

SEQ ID NO: 461354 - DNA, 100 bp, Homo sapiens
aattcactgtctgtagcatctgctcctccacagagggaccctggaatggcgatggcactcccgatgcctggacctcagataaagaactggtgacacgtgg

SEQ ID NO: 461355 - DNA, 51 bp, Homo sapiens
ggaatttctcctggggctcagagtcttctcaataggtttggcatggacaag

SEQ ID NO: 461356 - DNA, 101 bp, Homo sapiens
ttttggcaaccccaaagacagcacagttcatctctgcctgtctttccaagagcaaagatatccttggaacagaagatcttattgtggaagtgacttccaat

SEQ ID NO: 461357 - DNA, 74 bp, Homo sapiens
gaaaagccaacgcagagtgtatcatctcctgaagcaacatctggttctacagaaacattgaatgaggaggataa

SEQ ID NO: 461358 - DNA, 101 bp, Homo sapiens
ataaagatccagtttatgtgtggagaagatgctagcaatgcgatgccggtcccagctagtccacagggaccagcagtgccatggaaggatttaacatgtct

SEQ ID NO: 461359 - DNA, 73 bp, Homo sapiens
cctccggagtagctgggattacaggacttgaaagaggagattgatattcgactctccagggttcaggatatca

SEQ ID NO: 461360 - DNA, 100 bp, Homo sapiens
ctagcaagaaagataggaagacatctgcagtatcttctcccctgttggaccagcagaggatggtcttgttaatgtaggatggatggactgtgccacccag

SEQ ID NO: 461361 - DNA, 75 bp, Homo sapiens
gatcacaaacttttgactcttttccaccagaaactcaagcactgaaagcaggtgtgcaactgaggaacatggctc

SEQ ID NO: 461362 - DNA, 100 bp, Homo sapiens
ctgcaagatacggtcatgagcttttgattaacaccttaataaccagcggagctgacacagccaagaagaagaagaattttcagttcttgccagctgcctg

SEQ ID NO: 461363 - DNA, 100 bp, Homo sapiens
acagctatgggttcaaagaggaatatgaggctttggatctggctgccctctccacagaacattctcagtacaaggactggtggtggaaagtacagattgg

SEQ ID NO: 461364 - DNA, 83 bp, Homo sapiens
cgggacagtgacgacgacagcgtcctcgaagccaccagctcccgggacccgctcagcgattgcctccggagccagcgtggtgg

SEQ ID NO: 461365 - DNA, 90 bp, Homo sapiens
caaaacttcctaaggcagaaccctagccttccagctgccagggggcttaatgaactgcaaaggagaatcctcattgacactggagaacca

SEQ ID NO: 461366 - DNA, 100 bp, Homo sapiens
ggagaaaattgtccttgataactctgtattcagtgaacacaggtgtcgtgaaaactacccctaaaagccaaaatgggaaaggaaaagactcatatcaaca

SEQ ID NO: 461367 - DNA, 100 bp, Homo sapiens
ggctctgcgtgagtgtggtctacgagctgtttctcatctttatactcttccaggacactgggtccccttggagcctccccaggcttaatgattgtccaga

SEQ ID NO: 461368 - DNA, 73 bp, Homo sapiens
acacgtggaggcggagctgtcagctcagatccgctacctcacccagtctattatcctcccagtccacaacgct

SEQ ID NO: 461369 - DNA, 144 bp, Homo sapiens
gtctgcgagtgaggtatgttttctgcacagctcctatcaacaagaagcagccttttgtgtgttcttcactgttacaggtggacaggttcctgtatcacatgcggctctccgatgacacccttttggacatcatgaggcggttcc

SEQ ID NO: 461370 - DNA, 100 bp, Homo sapiens
tgctggggaaggcgattggcatcgatctctccatcccttccgaggcccgacttcgatctttctcctggcctgccctccatgtcggggagctatcgtcgtc

SEQ ID NO: 461371 - DNA, 73 bp, Homo sapiens
aaaaggttgatctcatagacaagtttgtacatccaaaatcgagcctgcgtgctgccgaagcagggcgccgagt

SEQ ID NO: 461372 - DNA, 100 bp, Homo sapiens
tcagcgtctaccggattccgccccgggcctccaaccgcggttacagattgctatgctatgccttgtatgactaagacctcttaccaagaatacgtgtcag

SEQ ID NO: 461373 - DNA, 100 bp, Homo sapiens
tttaatttcagtgactgaattaaaaggtgtcaagaagctcagaatggaaacagagcaaatgcagcgttacaatcaaagacttattgaggaattgaaaaac

SEQ ID NO: 461374 - DNA, 75 bp, Homo sapiens
aaagagaccagttagcagatgcttgtgtttgtggagaaggtgctgcagagactttttcctcctgttccaagtggc

SEQ ID NO: 461375 - DNA, 75 bp, Homo sapiens
gtcacctactgtaccagagtttcagatctcatcctggccttgggtgtcctggcccaaagccggccggtgtccagg

SEQ ID NO: 461376 - DNA, 97 bp, Homo sapiens
gcagccatttatattgcttaggctactggtagaatggatgagtgataaattgatgagatgttttgaagacaaaagaaataatccgtttcagtttcgc

SEQ ID NO: 461377 - DNA, 75 bp, Homo sapiens
ggctactcggagggggaccagcagctgctgaagcgggtgctcgtccgaacgctgccaagaagagagaccaggagc

SEQ ID NO: 461378 - DNA, 90 bp, Homo sapiens
gctgtagaccggagctgttcctattcggccatcttggctcctccacaagtaccaaaaactgtggaagagttatgtgaaacttcgccacct

SEQ ID NO: 461379 - DNA, 96 bp, Homo sapiens
gcctggacaggaggaaccctgcttcagggatgacttcttagggggcaggggaggtagtcgcccaggcgaccggcgaacaggcccccccatgggcag

SEQ ID NO: 461380 - DNA, 98 bp, Homo sapiens
ccatgacgtcatagctctgcggaggtggaagttggggagctttgagagatgctgcccccacccccttaggcccgagggatcaggagctatgggaccag

SEQ ID NO: 461381 - DNA, 100 bp, Homo sapiens
ggaccgcagcgtcaatgacttacgccaagaagacgagcccacagcctcggtgccccccgagtcggacgtgtaccggatgctccacgacaatcggaatgag

SEQ ID NO: 461382 - DNA, 75 bp, Homo sapiens
aaggttgatctcatagacaagtttgtacatccaaagttcggctttccagtttggcagcagcactacaaatttcaa

SEQ ID NO: 461383 - DNA, 100 bp, Homo sapiens
gattgagtgggccccaaacggctgtgtgctggcagtgtgggacacctgcttggagatcgccacatcacagaatcgtatctatctcacagctgacaacctt

SEQ ID NO: 461384 - DNA, 83 bp, Homo sapiens
gagaggaagcagaagggctctgaaggttaatgttcgtgaagaaattgaagagttttttccaagaatgtggaagataaatcaag

SEQ ID NO: 461385 - DNA, 50 bp, Homo sapiens
aaacagaaagagactgcccggttgcagggagacagtgtttcacaaaatga

SEQ ID NO: 461386 - DNA, 76 bp, Homo sapiens
attaaccccacaaccatcacatccaccatgaaagctaagctgctgaagagacagagttttgccatgctgcccaggc

SEQ ID NO: 461387 - DNA, 99 bp, Homo sapiens
gttccccggcccacagtgggggtgtgcaaacccgagagaactggcctcccccactggcaggattgccatgagttgtggagtaagaaacggcgacgtcag

SEQ ID NO: 461388 - DNA, 76 bp, Homo sapiens
atggcaggtgggggcagcgacctgagcaccagatacagaattcgttgttgggaaggactggggaaacagctgtaac

SEQ ID NO: 461389 - DNA, 101 bp, Homo sapiens
ccatgatctacaggaacttggtagtagtcaatcagcaggagtttcaagaagtttttaaccgaagtgtcatgattattgcagcaacaaatagacctgatgtg

SEQ ID NO: 461390 - DNA, 83 bp, Homo sapiens
cgcaacccgataccatcggacaggatttctccgcctcagcccaacggggagactgtgccctgtccacggtgcctcctgcatgt

SEQ ID NO: 461391 - DNA, 89 bp, Homo sapiens
tctgggaaactcagcctgtgaccccagcgtgggtgaagataggatcaagatggccatgtggcaggtactatactggcaattgctggaga

SEQ ID NO: 461392 - DNA, 98 bp, Homo sapiens
gagtgtggacgagtagccagtgaagataatgaatgtcgaatgtgactgactagcagcttcattttgaacctgtggacatctctacagcaatgagtgaa

SEQ ID NO: 461393 - DNA, 100 bp, Homo sapiens
ctgctgggccctgaaggcagacgggataatgtggttggccaaggcctgttggtccatccagagtggtaaagtgttgagagaggagaaccagtgcattgct

SEQ ID NO: 461394 - DNA, 82 bp, Homo sapiens
ggaaagtttggctgcgcgggttcccccgaagttcagccagagcagctgagttccagataaaaactgtcagacccggcctgta

SEQ ID NO: 461395 - DNA, 83 bp, Homo sapiens
gaccggttctcagggacagtgcacgcagacaatgcagatcttcgtgaagactctgactggtaagaccatcaccctcgaggttg

SEQ ID NO: 461396 - DNA, 98 bp, Homo sapiens
gctgctgcgtgctcagccccagagcaggtgctttacaaggccaagtacggtccaatgtggatgtcctacttagggcctcagatgcacgtgaacctggc

SEQ ID NO: 461397 - DNA, 74 bp, Homo sapiens
aggcatgggggtccacactgcaatgtttttgtggaacatgactatatcatcatgtacatagaaaaatccaaagg

SEQ ID NO: 461398 - DNA, 75 bp, Homo sapiens
attttgctaccaagaaagccaaaggagtctccccaggacagtgctatcacccgggatattaaccgaacattccca

SEQ ID NO: 461399 - DNA, 74 bp, Homo sapiens
tgagtaaaagaatagctccgtgttatcaaggttttcctttggaatatggataaatacaccatgatacggaaact

SEQ ID NO: 461400 - DNA, 90 bp, Homo sapiens
cggcgcagccagagccaccagcgcagcgctgccatggagcccagcagcaaggtgacatctgttcccgagctgttcctgactgcagtgaag

SEQ ID NO: 461401 - DNA, 101 bp, Homo sapiens
aataaagaagaggctgcagaatatgctaaacttttggccaagagaatgaaggaggctgaggatggcattattgcttatgatgactgtggggtgaaactgac

SEQ ID NO: 461402 - DNA, 75 bp, Homo sapiens
ggcggcggctggactaaacaggtcacctgcaggtgattgaattactcagatatgaagatcatcatctaggttttg

SEQ ID NO: 461403 - DNA, 50 bp, Homo sapiens
ctttctatctcgagatcttcgatgaggtatccaatgaacctgggaatcgc

SEQ ID NO: 461404 - DNA, 100 bp, Homo sapiens
tcaggacagctgttccttggccatcccaaagctattctgggggcaacagagactactccagtggttttggcggcaagtatggcgtgcaggccgaccgagt

SEQ ID NO: 461405 - DNA, 100 bp, Homo sapiens
ggacaggcttgctgcttcctcctcctcggcctcaccgtgcaacacgcaggactacatctggcacaaggggatgcgctgcgagtccatcatcaccgacttc

SEQ ID NO: 461406 - DNA, 100 bp, Homo sapiens
aggaggagccgagaggagctgagcgagcgcggaaggagcatttcctccctctgctatttatacacggaaagacttactacagcgatctacccatattgcc

SEQ ID NO: 461407 - DNA, 51 bp, Homo sapiens
ctggggtctccagactgtttttggtccgtaaaagccctgggctcagccaga

SEQ ID NO: 461408 - DNA, 100 bp, Homo sapiens
gaaggatatcgacgtcgtgatccagaagtccagagctgaggactgcctgtttgcagcagtgactcttcgagaagacagtgccaagaggttggagaggagg

SEQ ID NO: 461409 - DNA, 101 bp, Homo sapiens
cttgcaacagtggccgcacgcatagtatctggagtccatctttcaccatcttctcctgagattgtactggaccgtgaccactcttcttccattggctgcct

SEQ ID NO: 461410 - DNA, 75 bp, Homo sapiens
ccggagctgaggagaacgactgggttcgcctgcccagcaaatgcgaaggccctcgggaccaaggatcacgtcatg

SEQ ID NO: 461411 - DNA, 75 bp, Homo sapiens
agagattcagtatcactcgctcccttgatgatcttgaggtcatcaagagagagggcacaggtacagagatgccca

SEQ ID NO: 461412 - DNA, 100 bp, Homo sapiens
aaagagtaccaagctggccggtttgcccgaggacttcggctacagtgctttagcaaagtggaagatgctttctacaaaggtgaactcaggctgaatgagg

SEQ ID NO: 461413 - DNA, 51 bp, Homo sapiens
ctcggaaacatggtatcactcagtgcacagccagagaacaacacatcacac

SEQ ID NO: 461414 - DNA, 100 bp, Homo sapiens
taaccccaaaattgagtcctacgctgctgtgaatcacatatcccaactgtcagaggagcaggaatgtcccagcggaattgtcaatgaggagaacttcaag

SEQ ID NO: 461415 - DNA, 74 bp, Homo sapiens
aagaatcagctggggcagaagcgcgtggtcaagggtgtccgcaatgttgccagtgtctgtctgcagattggcta

SEQ ID NO: 461416 - DNA, 98 bp, Homo sapiens
tttgggattagtgaagctactgcctttgccgccagcgcagcctcagagtttgatctcaggtgtacatgcaccccagcctgtcaccgcccagcaccatg

SEQ ID NO: 461417 - DNA, 95 bp, Homo sapiens
tgaaatggtcattgaggaagcaactatagattcagcaacaaagcaaacctctggttcaaaccttgtactactcagctgatcacaagctgcttgat

SEQ ID NO: 461418 - DNA, 74 bp, Homo sapiens
tagatattgtcctagatgctggagtgagaaagatcagtctaaagaaaaggagaagaaagtgaaaaaaacaattc

SEQ ID NO: 461419 - DNA, 100 bp, Homo sapiens
aacttgaatgggtgtgccaaattccaaaagttggttgaatctggcgatgtggaacccatggatatggagggctgactatatacaccatgttttttcctgg

SEQ ID NO: 461420 - DNA, 82 bp, Homo sapiens
aataaaccaccaactgttaggtttttatccaaaatgtttcatccaaatgaaatttctgaataaattggcagaagaacgcaga

SEQ ID NO: 461421 - DNA, 73 bp, Homo sapiens
agaaaatcaaaagaaacttttgcccttatcagtaacacctgagaaactaatctggattcactccctctggttg

SEQ ID NO: 461422 - DNA, 75 bp, Homo sapiens
aatgactggaaactgattggaaactctttgggaaagccactcgaaaaggttcagcttgttggtttagatgaggag

SEQ ID NO: 461423 - DNA, 74 bp, Homo sapiens
ggcctgcccttcaccctctacatggtggatctccttacgtagcagccaaaataaatgaagcaaaagacttgcta

SEQ ID NO: 461424 - DNA, 74 bp, Homo sapiens
ggaattccggcggctgccgtgactccagtgcaaattctgcttctcagaagatgcactattatagatactctaac

SEQ ID NO: 461425 - DNA, 99 bp, Homo sapiens
cttggagcggcttttgtctacttggctgacctcctgatgcctcacttggcatcctctggtatcacgattccaaaacccccaaagccaccagataagccg

SEQ ID NO: 461426 - DNA, 97 bp, Homo sapiens
ccgtgtcctttctggaatgacatcagccagtgtggaagaagggactgtgctgtcaaaccatgtcaatctgtatatgagtagaccagtgatgagtggc

SEQ ID NO: 461427 - DNA, 148 bp, Homo sapiens
acgataaatttggattaaggaacagcgagctgtttgacccctttgacctcttcgatgtgcgagactttggaaaggattacacagtgcgtggcctcctgggcaaagctacagatgacttccgtgaggacgggaggctggtagagaagac

SEQ ID NO: 461428 - DNA, 107 bp, Homo sapiens
tggctctgaaggcgaacgcttcgctggccatttaggagctctgctcaaagccagacgcagtgtttggccagcgcttggatgagactgtggcctatgaacagaaattc

SEQ ID NO: 461429 - DNA, 98 bp, Homo sapiens
tttaactctccttatgctgggtgaaaacaaagtacgaggatgtcgtccaggaaagattgtgcagatgactgaagcagaagttcgaggcttatgtatca

SEQ ID NO: 461430 - DNA, 75 bp, Homo sapiens
tgacagctgcagttgctccccgcccccgagcagccgagcaacttgagttggtggaaccaagtggctggattcatg

SEQ ID NO: 461431 - DNA, 97 bp, Homo sapiens
aagaggactgggaccgggacctgctcctggacccggcctgggagaagcagcagagaaagggtgtgactcttacagacctgaaggaggcagagaaggc

SEQ ID NO: 461432 - DNA, 88 bp, Homo sapiens
gcgaatatcgtcatcgttagaaggcacaccatatgatccctataaggcactgtggtttgagcggaagaaggaccctgttaccaaggag

SEQ ID NO: 461433 - DNA, 83 bp, Homo sapiens
caactgcccagcgtgaccagtggccacctctgcagtgtcttccacaacctgggtggatcagtacaagggaaagcgggatttgg

SEQ ID NO: 461434 - DNA, 75 bp, Homo sapiens
agttctgcgctgctcccgttccccctccccagagcaagtatcagaggttctggtgatagcagtcattcacaatct

SEQ ID NO: 461435 - DNA, 75 bp, Homo sapiens
gttagtgtctggagccatgaaggccttgtgctgaccaagctgctcacctcgaatggcattgtgcccatcgtggag

SEQ ID NO: 461436 - DNA, 51 bp, Homo sapiens
cccagacaagatggacaccgcggaggaagagacaaagcatggaggacacaa

SEQ ID NO: 461437 - DNA, 90 bp, Homo sapiens
gcgccccgcagccccccaacatcctgctcctgctcatggacgacgtgtccccaggtgtcattgccaacccctttgcggcaggcatcggcc

SEQ ID NO: 461438 - DNA, 112 bp, Homo sapiens
tacgcctatctcttcaagtacatcataatcggcgacacagatgggccatcaactgagaaagaccttgacgaaaagaagaaagaacctgcaattacatcgcagaacagccctg

SEQ ID NO: 461439 - DNA, 88 bp, Homo sapiens
ttgggttcatctttcattgctgcaaggaacttccatgcctctaacactcatcttcaaaagactgggacccctcatggtgactgaagcc

SEQ ID NO: 461440 - DNA, 75 bp, Homo sapiens
cgaggcctccgaccgccgcgccccagacttgaaactgcatctgcagagcactgattatggtaacttcctggccaa

SEQ ID NO: 461441 - DNA, 75 bp, Homo sapiens
ggggggattctcgacctgctaacagaactggaccttttcggacagtcattttgtttactcattcagccctgttgc

SEQ ID NO: 461442 - DNA, 82 bp, Homo sapiens
ctatgtcatcaacgggcgcaccaagctcagagcccgggcgctgtggaagagattctagaccgggagaacaagcgaatggctg

SEQ ID NO: 461443 - DNA, 90 bp, Homo sapiens
agaggacactgaagatcacagactctctgaacagcaacatggggtgcaaagtcctgctcaacattgggcagcagatgctgcggcggaagg

SEQ ID NO: 461444 - DNA, 100 bp, Homo sapiens
cttgggtgactacctagaactgcatatactgcacggaacgtcatgaaggaccaacgcctggttttccatagtaaagttaggtcatctggttatgcgtcag

SEQ ID NO: 461445 - DNA, 100 bp, Homo sapiens
tatttcaaccataaagacatcttaattgggcacgaaagagttgatattcactgatggactccaaagaatcattaactcctggtagagaagaaaaccccag

SEQ ID NO: 461446 - DNA, 82 bp, Homo sapiens
cagcagcgcgggagagcggactcccctcgccaccgcccgagcccaggtttggtgcacctcgatttggaggaagtagggcagg

SEQ ID NO: 461447 - DNA, 83 bp, Homo sapiens
agggaaatcgtgcacatccaggctggtcagtgtggcaaccagatcggtgccaaggtcagggaagtcaaagatgcatccctgag

SEQ ID NO: 461448 - DNA, 87 bp, Homo sapiens
aggagggtcgacaaggcaaagaacctgaagacgacccaaaagggtacctaggttaccatgccagcaatgattccttttgagtttctg

SEQ ID NO: 461449 - DNA, 100 bp, Homo sapiens
gaacccaaccagaagattgtcctcaacttcaaccctcactttgaaatcgagaagcacgactgcaagaggatttgatgaagatgttaaagcgaaagtggag

SEQ ID NO: 461450 - DNA, 122 bp, Homo sapiens
attttagcaaagttccaaagctgaagacagttttccagaaagaaaatgtggagcctgcagagccaggccaggcatggggccgccagtccccccgacgtctggaggactcaagcaatggagag

SEQ ID NO: 461451 - DNA, 98 bp, Homo sapiens
cacaagtatgtatatgaatgatggctatgcaccacctgatatcaccaactcaatgtctcaggctgtgcagacaaacggaactcaaccattaagcaaaa

SEQ ID NO: 461452 - DNA, 80 bp, Homo sapiens
gcctgccacacattgttcccaatgtgctattggcaaagagagagggtccctgtgttcatgatgaggactctggcctatcg

SEQ ID NO: 461453 - DNA, 80 bp, Homo sapiens
gtgtcaccgccggaacctggcgcagccgccgccgcgccgccgtcgctctccaacgccagcgccgcctctcgctcgccgag

SEQ ID NO: 461454 - DNA, 100 bp, Homo sapiens
gtcatagaaactgatgcagaagatggaatcaaggggtgtggaattaccttcactctgggaaaaggcactgaagttggcctgtttaaagaagaaaacccgt

SEQ ID NO: 461455 - DNA, 100 bp, Homo sapiens
gtggacgccctgagctcccattaggagccgctggctgcggcagcaggggactagcgtgagaggtagaacatctgggaggtcccttgctgaccactggaag

SEQ ID NO: 461456 - DNA, 82 bp, Homo sapiens
ctggagcctcagttggaagcagccgatccagcctgcggagcctgtggggcagaaatgagccgtcagactgctacagcattac

SEQ ID NO: 461457 - DNA, 99 bp, Homo sapiens
acctggtatgccagatgagaatgacaggccctcggtgttccagcagcctgtcatcttcctgggagcggatgtcacacaccccccagcaggggatgggaa

SEQ ID NO: 461458 - DNA, 74 bp, Homo sapiens
cttcctcttcagtcatcagtatgaagactcttaagatgacagaaggtgatttttctggtgatcgaggacttccg

SEQ ID NO: 461459 - DNA, 101 bp, Homo sapiens
cctggaggtgggcaaggtgatccagcaaggtcggcagagcaaggggcttacgcagaaggacctggccacgagcctaaaaccattggccaaccgtcacgcaa

SEQ ID NO: 461460 - DNA, 82 bp, Homo sapiens
cccctcttcgttggaggaatgtgccaaaactgcaagattgtgccccagttacccccagaagctgctggttcctgtgtggatc

SEQ ID NO: 461461 - DNA, 100 bp, Homo sapiens
ggagtgggacatgggaaggaggctgcagatcgacctgggaaagggaatgcagagagcaaccaatgtcacctaccaagcccatcatgtcagcaggaacaag

SEQ ID NO: 461462 - DNA, 100 bp, Homo sapiens
agcaggatctgtaaaagcataattgaatttgtttcacccccgtggattccagtgggcccgacagcgcaacagctgttccatttcctccaagtcaccggct

SEQ ID NO: 461463 - DNA, 97 bp, Homo sapiens
cttgacgttcctgacgaagcaggagatcctcctagttgtggaaagtaaaaatgtagccctaccaaaaggaactattgtactggcttctccaggctgg

SEQ ID NO: 461464 - DNA, 82 bp, Homo sapiens
cgacgactgtgacgaggacgaggaggcagccacggggcccctggtgagtgtgtccgcttgaaaccaactgacatacagcccg

SEQ ID NO: 461465 - DNA, 100 bp, Homo sapiens
ctcgcgggtgaccgaaaggatcatgaactagtgacctggaaagaagtgtatgctgacttgtaaagtgaagaagccagtggtgctgcgggtgttcttttgg

SEQ ID NO: 461466 - DNA, 90 bp, Homo sapiens
ctttaagaattgggatgggtccccagtgagctcctggattctgctggtgtgtcaaggatgccacaatgccatcgacccagaagtgcagcg

SEQ ID NO: 461467 - DNA, 76 bp, Homo sapiens
cttatgcagcctattgtcagcaggaagcaaacatggacaggcaggagtgcagatgtgatctcggcacaccgcaacc

SEQ ID NO: 461468 - DNA, 115 bp, Homo sapiens
cgccatcttggatccgcgggacaagaaaattcatgcgacaatgcagatcttcgtgaagactctgactggtaagaccatcaccctcgaggttgagcccagtgacaccatcgagaat

SEQ ID NO: 461469 - DNA, 100 bp, Homo sapiens
tttctttggacccttgacatcaaccagttactatttgcagtgtttggccagcgcttggatgagactgtggcctatgaacagaaattcggcccccatctgg

SEQ ID NO: 461470 - DNA, 82 bp, Homo sapiens
gtcggcgagcccccgcggcgacaggaacctacaagcagcaattggcgcctattatgactttgagagcccaaacatcagtgtg

SEQ ID NO: 461471 - DNA, 96 bp, Homo sapiens
gacggggacaggcccaagatcctgatggacagccccgaagacgccgacctcttccactccgaggaaatcaaggtactatttcttgatcatccaaaa

SEQ ID NO: 461472 - DNA, 98 bp, Homo sapiens
ccggagtggggtgtcggcgcctcattcgggtggagctgagccggagacaggtgtccaccccccagggttcctgacccctgcccctggacagcgacccc

SEQ ID NO: 461473 - DNA, 113 bp, Homo sapiens
agacgatctcggagacgagtggtgggagaaccagccgactggagcaggcagcagcccaggacaatcatctatctctccttggtgtatgtgcttggccatgtgatcaagtcctt

SEQ ID NO: 461474 - DNA, 100 bp, Homo sapiens
tactactcccagaggtagatcgacagaatctatgtactttcatcagcgcggccagtaagtttgcacagctccagtgtctgtggaagacgagagactcagg

SEQ ID NO: 461475 - DNA, 128 bp, Homo sapiens
agagagagagcttggttaacttgggagaaagtttcatctgtggatggagtattggatggaactccaacctcgaaaacatttgaacacgtgaccagtgaaattggagcagaggaagctgaggaagttgg

SEQ ID NO: 461476 - DNA, 50 bp, Homo sapiens
attttatctgccacgacccagaaggtgaaggtgctaaaggagaagataga

SEQ ID NO: 461477 - DNA, 92 bp, Homo sapiens
caccgctgccctcagctccgagtccagggcgaggtgatgtgtccaatctagatcccaacttctcatttgaaggcaccaaactggatgtgggg

SEQ ID NO: 461478 - DNA, 50 bp, Homo sapiens
cccaggctcgagttgatgcccacaggaagatcagcccatctacttggcag

SEQ ID NO: 461479 - DNA, 75 bp, Homo sapiens
gggtgaggtacaggctcagtctgcggccaagactccgtcctgcaaggtgtctgatgatttgtgagcctcaagtga

SEQ ID NO: 461480 - DNA, 88 bp, Homo sapiens
gacggcccggacttcctctcagaagaggaccgcggacctacaacacagcagtcccctcaggatgagcaggaaaagctcttggatgaag

SEQ ID NO: 461481 - DNA, 75 bp, Homo sapiens
tgtgatcagcgttgcagctctcccagcagccctggacagtggtgcagctattgctggagtttaccgagcagcagg

SEQ ID NO: 461482 - DNA, 75 bp, Homo sapiens
gtgacagcaatcagctggcctggtttgatactgacctgtaaatcatcctttagaactgataaatttcaaacggaa

SEQ ID NO: 461483 - DNA, 98 bp, Homo sapiens
cggagcaacgttcgcgtcatcacggacgagaactggagagaactgctggaaggagactggatgatagaatttactatactggcaattgctggagaaga

SEQ ID NO: 461484 - DNA, 98 bp, Homo sapiens
gccggccagaagcgggcggcgcgggggagatggttgcagctgctccctggtggttacctgtgaaaggcgctaactggagacacccagaagggcctgac

SEQ ID NO: 461485 - DNA, 75 bp, Homo sapiens
tcggaagtcaagagactcagagtcccatagagtgaagttcccagaccctacgccccgctgtcaggcagcccgccg

SEQ ID NO: 461486 - DNA, 83 bp, Homo sapiens
aatcttccaagtccaaggatgtcaattctgtggtgttcttggtcacacatttatggagtttctgaagggcagtggagattact

SEQ ID NO: 461487 - DNA, 90 bp, Homo sapiens
gccaggtagagtgaagtcctacagagttatcaggttccagaccctgccttctcttctgaaaggtttgatctgtggatgaaatgaatcatg

SEQ ID NO: 461488 - DNA, 101 bp, Homo sapiens
ccctggagctgcaggccaagatggaccacctggtcctatgatcatgcaacagatgagtgaccaccgctacgacaaactcactgtgcctgatgacatagcag

SEQ ID NO: 461489 - DNA, 100 bp, Homo sapiens
tttagagcaggtgtatgatcttttggaggaggaggatgaatttgatagagaggttcctgttaccaatgcaattatttcgtggccttttgcctgaattatt

SEQ ID NO: 461490 - DNA, 50 bp, Homo sapiens
ctgagtggcactgggtaaaacttaagagttggacagtggaggaccttcag

SEQ ID NO: 461491 - DNA, 89 bp, Homo sapiens
gcgggcgcgcgagttcagccgcctggcaggatagctagcggccaggagaaatacagtggaaaatgcaaaacaacgaaattataaagcct

SEQ ID NO: 461492 - DNA, 156 bp, Homo sapiens
acagatgtcatcttgtgtgtggacattcaggaattctcctgccaccgcgtggtgcttgccgcagccagcaactatttcagccacataaagaagatccctaatagtcatttctcaacaattatatagtcaactgatgtaacaatggtactaatattg

SEQ ID NO: 461493 - DNA, 96 bp, Homo sapiens
aagacaggaaaataattaaatattcttaccgagattagtgatgatgaaccaggttatgaccttgatttattttgcatacctaatcattatgctgag

SEQ ID NO: 461494 - DNA, 124 bp, Homo sapiens
gccttttgcctcccaccgtgattctgaggcctccccaaccatgtgcaattggagtgaggattctttggacaccagcctgagagctcacggggtccatgccactaagcatgtgcccgagaagcgg

SEQ ID NO: 461495 - DNA, 100 bp, Homo sapiens
aatcgctctctcccagatatccggcacccaaaaaaggaagctgttgaagttattgaagtacctgttgctatattctaagaaattaaaatgtccagaaatc

SEQ ID NO: 461496 - DNA, 75 bp, Homo sapiens
cggcggcgtgatgttctcggcaggagcggagagtttgctccaccaggccagaagcctggagagttgatgacctga

SEQ ID NO: 461497 - DNA, 75 bp, Homo sapiens
gaaacccccaagatgggcatctattacattccacaaagaatggctcaagaagtactgacacatttaaaggagcat

SEQ ID NO: 461498 - DNA, 82 bp, Homo sapiens
ccagaccctggagcctcagttggaagcagccgatccagcctgcggagcctgtggggcagatggcattggagtcaagagagat

SEQ ID NO: 461499 - DNA, 74 bp, Homo sapiens
aaactgtgctcatagtcctaagggtagcttcctattgaagtttattcggaagatgacaagtaggcattggtgtg

SEQ ID NO: 461500 - DNA, 82 bp, Homo sapiens
aattgtgtactagcattccaagcggacaaggcaaaatctcagcaagttcggacctctagtacaataaggcgaacctcctctt

SEQ ID NO: 461501 - DNA, 50 bp, Homo sapiens
ctcagatccagtgataattgacagctagagaccgttggatggcagcttaa

SEQ ID NO: 461502 - DNA, 50 bp, Homo sapiens
cgactatgaagaattcagcaaagatcacacgcgctgcaacgtgtggattc

SEQ ID NO: 461503 - DNA, 100 bp, Homo sapiens
ccacatccaggactccttccacagaggtgtgatgaatgcagactctgctaccattttggctgtttggatcctcctttgaaaaagtctcctaaacagacag

SEQ ID NO: 461504 - DNA, 75 bp, Homo sapiens
gtcccaggctttccaggagagaggccttcccttcttcttggtggtgttcttgagtaagataatctggactggccc

SEQ ID NO: 461505 - DNA, 100 bp, Homo sapiens
ggtggtttggacgccggcggagacgcgggcgaggtaagcacagacacctccagcttgcgaagggcagatccgaaaggccggagtgcgctgttggctgata

SEQ ID NO: 461506 - DNA, 87 bp, Homo sapiens
gcagagtccccgtacgcctacagtaacgatctgccgacaccccaggccatcgagccccaggccatcgtgcagcaggtcccagccccc

SEQ ID NO: 461507 - DNA, 75 bp, Homo sapiens
ggagctgttcctattcgggcatcttggctcctccttgatgtctagtgaactagaaaatcacccaatgaatgaaga

SEQ ID NO: 461508 - DNA, 100 bp, Homo sapiens
gtggcatcagtccccactgcggtccacggccaggtgaacaatggtagtaagcattaataatgtctttcatctttgagtggatctacaatggcttcagcag

SEQ ID NO: 461509 - DNA, 96 bp, Homo sapiens
cctgagcagagctctccgggttccccggctcgcggggcccggcgaagggcaggtgtggacactgccagcggctgcagccgacttggaatgacctgg

SEQ ID NO: 461510 - DNA, 97 bp, Homo sapiens
gaattcacacagaaaagtggaggccaaggcgtgagaattcctcaatgactgccctctaaaggaagaggagctggaggagggaatgatattcagtggt

SEQ ID NO: 461511 - DNA, 51 bp, Homo sapiens
ttcatggacagctaaatttagaaatatacgtttgaaatggtttctgaagat

SEQ ID NO: 461512 - DNA, 78 bp, Homo sapiens
aaacatcatggatcaatctcaaacaaaggtttcacaagaagtactgtggctgtatacagtacctgtatgctggttgtt

SEQ ID NO: 461513 - DNA, 100 bp, Homo sapiens
agatgatacctttgatccagaacttgcagcaacaatagctccttgctctgctatggcttaccatcatgacagcagacggatatttgtgggccaggataat

SEQ ID NO: 461514 - DNA, 75 bp, Homo sapiens
ccggagcttctcagaagacagagggttttcttttgagagatgacctgatcagagccatcaagaaactaaaggcac

SEQ ID NO: 461515 - DNA, 50 bp, Homo sapiens
caactgtgaagccagatgataagattcttacgctgtatgacagtattaat

SEQ ID NO: 461516 - DNA, 75 bp, Homo sapiens
ttgccctttgatggtggccctcttgatccccggcttgctgaagtcaaagatgatcggctgaatgtaacagaggaa

SEQ ID NO: 461517 - DNA, 100 bp, Homo sapiens
gggcgcagggaaggagggcgtccgagtcaacaaccgcttcgagctggttgaaccatgattccggtgacagagctccgctactttgcggacacgcagccag

SEQ ID NO: 461518 - DNA, 75 bp, Homo sapiens
tgagccccagttcagtgccatcatgcaggaggagatgttaaagtaacccatcttgcaggacgacattgaagattg

SEQ ID NO: 461519 - DNA, 75 bp, Homo sapiens
tcacaacaggtatccagcaatgaggacctggtccctggccaaagatttatttctcttgacaaccaagggcctccg

SEQ ID NO: 461520 - DNA, 75 bp, Homo sapiens
ttcgcccgcggctcctgagggatcggtctcagccgcgcggtcctcatcaccgggggcatcgtggccacagctggg

SEQ ID NO: 461521 - DNA, 95 bp, Homo sapiens
aaaaagggactgctgcagagactcttcagtcgccaagaggtgaggtcctggcagggtgatggctcccccatggccaatggtgcaggggccgtggt

SEQ ID NO: 461522 - DNA, 75 bp, Homo sapiens
gagagcgccaggtgcttagcaggtctgaatttcctgctgctgttcacaaagatgctttttatctttaactttttg

SEQ ID NO: 461523 - DNA, 75 bp, Homo sapiens
aataatgctgatgatatggatagaattatgacgctaggccacaaaaatcgttatcctaccttgcggatagagaag

SEQ ID NO: 461524 - DNA, 100 bp, Homo sapiens
cccagagtgacctagaacagaccaagacacgacatctagccctgaatctgcaggctgtctgcggacctggtttcagcgctggtgggactgcagccggagg

SEQ ID NO: 461525 - DNA, 75 bp, Homo sapiens
ctcggccgatgaagtgcagaggtttttttctgggattccagcagaagttcaccttccacagcaaggagattgtgg

SEQ ID NO: 461526 - DNA, 100 bp, Homo sapiens
gcctgagcaagcggaggacctacgccggcctggggtggatgtgaacactgaccggaagatcagtgccaaggagatgcagcgctggatcatggagaagacg

SEQ ID NO: 461527 - DNA, 100 bp, Homo sapiens
aactacctggaggacttcggcggagggcggttcatgttcatggaggagggtgccaacaagacggtggagccgagagctgccgcttacaaacacgcagatg

SEQ ID NO: 461528 - DNA, 74 bp, Homo sapiens
gcagttgcgtgttgttcagaaagatgggacctgcaaaggataaactggtcattggacggatctttcatattgtg

SEQ ID NO: 461529 - DNA, 98 bp, Homo sapiens
catccaagacagctgaacctttgaaattcccaaagaagagaggtcccaaacctggcagcaaggctagacagcaacaagcagaattggcccaacaggaa

SEQ ID NO: 461530 - DNA, 100 bp, Homo sapiens
ggctgccgagaaggagggaggggaaacacaaagccggctacgcgctgcgaggaacttagtgatttggcccgtgaccctccagcacaatgttctgcaggtc

SEQ ID NO: 461531 - DNA, 100 bp, Homo sapiens
gattgagacggaccactggcctggtcccccctcatttgctgtcgtagaacgtggaatcttgtagaaggaagatcagcattcataaaaaatataaaacaaa

SEQ ID NO: 461532 - DNA, 50 bp, Homo sapiens
gtgcgccctcaacctgctttacaccgtacggacattgctgcaggagaaga

SEQ ID NO: 461533 - DNA, 100 bp, Homo sapiens
tctctccctggggctgcatgtagaagtcgagccgtctgtatttttcacccgagtcagcaccctcccagcaaccaggtggagctggaggtcacgctgccag

SEQ ID NO: 461534 - DNA, 74 bp, Homo sapiens
aggtggcagccatctccttctcgatcccggagttgaagcaggacatcagcatccccgactactgcagcctgggc

SEQ ID NO: 461535 - DNA, 98 bp, Homo sapiens
tagaagagactaatgctgtgcttcaaaaggtcattaatagcatctgggctctatggctacaatgccaccctggtgggagtactcatggctgtcttttc

SEQ ID NO: 461536 - DNA, 142 bp, Homo sapiens
cttgcaccaagaagtggaaaataaagaagagaaatgagaaccatgtttgtattggctgtctataaaataagaggtcataactccatgcaggaagctcatcttgtgtgctgataacagaaaagaaatggaagattggattgca

SEQ ID NO: 461537 - DNA, 100 bp, Homo sapiens
gcggcggttgcgggggggaagtgactgggcggtgccggcgccggagacgatgccgttattccagactccatcatttctcgtggtgttcaggtgctcccac

SEQ ID NO: 461538 - DNA, 100 bp, Homo sapiens
agcattcctgtgacctctgcctaccatccataaaatactcattcccctctcaggttttactcaagtgaacatgaatacagtggattaaatatagttcgac

SEQ ID NO: 461539 - DNA, 73 bp, Homo sapiens
ccacttgcttgggatcctttatcctggtcatcttctatttccaaagcggcggcggcggcgcccgggagccgga

SEQ ID NO: 461540 - DNA, 101 bp, Homo sapiens
atggtcagaatgctgctgggccctctgcagattctgtaactgaaaagttgggtatctacagccattggttgctgttcaggtcagctttgctcctaacaaca

SEQ ID NO: 461541 - DNA, 80 bp, Homo sapiens
cgcagaaaggtggggcagagctcatctgacgtggcatcagccccattgacaaaccttcagattctctcagtatagggaac

SEQ ID NO: 461542 - DNA, 101 bp, Homo sapiens
ataaaaaggagcaaaagaaaaaagaatgggtcaaccaagaacgtcaaacactccaacgattgagagcatttaaagattggtgatttacaagtcaagttaaa

SEQ ID NO: 461543 - DNA, 75 bp, Homo sapiens
gtcggtgctccggggaggtcacctgacgaggaggaatttatgcaaatattctcatgaggttctctcagaagagaa

SEQ ID NO: 461544 - DNA, 101 bp, Homo sapiens
agagaacatgcattaacatcaggcacgataaaagccatgttgagtggcccagctccaaaaggaattcttcatttgtctcctgatgtttatcaagagatgga

SEQ ID NO: 461545 - DNA, 73 bp, Homo sapiens
agccattgcagtggttatagcgatccttccagttttgctgaagatggttgaagatgacagcgatgcagagacc

SEQ ID NO: 461546 - DNA, 101 bp, Homo sapiens
aagcccgcgcgccgctgcatcccgcgtccagcacctacgtcccgctgccgtcgccgccgccaccatgcccaagagaaagggtgaggtggctttgaccccgg

SEQ ID NO: 461547 - DNA, 75 bp, Homo sapiens
ataatattctcttcagagattctgcaaatgcgacaagcctcccaggtgcaggtgatggtcctaccagtgtgtctg

SEQ ID NO: 461548 - DNA, 80 bp, Homo sapiens
agtgcgaagaagctgcagccgcacctggccaaggttatggctgcagcttcgattgccaatattgtaaaaagttctcttgg

SEQ ID NO: 461549 - DNA, 74 bp, Homo sapiens
aaagagaagatgaagaaacccagcttgatatgttggaccctaataggagtattcataccagcagcagcagcagc

SEQ ID NO: 461550 - DNA, 101 bp, Homo sapiens
gaactcatcagccgcatcaaacagagtgaactttctgccaagatgcgatccagacaaagacggtagctcagtgcgttgagtattattacatctggaaaaaa

SEQ ID NO: 461551 - DNA, 95 bp, Homo sapiens
atggcacttcattggccacctacagaaacaaaatgtcaacaaattgatggtaagaatacccggacttcagatacgttaagcaagcaacagcagac

SEQ ID NO: 461552 - DNA, 88 bp, Homo sapiens
gatcccaaatacaagaagatattagaagactcatgtatggttactatactggcaattgctggagaagattttgcaattgttgcttctg

SEQ ID NO: 461553 - DNA, 98 bp, Homo sapiens
gctgacaggggggcctggccgcgcagccggttctggcctataggaacaagacattttcagtaatggaagaaggagcttccaggctggggaagatcatc

SEQ ID NO: 461554 - DNA, 108 bp, Homo sapiens
agaggaggatttcagatctagccagggtgaacgcccgactgcaagctggaggagaatgaagtcactgagttctttgtgaccctggagaaggatccccaacaagaagac

SEQ ID NO: 461555 - DNA, 75 bp, Homo sapiens
aagcaaatgagctgatggaagatctgtttgaaactggagacccaaaggagtaaaggagcaagatgtgtacatctg

SEQ ID NO: 461556 - DNA, 75 bp, Homo sapiens
tacctgcaggcctcctacacctacctctctctgaccgccaggacctggagcagccggaccgggtggacatgctgc

SEQ ID NO: 461557 - DNA, 75 bp, Homo sapiens
actattacccccagtatctgcaagccaagagtccctgtgaagcaggaagagtgagggcaggttcactgcagctca

SEQ ID NO: 461558 - DNA, 75 bp, Homo sapiens
caggaatttatggtcgcctttttgaatgaggcgtttaaatgcagaattgcaggcaaaaacagctgacgtggttca

SEQ ID NO: 461559 - DNA, 88 bp, Homo sapiens
tgcgcttggggatcctctgtacgcccgttcactggacctcagcagccatgtcgaagccccatagtgaagccgggactgccttcattca

SEQ ID NO: 461560 - DNA, 75 bp, Homo sapiens
ctgaagagcgacaagccgctggcagccgcggatctcaccgccgctcaggctcaagaggtttggatatggaccttc

SEQ ID NO: 461561 - DNA, 100 bp, Homo sapiens
agatggtcaggtctggagctcgaccgggccaggagaggagttcattacttcggaagtggtacaatttaatgatacaaaataaggatgaccttgccagaat

SEQ ID NO: 461562 - DNA, 90 bp, Homo sapiens
taccgggttttggaggctggcaagattgggatatttgagagtccaactggcactttgccaccttccagagaagaggtacgagatgacaag

SEQ ID NO: 461563 - DNA, 100 bp, Homo sapiens
aaaaacctcaaaatatgatggtggttggacagtcagcatttgcagactttgcacaacattctgaaattttttggttattgtaatgatgttgatcgggagt

SEQ ID NO: 461564 - DNA, 50 bp, Homo sapiens
gggaagagctgggtcgactcaagactggcacagcctccaggttggcgggc

SEQ ID NO: 461565 - DNA, 83 bp, Homo sapiens
gctgcaggccagagagggcctcgggaagagatgcgaggatgacaaggttctagtaaataccgcttgctgtgttttgatgttgg

SEQ ID NO: 461566 - DNA, 75 bp, Homo sapiens
caacctcggcctgagacaccggaggaccggcgtccagcctgcatgccgtgcggactgcacccaccagcaaggtga

SEQ ID NO: 461567 - DNA, 74 bp, Homo sapiens
gaaataaagatcagtttggaagagcagttaaagaaagagactgctgctaaggcacctacaaaggcagcacctaa

SEQ ID NO: 461568 - DNA, 50 bp, Homo sapiens
tgaaggagtgcagaggcatcacctgaaagattctgaagacaatccccaaa

SEQ ID NO: 461569 - DNA, 90 bp, Homo sapiens
ccggagtgcgcagggcgacggccccacctccggccactgggacggcggcgcggagaaggcaggctgtggaaaatctctgttctcacaaag

SEQ ID NO: 461570 - DNA, 105 bp, Homo sapiens
gatgcctatgtattccctggggatggcgcatcacacaccaaagtgcaccaattccagctggacatcactgtgaaaatgggacgggataaagtccgagaaatgttt

SEQ ID NO: 461571 - DNA, 76 bp, Homo sapiens
tcgacttcatgctcggcgccaaaggtcactttcatgaattcaaaggcaatttaccagtgatttctgggtgctgggg

SEQ ID NO: 461572 - DNA, 85 bp, Homo sapiens
cctagtcgtggccggaggagtctcagagctgtcagaaaggtaactgtgacatttgatgatgtggccttatatttttcggaacaag

SEQ ID NO: 461573 - DNA, 51 bp, Homo sapiens
cctcaatggattggtttacataggtcaaataaagagttctatctgtcttct

SEQ ID NO: 461574 - DNA, 80 bp, Homo sapiens
caggcattgatctaagtgtgtgcacacaatgggaccacttgtacggtggctgaaagtgaattttagtgaagcatttattg

SEQ ID NO: 461575 - DNA, 100 bp, Homo sapiens
atgatttcctacatgatcgatggccagacacctgtgctgccccccaccatcaccgaccagatccggctctgggagctggaaagggacagactccggttca

SEQ ID NO: 461576 - DNA, 50 bp, Homo sapiens
caagatggtgcagaagaagaacgcgattgcagagggaatggcatacatcg

SEQ ID NO: 461577 - DNA, 83 bp, Homo sapiens
tgtgaaccaccccccgtggataggaacctcaagccagacagaaaagctgtgtcgactctacaagtttattgaacagaagggag

SEQ ID NO: 461578 - DNA, 50 bp, Homo sapiens
aagatcgtggagacactgatccagcacaacggaaagatgctgaaggatgg

SEQ ID NO: 461579 - DNA, 75 bp, Homo sapiens
tcgtggacgtcactggccctggtggggattgacagccacgggaagtgatgaacggcagcagccactcaccaacag

SEQ ID NO: 461580 - DNA, 83 bp, Homo sapiens
tggaagggccgctttttttgcagagtcagcgctttgggaccaagcaaattgtggctactaatttgccccctgaagatcaagat

SEQ ID NO: 461581 - DNA, 101 bp, Homo sapiens
attagagcagaaggattgcaaatggagaaagaggtacttgagctggatacactggtggataatttatctattgatccttcctcgggggacatctgggtagg

SEQ ID NO: 461582 - DNA, 100 bp, Homo sapiens
gcgcatctggctgcagctctgcggggcgcaggaggcggtgcacagcgccaaggctcagtttatgaacctcttaaaagcattaatcttccaagacctgata

SEQ ID NO: 461583 - DNA, 87 bp, Homo sapiens
aaaattatccgactcctcggaccagcaggacagagttgtctgctggttctcagcttgaagaagattctgcagtccttattgatcctt

SEQ ID NO: 461584 - DNA, 75 bp, Homo sapiens
gggaacgtgcgcgtgagtcgtgagctggcaggacacacaggagtatgcgaccagtggttggaacctgaatgtgat

SEQ ID NO: 461585 - DNA, 83 bp, Homo sapiens
gtcggcggctcagttgtccatgaccctgaaggtccaggagtacccgaccctcaaggcacaaatcctgaagagcccgtgggcgt

SEQ ID NO: 461586 - DNA, 83 bp, Homo sapiens
ggaaccttaccctgaggtagacatctttagactcatcagaacttcctacgaggagtggtcattcactgtaaccacaggatccc

SEQ ID NO: 461587 - DNA, 75 bp, Homo sapiens
gaaaaatttgagaaggaggctgctgaggagtctactcttcatcttgtgttgagacttcgtggtggtgctaagaaa

SEQ ID NO: 461588 - DNA, 90 bp, Homo sapiens
tgaggccgcaggagaccttcccgacgacccctgctccggcggggaagtgagcaaggggatatcattttcaatgcccaatacccagaactg

SEQ ID NO: 461589 - DNA, 74 bp, Homo sapiens
ccccggcccacagtgggggtgtgcaaacccgagagaactgggaatatattattcgagtgcaaagaggaatttct

SEQ ID NO: 461590 - DNA, 50 bp, Homo sapiens
gtcatgatctaccagttcattgttcaggttcagctctatgaagattttgc

SEQ ID NO: 461591 - DNA, 46 bp, Homo sapiens
ctggctggcttcagtggaccagtaccaaggaaaggcagatgccccc

SEQ ID NO: 461592 - DNA, 75 bp, Homo sapiens
tgaccctagggagtgaggaggagagtgaaaaatgcaatgacatcttcgagtggtccagggaccaccgagcccacc

SEQ ID NO: 461593 - DNA, 75 bp, Homo sapiens
gcgcatcaaggtgggacgggattacgtccagaaggcgcagactaaagagcaggtgccttggaacactatgttaat

SEQ ID NO: 461594 - DNA, 78 bp, Homo sapiens
acttcccaaagaactcctgttacgatgtatgtccatccctgtgacgatgagggctattcggaggaaagctgaaaccat

SEQ ID NO: 461595 - DNA, 73 bp, Homo sapiens
aatcatggagccgctggggtcccttttgcctcagatactattttgaaggtggactgtgcattgtcacttattc

SEQ ID NO: 461596 - DNA, 87 bp, Homo sapiens
taaaaataacaagaatgggaggagaaggctgttaaacgtttaatgaaagaagcggcagaattgaaagatccaacagatcattaccat

SEQ ID NO: 461597 - DNA, 100 bp, Homo sapiens
cccggaatgacctgtcgcctgccagctctgatgatcatgggaacagcaatagtagtcatgtaaaaatctttttaccgaaaaagctgcttgaatgtctgcc

SEQ ID NO: 461598 - DNA, 123 bp, Homo sapiens
ccccgctccagaaatggggttgtgatataaagacagggatatgagtgaagaaaacacagagccaccctggaaaggccgccgcccaccgcccgccgccatggggctgaaggccgcccagaagac

SEQ ID NO: 461599 - DNA, 100 bp, Homo sapiens
ctgaaaaccaaacttgaggacgccaatttgcccagcctccagagtgagaagccctaccactgcaactgggacggctgcggctggaagtttgcgcgctcag

SEQ ID NO: 461600 - DNA, 75 bp, Homo sapiens
gatcccgaccccaaaagagtattcttggatcttgcacaggaaggaattaaagaaacgtatgtcaaacgaggatac

SEQ ID NO: 461601 - DNA, 46 bp, Homo sapiens
catatcgttggacccagaattgaggccatcatctctcagcaaggtg

SEQ ID NO: 461602 - DNA, 98 bp, Homo sapiens
tgcttttccagaaactgtgccaggatcacgctaaggagagagtgttgaaaaaaggagagcaccaaatacttgttgacgaaaaacctgtgcccattttc

SEQ ID NO: 461603 - DNA, 75 bp, Homo sapiens
ctctggaatttagcgctcgcccagctagccgcagagctgtattataaagcgatactgtgagaaaagattcgtgtc

SEQ ID NO: 461604 - DNA, 90 bp, Homo sapiens
ttcgaacttagacttccggaaggactttggcgaggtgagccccatgcccgtttctacgcggcccagatcgtcctgacctttgagtatctg

SEQ ID NO: 461605 - DNA, 80 bp, Homo sapiens
gttgaggggcgactggagccatggcggagtcggcgcctgctcgggccacggcgtatgcctccaaggacggggtcctgacc

SEQ ID NO: 461606 - DNA, 101 bp, Homo sapiens
cggcgagtttccgatttaaagctgagctgcgaggaaaatggcggcgggagatggactagaggcttttaccagatttcttaaaactgaattcagtgaagaaa

SEQ ID NO: 461607 - DNA, 99 bp, Homo sapiens
tgcgggtggtcaccgagaagtccccgaccgactggcttgaatgaagagttggtccagctgcttctcatccgagatgagctgcacacagagcaggatgcc

SEQ ID NO: 461608 - DNA, 82 bp, Homo sapiens
aatatctgtcttcggtggactccttcggcagtccacccaccgccgccgcctcccaggcccttgatgagcctccctatttgac

SEQ ID NO: 461609 - DNA, 90 bp, Homo sapiens
gcccagccgggaactccccatcgcgttttgccagcgataatacgcctcaggtcagaaccatccagtcctggacatgggaccacatcggcg

SEQ ID NO: 461610 - DNA, 100 bp, Homo sapiens
caaaggcatcgtctatgacactggaggcctcagcatcaaagggaaggtgctggagaatctggtaaaagcaccattgtgaagcagatgaggatcctgcatg

SEQ ID NO: 461611 - DNA, 75 bp, Homo sapiens
gcggtcggctgcggtggcggcgtttggatgattgtctctcggcggcggagtcggcggagtctcactctgtcgccc

SEQ ID NO: 461612 - DNA, 100 bp, Homo sapiens
ctctgtgaacacccagaacttccagtcactgcataacattggcagtgtggtgcagcacagtgagggggcgggtgccacgtctatgtgggcttcgtgctgt

SEQ ID NO: 461613 - DNA, 98 bp, Homo sapiens
ggcgccacgcggcccgccggccacgcgccctgggacaaccacgtctccggccacgaactgttcgtcagttggcacaggagcagttctttttaatgtgc

SEQ ID NO: 461614 - DNA, 100 bp, Homo sapiens
cgacgctctctctgaccgtgaattcaggagaccctccgctagtgtctgcactgcttggggaggaagatgaagaggcactgcattatttgaccagagttga

SEQ ID NO: 461615 - DNA, 75 bp, Homo sapiens
accctgtggtccacgcgggagcggaagcagccatcccaggcctcaggacctgagttctccgacgcccacatgaca

SEQ ID NO: 461616 - DNA, 85 bp, Homo sapiens
accctgactaaagcttgaaatgctacatttccaaggtgagcacctgcggatctgtccccagggctacacctgctgcaccagcgag

SEQ ID NO: 461617 - DNA, 85 bp, Homo sapiens
gagccggggccgtggctgacatggagcaggtggggcagctgcagctctcccacaatctgagtttggtgatcctggtaccccagaa

SEQ ID NO: 461618 - DNA, 82 bp, Homo sapiens
cgccaggacaatggggacccgggacgacgagtacgactacctattcaaagggcgaactttctgaccaagtatacaactaccc

SEQ ID NO: 461619 - DNA, 113 bp, Homo sapiens
accccgggctcggcggcggcggccaggtccctgctgaatcacacgccgccatccgggaggcccagggaaggtactaggttttgacaagcttgcatcatgcgtgagtataagct

SEQ ID NO: 461620 - DNA, 100 bp, Homo sapiens
ttacagagaccggggaactctactcttcctacgaggcctgtgcaacctgtgcccagacagggccaacaaggagcacatcctgcacgcaggaggtgtccca

SEQ ID NO: 461621 - DNA, 75 bp, Homo sapiens
cgagaacatcgtggccaactcgctgctgctgaaagcgcgtcaagaatgtggcagatcagattgcatttcaagctg

SEQ ID NO: 461622 - DNA, 83 bp, Homo sapiens
gcctattggaggaaaacacaccaaggctggtgcagtggtgtcatcttggctcagtgcagcctcgacttcctgggatccagcga

SEQ ID NO: 461623 - DNA, 84 bp, Homo sapiens
ggggcaaagggaccacggtcaccgtctcctcaggtcatcatcagatttgaaatatttaaagtggatacaaaactatttcagcaa

SEQ ID NO: 461624 - DNA, 101 bp, Homo sapiens
ccttcgcatccgacgcaaccggcagcagcgctgccgccgcgtcctcagccaccgctccctcttcccacggcttgcagccaatttactggagcagggatgac

SEQ ID NO: 461625 - DNA, 75 bp, Homo sapiens
agattttaatttcagtgactgaattaaaaggtgtcaagaagctcagaatgtgtcagagatggctttggattcccc

SEQ ID NO: 461626 - DNA, 82 bp, Homo sapiens
ccgccgtgccgcatgagcatcgcggagcttgacccgtccatcgctgtggagaaccaggtgcatcagcgcattgcggagctga

SEQ ID NO: 461627 - DNA, 82 bp, Homo sapiens
ccggccttggtgcggcgagccgagcgaggcagctctgagccgcgcgcgtatctggtgcaggccgtgagagcagcgggcaagt

SEQ ID NO: 461628 - DNA, 100 bp, Homo sapiens
gaatggattgtaccgctgtgagaagtgcgacaccgaatttcccaatttcaagtaccgcatgatcctgtcagttatcaatactctggctgaccatcatcat

SEQ ID NO: 461629 - DNA, 83 bp, Homo sapiens
gaggaaaatttcaggctgaaggtttagcgggtgccgggttgtgagtcccggcccagcccctccacccccctgcccccccgatg

SEQ ID NO: 461630 - DNA, 100 bp, Homo sapiens
aattcttaaaaaggctcagaaagatggatttttgcatgagacgcttctggacaggcagccttaagtgccttgaaacaattttctgaacaaggactggatc

SEQ ID NO: 461631 - DNA, 100 bp, Homo sapiens
cacggaggtgggttcgacctccggttcccccaccatgacaatgagctggcacagtcggaggttggagatgaagatcatcaagggctccagtggcacccca

SEQ ID NO: 461632 - DNA, 82 bp, Homo sapiens
tccttgtggagccggagctgggcgcggattcgccgaggcaccgaggcactcagaggaggtgtggaaacaggaagagaactag

SEQ ID NO: 461633 - DNA, 95 bp, Homo sapiens
cggggagaagcgggcgcccgccgccgagccgtctcctgcagcggcccccgccgggtttattcttcagtccaaggaagcaattcacagtcagctgt

SEQ ID NO: 461634 - DNA, 75 bp, Homo sapiens
caagagctccaaccagactgccccctccctcaagccaagaagacgctggagggaggctgttaggagggactctga

SEQ ID NO: 461635 - DNA, 75 bp, Homo sapiens
cgcacctcggggacattattgcgcgtggaacggctgcttttggaagaaccagctccacccaaatcactcttcgca

SEQ ID NO: 461636 - DNA, 98 bp, Homo sapiens
cggagcttctcagaagacagagggttttcttttgaggtgccactgattaatgaacttgaatcagcaatacatcagctgtacaaacagcgagcttcccg

SEQ ID NO: 461637 - DNA, 73 bp, Homo sapiens
cgccgtccacgccgctcttgacagcaaaccaggttgctcaacaagtgtcagctgtcagaactcattcagatct

SEQ ID NO: 461638 - DNA, 78 bp, Homo sapiens
gcaaaagtgaagcaagttcacaaagaagtattaaactgtggtaccgtttctgatcacattgagagagtctatagaaga

SEQ ID NO: 461639 - DNA, 51 bp, Homo sapiens
gagcagctgccacaatgggacatgtgcaactgtcggaaaaggtaacagaag

SEQ ID NO: 461640 - DNA, 100 bp, Homo sapiens
cccaaaggcagcaaaaacaagagtccctctaaagcagctcaaaaggtagtgggcagcagtcagtgacaggtgtaacctctgtggatgacagcaacagtta

SEQ ID NO: 461641 - DNA, 50 bp, Homo sapiens
catgagatgattgccaaacccccaggaaaaaacgaggagtcattggagag

SEQ ID NO: 461642 - DNA, 97 bp, Homo sapiens
atggaaacaccatggctgcggcggcccagctctctctgacacaggtaactcaactggacccaaataaatcattattggaggtaaagttgttccctca

SEQ ID NO: 461643 - DNA, 97 bp, Homo sapiens
atctggccgccgccgccgcgagcgctcccggtttacccaaggtccagcctagcccctaggcaccatgtcggacagtgatctaggtgaggacgaaggc

SEQ ID NO: 461644 - DNA, 101 bp, Homo sapiens
agggagccagagaggccgatggcgcaaaggccttacgacagtctgcctacctcacagacctgcttcttccagctgaggctgcccccgtactccagccagct

SEQ ID NO: 461645 - DNA, 141 bp, Homo sapiens
gcctccgggcccggggctgcaggggccagagcgagtgcgcctcctgcccgcggaccgcggcagcccagagcaggaaacttggatttaactggccagaagcaggtattcaaagcagagaacaatccctgggtgacccccatt

SEQ ID NO: 461646 - DNA, 101 bp, Homo sapiens
ccgggggaattgcaggcccatacgatttgagccaccaatgctggatttccatgaacagttgctgaaaagccaggagtcaaaatgactgagcgctttgactg

SEQ ID NO: 461647 - DNA, 50 bp, Homo sapiens
aaattgaaaggcttcaaagctagcaggctgacattcacgtttcattctgc

SEQ ID NO: 461648 - DNA, 50 bp, Homo sapiens
ggcctcccaaagtgcttggattacagaagtctgggccaacggtcacaaaa

SEQ ID NO: 461649 - DNA, 82 bp, Homo sapiens
tgttgaaatagagggaccattgtctacagagaccaactgggatattgcccacatgatcaggcttgaagtagaaaatgccatg

SEQ ID NO: 461650 - DNA, 75 bp, Homo sapiens
ctcggccctcattctgcacgacgatgaggtgacagtcacgatggtcagtaggacagaaggtaacattgatgactc

SEQ ID NO: 461651 - DNA, 87 bp, Homo sapiens
ggaaaatgttttgccacgtggatgtgaagatttcctctaaaagtactatactggcaattgctggagaagattttgcaattgttgctt

SEQ ID NO: 461652 - DNA, 100 bp, Homo sapiens
tatgcctggaggaacttggaaatcaaactcactaagggagaacattgagcaattcttcaccaaatttgtagatgaggggaaagccactgttcggttaaag

SEQ ID NO: 461653 - DNA, 83 bp, Homo sapiens
ggcaggggcagcgggagccggccgggattgccaaggatccaagatttgaacgattaccatgtacacacaaaggaacctatgca

SEQ ID NO: 461654 - DNA, 100 bp, Homo sapiens
cgacgcggaccgcgccaggcggaagcccggctccgggccagcatccgagagcccggactggaggcctctggctgtacctggcagggagcagcctgccctg

SEQ ID NO: 461655 - DNA, 100 bp, Homo sapiens
gcttgaaattaccaactgctttcctttccctcagcacacagaggatgatgctgactttgatgaagcattttcttcctctcgcaaatctggaatgttcacc

SEQ ID NO: 461656 - DNA, 100 bp, Homo sapiens
gctcctttgggaacccattcgagggcagccggcgggaggaacgctcactgtcagcgcctggaaacttgctcacatggagttttaacattgaatgcggaga

SEQ ID NO: 461657 - DNA, 90 bp, Homo sapiens
cagaaggtctctggagacatcttcagcagtcactgtatatatgccttatttcctgggtccatgggaagcatgagtctgttgggacttggg

SEQ ID NO: 461658 - DNA, 75 bp, Homo sapiens
ttccgcaggaaggagatgtggtggtatgtgaaagcaagaacagagctaacatgggattatggctatgaagctggg

SEQ ID NO: 461659 - DNA, 90 bp, Homo sapiens
agaggctggactcggattcgttgcctgaggtggatccataaagaacccagccaacccgcagagggaggggaggggctgagctgtgaggag

SEQ ID NO: 461660 - DNA, 75 bp, Homo sapiens
accgccctggtgctctgcccattcaaagactccggctgcaagcacagggcataaaccttccactcttgaacaaag

SEQ ID NO: 461661 - DNA, 83 bp, Homo sapiens
ccttccgacgtgggcggtgggccccagccccacagaccagcccagcattcaggctgatcagctgaccgaagaacagattgctg

SEQ ID NO: 461662 - DNA, 98 bp, Homo sapiens
gcgtgggtgagcggcgcagcggcggcagcggagagcgagagaggggagcaggtacctagtcgatagtcgctggttcaaacagtggaaaaaatatgttg

SEQ ID NO: 461663 - DNA, 75 bp, Homo sapiens
caagtgatctttgataagaatgattcagattttgaagctaaagttaagcagaaatgattctggggaccattctga

SEQ ID NO: 461664 - DNA, 75 bp, Homo sapiens
atccttgctggggacgtggagacccatctgcagaagaaagatcagcaactggagcctaaaaaaagtaccagccct

SEQ ID NO: 461665 - DNA, 100 bp, Homo sapiens
gataaatcctgtcagtcttttatcagctggacaggagatggctgggaattcaaactttctgacccagatgaggtgattatcctgaaccatccaggccaaa

SEQ ID NO: 461666 - DNA, 75 bp, Homo sapiens
cccagagactgctgagcccgtccgtccgccgccaccacccactccggacacaggccaaatttgagtttcatcatg

SEQ ID NO: 461667 - DNA, 100 bp, Homo sapiens
tagacaggcgcgtggttaagggacaagtggaatatctactgaagtggaaaggcttttctgagttgttcggaatcctataattgaaaaacagtaaagatgg

SEQ ID NO: 461668 - DNA, 75 bp, Homo sapiens
aatgccggtggaggaatttgtggctggctggatctctgaagttcctgagttagttgagtcagcttattgggacta

SEQ ID NO: 461669 - DNA, 101 bp, Homo sapiens
acccaagcatttctttttctggaatgtcattatcagacacaatgccgaatttgccacatacctgaatttctgccgttccttgcgttttgacgacaagcctg

SEQ ID NO: 461670 - DNA, 83 bp, Homo sapiens
ggtgggcgcaccgggcatagtggttggagtttctgtagatggaaaagaagtctggtcagaagatcaaagggattatatctgtg

SEQ ID NO: 461671 - DNA, 51 bp, Homo sapiens
gcgacacactctgcgtcctcgcctcaccagaaatcgtggatgggaatgtga

SEQ ID NO: 461672 - DNA, 98 bp, Homo sapiens
catgagcgaaagctacacgctggaggctcttgcagccaatgccggaacaggatttgctgttgctgagcctcaaatcgcaatgttttgtgggaagttaa

SEQ ID NO: 461673 - DNA, 83 bp, Homo sapiens
ctgtggtttggctgcgggcggcttgggcagcccgcgggcgcctcaggcaagccgattttttcagttgatattcaccctgacgg

SEQ ID NO: 461674 - DNA, 74 bp, Homo sapiens
ggagaaacaagctatgtactctagcactgacacgtttacccacttgaaacaggggggtcctgtggagatccttc

SEQ ID NO: 461675 - DNA, 98 bp, Homo sapiens
cgacgccacctccgctgctgctgctgctcttcccgctgctgctcttctccaggctctgtgacgaaatctcacaaaactgtcccttatcttcagtcaca

SEQ ID NO: 461676 - DNA, 100 bp, Homo sapiens
ccgtcagcactcagcgcgggccggaatgaatctgaagtctgctgcagtaaaacacagaaggctttaaaatgttttcttgcataaaattcaaaacttttaa

SEQ ID NO: 461677 - DNA, 48 bp, Homo sapiens
cgagcgctgcgaggtggcggcctgagattattcagagctgggagagct

SEQ ID NO: 461678 - DNA, 100 bp, Homo sapiens
gcaaaaatctgcaatatggcattgagtctttctctaacaaaacgaaagggcagaagatcctgaaggagaaggctgtgcccatgatagaaggctacatgtt

SEQ ID NO: 461679 - DNA, 90 bp, Homo sapiens
ggagtcatggaagagtttttaaaccaggaagaggagcaggacttggatggtgagaaggggccatcatcggaagggcctgaggaggaggac

SEQ ID NO: 461680 - DNA, 75 bp, Homo sapiens
agcgtagctgaatccagtaccaaaaacgtcaacaacagttttacggatgatcacggacgtgcagctcgccatctt

SEQ ID NO: 461681 - DNA, 110 bp, Homo sapiens
tgttggagaactacaggaacctgctttctctcgatgaggataacatccctccagaagatggtggagtaactaatacggcacaatatcagaacaggctaatggtgtatgaa

SEQ ID NO: 461682 - DNA, 89 bp, Homo sapiens
cacggtctgcccacccaacgcgaagacggtaacccgtgtgactttgactggggtaagcttgatgattaccaggaacgaatgaacaaagg

SEQ ID NO: 461683 - DNA, 82 bp, Homo sapiens
ttttctaaagagtcttgttatttcttctttgagaaaaacctgaaagatgtctcagggcagcctcacctgggcatggcatcca

SEQ ID NO: 461684 - DNA, 100 bp, Homo sapiens
agggactcaggcagtacgggaagaacttcttcagaattagaaaggagctgcttcccaataaggaaacagtactggttttggattaggaattgttttctca

SEQ ID NO: 461685 - DNA, 100 bp, Homo sapiens
gactccaggtggccacaagccctgactttgatgggaaattaaaagtgcacgatctgattttctggagagatgtgaagaagactgggtttgtctttggcac

SEQ ID NO: 461686 - DNA, 99 bp, Homo sapiens
gtttctccaaaagatgttggacacaatatctatattctggcccatcaggagagtggtagaggcacagaagatgatgaggctgttgaactgtggaggcat

SEQ ID NO: 461687 - DNA, 90 bp, Homo sapiens
caacatgacagaggaccatgtgatgcacctgctccagcttcttggacacttaatgattgttggcaagaaatgtgctgctgatctgggcct

SEQ ID NO: 461688 - DNA, 90 bp, Homo sapiens
ccgctcccaagatgtcgcagacggccatgtccgaaacctacgaggaatgttacggcatccggagtcatccctcagatttctctgatcatg

SEQ ID NO: 461689 - DNA, 75 bp, Homo sapiens
tcggagccgaataccaagctcggatccctgaatttgatccaggttatgaagacagtatggagtttccagaccata

SEQ ID NO: 461690 - DNA, 81 bp, Homo sapiens
gccgatccagcctgcggagcctgtggggcagttcctctgtgacgagggtgcaggtatctctggggactacatcgatcgcgt

SEQ ID NO: 461691 - DNA, 100 bp, Homo sapiens
cagtcagcgtcaccgtggggggcaagcagtacctcctaggactctatgacacggccggacagctgcagcaaaaaattattcctgatcaggaccaactgat

SEQ ID NO: 461692 - DNA, 90 bp, Homo sapiens
gctctctctccagtccttgctgaagagactttccgttacatgaacacagggctgggtgactccgtatgctccagccccagtatctccagc

SEQ ID NO: 461693 - DNA, 80 bp, Homo sapiens
tgctggatgtcaacggcctctaatactaagaagtttcagcagtggaatgcctactcttcttataaccggagtggaaacgg

SEQ ID NO: 461694 - DNA, 96 bp, Homo sapiens
gtttgatgctcctacctggaacaggttgtcaagttattaagcaacaaaagatcacaagcagttggaatactaatgtctagccttcatttagatatg

SEQ ID NO: 461695 - DNA, 100 bp, Homo sapiens
tttggagacaactaagggattattatcctgtcaagggattggagtttggaatcctgccttcgatgtcaccccccacgacctcatcactggtggcatcatc

SEQ ID NO: 461696 - DNA, 54 bp, Homo sapiens
gttggataaatatatctatggagcacaggaagagaactccagagatttggaaga

SEQ ID NO: 461697 - DNA, 83 bp, Homo sapiens
gataaattcccggaaccgcgattcggcgtgtcaggcacctgaatggacagaagaggacctcagccaactgacaagaagtatgg

SEQ ID NO: 461698 - DNA, 90 bp, Homo sapiens
gtttgcaaactgcgcccattttgtggggctgaatccgcccgggctacgctcctccatcacgtggaggcacgcggacctccagtggccggc

SEQ ID NO: 461699 - DNA, 100 bp, Homo sapiens
ggtacccaaacaagcaggtccagcggcgactctggctggagtatgaagacatcagtaaaggacacagtgcgtaaggtacctccttggaagcagagaccag

SEQ ID NO: 461700 - DNA, 90 bp, Homo sapiens
atctggacaatcattctgcacttccagctcagagctctgctgcagggcctgcgtgagcttttaccactgggcgatggtggctgtgacggg

SEQ ID NO: 461701 - DNA, 75 bp, Homo sapiens
ggaagtcgcctggtgtgaactgcagtggcacacaactgggcaggctccatctcgtctgctgctggaacccactag

SEQ ID NO: 461702 - DNA, 100 bp, Homo sapiens
aaagatctaaaggagctgtcagatggagaaataaaagtggccattagtactgtgagcatgaaccttgagggggcagctggcattttatgctatgtgggag

SEQ ID NO: 461703 - DNA, 82 bp, Homo sapiens
tggaggcggcccgcttcctggaatggcaagcgcagcaacaacagagagcacgtggtgtggaaacaggaagagaactagaact

SEQ ID NO: 461704 - DNA, 50 bp, Homo sapiens
cagtgagatctttgccagcatcccaggcaagcaccggaagcaccccggcg

SEQ ID NO: 461705 - DNA, 100 bp, Homo sapiens
tggatttcagactggcctagccagcccccacaatcataggatgaaagtcctggacagacttatcacagagagagaagaaacgcaatcactatgcagccac

SEQ ID NO: 461706 - DNA, 101 bp, Homo sapiens
atttttttacccactatgacgcttccttagaggatcaaaaggggctcgtggcatcctatcaaggtttttcgttggaatatacgttgcacatttatggcgat

SEQ ID NO: 461707 - DNA, 74 bp, Homo sapiens
ctttgggaggctgaggcgggcggatcacaagagttgctacgatggaagttaaagggaaaaagcaattcacagga

SEQ ID NO: 461708 - DNA, 87 bp, Homo sapiens
agcctgatgctggaaggacgaagaacgtgctggccaaagcgctctatgacaatgtggccgagtccccggatgagctctccttccgca

SEQ ID NO: 461709 - DNA, 82 bp, Homo sapiens
cggacaatgagatgggccttagcttggagtttttatgatgatgtcacagtaccaaaaaagcttgtggtgaaggggggcaaaa

SEQ ID NO: 461710 - DNA, 154 bp, Homo sapiens
ttacagacccgagtggaatctttagaatctcaaacaagacaacttgagctgaaagcgaaaaactatgctgaccagactcctcaagagttactgatctatgaaatggcagagaatggaaaaaattgtgaccagagacgtgtagcaatgaacaagg

SEQ ID NO: 461711 - DNA, 48 bp, Homo sapiens
tgcgttgcggccagtcgccactgctttgtcgagatgtccacagaagga

SEQ ID NO: 461712 - DNA, 100 bp, Homo sapiens
atgtggataatttgccctgcctccaacatctctttctcagctttaacaatatatctaggatgctgacagacagcaccaagaagtaattgcaatttatcgg

SEQ ID NO: 461713 - DNA, 74 bp, Homo sapiens
tatgaagagacatgagatcatggtggccaaacccacagtgcagtcattggagaaatcgatgaagaaacagattc

SEQ ID NO: 461714 - DNA, 51 bp, Homo sapiens
caagcggcgccgcgccctcggcctgcacggtcacattgtcctaatgcttgc

SEQ ID NO: 461715 - DNA, 82 bp, Homo sapiens
cctcccttcgctcgcaccatgcattttgaaagcgaagcagaagccgtagaatcagcggcgagcctgttgaaagaacccacag

SEQ ID NO: 461716 - DNA, 75 bp, Homo sapiens
ataacctggacaacagaaccaaagagttcagacgtgagaaagcaccttctaagtgagcaacacagaaactttgca

SEQ ID NO: 461717 - DNA, 100 bp, Homo sapiens
atgaatgtggctcgtctgaacttctctcatggaactcatgaggtgctgctctccctgcgcattttgctactgatgaagcccagtgtgctatcccgagtca

SEQ ID NO: 461718 - DNA, 82 bp, Homo sapiens
cggggcacaaagagccctctgcactagcgccgcaggaccgcggacccgaggcagcctgcttctgcaaagtggtacgatcgaa

SEQ ID NO: 461719 - DNA, 100 bp, Homo sapiens
gccaccgactgggggcaacttggcacttagaaccgcagcagggacgtcggtttgctatcgggactcggcgaggacgagtcactttgtggcatgtatgaca

SEQ ID NO: 461720 - DNA, 90 bp, Homo sapiens
ttcaatgataagagctgtcagttttctgtggatgaagaagagtcaagtaccattggccaggatcaaacgcttatggaacgtgatacagag

SEQ ID NO: 461721 - DNA, 75 bp, Homo sapiens
ctacagattccaatacctcattccctaagacttcaccatgaaaaccagggtggttatgaccgctactcaggagga

SEQ ID NO: 461722 - DNA, 72 bp, Homo sapiens
ggattttttaactgaagatagtgcctttcagccctaccagcaagccagggctgagcaggaagaagaattcat

SEQ ID NO: 461723 - DNA, 83 bp, Homo sapiens
cgccattatccccagcaaaaagctccgcaacaagatagcaggatcgaggagactggcagagggaaagaaagttcaactatggt

SEQ ID NO: 461724 - DNA, 82 bp, Homo sapiens
cctggaggacggctgggacagcgagcccttcaccctggtggagcgagacggtgacttaagagattaaaattaatttggttgc

SEQ ID NO: 461725 - DNA, 75 bp, Homo sapiens
ggtgaactgaagaacaatcggggcgtgattgagaggatccagaatccagatctctggaatagctaccaggcaaag

SEQ ID NO: 461726 - DNA, 80 bp, Homo sapiens
ctcccgagtggctgggactataggtccacaaggcgattacaatttccagtcccctaaccacagacctgactgcagagctg

SEQ ID NO: 461727 - DNA, 99 bp, Homo sapiens
ccttcatataaacgtacacctactgaatggattcaagacttcaaaacccattttcttgctatcatggtgaacttacttcagattgtgcgggaccactgg

SEQ ID NO: 461728 - DNA, 100 bp, Homo sapiens
tgaaatttgctctgctaaaaggctccttcagtgagcaaggcatcaacgagtttctcaggtaaaccccagtgataggtaccatcttatgcctataattaca

SEQ ID NO: 461729 - DNA, 142 bp, Homo sapiens
ggactctgccagggtcaagacataaacctgcccccaccaagtcggcaccagccagcacagaactagagaccagagtgtattcgactttatgcacctccttttattctggctccagtgaaggacaaacagacagagctaggag

SEQ ID NO: 461730 - DNA, 87 bp, Homo sapiens
gcgggaagtgtgaagcggccaatggcacggaggcctgcgtcgccgtgccgtccctgcagtgacaccgaggtgctcctagccgtctgc

SEQ ID NO: 461731 - DNA, 50 bp, Homo sapiens
cgcgggatcttgcagaggagagagtgaaagcagcagcagtagcaacatct

SEQ ID NO: 461732 - DNA, 75 bp, Homo sapiens
aataaggacatcatctgctataacctacaagcagttggacagggcgcaaccatgtcgccatttcttcggattggc

SEQ ID NO: 461733 - DNA, 89 bp, Homo sapiens
gcgactactacgaggcgcaccagatgtaccggaccctgttcttcagagtttatgtggccgaggcagacaagtggaattaggccttgctg

SEQ ID NO: 461734 - DNA, 75 bp, Homo sapiens
tgcgccatcatcctcatcatcatcatagggtgacatgggcttgcctgggctctccgggaatccaggacctccggg

SEQ ID NO: 461735 - DNA, 90 bp, Homo sapiens
ttgggggcttcctcactcgtggctttccgaaggctgctggtatgtaggaaaccttcccagaatatttgactactcgcctttagatccaac

SEQ ID NO: 461736 - DNA, 98 bp, Homo sapiens
ccacccctgctgacatcgggagcagtgtgccaggcccgcagtcctaccccattgtgacaggtctgaatttcctgctgctgttcacaaagatgcttttt

SEQ ID NO: 461737 - DNA, 98 bp, Homo sapiens
tgggtcagtccgccgctcaccccgcggccgcaccttcccgccttctcagcccgagcgggaagaagttccgcagcaagccgcagctggcgcgctacctg

SEQ ID NO: 461738 - DNA, 90 bp, Homo sapiens
ggcatccaaatcttgcggcaacgcccccgggacatgcatcgtcccctggactctctcaagctgttcgctgctacgaatctttaatcttaa

SEQ ID NO: 461739 - DNA, 75 bp, Homo sapiens
ggctttacagatgtgggcccagaaaacaagccagtcagtaacgcatccccaattaatagaattgtacaaatcagt

SEQ ID NO: 461740 - DNA, 95 bp, Homo sapiens
tcagccaccccatgcaggaaactggggtggcttccaccactgctccagcgaccgtggcgggggcttctgtgcctatgcggacatcacgctcgcca

SEQ ID NO: 461741 - DNA, 75 bp, Homo sapiens
tcgggacacacagaaatataaacctttcaagagtcaagtaaaggttctagagccttctttccgccaggcctttcc

SEQ ID NO: 461742 - DNA, 75 bp, Homo sapiens
caagtatgtcatctctcacctaaacaaagaggtctgaagaatgtgtttgatgaggctatcctagctgccctcgag

SEQ ID NO: 461743 - DNA, 113 bp, Homo sapiens
gtcgcgcccgggaggaaggaacgaggcaaggagctaaagcagcgtgcgttcagccctgggatgagcagcaccagcagtaagagggctccgaccacggcaacccagaggctgaa

SEQ ID NO: 461744 - DNA, 98 bp, Homo sapiens
tgctctgaagcgcacgacctccgactactttctccttcaaggtgttgggatggccaccaactgggggagcctcttgcaggataaacagcagctagagg

SEQ ID NO: 461745 - DNA, 75 bp, Homo sapiens
agagaccccgcggctgggcgttcatctaccacgctttcgtaacggtgtgctgctgaggactgtcttggaccctgt

SEQ ID NO: 461746 - DNA, 100 bp, Homo sapiens
gactctggggaaaatggctgcgtcttcgagtgagaatggtggcatgaagctcaaaaaaatccaaagataagacctaatcctcatgacaccaaagtgaaaa

SEQ ID NO: 461747 - DNA, 76 bp, Homo sapiens
gcagcgtggcttcctttggtgccagctctttgtctaggtttatggctacaaatgatttgatgacggaactgcagaa

SEQ ID NO: 461748 - DNA, 83 bp, Homo sapiens
gaaatggcggagtatctggcctccatcttcggcaccgagaaagacaagtcactatcatatgacaaaggctttgccgcagttca

SEQ ID NO: 461749 - DNA, 82 bp, Homo sapiens
gaatgaagctgcagaccctcgcagtgagtgttacagctcttaagacaatgcagatcttcgtgaagactctgactggtaagac

SEQ ID NO: 461750 - DNA, 80 bp, Homo sapiens
accactcaggctgaacgcaagattcgtatcattatggcagagcccctgcacaagtgcatacaccttgatagcaccaaata

SEQ ID NO: 461751 - DNA, 80 bp, Homo sapiens
ctgctgctggctgcccttgtctcctttgaatttttgaaccgaagaaaaatgacagagtttggcaacctggcactaattga

SEQ ID NO: 461752 - DNA, 74 bp, Homo sapiens
ccctctcaggacaacccagatgtgcaacaaagtgcgatgggagtgcatccgccccaacccttttccccctcgtc

SEQ ID NO: 461753 - DNA, 82 bp, Homo sapiens
accgccgcccccccagacaagatggacaccgcggaggaagaacatccagtcatggataaaaatgagctggttcagaaggcca

SEQ ID NO: 461754 - DNA, 100 bp, Homo sapiens
ctccgatggccaggaaccttttagtacttccggagattatttggtagcaattgaagagaaaaacaaagctacatttctacgtgcttatgtgaactggaga

SEQ ID NO: 461755 - DNA, 50 bp, Homo sapiens
aaactgcaagtgtatattgttcttgtgtcaaaccagaagagaagtaaaat

SEQ ID NO: 461756 - DNA, 100 bp, Homo sapiens
ttgtcgcgccgtgacctgcaggtactgacagatccgtagggaggacaccgtgacttcccggacgctgggaaatgacgcaaacatgcagatctttgtgaag

SEQ ID NO: 461757 - DNA, 120 bp, Homo sapiens
ccaggatacagggtcaaaggagagcacaaccatcgcagttggaagcccatggggcagtttgtcccgctggctggaagcctggcagtgacacgattaagcccaacgtggatgacagcaagg

SEQ ID NO: 461758 - DNA, 100 bp, Homo sapiens
cgttcttccgctggctcagccgcaagtacccgtccatcatagtcaactgcgtggaagagaagtgatcctgccatgaagcagtttctgctgtacttggatg

SEQ ID NO: 461759 - DNA, 83 bp, Homo sapiens
aagcaatgtggcaaaacgaaaaagctcaatgcctcagaaattcattgaaaactttagaaactgttcctttggagaggaaaaag

SEQ ID NO: 461760 - DNA, 75 bp, Homo sapiens
ctctggagaagtgcgcgcgttttttggctttcacccccaaccagtgaccaaagacttgaccactcaaagtccagc

SEQ ID NO: 461761 - DNA, 82 bp, Homo sapiens
gccttgctcctcgccgcggcggggactgcaggcttgggcactgtttaaaggaaagttccgagaaggcatcgacaagccggac

SEQ ID NO: 461762 - DNA, 100 bp, Homo sapiens
cacagttgttgtggttgagaaagatcatttcatggatgatttcttccatcagtggtccatgctgtggacggcaccgccgagaacgggatccaccccctga

SEQ ID NO: 461763 - DNA, 100 bp, Homo sapiens
ctctccccaggcttcaacttcaggtatgagtcgtcatccgaggactccagcacagcagagaacatctcagacaacgacagcacagagaacgaggccccag

SEQ ID NO: 461764 - DNA, 100 bp, Homo sapiens
cgggagatcccaggcggtgacagagtggagccatggctagagcaaaatgatgcttcaacacccaggccaggtctctgcctcggaagtgagtgcttctgcc

SEQ ID NO: 461765 - DNA, 50 bp, Homo sapiens
ctgaaggctgtgcactgtggagagtggaatatgctgaatttcagtatcgg

SEQ ID NO: 461766 - DNA, 96 bp, Homo sapiens
gtcagcacagatccaagtggatgcaactttgcaatcctgcagtcagatcctaaaacaagttacaatgccatcaagtcatataaaacagaaggaaga

SEQ ID NO: 461767 - DNA, 71 bp, Homo sapiens
tggcagcagcatctcagcccaagagaagtgctgtgctgtggctttcattgagaagctagacgcccagtctt

SEQ ID NO: 461768 - DNA, 98 bp, Homo sapiens
gatgaatacccagcagaagactttactgaagtttatcttattaaatttatgaacttacaaagtgcaaggatattaaaggactcagcaaaaagagaaag

SEQ ID NO: 461769 - DNA, 95 bp, Homo sapiens
acctccaggtgattggggggaacgggagtaaggcatgtcgaggctttggctatgtcactttttcaatgctggaagatgttcagagggccctcaag

SEQ ID NO: 461770 - DNA, 90 bp, Homo sapiens
gtggaatatgccaaggaaaaactggagagcttcatcaaaaatagtgatagctttgataaggtcccgggattcttgagctgtgcccagctg

SEQ ID NO: 461771 - DNA, 100 bp, Homo sapiens
aagctatcaaatatcagagcaaggcaagaaggaccaccgccagtcctcccaccacatccatcacccactgtccacccacctgcctccggatgcacgccgc

SEQ ID NO: 461772 - DNA, 90 bp, Homo sapiens
agcaaattgaagagacgttaaaatacttcctgacgggtcagtcttacgagaatatggtaactgagatcatgtcaatgggctatgaacgag

SEQ ID NO: 461773 - DNA, 50 bp, Homo sapiens
catcatagtcaactgcgtggaagagaagttggaagctgaaggtgttcctg

SEQ ID NO: 461774 - DNA, 90 bp, Homo sapiens
acagccaatgatgtgccttctccatatgaagtcagagggtggccagtggcgatttcgatgcttgcgtccaagtctgtgaatgtaaaaccc

SEQ ID NO: 461775 - DNA, 111 bp, Homo sapiens
ccaatatcaggagatggagaagaaagtcagcctactcaaggacaatagctctctggaatttgactctgaggatcgaacagaggctgcaaatagaataatatgtactatcag

SEQ ID NO: 461776 - DNA, 96 bp, Homo sapiens
gcgattggacagaatttgtgaagaagactgtgcagtctttgtaactgatgaagagcaaggctttgtctctaattctgcccagttaaagtgcaggcg

SEQ ID NO: 461777 - DNA, 88 bp, Homo sapiens
ggaagttttctactgtaaagtcaccaacgagatcttccgccactacgagttcctgcacttggccatcatccatgaagaaaaggcactg

SEQ ID NO: 461778 - DNA, 97 bp, Homo sapiens
atggaccaggccctcaagtccctgatggcctcagaggaggagggtcacggagactcaccagttggcagaattaaatgagaagaagaatgaaagactc

SEQ ID NO: 461779 - DNA, 120 bp, Homo sapiens
gggggtcggccggggccgcttcaccacttacgaaatcagggtcaagaatacttcagagagtcagagttgtgccagaagtctcttaatggcagatagaatgcaaatagttgtgattctctc

SEQ ID NO: 461780 - DNA, 88 bp, Homo sapiens
atcaaataatagaatggtttatccagctgctgctgggagttgactacatgcatgagaggaccagctctcagctgatatgtacagtttt

SEQ ID NO: 461781 - DNA, 100 bp, Homo sapiens
tgctgctgctgcagtgggacaggtggcggcgaccggcggcgtccgaggagaaattatggatccggatgagcaattggaaacccttcatgaagcactgaaa

SEQ ID NO: 461782 - DNA, 100 bp, Homo sapiens
atggcagagccccacaggaagcataaggacaaacagagaactggccgctgcatggttaccacagaccacaaaatggctgcggctctgcattcaatccaag

SEQ ID NO: 461783 - DNA, 107 bp, Homo sapiens
ttgtgtttatcccgcccgggtgtgtgatgctgtaaaagcactcaaggctgcaggctgtaatatccctgtggcatcaggaataaagggattcattcctcattttaact

SEQ ID NO: 461784 - DNA, 74 bp, Homo sapiens
tagaacccaacatggatttgatcaacctgctcacgaataactgaagtgaagtgatggactccgatttggagagt

SEQ ID NO: 461785 - DNA, 98 bp, Homo sapiens
accgagaacatctactctttcaactacaccagccagcccgaccagatgaggaaactgaagcccagagaggtgaagtgaggtgcccaaggccacacagc

SEQ ID NO: 461786 - DNA, 96 bp, Homo sapiens
tcggccctggcctgaccccggcggccctgcccgcccctccctccagccttcctctgccaggacaagtttgtcgtctgctctgagctatcaagcccc

SEQ ID NO: 461787 - DNA, 98 bp, Homo sapiens
gagccgctcttcccttacagtttctttgagcagtttgtggaagcgatcagcatttgggcagtccttctccatccaccggaaggttgctgaagatggag

SEQ ID NO: 461788 - DNA, 75 bp, Homo sapiens
ccccggcccacagtgggggtgtgcaaacccgagagaactggtggccataatataattgtgataatgtaataaaat

SEQ ID NO: 461789 - DNA, 98 bp, Homo sapiens
gtcagccgcatcttcttttgcgtcgccagccggcagcaaaagtggaccaagaaaccttgacagaaatggtgaaacccagtattgattatgtgcgccac

SEQ ID NO: 461790 - DNA, 75 bp, Homo sapiens
tctaccagttcctcggggtgcagcagtggatgaggatcgcagtacggaacctgaccgattgcaggtgtttcacaa

SEQ ID NO: 461791 - DNA, 98 bp, Homo sapiens
cacgggaccctgcaggaagctgaggtggaatgaatcttacttgttgaatatcttctggttactagttggattcatttgtgaaagaatcattttcccct

SEQ ID NO: 461792 - DNA, 97 bp, Homo sapiens
ttacccggccaaagtcactgctgttaacaaggatgtccagaaaaggctttgaaagactcactacaaccctatgaggctgcttatctatcaaaatcct

SEQ ID NO: 461793 - DNA, 74 bp, Homo sapiens
tactcttctccgaattacacagaggtggagccgccaccaaaatgcagattttcgtgaaaacccttacggggaag

SEQ ID NO: 461794 - DNA, 100 bp, Homo sapiens
tgcagcggaagtgggaaacctgtagggtatggtccagctgtgccgcaccgaggcgagcaggagcagggaacagaacccttaggagaaatcttgagagtgg

SEQ ID NO: 461795 - DNA, 83 bp, Homo sapiens
cgccgctgccgccgcgacccttggcgcctgcccctgcaacgggagggtcccctggaagtgacgctgactcagccagtgaggag

SEQ ID NO: 461796 - DNA, 75 bp, Homo sapiens
gtagtcacctgtggcagctgcaaagttttcttcaaaagagcagtggaagaattcagaaggagctggcggacatca

SEQ ID NO: 461797 - DNA, 84 bp, Homo sapiens
ctgaacggggcgcacttcgacccggaagtttacctagacaagacttcccaagtaagaagcggaagaggagccgctggaaccaag

SEQ ID NO: 461798 - DNA, 82 bp, Homo sapiens
gaggaagacgaatcgttaaacatctgaaagggtcagtgccggtggtggtgtgcacattgagccccggtatagacagttcccc

SEQ ID NO: 461799 - DNA, 90 bp, Homo sapiens
agcctcacgagtcgaggtcctgcaggtggagctccggcagccgccctgtgacctacggcatgatgagctccaatgtgtactactacaccc

SEQ ID NO: 461800 - DNA, 82 bp, Homo sapiens
gtgtcatcggttcggtaaagtttctgttctctggacatggatttgattgacatactttggaggcaagatatagatcttggag

SEQ ID NO: 461801 - DNA, 75 bp, Homo sapiens
gctgcccccgccgccgccgcccccgccgccagcagcaatgcagagtccctggacaggctcctgccacctgtgggc

SEQ ID NO: 461802 - DNA, 50 bp, Homo sapiens
agagatcattcaggaggtccgagaagatgagcccattattgaagagccaa

SEQ ID NO: 461803 - DNA, 103 bp, Homo sapiens
cagaactgttccttcagccaaagaaacaagccgtggaataggtgtatcaagtaatggtgcaaagcctgaaaagatgggtgtgaacctgacacgcagcaacaag

SEQ ID NO: 461804 - DNA, 75 bp, Homo sapiens
ctgtcatttcaatagcaatgaagccttctaacaagggccgttgctccagggagaactgcaaatatcttcatccac

SEQ ID NO: 461805 - DNA, 100 bp, Homo sapiens
gcctgccccgccggagcagcatcatcaagtggatctcttagagttgagtacaacaaatgaaattttcaaacagcacaagttgaaccaaaatgaccagctc

SEQ ID NO: 461806 - DNA, 95 bp, Homo sapiens
cttccgtcacctccgctcccccgatcctattcccagtcgtgtttctggagactccgctgctgtctaatgtgatctccttgctacacacactgtgg

SEQ ID NO: 461807 - DNA, 75 bp, Homo sapiens
ggtcaggctggacgccatgttccgtacatgtgaagattttttggcagcttagcgtggaaaccattgatcaccctg

SEQ ID NO: 461808 - DNA, 90 bp, Homo sapiens
ttccagaaacgcaagaagtacaacgtgccggtccagaaaactctctgcagaggaattagagcgaaaacggcaagagatgatggaaaacgc

SEQ ID NO: 461809 - DNA, 74 bp, Homo sapiens
ctagagacggatggtcgcacgcatgattgtcggcatctcacagcgcacgtaccgggtgccgaaggaggtccgcg

SEQ ID NO: 461810 - DNA, 80 bp, Homo sapiens
cgatgaagatgttcaagttgaggtggctgagaaagtgcagaaatcgtctgcccccaggtggaagaagagcccgaagaaga

SEQ ID NO: 461811 - DNA, 87 bp, Homo sapiens
ggctggagtgccctgcctggagggagccctcctggctgggggcaagaacctaaaggcagacccagaagagctttttacaaaactaga

SEQ ID NO: 461812 - DNA, 100 bp, Homo sapiens
cgcagggcgatggacggccgaaccccgcgcccgcaggacgccccagccagtacacctttgggagcctcactggatgaacaaagcagtagtacactcaagg

SEQ ID NO: 461813 - DNA, 100 bp, Homo sapiens
tctatagccaaggaaggcttcgagaagattagcaaaggtgctaatccagtggaaatcaggagagatgatgattctgataccgagacgtcaaatgacttgc

SEQ ID NO: 461814 - DNA, 74 bp, Homo sapiens
atcacagagcctatttacccagaagtagtccatatgggcaattgaaggaacagactaaaaatcgtgtcctggaa

SEQ ID NO: 461815 - DNA, 75 bp, Homo sapiens
gcgctctgcccggcgagtcgggctctggaggaaaagaaaggtggtatggtcaggaaaaagactacaatgtactag

SEQ ID NO: 461816 - DNA, 118 bp, Homo sapiens
actgagcgtatgtgccacgccgcccaggagacccctctgctgcaccacttcatggtacaggtttgcagattccgccagcagcacagcaagctctacagatgagtggctctttggcatt

SEQ ID NO: 461817 - DNA, 100 bp, Homo sapiens
ctcacctgccttgcatcgttccgagtcctgtactggactgcatcaggccgcgtctcctcaggactgcctgaagttacatttagagactgaaatcactgca

SEQ ID NO: 461818 - DNA, 100 bp, Homo sapiens
ctgcagctcttcaggtccatcaatgacatgatgagcagcatgtcagaccagaccgtccgggtgaagggctctgtggtatatgactgcttcgaggctgccc

SEQ ID NO: 461819 - DNA, 82 bp, Homo sapiens
ggtggttgtgcaggatggcgacggcggcctacgagcagctgaagctgaaaatcctgccttgcttcgttgggcctatgcaaga

SEQ ID NO: 461820 - DNA, 75 bp, Homo sapiens
gaggagggcacaaggccaggttcccaagagctcagctttgacaattattctgccaatgttatggtagatggaaaa

SEQ ID NO: 461821 - DNA, 100 bp, Homo sapiens
cgcgccgctgctcccggaccgggccgcgcacgccgcctcaggttcgctgtgatcctgagattcaagaactgcgtcagtggcagaagaaacttcgcgaggc

SEQ ID NO: 461822 - DNA, 100 bp, Homo sapiens
tgaatactgtgacactgaccaccaggccaacttaacatcagcagatatcctgtctcagatgaagagcccatcaccactgagaatgcaccaaagaatgtag

SEQ ID NO: 461823 - DNA, 100 bp, Homo sapiens
gtgcccacactggccgtcccggccatctcgctgcccgacgatgtccgcaggcgggggccccactgcacccaggtcatccctgtgcagggccgggtcacct

SEQ ID NO: 461824 - DNA, 95 bp, Homo sapiens
atggattcagtttgcatctctccctcctttaaacagcttctccgggtctcagcatgatgaagagcatgatctagaagaggatgagagtggcactc

SEQ ID NO: 461825 - DNA, 82 bp, Homo sapiens
cctcgctctccgccgcccgcaccgccgcccgcgccctcaccaggtgagaagccctaccactgcaactgggacggctgcggct

SEQ ID NO: 461826 - DNA, 74 bp, Homo sapiens
catttaagagtgaatcagaccttcaactggaatacaaacagcaccttgtattctggcctagatgaagtggccga

SEQ ID NO: 461827 - DNA, 90 bp, Homo sapiens
ccaggcattagcgcagctcgagaaggccaaggtggctctgagggtcctgttccccgaccgctacgtcctacagggcttcttccgccccag

SEQ ID NO: 461828 - DNA, 82 bp, Homo sapiens
aaagcagcgtgcgttcagccctgggaggacaagaattttgggcagatttgaatgccatgaacgtgtatgaaacaactgaatt

SEQ ID NO: 461829 - DNA, 74 bp, Homo sapiens
gaccaggctcttgaatatcttaggacttatcttcaaaggtttggctctttaaccatggatggtggccttcgcaa

SEQ ID NO: 461830 - DNA, 75 bp, Homo sapiens
agagatgtgatcactggtttcgtggcctgaccaaggacctccaaggaaacccagaagttctgtgaacaagtccat

SEQ ID NO: 461831 - DNA, 90 bp, Homo sapiens
ctgcgccccgctctgctgtgggcgctgctggcgctctggctgtgctgcgcggcccccgcgcatggtgaatctggattgggaaagtcgaca

SEQ ID NO: 461832 - DNA, 83 bp, Homo sapiens
cgccgcgcgcccgcgccctccgcgcgacgccagggctgaagaagatgcagagcagcctgaagctggtggactgtatcatcgag

SEQ ID NO: 461833 - DNA, 100 bp, Homo sapiens
gaaagatgttttaatgattcttccatatgtggcaattgtccaagaaaaggttgggcccatgagatgtgtgctctgtatattccggaggtacaatttgcca

SEQ ID NO: 461834 - DNA, 82 bp, Homo sapiens
taaccagttagtggtgctcaacgtgtacgacatggaccggagcagggccccaagcccccgggcctggtgggggacgcgcttc

SEQ ID NO: 461835 - DNA, 83 bp, Homo sapiens
ctttactcggcggcagtgcaagcctaccatcgtttctaatagttgatctctctaatgtattagatcttcatgcctttgatagt

SEQ ID NO: 461836 - DNA, 50 bp, Homo sapiens
tttcaagaacaaaggccgcgacttggagatagcctgggctggaagctctt

SEQ ID NO: 461837 - DNA, 75 bp, Homo sapiens
cgtcccccgcgggtctgctctgtgtgccatggacggccacggcctgcggcgcccgcggcaccatgatctccacca

SEQ ID NO: 461838 - DNA, 75 bp, Homo sapiens
tttcggttctacctgggagaatccaccgccatccgccaccatgcggaagaccctgaagaccctgcgggaccaatg

SEQ ID NO: 461839 - DNA, 75 bp, Homo sapiens
cttatgtacatgggatacaaatttgagcagtacatgtgtgcagacaatgcagatcttcgtgaagactctgactgg

SEQ ID NO: 461840 - DNA, 83 bp, Homo sapiens
ggagagcaaaggctgtgtctacggcagcctggggatatagatgaatttcatcctttcatcgaagcacttctgccccacgtccg

SEQ ID NO: 461841 - DNA, 99 bp, Homo sapiens
gatgatttgaagatattagcctaacaagatggaagcaggtttaaaattttacataagaagttacctttttcagggatgcttgaagatggaaagaaattt

SEQ ID NO: 461842 - DNA, 100 bp, Homo sapiens
gtgtgattagcttcgcagtctggaaagctttaggagttcacagtatcccagattacaggaatgcagtaatcgtggccaagtctccagcctcggcgaagag

SEQ ID NO: 461843 - DNA, 100 bp, Homo sapiens
ctcacctccctaaactggttaatagtggcatggaagatccatttgaacatacatatgatagttgagaaagacacatattctgatcatgaagaaataaaca

SEQ ID NO: 461844 - DNA, 100 bp, Homo sapiens
ccgggacccggttccccggcccacagtgggggtgtgcaaacccgagagaactggctcctgcccctcctaaagctgaagccaaagcgaaggctttaaaggc

SEQ ID NO: 461845 - DNA, 100 bp, Homo sapiens
cggcgatgcttaggccccgtaggcaggaggcgaaggaggaggacgcagaatagcactgctgtcactcctgcagtgctgtgggaggagtcagagattatgc

SEQ ID NO: 461846 - DNA, 100 bp, Homo sapiens
cccgcgaccctcccgcagcctgcctttccttccccctcggaaaatggttcccactgccgggcgagtaatctatgccagcaattatgacaatgttagcaga

SEQ ID NO: 461847 - DNA, 100 bp, Homo sapiens
cagcttcatcccgaccggaaccctgatgatccacaagcccaggagaaattccaggatctgggtgctgcttatgaggtgcataaggcaaatccaatacgca

SEQ ID NO: 461848 - DNA, 103 bp, Homo sapiens
gatacattaaatgcaatagcccttcagtactgttgtacggtggtttgggaacattccatgcccttctaaatacagctgtacatgtagtcatgtattcctacta

SEQ ID NO: 461849 - DNA, 100 bp, Homo sapiens
gtggaactattggaaaggccttcactgcacaggtatctccctgggataaaaaagaagaagctaaccagaaaaagctggaatttgcattcgcaaacagtga

SEQ ID NO: 461850 - DNA, 98 bp, Homo sapiens
aaatagtaaccctgccaaatacatcagcttgtaggagacagagaatgaagaacaaattttggtattttgagtttggcacatctgaaactttctcagcc

SEQ ID NO: 461851 - DNA, 74 bp, Homo sapiens
tcaatagacagcccatggagggtagatctcggtggacgtgcaagtcagagaaatggtgaaactcctgttttccg

SEQ ID NO: 461852 - DNA, 100 bp, Homo sapiens
gaaaaacaagctgaagaaatggcatcagaatcccttgcagctagagtcatggaagcgaagaagtttccacaattagatgtgcctatgcaagatttgaaaa

SEQ ID NO: 461853 - DNA, 100 bp, Homo sapiens
aaaaactccctccgccaaatcgtgacaccatgaaagtcctctttggacatctaactaactcttcacagatggaatcacaaataaacttattggctgttac

SEQ ID NO: 461854 - DNA, 75 bp, Homo sapiens
caaaaaggaaaatcctttcttgaggcaagagttaaaagcatattggcagaggaagagccctggcattccagcagg

SEQ ID NO: 461855 - DNA, 101 bp, Homo sapiens
accatctaaaatacgaaggtttctggctggtgggttgaccacacaggtgcagcctcacagaagaaggctttccgttcttcaggatttggactagagttcaa

SEQ ID NO: 461856 - DNA, 83 bp, Homo sapiens
aaggagcggaccccgcatcttcgccgtctggaaagatgccatggacaatattaccaggcagaaccaattctacgatacccaag

SEQ ID NO: 461857 - DNA, 101 bp, Homo sapiens
agagccgggagaagaaccagcccgaggtggacatgagtgaccggggcatctccaacatgctggatgtcaacggcctctatcaatgaactgagccatgttca

SEQ ID NO: 461858 - DNA, 50 bp, Homo sapiens
gacaccaaacatttcctgccgctcggtgctggagaatctggtaaaagcac

SEQ ID NO: 461859 - DNA, 75 bp, Homo sapiens
gagaaagtgcagaaatcgtctgcccccaggaattacatgaatgacagtcttcgaaccaatgtgtttgttcgattt

SEQ ID NO: 461860 - DNA, 109 bp, Homo sapiens
cggggttcgggtgtctcgtgtgtgaacatcacagattacctctctagtgacccttcagctgttaaccctggttggccatgacgatcagcttgatggaccaaaatacaaa

SEQ ID NO: 461861 - DNA, 100 bp, Homo sapiens
aagctctgctccacactgccaaccggccagaggacgagtgtgatgtagtccagccggcagctgtgcaagctcaagggcaggtgaatgacgagaacagaag

SEQ ID NO: 461862 - DNA, 98 bp, Homo sapiens
acctacagtgaaatagcatggatttcatccattatgctggctgttatgtacgcaggaggtcctcgatgggcttcctggaatattggtgtgtttatttg

SEQ ID NO: 461863 - DNA, 80 bp, Homo sapiens
caagacatttcctgctcggaaccttgtttactaattgactggaatgtcacgtggaataccagcaaccccgacttcaccaa

SEQ ID NO: 461864 - DNA, 83 bp, Homo sapiens
cggacagccgcgcgctgagggtctcggggcgggcgccgcgggacctctccgggccatgggcgtccgacctccgatcatgaacg

SEQ ID NO: 461865 - DNA, 100 bp, Homo sapiens
gaactggcttcggatggcgtcccgcgtagacgcagtggcctccaaggtgcagacagctgtgactatgaaggggaaaagtccaacctgatcgtggtccaga

SEQ ID NO: 461866 - DNA, 48 bp, Homo sapiens
ggagggcatcttcaaccacaaagtcatcaagcctcctttgcgtcattt

SEQ ID NO: 461867 - DNA, 83 bp, Homo sapiens
gtcggcagcaagaacagagagagaggtggacagatctgagagatactgaggtcttccccagggaggtcctgaactacacagct

SEQ ID NO: 461868 - DNA, 75 bp, Homo sapiens
gagatcgacgcgcagctgcaggctgagaagcagaaggccagggtgaactgtcacccctacaactcagcttgcaac

SEQ ID NO: 461869 - DNA, 98 bp, Homo sapiens
cggtttacagcgaagtccacccagcgtttccgagttctagttcaccattgactttaccagcagatttgaagaacatcttggagaaacagttttctaaa

SEQ ID NO: 461870 - DNA, 83 bp, Homo sapiens
cgggagcgagctgggagggagccgcgcgcctttgtgcgcgcgccgagtgggtaattccagaattgattggccataccattgtc

SEQ ID NO: 461871 - DNA, 90 bp, Homo sapiens
gtctctttttcttggatggttgggagcagatcgattttaccttggataccctgctttggacatgaagaccctgttaccagtaagcaagcc

SEQ ID NO: 461872 - DNA, 74 bp, Homo sapiens
tgatatgcaatgtcacttacaacattaatcagatactgcatttaagatgatgaataaggtatttggaggtactg

SEQ ID NO: 461873 - DNA, 99 bp, Homo sapiens
cgacaagaaaaacaatcgcttcaatgatgggaaggtggatcccgccgggaggtactttgctggtggctttcctgggggaatgcctggtaattttcccgg

SEQ ID NO: 461874 - DNA, 82 bp, Homo sapiens
ctgctgctatgaatatgggtcgaccattccaaaaaaatcggtctggtgtcggcgcgcctgttatcggtgagatcgatgggga

SEQ ID NO: 461875 - DNA, 50 bp, Homo sapiens
aagagcgctcccaggagaaacaaattcccaaatgctggaaaatcctcttt

SEQ ID NO: 461876 - DNA, 100 bp, Homo sapiens
aaaacatttttgaaaagacaagccatcaaaactgccttcagaagcaaaagccgattccacgactcttctttgcgggagaacatacgatccgtaactaccc

SEQ ID NO: 461877 - DNA, 83 bp, Homo sapiens
gtttgggatcatccagaagcatctgaagaccatggatcacaaccggaaccgcagggtgtttgagaagtcccccctgcgggtga

SEQ ID NO: 461878 - DNA, 82 bp, Homo sapiens
gctgacaaaggagcggaggagcagtcgcagctgctttccgaggaagccggtgttgccgagctatgctaagaaggaatctgat

SEQ ID NO: 461879 - DNA, 51 bp, Homo sapiens
tggttattgacatctcttgtatttatgggttttatgacttacctagtggag

SEQ ID NO: 461880 - DNA, 118 bp, Homo sapiens
gctattgtggacagcccaagaaaggacatcttatctttgatgcttgctttgaaagtgataattagcaccatggagcctcaggtgtcaaatggtccgacatccaatacaagcaatggac

SEQ ID NO: 461881 - DNA, 89 bp, Homo sapiens
agtacaggaggagtgcgcaggacggcccagccccagcagggtgtgtccgcagccggccaggtggtatccctgaaggtgtggctgattga

SEQ ID NO: 461882 - DNA, 100 bp, Homo sapiens
ggaggcggctccgggggaacccgccgccgggttttgcacactagggaccaagaagccctcggggacactgctgagaaaagactgccgaagggaagaccag

SEQ ID NO: 461883 - DNA, 88 bp, Homo sapiens
ccacgcgtcctactacaaagatgctctgcggtttttgggctgtgttgacatcaaggatctaccaggtttaacctgccatcccagtcgc

SEQ ID NO: 461884 - DNA, 83 bp, Homo sapiens
gtttaatatgattgtagaaatacctcggtggacaaatgctaaaatggaggaacttagtgatttggcccgtgaccctccagcac

SEQ ID NO: 461885 - DNA, 50 bp, Homo sapiens
tttatccagtttcctggatggaccaagtggctgagcacggtgccaggttc

SEQ ID NO: 461886 - DNA, 101 bp, Homo sapiens
ggaccagacacacaggacctggaaggccagagccctccacagagcctgccttcaacccccaaagcaggtacaccaggggttggaaaaaccacactaggcaa

SEQ ID NO: 461887 - DNA, 122 bp, Homo sapiens
atcagaaaactatgggaagattttggtagagaagaatgaacattgtattgagaacaatatagatttgcagggcacctttcacagccagcaggcattggaatatggcaccaaactcgttggag

SEQ ID NO: 461888 - DNA, 100 bp, Homo sapiens
caatattggaagcgctttgatttacagcagctgcaggctactgcagcactggggtgtcagttgttggtccgacccagaacgcttcagttctgctctgcaa

SEQ ID NO: 461889 - DNA, 82 bp, Homo sapiens
cgagcggcgcccagcccagcgcctcggccgaacccctccgcagcagtaaaatgtttattggaggcttgagctgggatacaag

SEQ ID NO: 461890 - DNA, 98 bp, Homo sapiens
gctcccagcttcaagcccaaccaagtgcgagatctgcgtgaaaagtctaacttcaaacttgtggctgttaattcaaaactctatgccatcggagggca

SEQ ID NO: 461891 - DNA, 75 bp, Homo sapiens
ttggagcgaagagctcggaccaagcgctcagaaagccattgatctggtgacgaaagccacagaggaggacaaagc

SEQ ID NO: 461892 - DNA, 100 bp, Homo sapiens
gagagccgcggctccgtgtttctggaaagtgacagcaggaagttctactacatcaccctgctacgagaccccgtgtcccgctacctgagcgagtggcggc

SEQ ID NO: 461893 - DNA, 101 bp, Homo sapiens
acaaaagctgctcagagtctcaatgaacttgatctgttattttgaaccacatggccagagaacatgctttcaacattggattgccagacaacattgtaaac

SEQ ID NO: 461894 - DNA, 50 bp, Homo sapiens
gcggcgttggaggccaccgtttccagtgtatcctactcagtacatgtatc

SEQ ID NO: 461895 - DNA, 100 bp, Homo sapiens
aatgcaattcttatggagcaaattaagaatccacctcattgcctggagatcacgccaccatcttcagaaaagctggtctcagtgatgcggttaagtgacc

SEQ ID NO: 461896 - DNA, 82 bp, Homo sapiens
tcggccccggcccgactctatcacaagaagttgaagatcctctttgtaacttccactccccaaacttcctgaggatctcaga

SEQ ID NO: 461897 - DNA, 75 bp, Homo sapiens
ctacttttgtaattctgtacagaagttaccaatttgtgcacagtgtggatgatgatgctgaagctatccttgctg

SEQ ID NO: 461898 - DNA, 98 bp, Homo sapiens
tgacctgcaggtactgggagttacatagctaagatgccaggacaccccgaaagccggaaaacgggactttccggtggaggacgttttcaccctgcctg

SEQ ID NO: 461899 - DNA, 82 bp, Homo sapiens
cttcgaacttagacttccggaaggactttggcgagggtcgcaatggaagaagagatcgccgcgctggtcattgacaatggct

SEQ ID NO: 461900 - DNA, 83 bp, Homo sapiens
gccttcgtctgcacttaccttggaagccaatatatcttcacagaaatggcctcggagaactacgatgacccgcacaaaacccc

SEQ ID NO: 461901 - DNA, 88 bp, Homo sapiens
cggtacctgaagacccgggagaagatcaacagtacaaattctgaagtttgtaaacttgctgatggtggtggtaagccatggcagatga

SEQ ID NO: 461902 - DNA, 100 bp, Homo sapiens
gggaaacaaggcttccagtgccaagatcttgtagaaaatttcagctgtagcccttggactagaagctgaaataacagaagctgtgtacgatgcattaggg

SEQ ID NO: 461903 - DNA, 121 bp, Homo sapiens
caagactgtatgatagtgttagttccacagatggggaggacagtctagagagaaaggaggttcaaaatggaagactgtttaggctcctagcaaaattgggaacaatcaatgagaggccgga

SEQ ID NO: 461904 - DNA, 50 bp, Homo sapiens
caatactggatttggtgctgttggttcgcttgctgatgaccgtatggcac

SEQ ID NO: 461905 - DNA, 100 bp, Homo sapiens
ggcggcttcggcggctcaggttgtggtagaggcggaggctcaggcagcttgaggaggaagtctaacaggagctgtatttaatccagctttggcactttcg

SEQ ID NO: 461906 - DNA, 142 bp, Homo sapiens
tcttcaggaaacagctagagaaggcagaatatgaaataaagaagactacagctatcattgctgagtataaacaggtcaagactgatacagttcttatattgtgtagaaagaaagtggaaaacacaaggtgggattacctgac

SEQ ID NO: 461907 - DNA, 99 bp, Homo sapiens
gggaaatcgtgcacttgcaggccgggcagtgcggcaaccaaatcggcgccaaggcgggcaggaagacctatgccatggtgtccagccactcagctggtc

SEQ ID NO: 461908 - DNA, 74 bp, Homo sapiens
ccgacggcaaaggtgtcgtggtggtcattaagcggagatccgggaagatcagttttcctgccatccaggctgct

SEQ ID NO: 461909 - DNA, 100 bp, Homo sapiens
aagccaagtgatgtcatgcttgttcacttccgaaatgttgacttcaactatgctactaaagatcctctgccttgtcaatgttagtcacaatggtgtgagt

SEQ ID NO: 461910 - DNA, 100 bp, Homo sapiens
ctcatggagatccagctgagcaagaccccaccaacaactgaacgctttggtcaggctgctacaatggaaggaattggggcaattggtggaactcctcctg

SEQ ID NO: 461911 - DNA, 74 bp, Homo sapiens
gcacaacaaccttatttcgtgctgtgaatccagagctcttcattaaacctgtcttgtccagaatgccgtgtgat

SEQ ID NO: 461912 - DNA, 101 bp, Homo sapiens
cagccatgcccaccaccatcgagcgggagttcgaagagttggatactcagcgtcgctggcagccgctgtacttggacctggaggaacttgctttgtaccag

SEQ ID NO: 461913 - DNA, 97 bp, Homo sapiens
tgaacaggagtcaatggcaaggctaaagaaattaatgacaataatggatagtatgaatgatcaagtggcctggtttgctttcgaccctggctcggcg

SEQ ID NO: 461914 - DNA, 83 bp, Homo sapiens
cttcagggtctggatctcagcttcttccccaggaacatcaacaggaagactatgaccgtctgaggcctttatcttacccaatg

SEQ ID NO: 461915 - DNA, 100 bp, Homo sapiens
tgaactcaagtcaccgtggagctccgccgccccgaaactttcaccgcgagcgggtgctgtacttctttgcagtatacaaggactagcagttaatattgac

SEQ ID NO: 461916 - DNA, 97 bp, Homo sapiens
tttctgggactgcagcaccagggtggctacgcctcccggctgaactcccccactggaaaggattctgaaagaaatgaagtcagccctcagaaatgaa

SEQ ID NO: 461917 - DNA, 121 bp, Homo sapiens
gagctgctgcaggcggtgggcattgttggcgccatcatcatgccccacaacatctacctgcactcggccctggtcaagatggagtgtcactctgttgtccaggctggagtgctgtggcgtg

SEQ ID NO: 461918 - DNA, 82 bp, Homo sapiens
gaagagaaggagggaccttctgcagagactccgggcacagaccccacaggctcctcggacactgggtccatcacctcctgcc

SEQ ID NO: 461919 - DNA, 59 bp, Homo sapiens
aacttctcagaactgcccctggtcatgtggcttcaggcccgtgtatttaatgaaactcc

SEQ ID NO: 461920 - DNA, 48 bp, Homo sapiens
actgcccaccagctcatactaatcggtttgtacaatgacgacagaaac

SEQ ID NO: 461921 - DNA, 75 bp, Homo sapiens
ccggggacagccagccctcgctggaccagaccatggccgcggccttcggaaagcggagggaaaggccacttccac

SEQ ID NO: 461922 - DNA, 90 bp, Homo sapiens
aggcccgggagcgccgagcgtcgccgccgccgccgccatgaacaactcgggcgccgacgagatcgggactgatcctttgaaatactccag

SEQ ID NO: 461923 - DNA, 74 bp, Homo sapiens
atcgttaaagtctctcttcaccctgccgtcatgtctaagtcagagcatctcataatctatcctggggaattcag

SEQ ID NO: 461924 - DNA, 51 bp, Homo sapiens
gcggctttctgaactagattggacatatctgaagagatggattaagaatgc

SEQ ID NO: 461925 - DNA, 82 bp, Homo sapiens
aggagcagatttacaaactggccaagaagggccttactccttcacagatcggttacttttcacatagaaccatatagcaatc

SEQ ID NO: 461926 - DNA, 76 bp, Homo sapiens
ctcctctctgcaagtgaataggcccagaaaggtgtcgatggccaggtggtcttcataaactatactgccttgtgat

SEQ ID NO: 461927 - DNA, 100 bp, Homo sapiens
tcagctcccggaaaaactacaccaagcacatgttcatccactcgggtgctcttacagcctgttccaagtgtggcttaatccgtctccaccaccagatctt

SEQ ID NO: 461928 - DNA, 75 bp, Homo sapiens
acttcggaatgcactacaacaggaaaatcatattatagatggagtaaaggaagggatgagaccatgcagcctgcg

SEQ ID NO: 461929 - DNA, 100 bp, Homo sapiens
tgtgtccagctgtgggcaggcgggcagtcagagcatcgggagcaacgtcacgctcatcaccctgaactcggaaggaagcgcaacaggaaaggagagaaga

SEQ ID NO: 461930 - DNA, 100 bp, Homo sapiens
atctctgtgcttcgtgaagctaatcaagcaattaatcccaagttgcttcagttggtcgaagacagaggttcaggagttgtccgggcctccagcatcttcc

SEQ ID NO: 461931 - DNA, 75 bp, Homo sapiens
aggcaaggagagaatgtatgaagaacagtcacaggacagtgcaggccaaggccccctgcccatggaggtgtgctg

SEQ ID NO: 461932 - DNA, 89 bp, Homo sapiens
tgagactcctgctcagtgtagcattaagacattcaacgtctgcagttggatctgcagaaaatggagcttctagaaagtaagatgactga

SEQ ID NO: 461933 - DNA, 75 bp, Homo sapiens
aagcaagcagttcagaagagccaaggaataaacatgcaatgaacccaaaagggtgcggctggaagtatttcgggc

SEQ ID NO: 461934 - DNA, 100 bp, Homo sapiens
agggaagtcaaaagcatgcaagcctacagaaaagcattgagaaagctaaaattggccgatgtgaaacggtgtttaatcaggaaggagaattcatgttgaa

SEQ ID NO: 461935 - DNA, 96 bp, Homo sapiens
gaatcctgctgcatcacagaagctggaagttctgatgttccactgaaatcacaatggaaagtcttgacttgactgtgtgatttggatcatggccat

SEQ ID NO: 461936 - DNA, 75 bp, Homo sapiens
cttgaatcctttctacaaggagtggctgaatagcattggcaattactacaagccgtggttctttaagcatgtgga

SEQ ID NO: 461937 - DNA, 75 bp, Homo sapiens
ccactgttcactagtctagcttcagatgaacaggcggtctatgcttgcttggtgcttatgctgacagtgatgacg

SEQ ID NO: 461938 - DNA, 75 bp, Homo sapiens
attccaagtaactcttatttgaaccacctctgtgcagaaaagcaaccaccttgttctctattctgctgcccgaga

SEQ ID NO: 461939 - DNA, 75 bp, Homo sapiens
tgtctcaaggactcaccccgtttccgaaatcctaagtaatgcactgaagagaggagagatcattgcaaagcaggg

SEQ ID NO: 461940 - DNA, 75 bp, Homo sapiens
atctcctgggccgcctggcggccatcgtggctaaacaggtactgctggtggagaacccacatcactgcgatttcc

SEQ ID NO: 461941 - DNA, 100 bp, Homo sapiens
attatccttagcaaagtaacgcaggaacagaaaaccaaacaccacatgttgtctcttagaagtgggagctgaacggtcaaaatgcagatcttcgtgaaaa

SEQ ID NO: 461942 - DNA, 100 bp, Homo sapiens
tgaatgtgtacgtgcttggaaagacgtttcttctcttggcaagagagctctgcatcaatgcgccggccataggtcattttaaactctcagagtgaacgtc

SEQ ID NO: 461943 - DNA, 90 bp, Homo sapiens
gcccttcggccgcctacttcggtgaataaccctataccttccaatttgaaatcagaagcaaaaaaggctgccaaaatattaagagaattc

SEQ ID NO: 461944 - DNA, 98 bp, Homo sapiens
acagaggtgtgctgacgacctgctacaacagaagtgactattatatggttaaaaagattttggaggaaaacagttcaggtgacttgaacataaattgc

SEQ ID NO: 461945 - DNA, 100 bp, Homo sapiens
gtttgctgatcgccccagggatcaggagcctctggacgagaccagccagatgagcgacctcccggtgaaggtgatccacgtggagagtgggaagatcctc

SEQ ID NO: 461946 - DNA, 100 bp, Homo sapiens
tttctgggatccagcgagcgacatgggtcctggtcctggacaaaggagtagtagctgaatttgattctccagccaacctcattgcagctagaggcatctt

SEQ ID NO: 461947 - DNA, 82 bp, Homo sapiens
tctcaatcagaattactagattttctctcaaactacgagatgaatggaccaggtagtttgtttgcttcagagaatttcctgg

SEQ ID NO: 461948 - DNA, 82 bp, Homo sapiens
caggaggccaggggtgtcgccatgaagatttcagccccggccacgatgtttgctgtcagcggatggaaaagtcttcctcaat

SEQ ID NO: 461949 - DNA, 100 bp, Homo sapiens
tggagatgacaacttgacttctctggggactctgaacttccctggtcgaacagttttttctaatggctattcaagaaatttctacacccagaccatcttc

SEQ ID NO: 461950 - DNA, 82 bp, Homo sapiens
accgcatcaagagcttcaagaacaagggccgcgatgtggaaacaatgcagatcttcgtgaagactctgactggtaagaccat

SEQ ID NO: 461951 - DNA, 82 bp, Homo sapiens
atcacaggggaacacagccaactgttaggcttgcagaaggggaacaaatcttatctggtggagtgtttaataagcagaaaag

SEQ ID NO: 461952 - DNA, 120 bp, Homo sapiens
tcagagagccttgggccagagttccaggggctctgggagtggctgccagttttcggctttgtgagaaaccttaccatcaaacacgatggccagcaacgttaccaacaagacagatcctcg

SEQ ID NO: 461953 - DNA, 100 bp, Homo sapiens
tctccagaaaccagcagatattcctgcgggacatagaacaggtgccacagatcatggaagggaagtggttgctgtgtatgttactggtgcttggaactgc

SEQ ID NO: 461954 - DNA, 100 bp, Homo sapiens
acccctgatgcctctggcacggcagtacggcctctcagccccgcacgagcccctggaggtcccagccgtcggttcaagcgagtggtggagaccatccagg

SEQ ID NO: 461955 - DNA, 74 bp, Homo sapiens
tagtgaagatgctggaaaaatacctcaagggagtgcatccgccccaacccttttccccctcgtctcctgtgaga

SEQ ID NO: 461956 - DNA, 105 bp, Homo sapiens
ggcagtgccacctgccagctgtcagcaaggtaatagcctgcagctggtgttttgagaagccctactgctgaaaacttaacaattttgtgtaataaaaatggagaa

SEQ ID NO: 461957 - DNA, 100 bp, Homo sapiens
ctgttgtgagaggctcagagaaagcagagggtgagatggatgagtccagcattctaagacgaagagggctccagagtgctgcagcagctcccagtccagt

SEQ ID NO: 461958 - DNA, 83 bp, Homo sapiens
aatgaatggacacagtgatgaagaaagtgttagaaacagtagtggagaatcaaggacacagcattgttggttttgccatgtac

SEQ ID NO: 461959 - DNA, 82 bp, Homo sapiens
gggcgttttgcagcgacccagctataagttcttcttcaagtctatggacgacgatttcggcaacacagtcactcctggcggc

SEQ ID NO: 461960 - DNA, 100 bp, Homo sapiens
cgtacacttcttggcagtcatggacaagagctattgatagaagcttcctgcctgacacagctcacttcaagaagtgcacaatgtcagaacgtggaattaa

SEQ ID NO: 461961 - DNA, 100 bp, Homo sapiens
tcccgaccccaaaagagtattcttggatcttgcacaggaaggaattaaagtacaagccagctgccatgttgtgagcacataccacatagctccatggaga

SEQ ID NO: 461962 - DNA, 101 bp, Homo sapiens
acaagacaaggtgaagcctcggaagttggggagtcagccggcatgataatgctatcaattacctcgacttcctgagagcagtggagaacagcaagtcaaca

SEQ ID NO: 461963 - DNA, 100 bp, Homo sapiens
ccacatgaaagttttcagcctcatccagcaggcggtgacccgctaccggaaggccatcgccaaggagactccatcctctgccaatggcccttcccgggag

SEQ ID NO: 461964 - DNA, 100 bp, Homo sapiens
ggaatgtccggtgaaacgggagcgactatcagagactagcccagcgttccgcattctcagtgtggagcccaggtcattgatgtccttcaccccgggaagg

SEQ ID NO: 461965 - DNA, 75 bp, Homo sapiens
cgcggccggcccggcgcggcccagcgccctcaggcaacatgagtgagaatgaggaagaggaaatttctcagcaag

SEQ ID NO: 461966 - DNA, 90 bp, Homo sapiens
ggcccgggggcggggcggggcgccagccatggacaatcagacttaattcagtgcacaaatgagatgaatgtgaacatcccacagttggca

SEQ ID NO: 461967 - DNA, 75 bp, Homo sapiens
cgcgaccatgtcccatcactgggggtacggcaaacacaacggtttggcagttctctaccagtggaccaatctttt

SEQ ID NO: 461968 - DNA, 82 bp, Homo sapiens
gctgagggctgatgggttctgacggataatttccaagccagtgtggacgaatgtggaacctcgctctgtggctgtgttccct

SEQ ID NO: 461969 - DNA, 75 bp, Homo sapiens
agccacacgccacagtcagcgtctgctgcttgtgaagaaatagcctaccaggaatcatatgaagatggcccttgt

SEQ ID NO: 461970 - DNA, 100 bp, Homo sapiens
agcagctgctgtcccgggcctaccccctggactccctggagaagcagatggaaaagagctcagtgcctctgatgacagctccctgtcagatgggctcctc

SEQ ID NO: 461971 - DNA, 83 bp, Homo sapiens
gcacttccagcccttctggattcagatgagatttgtagcctcgtgtggcttcaccccagatgtgaaggtttgggaagtctgct

SEQ ID NO: 461972 - DNA, 50 bp, Homo sapiens
ggaaagttccagccggttcgagagctagtttttggctttcacccccaacc

SEQ ID NO: 461973 - DNA, 82 bp, Homo sapiens
cgcctgggccgggggctgcagcatgtgccctctggtggtcagaagatgctgtgctgtctcgttaggatgaatggattaaaat

SEQ ID NO: 461974 - DNA, 89 bp, Homo sapiens
aaaaagagatgtggggggattctcgacctgctaacagaactggaccttttcggttacctgtcctgctgccgattcctggatgacaatca

SEQ ID NO: 461975 - DNA, 100 bp, Homo sapiens
agtactgaacaaactggaaaaaccacaaggcctttatcctaactatctgaatcccagtagtggacagtggggtcaacacccttcttatgactcagtcaga

SEQ ID NO: 461976 - DNA, 100 bp, Homo sapiens
gccatgtcaactttgttcggaagaatgtttctccatcccagagagatgaagtaattcaatggctggccaaactcaagtaccaattcaacctttacccaga

SEQ ID NO: 461977 - DNA, 87 bp, Homo sapiens
acgagttttgaagggtgatgtggaaaaactttctgttattgttgtgggtaatccagccaataccaactgcctgactgcttccaagtc

SEQ ID NO: 461978 - DNA, 50 bp, Homo sapiens
agctgatgagcccttgaagcacagcagatcaaaggtccatcatcaaaaca

SEQ ID NO: 461979 - DNA, 87 bp, Homo sapiens
aaatctacaagatgatgcagggaggagatctattaatgagatgaagcggttggaagaaatgtcaaatatgtttcagagctctggagt

SEQ ID NO: 461980 - DNA, 100 bp, Homo sapiens
aggaggaggagtgcggcgcggcggccccgggaccaaggagtggaatgcagtagccctctgggcctgggatattgtggttgataactgtgccatctgcagg

SEQ ID NO: 461981 - DNA, 101 bp, Homo sapiens
gcgcagctctggactctgcgtataacaaaatgagccgtcagactgctacagcattacctaccggtacctcgaagtgtccaccatcccagagggtgcctgcc

SEQ ID NO: 461982 - DNA, 101 bp, Homo sapiens
aacagcgtcgccttgcaacactactaggtcttcaagccccaccgacacgaattggccttattaatgatatggacttatcaaactggtttcaaagcacagag

SEQ ID NO: 461983 - DNA, 90 bp, Homo sapiens
ccggaccgatgtggaaactgctgcccgccgcgggcccggcaggaggcagagacccgtgctgagtttgctgagagatcggtagccaagctg

SEQ ID NO: 461984 - DNA, 82 bp, Homo sapiens
agtggatcggggacggagagaacacgagcccatcaggtgacttaagagattaaaattaatttggttgctgttggttctgaac

SEQ ID NO: 461985 - DNA, 75 bp, Homo sapiens
aacaaactcgaagaacagctgtggaaagaagttgcaaaacactgggtgactctgacatcattagaagcatgccag

SEQ ID NO: 461986 - DNA, 50 bp, Homo sapiens
tcccagaggactttggagaccagtagacccaaatgatttgtacattgtag

SEQ ID NO: 461987 - DNA, 50 bp, Homo sapiens
ctgagacggtgtcccgccgaaagggtataactccaccagggaatgctccg

SEQ ID NO: 461988 - DNA, 75 bp, Homo sapiens
tacccgagaacgtgcgggaagagaagatcatcgagcatttcaaacggtgcgcgcggagccatggttatcatgtcg

SEQ ID NO: 461989 - DNA, 80 bp, Homo sapiens
gatcctggtcctcgatccgcccacagacctcaaattcaaaggaggctactcacagtcgaactacaactccccggggtccg

SEQ ID NO: 461990 - DNA, 100 bp, Homo sapiens
ttaaaaatcaacaccaggactacagtaaggctgaaatcattgaagtgcttggagtgcagaactgaaagaggataagtctacttttcttccacgtaacaac

SEQ ID NO: 461991 - DNA, 82 bp, Homo sapiens
tcccagcccgggtccccgcgttcacagccccagcgcagatgggaagcggtctcgagcagaagccccactgaagtgtcccctg

SEQ ID NO: 461992 - DNA, 90 bp, Homo sapiens
ggaattttgtcttctgttgggcttggaacagggctgcacacctttctgctttatctggcatcacgaaagagccaagttttatttcaaaaa

SEQ ID NO: 461993 - DNA, 100 bp, Homo sapiens
ttacatgttccacaagaagtgcagcttataatccaagctattactcaggtactaggttttgacaagcttgcatcatgcgtgagtataagctagtcgttct

SEQ ID NO: 461994 - DNA, 75 bp, Homo sapiens
tgagagtgaccaggcttgttctggatccctatttattaaaggtttggttgggatgttccagtaattctgagaaat

SEQ ID NO: 461995 - DNA, 100 bp, Homo sapiens
actcgagtgtccagacctgctcgatggttcattttgatggttgggaccataagtatgactactgggtggaggcagacagccctgatatccacccgatcgg

SEQ ID NO: 461996 - DNA, 83 bp, Homo sapiens
acaaacagcccgcccgaccccgtcccgaccctggccgccccgagcggagcctggagaccctgtattcagtggatcagctggca

SEQ ID NO: 461997 - DNA, 82 bp, Homo sapiens
cgacgaggaagttttctactgtaaagtcaccaacgagatcttccgccactacgaatgtgaagttcatttccaatccgccctc

SEQ ID NO: 461998 - DNA, 50 bp, Homo sapiens
ctgaagaccccacctttcctgggcccaggagacaccagcgggggctgccg

SEQ ID NO: 461999 - DNA, 98 bp, Homo sapiens
tctcgctccgtggccttagctgtgctcgcgctactctctctttctggcctggaggctatccagccacgtttcttggagcaggctaagtgtgagtgtca

SEQ ID NO: 462000 - DNA, 75 bp, Homo sapiens
ccagtggatccatacaactgctccgcctggtggaatctgagtgcacttgccggcggtcccaacccagcaggagaa

SEQ ID NO: 462001 - DNA, 98 bp, Homo sapiens
gtgttctccaagggaaggaggaggaaactgtggtgttcctttcttccaggtgacaggccgctgcggctctgtgctggtacgcctcatccctgcaccca

SEQ ID NO: 462002 - DNA, 100 bp, Homo sapiens
taacaacagcagtggcagcatggagaaacgcaagtccatgtacacgcgagattataagaagcttgggttcatttgaatggacctgagtggaccctttgat

SEQ ID NO: 462003 - DNA, 100 bp, Homo sapiens
gtggcgtgtaactatgctcatcattgttcttgtcaatgcctttgtgtctatcacagtggagctccagcgttctatgagcgccggtcttgtctcccccagc

SEQ ID NO: 462004 - DNA, 83 bp, Homo sapiens
taccagatcgaatctgggccaaatagaaagatatcatggaaatcaggacagtggcagttggaattgtggcaatcaaaggggtg

SEQ ID NO: 462005 - DNA, 101 bp, Homo sapiens
aggaatgttccctgacaatttcgttaagggctcaaaatctccttcgccaagaccaaacatgcctgttcgatacttcataatgaagagtagcaatttgagaa

SEQ ID NO: 462006 - DNA, 95 bp, Homo sapiens
cctgggtcgcttggaagaagccaaggccactattgaactctgcagtacccatgcaaatgatgcctctgccctgaggattctgttttcttccctga

SEQ ID NO: 462007 - DNA, 97 bp, Homo sapiens
aaggagccttggagcggggcaaagggcaagtgtccagagaatggctgggatgaaagtacacttgaactctttttacatgaacttgcaatcatggaca

SEQ ID NO: 462008 - DNA, 101 bp, Homo sapiens
gtgggaggaggaagatggcggccggcaagagcggcggtagcgcaggggagattacttttctggaaggtgatgcttttccttggacgatcagcttgcataat

SEQ ID NO: 462009 - DNA, 50 bp, Homo sapiens
gctccttctcctggagacgcaactcaagccacagacccctttgcttctgt

SEQ ID NO: 462010 - DNA, 100 bp, Homo sapiens
caaaggagacccaaggaacagtgccaagttagatgccgattacccacttcgagtcctttattgtggagtgcacctatgatatgtgttttagaaatagccg

SEQ ID NO: 462011 - DNA, 75 bp, Homo sapiens
cttacaacatggcagacattgacaaatctcagaaaactgatcttcacaatgaaggctacatcttggaattagatt

SEQ ID NO: 462012 - DNA, 102 bp, Homo sapiens
cgcaagggcggcggggagcacacggagcactgcaggcgccgggtttggtgcacctcgatttggaggaagtagggcagggcccttatctggaaagaagtttgg

SEQ ID NO: 462013 - DNA, 73 bp, Homo sapiens
gtggaataggtgtatcaagtaatggtgcaaagcctgaagttacaaaagcaggttggtcactggaagatgttga

SEQ ID NO: 462014 - DNA, 100 bp, Homo sapiens
tgccttcaatactacctttatttccaccataggtgtcatagagacgtcagatcgactggaccgtgaatcgacctcccattattggctaacagtctttgca

SEQ ID NO: 462015 - DNA, 74 bp, Homo sapiens
gaggaggaggaggagctgaagaggaaagtggagcaatgcaggtgggctcgggatgagtttgaaggcctcttcaa

SEQ ID NO: 462016 - DNA, 126 bp, Homo sapiens
acaggcacgggagccggcgcggcgtcaagtggagctcggacgcacggaccaggcccatttccctttcatctgctgcaagaaagcgtaagattgccattcgaaaagcccaggggaaaaatgtggagg

SEQ ID NO: 462017 - DNA, 83 bp, Homo sapiens
ccaggcccggtgacgtcacttcctgccaggtacaccaggggttggaaaaaccacactaggcaaagaacttgcgtcaaaatcag

SEQ ID NO: 462018 - DNA, 90 bp, Homo sapiens
aaataattctcagaaacaaaacttctattgagtcatggattgaagagaagtggatcatctccgaattggcttgttacacgtactctatgg

SEQ ID NO: 462019 - DNA, 100 bp, Homo sapiens
agcaagaaacagtcctggacggcaacctcattatccgctatgatgtggaccgggccatctccgggggctccattcaggagggacaagaattcagtataac

SEQ ID NO: 462020 - DNA, 80 bp, Homo sapiens
tggcaagaggatggcctgaagtttgggctggaagtcttctcaataggtttggcatggacaagatctatgaaggccaagtg

SEQ ID NO: 462021 - DNA, 100 bp, Homo sapiens
gaccaggaccacagcggcaaggtctccaagtcccagctcaagacttaattcagtgcacaaatgagatgaatgtgaacatcccacagttggcagacagttt

SEQ ID NO: 462022 - DNA, 75 bp, Homo sapiens
gcaaatgaagttgatggaattacactgtgatacgactgactgagagtagttatcttgatggaattagaagttttg

SEQ ID NO: 462023 - DNA, 82 bp, Homo sapiens
tacattcgctgcatcaagcccaacagccagggccaggcgcagacctttctccaagaggagaatgaggaaaatggggagcagg

SEQ ID NO: 462024 - DNA, 100 bp, Homo sapiens
aacctttgccctctgttccagaagagaaaaagcccaggcataaaatcatctccatattctcaggcacagagaaaggattaacacagattcctcagatcca

SEQ ID NO: 462025 - DNA, 101 bp, Homo sapiens
cgccgacatcaattacgccaatgtggacggactcactgccctgcaccagtgaatacggctttgctgaaaaagtagttgagggaatttctgtttctgtaaat

SEQ ID NO: 462026 - DNA, 75 bp, Homo sapiens
ccctggctcataaacacattgtcaagactgtggatttcacgcagtattgcctaagtgtaatcttgaacatgggcg

SEQ ID NO: 462027 - DNA, 101 bp, Homo sapiens
aacacccttggagttttacagggaacatgtcaagccactcttcaatatggaagataagcaagacactaagggcgactaccagaaagcgctgctgtacctgt

SEQ ID NO: 462028 - DNA, 50 bp, Homo sapiens
gttccggcagagaattctggctccctgctggcttagcaggagctccagcc

SEQ ID NO: 462029 - DNA, 50 bp, Homo sapiens
tttctctgctgaagttgcaactattactgctattcctctacacagccgac

SEQ ID NO: 462030 - DNA, 75 bp, Homo sapiens
tgggcagacagcggcatacagaatgcctatgaccggcgtcgagaatttcaactgattgctcatttagaaagtgga

SEQ ID NO: 462031 - DNA, 83 bp, Homo sapiens
ctactgcctggaggccggggagccgacgcctgttcccagtgacctgacagcagaggagcgtcaagaactggagaacatccgac

SEQ ID NO: 462032 - DNA, 100 bp, Homo sapiens
tacaggagaaagaacatttccatcaaaccctgagagctttattaccagacatgatctttcagatgcccctcaatcttaccaatgccgtggcaacagctcg

SEQ ID NO: 462033 - DNA, 75 bp, Homo sapiens
tgaagtccgtccgcctggacgcctgggaggaggcccaagtggagagcttggggcttccttggtcgcacccaccac

SEQ ID NO: 462034 - DNA, 74 bp, Homo sapiens
atgaccctgagcaaggaaaatctgagggagttattcctgatgaagctaaagctttgtctctgttggcaccagct

SEQ ID NO: 462035 - DNA, 83 bp, Homo sapiens
gttttcgtgatcttcagaccccaggttctttggcacttaaagagaaggctgagctgcaggcccagctggccgccctcagcacg

SEQ ID NO: 462036 - DNA, 90 bp, Homo sapiens
ccacttgctcgtgcactttacacacatgagggcgccctgcgtccggcagaggaggcgagcatcccgctcaggtgatgaggaacccctcgc

SEQ ID NO: 462037 - DNA, 75 bp, Homo sapiens
gcagcccaggtggataaggaacatctcttcccagcggctcagcacttgcacctcctgcgccgccgccccccatcc

SEQ ID NO: 462038 - DNA, 90 bp, Homo sapiens
gtgttcctgtggtctctgcacctcctttcttgtcagagatggctttggattccccgttctgtgtgctgctgtctggctcctgaacccagc

SEQ ID NO: 462039 - DNA, 51 bp, Homo sapiens
tctggaggagccttctcaagaacagaggtgcagctattgctggagtttacc

SEQ ID NO: 462040 - DNA, 73 bp, Homo sapiens
ctgcccgtacctggacaccattaacagaaccttcaacaactagtactgcttcaaattatccagatgtgttaac

SEQ ID NO: 462041 - DNA, 146 bp, Homo sapiens
tcagaactgttccttcagccaaagaaacaagccgtggaataggtgtatcaagtaatggtgcaaagcctgaacacaagctccgggtggataaggcagctgctgcagcagcggcactacaagccaaatcagatgagaaggcggcggtt

SEQ ID NO: 462042 - DNA, 75 bp, Homo sapiens
gctctactgtgacttcagagacactgccaagcagccttagccctagtgtagagatattcccactctggccactgc

SEQ ID NO: 462043 - DNA, 75 bp, Homo sapiens
cgacatgagtgatgtggaggaaaacaacttcgagggcagagactcgctcagcagcagcctgaaaacttgctacaa

SEQ ID NO: 462044 - DNA, 100 bp, Homo sapiens
gttaccggaacggcggcgacaagggtgttcccgaactagagtgggttgaaatcacaaagattagacacctttttagataggtgttcttcagcaccactga

SEQ ID NO: 462045 - DNA, 110 bp, Homo sapiens
aagctgtctctgatccgcaagcatgctcagaccttcattgctctgtgtgccaccggtgcttcctttcacaactttttccagagggcaggcgtcctagctccagttgctcc

SEQ ID NO: 462046 - DNA, 90 bp, Homo sapiens
acctgtgaacagtacgcagtgaatgttgttgtttacattcagagctctatcaataagaggaatacatattacagtgaattcgacaaccgc

SEQ ID NO: 462047 - DNA, 75 bp, Homo sapiens
atatgattttctttaaggatggtttagaaatggaaaaatgtatgcttgctctgtcaaggcacagcctattgtctc

SEQ ID NO: 462048 - DNA, 74 bp, Homo sapiens
ttcccgttaaccttagccacaaagtcaaaggtatggacctgtctgccaatcaggacgaggagaccgaccaggag

SEQ ID NO: 462049 - DNA, 101 bp, Homo sapiens
ctcaaagaggcctttgcaaaagttggttatcaatagtctggctgtctatcgtcatcgtgagactgactttggtgtaggagttcgagaccaccctggccaac

SEQ ID NO: 462050 - DNA, 85 bp, Homo sapiens
cctcttggtttgcgtcctgcactgaaaggaaatgacggattttgtcaaaatgcagatcttcgtgaaaacccttaccggcaagacc

SEQ ID NO: 462051 - DNA, 76 bp, Homo sapiens
agaaggctgctaccatcccagtgagccaaatctctaccattgcagctatcatggtgaacttacttcagattgtgcg

SEQ ID NO: 462052 - DNA, 75 bp, Homo sapiens
caacatttagttcagaatccagtcagactctggcaacttttagtgacctactgatagagaatacttcactcactg

SEQ ID NO: 462053 - DNA, 75 bp, Homo sapiens
gaagccagtcacgccgggagctggtacacagcctcaggtgaaagcatgtattgccaatgtagaacccaaccaaac

SEQ ID NO: 462054 - DNA, 100 bp, Homo sapiens
tgccgagcccttagcgtggactgggctggccccggaagcccccacgggctctacctgaccctgcagtgtggacgaatgtggaacctcgctctgtggctgt

SEQ ID NO: 462055 - DNA, 75 bp, Homo sapiens
gaaaatcgcttggttaaaacctgacacttttaacaggctggtagctcagggatgtctcgtctgtgagttacagct

SEQ ID NO: 462056 - DNA, 80 bp, Homo sapiens
gagaccccaagagtgttgagcagcccatcgtgcttaaagaagggttaatttggagtggcccctggagtcagtttcctaca

SEQ ID NO: 462057 - DNA, 50 bp, Homo sapiens
gccccctcacctcatatctcagccatacattaacaagcacaagccctggc

SEQ ID NO: 462058 - DNA, 97 bp, Homo sapiens
ggctgaaacacagtcgaaaagaatactgtgaattatgcaagcacagatttgcttttacaccaaatgctgcagttggagaagaaacttgaacgtgaac

SEQ ID NO: 462059 - DNA, 82 bp, Homo sapiens
cccccagacctcctcagctccaggaaaaccagcattggaatcagctgattcaggatgctcagaagcgtggtgccattattaa

SEQ ID NO: 462060 - DNA, 100 bp, Homo sapiens
gggcttcttgtggccaacttcagagcctgtcaccaggaaagtacaaggcgagtggataattccaacacaagactggcagtccaaattgaaagagatccag

SEQ ID NO: 462061 - DNA, 75 bp, Homo sapiens
gaggtggaccagaacttttggaactagtgccggcggctctccaccccccaggctcttgtcaggatggtgaagctg

SEQ ID NO: 462062 - DNA, 75 bp, Homo sapiens
aagcgtccctgatccagaaggtggtggatttcattgactgggtagacaacatgtggccaaggcacttgaaggaaa

SEQ ID NO: 462063 - DNA, 100 bp, Homo sapiens
ttcaaagttccccaagaagaactggaaaatgccagcctagtgtttacaggttgacgccgctgtcaccccagaggagcgccacctgtccaagatgcagcag

SEQ ID NO: 462064 - DNA, 100 bp, Homo sapiens
gaggcccggccacctctgagaagggagacgacgctgctgggtccgctgagcggggcgacccgagatacagtttatgtaacttgatggaagaaaatggaat

SEQ ID NO: 462065 - DNA, 50 bp, Homo sapiens
atgggggaagtggaagtgaaattggagtggaagctggacacactatgtga

SEQ ID NO: 462066 - DNA, 100 bp, Homo sapiens
ccggctaccacctccagctgactataataaggagatcacagaaggggatgaagtggagtactcccctgccctcaacaagatgttttgccaactggccaag

SEQ ID NO: 462067 - DNA, 100 bp, Homo sapiens
agcaactcccccatcgtatgaatctaatcaggaaacccaggcccaacggcaggtggatgcaagaagaaatgttccccaaaacgacccagtgacagtggtg

SEQ ID NO: 462068 - DNA, 82 bp, Homo sapiens
ggagcgcggcggagacgatgcctgagatcagagtcacgcccttgggtcaaaatgcagatcttcgtgaaaacccttaccggca

SEQ ID NO: 462069 - DNA, 82 bp, Homo sapiens
gtcatcatgctgaccaccaatcagatccgtaaggttttaaaatcaaagatgggaaaatcggagaaaattgcccttccccatg

SEQ ID NO: 462070 - DNA, 113 bp, Homo sapiens
gtgtggatttctaccatttgatgatgataatgtaatggctttatacaagaagattatgggcagcagaagaagcctttgtaaatgacattgacgagtcgtccccaggcactgag

SEQ ID NO: 462071 - DNA, 100 bp, Homo sapiens
gtttgtcggcccttgccttggcagagctgagattactgatctctcattacccaactatctgatggcatcttcggttggactgcttcctacccagcttctg

SEQ ID NO: 462072 - DNA, 82 bp, Homo sapiens
aattgccttattggaaaaacatttcttactgtactaatggtcacttgatgtgcgctggctgttttatccacctactagcaga

SEQ ID NO: 462073 - DNA, 82 bp, Homo sapiens
aggaacatctctttcaatgacaaaaagtttgtcattaaacccatcgacaagaaggcacctggagcatcgagtacagctgtcc

SEQ ID NO: 462074 - DNA, 83 bp, Homo sapiens
gaagaactcgagcgacagagacaagctgagcttgccgcacaaaaagctagagaggtcttccccagggaggtcctgaactacac

SEQ ID NO: 462075 - DNA, 100 bp, Homo sapiens
ataaagtctaccttacagggtataactttacattagcagatatactattgtactatggacttcatcgctttataagtcccaagagtggcccaaaagagag

SEQ ID NO: 462076 - DNA, 82 bp, Homo sapiens
tcgaccagttgcctgacgagaattgtccccttggggcggaaagaagccaaggccaaggagctggtgcggcagctgcagctgg

SEQ ID NO: 462077 - DNA, 90 bp, Homo sapiens
agattgtgtaggcgttggtcttctgatagcaactttaatgtgacctaactaccataatgaatgctgcatattaagagaaaccacaagaag

SEQ ID NO: 462078 - DNA, 50 bp, Homo sapiens
aggcccgccgcctccctgccaagttacagaatgtctgaaggggacagtgt

SEQ ID NO: 462079 - DNA, 75 bp, Homo sapiens
atgctgccgagatgctgggcgccaagatcaaggtcaaatgaagcgcaacagaggggaagaaatagattttgagac

SEQ ID NO: 462080 - DNA, 100 bp, Homo sapiens
aagtcctgcgcttggggatcctctgtacgcccgttcactggcaccagttggagatgccaggacattactctcatctggctgccttctatgaggacaaaaa

SEQ ID NO: 462081 - DNA, 100 bp, Homo sapiens
ctcatatccttttcagactacattttcctcacaactgttctttccagtcccccccgcctccagccagcctgtgcagacttgctgcctgctgtgtcaccgg

SEQ ID NO: 462082 - DNA, 75 bp, Homo sapiens
cctggagtagttgggactacaggctcatgctaccacacctgatctttaatctcatgaagtacgacagctacagcc

SEQ ID NO: 462083 - DNA, 100 bp, Homo sapiens
cccatcccgttctctgatttgcagcagccaataggagctctgaacccaaaaagagcagcattcttcgctgagcgttatgaatcatgggaagatgatcaag

SEQ ID NO: 462084 - DNA, 82 bp, Homo sapiens
agaaaatgggactggttgaccaactggtggaacccctggaaataaactatcaatcttgcccagactggagaaaggactgcag

SEQ ID NO: 462085 - DNA, 76 bp, Homo sapiens
gatgaaaatgaagacgacattcagtttgtcagtatttgagagggaagatctgatctcctagaattagagttggtac

SEQ ID NO: 462086 - DNA, 51 bp, Homo sapiens
ccacactgcaggacattgggaagcggggatctgacgagcttttctctactt

SEQ ID NO: 462087 - DNA, 100 bp, Homo sapiens
gccacagccgctgcggatcatgaaccttctgataacttaagagagattctccaaaatgtggccagattgcagggagtatcaaatatgagaaagctaggcc

SEQ ID NO: 462088 - DNA, 75 bp, Homo sapiens
aagaattctctatttctgctccgtcatccatgccactatgaataatacggcagctagtccaatgtctactgcaac

SEQ ID NO: 462089 - DNA, 100 bp, Homo sapiens
aaggaggcctgcaaattcatgacaggattattgaggaagagctaaggagcaaatccaagatctgtgccaatgtgttttgtggagccggccgggaatgtgc

SEQ ID NO: 462090 - DNA, 100 bp, Homo sapiens
cgggggtcgacccgggggctccgggcatgcaggatggacatgtagaggtggcacgtttgcttttggatagtggtgctcaagtgaacatgcctgcagattc

SEQ ID NO: 462091 - DNA, 50 bp, Homo sapiens
gcattgcctccaggggagctccagaaatggactcggcactactgcgccat

SEQ ID NO: 462092 - DNA, 100 bp, Homo sapiens
tggccgctctacccaggagccttggagtatgatcaggtcgaaaatttaaaaagttcaataaagtcagagttgtgagagcactggatgctgttgctctccc

SEQ ID NO: 462093 - DNA, 100 bp, Homo sapiens
gggaaacagtgataagtaagctgaccacttgctgtaggagaagttccaacgtgtcctacaaatactcaaagtcacagaatttgttggctcgggctccaga

SEQ ID NO: 462094 - DNA, 82 bp, Homo sapiens
cccggtacatctgaaagccgggaaatggtgagaagccctaccactgcaactgggacggctgcggctggaagtttgcgcgctc

SEQ ID NO: 462095 - DNA, 101 bp, Homo sapiens
ccggactcctgctgttgagggtctgacagaggctgaggaggaggagctcagggctgagcttaccaagctctggattaatcgaattacagctgctagccagg

SEQ ID NO: 462096 - DNA, 96 bp, Homo sapiens
tgatgacccacggccgcatggtgccgagagggacaggcttctccggaaggaacagattttagctgtggccagtactaaggctcgtacgtctgcatc

SEQ ID NO: 462097 - DNA, 75 bp, Homo sapiens
aagaccatcactgacgagtttgagcaggaggtggatgccagtgtggtacgtgagatctgctccaagtacatctat

SEQ ID NO: 462098 - DNA, 51 bp, Homo sapiens
gtggagtggacgggagcctggagcgacaggccgtatctgaggaacagcagc

SEQ ID NO: 462099 - DNA, 110 bp, Homo sapiens
acggacaacctcagaggacaacgaagtgttcgttcctggtccagaactttacacagaaaaggtgctcaaaggatatttgtttaatgaatgtggtatgctgacatttaaac

SEQ ID NO: 462100 - DNA, 107 bp, Homo sapiens
gaagagtatcaggaatttgaagagatgctggaacatgcagagtctgcacaagccaacctgcccctgctgcagcgggaactgctgcactgcgctcgggcggccaagca

SEQ ID NO: 462101 - DNA, 76 bp, Homo sapiens
ggcactgggcttcctgccatcaccgatgtgcctaggcgcatttcaggatctatcttgggatcccatggctttcttt

SEQ ID NO: 462102 - DNA, 100 bp, Homo sapiens
aggatataaagagaaacctcaagatgtggatttaccttatcccctcaacaacttttcagtggcaatttcctgttttccagcacccaacataacttgtaag

SEQ ID NO: 462103 - DNA, 75 bp, Homo sapiens
ggcgaggcagatcctgccccgtggccgcggccgtctcgataaagataaagtttctctaaccaagaccccaaaact

SEQ ID NO: 462104 - DNA, 50 bp, Homo sapiens
tctacacacaatgagctggaaaagaatcgagctacagagacttctgaagt

SEQ ID NO: 462105 - DNA, 98 bp, Homo sapiens
gccgactcagtggaacaatcttttgttggattgaaacagctaatcaaaaggtcacggatcgcctacagtgacgaagtacggaatgagctcctggggga

SEQ ID NO: 462106 - DNA, 100 bp, Homo sapiens
tttactactttgagtataccacggatccactagttcctggactatgggaactgatgactcgcccaatgtcacagatgatgcagctgatgagatcatggac

SEQ ID NO: 462107 - DNA, 83 bp, Homo sapiens
gctgactccattgcatgtgggaccttcagccgtgaactggtgaggctccaggttgggctctatgctgtgtaccttctggactg

SEQ ID NO: 462108 - DNA, 100 bp, Homo sapiens
cgtcagtgaccgcagcagcctcaacaagaccctgcccgaggtgaccctcttcacagacactgtgggcttccgcatggccccctggatcatgacgcccaac

SEQ ID NO: 462109 - DNA, 74 bp, Homo sapiens
cctccgtctggatttccaaggaagaatttcctctgaagcaccggccgccatggcatcagatgaaggcaaacttt

SEQ ID NO: 462110 - DNA, 102 bp, Homo sapiens
gcaagatttgatgctcttgtgctcagtgacatcattcagtggacggaaagtcccgggattctttgcgagccttcacccggacattcattgctgttcctgcta

SEQ ID NO: 462111 - DNA, 75 bp, Homo sapiens
tccccgaggaggaagacgaatcgttaaacatctgaaagggtcaggtggaggagattagaaacagtattgataaaa

SEQ ID NO: 462112 - DNA, 100 bp, Homo sapiens
ggcgggtttcccaggacctggaagtgactgttcgccatggatttccctatcaaccctcagccctggcctttgatcctgtacagaagatcctggcagtggg

SEQ ID NO: 462113 - DNA, 100 bp, Homo sapiens
aagatataaatgaaagtgatgaagttgagattcgagtgagggttgaaaaggatccagaacttggatttagcatatcaggtggtgtcgggggtagaggaaa

SEQ ID NO: 462114 - DNA, 100 bp, Homo sapiens
gtgaactcagcattgctgcagctcgtgggtgctcagacctcaaaggaagaccttctgcaggctgattttgaaggtgctttaaagttctttagagttcagc

SEQ ID NO: 462115 - DNA, 87 bp, Homo sapiens
cggagctggacgccgcgatcgtggggcccgcgaggcgggcagccggggcgtccaggttttcttggagcagaagaaaatgttaaaaag

SEQ ID NO: 462116 - DNA, 75 bp, Homo sapiens
ggtgaagtccacaatcaagttccaaatgaagaaggccaaacgtaccaagaaagtcgggatcgtcggtaaatacgg

SEQ ID NO: 462117 - DNA, 75 bp, Homo sapiens
gcaaagtgtccccggcaagaagccgagcctcttgaagccattcttacagatgatgaaccagaccacggcccgttg

SEQ ID NO: 462118 - DNA, 100 bp, Homo sapiens
ggctcatcctgtccatcgtgtgcctgatgatcacgcagctggctggcttcagtggaccacaacagggagctgccaccaccgtgtactgtgctgctgtccc

SEQ ID NO: 462119 - DNA, 100 bp, Homo sapiens
aagcaaggagtcatatatccttcatatgatccatcttagtgaagaattaggatacagctctgcttatgataatgtcaacaaagttcgagtagctatcaag

SEQ ID NO: 462120 - DNA, 100 bp, Homo sapiens
gtcaccattggagctcatcagactgaccgtgtcttacatcagttcagagaggttcatgcatgggagatctcagaccagttgttacagatccggcaggatg

SEQ ID NO: 462121 - DNA, 100 bp, Homo sapiens
tggccggggaggagctggccggggaggaggccccccaggagaaggcggaggacaagcccagcaccggttccttcaatggtgccttagctgctgttcctgt

SEQ ID NO: 462122 - DNA, 51 bp, Homo sapiens
gcggactggaagagcaggaaacaagaaaatgatgcatcctgttgccagcag

SEQ ID NO: 462123 - DNA, 75 bp, Homo sapiens
cagtacaaaaaagaaatactcgtttgcaaagaaaaaggacttttgggaaaagatatttcagaagttcagtgcata

SEQ ID NO: 462124 - DNA, 83 bp, Homo sapiens
gacgcgcaggagaagctggagctcacggagaagaaggcctccgacgccctgcgggtgaatggcctggagcaactgtgcaacaa

SEQ ID NO: 462125 - DNA, 100 bp, Homo sapiens
gccaccaccgccaccggaacccgagaccgagtcagaacccgagtgctgcttggcggcgagagagaactcgatgccaccgcaacggtattggcgaaccggc

SEQ ID NO: 462126 - DNA, 100 bp, Homo sapiens
attggaggccaggtttactggagtaggtgttagtaagctttgtcactccaagagatggccctgggactgagaagtggatggcagctgtgacagcaggaga

SEQ ID NO: 462127 - DNA, 75 bp, Homo sapiens
aggacgcgggctctgaggatgagctggaggaggggctgaaagtacccatggcagacaagcctggtaacacagtga

SEQ ID NO: 462128 - DNA, 100 bp, Homo sapiens
gaggacatggagcaggagccagcacagcaggatctagtgaaaagccatttgatgtatgcggtcagagaagaagtggaggtcctcaaagagcaaatcaaag

SEQ ID NO: 462129 - DNA, 100 bp, Homo sapiens
atagccatcgacttcggggagcagtggtgaaagtggggcaggtaaaaccgaaagcactaaattgatcctcaagtttctgtcagtcatcagtcaacagtct

SEQ ID NO: 462130 - DNA, 100 bp, Homo sapiens
gaataattttgatgacatcaagcacacgactcttggtgagcgaggagctctccgagaagcaatgagggcaggttgtgcagctggaggcagagcagtcctc

SEQ ID NO: 462131 - DNA, 74 bp, Homo sapiens
actggctctgctgaccttgtgccttgacaccattcgcttttcacccaagatgatttgatgtcttataaaactct

SEQ ID NO: 462132 - DNA, 75 bp, Homo sapiens
gccgccgccgctgccgcttccaccacagaaggacagaataacgggctcccagattcacaagccccaccaagagga

SEQ ID NO: 462133 - DNA, 83 bp, Homo sapiens
gggcccggagtactagtctcaacgagagacccaagaggaagcgccgcggagccatcaacagcaagcagctcacctacctggag

SEQ ID NO: 462134 - DNA, 98 bp, Homo sapiens
agggaacgcccggcccagccccgaaagggaattcttgaagaattatgtccagcgaatagttgatgttcgacccaccttggttcttgttgagaaaacag

SEQ ID NO: 462135 - DNA, 80 bp, Homo sapiens
tggctagagttgcaactacagctgggttatatggctctaatctgatggaacatactgagtcttggccatttcatcaccca

SEQ ID NO: 462136 - DNA, 90 bp, Homo sapiens
tcaccatcacaccacctgaccaaggatgagacctgcacgcagtggctcacagcagcacgatttgtgacagcccgaggcggagaacaccga

SEQ ID NO: 462137 - DNA, 87 bp, Homo sapiens
gcagcggaagatggtgttgctgagagtgttaattctgctcctctcctgggcggcggggatgggaggataagttctgaacgtcgaaaa

SEQ ID NO: 462138 - DNA, 100 bp, Homo sapiens
cggaaccatctgggagccttcctgatccgggagagtgagagctccccaggggagttctctgtgtctgtgaaatgaaggatttgggggcagagcacttggc

SEQ ID NO: 462139 - DNA, 74 bp, Homo sapiens
ccgagggtgttcttgacgattaatcaacagattacaccaggaagcaaggcggcagctgccaacctgtgtcctgg

SEQ ID NO: 462140 - DNA, 100 bp, Homo sapiens
gttcaattcatttaaacccaaaggaggtgtaatattttccgtcaagggatccacaaatgctaaagagctgtcttccaagggagtgaaaatctgggatgcc

SEQ ID NO: 462141 - DNA, 100 bp, Homo sapiens
gcacgtggaaaccgtcagtgatttgtgtctgcaacgtgtgtgagagaatggagggactggtgattgcagctggaagtgcccatgaccgagctggcgtcct

SEQ ID NO: 462142 - DNA, 124 bp, Homo sapiens
aaaaatggtggatcaatacttttctacactggtaatgaaggggacattatctggttttgtaataacacgctgtgtaaatgagtatggaagattatgatttcctgttcaaaattgttttaattgg

SEQ ID NO: 462143 - DNA, 74 bp, Homo sapiens
gcagccacatactatccgtttgttcaggaaccaccagtgacagattctctctttccagacgtagtgaactgtat

SEQ ID NO: 462144 - DNA, 100 bp, Homo sapiens
gctctcgggccactcggccgcagtcgtcctcttgagttctggcgccttgactactgggaagatgacttgcggcgccggcgacgatttgtgcgtaaccctc

SEQ ID NO: 462145 - DNA, 100 bp, Homo sapiens
gggtgtcctggtgcacccccagtgggtgctcacagctgcccattgcctaaagaaagagggccatgatgcctttgagcttaaagagcaccagacatctgcc

SEQ ID NO: 462146 - DNA, 100 bp, Homo sapiens
tggcacaactaaatatagcagaacagaattggagtccggggcagccttctttcctgcaaccacgggaacttcgagatcccgtaccagctttggatctcgg

SEQ ID NO: 462147 - DNA, 100 bp, Homo sapiens
agcatctgaaaaagctgtggaaggctctggataaggaccagtacctgcccaggaaactggctctactgaagaaacacgaagctttgatgtcagatctcag

SEQ ID NO: 462148 - DNA, 101 bp, Homo sapiens
gtgaatcaatagcagaagacctggaagaaccatcctataaacgggaaagattgactagtttcacaggaaggcgacatgccaattcatgaacttctcagcct

SEQ ID NO: 462149 - DNA, 75 bp, Homo sapiens
gtgacgctgagcgaggcggagaaggtgtacatcgtgcatggcgtccagtgggagcgatgcagcctcaatccggag

SEQ ID NO: 462150 - DNA, 50 bp, Homo sapiens
ccctgacacccggcatgaccaataaagcctagccatggctgctgtttatt

SEQ ID NO: 462151 - DNA, 100 bp, Homo sapiens
ggaaattcaggaaacatccaagaaaattgctgtcaaagccattgaagactctgatatgttacaggaggaagcagttcaggtacttttgaagcattctgca

SEQ ID NO: 462152 - DNA, 75 bp, Homo sapiens
tcatctccttctgcatccttaactgagaatgaggaagccagcagacctgcagaacttggctcccgggacccaccc

SEQ ID NO: 462153 - DNA, 90 bp, Homo sapiens
tgggattggagattccacccaaacttgctggtcactgggagattcagagcattcttcactccagaataatgagcaaccctctttggccac

SEQ ID NO: 462154 - DNA, 100 bp, Homo sapiens
cggaggcgcgcgctcgattccccccacgcggcggcgccgcctgtttacggctgaaactgccgccaaccggatctgtaaggtgctggctgtcaaccaagag

SEQ ID NO: 462155 - DNA, 105 bp, Homo sapiens
tgctgctgcactgacggcgggtgcccgcgcctcagtcttaggaaaagtcctcagtgctgtgggcagtgcccagctactgatgtcccagaaattccagcagttccg

SEQ ID NO: 462156 - DNA, 100 bp, Homo sapiens
gctccagccgaaggagaaggggggtacaggtttgcagattccgccagcagcacagcaagctctacagatgagtggctctttggcatttggtgctgtggca

SEQ ID NO: 462157 - DNA, 103 bp, Homo sapiens
ctgctcgataaatcagacagaacagttaatcctcaatttaagcctgatctaacccctagaaacaggaagtcgaggctcaagaggttctcaaattgatagtcac

SEQ ID NO: 462158 - DNA, 98 bp, Homo sapiens
ggacttcatcgggaacctggagggcctcaatgatggcggcgacttccctagggagctgctcaagctgccgcagcgggaaccgcaagagcttggtggta

SEQ ID NO: 462159 - DNA, 80 bp, Homo sapiens
ggagaagcagctgcggaaaatgctagaagtgtggcaaaggagcagagaactttgacaagttcttcacacgaggacagccc

SEQ ID NO: 462160 - DNA, 98 bp, Homo sapiens
aggtcaccgccagcacgcgcctgcttcccgtctgcgcgagtccacgcagctccccaggcggaaggtgctctaccagcgtgcacccaggaatatccacc

SEQ ID NO: 462161 - DNA, 100 bp, Homo sapiens
ccggcgctctcctggctcccttctgccccagctccgtctcggcggcggcggcagagcatcctggccagaacaagccaaggagccaagacgagagggacac

SEQ ID NO: 462162 - DNA, 75 bp, Homo sapiens
gaagaagggaaggcgcgagtgaggaaaggaggtactgtaggaatgcttctagtcacaacagacacccttggccat

SEQ ID NO: 462163 - DNA, 75 bp, Homo sapiens
gggaaatcgggctgaagcgactgagtccgcgatggaggttacacttccaggggctccccactcagtccccagtca

SEQ ID NO: 462164 - DNA, 98 bp, Homo sapiens
gagcggcggcggcggcagcgggtcttgggtcctccgagagcagcagcgaatggagatgtatgcatttcgattcttcatccgcctgtagatgacccaca

SEQ ID NO: 462165 - DNA, 83 bp, Homo sapiens
tctgcagccactgcaccgacttcatctgccccgtgtgaccccagagggtgagtacatcccgctggaccaccaggatgtggatg

SEQ ID NO: 462166 - DNA, 75 bp, Homo sapiens
gtgtatgactttgtctcccattcccggaaagcagatggtggagctgaatatgccacttaccagactaaatcaacc

SEQ ID NO: 462167 - DNA, 75 bp, Homo sapiens
gctcgcgctactctctctttctggcctggaggctatccagcgttccttctgatgatgggcgtgcttttctgctgc

SEQ ID NO: 462168 - DNA, 98 bp, Homo sapiens
caaatatcttgatccgtccttttttcaacatcggctttgtaggcagccaatcccagagaagcagacgggatggctagttcagcccgggagcacctgct

SEQ ID NO: 462169 - DNA, 90 bp, Homo sapiens
cgggggcgagagtgaacgattcaacccgggggagctcaggaattgaaagatgttggccatcgtgatcagatggctgcagctagaggaatc

SEQ ID NO: 462170 - DNA, 75 bp, Homo sapiens
aaaatgacgacacgccccacaggtcttgggaggattaagtgaggggacatgaggccttctggcggccgcccctgg

SEQ ID NO: 462171 - DNA, 98 bp, Homo sapiens
cgcctcccgccgcgcccgggatgtattcgtccccgctctgcctcacccaggtgagtggcatcaaggcgctgtacgagtcggagctggccgatgcccgg

SEQ ID NO: 462172 - DNA, 89 bp, Homo sapiens
ctcatgattggctcttacgcctcttctgccattacgttcccaggaatcaaggtggtgaagcagtattttccaatttgaagattcatttg

SEQ ID NO: 462173 - DNA, 50 bp, Homo sapiens
ccgagaagtccccgaccgactgatcggcttcaccaccgaccctcggatgg

SEQ ID NO: 462174 - DNA, 83 bp, Homo sapiens
ccaggaccttccaccaatattcctgaaaatgtgagaaagatcagtctaaagaaaaggagaagaaagtgaaaaaaacaattcct

SEQ ID NO: 462175 - DNA, 100 bp, Homo sapiens
ccgcccccttggccagccaactggacagcggagcacgatgattgataggtttcacatcctgggaatactgtattttcaatctgaggttggtggagtcgcc

SEQ ID NO: 462176 - DNA, 100 bp, Homo sapiens
tatacatggagttgatattacaaccagtgacactgcagcttcttccagaccagctggtcttgcttctggagcatctcttggagcagaagactctgagccc

SEQ ID NO: 462177 - DNA, 104 bp, Homo sapiens
tcaaaagagcttctctccagagtagaaagattgaagctggacagtactgcacttttgtcatttctacggatggctctgttagagcttgcgggaaaggcagctat

SEQ ID NO: 462178 - DNA, 129 bp, Homo sapiens
aatgaatcacgatgatgggagagattgttcctgtggagcaaagagctgcatcatgaattcaggagcatcatccagacatttaatgtggatgcaccatgccagaccgtggaagatttaacgaatggggtt

SEQ ID NO: 462179 - DNA, 100 bp, Homo sapiens
caacatttgccccccggaggaaagaactggaaccaggatggtcttgttaatgtaggatggatggactgtgccacccaggataacctttgtaaaagcttag

SEQ ID NO: 462180 - DNA, 100 bp, Homo sapiens
ccccagcagtcaaaccgtacaagaaaaagtcgtgtttctgtgtctccagggagaacttcagatgttcctcctgctgatcaagagaagctttttatccaga

SEQ ID NO: 462181 - DNA, 95 bp, Homo sapiens
ttgtccacgtccagcattatgagaacatggacacgagaacccccataaataatcttcgtgctggagaatctggtaaaagcaccattgtgaagcag

SEQ ID NO: 462182 - DNA, 96 bp, Homo sapiens
atcttcaaagcggagagcgggaggagccacggagaaagtcagaaaaggtactttgtggactatcggagagtgcttgtctgtggaggaaacggaggc

SEQ ID NO: 462183 - DNA, 100 bp, Homo sapiens
ccggattcccgcaagaggcccctcgaaacgccccccgaggtggtctgcaccaagcgcagcaacacgggaggtgggaaccgtatcacacaggcggtgctgg

SEQ ID NO: 462184 - DNA, 106 bp, Homo sapiens
atgggatagaatcctaggatacaactctctggaaattcttgctgggaccatggctaaacctcctggatcattagccagaagcagcagcctgtgccgttcacgccgc

SEQ ID NO: 462185 - DNA, 98 bp, Homo sapiens
gggaccttgaagacgacttcgaccctgcccagcacgaccagctcatgcagtttgacaagtatgcgcccaagctggacagcccctacttccgacattcc

SEQ ID NO: 462186 - DNA, 75 bp, Homo sapiens
cgttctcagctccagtggaaccagtcctgctcagagtgaagcttctccagtggcttctccagatccccagcgcca

SEQ ID NO: 462187 - DNA, 51 bp, Homo sapiens
tgggaagttttaaagacagaggagttgtacacagaagaaagcccatatgag

SEQ ID NO: 462188 - DNA, 75 bp, Homo sapiens
gcagcattggtgtccagtcagatgaaattgatttatcagatgtcctttcagcgccaacttgcaagtttgctcttt

SEQ ID NO: 462189 - DNA, 100 bp, Homo sapiens
ccgcgccaccctgttcttccgtgtctccctctgcctggcggcagtcacggccaaggtttagacccagtgtgcctggtgggctgtgcccaggttcagagtc

SEQ ID NO: 462190 - DNA, 75 bp, Homo sapiens
aacggcagaagcttcaccacaaaagcgaaatgggcacaccacagacaggggcaagtgtccgagtggtgaatcagc

SEQ ID NO: 462191 - DNA, 90 bp, Homo sapiens
atggcgacgtctacactgagtcggaggcgaaggttttgattcccaccatggccatcacccagtttcggttatttaaattttgtacctgcc

SEQ ID NO: 462192 - DNA, 96 bp, Homo sapiens
tcatcacaagatcttggaaacattatataccttggggaaagctgatatcatggaagggaagtggttgctgtgtatgttactggtgcttggaactgc

SEQ ID NO: 462193 - DNA, 107 bp, Homo sapiens
gaaacacaagaccttcgtggaaaaatacgagaaacagatcaagcactttggtgctggagaatctggtaaaagcaccattgtgaagcagatgaggatcctgcatgtta

SEQ ID NO: 462194 - DNA, 100 bp, Homo sapiens
gacgctgacacctcccaccatggacagcttcgacttagccctgctccaggaatgggacctcgagtcactgtggatgttccctttctacagctgctggagg

SEQ ID NO: 462195 - DNA, 97 bp, Homo sapiens
catcgagccagaagcagtatttgtcctggatgcctaaatcaaaggaacttgtttcttcaagctcttctggcagtgattctgacagtgaggttgacaa

SEQ ID NO: 462196 - DNA, 75 bp, Homo sapiens
aagaaactggagaaactcggagtgtactccgcctgcaaggttgaattgaccaaagcaatggtgatggagaagcct

SEQ ID NO: 462197 - DNA, 80 bp, Homo sapiens
gcgggaaatcgggctgaagcgactgagtccgcgatggagggaagtgggaatgtccttggcatcattgtgacgtgtgtggc

SEQ ID NO: 462198 - DNA, 100 bp, Homo sapiens
aattatttatccaacagctcctcccagggtgataaaagaaaatgtggctgaagttacccgaagttcagcttgcagtgtaattcagaagagttaagaccag

SEQ ID NO: 462199 - DNA, 100 bp, Homo sapiens
aagatgaaaatgaacagctaaagcaggaaaataaaactcttttgaaagttgtgggtcagctgaccagttggagtcattcgttgcccagtttgcagccaag

SEQ ID NO: 462200 - DNA, 117 bp, Homo sapiens
ctttcccaagcctggaagaactcgtcatgctctttgtagcgtggtgcttctgttgctcacagaggtgagagctacatggaagaggagataattttggacatcacagtgaaccattcg

SEQ ID NO: 462201 - DNA, 88 bp, Homo sapiens
gttattctgatctcaccaccctggtggcctttccctccagctctgtctatcctaccaaggagggcatcctggctgtttcacccgtgga

SEQ ID NO: 462202 - DNA, 51 bp, Homo sapiens
gcgttggggtgagaccctcacttcatccggctgcagtgcacctgccagcac

SEQ ID NO: 462203 - DNA, 90 bp, Homo sapiens
ggcagcgaggtcgcggcaggttcgaggttatacattggctcttcaaagacgttcacctcatcagagaaatccctgactcctttgcagtgg

SEQ ID NO: 462204 - DNA, 100 bp, Homo sapiens
gggcttcccctgaccccttaggccctccccctgcaggtgccctcgcgcccctcccggggtccccaggaattactccttctacgtcctcgacaaccagaac

SEQ ID NO: 462205 - DNA, 100 bp, Homo sapiens
ggggccgttgcagggtgcgggcgagcgtcgacccgggccgctcctggaggaggaggtgggaggtttcccaaaccactccttatgatccagtgaatattca

SEQ ID NO: 462206 - DNA, 83 bp, Homo sapiens
atcccggccaccagcaattgtccggtgatgtgtccaatctagatcccaacttctcatttgaaggcaccaaactggatgtgggg

SEQ ID NO: 462207 - DNA, 111 bp, Homo sapiens
aggacatggacctgtacagcatcaactacctgcactttggggagcctaagtcctggtgagaagccctaccactgcaactgggacggctgcggctggaagtttgcgcgctca

SEQ ID NO: 462208 - DNA, 51 bp, Homo sapiens
gtctctgcacctcgcgccccagcaggaaggacttttgactagatctgctca

SEQ ID NO: 462209 - DNA, 80 bp, Homo sapiens
ctccgccgctacaaccagagcgaggctgccacgtgggcagccatgtcctacccagatgttagtgccatgatcctggatgc

SEQ ID NO: 462210 - DNA, 97 bp, Homo sapiens
agacgatcacttttctgtaggccatttgtccagacatatctgaagagatggattaagaatgctttggattaaggattgtggagcacatttcaatcat

SEQ ID NO: 462211 - DNA, 75 bp, Homo sapiens
gaaccaacccactttctcggcgccgcggctcttttctaaaagtgaaataatgcaaaaggtgtcccaaggctcctg

SEQ ID NO: 462212 - DNA, 82 bp, Homo sapiens
acaccaagattttatcctgttgttaaagaaccaaaagccattgatgtaaaggacgactgggtttggattcagaagaggatta

SEQ ID NO: 462213 - DNA, 100 bp, Homo sapiens
tgctgctactactaccactttgggctgatggcaactggttattcagcttctcaaggctggaaaagcgaaggaagtttcctacaatgcactagcctcacac

SEQ ID NO: 462214 - DNA, 101 bp, Homo sapiens
ctgaggccgcatcatgagtatccagaaggagcttcaagagcagggggagatcagaatcgtccagctgggcttcgacttggatgcccatggaattatcttca

SEQ ID NO: 462215 - DNA, 74 bp, Homo sapiens
tgcatccacttgttgtcagataaaaatctgcaaatccgcctgaaggtgccatttggattgtactttagtggcac

SEQ ID NO: 462216 - DNA, 74 bp, Homo sapiens
ttttagggtcctttatatagaagggagatttgtgatggacgcctctgaccccacccagctctctgcatcctgtg

SEQ ID NO: 462217 - DNA, 100 bp, Homo sapiens
aataaccatgaacttcgaaacgtgataagaagcacctggatgagacatttgctacagcatcccacattaagtcaacggctcaaagatttggaaagagaca

SEQ ID NO: 462218 - DNA, 82 bp, Homo sapiens
ggcagacagcggcatacagaatgcctatgaccggcgtcgagaatttcaactgcagaaaaatatggctcaggagactaaccag

SEQ ID NO: 462219 - DNA, 100 bp, Homo sapiens
tgtaacacagattctcctctgcgctatgtggacattgccatcccatgcaacaacaaggcccagatgatcttcctcaactgtggccacgtctgctgctgcc

SEQ ID NO: 462220 - DNA, 98 bp, Homo sapiens
ccagtgtggagcagcccagccaagcactgtcaggactacgcgtttgttcacatggagaaggaagcagatgccaaagccgcaatcgcgcagctcaacgg

SEQ ID NO: 462221 - DNA, 82 bp, Homo sapiens
gctcatggcccaccagctagaaaggtaaggtactcaactgtgtggggtactacataaatcctgaaagactacaataaagtgg

SEQ ID NO: 462222 - DNA, 146 bp, Homo sapiens
aaggatccggggatcaaagagcagtgggggttgctgacccagaggagagttctccaaacatgatcgtttactgcaaagttactataacaacagtaccaaggtggctgtgaaaaccctgaagccaggaactatgtctgtgcaagcct

SEQ ID NO: 462223 - DNA, 51 bp, Homo sapiens
ggatcaggcagccttcaggactttgggcaacacggaggtagtcacgtttcc

SEQ ID NO: 462224 - DNA, 50 bp, Homo sapiens
tttttttctgttcagtgacatctgttcttctggatctgcctcagtcctga

SEQ ID NO: 462225 - DNA, 87 bp, Homo sapiens
catattcatcatggacgtgatgttggtgtgttcacatttgatcatggcatggtctgtggacggtctgctgaatgcccataggaggaa

SEQ ID NO: 462226 - DNA, 100 bp, Homo sapiens
acgagcgggccctggctcaggaacagggacagcacctcatcccctggatgggggaccacaagatcctcatcgacagtcaccttcaggccattcagaggag

SEQ ID NO: 462227 - DNA, 83 bp, Homo sapiens
ccctactctgccccgggggagagatcaatgtccgagttaccaccatggatgcagagctggagtttgcaatccagccaaataca

SEQ ID NO: 462228 - DNA, 82 bp, Homo sapiens
tgaagtgtcattctacagtgtttcagatgacaatgctccctctccttatatgtctattatcctcccagtccacaacgctgaa

SEQ ID NO: 462229 - DNA, 50 bp, Homo sapiens
gcgcaaattcactccccagtacaaaggtgttcaggcgcttcgtggaggtt

SEQ ID NO: 462230 - DNA, 111 bp, Homo sapiens
caccgctatcacagctgctgcaatcgcttgggagagctcctgggccacccctcctttcaggtcaaggaagcaatgaggctccccaagaacacacctgaggaaaaggacagg

SEQ ID NO: 462231 - DNA, 100 bp, Homo sapiens
ttgcccagaggagcaaggctgaggctgaagccctgtaccagaccaagtatgaggagctgcagcagacagctggccggcatggcgatgacctccgcaacac

SEQ ID NO: 462232 - DNA, 50 bp, Homo sapiens
cctgctttgattcattgaaatatctgacgaagcaagtggaacttctacgg

SEQ ID NO: 462233 - DNA, 95 bp, Homo sapiens
ggaagccatcgcctggccccggctctctggaccttgtctcgctcgggagcggaaacagcggcagccagagatttcgagatccactggaaagtgat

SEQ ID NO: 462234 - DNA, 100 bp, Homo sapiens
ctggcaggagaaaatcaaacagcatttgagattgaagagcttaataggaagagatcgtcaacttcaactgccggaagctggtggcctccatgccgctgtt

SEQ ID NO: 462235 - DNA, 100 bp, Homo sapiens
tggaaagacccaggagaagccgcccaaagaactggcgtctgcgtcctgcacaactgtatctatgctgctgggggctatgatggtcaggaccagctgaaca

SEQ ID NO: 462236 - DNA, 88 bp, Homo sapiens
cagacctgtgcttctgactatcttctcttcaccagctcttcagatcaatatgatcaccctgagactataatggaagaagtgaaaataa

SEQ ID NO: 462237 - DNA, 100 bp, Homo sapiens
agtggccagaactacacctgtgcctgccccactggcttccgcaagatcagcagccacgcctgtgcccagaagccacaaaccggagggaagtggagagccg

SEQ ID NO: 462238 - DNA, 75 bp, Homo sapiens
accagctggatttcgtgcaagtgaaagagggtatattacctctctctggaattttacatgggccgaacattacag

SEQ ID NO: 462239 - DNA, 76 bp, Homo sapiens
gactgtgactgaggaagagtggtagctacagcaagctgggtagcaggcagatccaaaggatatcatgaagtttcca

SEQ ID NO: 462240 - DNA, 100 bp, Homo sapiens
tattcatgaggcaaatgaggaacagggcaatagtatgatgatggagtgaaggtacctgagcgcaggaaccatggtcttcattgctgcctcagcattagcg

SEQ ID NO: 462241 - DNA, 110 bp, Homo sapiens
cgctgttccacctcattcaacttcaggttcagattcagaacaagaaagtggacatctctaaggtctcctccaagtgtgggtctaaggctaacatcaagcacaagcctggt

SEQ ID NO: 462242 - DNA, 51 bp, Homo sapiens
gatttcctggaagcagagaaatggtcatgttggcagcttcctattggtctc

SEQ ID NO: 462243 - DNA, 50 bp, Homo sapiens
ctcagcggcgccttgcggagggaccccagatatttggccttgacattaaa

SEQ ID NO: 462244 - DNA, 96 bp, Homo sapiens
ccaaactttgtgattcaggagaactggtcgccatcaagaaagtattgcaggacaagagatttaagagccaagaaaatgatgagctaagagatgccc

SEQ ID NO: 462245 - DNA, 82 bp, Homo sapiens
aacaacaaccttatcccggccccaaactggcagggtctttatcccaccattagagagagcccaagatttctctacatttggc

SEQ ID NO: 462246 - DNA, 100 bp, Homo sapiens
cagagaggcctagaaaggaatgatagctggggttcttttgacctgagggctgctattgtatatcacactaaaggtatgcaggtgccttgagagcttcagg

SEQ ID NO: 462247 - DNA, 90 bp, Homo sapiens
cgcccctcggggaagatggcgccctcggggctgaaggcggtggtgggggaaagaccttcgtggggatccaggcctctgaggcctccagga

SEQ ID NO: 462248 - DNA, 100 bp, Homo sapiens
attcagggctggcagtattccttctgttctggtggctcgatcttcattgctttcctctggacttaggtccagttccggccgtaccgcacagacgacttca

SEQ ID NO: 462249 - DNA, 75 bp, Homo sapiens
ccggtgcccatccagtccggtgccatctgaagcccccttcccagatggagacctcacagacacggtcagtggtcc

SEQ ID NO: 462250 - DNA, 96 bp, Homo sapiens
cccgacttcggaaggaccgggaggcaaaggtgaggaagttggcgaaggaacggctctcctttgtttgcagtaagaagacatgttggataacaagaa

SEQ ID NO: 462251 - DNA, 100 bp, Homo sapiens
gaacaaatgcctcctgaggatttctgtgcctggaaaatatctgttaacagactgcttttacacctactatggctgtagaatttcctctagtcttatatga

SEQ ID NO: 462252 - DNA, 83 bp, Homo sapiens
accgcgggcgccaatggggagcagaaggactcggacacagggcctgagccaagattctgccaaaagactgcgctttgtggcag

SEQ ID NO: 462253 - DNA, 75 bp, Homo sapiens
tggagaagagaaagcacaaagcatggagaccctccctccaggagtccaatgtgctgattgctgctaacagtcagg

SEQ ID NO: 462254 - DNA, 100 bp, Homo sapiens
ggaagtcatgctcgcttcacggaggcaatagctagccgttccagaaagctgagtctgatctggattacattcaatacaggctggaatatgaaatcaagac

SEQ ID NO: 462255 - DNA, 82 bp, Homo sapiens
cgcagggcctgcagcgggagctggacggcgagcgcgagcggcgcgagaaagttgttcctcaaagtcattcaagctgtactcg

SEQ ID NO: 462256 - DNA, 92 bp, Homo sapiens
acgcaaccccagatccatttacactttacaggtgatcagcccatgacctaaacctccagacaaaataaaacggaaaatttgctagaatcaag

SEQ ID NO: 462257 - DNA, 100 bp, Homo sapiens
gtcagaaggagtggacttgattgatatatatgctgacgaggagttcaaccagtttgaaggatgacctctaggaagaaagtgttgctgaaggttatcatcc

SEQ ID NO: 462258 - DNA, 100 bp, Homo sapiens
gcaaattccgacgtcttgaagacttccgagtagatcctctcaacattgcctacagccacatctacagctcctacaggaatttcgtggggccacctcattt

SEQ ID NO: 462259 - DNA, 83 bp, Homo sapiens
gccaaggaataaacatgcaatgaacccaaaagggcgtgtgcttagggatgcagttggcagtggttgaattctcaagaaacgtg

SEQ ID NO: 462260 - DNA, 100 bp, Homo sapiens
aaaccagtgacgttttccacaggcatcaaaatggagtacaagcgcaagctagccagagtttccctggtgcgcaaagaactcaggtcccggatccagagcc

SEQ ID NO: 462261 - DNA, 84 bp, Homo sapiens
ggaagagaactgctgttccacctccgcctcctccctgcagtgtggcttcttagccatcactggtgcaagctatatttaacggag

SEQ ID NO: 462262 - DNA, 74 bp, Homo sapiens
cttcagtctataataaagagatgtatacatcgagatatttccaagcagaaggaatgaagttcgaacacatgtcg

SEQ ID NO: 462263 - DNA, 75 bp, Homo sapiens
accgtgagcctgaaccacaagctggacagccatgcgattgactggggcgactttggggtagaggcagtgtctgag

SEQ ID NO: 462264 - DNA, 75 bp, Homo sapiens
ggatgagtcatgtggcagtggaaaatgcgctcgggctggaccagcaggttttagctgaattttgggacatggcca

SEQ ID NO: 462265 - DNA, 100 bp, Homo sapiens
gcactggttttacagttgaaggagacctcaagcttacaggaacaagctgatatcctctatatgctgtatactatgaatttttcacagcatatggtcctga

SEQ ID NO: 462266 - DNA, 100 bp, Homo sapiens
ctctgaaggtgatcaggctgcaggaagaagaagggacacctttcacagctatcagggaaggaacattttagtggacaaaccaaatgaccaatcttcaaga

SEQ ID NO: 462267 - DNA, 87 bp, Homo sapiens
tgtctccctgcctctcaataccttgggcccagtcatgaagatggaacctctgaataacctccagtagggacggggtttcaccatgtt

SEQ ID NO: 462268 - DNA, 100 bp, Homo sapiens
acatccttctgacaggcccggcagactcagaggcacccggcctggtctctgtgatcaagcacaagggggtccactggacggggcctgagctacaacttca

SEQ ID NO: 462269 - DNA, 49 bp, Homo sapiens
ttgccctgcttcgtgccttgcagcaggtggtcgtaatggttatggtgca

SEQ ID NO: 462270 - DNA, 76 bp, Homo sapiens
gaggagtcggaggagccgcgggcggcgcggcccagctcgttccagaacatgaaaggctcccggagcagcgctgact

SEQ ID NO: 462271 - DNA, 90 bp, Homo sapiens
ctcccacgcgcttgtgcctggacggaccctcgccagtgctctgcgcagttgttgaatgttgggtcacgaagatctcaacctggccaaaga

SEQ ID NO: 462272 - DNA, 82 bp, Homo sapiens
aatgagcacatgaccagcttagcttctgtcctaaaggatggcaatggttatatcagtgcagcagaactacgtcacgtcatga

SEQ ID NO: 462273 - DNA, 97 bp, Homo sapiens
tgcaggtgcggaagctggtgggcactcagcaccctctgcttaccacagccagaacctactgggttggtgacatttacaagacagagtcttgaagatt

SEQ ID NO: 462274 - DNA, 50 bp, Homo sapiens
cctatgttgccctgagttacataaatagaagaagaagaggacagtgctcc

SEQ ID NO: 462275 - DNA, 83 bp, Homo sapiens
ggaggttcgagcgctgttctcgctccggagccgctgcacatttcggacatggatttgattgacatactttggaggcaagatat

SEQ ID NO: 462276 - DNA, 75 bp, Homo sapiens
ctgaaattcagagaggggaagtgatttgcctcagcttgtactggatttatcaaagatgttcatgaagactccctt

SEQ ID NO: 462277 - DNA, 100 bp, Homo sapiens
caggaactggtggagtggaagtggatccaggaaaccgcagcaatggcgctgagttcctctgctggagttcatcctgctagctgggttcccgagctgccgg

SEQ ID NO: 462278 - DNA, 75 bp, Homo sapiens
ctacagctcaacaggagcctcaccagcttagatccaatggatgggaccccaatgaaatgttcaagttcaatgagg

SEQ ID NO: 462279 - DNA, 75 bp, Homo sapiens
ggtgtacaaatacccctttgaattaattatggctactctgtggtttcccctcttcctgtaaccactgtgaaatcg

SEQ ID NO: 462280 - DNA, 113 bp, Homo sapiens
tcaaagcaagaagtggtgacaaccccgtgtacatctggggccactctctgggcactgggacttaaccaccaccatgtcgagcaaaagaacaaagaccaagaccaagaagcgcc

SEQ ID NO: 462281 - DNA, 74 bp, Homo sapiens
agcgatgttaccattgtgaaagaaggttgggttcagaagaggggtcacactgtgaacaagatgcgtaaacactc

SEQ ID NO: 462282 - DNA, 51 bp, Homo sapiens
cacccctgaagaaattgcacaggtcctaggcctacttacaagcctccagtc

SEQ ID NO: 462283 - DNA, 75 bp, Homo sapiens
atcgaggcggacgacgaccggctcaacaaggaatttgctgacacaatatcttccgcctggtgctgggcatatcct

SEQ ID NO: 462284 - DNA, 75 bp, Homo sapiens
tttccggatcaatccagatggcagccagtcagtggtggagctattgacctgaaaagtggttctggaaaagtgtac

SEQ ID NO: 462285 - DNA, 51 bp, Homo sapiens
gtggttacttgttatttcaacaggttggcatcactctcttcactgtgtctc

SEQ ID NO: 462286 - DNA, 50 bp, Homo sapiens
cccaaacatctcaacttacatttaaagtgagggccccaaggctgttgcag

SEQ ID NO: 462287 - DNA, 83 bp, Homo sapiens
aaggaacgaggcaaggagctaaagcagcgtgcgttcagccctgggattgtcttctcctccaaggtctacatgattacctgaag

SEQ ID NO: 462288 - DNA, 100 bp, Homo sapiens
atcgcggtgctcatagacgaactccgcaatgaggacgttcagggactttgaacatgtcggggatcgccctcagcagactcgcccaggagaggaaagcatg

SEQ ID NO: 462289 - DNA, 83 bp, Homo sapiens
ctgattgggacaacattcagacccatttccagtcatgattttctgaatttccagatcccatgtggggttcagattatgtgcag

SEQ ID NO: 462290 - DNA, 75 bp, Homo sapiens
caaccaacttcgggcgcgctgtacagcaagtcaatgccatggatcacacctcgacacccaacccctgaaccccac

SEQ ID NO: 462291 - DNA, 80 bp, Homo sapiens
aaacgcctgtgttccaccgttcaccatcgaggtgaaggccaaatttgagtttcatcatggtgactatgaaaaacagtttc

SEQ ID NO: 462292 - DNA, 75 bp, Homo sapiens
ggcaaaatggcggaccgcttctcccgcttcaacgaagaccgagactttcagggtgaagagggaacagaaatcttt

SEQ ID NO: 462293 - DNA, 90 bp, Homo sapiens
atgggctgctgagcttcacggtgcatcccaagcccaagcacctggctgagcacgcagacactgtgcagctggtgtccggcttcgaggcca

SEQ ID NO: 462294 - DNA, 100 bp, Homo sapiens
caccgcggcgccgacatcaattacgccaatgtggacggactcactgccctgcaccaggtgccagtgacggggtggcccgtgagctgatgacgaggactgg

SEQ ID NO: 462295 - DNA, 83 bp, Homo sapiens
gcgggaagagccggggccgtggctgacatggagcaggtgagaagccctaccactgcaactgggacggctgcggctggaagttt

SEQ ID NO: 462296 - DNA, 51 bp, Homo sapiens
cacccaggaacaagtatctgacaggagaataaaggcagccccgttgatgac

SEQ ID NO: 462297 - DNA, 75 bp, Homo sapiens
ggagccgtctgcctgcatctgctgctgaccctcgtggttcttcacacacccccattcggcgtagtacccagagag

SEQ ID NO: 462298 - DNA, 100 bp, Homo sapiens
cccgccggcgctgacggactgggggcgccgcccgcgcccgggaccgacccctctgctcgcggccgcgcctttgagactgctctctctgtataagaaaatt

SEQ ID NO: 462299 - DNA, 74 bp, Homo sapiens
aagagtccagattcaacaggctgccaataaaggagcaagatggctagggagtcgtccttgtctactccactacc

SEQ ID NO: 462300 - DNA, 83 bp, Homo sapiens
gtgcgggacgcgggcgccaggaccggccgaacgcagagttggaatcgaagcctcttaaaatggcagatgacttggacttcgag

SEQ ID NO: 462301 - DNA, 83 bp, Homo sapiens
cttttccgcccgcttcgatcgcctcgcgccggctgctctttccggctcattgctatggacagtgctatcaccctgtggcagtt

SEQ ID NO: 462302 - DNA, 82 bp, Homo sapiens
aattttctgtacaccaatggaaagtgcgtcatcctaaggaacatcgaccaccggcagctgctgaaggacagcttcatggtgg

SEQ ID NO: 462303 - DNA, 97 bp, Homo sapiens
ggctgccatggacgacgaggaggagacgtaccggctctggaaaatccgcaagaccatcatgcaggaaatggctaattctgtctacctggttatggag

SEQ ID NO: 462304 - DNA, 75 bp, Homo sapiens
acacaggtgaatttaaaggagcagccctggtgtcacctatcagtaaaaggtgtcccgacccaggctaagcttgag

SEQ ID NO: 462305 - DNA, 90 bp, Homo sapiens
agactgcaagacttctatgattccacagcaggattcaactggaagctttgtgctgcctttccggcaagtcatgtatgctccatatcccac

SEQ ID NO: 462306 - DNA, 100 bp, Homo sapiens
gtggaggaagaagcgaatgcgcaggctgctggtggtctacccttggacccagaggttctttgagtcctttggggatctgtccactcctgatgctgttatg

SEQ ID NO: 462307 - DNA, 83 bp, Homo sapiens
cggatctgaacccatgtcaacacgaggcccagtgtgtgggcaccccggatgggcccagggaaaaagacctcgatgaagttctg

SEQ ID NO: 462308 - DNA, 98 bp, Homo sapiens
aagaaatggaaagaatgctccacgtggtggatggtaaagtcccagatacactcaggaagtgtttctcagaggtatatgaatgacctaaaggtacaaat

SEQ ID NO: 462309 - DNA, 75 bp, Homo sapiens
caggtgtgcaggtttcggcacatggagattgatgtcctaggcctacttacaagcctccagtctcaaattatccag

SEQ ID NO: 462310 - DNA, 100 bp, Homo sapiens
gacgaggggacctacatttgccagatcaccacctctctgtaccgagctcagcagatcatccagctcaacatccaagaacgcctgacagacaatctcagag

SEQ ID NO: 462311 - DNA, 101 bp, Homo sapiens
gtaaacttcatggttcggctttttgtggtgattgtgatgtttgcctggtctatagttgggaaatggctcattccaagactagcttttcatgggcaacccct

SEQ ID NO: 462312 - DNA, 100 bp, Homo sapiens
caaaagtgatggtcagtatttctttgaaattctacaaggaacttcaggcacatggtgctgatgaggtgaaatgacaatggatgctctgttggctcgattg

SEQ ID NO: 462313 - DNA, 144 bp, Homo sapiens
gagagcagatggcagatttgcatctttacaaccagaagctcagggagaagttgaaggaggaggagaacacagtgggtgctggagaatctggtaaaagcaccattgtgaagcagatgaggatcctgcatgttaatgggtttaatg

SEQ ID NO: 462314 - DNA, 100 bp, Homo sapiens
gtccaggaaaagtgtttggggaattggctattctttacaactgtacccggacagcgaccgtcaagagaggccagatgctccagtgcctgatggcgaaagt

SEQ ID NO: 462315 - DNA, 75 bp, Homo sapiens
taatctcagggaactggatgtcagcaagaatgtgttttagagcactttgctgcaagggaccaccacctgcacgac

SEQ ID NO: 462316 - DNA, 89 bp, Homo sapiens
gcgccgtggccgcgtcccactcctcaggccggggcgcacgtcggctcccacgcttagccagctcccgtggaagagaaagccaataccca

SEQ ID NO: 462317 - DNA, 98 bp, Homo sapiens
aggaagagtcagacctcgaattagcaaaggaaacttttggtggataattactgtaccttcctcatggaaaaagttttatttaaagtgttatttctcat

SEQ ID NO: 462318 - DNA, 101 bp, Homo sapiens
gctccaccagtcctctgacaagtttgtctcggagctgtggaaggatggtgacagagctgaatgaacctctctccaatgaagatcgaaatctcctctctgtg

SEQ ID NO: 462319 - DNA, 112 bp, Homo sapiens
aagtcctacaacagtttggcgtgcaacatggggcttgagaaagggatcagttccatgacaagaccccttatacgattatgtttggtccagataaatgtggagaggactataa

SEQ ID NO: 462320 - DNA, 100 bp, Homo sapiens
gagccgatagcgtccgctaggctgtctgcctcggtacctgttactgctgctacttcctcgtttgacaccttcctggaccctggaagctgtcctgaatttc

SEQ ID NO: 462321 - DNA, 144 bp, Homo sapiens
ctacattaaattcttgcgctccatccgtccagataacatgtcggagtacagcaagcagatgcagagataaactacgcccgccgacagaaacatctgcaaagatacagtctgactcagtgggttgacaggaacatgcgaagccac

SEQ ID NO: 462322 - DNA, 82 bp, Homo sapiens
gagcccagtatgggaaagatctaccttctggaagctactactacgtggtgcttggaaaggccatccagaaggaactagaaca

SEQ ID NO: 462323 - DNA, 100 bp, Homo sapiens
acccggcaggcttggcggcggcggctgcggggacgccccggctgcgtacaggattatcatggtcataaaatttgtgacccttacgcctggcttgaagacc

SEQ ID NO: 462324 - DNA, 81 bp, Homo sapiens
tctttgtcctttgggatttctgaacttcagaaagccagtgttgatggctgcatcaagcttctagctgtgcaagaactgctt

SEQ ID NO: 462325 - DNA, 83 bp, Homo sapiens
tcctggtcaatcatgacttcacccctctggaggcctgggccgaggccactggtgcatatgttcccgggagggataagccagac

SEQ ID NO: 462326 - DNA, 74 bp, Homo sapiens
tgagagcgacgaagccaactgtccaggtgtatgcccacgcaggcgcgacgctggaggggaagatgtatatcacc

SEQ ID NO: 462327 - DNA, 73 bp, Homo sapiens
ggtcaaatttcagccatcagcaaatgtagccatagctgtaacgtataaccatgatgggtcttatagcatgcag

SEQ ID NO: 462328 - DNA, 90 bp, Homo sapiens
cgacttcaagacgcggcccaaggtgtcccttggcggcgcgagcaggaagagcccaatgacgaaagtggagctaacgtggatgcgtccaaa

SEQ ID NO: 462329 - DNA, 100 bp, Homo sapiens
ccgtccccctgccccgttcacaatttccaaaagctgagacaagatcttgaaatggtactgtccactaaggagtcaaagaatgaaaagttaaaggaagact

SEQ ID NO: 462330 - DNA, 75 bp, Homo sapiens
ttcaggctgtccagaagtaaaaggcagaaaggacccaggagcgataacagtaaatcaaataagatatttgtcggt

SEQ ID NO: 462331 - DNA, 100 bp, Homo sapiens
cctgcatctgcccctcggccttccgacgtgggcggtgggccccagccccacagaccagcccagcattcaggtgccagtggcaggtggaggccaatggcgt

SEQ ID NO: 462332 - DNA, 73 bp, Homo sapiens
gcggtacccgggtggttaaacttcgcaaaatggttggatggcaagcatgtggtgtttggcaaagtgaaagaag

SEQ ID NO: 462333 - DNA, 101 bp, Homo sapiens
tacaggatttcctggttctgcgggcagagttggacctccaggccctgctattctggatgaaattgaagaacataacatcaaaatctatcacttacctgatg

SEQ ID NO: 462334 - DNA, 90 bp, Homo sapiens
cctggtcagtgtaattctaatctcacggatatcctctgttgggggagaagggacggagtgcatcaagccagttgtgcaggaagtcctgac

SEQ ID NO: 462335 - DNA, 100 bp, Homo sapiens
acttctgactcacatgatggcagccagcttaggtacacagagcatgtctgttcgatcctggcttccctcctgcggaacctgagagggcagcagcggaccc

SEQ ID NO: 462336 - DNA, 100 bp, Homo sapiens
acagtgctaggcttggcccgcctaaggcactgggtgtacctgctttgcttctctgcaggaactgtctatcttgaccatgcaggtgccaccttgttctccc

SEQ ID NO: 462337 - DNA, 100 bp, Homo sapiens
aagatgctgaagtctcagtccagctctgccgaacagagcttcctgttctccagggaggaggcggacacgctcaggtgaaagaacttgtcctggacaacag

SEQ ID NO: 462338 - DNA, 100 bp, Homo sapiens
ctggctccgggctgagcttcctggagaagaggaaggaagctattttgccagccacttcattatgggaggagagaagtttgactcaactcatcctgaaggt

SEQ ID NO: 462339 - DNA, 98 bp, Homo sapiens
tgggatggcaaagagacaaccataaagagaaagctagtgaatgggaaaatggtagcgattcaaggcctcttccagatgtagccctgactgggaagtgc

SEQ ID NO: 462340 - DNA, 96 bp, Homo sapiens
gctgtgcacgaccacaccgctgatgaagacaaggactcacagtggctgcaagggacaaaagtggctctcaatccagcacatgcacattgaagcaag

SEQ ID NO: 462341 - DNA, 75 bp, Homo sapiens
ctgcgacagcctggacagcaactcaggtgaaatgacaatggatgctctgttggctcgattgaaacttctgaatcc

SEQ ID NO: 462342 - DNA, 51 bp, Homo sapiens
ggcgcgagtgaggaaaggaggtactgtagggttatgtaccgaaggactcta

SEQ ID NO: 462343 - DNA, 100 bp, Homo sapiens
ttttatctgtctagtggttcttgtgggtattctcatctactggagattgtcagcagcctgctgcctccgtaccgccacagtgctcacaactagccgggag

SEQ ID NO: 462344 - DNA, 83 bp, Homo sapiens
cttagccctctacttttcaagacaccaagtgagaggccaaccagaactggactcagaggatgccccgccatgctgccgtctgg

SEQ ID NO: 462345 - DNA, 74 bp, Homo sapiens
cttacgtctgcggaagtgcagctgcctcagttcttagcgcaggcctggcgctgctgctgccgcccgtcaccctg

SEQ ID NO: 462346 - DNA, 101 bp, Homo sapiens
ctgcagccgagatgccgggggagcggggccttccacaccccctccgtgggtgtgtgcctgtggacatctctacagcaatgagtgaacgggcacttgctcag

SEQ ID NO: 462347 - DNA, 100 bp, Homo sapiens
cccggatgtcgcttacagagtcaccaaagacgcgcagctcagcgcacccaccaagcagctgtaccctgagaagttgatgacgcctgagatgttttcagaa

SEQ ID NO: 462348 - DNA, 74 bp, Homo sapiens
aaaagagaggtgcctttatctgatgatgatgaaagttacacaggcaagaaggctttagctgatgcacagatccc

SEQ ID NO: 462349 - DNA, 75 bp, Homo sapiens
ttcagcgtcccggcgccgtcgcgccactcctccgactgccagccctctcctggtgctattcactctcaacttcac

SEQ ID NO: 462350 - DNA, 100 bp, Homo sapiens
tctcctcctcttcctctctctggacgcccggctcctccgcaccccctcccccgggggtcccgcggcctgggctggggagaacaccaaaacaaacctggag

SEQ ID NO: 462351 - DNA, 82 bp, Homo sapiens
gcacagagcctcgcctttgccgatccgccgcccgtccacacccgccgccaggacgcccctttcgccccaacggtctcttgga

SEQ ID NO: 462352 - DNA, 82 bp, Homo sapiens
cagtgcttccaccctggacgaagccacccccaccctcaccaaaggctgggaggcggcagaatgcagccagaggagggcacag

SEQ ID NO: 462353 - DNA, 74 bp, Homo sapiens
gttcaagacaggtgtttaagcggttttcagagaaagatgctgatgaggtgaaaggaatttttgtagataccaac

SEQ ID NO: 462354 - DNA, 100 bp, Homo sapiens
tatattcaaccagctggaagtgaagatgtggaagatgtgaaatttgtcatcaattatgactaccctaactcctcagaggattatattcatcgaattggaa

SEQ ID NO: 462355 - DNA, 83 bp, Homo sapiens
cgggagttgggaggacccgggacaccgcacagccgggaaatgggactttgaacatgtcggggatcgccctcagcagactcgcc

SEQ ID NO: 462356 - DNA, 83 bp, Homo sapiens
cttgccttgagtcagtgcgccgctctccagcccgcttgaacggccccagcccacgcagcaggaggacacactgccgaagggac

SEQ ID NO: 462357 - DNA, 50 bp, Homo sapiens
cccagacgtgcaacaaagtgcgatgggttctgagcaaggttcaaccagtc

SEQ ID NO: 462358 - DNA, 75 bp, Homo sapiens
agcgcgaatatcgtcatcgttagaagttcattcggctcctaaagaagtagcagtgtccaaggaacaagaagagaa

SEQ ID NO: 462359 - DNA, 98 bp, Homo sapiens
caggcccatacgatttgagccaccaatgctggatttccatgaacagttgaaatcacaaagattagacacctttttagataggtgttcttcagcaccac

SEQ ID NO: 462360 - DNA, 125 bp, Homo sapiens
gccagagaggcccgcccaccagttcgcccgtccccctgccccgttcacaatgtgacaaagaagctgaagatgggtggtggagagaggtataacattccagcccctcaatctagaaatgttagtaa

SEQ ID NO: 462361 - DNA, 73 bp, Homo sapiens
accattgaaaagccttcagagctgagagttactccacaggatccgctgaacataggatgttgccacaaaatct

SEQ ID NO: 462362 - DNA, 100 bp, Homo sapiens
ttgctgccatggagcccgagcccgccccagccccggccccagaagagtggctggacattctggaacatctctattctgcaagacccctctgccatgccag

SEQ ID NO: 462363 - DNA, 98 bp, Homo sapiens
caggattctacagatatatgcaaaataagactgattttatgggaaaattaagcagatgctccagtttgagaaacctggatctgcgatctgtttgtggt

SEQ ID NO: 462364 - DNA, 78 bp, Homo sapiens
cccaatgctgaagtaagattgtcttggaaatactaagttgggattgtcaccagacctgcaatctatggagcagattcg

SEQ ID NO: 462365 - DNA, 75 bp, Homo sapiens
cgccgctctccgagctcgatccgctgctcgcacgggagccagctgggtggaaaatgcaacatggcagcagcaatg

SEQ ID NO: 462366 - DNA, 75 bp, Homo sapiens
aaacgaggggctggaacacctcgccaaagcagagaaatagacagaataacgggctcccagattcacaagccccac

SEQ ID NO: 462367 - DNA, 87 bp, Homo sapiens
gcgcgcgcccgccccgctctgggaggaccgcgagacaccattcgcttttcacccaagatgatttgatgtcttataaaactctgatga

SEQ ID NO: 462368 - DNA, 83 bp, Homo sapiens
cccggccaccagcaattgtccggaagcagttcaggtacttttgaagcattctgcagatgttaatgctcgagacaaaaattggc

SEQ ID NO: 462369 - DNA, 82 bp, Homo sapiens
ggccagagtcacacacggtcctaagagctgggcaccaggaagcgaaggctggaacgtcaaggtcgtgggaaataaaaggcag

SEQ ID NO: 462370 - DNA, 100 bp, Homo sapiens
ggtctcactgacttcaagaatgaagccacggacccttgcgatatttcagcagttgaatcagttgaattcacttcatcaagaaactatcatgaaatgcgtg

SEQ ID NO: 462371 - DNA, 50 bp, Homo sapiens
tggagttcacagaagagtcgaggaggaggttccagccttggcaagaggag

SEQ ID NO: 462372 - DNA, 98 bp, Homo sapiens
cgcagaggaggagcgcagcccggcctcggttctgtcatatgttgaagaatccatacaccattaagaaacagcctctgcatcagtttgtacaaagacca

SEQ ID NO: 462373 - DNA, 100 bp, Homo sapiens
tgagcaatttctatatgataagcagtttttagattctgtttctggcgtctgcatacgcaagtccccaactcgctgaggagagctgttcagctatggctgc

SEQ ID NO: 462374 - DNA, 75 bp, Homo sapiens
gcggcggcggcggcagtgacgtcgccggacaaatttacatgtattggagaccagaccagaagcccttctgaatta

SEQ ID NO: 462375 - DNA, 51 bp, Homo sapiens
agtatcataaaattcctctaaatgcaaatgtactcaagactgatcttctaa

SEQ ID NO: 462376 - DNA, 83 bp, Homo sapiens
caagggcctccgtctggatttccaaggaagaatttcctctgaagcaccgaacatccagtcatggataaaaatgagctggttca

SEQ ID NO: 462377 - DNA, 100 bp, Homo sapiens
gctcttcacatgatggaactgtttgacacaactgtagagcagctgtatagcatcttcactgtaaaggagatctccagtctatgtgctgaagaagcagcag

SEQ ID NO: 462378 - DNA, 100 bp, Homo sapiens
cacaaatgaatggtaggaaaattactctgaaaagagaacaagagagtgagaaaccaagccaagcttatatagaattggtgataggatcacaacttctgag

SEQ ID NO: 462379 - DNA, 101 bp, Homo sapiens
ctctccgaatacatatgttaaagcacacaggtgtaaagccacatgcatgccagattcctgaatttgacaacttgtacctggatatgaatggaattatacat

SEQ ID NO: 462380 - DNA, 99 bp, Homo sapiens
cggcgcggtagcgaaggccgccgaacctgcctggctagccggcgacttgagtgacgacaattctgtggtgttcttggtcacacatttatggagtttctg

SEQ ID NO: 462381 - DNA, 100 bp, Homo sapiens
cgccaaacctgagtttctacagaaatgagatccgcttcctgcccaacggttggtgttcgaggaagagacattgttgttcttggtgtggagaagaagtcag

SEQ ID NO: 462382 - DNA, 101 bp, Homo sapiens
gacatctgcgccatctgtcaggccgagttccgagagcctctgattctcctgtgccaggtggatccataaagaacccagccaacccgcagagggaggggagg

SEQ ID NO: 462383 - DNA, 83 bp, Homo sapiens
cctccctccactccctccctgccccgcgctgacaggggggcctggccgcgcagccgctgtcgcctggttgggcccggaaatgg

SEQ ID NO: 462384 - DNA, 98 bp, Homo sapiens
ggtattggcagtgtgctctccctccagaagttctggcagcaccgcatcaaggactatcacagttacatgctacagcccattttgaaagccggagatga

SEQ ID NO: 462385 - DNA, 74 bp, Homo sapiens
agaggatgatgctgactttgatgaagttgactggattgttgctgacatcttggccatcaggcagaatgcgctag

SEQ ID NO: 462386 - DNA, 88 bp, Homo sapiens
gaggaagacgacgagtttgaagagttccctgccgaaggaccctttagatcctacaagatcagtgattgtgatccgctccctggtagca

SEQ ID NO: 462387 - DNA, 96 bp, Homo sapiens
ctccctggtctctgttggtgtagaagccaaaatcagaattctgcttggtcagaatcgtgatggcattgtgttcagcactgatgactattttcacca

SEQ ID NO: 462388 - DNA, 74 bp, Homo sapiens
gagcgtgaccgagagcgcgaatatcgtcatcgttagaaggattctaacattttcagagaaccttttggaaagaa

SEQ ID NO: 462389 - DNA, 51 bp, Homo sapiens
gacagggatatgcagactacagtggtcagcttttgccaactgttttcaaat

SEQ ID NO: 462390 - DNA, 71 bp, Homo sapiens
ggcgccggagcgggtctccaggctggcgagcgcccagcagtcctgcgttaactgcggccgggaggctatga

SEQ ID NO: 462391 - DNA, 100 bp, Homo sapiens
ctggaactcacctacctgcccaccaatgccagcctgtccttcctgcagcattccttctgcagcacttgatttattggaccacatgctgacactagatcct

SEQ ID NO: 462392 - DNA, 74 bp, Homo sapiens
gtgttatcaacttaaaagatgccacctctaaggtgcataaggcaaatccaatacgcaagtaccagggtctggag

SEQ ID NO: 462393 - DNA, 75 bp, Homo sapiens
ggagagtgggggagacaccaggtccgcgccaggcgtctcggggagagtaatgccttctagctttttcctgctgtt

SEQ ID NO: 462394 - DNA, 103 bp, Homo sapiens
aagtaagaggatttatagatcagaatctcagtccaacaaaagttttgtaccaatggctagaagcagatcgtcatggcaagagccaaggtgctgcaaatacgac

SEQ ID NO: 462395 - DNA, 100 bp, Homo sapiens
agtcctgttccaccttcagagcgtcacggcgtacgccctcatggggaaaatctccccggtgactttcagtggtatgttcaagccacttgtgcaacacaag

SEQ ID NO: 462396 - DNA, 82 bp, Homo sapiens
tggcgtgcactccgcacctcggggacattattgcgcgtggaacggctgcttttggaaggatgaagccaacgcacacgatggt

SEQ ID NO: 462397 - DNA, 96 bp, Homo sapiens
tggctgcccaggctcgcctcgactccaaatggttgaaaacagatatacaggtctcctttacagaaaggggcttggataaggaggaaagaccatcag

SEQ ID NO: 462398 - DNA, 96 bp, Homo sapiens
cgcttgtggaggaaacccacactaacgagttcatcacctggagccagagttgaagagagttttaagacactgttctgggctatatttggactttct

SEQ ID NO: 462399 - DNA, 98 bp, Homo sapiens
actgggccgcgcatttcggcaagtgacagccccaatgctgttcatgaggtggagaagtggctgccccggctgcatgctcttgtcgtaggacctggctt

SEQ ID NO: 462400 - DNA, 98 bp, Homo sapiens
acgctctgtctcctcaacctctacctggcggagataaactcaagccatggagggattactgcattacatcaaccctgcacacgccatttctctcctaa

SEQ ID NO: 462401 - DNA, 74 bp, Homo sapiens
ttcatcgcctacccccatctccgcatcaggaccaaggtgctggagaatctggtaaaagcaccattgtgaagcag

SEQ ID NO: 462402 - DNA, 83 bp, Homo sapiens
gaatagagttgagcctgtgggacacttcggtaacggcacagccaacaagatgaacggagctttggatcactcagaccaaccag

SEQ ID NO: 462403 - DNA, 80 bp, Homo sapiens
agcagcccgcaccggacaacttgcgagccatggggctggcggatgcgtcgggcattctggctggggcttctgtacctggt

SEQ ID NO: 462404 - DNA, 75 bp, Homo sapiens
ttttacaggcatttccttcagtgcttcctacagagaacaatggagccagaggtattagaaaactactcggatgct

SEQ ID NO: 462405 - DNA, 51 bp, Homo sapiens
cccagcttggcgtcctgagaaatggaccctaaagtaaattggttgaagaaa

SEQ ID NO: 462406 - DNA, 96 bp, Homo sapiens
cctggtaaccgagacaacggtcgtcccctttcttccggtcaatcctgagtactcatcaacacgaaatcagattccgaaatttttaacctctgaagc

SEQ ID NO: 462407 - DNA, 88 bp, Homo sapiens
gcacctggataaccttttgctaacaaaaacagtatggaagctccaaaaggaaagataccagattgatcttgatcacctctgcctcccc

SEQ ID NO: 462408 - DNA, 100 bp, Homo sapiens
aagaacagaatgaagaaagtcagggggactgcaaaggccaatgttggtgctggcaaaaaggatcatccagcagctcgtcaacggcatcatcacgcccgcc

SEQ ID NO: 462409 - DNA, 83 bp, Homo sapiens
cgagaggtgcgggcgcggctggcggccacgcaggaaccctctggatattgatgcctcgggtgtggttggactgtcatttagtg

SEQ ID NO: 462410 - DNA, 75 bp, Homo sapiens
aactggtcttggtagcggaggcacccgaatgctgcccgggtgaggcaggagtagggctgattggagccattgtac

SEQ ID NO: 462411 - DNA, 90 bp, Homo sapiens
taacacaccttcagaacctatacattgcatcgtttgggcaaagtacttgttcaaaaactcatcactgctatatatgcagattatgcccgg

SEQ ID NO: 462412 - DNA, 100 bp, Homo sapiens
tcctgaacctgtttctgctcagattgaggaaacaatggaagaggatgattgtagagttgtcttggcaaaacaggaaattacaaggttactggaaacattg

SEQ ID NO: 462413 - DNA, 101 bp, Homo sapiens
ttgtccaacagaacgacctagtatttgaatttgctagtaacgtcatggaggatgaacgacaggatctagtgaaaagccatttgatgtatgcggtcagagaa

SEQ ID NO: 462414 - DNA, 82 bp, Homo sapiens
agatgcgcaaattcactccccagtacaaagatggcctgcacagcgtgacggcgcagtgtgtgctgcgcgtggtcatcatcac

SEQ ID NO: 462415 - DNA, 82 bp, Homo sapiens
gttcccgctgcgctaggggaagcgggcaggatgaatttcatcctttcatcgaagcacttctgccccacgtccgagcctttgc

SEQ ID NO: 462416 - DNA, 95 bp, Homo sapiens
acatcaaaccagacaaccttcttttggacagcaagatgacctgtgtagaaaaagcaggaacagatgagaaaatgcttatgaaggtttttcgctgt

SEQ ID NO: 462417 - DNA, 74 bp, Homo sapiens
actgcgggccggcgaaagctgatgtgaagttcatttccaatccgccctccatggtggcagcggggagcgtggtg

SEQ ID NO: 462418 - DNA, 82 bp, Homo sapiens
ggcaggatcctggtatccgctaacagctcaaactggaggattataaggatcgcctgaaaagtggagagcatcttaatccaga

SEQ ID NO: 462419 - DNA, 75 bp, Homo sapiens
tggtcaaatggatagccctacacagatatttgagcatgtgttcctggttgcaaaggagtttggcttccaaaataa

SEQ ID NO: 462420 - DNA, 82 bp, Homo sapiens
ctcctagcgcggtgcccgcgccgtgactccgcagggaaagcaggcaggatgggagagtcgccgatagaaccacctcttccct

SEQ ID NO: 462421 - DNA, 82 bp, Homo sapiens
tcgacctgacttcttttgagcagttggcactacccgtcttgaggaatgtactccaaagattcaggtttactcacgtcatcca

SEQ ID NO: 462422 - DNA, 111 bp, Homo sapiens
ccgacagtgccctgagggccttcgagagctaccgcgccagacaggccgccatggcatcagatgaaggcaaactttttgttggagggctgagttttgacaccaatgagcagt

SEQ ID NO: 462423 - DNA, 75 bp, Homo sapiens
cacagttggattacaggcaatatttgtctgatgagattgatttgactatatgaaattgcatctgatggtctcaag

SEQ ID NO: 462424 - DNA, 90 bp, Homo sapiens
cccgttcttccgaaatgttgattgggatatggtgctggagaatctggtaaaagcaccattgtgaagcagatgaggatcctgcatgttaat

SEQ ID NO: 462425 - DNA, 49 bp, Homo sapiens
ctttcgggaatagagaaaccacaggtccgtggcactcaggtagttggtt

SEQ ID NO: 462426 - DNA, 100 bp, Homo sapiens
gagggccacgtgcggcagggtgtcttttcctccctcaaccacattgtggagaaacgggtcttggcggtctgttcctggtttcccagatgcataaaggaag

SEQ ID NO: 462427 - DNA, 90 bp, Homo sapiens
cagcggccggggcgcaggcgcccgtgcggaatggcagattatggcattaaaaccctatgacttgaggaggcgcttatatgtaatatttag

SEQ ID NO: 462428 - DNA, 100 bp, Homo sapiens
tttgtgacctccctctccgtgccaggacaacacctgcagtgtactggaaaggtattctctgaaaccaaatgaccaaatcttggctgaagacaaacacaag

SEQ ID NO: 462429 - DNA, 87 bp, Homo sapiens
gagctggattacacacagcaagttcctgcttctgggacagctctactgacgggaaatcctcattgacgattcaatttgttgaaggcc

SEQ ID NO: 462430 - DNA, 83 bp, Homo sapiens
gatgtgcaacaaagtgcgatgcctgacatttaccccggtaactgctgggcatttaaaggctcccaggggtacctggtggtgag

SEQ ID NO: 462431 - DNA, 96 bp, Homo sapiens
agcccccgcctgagatggctggacacagcctagccagctcccacagaaactccaccccggggcccagcgacctgacagttacaggactgaagtctt

SEQ ID NO: 462432 - DNA, 100 bp, Homo sapiens
tctgttgtgctggcttggtgacgctcacagtgctgggaaggaatctatccaaggcaatgcatgaaccattgcaaacttggcaagatgcaccatacatttt

SEQ ID NO: 462433 - DNA, 100 bp, Homo sapiens
aaaagcgagcgatcgagcgagcgcgcgcgcgaaaactccgggcaggaatagcgggttttgcagcaattgttgcatatggattatataaactgaagagcag

SEQ ID NO: 462434 - DNA, 90 bp, Homo sapiens
tggagccaccatcaagctgtctaagtccaaagatttttacccagatttggatttacagtgtgagataatcagctacatagaagtacccac

SEQ ID NO: 462435 - DNA, 96 bp, Homo sapiens
gcaacagcgacgactatgacctcgagtctgacatgaccccaccaacaactgaacgctttggtcaggctgctacaatggaaggaattggggcaattg

SEQ ID NO: 462436 - DNA, 100 bp, Homo sapiens
actctgcaaattccctaaagtaggaggaaaaatgaccatgtccaagctggaaaacctcatgctggacaaagatggccacatcaagatcactgactttggc

SEQ ID NO: 462437 - DNA, 100 bp, Homo sapiens
gtccctgtgacctggccgatgaggaagtactgagcctgttggaggaactggcccggaaacaggaggacgttcattttccagacactgaaagagcagaatg

SEQ ID NO: 462438 - DNA, 75 bp, Homo sapiens
gaaccggatcaccgagggcatttacggcagggactttgaacatgtcggggatcgccctcagcagactcgcccagg

SEQ ID NO: 462439 - DNA, 75 bp, Homo sapiens
gtggactgcgacaacggctcagacgagcaaggctgtcgcaagatcatgctctgtcagtcacccaggctggaatac

SEQ ID NO: 462440 - DNA, 101 bp, Homo sapiens
accccagacatcaagctctttgggaagtggagcaccgatgatgtgcagatcaatgacatttccctgcagctatgtggtggtaatgcctaaaaagagacaag

SEQ ID NO: 462441 - DNA, 83 bp, Homo sapiens
ccactggagattgtcctgatactaaggacaagtatccttatgccagcctggaccatcttggaggcagtgtaggatcatggaag

SEQ ID NO: 462442 - DNA, 100 bp, Homo sapiens
cagacggcgacagtggcggcggcgccatggcagggcttgcagattacttctctaacaggatcaccagtttgctccacaaagcacaatgtctcgatcacga

SEQ ID NO: 462443 - DNA, 75 bp, Homo sapiens
catgagcttttgattaacaccttaataaccagcggagctgacacagccaacctaagaaagctgtcaagataaaac

SEQ ID NO: 462444 - DNA, 50 bp, Homo sapiens
tgcaaagtgtccccggcaagaaggagctccttcccttaacagagctgaga

SEQ ID NO: 462445 - DNA, 98 bp, Homo sapiens
ccaggcagagacgggggaagcagcacgggatcccagcctcaggcctgcacggacggtgttggttgggattacattccaggtcaaacgtgtaaagaaac

SEQ ID NO: 462446 - DNA, 100 bp, Homo sapiens
ggaagcgagactcatacgcaacctcaatgacccaagtcccccgggaccctcgactgtggaggagcgtgtggcccaggaagccctggaaaccctacagctg

SEQ ID NO: 462447 - DNA, 100 bp, Homo sapiens
attagagtgaatgtagttgcaccaggtgagcctgaatttaaatacattgggaatatgcatgggaatgaggctgttggacgagaactgctcattttcttgg

SEQ ID NO: 462448 - DNA, 83 bp, Homo sapiens
ttcattgctctgtgtgccaccgatatggctcgtggacagcagaaaattcagtctcagcagaaaaatgccaaaaagcaagctgg

SEQ ID NO: 462449 - DNA, 74 bp, Homo sapiens
cattgaatatattagaaccattctgccttgcaggagcgagaacccgagcagcgccatgagcaacactaccgtcg

SEQ ID NO: 462450 - DNA, 104 bp, Homo sapiens
ggacttcatgaggcgcattgagtgctatgagaactcctacgagtcgctagatgaggacctggatagcgtgcctgccagtgtagagccggtggagcagctgggct

SEQ ID NO: 462451 - DNA, 90 bp, Homo sapiens
cagctcaggccagttcgtcggctgccagcaacaatcaccaggttcacagcaaacaggattcctaaatgcccttaaggacagtcctgcaag

SEQ ID NO: 462452 - DNA, 148 bp, Homo sapiens
cgagggcaaggactctgcgtgcattctccactgccgtctactcggccactccggtcccgacacctagcctgcgtaaagtgttgagagaggagaaccagtgcattgctcctgtggtttccagccgcgtgagtccagggacaagaccaac

SEQ ID NO: 462453 - DNA, 100 bp, Homo sapiens
agaagagcgagcgagggcgagctatggaccctgtgagtcagctggggcacccagggtgacttctccacaacccatgcactgccagctgtgaaggtgaagc

SEQ ID NO: 462454 - DNA, 90 bp, Homo sapiens
gagaaggcaaggccggtgtgtttatctgcaagaattaaacaaccaccatgtcgagcaaaaaggcaaagaccaagaccaccaagaagcgcc

SEQ ID NO: 462455 - DNA, 75 bp, Homo sapiens
ctttgggatcagtggttttgatttacaacctgtcaggttttaaaatcaaagatgggaaaatcggagaaaattgcc

SEQ ID NO: 462456 - DNA, 83 bp, Homo sapiens
cacgcacgggatccagagcgccgcgcacttcgtcatgttcttcgcgccctggcccactgctcagtggagcgtggaggacgagg

SEQ ID NO: 462457 - DNA, 83 bp, Homo sapiens
agatttttgctgagaagtagttactgtgcacatgtgtagatttgcaggttgtggcagcactgcctgaaggtatgagaccagat

SEQ ID NO: 462458 - DNA, 114 bp, Homo sapiens
ccggtatggccagaacggcgacttcacgcgcgctctcaagaccgtcaataagagatcttgaagcagcctatcacattacagatatccatgaagctttggcattatctgaagtgg

SEQ ID NO: 462459 - DNA, 74 bp, Homo sapiens
ttatcttccttcggcttaatgttcttcgtgagcatgcttatgagcccactcctgatgatgtggccatatcctac

SEQ ID NO: 462460 - DNA, 100 bp, Homo sapiens
atcaggacagctgttccttggccatcccaaagctattctgggggcaacagaggagagtggaattcgtgacctgataccaggttctgtcattgatgccaca

SEQ ID NO: 462461 - DNA, 100 bp, Homo sapiens
tgatgatggagctcagccctccacctccacagtatggtttgaagtggtgaacatggatttttctcggcttcacatgtacagtcctccccagtgtgtgccg

SEQ ID NO: 462462 - DNA, 100 bp, Homo sapiens
gccggattacctcggtgccgatcagcggaagaccaaagaggatgagaaggacgacaagcccatccgaggtacttacaatttcatcagaaattcctaaaag

SEQ ID NO: 462463 - DNA, 75 bp, Homo sapiens
tgactcctctgaaggtaaacggggcccacgtggaatctgcatcaggaagattcttacctctgaagacaatgttag

SEQ ID NO: 462464 - DNA, 75 bp, Homo sapiens
agatgtggacttgaaagaagctgcagcggaggaaggcgagagaaatccaagaccagtgacttatcaattccatcc

SEQ ID NO: 462465 - DNA, 83 bp, Homo sapiens
agaacttcaagcagaaagtggtagcgctgctgcggaggttcaaagtgtccgacgaggtgctttgcaagatatcaccttgtcac

SEQ ID NO: 462466 - DNA, 100 bp, Homo sapiens
gctgacacttcaggtgcttgattttgtgcaggatccgtgctttgcccaaggagatggtctcattaagccatctatcacacctgtgaggcctccaacttcc

SEQ ID NO: 462467 - DNA, 80 bp, Homo sapiens
cgctcatccgcgccgggagcccttggctgcgtcgcccggcagccgcgggccatgaagcccccaggaggagaatcgagcaa

SEQ ID NO: 462468 - DNA, 100 bp, Homo sapiens
gtggtggtggtgtcttcctgtctcaacgatacctattttctagtgctgagatcctgagacaatggcctcgtttaggaacagtcatgcaccgggtgatcgg

SEQ ID NO: 462469 - DNA, 100 bp, Homo sapiens
gatcagaccaattggagagaagttgccaacatctggaggctgttctgctttggagttaaaggtagatataatctgtggtgatcacctgttggagcagtat

SEQ ID NO: 462470 - DNA, 50 bp, Homo sapiens
aacaagccctccaggaactcacgctggttgtggtgactcatgcccataat

SEQ ID NO: 462471 - DNA, 90 bp, Homo sapiens
agcgtcgggattaggtgaaagtgtttgagaagtcccccctgcgggtgaagaacttcgggatctggctgcgctatgactcccggagcggca

SEQ ID NO: 462472 - DNA, 101 bp, Homo sapiens
gaacatggcggcggccaccgggtttggtgcacctcgatttggaggaagtagggcagggcccttatctggaaagaagtttggaaaccctggggagaaattag

SEQ ID NO: 462473 - DNA, 80 bp, Homo sapiens
gtgacccacggccgcctccggagcccgacgcgaaaagaggcacagttagatgaagaaggacagtttcttgtcagaataat

SEQ ID NO: 462474 - DNA, 100 bp, Homo sapiens
gactcttccctggacactgtgttgagttaattaaccaaaaagttccccagtcagtgaccaactcagtgccaaaaccagttaccttatcccatatcacaca

SEQ ID NO: 462475 - DNA, 75 bp, Homo sapiens
atctgtaaacctgataacactgcatgaaatgttagagtgatgcggctgactaagcctactttattcaccaatatc

SEQ ID NO: 462476 - DNA, 75 bp, Homo sapiens
gaactcctagctcatttcgacagccttaatgctcagatgcatcagttccttaatatacacgtgaaatttgaaaac

SEQ ID NO: 462477 - DNA, 96 bp, Homo sapiens
ggttttttcctagaaacaggacttcagagagcccatgtcctctatttcaaaaatgggctgagggtaaaaagctgggattggtaggctgggtccaga

SEQ ID NO: 462478 - DNA, 99 bp, Homo sapiens
gtcaagtccaagatcggctccactgagaacctgaagcaccagccgggaggcgggaagaggttggaaagaaccatgactgtattcaggaaggcacatgaa

SEQ ID NO: 462479 - DNA, 100 bp, Homo sapiens
gttggacccaatggggcgggaaagacggaactcaatgttcgaaaagttacactgtctacagataaaaacaagtatggcattcggctaagggcagaaccag

SEQ ID NO: 462480 - DNA, 113 bp, Homo sapiens
accagctgaagagcgacaagccgctggcagccgcggatctcaccgccgctcagggctgctctttggcgtaaattgcaatcgattagggatcgtttctcagaatcaagttagaa

SEQ ID NO: 462481 - DNA, 75 bp, Homo sapiens
ggaggcgttgggaagtctgctctgctctgggtgaaccaggaggatgaggtggaggaggggcccagcgatgtgcag

SEQ ID NO: 462482 - DNA, 74 bp, Homo sapiens
aggagcaggatggtaaagagtggatggaggccattcaccaagccagggaggtgcagtatattgtcctacaaaat

SEQ ID NO: 462483 - DNA, 101 bp, Homo sapiens
cacggactttgacttgagtctggacaacagccctctgctgcaatccatccaccagctggatttcgtgcaagtgaaagcttggattggatatagaagagtta

SEQ ID NO: 462484 - DNA, 82 bp, Homo sapiens
tggagcggcggcgggcaggcgtgcggaggacactcctgcgaccagattttgcaagaacgaggctcaaggatgtgagggacac

SEQ ID NO: 462485 - DNA, 106 bp, Homo sapiens
aggctccggaggcggcgggacagagcgcctgcgaccccagtcggtgctccggggaggtcacctgacgaggagacccaacatgagtgaagtttcctgcaagaaacgg

SEQ ID NO: 462486 - DNA, 101 bp, Homo sapiens
cacagcccgagaaaccgcagcactacacgtttttcgttggaatatacgttgcacatttatggcgattctgagtgtgagggcagacttctgccaggctcagc

SEQ ID NO: 462487 - DNA, 101 bp, Homo sapiens
cagctatttaccaccctggtcacagtgggacacagcaggccaggaaagatttcgaacaatcacctccagttattacagaggagcccatggcatcatagttg

SEQ ID NO: 462488 - DNA, 75 bp, Homo sapiens
ccatcggtgacctcaccgcctcggttcgccctcagccgccccgccaagaaggatcaagaaggtggagaagaaaag

SEQ ID NO: 462489 - DNA, 82 bp, Homo sapiens
gatgaatataatccattctcggattctagaacagtttactcctggcttgggggcattaggaagcactggaggctcttcggga

SEQ ID NO: 462490 - DNA, 97 bp, Homo sapiens
aaagcgcagaccacagttacatgtatggagaatggctggtctcctactcccagatgcatccgtgtcaatcctgataacttaagtgactctctctttt

SEQ ID NO: 462491 - DNA, 129 bp, Homo sapiens
gatcgatattttgtcgaagaaactgtggaagtcattaggaacaatggtgcaaggattcttacagaagcagagattgatgctcaccttgttgctctagcagagagagactaaacattgtcgttagtttac

SEQ ID NO: 462492 - DNA, 90 bp, Homo sapiens
ctggctgactgcaacctgttgccaaagttacacatagtacaggaatttgctgacacaatatcttccgcctggtgctgggcatatcctaag

SEQ ID NO: 462493 - DNA, 101 bp, Homo sapiens
ccgcggcgagaagccccagctgcactacgcgatttgtcccatcagatgaaaagaagaaacaaggttgtcaacgagaaaatgaaactctaatacaaagaaga

SEQ ID NO: 462494 - DNA, 100 bp, Homo sapiens
ttggaagctctgcaaagacctacgctccttcatctaatccatggaaagagaggtgagagacttcagaggctgccctttcttttcatctgctgcttgtgaa

SEQ ID NO: 462495 - DNA, 50 bp, Homo sapiens
tgcagaacccccagaccatcatgccgatacaaagcaggggaaaaggagcc

SEQ ID NO: 462496 - DNA, 100 bp, Homo sapiens
aagactaccacaggctcctcaccaagtacgctgaggccgagaacaccattgaccagctacgcctcggggccaagagggccaagatcagtcagggaaccaa

SEQ ID NO: 462497 - DNA, 75 bp, Homo sapiens
agtcctccagggtatacttcgtggcctgcaccatcgtgttacctgtttcacatgtacgtgggtgtccgggctggc

SEQ ID NO: 462498 - DNA, 119 bp, Homo sapiens
cagtcttcccgcgtccgccgattcctcctccttggtcgccgcgtccttggctggcgtgtgagaagccctaccactgcaactgggacggctgcggctggaagtttgcgcgctcagacgag

SEQ ID NO: 462499 - DNA, 83 bp, Homo sapiens
gaggaaacacctgaaggtgaagaacatcatccagtggcagacactgaaaataagactttgtgttttatgccccacgtctgaga

SEQ ID NO: 462500 - DNA, 98 bp, Homo sapiens
gagatgatcctggcggattttcagatgcctgtgaggagccaccaacatttgaagctatggagctcattggtaaaccaaaaccctactatgagattggt

SEQ ID NO: 462501 - DNA, 80 bp, Homo sapiens
gacctgtgcttctgactatcttctcttcaccagctcttcagatcaatatgggaccatggctaaacctcctggatcattag

SEQ ID NO: 462502 - DNA, 75 bp, Homo sapiens
ggttgcacaataaaccgacgtttagccaggctgacaagacctacatgttacgagaatatacgtcacgagaaagca

SEQ ID NO: 462503 - DNA, 51 bp, Homo sapiens
attaatccagaagatagtactttccctggttcgttccaccagtcataaacc

SEQ ID NO: 462504 - DNA, 74 bp, Homo sapiens
gttcggggaaatggctgcgagaccctagaggcctgcgtaattcgccaaaatgacgaacacaaagggaaagagga

SEQ ID NO: 462505 - DNA, 75 bp, Homo sapiens
ggacttcctgtgggacaagcgcacgggcctcgccgccagaacggtgacagagttagtccttgataattgcctgtg

SEQ ID NO: 462506 - DNA, 75 bp, Homo sapiens
ggatgacagctggagaatggagtcagagtcgacttcaatgttcctatgaagaacaaccagataacaaacaaccag

SEQ ID NO: 462507 - DNA, 101 bp, Homo sapiens
cagctggctgaggggtgtagactggcacagcaccttgtccaaaagctcagcccagttgttgaagtccgaagaggattcctcatataaacctgtgaagaaag

SEQ ID NO: 462508 - DNA, 100 bp, Homo sapiens
aaaagggtcagaaagtctgttgaccgatcacttcttttcttggataactgtctgcggctgcaggaagagtcagaggatctggagtgggagagcaggatgg

SEQ ID NO: 462509 - DNA, 75 bp, Homo sapiens
cacgcttcaagaggtctacattgagctgtttgatgttctttgaagatcatattgatgatgccaaatattgtggtc

SEQ ID NO: 462510 - DNA, 98 bp, Homo sapiens
tactcgcccgccaccctgcgctgccgccgctctgaggagttaaaggaattttactggcctgtggttggatctgaaagttaatgatgaaggagctattg

SEQ ID NO: 462511 - DNA, 88 bp, Homo sapiens
cgcagcgtcaatgacttacgccaagaagacacagaagttgggcctcattgggcctccaccacctccactgtcatcagatgaatgggag

SEQ ID NO: 462512 - DNA, 83 bp, Homo sapiens
ggaagatacagagtgctttcaaaagtgcctaaatgtctacagtgaatatagagccagtcttgcttttgaccttgttagcagcc

SEQ ID NO: 462513 - DNA, 140 bp, Homo sapiens
cttgagtgctttggacgatcttcagctggccaacagcaccatcattgcatttacctcggatcatggtgttacagaacatcctggacactgaaaaagaatatgctaaagaacttcagtctcttcttgttacttacttaaga

SEQ ID NO: 462514 - DNA, 90 bp, Homo sapiens
gtggatgatgtgcttggtggagcagctgcctgggagaatgttgactctactgcagccaaaatgaagtttaatccctttgtgacttccgac

SEQ ID NO: 462515 - DNA, 101 bp, Homo sapiens
taccagtctcctgtccgagtctacaagtacccgtttgagctggtcatggcggatgacaaggagtatgtgggctttgcaaccctccccaaccaagtccaccg

SEQ ID NO: 462516 - DNA, 74 bp, Homo sapiens
ctaaaaagcagagcatttctgcatgaagaggaaccacctcagaatatgaaaccacaatcaggaaacgataagcc

SEQ ID NO: 462517 - DNA, 96 bp, Homo sapiens
atggtggtgtcccacctttttgggaaggtgactgcccaggatgtgcggaaggaaagccccctgctctttaagttccgtgccaagttctaccctgag

SEQ ID NO: 462518 - DNA, 100 bp, Homo sapiens
gagacatgaaaaagatgagcaggaatgttttgctacaaatggaggaggaggaggacgacgacgatggggatatcgcggaaagaacacccggaaatgaaag

SEQ ID NO: 462519 - DNA, 95 bp, Homo sapiens
caaggtgcactccttgcagcattctggagagaagccctttagatgcgaggaaattatattgagaaatccagatgtgcagttgtgcaagagcaagc

SEQ ID NO: 462520 - DNA, 83 bp, Homo sapiens
cctggttctggaatcctcagttcaagacgcaaacatgcagatctttgtgaagaccctcactggcaaaaccatcacccttgagg

SEQ ID NO: 462521 - DNA, 100 bp, Homo sapiens
gagcccgaggtccccgcgcggcccgggcctggcgccctgaggggaagagcggcccggcccgaggctgcccaagcgccagaggtgacctatgaggcagaag

SEQ ID NO: 462522 - DNA, 83 bp, Homo sapiens
cttcgagtgacccgggtgccgaggagcgggaagagttgctggggcagaagctcctcctggggtagagacagatcttattgatg

SEQ ID NO: 462523 - DNA, 83 bp, Homo sapiens
cctgccttgggatccggagggaggaagctgggacacccgggagtcaggaaatgcagtcttatagctggatcagctaccaagag

SEQ ID NO: 462524 - DNA, 100 bp, Homo sapiens
ctcagccctggatggtgaatttcagtcagcctcagaggttgacttctacattgataagtgcagctgctcctggaccatggtgctgatcctaaccagcgag

SEQ ID NO: 462525 - DNA, 100 bp, Homo sapiens
cgcagatgctggagaagtccccttatgaccagggggacttgatctcatcttcatgccaggccttgggtttgacaaacatggcaaccgactggggaggggc

SEQ ID NO: 462526 - DNA, 75 bp, Homo sapiens
tgaaaagacatctaatttcattgctcggcaggcatgcatatcattctgtttcaactccccctgtttaccctccta

SEQ ID NO: 462527 - DNA, 74 bp, Homo sapiens
aaacccacttcgttcaagacaggtgtttaagcatcacattccagttcatagcaacattttctactctggtgcct

SEQ ID NO: 462528 - DNA, 76 bp, Homo sapiens
cgtagacaccagctccgaaatcaccaccaagttcccagtgacctgacagcagaggagcgtcaagaactggagaaca

SEQ ID NO: 462529 - DNA, 75 bp, Homo sapiens
tctgttaaagctggtctgttctaactgagaatgctgagatgtataaactgtcttcagagcaattccatgaggcag

SEQ ID NO: 462530 - DNA, 100 bp, Homo sapiens
acagagtgctgttttagagctggcagcagcatctcagcccaagagaagcttcccatcgacggtcagtgcgcacgttgtaatcagctgaggccatgtcagg

SEQ ID NO: 462531 - DNA, 102 bp, Homo sapiens
caacactggtgataacacaacatttcctgatgctgaagataaaggattccagacagcattggaaaagacatagaaaaggcttgccaatctatttatcctctc

SEQ ID NO: 462532 - DNA, 100 bp, Homo sapiens
tcccgctggcggcgggcatcttcttcgtgaggctgctcttcgagcgactctcagcgttctcatctctcttccttcaccatgaagctgatggacaaattcc

SEQ ID NO: 462533 - DNA, 103 bp, Homo sapiens
ccgggcctgcaccatgagcgtcccggccttcatcgacatcagtgaagaagatcaggagcaggaactcaaagcagccgctgatggcgtactatctgaagtgagg

SEQ ID NO: 462534 - DNA, 100 bp, Homo sapiens
ctggaaaggtcatctcggagactagaggctggataccaaatagcagtggaaaccggtgctggagaatctggtaaaagcaccattgtgaagcagatgagga

SEQ ID NO: 462535 - DNA, 90 bp, Homo sapiens
tcaagagtcataggattagatgatccaagtcaccaagaaattactgtctcaagtgatacggaaaaatccaagctggagagtgagctagcc

SEQ ID NO: 462536 - DNA, 82 bp, Homo sapiens
atcaggttcacgccaacagtacctcattgctctttggcgactcttattggaggggcaacccccttcatttatctcgtgagcg

SEQ ID NO: 462537 - DNA, 100 bp, Homo sapiens
ctggagtaaaagggacattgggaagattagttggaatttttgagtcacacgaactcatcagcaaagcattcagaggcctctgtcttgactgtggctgacc

SEQ ID NO: 462538 - DNA, 83 bp, Homo sapiens
gaggtgggcatcaccttctgggtcattcacagggtggcatgtgctggagaatctggtaaaagcaccattgtgaagcagatgag

SEQ ID NO: 462539 - DNA, 73 bp, Homo sapiens
tcagcccgtcagcaagtggcaagcctatggactcaaaggctatcctgttggaaatctacatttctgaaggaac

SEQ ID NO: 462540 - DNA, 74 bp, Homo sapiens
gtccgccgccaccacccactccggacacaggggttcggtccgagcccggtgggaggctcccggagcgcagcctg

SEQ ID NO: 462541 - DNA, 100 bp, Homo sapiens
ctctgccgtgccacctgctgcacccacgaatctgcccacccctcctgtaacccagcctgtttcacttcttgcagttggaattgatcacaccttttcagtt

SEQ ID NO: 462542 - DNA, 78 bp, Homo sapiens
agcgttcacagtccgccgctcccacccttctcacgtctgacggactctgctgacagacttcattagaggggtggtaga

SEQ ID NO: 462543 - DNA, 113 bp, Homo sapiens
cccgcctctgcgtctttgctcccggagcgcttgaaggagctgcgggtatcatgatattagctggtttgacatcaagtcatttgtgagtcatcagatcttctcctgaaaatggg

SEQ ID NO: 462544 - DNA, 100 bp, Homo sapiens
agctggcggacatcactttagaccctccacctaattgcaggtctgaatttcctgctgctgttcacaaagatgctttttatctttaactttttgttttccc

SEQ ID NO: 462545 - DNA, 83 bp, Homo sapiens
cgctccgtggccttagctgtgctcgcgctactctctctttctggcctggaggctatccagcaaaaggagaacaacttcccgcc

SEQ ID NO: 462546 - DNA, 88 bp, Homo sapiens
cactgcagggagcaataaggagagaacccaccagctcaccattgtactcttacacaacaggccatgtcaaaggacgccctgaatctgg

SEQ ID NO: 462547 - DNA, 82 bp, Homo sapiens
ccttttgccacctttccctttatttccggagttactatgcgagtcagaagaaaacatttgaaattaatcccagacacccgct

SEQ ID NO: 462548 - DNA, 100 bp, Homo sapiens
gagaccacagccaccactattctagcatccgtgaaggagcagaaatatcgacagtatatggcaggacttctggctcctccttatggtgttatggaaacgg

SEQ ID NO: 462549 - DNA, 117 bp, Homo sapiens
ggtctggagacgccgtggcagcctgaacggagtgtgcgacggattgggagtactatactggcaattgctggagaagattttgcaattgttgcttctgatactcgattgagtgaaggg

SEQ ID NO: 462550 - DNA, 149 bp, Homo sapiens
ctgaccttaaagatgctgaagctgttcagaagttcttccttgaagaaatacagcttggtgaagagttactagctcaaggcgcggatcaagaagatcatgcagacggacgaagagattgggaaggtggcggcggcggtgcctgtcatcat

SEQ ID NO: 462551 - DNA, 98 bp, Homo sapiens
ggctctccagcaagaaggtggcaagggtaaagcccacagcttgaagccaagcataaaggagaagctggcaggcagccccattcgtacttctgaagatg

SEQ ID NO: 462552 - DNA, 88 bp, Homo sapiens
caagataagaccgggatggtggactttgctctggaatctggtgaaaaagatgctatggacgtatggtgcaatggtaaaaaattggaga

SEQ ID NO: 462553 - DNA, 90 bp, Homo sapiens
aaggcctaagaattttggcattgagtccagcaagctaaaagtacagaaggtggagccctggaacagcgtgcgtgtgacattcaacatccc

SEQ ID NO: 462554 - DNA, 98 bp, Homo sapiens
gtctcgctcgggagcggaaacagcggcagccagagccgccgccatgtctgcgcatctgcaatggatggtcgtgcggaactgctccagtttcctgatca

SEQ ID NO: 462555 - DNA, 97 bp, Homo sapiens
gaagaagatccttcacgcaggctttaagatgatgagcaaaacaatgcagatcttcgtgaagactctgactggtaagaccatcaccctcgaggttgag

SEQ ID NO: 462556 - DNA, 98 bp, Homo sapiens
gacctccctgttgtctgaactggtgtggtgtctatctgaagaatattttactttcaaaggaaagatgctgtctccaaatgataaaatgttaggaaaac

SEQ ID NO: 462557 - DNA, 51 bp, Homo sapiens
ggccgacatcgcggccttcttccgatccgctgatcttgcatctttaatgga

SEQ ID NO: 462558 - DNA, 50 bp, Homo sapiens
ggctgaggatgatggtagattgccagtcaacgttggtgaggactgtccag

SEQ ID NO: 462559 - DNA, 110 bp, Homo sapiens
gagggaatgcaggaaagctaagaagaatcacacctcattgcagataacaacgaacttgatgcaagtgataggtttgccaaggtcagacctctcatcatccggatgaactg

SEQ ID NO: 462560 - DNA, 96 bp, Homo sapiens
gtagagcttctgcaaaggcagtgggaagaactatgccaccagtaacaaaggcatggagcatctgtacagcatgaagtgcaagaacgtggtgcccct

SEQ ID NO: 462561 - DNA, 98 bp, Homo sapiens
tgctcttctggcaggaccttgaccagccgagggccatcgccttggaccccgctcacggaattcagaaggagctggcggacatcactttagaccctcca

SEQ ID NO: 462562 - DNA, 82 bp, Homo sapiens
gaggttgtttgcaacgaccgtctggggaagaaggtccgcgttaaatatgctgcacttaaaaggatgcttgttttgatgtcct

SEQ ID NO: 462563 - DNA, 100 bp, Homo sapiens
gattaggcatgtcagctgatccagataatgaggatgcaacagccaggtgactttatacacactttgggagatgcacatatttacctgaatcacatcgagc

SEQ ID NO: 462564 - DNA, 90 bp, Homo sapiens
gtggcgtattccacatagcaaacagagtgaagatagtccaagtcctaagagacagcgcctctctcattcagtctttgattatacatcagc

SEQ ID NO: 462565 - DNA, 101 bp, Homo sapiens
gatggcgggggcggcgggactcacggcagaagtgagctggaaggtcttggagcgaagagctcggaccaagcgctcaggacgcacagacattcgggtgcttc

SEQ ID NO: 462566 - DNA, 144 bp, Homo sapiens
ggcccccctctggccagcctgcaagatagccatttcctcaccgacgccgacatggtcatgagcttcgtcaacctcggtgctggagaatctggtaaaagcaccattgtgaagcagatgaggatcctgcatgttaatgggtttaat

SEQ ID NO: 462567 - DNA, 100 bp, Homo sapiens
aaagaccatcttatgccccacctcccaccccagctcctgcaacagagcttactccacgggaacagcctctagataatctgagttgttgaaaatacgaagc

SEQ ID NO: 462568 - DNA, 89 bp, Homo sapiens
ggcctcgtgccgttacggccatcacggcggccgcagtggcgtcctggagccctcctcagccgccgccatgtctgcgcatctgcaatgga

SEQ ID NO: 462569 - DNA, 51 bp, Homo sapiens
gcgagggggccattgcggtgaggagatcaaaagcagcatggatctgcctgt

SEQ ID NO: 462570 - DNA, 100 bp, Homo sapiens
gccgcagagcgccgaggaggctttcctgctggtggcaaccgcctacgagacactcaaggtaacacaagtggcaagacagccgggaacccctaccccatcc

SEQ ID NO: 462571 - DNA, 98 bp, Homo sapiens
tggcggcgctggagagggggcgctgagctgttgggttaacaagcacaagccctggctggagcccacctaccacggcatagtcacagagaacgacaaca

SEQ ID NO: 462572 - DNA, 83 bp, Homo sapiens
gggtgagaagcccttcgcctgcacctggccaggctgcggctggaggcggtctatgcttgcttggtgcttatgctgacagtgat

SEQ ID NO: 462573 - DNA, 95 bp, Homo sapiens
ggagaccatggagaccctcacggagctgggcgacgagctgaccctgggagacatcgacggcgggtgccacgtctatgtgggcttcgtgctgtggg

SEQ ID NO: 462574 - DNA, 76 bp, Homo sapiens
aatttcatggaggatagaagacaacgaaagttacttgggcttcctgaggtgatctgtgaaaatggttcgctattca

SEQ ID NO: 462575 - DNA, 100 bp, Homo sapiens
aaaaacgtcaacaacagttttacgagtccagagcctaaggaccagactttgaaaatgattaaaattttaagtggtgaaatggctattgagttacatctgc

SEQ ID NO: 462576 - DNA, 100 bp, Homo sapiens
atcccactgatgaggatcagcccatgtcactctgagaggagtgataccaatgaaaaaaggtcagttgattccagtgctaaaagggaaaaacctgtggtcc

SEQ ID NO: 462577 - DNA, 100 bp, Homo sapiens
cgcagagtcggcacctgaaggacatggagctccagaaacatgacaaggaggactttcctgcctcttggagatcagaggaggaaatggcagcagaagccgc

SEQ ID NO: 462578 - DNA, 100 bp, Homo sapiens
gtatccgcggccgtagcagccgggctggtcctgctgcgagccggcggcccggagtggggcggcgggtatcatgatattagctggtttgacatcaagtcat

SEQ ID NO: 462579 - DNA, 75 bp, Homo sapiens
aagggcagtgccattgatagggctctctttaaactgtggggctccccagacaagtatcccaaagacatcctgaca

SEQ ID NO: 462580 - DNA, 74 bp, Homo sapiens
gttctgggacttaggagggcaggaagagctgcagtctttgtgggacaaggcagctgtgcctcctgctgaatgcg

SEQ ID NO: 462581 - DNA, 74 bp, Homo sapiens
ctgtgtcccaaccggcctgagtcaagatgaagatgggtttcaagaactaaatgagaatggaaatgctaaggatg

SEQ ID NO: 462582 - DNA, 95 bp, Homo sapiens
aacgaccaaccagcctccccctgaagattctgccgctgattgctatcacttctgcagaatccagtggaccaagatcactccatggatgaaatgac

SEQ ID NO: 462583 - DNA, 80 bp, Homo sapiens
caccagcaaccatgagtggttccatgatgggaagtgacatgggtaagcttgatgattaccaggaacgaatgaacaaaggg

SEQ ID NO: 462584 - DNA, 90 bp, Homo sapiens
gatctgagtaggatgctgcaaatgtttagagggtccgcaagcaggtggtgaacatcccgtccttcattgtccgcctggattcccagaagc

SEQ ID NO: 462585 - DNA, 74 bp, Homo sapiens
gcagtggtcgcttcttctccttggttctggaggacacgtgccggcggcaggacttcaacccctgtgaatatgat

SEQ ID NO: 462586 - DNA, 50 bp, Homo sapiens
aacaaaatattcatggttcttgagctttctgaaacaaaggtcttcactgc

SEQ ID NO: 462587 - DNA, 71 bp, Homo sapiens
ggcacgctgactggaggctggcggacaggcgacagcgacctgcggcagagtatcctgagctccagctggac

SEQ ID NO: 462588 - DNA, 114 bp, Homo sapiens
atcatgtgacgacacccctgatggggcaggaggggcctttgcagctcagtgccgtattcacctggaccaacctgctggtggtggtggtggagctggatgggctagagcaggatg

SEQ ID NO: 462589 - DNA, 100 bp, Homo sapiens
cgcctgggccctggcatggccgacataatgacagcatattaaagtgagtgaccctgcgacccactctttggaccagcagcggatgaataaagcttcctgt

SEQ ID NO: 462590 - DNA, 100 bp, Homo sapiens
gatctcatcctgtcctgctgcctccactactgcaaagacaaggctaaggacttcatgcccgccagcaaagattggcggcagtaagcacacaatgaatgat

SEQ ID NO: 462591 - DNA, 87 bp, Homo sapiens
aagcaagagatggctagtgcttcatccagccaaagaggtggacgacatccttggagaaggcagcgacgacagcgacagcgagaagag

SEQ ID NO: 462592 - DNA, 90 bp, Homo sapiens
ggtcggatttcaccacaagaagggctgccagctcctgttggaacaccaggatgcaattgcccctgagaaaaatgacttactgagtgaatt

SEQ ID NO: 462593 - DNA, 100 bp, Homo sapiens
ggcgcagcagggaaaggcaaaggcaaaggcggctcgggagattcagccgtgaagcaagtgcagatagatggccttaacaaaatccagtctcatagcagag

SEQ ID NO: 462594 - DNA, 90 bp, Homo sapiens
ggaggtaccatctagccctctgcggaaagccaagcgagctcgcctctgctcctccagcagttcgggtcccagtgatctgtatttgatgag

SEQ ID NO: 462595 - DNA, 90 bp, Homo sapiens
gccaggtccctgctgaatcacacgccgccatccgggaggcccagggaagatgatcatgacgcagtcctgaggtttaatggggcacccaca

SEQ ID NO: 462596 - DNA, 100 bp, Homo sapiens
ttacttgggaaatcatctttacggaatgtggtgctgagagactacatttataattggagatcctgaacaccaaagtcttgttgcagtaggagaaagagca

SEQ ID NO: 462597 - DNA, 99 bp, Homo sapiens
cgagaagcagatggaagtgacagtttggagggagctgggtatgcaggattcctatgggacgcggctgccggcatggagctgagagacgcgggttcacag

SEQ ID NO: 462598 - DNA, 83 bp, Homo sapiens
gatgcggcccagtttgccgccggcatggccagtgccctagaggcgttggaaggcccggaggctgtttgatgtcctgcacgagc

SEQ ID NO: 462599 - DNA, 101 bp, Homo sapiens
gatttgatggccttcacaatccaagttccacaatatattgactactgccacaattccggctatttttatgattcccacaaatccaccaccaacattcagaa

SEQ ID NO: 462600 - DNA, 83 bp, Homo sapiens
gctccagctcagactccagctcagactcagacttcgagccatcccagaaccacagccaagttctggaggctgggaagtccaag

SEQ ID NO: 462601 - DNA, 100 bp, Homo sapiens
ccagcctgcacgcgctggctccgggtgacagccgcgcgcctcggccagggccatgctgcaccttacaaaacggtctccgtccgcgcggccatcccgtcca

SEQ ID NO: 462602 - DNA, 98 bp, Homo sapiens
catccatgcctacgtgggcttcaccatggacaagctggtgcagaacattgcgcggcagaaaaagggcgtgaagcggaaagcagacacaaccactccca

SEQ ID NO: 462603 - DNA, 75 bp, Homo sapiens
cagtccccaagattgtggcatttgaaactgtccattcaatggatggctgcaataggatctgtggctttggacaca

SEQ ID NO: 462604 - DNA, 49 bp, Homo sapiens
aaccgcctcgaaaacggagaagcaggaagctctatgcagaactgtgcca

SEQ ID NO: 462605 - DNA, 100 bp, Homo sapiens
catgtttctgccttttccaatgtggcatggctgcccactcttatacccagttattgtctgggtcccgtttccctctgtgcggcggccggcgggaccataa

SEQ ID NO: 462606 - DNA, 74 bp, Homo sapiens
aggagaacgaacatcttctggacctttgtccaggatcaaaatacttgctggatggtggactcagagaccaataa

SEQ ID NO: 462607 - DNA, 74 bp, Homo sapiens
cgggaagatggcggctgggttcaaactgatgggaagaagagttactataagaaggtgtgcattgatgcggaaac

SEQ ID NO: 462608 - DNA, 97 bp, Homo sapiens
tgttaaggaactcgatttatatttggcatactttgtgcatgcagcaggcagcttcatcagccttgagcagtctgggccacgtgtacacagccattgg

SEQ ID NO: 462609 - DNA, 80 bp, Homo sapiens
caattccgatggcaaagccgttgccaaggtggcacaagaatggctcaactctccaaatagagagaatttctatcagttgc

SEQ ID NO: 462610 - DNA, 99 bp, Homo sapiens
cgggaaaccaggcatctctgggtgggcaacttacccgagaacgtgcgggaagagaagatcatcgagcatttcaaacggctagcttgtcactttctgcaa

SEQ ID NO: 462611 - DNA, 100 bp, Homo sapiens
agccttcccaagcttccaggtgtcccagaaacccaggaaatcgagactcatgactcccagagaggatggcatctagaagaactgaagagagatctggcca

SEQ ID NO: 462612 - DNA, 83 bp, Homo sapiens
ccgattcctcctccttggtcgccgcgtccttggctggcgtgctggacggcagtctggaaacgaccaatgagatcttggactct

SEQ ID NO: 462613 - DNA, 98 bp, Homo sapiens
ccaggaccggccgaacgcagaggagttgtgaacagatgtgtgtacagcacaaccaaggcagccgtgattggcctcacaaaatctgtggctgcagattt

SEQ ID NO: 462614 - DNA, 74 bp, Homo sapiens
attaagaaacatcgagtcactttgcctggacaggaggaacccttctagagcatgtttggaaaggattcaagaat

SEQ ID NO: 462615 - DNA, 87 bp, Homo sapiens
gcgagatccgggccgtgaacgaaagcagtgacggaggagcttgtaccaccgttgaggaaacgtgtgaagcttgaagggaaagaactt

SEQ ID NO: 462616 - DNA, 83 bp, Homo sapiens
ccagagcgccgcgcacttcgtcatgttcttcgcgccctgggaagcctctgcacatcaaaccacgtctgtgaggaccccaggga

SEQ ID NO: 462617 - DNA, 51 bp, Homo sapiens
gatctgtgtgaaagctttgaaaaccagccattcgatgaggactatctaaac

SEQ ID NO: 462618 - DNA, 83 bp, Homo sapiens
tgcaaaaaaggaggccaaagactttaatccaaaggactgcatgacacaccataggatatagtcaagaagcctttggacatggg

SEQ ID NO: 462619 - DNA, 100 bp, Homo sapiens
ccaggagaaattcgccctcaaagtactggctgtgatcgaacttctcaaccctcagagacttagatcttccacctcactccctcagccaagcctccaggcc

SEQ ID NO: 462620 - DNA, 90 bp, Homo sapiens
ctgacgggtaccttctacatgtgcaaagcaggaaagaccacagcaagattctttcattcgtctcctcctagcctgggggaccaggctcga

SEQ ID NO: 462621 - DNA, 75 bp, Homo sapiens
ccctgctgatcttgtaatagatcattccatccaggttgatttcaacagaagtctgcgctcctcagaccaccggca

SEQ ID NO: 462622 - DNA, 101 bp, Homo sapiens
taaaagcgaactacagtggatgggtgcagttcagggtactccaaagattcaggtttactcacgtcatccagcagagaatggaaagtcaaatttcctgaatt

SEQ ID NO: 462623 - DNA, 74 bp, Homo sapiens
gaagatcatgacattgtagtacagtatccaagtggcaatagtgggagccaagaagaaaggtttgctcccgggtg

SEQ ID NO: 462624 - DNA, 100 bp, Homo sapiens
cgagtgaggaaaggaggtactgtagccgggtaacagatcttgtaaaccaacaacaaaccctggaggagaagatgcgggaagaccgggatagcctggtgga

SEQ ID NO: 462625 - DNA, 51 bp, Homo sapiens
tccagatgttcctgtggaccccagtccagaaatgggacgtcggtcatcaga

SEQ ID NO: 462626 - DNA, 101 bp, Homo sapiens
gactgcaggcgatcataaagaaaatcgacttggactcagatggctttctcactgaaagaatgagtagcgacagtgacattgaatgtgacactgagaatgag

SEQ ID NO: 462627 - DNA, 100 bp, Homo sapiens
gcgatgactacattaaattcttgcgctccatccgtccagataacatgtcggagtacagcaagcagatgcagagataaacgcttcgttaagggactcaggc

SEQ ID NO: 462628 - DNA, 88 bp, Homo sapiens
atgctggagacctgtgggcttctggtcgcactggaagcatcaagtgtacctgatttgtgaacctatcttgcttcagttggtttcctcc

SEQ ID NO: 462629 - DNA, 82 bp, Homo sapiens
gaacgaggcaaggagctaaagcagcgtgcgttcagccctggggcccgccacgatgactatcatggtggaggacatcatgaag

SEQ ID NO: 462630 - DNA, 80 bp, Homo sapiens
ccaaagagaggtgttctgaacaagttcaaggtagattttcgttccgtcacccaggctggagtgcagtggtgtgaccttgg

SEQ ID NO: 462631 - DNA, 82 bp, Homo sapiens
ttgtacattgggcaaaatgccttcagaaaatgatcaagagcagagattgaacacgaagcactgattgatggaaacctggcta

SEQ ID NO: 462632 - DNA, 100 bp, Homo sapiens
ggaagttgattactcagtctctaaaaagctaagtatgagcccagaggacctggtcggcccttgtaccaaagaagaatctcatctagctcagttcaacctt

SEQ ID NO: 462633 - DNA, 100 bp, Homo sapiens
tatatcagtaactcctgatgcaagtcctaatgtatttgaagagccagagagcaatatgaagtctatgccaccaaggtaaaacttcagtcaagaagctgac

SEQ ID NO: 462634 - DNA, 75 bp, Homo sapiens
gcatggtggtctggggcaacgcggaaggaaaatgtttataggaggccttagctgggacactacaaagaaagatct

SEQ ID NO: 462635 - DNA, 48 bp, Homo sapiens
ggctcccactgattctacattatgatttattcaggagattgagcatgc

SEQ ID NO: 462636 - DNA, 75 bp, Homo sapiens
tcagcaacaaggctgtgcctgagcccaaagaccccaccaacaactgaacgctttggtcaggctgctacaatggaa

SEQ ID NO: 462637 - DNA, 98 bp, Homo sapiens
ctgcctgttcgcagcgtggattttaaccgaggcacggacaacatcaccgtgaggcagggggacacagccatcctcagtaagctgtgctagaacaaaaa

SEQ ID NO: 462638 - DNA, 75 bp, Homo sapiens
aaatgagagatgagctacatgtccgaggtgtctatccagaagttaaaggagagattgctcgtaaagatgaaaagc

SEQ ID NO: 462639 - DNA, 98 bp, Homo sapiens
ctgtattctcctccgaaccccttcatgcccaaatcccggaaactccagcgtgtctccagccgtgtggtgctgattactatgattacggacatggactc

SEQ ID NO: 462640 - DNA, 74 bp, Homo sapiens
cctagcgcaatgaggcgggcagcactgcgatccgatcacataggacagtatgcaccttaagatcctgaagaaac

SEQ ID NO: 462641 - DNA, 75 bp, Homo sapiens
caacccgaccaccggagaattcctggggcgcaccgccaagagctgggggtaaccaggagccgacaacaactcctg

SEQ ID NO: 462642 - DNA, 75 bp, Homo sapiens
gcatggcacgctgcatggagccaaaatcgggtctgagagagccttcaacgccctgtgtcacagcacccacttgta

SEQ ID NO: 462643 - DNA, 100 bp, Homo sapiens
gccgccgccgcggtttgtcgccagaaggaagatggcggatctggaggagcagttgtctgatgaagagaagtggctgccaaatgtttggtgatgaaggcag

SEQ ID NO: 462644 - DNA, 75 bp, Homo sapiens
aacagctgaagtgtcttcaatgcctgcttgcggctgccgagtgatagagcagaaggaggttcccaatgggctcag

SEQ ID NO: 462645 - DNA, 51 bp, Homo sapiens
ggcctccccagccacgtgaaactgcactttgtgggaattttgaacaagacc

SEQ ID NO: 462646 - DNA, 124 bp, Homo sapiens
aaaactgcaagcagtagagaaataagacaagctttcaagaaattggcattgaagttacatcctgataaaaacccggttcaaagtacggagggagaagctcctcatgttccagccacttaccagc

SEQ ID NO: 462647 - DNA, 75 bp, Homo sapiens
caaaaacaattcaaggggagctgggctggatctcttatccatcacatgggaattgtctatttcacagcaatatta

SEQ ID NO: 462648 - DNA, 75 bp, Homo sapiens
gagtacggtctcacagacaacgttgaggtgagaattatgaagatgatgacctagtaaattctgatgaggttatga

SEQ ID NO: 462649 - DNA, 99 bp, Homo sapiens
ttgcaccactggatgttgtttactgggatgaagaaccaggaggccagctggttacagataagttccatattgactgggattccgtactcattgacatgg

SEQ ID NO: 462650 - DNA, 100 bp, Homo sapiens
cggcaggccaccgtccagcaacttgtggacctcctgtgccgcctggagctctaccgggctgcccagatcatcctgaacttgtatactctgaaagagcgat

SEQ ID NO: 462651 - DNA, 83 bp, Homo sapiens
caaaaagcttcagagttctctaaaaaaactggctgtgaataatatagctggtattgaagagaatcctcactatggatgggctc

SEQ ID NO: 462652 - DNA, 88 bp, Homo sapiens
gagttcctgaagaagaacctgcgagccgacaacgccttcatgctgctcacgcagaccccaccaacaactgaacgctttggtcaggctg

SEQ ID NO: 462653 - DNA, 90 bp, Homo sapiens
gtggaagaaagccaaacgaagttaaaggaagtgttccccacggctgcgctcatgccaggtgccaacatcgcctctggtgaggaagtcgcc

SEQ ID NO: 462654 - DNA, 75 bp, Homo sapiens
aagcccctcacgctcagggaggtcgaggtgctggacgtcattgctcctccttatacctctgacttcgtgcaactt

SEQ ID NO: 462655 - DNA, 50 bp, Homo sapiens
cgccgcggggcagccgccgctcctccgggtttgtatctacttgaacaaga

SEQ ID NO: 462656 - DNA, 50 bp, Homo sapiens
ctggaggagctgcacgtgtttgaggatgacaaggagtatgtgggctttgc

SEQ ID NO: 462657 - DNA, 102 bp, Homo sapiens
cccacttcagcgacgacagcaagagggacgttgtgaagaccaagccaccctggtagaacaagtaaaaagagtaaaagaaattgaagctattgaaagtgattc

SEQ ID NO: 462658 - DNA, 98 bp, Homo sapiens
cgtggcctaccaggtctacctcctacagctatggtgaactaaacggtaatgctggagaaagagaaatatctttaaagaacctgagttctgatgaagcc

SEQ ID NO: 462659 - DNA, 101 bp, Homo sapiens
cagaagaagaagaaccggaagaaactgtccgagaagcccaaagctttcaccactttcctctgtctgtacggcatgatttggtatgcagaacactatggtca

SEQ ID NO: 462660 - DNA, 75 bp, Homo sapiens
agcgtggccctgctggaggcctcgctgaggaacgacgccgaggaagttgtcacaggtagtactgatggaattgga

SEQ ID NO: 462661 - DNA, 74 bp, Homo sapiens
cagcaactcccccatcgtatgaatctactctgttacggcatggtgcaaatccagatctgagagatgaagatggg

SEQ ID NO: 462662 - DNA, 74 bp, Homo sapiens
gagattgtcgcactgaagaaggtgcggatggacaaggagaaggatgagattctagactttggctacccacagaa

SEQ ID NO: 462663 - DNA, 52 bp, Homo sapiens
ctcctgaatctggactctaaactcaaaatgatgcttcaacacccaggccagg

SEQ ID NO: 462664 - DNA, 74 bp, Homo sapiens
agcactcgtgaggtgtactgctgctagaatgtttgagggttttacagattcctgtggcaaattctaccaagcaa

SEQ ID NO: 462665 - DNA, 75 bp, Homo sapiens
tgtctcgtgtgtgaacatcacagctgctggctaccaatattctactttctgtctctatgaatgtgactaccctgg

SEQ ID NO: 462666 - DNA, 75 bp, Homo sapiens
caggatttatcaaatcgagtcactgtcaagttgatgaggtaatgctgactctgaaacaggccttcagtacggcgg

SEQ ID NO: 462667 - DNA, 101 bp, Homo sapiens
cccccgggagggagagccgagcagccccggctctgggctacggactatgggcgaatagctctgaccacccggcgaaggccctgcaggagcagccaaagatg

SEQ ID NO: 462668 - DNA, 100 bp, Homo sapiens
ccttcctgttcacggtgaccttcgcttggtgtcctcctggcctcagcaacctgacaattctgtcgtgtcccgacagggtctccctgtcacccaggctgga

SEQ ID NO: 462669 - DNA, 50 bp, Homo sapiens
aaagaacttcttcccaaaatgggttgaaatcacaaagattagacaccttt

SEQ ID NO: 462670 - DNA, 100 bp, Homo sapiens
gtacttcctgtcaacttcgcacttctccagttagttggagcccaggtattgcaggcaatgggatatccaacaggctttgatgcagatattgaatgtatga

SEQ ID NO: 462671 - DNA, 100 bp, Homo sapiens
gactgagcggagcccggtgacaggatgcagcaagatgaagagcgacgtcggcagctgagagagagagctcgtcagctaatagcagaagctcgatctggag

SEQ ID NO: 462672 - DNA, 97 bp, Homo sapiens
gtgaacagggactggctccagcctctgttgcacagggtcaaagaggtttttagaacttcagccataaaaatgggcagaattttccttgatcatatcg

SEQ ID NO: 462673 - DNA, 74 bp, Homo sapiens
tcagtgattctacatctcaagctcatattttgaagtgtttacggcttctccaggcagccaccaactaccacaac

SEQ ID NO: 462674 - DNA, 75 bp, Homo sapiens
cttcaagtagtcctgtgctcaacattgcttatcggtcatgaagaaggatatttcacagctataatgttgaagaaa

SEQ ID NO: 462675 - DNA, 75 bp, Homo sapiens
gtttttcggatcatgtctggtggctccgcggattataacaggtacaggtttgcagattccgccagcagcacagca

SEQ ID NO: 462676 - DNA, 50 bp, Homo sapiens
cctgagacggtgtcccgccgaaagatttgggaatggatgatgaaggagat

SEQ ID NO: 462677 - DNA, 71 bp, Homo sapiens
agcaccaagtcgggctggccccgacagaacgaaaagaagccctccgagaagtctgggccaacggtcacaaa

SEQ ID NO: 462678 - DNA, 75 bp, Homo sapiens
gcggcggcgacgcgtccgggccgattccaactccacagagtgaccagagagaggacgtggctgaagacaccaaag

SEQ ID NO: 462679 - DNA, 75 bp, Homo sapiens
cacctggaggatacctgctacctctgagctgttcatggagcagcagcacctcaaggaagcaggtttctgcatcca

SEQ ID NO: 462680 - DNA, 80 bp, Homo sapiens
cagccattctggcgttcctggtcaatcatgacttcacccctctggagctcatcctgtttgggctcagtaatcagctggct

SEQ ID NO: 462681 - DNA, 100 bp, Homo sapiens
ccagaaaatgcagttaatgctgaagcttcattaaggaggagcaggttgttgccctggatgcccaaaatattgtagctgtttcatgtggagaagctcatac

SEQ ID NO: 462682 - DNA, 100 bp, Homo sapiens
tttggaatgattctcttttttgacaaagcactactggctattggaaatgtgacaatctccaatagacttgtgtcttcaccttgctgcattgtgaccagca

SEQ ID NO: 462683 - DNA, 51 bp, Homo sapiens
gcctacagttttcacaaatctgaactacatattgtccataagtgcttcatc

SEQ ID NO: 462684 - DNA, 75 bp, Homo sapiens
cgacgggggaatgtggcgctggatccggcagcagctgatgaagttggagcccttgtttttgacattggatcctat

SEQ ID NO: 462685 - DNA, 95 bp, Homo sapiens
acttagcttttaaattaaaaaggaagctattcaccattgagggaaggacatggagcccaacggcccgtcgctgcccagggatgaagggcccccga

SEQ ID NO: 462686 - DNA, 100 bp, Homo sapiens
ccccacataaaaatgaaacaatgctttctcctcgagaaaagattttctattacttcagcaacagtccttcaaaggagatctattgggaaactgattataa

SEQ ID NO: 462687 - DNA, 100 bp, Homo sapiens
taattgggcagaagagaagcagtgaaggagtgcagaggcatcacctgaaagtattgcctaagtgtaatcttgaacatgggcggtgctgtgagtgctggtg

SEQ ID NO: 462688 - DNA, 83 bp, Homo sapiens
gccaagctgatccccaacgccatccagatctgcacggagagcgagaagatctgttcagcctgtgtgcgctgtaagagctgtgg

SEQ ID NO: 462689 - DNA, 87 bp, Homo sapiens
gaactacaagaatcctgaccaggattggtggaaagtggaagtgaacgatcgtcagggttttgtgccggctgcgtacgtgaagaaatt

SEQ ID NO: 462690 - DNA, 89 bp, Homo sapiens
taatattaatgaaggacaagtacaagttagaactctttatctttctgtggatccttacatgtggctttgaagcgtatgttgaatttcaa

SEQ ID NO: 462691 - DNA, 87 bp, Homo sapiens
gaaacgcagacactgaactttgggcctgaatggtacctagtagaactgggttgtatcaagccgctctgtgatctcctcacggtcatg

SEQ ID NO: 462692 - DNA, 88 bp, Homo sapiens
cctgagcccgacattattcctgagctatttgtttcctgatggacgaaatcagaatcctgatctgactggcttatgtgaaccaactccc

SEQ ID NO: 462693 - DNA, 100 bp, Homo sapiens
cagggaacagccagacgagagcttcagccatcacgaggatgatttcggaacctggagaaaatgggtcttgctcctcagaacaaaccagaattgcagaagg

SEQ ID NO: 462694 - DNA, 74 bp, Homo sapiens
gtccaaagtcacagatgctatagtctggtatcaaaagaagttgccagagtctgccctccgagacctcatcgtag

SEQ ID NO: 462695 - DNA, 75 bp, Homo sapiens
ccatgtgttgggtcagcaccatcagaacccttaggagaaatcttgagagtggacagcaattgtgaagatcgccag

SEQ ID NO: 462696 - DNA, 80 bp, Homo sapiens
cccggcaaactccccatccagctccagcctaagtctatcttcataccacaggaaatgcattctactgaggatgaaaatca

SEQ ID NO: 462697 - DNA, 76 bp, Homo sapiens
ctccattgttcgtgttttaaggcgccatgaggtggatttgtttaaaaagagtcttctgttgattcctattcacctg

SEQ ID NO: 462698 - DNA, 95 bp, Homo sapiens
gaccttccctcgggaattccacctctgcgtttttccctccagcgcaacctctgctccctgcctcgcctcccgcgcgcctaggtgcctgcgacttt

SEQ ID NO: 462699 - DNA, 75 bp, Homo sapiens
gttggcaagcgagcaatttccacctctgtgtgtgtacgagctcatggaattaaggataacctagacgacataaag

SEQ ID NO: 462700 - DNA, 96 bp, Homo sapiens
aacagctgcggtgctctgccatattgtgtcttccccggccggtccctcgcctcccggccgagctgacggccggaccagaatatggccaagggatga

SEQ ID NO: 462701 - DNA, 88 bp, Homo sapiens
acacaatttatttctctgaaacctaaaatccctctcagcccagaagtgacacacaccaaacctgatctcagtggttcaatagcatccc

SEQ ID NO: 462702 - DNA, 101 bp, Homo sapiens
gacagagcgagcgcggcgcggggccaccatgggggcccagctcagcacggtcctggctataagtcaccatggcacagcaagctgccgataagtatctctat

SEQ ID NO: 462703 - DNA, 100 bp, Homo sapiens
cctgccaaatacatcagcttgtaggagacagaggccatcatctctcagcaaggtgacatatttgtttttgacctggagacctcagctgtcgctccctttg

SEQ ID NO: 462704 - DNA, 75 bp, Homo sapiens
tggacctccagaaacaactgggaaggtggcagagtttgtggatgagcggccagaagaggtaaagcagatggaggc

SEQ ID NO: 462705 - DNA, 75 bp, Homo sapiens
tttttggatgatgatggatccatttctcctattgaggagtcaacatctgaaatagctcaactcagtcaagaaaaa

SEQ ID NO: 462706 - DNA, 96 bp, Homo sapiens
tggcattcaagctcgccgcaggatctgtgagaatgggcctgactgtgcaggctgcaatgtggttgtccttctattcaggccactcttcgttttcca

SEQ ID NO: 462707 - DNA, 83 bp, Homo sapiens
cttggactgagtcctgcaggacacaggaagctgtagagaaatatgaagaagtgctacataatttggaatttgccaaggagctt

SEQ ID NO: 462708 - DNA, 96 bp, Homo sapiens
cgcgcccgccgcgcggagcgccccttcgcgtcccctgcaccatgagctggggcaccgagctctggccacgatggaggtgatgaacctgatggagca

SEQ ID NO: 462709 - DNA, 74 bp, Homo sapiens
ttgcctcctcaccatgaacggaagctgttgtgaaggcagagcagcatctgctgaagagacagaaaccagcccca

SEQ ID NO: 462710 - DNA, 75 bp, Homo sapiens
cccaccatcccaccaaagggggctgctgaccgagagagctcactcagccaggtattgaaattgttggcggagatg

SEQ ID NO: 462711 - DNA, 100 bp, Homo sapiens
ctggacaagaatatgctgccaaaattatcaacaccaaaaagctttctgctagggctaaaagatggcggcaaggcagcccaggcaaatgtaagaataggcg

SEQ ID NO: 462712 - DNA, 50 bp, Homo sapiens
gacaccagaggctcccacttgaccagcaaaagctggcaggctgacagagg

SEQ ID NO: 462713 - DNA, 100 bp, Homo sapiens
acccaaggggatcctctgaccgctgggacaaaatagccagatgtgtcccgtccaagagcaagaagatgctcatgaagcagcaggaccggctggaggagcg

SEQ ID NO: 462714 - DNA, 100 bp, Homo sapiens
tagctgcagccggagcctgggagacgttacagaatgtctgaaggggacagtgtgggagaatccgtccatgggaaaccttcggtggtgtacagatttttca

SEQ ID NO: 462715 - DNA, 89 bp, Homo sapiens
ggggactcggaagtgtggctgtccagctgggctgagtcgcccaagaaggacgtgacaggctcagtcctggtgtctgcagcatgacctgg

SEQ ID NO: 462716 - DNA, 105 bp, Homo sapiens
gggattccagctgtctgattaatgagaaacataatgtattttggcagaactcacagtttggagatgaaaaaacatttagtgattcatcattgctggaaaatctcc

SEQ ID NO: 462717 - DNA, 100 bp, Homo sapiens
cctacctcaaatgtgctcacgatgttgaatgatgctttaacacattctgcagttttaattcagattcgagtggtgaatgcatttcgtagttctttatatg

SEQ ID NO: 462718 - DNA, 90 bp, Homo sapiens
ggcgaaggtgaagagttgtcccagctcggcccgcgggggagccccgggagccgcacgtactgtaagattgatgttaaaggcatggtgttc

SEQ ID NO: 462719 - DNA, 85 bp, Homo sapiens
tgtggatcagcagacccccaccatccctaaccggctggctgcagacccgtcggcagaaccaattgaaagaccaacagcaacagca

SEQ ID NO: 462720 - DNA, 83 bp, Homo sapiens
cttgtttcacatctgtaacaacaggctggacggcagtctggaaacgaccaatgagatcttggactctgcctctcacgactgcc

SEQ ID NO: 462721 - DNA, 75 bp, Homo sapiens
cgggagcaggcggcgcagcaccagacaccaatgggaatcccaatggggaagtcgatgctggtgcttctcaccttc

SEQ ID NO: 462722 - DNA, 130 bp, Homo sapiens
gagcgagcgaggaggcccgggagcgccgagcgtcgccgccgccgccgccatgaacaactcgggcgccgacgagatcggggtcccgacggcctacacatggggcgctgtgggcgccgtggggctggtgtgg

SEQ ID NO: 462723 - DNA, 85 bp, Homo sapiens
catttccacctctatggcagcaacgcctccctggcccaggtggtgaaggcatttgtggtcctggcctcgcagttcctgtcccatg

SEQ ID NO: 462724 - DNA, 83 bp, Homo sapiens
caacaccaggagaggccgggggcagccgccatcggcagcgccaggttttggctacgggcctccacctccaccgccagatcagt

SEQ ID NO: 462725 - DNA, 90 bp, Homo sapiens
tggacttccactggattgagaccatcctgagtgataagaagcggattcttggtgccaccattgagaactccaggattgtcctgcagatcg

SEQ ID NO: 462726 - DNA, 75 bp, Homo sapiens
aatccccagacccgaattcccagaacctttgaccgcttttgtggcctcatggatggcagaaacggtggacacaag

SEQ ID NO: 462727 - DNA, 100 bp, Homo sapiens
cggcggcgaacatgcgcttttgacacattggagaaaatgttttcagactgctcatttctatgtggaagacagcagttcacctcgagtggtccctaatgaa

SEQ ID NO: 462728 - DNA, 75 bp, Homo sapiens
caagaagattatgacagattacgccccctatcctatccgcaaacagcagttgtgaaaaacttcaggacaaaaatg

SEQ ID NO: 462729 - DNA, 88 bp, Homo sapiens
gctgcctccgagcgccgtccgccaggaagactccctgcctcctgagtcccaattgatatcagtaaatgccattatttagtggatttgg

SEQ ID NO: 462730 - DNA, 82 bp, Homo sapiens
cgccggcggccaagcagccaaccatgctcaacttcggtgcctctctccagcagactgcgccacgccgcaatgaagagcttct

SEQ ID NO: 462731 - DNA, 100 bp, Homo sapiens
tgatgtaccatcatgggtagcctttgataaacagtggaaagaggcaaaacctgatgaattaatggattccaaattgagatgcgtatttgaaatgcccaat

SEQ ID NO: 462732 - DNA, 75 bp, Homo sapiens
ctggagcagtggagcccaaagacccctggagacatggaaccatcactgttgctggaggcacctgacaaatcctag

SEQ ID NO: 462733 - DNA, 90 bp, Homo sapiens
gcgcgatggagcagcgaaaacgtggttgtagagttccgtgactcccagcaagagtgagccatggagctacgtgtggggaacaagtaccgc

SEQ ID NO: 462734 - DNA, 83 bp, Homo sapiens
cgctatcctgccaactctatcgtggtcgtaggaggctgtcctgtctgcaggtacaatgactcttcttgcttttcacctaagtt

SEQ ID NO: 462735 - DNA, 80 bp, Homo sapiens
aggagctgaagcaggacaacatagcggtgaaggcgaacgcggtctgcaagctgacgtattgtggacgaatgtggaacctc

SEQ ID NO: 462736 - DNA, 100 bp, Homo sapiens
cctgaagttacatttagagactgaaatcactgcaccttaaaaacaaaagattgagctgcactgtattcctgtgtggcagtgtggcgggagtgtggaggtc

SEQ ID NO: 462737 - DNA, 73 bp, Homo sapiens
tcagcgccgcctccctgcttcttaacagtgagtctgccaaaaaagaggtggttgctgaagtggtaaaagcccc

SEQ ID NO: 462738 - DNA, 118 bp, Homo sapiens
atttttcgcttctcttcagggatgagtcatgtggtggtgaaaaatgaccctgaactggaccagcagtgatagtagacaagaagatgcagaagaaaatgaagaaagctcataaaaagat

SEQ ID NO: 462739 - DNA, 100 bp, Homo sapiens
aagaacaaaacaagaaaaatgaggagcgaatgtttaaggaaaaccaaagtttattcagtgaggtagcttccttaaagacattgccgagaatggctgcgcc

SEQ ID NO: 462740 - DNA, 75 bp, Homo sapiens
cagaagtgaaacgccaggctctctggaggccaggagatgctgcgtgacttcctgttggtctacaatcggatgaca

SEQ ID NO: 462741 - DNA, 100 bp, Homo sapiens
aagcgactgagtccgcgatggaggttggaagttaaagataagacagatgaagtacatttgcttaatgacacattagcaagtgaacagaaaaaatcaagag

SEQ ID NO: 462742 - DNA, 101 bp, Homo sapiens
ggagtggctgaagaccaccaccctccacagggctgggcccatgcacagccatccttccctaccttgactgccactggtgacatgccaacttaccagatccg

SEQ ID NO: 462743 - DNA, 100 bp, Homo sapiens
cgggctccggctccggctccggctctggctctgcgcggtggcagcggcggcggcggcgcggggaccgagccctgggcgctgcctatggcacagccaagag

SEQ ID NO: 462744 - DNA, 98 bp, Homo sapiens
agacagcatactgaagtggtttgcaacatccttcttctggataacactgtacaagctttcaaagtcaatattcgggaactggagcctctcctctgtca

SEQ ID NO: 462745 - DNA, 83 bp, Homo sapiens
gaacttcgttgcttgcttgcctgtgcgcgcgtgcgcggacatggcctcaaacgttggagagaggcgatttcctctcagaagag

SEQ ID NO: 462746 - DNA, 76 bp, Homo sapiens
ctcgccaaactgcaggcacaagtgcgcattggtgggaaaatgttgatgatggagacacagtgacagatttcatggc

SEQ ID NO: 462747 - DNA, 117 bp, Homo sapiens
tgtcggaacgacatgcgcagcgactttagccagacgatgctgtttcaaggaaggatgccatcctgttaactgatgcttttgacttcaccgatcagtgtttaaattcagcacttggct

SEQ ID NO: 462748 - DNA, 75 bp, Homo sapiens
tgataaccatatcctgctgtgggatttacaggaaagctcgagccaggctgtggagtacaagcgcaagctagccag

SEQ ID NO: 462749 - DNA, 98 bp, Homo sapiens
cggcatcaagcaggtccggacccactggctgctggagcttgtcaccaccaggcctccccatggccacccatggaccagtcggcattcacttcctccct

SEQ ID NO: 462750 - DNA, 100 bp, Homo sapiens
tccgagacccggacagaggcaagcaggggcgccgtgggtgccagagaggcggaagaggaggcctgatggggagagattatttcattcaatattttttatg

SEQ ID NO: 462751 - DNA, 50 bp, Homo sapiens
tctggatctaaaagctctagaaggtcgaatgagtgatttgagtgtaattg

SEQ ID NO: 462752 - DNA, 98 bp, Homo sapiens
ctatcccaggaatacagctttgcattagatttggagtccaggaatgagactaagcatttatctgtaggaaaagatattattcaaaacactggttctca

SEQ ID NO: 462753 - DNA, 100 bp, Homo sapiens
gccagtttggctgaaaataaaaggttggtcaaagaaaaagtgatgtatgaaaaagaggcaaaacaacaagaagaaaagattgaaaaaatgagagctgaag

SEQ ID NO: 462754 - DNA, 100 bp, Homo sapiens
ctgcaaatgcgcttgatggaaggagatgtcaattccactgaagtcctcatttctgctgatgctcgtcagaagttccgctctgttctggttgaagcaacgg

SEQ ID NO: 462755 - DNA, 82 bp, Homo sapiens
cgcgcgcccgcgccctccgcgcgacgccaggggaacgcccttttgcttgtgactggcagggctgcgacaagaagttcgcccg

SEQ ID NO: 462756 - DNA, 101 bp, Homo sapiens
ttgaagtctttgtacaggcggatgctccccatggagttgcctttagtgcagccgtcattatccatgacaccggaaactgtgaaagatgttggatttggtag

SEQ ID NO: 462757 - DNA, 100 bp, Homo sapiens
tggaaaccaaagtcaagcatgtgataaagcagggcccaatgtaaaggctgttgctactgctgtggaacagatttacccatttgtgtttgaaagcaggaaa

SEQ ID NO: 462758 - DNA, 88 bp, Homo sapiens
gattgttgagaggattacatgtaaagtaccaggacagtgcatggcacatgtctcgcatgaatttgccttgaatttcaaccccagtaac

SEQ ID NO: 462759 - DNA, 82 bp, Homo sapiens
ctccgggagagggggagtgcgcggcggccgcagctgccacaaaccagagatcctgaaggagctagacgagtgctacgagcgc

SEQ ID NO: 462760 - DNA, 145 bp, Homo sapiens
tgttgatgctgtaattgctgaacttaaaaagcagtctaaacctgtgaccacccctgaagaaattgcacagagccagagcccagaggtggagcagttagggagggttgtggaactggacagtgacatggtagatatcacccaggag

SEQ ID NO: 462761 - DNA, 100 bp, Homo sapiens
ctgcaacgatcccgatccaattcagcagcgttttaaaagcagcgtcaccctttacaccagaaagctggcgggcactatggggaaaaaacaaaacaagaag

SEQ ID NO: 462762 - DNA, 100 bp, Homo sapiens
acttgtccacgacaccggctacttctcagctttaccatccctggaggagacctggcagcaggaaacttggatttaactggccagaagcaggtattcaaag

SEQ ID NO: 462763 - DNA, 98 bp, Homo sapiens
gatagatttaccctttctaaactattagctgtaattttaagcttccaggtggttcacttatttttaacactctgcagcagcagcaacagcagctctcc

SEQ ID NO: 462764 - DNA, 80 bp, Homo sapiens
agaccctggagcctcagttggaagcagccgatccagcctgcggagcctgtggggcagtgtcttccatgaagaaatgatga

SEQ ID NO: 462765 - DNA, 75 bp, Homo sapiens
ttatggtgtaaacaacgattctttggaggtggagggaagctgtcacagcccgcaagaaactgaggcgccaaatgc

SEQ ID NO: 462766 - DNA, 75 bp, Homo sapiens
cgcagtggtcgcttcttctccttgactgtgaaccagaagagctgactgactggtctatggatgaaaaatgttcat

SEQ ID NO: 462767 - DNA, 74 bp, Homo sapiens
cgaggagtgcaggcgcttcaccacagacgtccacctctggaggtatgaaggaggctatccagccctcacagaag

SEQ ID NO: 462768 - DNA, 100 bp, Homo sapiens
cctccttcgtcgctgttgctgccgccatacgcgctctccctgtttagtttgggaaggtggtagtgtatgggatcttcctctggacaccacgacaccaggc

SEQ ID NO: 462769 - DNA, 110 bp, Homo sapiens
gagttgtggtaactagatatgaggagaaagagaggaaggaggcacagagcagttggagcttgctgcctggaagaatgacgcggaagtacaaagtgaaattgaaagaatct

SEQ ID NO: 462770 - DNA, 98 bp, Homo sapiens
ggttctttgtgtaggttgttcaacagtgttgtgccagcctacaggaggaaaggccagactcacagaagttaaacaggtgttcaaggagctggagtttc

SEQ ID NO: 462771 - DNA, 98 bp, Homo sapiens
aggctgacgcagaatgcagactgtgtgaacattgatgatggcacctcagatcgcccctacagccatgctctggtggctggaattgaccgctacccccg

SEQ ID NO: 462772 - DNA, 100 bp, Homo sapiens
gaagggcaaggagaaggcggaagcacagcagatggacggagaggggttgcttaacgaagaattgccaaattgctgggaatgtccaaagtgctaccaggag

SEQ ID NO: 462773 - DNA, 90 bp, Homo sapiens
gctagagaaggtgggcggcagcgccagcccggcgccccctcccagctcccagcggaaggaccattacgacctgttcttgaatacattgat

SEQ ID NO: 462774 - DNA, 83 bp, Homo sapiens
ggcgcggattcgccgaggcaccgaggcactcagaggaggtgacagcgggaaggtgaccacagtcgtagccactctaggccaag

SEQ ID NO: 462775 - DNA, 74 bp, Homo sapiens
tgcaagacgacgagtatgaagatctttatgatgatccacttccatacagtgctacaacaagtaattgaagatgg

SEQ ID NO: 462776 - DNA, 100 bp, Homo sapiens
ataaaatcatctccatattctcaggcacagagaaaggaccctgctgggatctttgagcttgtggaggtggtcggcaatggaacctacggacaggtgtaca

SEQ ID NO: 462777 - DNA, 76 bp, Homo sapiens
aggtatttcaaaatgagtgaagcatgactctcacagatgaaggcctagacgcagatacttggcatatcgaaatttt

SEQ ID NO: 462778 - DNA, 100 bp, Homo sapiens
gcaccctggagatactcttaaaagatgatgatgatgattcagactctgatggtgatggcaaaggttcaaaatcaaaggaagcccagaagggaggtcattt

SEQ ID NO: 462779 - DNA, 97 bp, Homo sapiens
cagccgcccgcttcaaccccaggggaccagaggaactcagccctgattgcgggcttgtatgctgtggggaatttcctgcccagtgatgagagtatgt

SEQ ID NO: 462780 - DNA, 51 bp, Homo sapiens
aatcttccttcaggatatcaaggaattgactttaaaattaggaccatagag

SEQ ID NO: 462781 - DNA, 80 bp, Homo sapiens
ggagtttctcgccctcgtcgcgcctgccgcgcggagagataaggtggaagttgatgggtcgaaactaaatgtgaccagca

SEQ ID NO: 462782 - DNA, 98 bp, Homo sapiens
gcaggaagaactcagagccgggaagcccccattcactagaagcactgagagatgcggccccctcgcagggtcaaaaggctgagtttcaaattctggat

SEQ ID NO: 462783 - DNA, 100 bp, Homo sapiens
tcttcctgaacaagactttcaataggggccagtatgcttcgcttcatccagaagttttctcaagcatcttcaaagggaaacactactatgaagtatcctg

SEQ ID NO: 462784 - DNA, 50 bp, Homo sapiens
agaaccaatcagcagccgcgttaggctgctcccggcagatcggcttctcc

SEQ ID NO: 462785 - DNA, 100 bp, Homo sapiens
atcttcacagcacagttcctgggaaggtggagccaccagcctctccctggatgaccatgaaagctgtggttctaattctaccaaccgtagtactgctgag

SEQ ID NO: 462786 - DNA, 100 bp, Homo sapiens
accaccacagagtctgtggaagaggtggttcgagagagtaaaacttgtctcggcacagagtcaagtaaagaaagccaacatacagtggagcccctgggga

SEQ ID NO: 462787 - DNA, 100 bp, Homo sapiens
tgcgaacaaagcttttctgatatgatgggaaatacaaatgaaccaagcacacgtgtccgagtatttcatagtgaaaaagttctgatgaaaagaacatgga

SEQ ID NO: 462788 - DNA, 101 bp, Homo sapiens
ggaaacatggcgaccgagggaatgatccttactaaccacgaccatcaaatccgtgtcggagtccttacaggttttataggatcacattgacaaaagtacca

SEQ ID NO: 462789 - DNA, 83 bp, Homo sapiens
ctcagagagggaagagattcagccagcacactcctcgcgagcaagctgcggttggatttctcacgatgtccagtgttatctcc

SEQ ID NO: 462790 - DNA, 100 bp, Homo sapiens
tcgcagtggtcgcttcttctccttgtttcagttcctcatgttcagattgttctcagaggcccgacagcctctttctgaggaggacgtagccagcctttcc

SEQ ID NO: 462791 - DNA, 98 bp, Homo sapiens
tttataattggagatcctgaacaccaaagttgactatagtcaatggggccaatggagccaagtgtatggaaacccacaacagtatggacagtatatgg

SEQ ID NO: 462792 - DNA, 113 bp, Homo sapiens
ggcacgcttccagaacgcctgccgcgacggccgctcggaaatcgtcagtatgggaatcctttaaataaatatatcagacattatgaaggattatcttacaatgtggattcatt

SEQ ID NO: 462793 - DNA, 138 bp, Homo sapiens
caacaacaggaaaatggacaccttccaacactttgctccctggcaacccctaatatttggtatggcagatcccagaaaatggactcaccctttccctgactgaacctgtggtgattttggaaggccactcaaagagag

SEQ ID NO: 462794 - DNA, 87 bp, Homo sapiens
gaaggtccggggcttgccctggtcttgctcggccgatgaagtgcagaggtttttttctgtgtcttaaagacttttctacatgatcct

SEQ ID NO: 462795 - DNA, 83 bp, Homo sapiens
cttagctgtgctcgcgctactctctctttctggcctggaggctatccagccaatcccacagagtattgatgaggaaactgaag

SEQ ID NO: 462796 - DNA, 95 bp, Homo sapiens
aagacaataagtatgttccctactcggagagcttcagccaagttttagaggtggtataagttgaaatccaaaccaggaaagaaggacaaggagcg

SEQ ID NO: 462797 - DNA, 48 bp, Homo sapiens
ccaggcgacagcggcagccgggccatcatctgtgcgatctctgcggtg

SEQ ID NO: 462798 - DNA, 51 bp, Homo sapiens
tgtgcacttggatttttcttcaggcacaggttcaatatcaacagcagcatg

SEQ ID NO: 462799 - DNA, 75 bp, Homo sapiens
gatccagaacttgcagcaacaatagcctgattacatcaaccccagagccgtgcagctgggctcccttctcgtccg

SEQ ID NO: 462800 - DNA, 100 bp, Homo sapiens
aagatggccgccgcggagacccagtcgctacgggagcagccagaacaggggcaagtgtccgagtggtgaatcagctacttacagagatggatggtctgga

SEQ ID NO: 462801 - DNA, 75 bp, Homo sapiens
cgcccgtctaccccgacttggcggaggtggtgggctaccaggcctccccatggccacccatggaccagtcggcat

SEQ ID NO: 462802 - DNA, 50 bp, Homo sapiens
ctgcagctcgtcagcccatttctgggctcaggagcatctatcggctgcac

SEQ ID NO: 462803 - DNA, 80 bp, Homo sapiens
accaaggggcagacccaaaaaactggtgtggacactgccagcggctgcagccgacttggaatgacctgggagacaaatac

SEQ ID NO: 462804 - DNA, 51 bp, Homo sapiens
gcatggagttggctaatggatgctgcaatccaggagtggctgaaggagggc

SEQ ID NO: 462805 - DNA, 74 bp, Homo sapiens
aaacttcgaggcactcaagtcctggctcagcaagactctcgagcccatgtagctacagcaagctgggtagcagg

SEQ ID NO: 462806 - DNA, 51 bp, Homo sapiens
ctggagaagacccagcaggcccaggttggactcttcacagaaattgggccc

SEQ ID NO: 462807 - DNA, 91 bp, Homo sapiens
ccctcccaaggtatttgagatgctgttgcacaaaattccccttatttgccaggatttttctaaagacgttgcagtgcaagtgttgcctttg

SEQ ID NO: 462808 - DNA, 100 bp, Homo sapiens
gaaaaggcgcagtctcggtgggattgcgtgcaggagggtcgtggtctggctgtggcggaggagcataagaaggattgtgctcatggacgatgccatggac

SEQ ID NO: 462809 - DNA, 100 bp, Homo sapiens
gacaagcaacaacaatcatagctgacaatacacattccaactatggagaatggtcctaagctggcaagccgcatcttgagcaaattaactgatatccagg

SEQ ID NO: 462810 - DNA, 74 bp, Homo sapiens
ctgagaccagtggtcatcgatgggagcaacgtggccatgagggtgttcctgaaaagaaggtacttccaatcacc

SEQ ID NO: 462811 - DNA, 100 bp, Homo sapiens
ctgtggtcttcattggcacgcgcagcggcagcttgaagaagcttggagagggtctgggagtgaaggagacaccccagcaaaagtaccagcgcctactgca

SEQ ID NO: 462812 - DNA, 100 bp, Homo sapiens
ccacaaaccccatttggccctcaaacaggaattccgtcagaaatcgctggactgggagaagcaacgcttgatttatcagcaacaggtatcttcactggag

SEQ ID NO: 462813 - DNA, 98 bp, Homo sapiens
gagccagtaacatacttcatcacttatggaagtgccatggcaatgtatgcatattttgtaatgacacgccagtgaacctccttggcctgggcgaagct

SEQ ID NO: 462814 - DNA, 51 bp, Homo sapiens
taaaggccaagatccaggataaggaagctttttcagccaaccaagtgccgg

SEQ ID NO: 462815 - DNA, 100 bp, Homo sapiens
agacatctcctgagctctgaccagatgatggccgctcctttgaacctgtaggtactcggccccgagtggactccatgagctctgtggaggaggatgacta

SEQ ID NO: 462816 - DNA, 119 bp, Homo sapiens
gaacatccgagggtgcctgggaatcggtcgcctggaggaccagtatttcccatggagggttgaaggggcccggccaggactcggggaagggtggcctgagagcagcgatgacctctggg

SEQ ID NO: 462817 - DNA, 48 bp, Homo sapiens
gccagtcaataggaagtacgagtggccccgtggttatgaatgtgcttc

SEQ ID NO: 462818 - DNA, 75 bp, Homo sapiens
caagtactcgccggacccggtggtcgtccgcggctccggtcacgtcaccgtgtatgatctcgtgaaaccttgaga

SEQ ID NO: 462819 - DNA, 90 bp, Homo sapiens
agccgatccagcctgcggagcctgtggggcaggtgttacacataatattgcattacttcgagaggtgataatcaactcacgctttgtaaa

SEQ ID NO: 462820 - DNA, 74 bp, Homo sapiens
agctcaagatgtggggagtggcagagagtatgcattaaagggaaatcctcattgacgattcaatttgttgaagg

SEQ ID NO: 462821 - DNA, 50 bp, Homo sapiens
tctctcctcacgcctcctgacagacctctgactatgtgaagatacggtgg

SEQ ID NO: 462822 - DNA, 75 bp, Homo sapiens
gcctggagactcgcaacaagatcccctatgagagtcccatcttcagcagaggaacagaattagaacctgttgaag

SEQ ID NO: 462823 - DNA, 82 bp, Homo sapiens
atttgggaaggaataagcctggaagaaaaagatacaacgaactagcacaacgaggattgtgggattagtgatatgcttttct

SEQ ID NO: 462824 - DNA, 88 bp, Homo sapiens
tgatcgtgctgtattggagagagaagtccaaggacctagtggaagaaaatgcctaacatcagggaacagtaggagcagcctaaattga

SEQ ID NO: 462825 - DNA, 74 bp, Homo sapiens
atcaggacggaagcacaggggccactcagagtcgcccgagaagactggaatgtcacgtggaataccagcaaccc

SEQ ID NO: 462826 - DNA, 98 bp, Homo sapiens
cttctgggctgtgctggtcacagccacactctgcaccgctaggccgtccccgaccttgcctgaacaagtgaggattatgggaagaactttaaggatat

SEQ ID NO: 462827 - DNA, 74 bp, Homo sapiens
cagccaggagcaccgccgaggactccagcacaccgagggcgggctggtccgagtctctgttttggaagctcaac

SEQ ID NO: 462828 - DNA, 101 bp, Homo sapiens
actcacacgacgtgcgctatgggtcagccaacaaaccacctgccaagctgtgaccaggaaaactttcatgcaaggggagtttctaaagattaaacacatag

SEQ ID NO: 462829 - DNA, 83 bp, Homo sapiens
tgcggacgctcgtgcacagatacgagggctccccgaggactttctgaactccctggagaagatggaggacggcaagttgaagg

SEQ ID NO: 462830 - DNA, 80 bp, Homo sapiens
ctgaagaggacctggaggccatccggctgcgggaggaggccatcctgcagatggagcgggctgacgcacgaggcacacag

SEQ ID NO: 462831 - DNA, 97 bp, Homo sapiens
aatgtttcatcattactaacaggatattcctcatgacattgctgtctgatattaataaggcagcggaaagaagaaatatgaatacggctccatcaag

SEQ ID NO: 462832 - DNA, 83 bp, Homo sapiens
cttcagccgcctccttgacagtcttcggcaggaagaaggacactcgtgaagtggtagccataaagtgtgtagccaagaaaagt

SEQ ID NO: 462833 - DNA, 75 bp, Homo sapiens
agatcctgccccgtggccgcggccgtctcgtagtgatgaacggcagcagccactcaccaacagccatcaatggtg

SEQ ID NO: 462834 - DNA, 82 bp, Homo sapiens
ctttcgccagcccgtgccgcgagcgcggcctgcaggaggtgcatctgcagacgcagcaggaggtgaagctgcgcatgacggg

SEQ ID NO: 462835 - DNA, 82 bp, Homo sapiens
tctgcgtcatgggggagtgctgatcaactaaaagagactcatgatagtaaagagcacctggcaatgatggaacgaatattag

SEQ ID NO: 462836 - DNA, 87 bp, Homo sapiens
ctgtggacatcagcgccatccccgagcagcggtggaagctgaagtgctttggggacgagtactacggggccgtggaggaggagaagc

SEQ ID NO: 462837 - DNA, 75 bp, Homo sapiens
cctggtcctcgatccgcccacagacctcaaattcaaagatgcacaagtctggcgttctgaggaaggccattgatt

SEQ ID NO: 462838 - DNA, 74 bp, Homo sapiens
ctcaactatctcgctgacacgcaggtggtggagattgtgaagaagctggagtctcgccagcggggctgggagga

SEQ ID NO: 462839 - DNA, 75 bp, Homo sapiens
ccggagcgggcggctgagacaaaggcgacgggtttgaacatcctcatccctgtgttagaccggatccgatatgtg

SEQ ID NO: 462840 - DNA, 90 bp, Homo sapiens
ttggacccacagggcagatggagtgtgaacatggctacgcctcttcattcccgtccatgccgagcccccgactgcagcattcaaagcccc

SEQ ID NO: 462841 - DNA, 90 bp, Homo sapiens
agactcctgctcagtgtagcattaagcttgcagaacacagagaagtacggcatacctacagcctggagtccctttgtcactgcccatttt

SEQ ID NO: 462842 - DNA, 100 bp, Homo sapiens
tattccgtgagatgtatgtgcgttttttcttcagactccattccatctcttctcatccttctggtatttctggccctcctggtccccctggtcctgctgg

SEQ ID NO: 462843 - DNA, 100 bp, Homo sapiens
gttctcgctgctgcgggagggacatcggatggaccgacccccacactgccccccagagctaggcatttcatccttcatgaagccattcaggattttgaat

SEQ ID NO: 462844 - DNA, 82 bp, Homo sapiens
gcaggggacgtcggtgggcgcaggacgagcaagttgagaagctgatgtctcctcgacttccaactggaaccttgaaccccca

SEQ ID NO: 462845 - DNA, 81 bp, Homo sapiens
agacgatattgatattgaagcaatgcttgaggctccttacaagaaggcataagatgcacatttttctgctctggagccggg

SEQ ID NO: 462846 - DNA, 75 bp, Homo sapiens
ctgtcactcacttacacagtattgggaaatctgtgaaagaaagcggcagcccagaatctcgtgttaatgcgatcc

SEQ ID NO: 462847 - DNA, 96 bp, Homo sapiens
ggcgatggagactacagagcaccagagcgtctgaaccggacggcttttctcatttccacttgtacgtgtgcgctgcttttctcgtgagatggagga

SEQ ID NO: 462848 - DNA, 100 bp, Homo sapiens
ggggattgcctggcaggacgtgaaggggaagaggcccaccctggagtaaccctcactggagaatccagaggcgccttggtgctgaattggggaagtctgt

SEQ ID NO: 462849 - DNA, 75 bp, Homo sapiens
gcggcgcggagtaaggccccggccagcagttcttcaaaccctgaggaggtgcagtcggctgccctggacgagatg

SEQ ID NO: 462850 - DNA, 100 bp, Homo sapiens
gaaatggccgctgtgtggttgcaacggagataaattcccggaaccgcgattcggcgtgtcagtcttactactttgaccgcgatgatgtggctttgaagaa

SEQ ID NO: 462851 - DNA, 101 bp, Homo sapiens
ttgaagagcacccaaagtcaaactagtgctccgcgctggcagtctggaaaaggcagatgtatggctccagtttgtgttttcagctgcctactagacctcac

SEQ ID NO: 462852 - DNA, 98 bp, Homo sapiens
ttttgatcaccattggctgggaaggaaaaacagaatcagctgttccctgcgaaaggaacatctaaaggcctttgatgatgaaatcaatgcttttttgg

SEQ ID NO: 462853 - DNA, 98 bp, Homo sapiens
ccagggcagaaatagcgaccatggcgagttactccacaggatccgctgaacataggatgttgccacaaaatctacctcgtgtatttttctctttcact

SEQ ID NO: 462854 - DNA, 82 bp, Homo sapiens
cagggatctacagaaattcctgcaagattgtcaagagcacctgtgaaactggaaaaacatctgcacagtgctagatctgaag

SEQ ID NO: 462855 - DNA, 102 bp, Homo sapiens
ctttaacgacatagtcaagcagggctacgtgaaaatccgcagcaggaagcttgggacgaagttatacggaagcgtctcctcattgatggagatggtgctgga

SEQ ID NO: 462856 - DNA, 83 bp, Homo sapiens
cgacaagccgctggcagccgcggatctcaccgccgctcagggcctccggtgtggctgtctctgatggtgtcatcaaggtgttc

SEQ ID NO: 462857 - DNA, 90 bp, Homo sapiens
cgacgggccgagcctgccactatcatcaatgctgtggtactgttgattttattgagtgccctggctgatccggatcagtataacttttca

SEQ ID NO: 462858 - DNA, 75 bp, Homo sapiens
cgggagaatctgggcgtcgctctagaggtggatccataaagaacccagccaacccgcagagggaggggaggggct

SEQ ID NO: 462859 - DNA, 75 bp, Homo sapiens
gtggtgtccagccggatccagcatctctccaccatcgactacgtggaggacgaatatgcttttaaggctattaac

SEQ ID NO: 462860 - DNA, 100 bp, Homo sapiens
ggagcttaaaaagctgcacgcaagtgttaaacttctggcccgacaacaagctcaaatacgtcaccaaatggcagaggacagcaaagcagattactcatcc

SEQ ID NO: 462861 - DNA, 105 bp, Homo sapiens
gctgcctttgccgccaccatgcccaaaacgagctaaagttgcagacaagatccagctcatcaataatatgctggacaaagtcaatgagatgattattggtggtgg

SEQ ID NO: 462862 - DNA, 88 bp, Homo sapiens
gttgattcacacaaccgagcagcactgtcagcagatgtcgaataaaaccttcacggcatggtgcaactcccacctgcggaaggcaggc

SEQ ID NO: 462863 - DNA, 100 bp, Homo sapiens
tttgaggaatccagcaagctagaagacctgttgcggaaggttcgcgccaaggagaccaggaagcgagcactcagcaggttcaattcccatgaaagtgcag

SEQ ID NO: 462864 - DNA, 90 bp, Homo sapiens
cttggatcgctgcaaccatctccgccagaacgacaaagaggagaactgccattggatgtccagaatcccctgtagttgataatgttggga

SEQ ID NO: 462865 - DNA, 96 bp, Homo sapiens
acagatccagggagcattcacctgccctgtctccaaacagtatcagaagtgactctgaccttggactccaagacctacatcaacagcctggctata

SEQ ID NO: 462866 - DNA, 100 bp, Homo sapiens
gcccactgccatgacggggggctggtgctgcgggacctcaagctgcggaaattcatctttaaggacgaagagagccgtactctgacagctgtgcacgatg

SEQ ID NO: 462867 - DNA, 74 bp, Homo sapiens
ccgtggccgctgccggtctaccaagagtgagccatggagctacgtgtggggaacaagtaccgcctgggacggaa

SEQ ID NO: 462868 - DNA, 75 bp, Homo sapiens
gcgattctcagggattgatcgcctcttcaggttgaagaaatatggagatcaacacaaaactgctcatcagtgtta

SEQ ID NO: 462869 - DNA, 75 bp, Homo sapiens
gccccggcccctcctgcccatggcggtggccgagctgtacacgcaggtgagaagccctaccactgcaactgggac

SEQ ID NO: 462870 - DNA, 82 bp, Homo sapiens
gaacacctcgccaaagcagagaaataaggactactgagcccagccaggctgtatgccattgctgccaaagaaaaagatattc

SEQ ID NO: 462871 - DNA, 100 bp, Homo sapiens
gattacagacctgagccactgcgcccagccttgatcttgagcatggcggacaccgacctgttcatggaatgtgaggaggaggagttggagccatggcaga

SEQ ID NO: 462872 - DNA, 83 bp, Homo sapiens
cgccgcgggacctctccgggccatggacatatgtagagtgtgtcggtcagaaggaacacctgagaaaccgctttatcatcctt

SEQ ID NO: 462873 - DNA, 100 bp, Homo sapiens
aagcctctgggagcagaagggaggctccaagacctcatcaacaattaagagtacccaaaggcaagtggaacagctctaatggggttgaagaaaaggagac

SEQ ID NO: 462874 - DNA, 51 bp, Homo sapiens
actatattgagaaggaggtaaagggctgggaagaaacggtggatgccgcca

SEQ ID NO: 462875 - DNA, 100 bp, Homo sapiens
agaacttcctcttttctctggagacagtggcaagatcacaaaatttgtccaggatagacatagagctagaagaaacagacttcgtaaagatcaacttaag

SEQ ID NO: 462876 - DNA, 50 bp, Homo sapiens
cctctggctgctcagtcctgcctcagaaacgcttcgttaagggactcagg

SEQ ID NO: 462877 - DNA, 100 bp, Homo sapiens
attctttctctggaactgaaccagaggttcacaaaacaagtgtagtaggtggtgtgtaagaagtaccggggattcaccatccccgaggccttccggggag

SEQ ID NO: 462878 - DNA, 100 bp, Homo sapiens
acgatggagaagaatatgatgtggaagcacatggatttaagcgagagcctcactggttcccaggacatcaacctgaactggatcctccccgatacaaatg

SEQ ID NO: 462879 - DNA, 100 bp, Homo sapiens
aacactgctgctgcctgtgatgggagattcaaagtccagcatggaggactcttcccagggaaattccatcttccagatcaatatgatcaagtacatcaaa

SEQ ID NO: 462880 - DNA, 100 bp, Homo sapiens
aaaatcggcagatgttacagctgctcatgaaccacttggcaaatgtgctcactgatccgcctccagggccaccgccatgtcgagccgcggtgggaagaag

SEQ ID NO: 462881 - DNA, 50 bp, Homo sapiens
cttttttcttgctgaaacattaaaagctaatgtcaaaccccgaaattcca

SEQ ID NO: 462882 - DNA, 80 bp, Homo sapiens
cagtcttcccgcgtccgccgattcctcctccttggtcgccgcgtccttggctggcgtggcatgacgtccttgatgaaggc

SEQ ID NO: 462883 - DNA, 74 bp, Homo sapiens
tgtcgaatatcaaattggggaagtacactgaggaggggacggctccgtcttcacattgtgcacagatctgagga

SEQ ID NO: 462884 - DNA, 80 bp, Homo sapiens
ggcagcctccacccaccggcccaccctacatttagcgcatcatgtgatccggatgtgttcagagcaacattgttttgttg

SEQ ID NO: 462885 - DNA, 100 bp, Homo sapiens
agaaaagaggagagttgaaagagaacaggatgatcacggacgtgcagctcgccatcttcgccaacatgctgggcgtgtcgctcttcttgcttgtcgttct

SEQ ID NO: 462886 - DNA, 101 bp, Homo sapiens
acttatgtttgtaaatgtgagtggaagccatgaggccaaaggcagttgtattggctgtcagcttctttgggcaaagactgagtcatctctgcattctcagc

SEQ ID NO: 462887 - DNA, 100 bp, Homo sapiens
cgcgcgccgctgcatcccgcgtccagcacctacgtcccgctgccgtcgccgccgccaccatgcccaagagaaagctgaatgcaatatccatacatctcct

SEQ ID NO: 462888 - DNA, 75 bp, Homo sapiens
gagagttcttccaaagtcgcccaggcaccttctccatgcattgcaagggttcgggggtgattaaagctggctttg

SEQ ID NO: 462889 - DNA, 100 bp, Homo sapiens
ggcacccccggccccgtagggtccccggcgccaggccacccggccgtcagcagcatgcagggagtctgcactatggaaacaacctgtcaatccagctcaa

SEQ ID NO: 462890 - DNA, 90 bp, Homo sapiens
caggagttcatctacccggagaagcaggagccctactcggcaggtcctcagccctcgctctcgctggcggagcagcacctggagtcgccc

SEQ ID NO: 462891 - DNA, 83 bp, Homo sapiens
cctggagatgctgttcataagatctacccaagtgcatatataaagaaagcgatagatctggctagcaaagcagcgcaagaaga

SEQ ID NO: 462892 - DNA, 100 bp, Homo sapiens
gaagcaggaatgaaagtggcgctttctccgccccagaggactactgagcccagccaggctgtatgccattgctgccaaagaaaaagatattcaagaggag

SEQ ID NO: 462893 - DNA, 98 bp, Homo sapiens
gcctctgtgtcattgtcaacaaccacagctttacctccctgaaggacagacaaggaacccataaagatgctggtgatcagaggactgctgaaattttg

SEQ ID NO: 462894 - DNA, 100 bp, Homo sapiens
cctgcagctgcccggcaggcaggggaggcgccgtctgtgagaaggaggcggggtttcaccatgttgcccagactggtcttgaactcctgagcttaagcaa

SEQ ID NO: 462895 - DNA, 100 bp, Homo sapiens
gcaacagcttcgaaggcgaccttccttgctttcagaatttcacccaggttctgacaggttaatttggagtggcccctggagtcagtttcctacaccatcc

SEQ ID NO: 462896 - DNA, 96 bp, Homo sapiens
cggccgtggcggtgaagcgtgaggccggcatcgtctttccgtcctctgaggcgacggccgcggctgcacaggacaatgaaggccaaacagctctac

SEQ ID NO: 462897 - DNA, 82 bp, Homo sapiens
aaccatccacacatcataaagctttaccagggtatttgaagtataccatacaactgttttgaaaatccagcgtggacaatgg

SEQ ID NO: 462898 - DNA, 100 bp, Homo sapiens
ccctgtgggacacaatgcccccaagccaagtgcaagatctgtgaatgggcgtttgaaagtgagccactatttctccagcatatgaaggatactcataagc

SEQ ID NO: 462899 - DNA, 75 bp, Homo sapiens
gatcccgccccgcccggagccccggcccccacaggaagccatcttcgacaagagcacagggaaggttgttttgaa

SEQ ID NO: 462900 - DNA, 100 bp, Homo sapiens
gatctctccttaacgcctttcaccattaagaggaaagcgatggaggagctgagcgctgatgaggaatcgagtcactggcatttacgaactcagcttatgc

SEQ ID NO: 462901 - DNA, 100 bp, Homo sapiens
gtgaaagcactaacaaacctaattgatcagcagcagcagaaaatcattgccctgcagagtggtttacaagctgacaactaaactggtaggtggcagcaga

SEQ ID NO: 462902 - DNA, 100 bp, Homo sapiens
ccactattttcttcctgcccctcgttgatgagagcattcgaagtgacctcagcagggcatccagagccctgagaccagtgcaccgctgctgcctgaggcc

SEQ ID NO: 462903 - DNA, 83 bp, Homo sapiens
caattagaaggcggctgtctagagacaatgcagatcttcgtgaagactctgactggtaagaccatcaccctcgaggttgagcc

SEQ ID NO: 462904 - DNA, 90 bp, Homo sapiens
tggtgaaggtccggggcttgccctggtcttgctcggccgatgaagtgcagaggtttttttctgatgctgagatgaatcgtcacctgtgtg

SEQ ID NO: 462905 - DNA, 75 bp, Homo sapiens
gcttgcggctagccggaggaagctttggagccggggcagcccaatggatccaatggtgatgaagagacctcagtt

SEQ ID NO: 462906 - DNA, 90 bp, Homo sapiens
cccgggagacgccccccagccacagcccacctgctgagggggacccccgcacccaccagtcttctggaagtactactatgggcattactt

SEQ ID NO: 462907 - DNA, 83 bp, Homo sapiens
cgctgttttgccggaggagcccctcaggccgaactgtggctgcaccatctgtcttcatcttcccgccatctgatgagcagttg

SEQ ID NO: 462908 - DNA, 100 bp, Homo sapiens
cttgcacccacccagccccgccgtcgccccgccgcgccgcgctccaaccgcctcctcctcctcagtaacgcgggtgtcatggagaaactccagctgggcc

SEQ ID NO: 462909 - DNA, 88 bp, Homo sapiens
ttggaagcagccgatccagcctgcggagcctgtggggcaggtattagaaaactactcggatgctccaatgacaccaaaacagattctg

SEQ ID NO: 462910 - DNA, 100 bp, Homo sapiens
ccacgttctccaatgcaatgctgtttgccctgaacatcatgaattcccaagaaggaggaaacagagcaaatgcagcgttacaatcaaagacttattgagg

SEQ ID NO: 462911 - DNA, 98 bp, Homo sapiens
tcctactgtaaaggagatgggttagatgttggctccaacaaaagaatcctctgaagaggagtatgactctggagttgaagaagaaggatggccccgcc

SEQ ID NO: 462912 - DNA, 100 bp, Homo sapiens
tcgacacgagcgacgtcctgcagcagatcatggccatcaccgaccagagcctggacgaggcacaggccagaaggacagaataacgggctcccagattcac

SEQ ID NO: 462913 - DNA, 100 bp, Homo sapiens
agtagagccatgagccgatgtgttttggagcctcgccccccggggaagcggtggatgtggagacctttggcgacttggcctttggcgacatcttcctcca

SEQ ID NO: 462914 - DNA, 51 bp, Homo sapiens
ggctttggggtcaagcagattgatggttcacaggcaccagccagaccccct

SEQ ID NO: 462915 - DNA, 100 bp, Homo sapiens
accaagcagcgcatgttaacagaagactgggagctttttaaacaaagaagattcattgaagaacagagaatctggacgaggctagagaacagaaagaaaa

SEQ ID NO: 462916 - DNA, 87 bp, Homo sapiens
cgttgacaaggcactgctttttcatgacgaaactatgttccaacttcctgtcaacaatcttggcagtttaagaaaagcccggaaaac

SEQ ID NO: 462917 - DNA, 82 bp, Homo sapiens
ctgccgtccttctccactttcgccagcccgtgccgcgagcgcggcctgcaggagcatcaggacagaaaggtgtccaagtacc

SEQ ID NO: 462918 - DNA, 98 bp, Homo sapiens
cgctctctcagcagcttccaagagaaccaatggaatggagaagtgcaaagtttattgaaggtgttgtgttacagttattagaggaagatgatgttgtg

SEQ ID NO: 462919 - DNA, 100 bp, Homo sapiens
tggaagatggaaggaaggagcgcagcgggccctcatctttgtgtcccatggagccggagagcacagtggccgctatgaagagctggctcggatgctgatg

SEQ ID NO: 462920 - DNA, 80 bp, Homo sapiens
ttctctcttcccttcagggagagaaaatgatgcatcctgttgccagcagtaatccagctttctgtgggcctggcaagcct

SEQ ID NO: 462921 - DNA, 100 bp, Homo sapiens
gccagggtccctgaagagggaagacacgcggaaacaggttcagtggtcacctcacaatgagactattttagcttccagtggtactgatcgcagactgaat

SEQ ID NO: 462922 - DNA, 101 bp, Homo sapiens
ctccaacaggattccatggtagctgggatgttagggctcagacttaattcagtgcacaaatgagatgaatgtgaacatcccacagttggcagacagtttat

SEQ ID NO: 462923 - DNA, 90 bp, Homo sapiens
ggttgctggaaaactctccgtctttgctaatggagtcgtgacttcaattcaggtggtagctgagcacccagatgcttcaggtgaggagat

SEQ ID NO: 462924 - DNA, 73 bp, Homo sapiens
tttaatggaaaatcgcttggttaaaacctgacacttttaacagatgcagcagcttttttatgagaattacgag

SEQ ID NO: 462925 - DNA, 90 bp, Homo sapiens
agaagggatacccttccatttcaaagaacagaatgctaaggaagctgtggcaagccatgaccttgcctcctttcctggagttcggtgtcc

SEQ ID NO: 462926 - DNA, 100 bp, Homo sapiens
cctttggtctttccagaattagaccagcagctacaggatgtaatccctgttcattactacttaatacctccaccaacaaagactaagaatggcagcaaag

SEQ ID NO: 462927 - DNA, 50 bp, Homo sapiens
tgtagcatcacatccagaaaccagggaaggacaccactggtaccagctgc

SEQ ID NO: 462928 - DNA, 101 bp, Homo sapiens
gtctcccttaccaaagagaagaaccactctctggcgctggggtgacctgctggctgggcctgtaaggtatggtttaggaatgatttattacaagcaagaaa

SEQ ID NO: 462929 - DNA, 101 bp, Homo sapiens
agtccatgttcaggaaatggctgaagttcgtaaagatgatgttgtaacagtgactggatctagtgaaaagccatttgatgtatgcggtcagagaagaagtg

SEQ ID NO: 462930 - DNA, 100 bp, Homo sapiens
cctgtacggtggccagaattcttcatggtggcatgatccatagacaaggaagagaacaggccagtgggtgggttttctcttcgtggttcactcgtgtctg

SEQ ID NO: 462931 - DNA, 75 bp, Homo sapiens
tgatatgcttgcttctattaaaagtggtgatgaacttcaggatgagggcatcgttataacacccctgctcctgct

SEQ ID NO: 462932 - DNA, 74 bp, Homo sapiens
ggattgtcactccaacctcttttcgctgatccttcctgggcatcagtaaataggggaacgtttttatgtgatga

SEQ ID NO: 462933 - DNA, 100 bp, Homo sapiens
gatcagggaagcagcttaatttgctctttgcaaagccagagactgctgctactttgaaacgtacgatagaggccctgatggacagaggagcaatagtgag

SEQ ID NO: 462934 - DNA, 75 bp, Homo sapiens
cgcagcgagctggagccgccggaggttatcaatactctggctgaccatcatcatcgtgggactgactttggtgga

SEQ ID NO: 462935 - DNA, 83 bp, Homo sapiens
gaaagatctaccttctggaagctactactacgtggtgcttggaaaggctatgactttgcagccgtcctggagtggttcgcgga

SEQ ID NO: 462936 - DNA, 83 bp, Homo sapiens
acaagaacgcactttcctcccaggatgcagcagtctcggccctggctgctctatgcagtgaatattacatgaaggagccgggg

SEQ ID NO: 462937 - DNA, 50 bp, Homo sapiens
cttcctcctcctcccgcgacgggtgtggatgaatggaacatagctcgcct

SEQ ID NO: 462938 - DNA, 100 bp, Homo sapiens
agaagagtgagagatggaacccgaagaagaaaggattcgttacagccagagattggtcttggatgtgctggatctgtgtgtggttgttcttcagtcccac

SEQ ID NO: 462939 - DNA, 96 bp, Homo sapiens
atttttgatgcggagtgtgcactggagaaacttactaccgatcatgagaaagaccctgactgcacctgccccatttgctgatgaaaccaactgcca

SEQ ID NO: 462940 - DNA, 82 bp, Homo sapiens
atgcccgagtgcagacctgcatcaacctgatcaccagccaggagtacgccgtcaaggtaatagcctgcagctggtgttttga

SEQ ID NO: 462941 - DNA, 83 bp, Homo sapiens
catccaccacctgcccagtcctggcccgcacaacttccccctcgggctccactgccagttcaaggagcagggacaagttacag

SEQ ID NO: 462942 - DNA, 100 bp, Homo sapiens
ctaggcggcggcggaagatggtgccgggggtcgctggctctgctgctgccgccggcgaaggaggaggcgttgccgggtacaaacccgtagtgctgatgaa

SEQ ID NO: 462943 - DNA, 90 bp, Homo sapiens
ctcccagctacgagctgccccaggactatgatgatggatatggcactgcttatgatgaacagagttatgattcctatgataacagctata

SEQ ID NO: 462944 - DNA, 82 bp, Homo sapiens
cgggggaggcgacgctaagttgctgatcgtggcggagccttcacgtaaatgggtccagtcatgcctcccagtaagaagccag

SEQ ID NO: 462945 - DNA, 74 bp, Homo sapiens
gccagggtccctgaagagggaagacacgcggaaacagaggagaggagacgccgtgagcgggacgaccagatgta

SEQ ID NO: 462946 - DNA, 87 bp, Homo sapiens
ccctgtaccgccggcttgccacagtccacatgtcccggagtctgggatctgccgatatgggggatatgaagacccctgattttgatg

SEQ ID NO: 462947 - DNA, 82 bp, Homo sapiens
ccaggctttggtcaccagtgagctggagaagttccagataaaggctggtggtgggagaatgctatcgctgccctgtttcgga

SEQ ID NO: 462948 - DNA, 100 bp, Homo sapiens
cagaatcaaaacctggggaaagaccttaggtattcagacttaattcagtgcacaaatgagatgaatgtgaacatcccacagttggcagacagtttatttg

SEQ ID NO: 462949 - DNA, 100 bp, Homo sapiens
caaccagcagcagccatcatggaggcctccggtgtggctgtctctgatggtgtcatcaaggtgttcaacgacatgaaggtgcgtaagtcttcaacgccag

SEQ ID NO: 462950 - DNA, 82 bp, Homo sapiens
gccagggaaccctggtcaccgtctcctcaggcaagagcggtgagcggggcgcctatgcctccttcgggagagacgcaggcgt

SEQ ID NO: 462951 - DNA, 98 bp, Homo sapiens
aacaaaggaaccacttgagaaaggaggcattgttctaattgatgcacataagaaaaatccagttacactcttaaaggaattgtcagtgataaagtctc

SEQ ID NO: 462952 - DNA, 124 bp, Homo sapiens
aactggcagaaggattgctttctcattatttgccagatctgcagagatcaaaacaagccctccaggaactcacgctgctttgctggctctgcaagaaaatggactagacgcaactacagtgaaa

SEQ ID NO: 462953 - DNA, 100 bp, Homo sapiens
tcatcacccctctcttccaaatcctgtagccataaatgtctggctaatggcatttacaggaggacagtcattttgtttactcattcagccctgttgcagg

SEQ ID NO: 462954 - DNA, 100 bp, Homo sapiens
aatatggtgtttcttctatcattccaaactttcagatctctcaagattcagtagggaacagatccggccccacatcgcaactcttcgtaagtacacctat

SEQ ID NO: 462955 - DNA, 100 bp, Homo sapiens
agacatatggaccacatgttcctgagcttgagatgctaggaagacttggagatcctgcatattttgatgaaaattggctaaacagaatcaaaactgaagt

SEQ ID NO: 462956 - DNA, 100 bp, Homo sapiens
ccttcctccccaactggcagcccgtgcagtgccgtggggccaattttttaactcagatcttgctgagaccaggagcatctgatttaacaggaagtttcag

SEQ ID NO: 462957 - DNA, 82 bp, Homo sapiens
gctttacccgactctttgggccgttatctcacctacgagttccagggagctctgtcctggtgaccgtgcccgggttatgacg

SEQ ID NO: 462958 - DNA, 98 bp, Homo sapiens
aaatgtaaaggccaagatccaggataaggaagtgactccttgagtgaactatgtgaaaataagcgtgacaatgtagtcctggcatttaaacaattgag

SEQ ID NO: 462959 - DNA, 100 bp, Homo sapiens
ctcagacaaagagtcagtgaggacttccttggccttagatgagtccctatttagaggaaggcaaatcaaggcgatctgggtgtccatagtggggaagaac

SEQ ID NO: 462960 - DNA, 98 bp, Homo sapiens
caaaactcatttggcagcagaggtgaggatggaggaaccaggggacgccgctgtgccattgaagcagatatgaagatgaaaaagtgaagcctcagagt

SEQ ID NO: 462961 - DNA, 100 bp, Homo sapiens
gcgctgcccgggcggtgtctcgggaccccgacagctgcggttggcgggcaccataggccgaagcacccgggataacttcaaactaatgtgtactaatgcc

SEQ ID NO: 462962 - DNA, 82 bp, Homo sapiens
cccctcaccccccgagagccggaacctcggagagctgatagatcggtttgtggctgatttcaaagcccaggggccacctaag

SEQ ID NO: 462963 - DNA, 82 bp, Homo sapiens
ggggagccggtctatggactttccgaagacgagccaagtatcttcaagaccttctcatggagagtgtgaatttttcccccgc

SEQ ID NO: 462964 - DNA, 50 bp, Homo sapiens
gccctggccatctaccatgtggctgctctttggcgtaaattgcaatcgat

SEQ ID NO: 462965 - DNA, 75 bp, Homo sapiens
acgcttgtacagtggaaaccagcccaagctacaaaagtggtggcccagtggagcaggcagcaagtaaaggaggag

SEQ ID NO: 462966 - DNA, 75 bp, Homo sapiens
tcaggagctgtatgaccttaacgtggagctctccaaggtatgagcattctccaaggaaaggatgacatatttttg

SEQ ID NO: 462967 - DNA, 98 bp, Homo sapiens
cagagattgagacagcaatggtcacctctataggaatgcacctgttgaaagatgcatgagtgtgatgcagtccgggacacagatgatcaagctgaaac

SEQ ID NO: 462968 - DNA, 74 bp, Homo sapiens
tacaccctcaacaaacaccagcgctttgggagcatcagatccatgctgctgctgactcggagccccacagcttg

SEQ ID NO: 462969 - DNA, 98 bp, Homo sapiens
agcatttccatttaatatgcaaggtggtcgagatatccagtctgacggagcacttgctgacggaatgtgacaaaaaagacgggtttggaaagtgttac

SEQ ID NO: 462970 - DNA, 117 bp, Homo sapiens
agatggacggagccgacgaatccgagaagctagactgtcagttctccacgcaccaccccagacctctggcggctagtcaaatgaagcagtgggatatgctgcattttcaaaaagcct

SEQ ID NO: 462971 - DNA, 90 bp, Homo sapiens
agcgcatgtacgtacaggacctgcgcagcatcgtggagagcaccaaaagtggtctgaagtcagagaagttggtggaacagctcactgaat

SEQ ID NO: 462972 - DNA, 95 bp, Homo sapiens
ccatgtcttcatttgcttccacaagaaccgcgaggacagagggaaagcaggcaggatgggagagtcgccgatagaaccacctcttccctgcctcc

SEQ ID NO: 462973 - DNA, 100 bp, Homo sapiens
ataccaagctcggatccctgaatttgatccaggtctggagcccggcactgtggtcataacagagcaggcagtggatacctgcttcaaggcagagtttgag

SEQ ID NO: 462974 - DNA, 100 bp, Homo sapiens
tgagaactcaggaaggtgggaaaattcatctggaattactacccaatcaaggaatgctgatcaaacacagctccgaattgattccttctttagattagca

SEQ ID NO: 462975 - DNA, 74 bp, Homo sapiens
cgcgtcccgctcgctgggagagagacatagggcctgattacattccaacagaggaagaaaggagagtcttcgca

SEQ ID NO: 462976 - DNA, 74 bp, Homo sapiens
aacagctgaccctacatgatgagaggtttgagaagagcaatggtggaacaaagcggcaaaagatatcccatcaa

SEQ ID NO: 462977 - DNA, 90 bp, Homo sapiens
aagggagacaaagttgaaaacaaagtgctggccaaatttgagtttcatcatggtgactatgaaaaacagtttctgcatgtactgagccgc

SEQ ID NO: 462978 - DNA, 75 bp, Homo sapiens
cctggaggagagtgctggtgaatggcagcaattaccagctctggctgggtcgccacaacttgtttgacgacgaaa

SEQ ID NO: 462979 - DNA, 75 bp, Homo sapiens
gtggaggaatcctgatactgagcgaatagcctaacatggcagaccagagacagcgctcactgtctacctctgggg

SEQ ID NO: 462980 - DNA, 75 bp, Homo sapiens
catgggctctatcaaggaaaacaagtgtctgcttatgtcggatacttatccgctttttccccttggagtcctggc

SEQ ID NO: 462981 - DNA, 119 bp, Homo sapiens
gtagagtttgcatatatcaactgtggccttaatgagcatgttgacagcatcgatgctagacagacaggcagctgcaatgactctccgcacggtattattgtcattgcaagcactattgg

SEQ ID NO: 462982 - DNA, 100 bp, Homo sapiens
tggctcccactcagagaatgcgctccacgccagtgaggaggaggaaggcgagggaggcaaggcccagaggtcatcatcagatttgaaatatttaaagtgg

SEQ ID NO: 462983 - DNA, 100 bp, Homo sapiens
tggtcagcagtgatgatgaagagcctagcacctcttatactgatgtttgtggaaggaatgcttaacatttgttacaatgccgttgatcgtcatattgaaa

SEQ ID NO: 462984 - DNA, 99 bp, Homo sapiens
attcctgaaaccactcaagagtcataggattagatgatccaagtcaccaagaaattactgtctcaagtgatacgagaggccaatgagacttgaaccctg

SEQ ID NO: 462985 - DNA, 100 bp, Homo sapiens
cttcttagttgatgatttagttgattctctgaaggtaaagatgagcccagcagctacacatgtacaacttgcaaacagccattcaccagtgcatggtttc

SEQ ID NO: 462986 - DNA, 86 bp, Homo sapiens
ccgtccatcatagtcaactgcgtggaagagaaggcagaggtggaggagacactgaagcgactgcagagccagaagggagtgcaggg

SEQ ID NO: 462987 - DNA, 131 bp, Homo sapiens
ggtggctcccccacggctggtgatgagcatccgggatgggatccacggacccctgctgttcctatctgacccacgaagccagtggcttggatgaacagggagaagcaagagaagccttcctcaatggcagc

SEQ ID NO: 462988 - DNA, 82 bp, Homo sapiens
tgactttgagccctaccttactggacagtcaaatcagattcatctgaaaactacattaagatgaagacctttgaaggtttct

SEQ ID NO: 462989 - DNA, 99 bp, Homo sapiens
ctggatgacaatggagacctcaagaaggagatcaatgagcggctgcttactgctcgacagcactggagaggggtctcctgaaaaccctgcagaaactgg

SEQ ID NO: 462990 - DNA, 100 bp, Homo sapiens
cagacggcgagacctcctgcacagatgaagttggagcccttgtttttgacattggatcctatactgtgagagctggttatgctggtgaggactgccccaa

SEQ ID NO: 462991 - DNA, 90 bp, Homo sapiens
cgggccggcgagcgcgtcgccaccatgccctgggcgctgcctatggcacagccaagagcggtaccggcattgcggccatgtctgtcatgc

SEQ ID NO: 462992 - DNA, 82 bp, Homo sapiens
taaatcacctgagattttagtctgtccgcggttccactttataactcctgcactgcggtagacaaatttacatgtattggag

SEQ ID NO: 462993 - DNA, 83 bp, Homo sapiens
tgactctactggaacctgagatgttaatgatggcagtacagtcagatattttggagtgtatacaataatatccctcctgtgac

SEQ ID NO: 462994 - DNA, 75 bp, Homo sapiens
caggagtcatcggacgccagaatctgcgagcagctgatgcagctgtacagtgcgcgccagcggcggcggctgaac

SEQ ID NO: 462995 - DNA, 96 bp, Homo sapiens
gtgtgacccagaggcgccgctcaccctctctgagctggtggacatcataggcccacccatggccacccatggaccagtcagcttgtacttcctccc

SEQ ID NO: 462996 - DNA, 75 bp, Homo sapiens
gaaaaattacctctttatcttgcatgaacatcttaattttcagaatatggttgagccccttatacccacgaattg

SEQ ID NO: 462997 - DNA, 96 bp, Homo sapiens
ctctctcggagaattccccttcctagaaggaccaagatggcagcagtgactctgctggctttggcgtatacacagagtttcgctcttgttgcccag

SEQ ID NO: 462998 - DNA, 100 bp, Homo sapiens
gttagattctatggaaagttctgagacatcttgtagaggaggcaagtgaggcctatctggttggcctttttgaagacaccaacctgtgtgctatccatgc

SEQ ID NO: 462999 - DNA, 100 bp, Homo sapiens
gctcgagtgcctgcaggatgtgagggagagagaagaagaaggaggttcctgctgtgccagaaacccttaagaaaaagcgaaggaatttcgcagagctgaa

SEQ ID NO: 463000 - DNA, 73 bp, Homo sapiens
cggcgccatggcagggcttgcaggacactggggttgggaaatcaagcatcgtgtgtcgatttgtccaggatca

SEQ ID NO: 463001 - DNA, 82 bp, Homo sapiens
tggaggaggtgcagctcaacttctaccagttcctcggggtgcagcaggtctactggggttcatcccatctgagccaggcctg

SEQ ID NO: 463002 - DNA, 51 bp, Homo sapiens
ggtgcacctggtggagcgagtgcagagcatttaaatcaaacggtattgaga

SEQ ID NO: 463003 - DNA, 100 bp, Homo sapiens
aaccttctctctttcgctctttggactaatgggagttgcttttggaatgaatttggaatcttcccttgaagagataaagtcctgtttatgaccacagctg

SEQ ID NO: 463004 - DNA, 100 bp, Homo sapiens
cgtccgcccactccgcggcgttcggggaaatggctgcgagaccctagaggcctgcgatttatcagcgatgctggttagtattcaagaaagcttcaagcaa

SEQ ID NO: 463005 - DNA, 90 bp, Homo sapiens
tatgagtacctttgtcatttggaagaagcgaagagtgaagccatgtccctggagggagatgaatgggaactgagtaaagaaaatgtacaa

SEQ ID NO: 463006 - DNA, 123 bp, Homo sapiens
cagcgcgtgcgggtgctggacgagaggaaggcgctgatcccctgcaagagaaccacccgttcctattgccccacctcagctcgcctctgtaggagccacctacctgtggatacagctcaacgc

SEQ ID NO: 463007 - DNA, 100 bp, Homo sapiens
acagtgacgtgttctccaaataccagctcgacaaagatggggttgtcctctttaagaaggttgtcggggccaaagtggtaacgaacgcccgcagcccggg

SEQ ID NO: 463008 - DNA, 82 bp, Homo sapiens
gagacctgaagctgtattccctagagggttacgggacagatgcagttatctacattaagagtttgctgcaacagggtgtgct

SEQ ID NO: 463009 - DNA, 75 bp, Homo sapiens
gacaagatcattgcaggatccttgtagtaactgcccagctgcttcccaccctatgcgttgcatgaactacatcac

SEQ ID NO: 463010 - DNA, 96 bp, Homo sapiens
gcggcggcggtggcatctgcggccatggcggcgactactgccaaccccgctttggggccatttggatcacacgatgttttttcaagattttagacc

SEQ ID NO: 463011 - DNA, 75 bp, Homo sapiens
ggagaatcgaggagctcaacaaggaacctcaggcccagagtccccaggagggagcagccggcaacacggtttccg

SEQ ID NO: 463012 - DNA, 97 bp, Homo sapiens
aggaggagtgggggaggcgaacagtctcgttgctgcctctgtgtacgctgaggggggaggagtacttcttgcaagcagagctgacaagcaacgtctt

SEQ ID NO: 463013 - DNA, 75 bp, Homo sapiens
cgcaccatggaggaggacgacagctacgaccatcatggagcagttcaaccctagcctccggaacttcatcgccat

SEQ ID NO: 463014 - DNA, 82 bp, Homo sapiens
cctgtctgggtctcagccgccaaagaccccgtccggtaggaggaagagtttgccagcccgggatggaggcttcaccctggaa

SEQ ID NO: 463015 - DNA, 99 bp, Homo sapiens
ggcagtcctgtttccctgtaagatgctcctgccagcatttgtcttcattgggctggaacaggatgactgctgtggctgctgtggccatgaaaactgtgg

SEQ ID NO: 463016 - DNA, 100 bp, Homo sapiens
tcgcgaggctgtgaagctgcttcgccggtgcttggcggacagaagaggccagcggaagcctgccacctcctatgtgcggaccaccatcaacaagaatgct

SEQ ID NO: 463017 - DNA, 82 bp, Homo sapiens
caagtcctcgctggactgctcagggtgccagacctcatcgttgatgataattagaagcatgctttccactgaacttcccgac

SEQ ID NO: 463018 - DNA, 80 bp, Homo sapiens
cctagacctggaatcgcccaagtccctctactcgcgagactcgctctttactgagcgtgtttgaagaagatgctggcacc

SEQ ID NO: 463019 - DNA, 75 bp, Homo sapiens
cagcctcgggtgcaatcctggagccccccagtgagggctctgaaccaagttgtcctatgggacaagattgttttg

SEQ ID NO: 463020 - DNA, 75 bp, Homo sapiens
atgccacccagaaacctactggagttacttattaacatcaaggcttttgaggagcagctgcagagctggtgccag

SEQ ID NO: 463021 - DNA, 104 bp, Homo sapiens
acagacttgccgcggccccagagctggcgggagggagaggccaccagcagcgcgcgcgggagcccggggaacagcggttttgagcaaaattttggactgtgaag

SEQ ID NO: 463022 - DNA, 90 bp, Homo sapiens
ggaccctgctgatagtctggggatatgagtttgtcttccagccagagagcactgattctggcagcgaggtgctccctgactccttcccgt

SEQ ID NO: 463023 - DNA, 133 bp, Homo sapiens
ttgatgctgttatggtttgcactggacatttcctgaatccccatttacctttggaagcctttcctggcttgtgtagcctgccctcagagagaactatgatgatggacattatcaaaaggaatgaaaaaagaat

SEQ ID NO: 463024 - DNA, 95 bp, Homo sapiens
cagcaaatgccagaagaagttccagccccagctcctgctcaggaaccagtgcaagccttgtcttaaaagaagaagcatctgattaccttgaattg

SEQ ID NO: 463025 - DNA, 100 bp, Homo sapiens
cctgaagcacaagtgatccacctgcctaggtgacccaaagtaatgggattacaggtatctttcagatgaaggcattgaagcttgcacaagctctccagac

SEQ ID NO: 463026 - DNA, 98 bp, Homo sapiens
cttatatggtgtgattctgctgttcagcaggagaaaatttcagagctgcaaaattatcaggacttgattattcttagaaatgcacttgacctgctttt

SEQ ID NO: 463027 - DNA, 75 bp, Homo sapiens
tggcaagaacacagaagcaaggttgaattgtttcagaaacattggcaggatggccatgagctacccccaccaatt

SEQ ID NO: 463028 - DNA, 100 bp, Homo sapiens
gacctcaatagcctcatctcttcagtgtctgcactgcttggggaggaagatgaagaggcactgcattatttgaccagagttgaagtgacagaatttgaag

SEQ ID NO: 463029 - DNA, 82 bp, Homo sapiens
ggtcttcatttgtgaatacatagttggaatcgaagcctcttaaaatggcagatgacttggacttcgagacaggagatgcagg

SEQ ID NO: 463030 - DNA, 75 bp, Homo sapiens
gcattatccaacggctgctggaagcgtggtgatggtggatgaggcacacgaaaggaccctacacacagacattct

SEQ ID NO: 463031 - DNA, 88 bp, Homo sapiens
agggggcggagtgaggcgcagtcgttcgcccaggctttggcccggcttccggagagctcccagctcctccagcagccgacaggaggcc

SEQ ID NO: 463032 - DNA, 83 bp, Homo sapiens
ccaggaccctctggaagcctagaaatgggtgtgctgatctgcaaaccctggacacaatgcagccaattgagaggaaaagacag

SEQ ID NO: 463033 - DNA, 75 bp, Homo sapiens
acaatcaagaaatgcagaaacgtaaagaaatgcaattgaggacttaaacaggcacaatcaaaaccatctcagtca

SEQ ID NO: 463034 - DNA, 88 bp, Homo sapiens
gtcacaagattgaccacattgatcacagtgctggagaatctggtaaaagcaccattgtgaagcagatgaggatcctgcatgttaatgg

SEQ ID NO: 463035 - DNA, 50 bp, Homo sapiens
gtgaagcagcaggcgccaagtgatgaagatgcttttggacccaatgggag

SEQ ID NO: 463036 - DNA, 83 bp, Homo sapiens
aaataccgtgccctgaggttggacgtggggaatttctcctggggctcagagtgggtctccttatgccagggaccaggttaccc

SEQ ID NO: 463037 - DNA, 100 bp, Homo sapiens
caagaaccagttaactgtacaaactacacagctcatgttgacttacagaggttcatgtctgagttactgaccttcttaaagcctcatcttcagccctctc

SEQ ID NO: 463038 - DNA, 98 bp, Homo sapiens
gtccagagactcatccccgccctgtgggagaagcacagtccacaggtcaactgcaacttggcctcttgatccaccaaaggatgagaaacaagggtgga

SEQ ID NO: 463039 - DNA, 104 bp, Homo sapiens
gcaaagggaaggtggtggacctgctggcgcaggacgccgacatcgtgtgccgctgccagcccctgggaatcgtggcggatataataggaggggcaacatgccac

SEQ ID NO: 463040 - DNA, 100 bp, Homo sapiens
aaaagatgatgagaaataaggacaaaagccaagaggaggacagttcgctacacagcaatgcatcgaggcccagttaaaggcccaagaggaggaacgtcag

SEQ ID NO: 463041 - DNA, 82 bp, Homo sapiens
ttctgcttcctgctgctctgtctcagcgccgcctccctgcttcttaacaggttttaaaatcaaagatgggaaaatcggagaa

SEQ ID NO: 463042 - DNA, 83 bp, Homo sapiens
ggaggcagctgcggtggcagctgctgagttctcggtgaagataacgaaggaggcccaacttcattcaataaggagcctgacgg

SEQ ID NO: 463043 - DNA, 97 bp, Homo sapiens
cttgtcaccgacagggcgattgcagtgcgttccggagagtagttatcttgatggaattagaagttttgaagtcagctgaagcagttggagtgaagat

SEQ ID NO: 463044 - DNA, 117 bp, Homo sapiens
cgaagttccggcgcatcctccacaccgacaccatctggaggaggcgttgccgtgaggacaatgcagatcttcgtgaagactctgactggtaagaccatcaccctcgaggttgagccc

SEQ ID NO: 463045 - DNA, 100 bp, Homo sapiens
accagcattgcctcgaccacactcacctctctctgctcatgcagggaactgctcgcagaaagaagaaggtggttcatagaacagccacagcagatgacaa

SEQ ID NO: 463046 - DNA, 90 bp, Homo sapiens
caacggcagaagcttcaccacaaaagcgaaatgggcacaccacagttgcatttgctggtctggcctttgcgtccttctacctggcaggga

SEQ ID NO: 463047 - DNA, 82 bp, Homo sapiens
tagccggagtgagaagcaagaaggccctggacacagcaatatctctgggctttcacagaggaatgtttgctgggggattgaa

SEQ ID NO: 463048 - DNA, 96 bp, Homo sapiens
agggaggaggaggcggcagcggcggaggaaggcggcgcaccccgagagatgatatcatcaagttgaatcgaaaggaagggaagaagcagaattttc

SEQ ID NO: 463049 - DNA, 75 bp, Homo sapiens
tttccctctccctttccctaagagtcatcttagtgggatttggggaagcaacagggctgtgtggggtaacctgcc

SEQ ID NO: 463050 - DNA, 101 bp, Homo sapiens
gggtaccatggacgtgggcgaacttctgagctaccagatcacgagctgctcaggcaagagctgaacacgcggtttctggtgcagagcgccgagcggcctgg

SEQ ID NO: 463051 - DNA, 82 bp, Homo sapiens
cgccgctgcctcagtcatgccggtccagctgggagctccccgacctccaggagggcaagatccaagccatcagcgactcgga

SEQ ID NO: 463052 - DNA, 50 bp, Homo sapiens
gcgaccgcggcgcgagtcaccatgccgcttacaaacacgcagatggcaag

SEQ ID NO: 463053 - DNA, 100 bp, Homo sapiens
ccgggcttttgctgatatgcatgcatgtaccgaccttctgaacaaggccaacacctatgcagagtatctgactgtcttctctcagatgattgcatttcat

SEQ ID NO: 463054 - DNA, 98 bp, Homo sapiens
ggagggaagaagtccttccagcaatgataagcatgtaatgagtcgtctttctagcacatcatcattagcagtaggataattgcggactgaaccctcgg

SEQ ID NO: 463055 - DNA, 100 bp, Homo sapiens
attggagcaagggaaagaaccctggctggggaaaagggaagtgaaaagagatctgttttcagggactgctgagatgtcctctattcttgaagagcgtatt

SEQ ID NO: 463056 - DNA, 97 bp, Homo sapiens
cggtattggatgattcgtatctaagactctgggacactcctgaagtcgggaaatgccgaggacagcatagcagctaagatcttatcctacaaccgag

SEQ ID NO: 463057 - DNA, 100 bp, Homo sapiens
ttacgcggatgtcggcgaagagttcaaccaggttagcatggcctcattgaaagaactagatcaaagactctttgaaaattacatcgagttgaaagcagat

SEQ ID NO: 463058 - DNA, 90 bp, Homo sapiens
acctcgacttggcctcccttctagagattactatgaatgcactggaatctataaagagcttatgtccctgatgccaaaaatgcacctact

SEQ ID NO: 463059 - DNA, 82 bp, Homo sapiens
gaaaattagtggaacaggctctctggattaatcgaattacagctgctagccaggaacatggactgaagtatccagcgctcat

SEQ ID NO: 463060 - DNA, 111 bp, Homo sapiens
gggagaagcatgggaaggaggccgagccgggatctcaggtcctcgggggcggcggccacgccaaggacgggaaagaaaccttgactggttccccaggatgagagccatgtc

SEQ ID NO: 463061 - DNA, 74 bp, Homo sapiens
gctgctgaagtcaaaggagcaattgctggtcctgagcctgaggcatctgggaacaaagtcagtcgccagtcagt

SEQ ID NO: 463062 - DNA, 76 bp, Homo sapiens
caaaggagaaatgagcaatccgcggtctttggaagaggatggagatgaagatgaggaagctgagtcagctacgggc

SEQ ID NO: 463063 - DNA, 59 bp, Homo sapiens
aggagcctttcccaccggagcctgcgaggagagaaagcttatagcttcattgcaccatg

SEQ ID NO: 463064 - DNA, 100 bp, Homo sapiens
aagtgcgcggcgcccaggcctcccagcagcagtcccgagcagagacccaacatgagtgaagtttcctgcaagaaacgggacgactatttggaatggccag

SEQ ID NO: 463065 - DNA, 75 bp, Homo sapiens
atcaacctgtcatctacattagcttagcagtgtctgcaaaaacgaatcttttcctacaacctgttaactgactgg

SEQ ID NO: 463066 - DNA, 75 bp, Homo sapiens
ggaagcaaaaggcagactttttgatattcagagccttggaagtcaacactgtcatatacgctcaacggcaagaaa

SEQ ID NO: 463067 - DNA, 96 bp, Homo sapiens
cggggccatgtgcaggaccctaacgacaggcgcctccggcccatttacgattatggtgacaagctgaacatggagctgagtgagaaatacaagctg

SEQ ID NO: 463068 - DNA, 100 bp, Homo sapiens
tgctctgatgacggcactgttagaatctgggactttcttcgttgccatgaggaaagaattctccgaggaagcggctcagccccagggcagcacatcagag

SEQ ID NO: 463069 - DNA, 82 bp, Homo sapiens
agaaggtgaaggtgctcacgggcacggcagttggaattgatcacaccttttcagttgtacttcaatcctgaattaatcttta

SEQ ID NO: 463070 - DNA, 98 bp, Homo sapiens
gcggcgctcgccgccttgggcaggacccacctcgccttcctcccggcgtggcagatgctccaggttgaattgaccaaagcaatggtgatggagaagcc

SEQ ID NO: 463071 - DNA, 100 bp, Homo sapiens
cagggattacataaacctgtgtaccatgcactgagaactgacaatggcgaagcccttcccgaatccatcccatcagctcctgggacactgcctcatttca

SEQ ID NO: 463072 - DNA, 75 bp, Homo sapiens
gcctccccaatagctgggattacaggcggcatcctcatgtatggggccctggtgctcttcgagtctgagttcgtc

SEQ ID NO: 463073 - DNA, 132 bp, Homo sapiens
gtggagactctctgaaaagcgtgggctccgtggcctccggcgcggccgcggcgggtcggtctcctaggtgtgaccatgaagctcatggatgaggtcgccgggatcgtggctgcacgccactgcaagaccaac

SEQ ID NO: 463074 - DNA, 75 bp, Homo sapiens
agtcggcgagcccccgcggcgacagaagaggatgtggagaactttgacgtgaccaacttgtctcaagacatgctg

SEQ ID NO: 463075 - DNA, 95 bp, Homo sapiens
agatgttttcccattgttcaaggacaaaggtggcccagaattttccagtgccctgaaaaatatctacatcagcatcagcatctgcgtcaccattt

SEQ ID NO: 463076 - DNA, 75 bp, Homo sapiens
tcaggtggtggtggccaagtatgcgcccagcggattctacattgcctccggaggctataccccagctttggcctg

SEQ ID NO: 463077 - DNA, 100 bp, Homo sapiens
aataattctgaaagaaagaaaacaaagaaaaacatactccagaattcctaatagaacagtgtttgtagaagtctataatctgactgcagacccagaccag

SEQ ID NO: 463078 - DNA, 83 bp, Homo sapiens
ctaggtgagtcgcggtgggtcctcgcttgcagttcagcgaccacggtgtttcccattaaacactaccaggacaaaatcaggcc

SEQ ID NO: 463079 - DNA, 74 bp, Homo sapiens
aggcttgaagatttctatgcaggaccccaaaatgcaggtcttccaaattatgaaaattggcaattgggcgatgt

SEQ ID NO: 463080 - DNA, 51 bp, Homo sapiens
gacatgcgatggtagatcaacccccaggccggaaggtggtggtcgtacgct

SEQ ID NO: 463081 - DNA, 99 bp, Homo sapiens
tatttggtcactgaggaagagatcaatcttaccagagggccctcagtgcacgatctgattttctggagagatgtgaagaagactgggtttgtctttggc

SEQ ID NO: 463082 - DNA, 100 bp, Homo sapiens
cttgggtagagatgatgcgcttctcagaaatgtccaggcagacatctggtccctgggcataacagctattgaacttgcaagaggggaaccacctcattcc

SEQ ID NO: 463083 - DNA, 100 bp, Homo sapiens
tgaccactggcagcctatgctcacattgtccctgtgtctagcagtttcagaggcaagaggaggaacgacgtagaagagaggaagagatgatgattcgtca

SEQ ID NO: 463084 - DNA, 74 bp, Homo sapiens
cggtcatgtacccggtggactcggtgaagaaggacagaataacgggctcccagattcacaagccccaccaagag

SEQ ID NO: 463085 - DNA, 74 bp, Homo sapiens
ggtagccatggcacaagaatataaattcagacctaccttcagtcaacaaagccaattattgacttatatgaaga

SEQ ID NO: 463086 - DNA, 83 bp, Homo sapiens
aacctggcatatctgggcgccaagccgcggagcctccagacggaggctgggaggcggcagaatgcagccagaggagggcacag

SEQ ID NO: 463087 - DNA, 82 bp, Homo sapiens
cagtccacccaccgccgccgcctcccagccgaggtgctcggtggagtcatggcagtgccctttgtggaagactgggacttgg

SEQ ID NO: 463088 - DNA, 80 bp, Homo sapiens
agaactgaccagagctgatcccgagcagcgtcatgtacccctagttgctggagaatgtaaccctaatccataaaccagtg

SEQ ID NO: 463089 - DNA, 110 bp, Homo sapiens
cagatattcctccccagcatgtcagcatgaccaagcgcctctactacctctggatgtacctgcgtcatgcgggcctgggaccgcagcaagcccctgctcttctgcccggc

SEQ ID NO: 463090 - DNA, 96 bp, Homo sapiens
agctccagctaggatgatcgaggttgtttgcaacgaccgtctggggaagaaggtccgcgttaaatacatgcgtcgggatgtccaggaaatttttcg

SEQ ID NO: 463091 - DNA, 82 bp, Homo sapiens
aagaatgaagaaccctcaagcaatcatattccacatgggaaaggaagagagagaaaatccttcaaaacggagtagaattgaa

SEQ ID NO: 463092 - DNA, 75 bp, Homo sapiens
cttgctagaggttgaggacgctcaaattcagaaggagctggcggacatcactttagaccctccacctaattgcag

SEQ ID NO: 463093 - DNA, 75 bp, Homo sapiens
gaaccgaggggagcctgatcctatcgttttgacgccaggtcaaaatgcagatcttcgtgaaaacccttaccggca

SEQ ID NO: 463094 - DNA, 96 bp, Homo sapiens
ctgctcgttcctgacagaatgcactgacatggccgtcttctgtctgctgtgtgggaagcgcttccaggcgcagagcgcactgcagcagcacatgga

SEQ ID NO: 463095 - DNA, 100 bp, Homo sapiens
ccatgatcctgctggtgggccagtacagcaccggcaagaccaccttcatcagaagcaccaaagcatcttcagtgctaagacctggaaaagtcgaagtccc

SEQ ID NO: 463096 - DNA, 83 bp, Homo sapiens
gtttggaagagaagattgctgcgctctttgatcttgaatattatgtccatcagacaatgagttacaaggcactaatagttctg

SEQ ID NO: 463097 - DNA, 82 bp, Homo sapiens
aaacccactgaagacgtctgcgtgagaatagagaccaccgaggttgatgataattagaagcatgctttccactgaacttccc

SEQ ID NO: 463098 - DNA, 80 bp, Homo sapiens
tgcggctgcgtggggctcggccgcgcggactgaaggagactgaaggccgggctctcgccatgggtcactgtcgcctctgc

SEQ ID NO: 463099 - DNA, 83 bp, Homo sapiens
gtggtacttctcctagttgcagtcaggcttcatacgctattgtcctgcccagaaagcatgggattatggcaaccacagaatct

SEQ ID NO: 463100 - DNA, 100 bp, Homo sapiens
gcagccccctcctggcgacccgcaatccacaggtcctggctaccctgggaagagacaagaagtaaatgaagaaagaggaagattccaggacctagatatg

SEQ ID NO: 463101 - DNA, 87 bp, Homo sapiens
gtggggagtttcatcctagcgggaagtaccaccaagaacagggaaggacaagccagaggctggaggaagatacctgcagaacacaga

SEQ ID NO: 463102 - DNA, 75 bp, Homo sapiens
actttcttccagcttctgctgtccttctttgtggagagcaaggccccatcacaggtatatggaggagtgacctac

SEQ ID NO: 463103 - DNA, 75 bp, Homo sapiens
cttgatttgtttttggcatactacgtgcaggagcaagccgattacacctcaacaagaaggcaactgacaaacagc

SEQ ID NO: 463104 - DNA, 75 bp, Homo sapiens
cttggatgactctgactctcatttagaaatccaaaaggtggaatgcaagctttaggacttcacctgacagatcca

SEQ ID NO: 463105 - DNA, 100 bp, Homo sapiens
aagagccaaggaataaacatgcaatgaacccaaaaggggaagtgggaatgtccttggcatcattgtgacgtgtgtggcaaaccttcgacttcattttgcc

SEQ ID NO: 463106 - DNA, 83 bp, Homo sapiens
ggagaacgcggctaaagttctgatggaaatctggcattttttaaagtttgcgccccacaaagaggaaatattccaaaggtact

SEQ ID NO: 463107 - DNA, 74 bp, Homo sapiens
cagttcatcaacatcaactacgtccctctgaaggttggatggcaagcatgtggtgtttggcaaagtgaaagaag

SEQ ID NO: 463108 - DNA, 51 bp, Homo sapiens
tctgagtacggtctcacagacaacgttgagattaaaaggagcccaagcccc

SEQ ID NO: 463109 - DNA, 75 bp, Homo sapiens
cgctgatgaacttgtacttcacgcaggtcactggagttctggatgattgcttgtgtgatattgacagcatcgata

SEQ ID NO: 463110 - DNA, 75 bp, Homo sapiens
aaaaatgtcacctttgaacatgttaaaggggaatgtatcctgtcaggtataatgtcagtgaatggcaagaaagtt

SEQ ID NO: 463111 - DNA, 50 bp, Homo sapiens
cctacccctacatcggacacccccaagcttcgagagctgtgcccaggagt

SEQ ID NO: 463112 - DNA, 90 bp, Homo sapiens
attggatttgatcttccatatggataagaaggacagaataacgggctcccagattcacaagccccaccaagaggatcaccccaggaacgc

SEQ ID NO: 463113 - DNA, 49 bp, Homo sapiens
cggggatcttccaagtctggaaagtgtagcacaggcggagtgcagcgga

SEQ ID NO: 463114 - DNA, 58 bp, Homo sapiens
tttacagaagccgagacccacagctgtgaggaaaatagcagctgaatactatgacaac

SEQ ID NO: 463115 - DNA, 75 bp, Homo sapiens
tgaatttctctctgtaaaggagcctttccgctgtgcccattgccattactcctgcaacatatctggctctctgaa

SEQ ID NO: 463116 - DNA, 76 bp, Homo sapiens
aagatgatgatatccttctcaaccttgtgggatgtgaaaactctgttactgaagtgagcggggacgcgctgcagct

SEQ ID NO: 463117 - DNA, 89 bp, Homo sapiens
aaagccagaatggcatccagagagaggctctttgaactttggatgctttattgtacaaagagcaacagaacttgctggaacgactgtgg

SEQ ID NO: 463118 - DNA, 51 bp, Homo sapiens
cgtgtttctggaaagtgacagcagcacagcccgttcttcgccgagcagctg

SEQ ID NO: 463119 - DNA, 75 bp, Homo sapiens
ctccagactcgccgtggtcaagttcaccatgagagggctgacccagctggatgttgacagccacctggcccagtg

SEQ ID NO: 463120 - DNA, 100 bp, Homo sapiens
tttcagttgcagactttaggcctgaaagaaataagcgggttttgaaaacaaaaaaaagaaggagtggaagagggggccaggatccaggcctccatcccca

SEQ ID NO: 463121 - DNA, 51 bp, Homo sapiens
ggtacctgccggacacgcttctcttggagtctgctgtaggctttgaatacc

SEQ ID NO: 463122 - DNA, 118 bp, Homo sapiens
aggacacacagccatcatggaacccaaacctcagaagagtccagaaacccagatgcggacgaaaagccctggtgctttattaaagttaccaatgacaaggtgaaatgggaatactgtg

SEQ ID NO: 463123 - DNA, 98 bp, Homo sapiens
gggaagatcacctgtgcttcagcccagggtcagaggtcaagctgtctgtgcctcatggaattgccaatgaagatattgtctctcaaaaccccggagaa

SEQ ID NO: 463124 - DNA, 98 bp, Homo sapiens
ctggaagccagagaccaacgagatcctgcacatgtctttgatggatgacatggctgtggatagtgatgaggaggtggattatagcaaaatggaccagg

SEQ ID NO: 463125 - DNA, 74 bp, Homo sapiens
tgacagagatctcagctgctgacaaagctgaggagtttcgcagggcccgcgccgcccgccgcgaagctgaggcc

SEQ ID NO: 463126 - DNA, 88 bp, Homo sapiens
gcaatgaatgatatcagacccagtgccatgagggaaatagcaattgatgtcccaaattcaagagaatccatcccattaaatgacctga

SEQ ID NO: 463127 - DNA, 90 bp, Homo sapiens
gccccagtgaccttgaacgattccgctctgcggcgggtgtccctaaactagcagtttagggtgtcagtagagaaatggtcagaaggaacg

SEQ ID NO: 463128 - DNA, 101 bp, Homo sapiens
tcccgcctccgtgtgccctggttgtgagaagacgtctgtgtcgtgcgagtgatcagcagctggactgtgccttggacctaatgaggcgcctgcctccccag

SEQ ID NO: 463129 - DNA, 75 bp, Homo sapiens
aacaatttacgcgccgtgtaactgtgaatctttcaaaggtaaagagtgtgtacaacagttagctgaaaacaccag

SEQ ID NO: 463130 - DNA, 90 bp, Homo sapiens
cctcttgcacatgacctgacatttagattctggatgcgggtacccttggtggcaccagaggacctgagagatgatataattgagaatgca

SEQ ID NO: 463131 - DNA, 82 bp, Homo sapiens
cgaactccaagggacgacgctcgcggaagcagaggtttggggtacatgtcccagagcaagcacacggaggcccgggagctca

SEQ ID NO: 463132 - DNA, 82 bp, Homo sapiens
caaccattgacgccatgtcgggttattcgagtgaccgagaccgcggccgggaccgaggttttagaaagagcgttttcgctac

SEQ ID NO: 463133 - DNA, 75 bp, Homo sapiens
caacatagaacctattatgctctatcagactgctgtggatgtttttcgaaggataattttggaggcagaaaaaat

SEQ ID NO: 463134 - DNA, 82 bp, Homo sapiens
atcagaatgccaaatgtgtttgcatgctgggtcaacaaaaatctctcatttacttcaccaccagcagtttcctcacaacagt

SEQ ID NO: 463135 - DNA, 82 bp, Homo sapiens
tggaggctgtgctgaagctgtctctcgggtcctcaataagcttggaggttgatggacggatggctacatggatgtgatggag

SEQ ID NO: 463136 - DNA, 100 bp, Homo sapiens
cttccacccttggccacctccccaggtgatgcctgaagctcaagggactgtgtccaccctcagatatggatcagaaactttcgaagttggtagaagagct

SEQ ID NO: 463137 - DNA, 115 bp, Homo sapiens
tcaagtgggcatcctgggagctccattccctaaggcactgtggttgcatcccagcgcattagctcagtggacctctcgtgttgtagcctggaacatctgcctgccaacctcttct

SEQ ID NO: 463138 - DNA, 98 bp, Homo sapiens
cagcttggagatgtcgtcggatggggaacccctgagccgcatggactcggaggacagccctcaagatgaaacacagaccgcaaatcataaaccagaag

SEQ ID NO: 463139 - DNA, 96 bp, Homo sapiens
gaaccaatcagaaacgctccctctacgtcagatttcttataggaaagacgtgcaggacacccacacgtacagtgcagaacttgaccgaccagacat

SEQ ID NO: 463140 - DNA, 100 bp, Homo sapiens
acagattactttgtgattgttagtggaacttctacccgacacttacatgccatggccttctacgttgtgaaaatgatgttcattctggacagagtggaag

SEQ ID NO: 463141 - DNA, 98 bp, Homo sapiens
gtggatatgacctgccatggagagccatctctttataattccctaagcatggctatgcagactctaaactgagattggggattttgatgaagccttgg

SEQ ID NO: 463142 - DNA, 100 bp, Homo sapiens
aaccctgctacctcgcccgggggcatcaggtttttctcccgctccagaaaaacttttacaaagttgatcacagtaaatggacaagaatatcatcttcaac

SEQ ID NO: 463143 - DNA, 83 bp, Homo sapiens
atccaagttaacccttaccacccagcagcagggcatcaaggaatagaaggacagtctgtggaagtttccaatattgtggacat

SEQ ID NO: 463144 - DNA, 75 bp, Homo sapiens
tgcagatcctgacctctctgatgagatggatcgggaactgtccaggtttattgctgccgggagactacactgcaa

SEQ ID NO: 463145 - DNA, 99 bp, Homo sapiens
gtcataaaataccagtggaggccgacttcttgtatgcatactccacagcacctgaaagaatgctttgtggaacttggcttaaatataggacaactgggt

SEQ ID NO: 463146 - DNA, 82 bp, Homo sapiens
cccgggaggaaggaacgaggcaaggagctaaagcagcgtgcgttcagccctggggtatcacctcttctgggctcaagatgga

SEQ ID NO: 463147 - DNA, 82 bp, Homo sapiens
agccgaggccgccgccgcctctccttgctgcagccatggagcgtccgacctccgatcatgaacgggcccctgcacccgcggc

SEQ ID NO: 463148 - DNA, 75 bp, Homo sapiens
caccctccacatccaacttcagagtggaagttgtggcaatttatgactatacaaaagacaaggaagatgagctgt

SEQ ID NO: 463149 - DNA, 82 bp, Homo sapiens
taccacctgtcgcggcgcgagacctctgagctggagtggaccagagaaattgcttgctttagatgaactcattgatagttgt

SEQ ID NO: 463150 - DNA, 74 bp, Homo sapiens
ggcagcttctcacgggacaacggaggggatgcggcctccaatcttctttatagctcatttgtggttgagcgaca

SEQ ID NO: 463151 - DNA, 100 bp, Homo sapiens
gcctttccagtgatgatgaagaaacttctacagatattactaatttcaatctggaaaaagttggaagcaaggtatcattctttcaaccagatgatgaagt

SEQ ID NO: 463152 - DNA, 50 bp, Homo sapiens
agaacgtctatgaagacattctagatactggatgatgaagctgcgcaaga

SEQ ID NO: 463153 - DNA, 75 bp, Homo sapiens
agaacatcggcaatgggattatttcctccccactgactggaaagggcaattgaaggaacagactaaaaatcgtgt

SEQ ID NO: 463154 - DNA, 82 bp, Homo sapiens
ttggagacttcaaagatgtattatggagtgaaggtacctgagcgcaggaaccatggtcttcattgctgcctcagcattagcg

SEQ ID NO: 463155 - DNA, 100 bp, Homo sapiens
gactcccgcggcgggaggagcctgttcccctgagctgcttttctaacccaaactgtatgtcttgatgacactacagtaaagtttgaaatatgggatacag

SEQ ID NO: 463156 - DNA, 100 bp, Homo sapiens
gctcggaggaatggcgccgccggtgtttcagaaatacaccaagtacagtaagcatgacatgaacaaagttctggacctggagttgaaaggtgacattgag

SEQ ID NO: 463157 - DNA, 82 bp, Homo sapiens
gggagctggacggcgagcgcgagcggcgcgagaaagaatcccagtcagaagttccagcctgccactgttctctgatgccatg

SEQ ID NO: 463158 - DNA, 75 bp, Homo sapiens
acaggaatatcgagagcgtcatgaacccgagctatagagaaaggagatgagacctcctgccccccgaggtctgca

SEQ ID NO: 463159 - DNA, 51 bp, Homo sapiens
gccttcccatcaccatcacagagagcgatctttggacatcagacagtgcag

SEQ ID NO: 463160 - DNA, 75 bp, Homo sapiens
ccccaaagatgagatttacctgtgagatgtttcatcccaacaaacttacgatttccaacggccccaaaaaccact

SEQ ID NO: 463161 - DNA, 87 bp, Homo sapiens
gggacggtggacaagaagatggtggagaagtgctggaagctcatggacaagaccccccagttcccttcaggatgatggaggatgcgg

SEQ ID NO: 463162 - DNA, 133 bp, Homo sapiens
tgagaaccctacttgcctaaatgaggaatgtctttcctaccatctaaaatacgaaggtttctggctgggtgtatgaaatctgaagagaagtcccttggtgtgggattacatacattttgcacaagagtatttg

SEQ ID NO: 463163 - DNA, 51 bp, Homo sapiens
tctaaatacaagagtggcctattggtggatcttcttgttccaaccaaagtg

SEQ ID NO: 463164 - DNA, 75 bp, Homo sapiens
gaacgaggcaaggagctaaagcagcgtgcgttcagccctgggaatgtgaaagatgttgcagaagtgttccagaag

SEQ ID NO: 463165 - DNA, 100 bp, Homo sapiens
atatcgttccttggaagttctaatcggatctggctataatacccctgctgacatttggagcacggcatgcatggaagtcagcctcataccaaaccatccg

SEQ ID NO: 463166 - DNA, 75 bp, Homo sapiens
gccaacgccaccgccacgctacacacaggatctggttctgctgccggagaaggcaaacccgctttgagtgaagag

SEQ ID NO: 463167 - DNA, 100 bp, Homo sapiens
tccatgcctctgttcctcctgctcttacttgtcctgctcctgctgctcgaggacgctggagcccagcaagaaagaagttttcccatttccagaagttagc

SEQ ID NO: 463168 - DNA, 146 bp, Homo sapiens
cggctgcaggaagtggctttttatcagttgcaacaggactgtgacctgagctgtcagatcaccattcccaaaggtcagaaagcaacattgaatgcagaagaaatggcggacttctacaaggaatttttaagtaaaaattttcagaa

SEQ ID NO: 463169 - DNA, 105 bp, Homo sapiens
gtggttgcaacggagataaattcccggaaccgcgattcggcgtgtcaggtgtggacactgccagcggctgcagccgacttggaatgacctgggagacaaatacaa

SEQ ID NO: 463170 - DNA, 90 bp, Homo sapiens
ggaaaatcatattatagatggagtaaaggtgtctggagtagatttgcagaatgcctcacacagcgaagcagttgaggccattaagaatgc

SEQ ID NO: 463171 - DNA, 75 bp, Homo sapiens
tgtagtatctgcattcctagcctctatgataggccctcaggctttgtacatcttagattcccatgtagaattact

SEQ ID NO: 463172 - DNA, 78 bp, Homo sapiens
ttggagcagtagctctgctaattgggccaaatgctcctttaatttttgaacgaggaactatcgtgagcataggtgacc

SEQ ID NO: 463173 - DNA, 100 bp, Homo sapiens
tccatatgagcatttcagtggagaagaaaagaaactttgctacctgggaactgaagactacttaggtatgggctacgtgagttcgtggtgattgcccctg

SEQ ID NO: 463174 - DNA, 51 bp, Homo sapiens
caacttcctggagaagcagaaaggcactgttacatggacacagaacagtat

SEQ ID NO: 463175 - DNA, 74 bp, Homo sapiens
ccgggatgcaggaggagagcctgcaggctgtgagccgtgagctttgaggcggtgggatgtgtcagcagaatgtc

SEQ ID NO: 463176 - DNA, 75 bp, Homo sapiens
gaagaagaaagaagacgccacagacagcagcgcagtaccaccttccagagatgccctggagagtgaatttgtttc

SEQ ID NO: 463177 - DNA, 100 bp, Homo sapiens
tcgccaggccccaggcctcctgtgggacgccagtcaccagcaggagcagccaaccagcagcagccatcatggagcctttctgaagggcctgagtgacaag

SEQ ID NO: 463178 - DNA, 101 bp, Homo sapiens
gtggagctggtcgcagatcctgagacccggacagtggcagtgaaacagagtacaggggctcaggtccaggtggcaggggatatgctacccaactcaactga

SEQ ID NO: 463179 - DNA, 101 bp, Homo sapiens
ggacacccagcggtctgacatcgcgacgctgctcaaaacctcgctccggaaaggggacacctggaaacccttttccaaagagaaatgaagaagaaaactgt

SEQ ID NO: 463180 - DNA, 76 bp, Homo sapiens
caaagttgcccactcatttaactgcacgccaatagaagcacatgcttgactatctttggcagaggaaccttcgcca

SEQ ID NO: 463181 - DNA, 100 bp, Homo sapiens
atggtatatttgcagccagtactctatatgaacaatccgtctggatcacggatgtaggaagtggtatgataagtattatcagcaacataatagttctggg

SEQ ID NO: 463182 - DNA, 97 bp, Homo sapiens
tttggaccaaaggcctgtgtgctgcagaacccccagaccatcatctggagaagaagcaggcgctccctccattccagccacagatcacagacgacta

SEQ ID NO: 463183 - DNA, 98 bp, Homo sapiens
tgcggcgggacaagcgcgacgcccggcgcgagctcaagctgctgctgctcgcccgagcgggaagaagttccgcagcaagccgcagctggcgcgctacc

SEQ ID NO: 463184 - DNA, 101 bp, Homo sapiens
ttccctgcacagaaggattccgaggctggaatggacagtgccttggtgggaacctaaattattctgcaagacaaagggaagaaataaaattttcccatact

SEQ ID NO: 463185 - DNA, 82 bp, Homo sapiens
tgtgctgtgacccgcactggtcgtgggagtcacctgaaaggcaagaaatggaaggaagcagccaccctcgccatggcctccc

SEQ ID NO: 463186 - DNA, 100 bp, Homo sapiens
gtccagggagagcctggggacgacttttacatcatcacggagccccaactggaccctaggcaaaagtgagtggcactcctctgccaggactccaggcaag

SEQ ID NO: 463187 - DNA, 100 bp, Homo sapiens
catcatccgcctcaccacgagctacctgaagatgcgcgccgtcttccccgaagagtggagcctttcaggctggcatggagagcttaaggggcaactgaag

SEQ ID NO: 463188 - DNA, 132 bp, Homo sapiens
ccgtggcctcgctcgtctgcctgctgcgccacggcggccggacggtggagaacatgagggccaattcctgtccccccagcagcatggcatcgtgtgctgaaccctctgagccctctgccccactgcccgccg

SEQ ID NO: 463189 - DNA, 132 bp, Homo sapiens
ctttctttaagaagacatttgtcaaactcaacaaattgaaggttaacaccttaagagttgtagttactgaccagcatttgacattgtgcagcaaagaaatggttatggagaagcccagtccgctgcttgtag

SEQ ID NO: 463190 - DNA, 90 bp, Homo sapiens
tgggatgagggaatacaagtgtcatgtctgtggtttattgaagtcaaactgtgatggctggctgcttggaacatcatcatctattaaaaa

SEQ ID NO: 463191 - DNA, 100 bp, Homo sapiens
cagcactgccaaatagcagaagaataccatgaggtcaaaaaggaaatcaccctgcttgagcaaaggaaaacccattaaaagagccagtaaatcctgtgga

SEQ ID NO: 463192 - DNA, 75 bp, Homo sapiens
gtttctgtgcttaaagccatcttccaggaagtgcatgtacaggtgtttgacttcacctttagcccagaagagatg

SEQ ID NO: 463193 - DNA, 100 bp, Homo sapiens
aggcagtcaaccctaaacagtggactcaacttcaaagacgttctcaaggagaaggcagacctggcttttgccttatgaacagtcctctcttttggaactc

SEQ ID NO: 463194 - DNA, 97 bp, Homo sapiens
atgcggaagaagctaatcttgtacttcaagaggaggaatcacgctcggaaacaatggggggatatgagactttctactcggaatatcctgagtgttg

SEQ ID NO: 463195 - DNA, 120 bp, Homo sapiens
gaggacgtgcctcgtggtctaaagcttcggcacaagggcccaactggaattccacttacggagactctgacctgtttttgttggacacccgtgtagtatgggcctcagaagaaggctggc

SEQ ID NO: 463196 - DNA, 118 bp, Homo sapiens
agcagccggggcgagtatgtggtggccaagctggatgacctcgtcaactgggcccgccgggaagctcttcgtgggcggtcttgactggagcacgacccaaggtaggtggggaaggggt

SEQ ID NO: 463197 - DNA, 90 bp, Homo sapiens
ctgaatcaaggtccagagaaggtggaggaatcctgatactgagcggtgtcctgtggccaggcggaaagcagtgagaagcccaacgctgag

SEQ ID NO: 463198 - DNA, 98 bp, Homo sapiens
ctcattatagcctcaaactcccaggctcaagcaatcctaccatgtcagccttcccagtagctggaactacagaaacaagggcagctgcgttccctgca

SEQ ID NO: 463199 - DNA, 100 bp, Homo sapiens
gagctacaatgagcagcgcatcagacagaacgtgcaggctttggtcctcttagatgtcactcctgaccagtcaatggtagatgaaggaatggctcgggaa

SEQ ID NO: 463200 - DNA, 74 bp, Homo sapiens
tggttgagtgtacgaagaaatggtgatctgtgaaaatggttcgctattcacttgacccggagaaccccacgaaa

SEQ ID NO: 463201 - DNA, 100 bp, Homo sapiens
gtcaccgaggaggctgctgcgctcctgccccacgccctgggcccttgaaggtgacagagctgaatgaacctctctccaatgaagatcgaaatctcctctc

SEQ ID NO: 463202 - DNA, 75 bp, Homo sapiens
tttatagaagtgtcaagaggctaggtattcctgacaggataatgcagaattgatcacttctctgcttcacagtgg

SEQ ID NO: 463203 - DNA, 100 bp, Homo sapiens
aaaaccacaaatgtttttctgttttgcctgaatacatgatttaaacaagagatttccacagaaggtgcgcttcccttcccacttcagctctgacttgaag

SEQ ID NO: 463204 - DNA, 88 bp, Homo sapiens
agaaagccaaggaggcagcaggggccagcaaggccctgaatgtgactgtggacgtgcagaaaccagactgtgatgactgggagagcgg

SEQ ID NO: 463205 - DNA, 75 bp, Homo sapiens
gctaagagctgtgtcaacacatcagatgatctctctttcctcatcatggtacatttgaagtaataaagaatacag

SEQ ID NO: 463206 - DNA, 100 bp, Homo sapiens
gccctgcaagcgataggagtggaagcccaccagaaaacgttgtgtgacgtgatcctcatggtccaggaaagaaagatacctgctcatcgtgttgttcttg

SEQ ID NO: 463207 - DNA, 78 bp, Homo sapiens
tttggaactgtcaggtacctcaaagcgggccagtgtcattcaaagatgtggctgtggatttcacccaggaggagtggc

SEQ ID NO: 463208 - DNA, 153 bp, Homo sapiens
ctcagtgccgggagggcaacgcagtcgccgttcgcctgtggctggacaacacggagaacgacctcaaccagggagcctccaaggcaggtcatcctgacactgcaacccactttggtggctgtgggcaagtccttcaccattgagtgcagggtg

SEQ ID NO: 463209 - DNA, 83 bp, Homo sapiens
cgccgcgggacctctccgggccatgggaggaggaaggtgaggacggcgatccatcgtcagggcccccagggccgtgtcacaag

SEQ ID NO: 463210 - DNA, 100 bp, Homo sapiens
gcttacgcagaaggacctggccacgataagatgctcccaagtcccttgcagctctcttcagaagaaaaatcactagtgctctgctcttgccataatacca

SEQ ID NO: 463211 - DNA, 95 bp, Homo sapiens
gtttccgccagctgcacctacgaaagcaggtgtcttacaggtggggcagctgcagctctcccacaatctgagtttggtgatcctggtaccccaga

SEQ ID NO: 463212 - DNA, 83 bp, Homo sapiens
gaaaagacagagtaagaagactcccgaggtgctgactgggttacttttttaaacactaggaatggtaatttctactcttctgg

SEQ ID NO: 463213 - DNA, 75 bp, Homo sapiens
ctccgagctggggttggacgctgccagtttgcacagcagcaggatctatctggttcaatagatgacctccccatg

SEQ ID NO: 463214 - DNA, 75 bp, Homo sapiens
catgggagaaagacactgtttcacttgtctcaggtcttctttgtgatccgcctcattgctggccctgctgccaac

SEQ ID NO: 463215 - DNA, 87 bp, Homo sapiens
aatgcagtttacggtgaagacctgccttccctctgggaatctggagcttcagtaacaggggattcccatcgaaacgtcatcatgtgg

SEQ ID NO: 463216 - DNA, 82 bp, Homo sapiens
ggagcttctcagaagacagagggttttcttttgagcatacattcctactccaatctactttggagcagtcattgacaccacc

SEQ ID NO: 463217 - DNA, 89 bp, Homo sapiens
tgatgtcttccagactcggtgctgtacccgccaggctgggaggcggcagaatgcagccagaggagggcacaggctggctgctggagctg

SEQ ID NO: 463218 - DNA, 100 bp, Homo sapiens
gcgtagtcagcttcaaggagcaatgcagcagtttaaccagagattcatttatggggctgaccggttccctgatgtgttacctgcttctgctactgatcca

SEQ ID NO: 463219 - DNA, 75 bp, Homo sapiens
gcctccttcgccgcgccccacttgctcgtgcactttacacacatgaggtcaaaatgcagatcttcgtgaaaaccc

SEQ ID NO: 463220 - DNA, 100 bp, Homo sapiens
tgtggggcctctacatgtccctggttaatgtgggccatgtctggattttttatcaagcagaaatgcatcgaacaacgagaatcaagatcactgagctaaa

SEQ ID NO: 463221 - DNA, 75 bp, Homo sapiens
cctggcgcccatccgcagcaaggacgtccgcagcagtaagactttgaccccgacgcaggcttcagtgattgccgc

SEQ ID NO: 463222 - DNA, 82 bp, Homo sapiens
gacgaccggatcctgaggaggcagctgcggtggcagctgctgagttctcggtgaagtttggtgaggattcatcaacctccag

SEQ ID NO: 463223 - DNA, 100 bp, Homo sapiens
gtgaaaggccagccaccagttcaggagcacttgggagtgatctagctccaaatgagaagatgaagcaagtgttaaagaagactatagaagaagccaaagc

SEQ ID NO: 463224 - DNA, 100 bp, Homo sapiens
tgaagcagaaaaactgtataaaaacatcttacgcgaacatcctaattatgttgactttgtagagtataaaattgcggatatgggacacttaaaatactac

SEQ ID NO: 463225 - DNA, 80 bp, Homo sapiens
ctctgcagccacatactatccgtttgttcaggaaccaccagtgacagattcaacccaatggaaatggattgaaagagtga

SEQ ID NO: 463226 - DNA, 100 bp, Homo sapiens
cttcagccatcagggcagcatccaggtggacaggccgtgcataaggctgtgctgaccatcgacgagaaagggactgaagctgctggggccatgtttttag

SEQ ID NO: 463227 - DNA, 75 bp, Homo sapiens
tgagtaaacagaccaagttgggggctggagagacttcttcatgaaggaatacagggacagtcacaggagacagga

SEQ ID NO: 463228 - DNA, 74 bp, Homo sapiens
gtgtgtggggtcctgtcactatttggtacaatgactcttcttgcttttcacctaagttgaataagcaccctgtg

SEQ ID NO: 463229 - DNA, 85 bp, Homo sapiens
aactagagctgaaacaatgggacccatgggttgaattcaattcgtcataatctgtccctacacagcaagttcattcgtgtgcaga

SEQ ID NO: 463230 - DNA, 82 bp, Homo sapiens
gagagatggaacccgaagaagaaaggattcgttacagccagagattggtgcggtcttgctctgttgcctaggctggagtaca

SEQ ID NO: 463231 - DNA, 85 bp, Homo sapiens
gatgggatctttccggatcaatccagatggcagccagtcagtggtggaggagaaagttcagaaggactcactgaggcccgaggct

SEQ ID NO: 463232 - DNA, 75 bp, Homo sapiens
aggatgtggaggaggtcacttaccgagccctgagtcaccaggagactaaagtccatcaaaaacatccagaaaatt

SEQ ID NO: 463233 - DNA, 73 bp, Homo sapiens
caagatccggacctaatatatatgaactcaggtcttaccaactccgagtctgcagactcgtgaatgacgtcta

SEQ ID NO: 463234 - DNA, 88 bp, Homo sapiens
ggaagtgcccgctgagaaagggagaagacagcagaggggttgccgagtgtcaggggaagctgatggagaatcgagctctggatccagg

SEQ ID NO: 463235 - DNA, 100 bp, Homo sapiens
ggactcatggaggctgagcatttattcagcatcttcatgatacagttaagaggaatcttgacagcgccacttcccctcagaatggcgatcaacagaatgg

SEQ ID NO: 463236 - DNA, 75 bp, Homo sapiens
attgaaaaatttgagaaggaggctgctgaggtgccagcacgtgccctttggagtagtacagggaatgaagactcg

SEQ ID NO: 463237 - DNA, 83 bp, Homo sapiens
cctgcagcgggagctggacggcgagcgcgagcggcgcgagaaatcttccgtgtgtgctaagatcgtgcagctcctggggcaga

SEQ ID NO: 463238 - DNA, 82 bp, Homo sapiens
ttcggtggactccttcggcagtccacccaccgccgccgcctcccagatttgctcccattcatgctgaggctccagagttcat

SEQ ID NO: 463239 - DNA, 75 bp, Homo sapiens
gtacgtgatatctgaacactcctcacttcttccccaggttaagaatagacccaccagcatttcgtgggatggtct

SEQ ID NO: 463240 - DNA, 100 bp, Homo sapiens
ggcccaaggatgccaaccggccttactgacctgctttcactgaccagccacagaaaggtgggcaccatgtccttgaagcttcaggcaagcaatgtaacca

SEQ ID NO: 463241 - DNA, 75 bp, Homo sapiens
atcaaacagctatggtgatgattagagacatactaatgtacatggtaacagctattgaacctataattaatcatg

SEQ ID NO: 463242 - DNA, 50 bp, Homo sapiens
ctgcccgccttggtcctgttcctggaactgaagcaggcccagaccctgat

SEQ ID NO: 463243 - DNA, 90 bp, Homo sapiens
accagttgaatcatctgttgaaatagaatgacatgatcactactcttggaatcaaagataaatccaaatactgcatatcagaaacaacag

SEQ ID NO: 463244 - DNA, 82 bp, Homo sapiens
ctgcgcgaagctggccaaagcctgcccagacggctcacctgtgcgggatggaacaaaaggtcaagaagtggcgctgacctgg

SEQ ID NO: 463245 - DNA, 100 bp, Homo sapiens
tgtgatctgcgctaggtggcatctcctctcacggatgcctcggaatagccaggccagaagaaggaaggcctgtggtgagtgggacaggaaatgacatcac

SEQ ID NO: 463246 - DNA, 83 bp, Homo sapiens
caaaatacgatcttatttcaatatggaatagaaggacagtctgtggaagtttccaatattgtggacatccgaaaagtatataa

SEQ ID NO: 463247 - DNA, 95 bp, Homo sapiens
gggagcttccgggagggcggctcgcagcgtgagtgcatctccatccacgttggccaggctggtgtccagattggcaatgcctgctgggagctcta

SEQ ID NO: 463248 - DNA, 100 bp, Homo sapiens
gttgtggcgaggcagatcctgccccgtggccgcggccgtctcgtagtatggtttgaagtggtgaacatggatttttctcggcttcacatgtacagtcctc

SEQ ID NO: 463249 - DNA, 100 bp, Homo sapiens
tccgtaaccttgtggagaagaccccggcgctggtgaacgagacagtgtctcaccttgtcacccaggttggagtgtagtggcacaatgatagctcactgca

SEQ ID NO: 463250 - DNA, 100 bp, Homo sapiens
gatctttccggatcaatccagatggcagccagtcagtggtggagtctattatcctcccagtccacaacgctgaaccgtggctggacgaatgtttgaggtc

SEQ ID NO: 463251 - DNA, 75 bp, Homo sapiens
tgatcatcagtatttgcctcctgtgtcccaaccggcctgagtcaagttttaaaatcaaagatgggaaaatcggag

SEQ ID NO: 463252 - DNA, 99 bp, Homo sapiens
caggccttgctccgcaggtaccaggtctgagagtcactggagctaccagaagcatcatggggccctggggagagccagagctcctggtgtggcgccccg

SEQ ID NO: 463253 - DNA, 100 bp, Homo sapiens
agtgagcagtccagaaagcggcttatcgaacagagccgggagttcaagaagaacactccagaggccatttgtgtaggaccagaaaacatgcagataatgt

SEQ ID NO: 463254 - DNA, 87 bp, Homo sapiens
cgcgggacggctctgtaggaaggaacttggttccccctccctcagcttccgccccaaaaggaagcaagatttccagatgtagcaaat

SEQ ID NO: 463255 - DNA, 98 bp, Homo sapiens
aggtgacagcaatcagctggcctggtttgatactgacctgtaaatcatcctttaggtcccaggtcaagttcatggacctgagatgctcgcaaggggga

SEQ ID NO: 463256 - DNA, 88 bp, Homo sapiens
cgcttctttaagggctacgggaagatcctggaggtggatctgaagaacgggcaaagccatgactacagtagtggtacatgtggactcc

SEQ ID NO: 463257 - DNA, 75 bp, Homo sapiens
cgaggtcatccttggcatgggctacaaggaaaacggtactaggttttgacaagcttgcatcatgcgtgagtataa

SEQ ID NO: 463258 - DNA, 100 bp, Homo sapiens
ctacaagccagcttgcaagaaattggggatcgtgtccgagctgcaggaggagggaatgaacgccatcaacctgcccctcagcccaattccctttgagctg

SEQ ID NO: 463259 - DNA, 71 bp, Homo sapiens
ccgcatcgagcccggcgacatgttgctgcaggtgaaatccgagaacagaatggagacagtcttgtccatgc

SEQ ID NO: 463260 - DNA, 100 bp, Homo sapiens
ttcgttcccgggtcccgcgcgagctttcccgggataagtagctttagcgatcgggagacagccgggcgctgcaaggcacattgcaagcaacccgtgcctt

SEQ ID NO: 463261 - DNA, 74 bp, Homo sapiens
tacctgcatgctaactgggtgttgcacagagatttggtgatggtgtttgtacatgctcgaaatgccactgtaag

SEQ ID NO: 463262 - DNA, 96 bp, Homo sapiens
aagaggtgcaggcctgggcgcagcgcaaggagcgggaagtgctgcagctgcaggtggagccgccaccaaaatgcagattttcgtgaaaacccttac

SEQ ID NO: 463263 - DNA, 117 bp, Homo sapiens
aagatccggggggaccggtgctggcgagacctcacctgcatggacttccactatgaggtatggacgacaaaggcgacccgagcaatgaggaggcacctaaggccatcaaacccacca

SEQ ID NO: 463264 - DNA, 100 bp, Homo sapiens
gacgccaaaggggacagcgagtcggaggaggacgaggacttggaaggtacgtagagaatacaggaaattcttcagagccaatgctggaaagaaaatctat

SEQ ID NO: 463265 - DNA, 145 bp, Homo sapiens
cagcagggacggcgcagtgttggcctgcatgcctgactgccacacacctccagaatcaggtgtctgaaaaaacattgacatcaccaatttcagcagcagctggagcgatggcctggccttctgtgctctgctccacacctacctg

SEQ ID NO: 463266 - DNA, 50 bp, Homo sapiens
attggcaagctacaataatggggccatctagatgctgggaagtccaagat

SEQ ID NO: 463267 - DNA, 83 bp, Homo sapiens
caaaacttcaggaatacctctgtagttttaagaggttagaagacttccgtgttgatgctttatcctgtggataaacgcagagt

SEQ ID NO: 463268 - DNA, 76 bp, Homo sapiens
aactcaggcttcaagcgttctcgaacccttgaggggaagttaaaggtctctggacctctgactgacactgtgcctg

SEQ ID NO: 463269 - DNA, 82 bp, Homo sapiens
gcgcgggaggtgttcgagaacgaccccgagacgcccccaaatacatcaagatgtttgtactggatgaagctgacgaaatgtt

SEQ ID NO: 463270 - DNA, 75 bp, Homo sapiens
caaggaggtgctgaagagcgaggaggacttccaatagtagtcagacattatcatcctgtcatactatggagccat

SEQ ID NO: 463271 - DNA, 100 bp, Homo sapiens
agattatagatgaagaagatacttacaccatgccctcaaacctgcaaatccaagagacacatctttggaagataagagagcttcttcaagaccaaaaaag

SEQ ID NO: 463272 - DNA, 100 bp, Homo sapiens
ccaccaccatctccatcacccaccaacaacaccacaataatccacagccaaggacccagatgatgtggtaccagttggccaaagaagagcctggtgttgg

SEQ ID NO: 463273 - DNA, 75 bp, Homo sapiens
tgcgacattatgcagggactgtcacctaccagtcccgcacggtgacctgccccatgtcagggaagcccctgcgca

SEQ ID NO: 463274 - DNA, 100 bp, Homo sapiens
caagcacgtgcctgactgggtttggattgtagtgggcatcctcaacttcgtagcctacactctagacccctgtaaaagagcccaacagtgaaaatgtaga

SEQ ID NO: 463275 - DNA, 100 bp, Homo sapiens
gatttttagcccagcccatgaagattatgtgtgacaatccaagaagccaaccaattaagaaccgaaaatacacatctggaaaaacagaccagagagctac

SEQ ID NO: 463276 - DNA, 88 bp, Homo sapiens
gggaacaacatacagtgacgcttcacaggggctactacaaagttctgggaaagggaaagctcccaaagcagcctgtcatcgtgaaggc

SEQ ID NO: 463277 - DNA, 75 bp, Homo sapiens
agaccagaccagaagcccttctgaattaaggcatcagtgtttttctgaccgaagttctcatttcctgacaatgga

SEQ ID NO: 463278 - DNA, 96 bp, Homo sapiens
cacagcaggaccagagtggaccagcacaccccaggagagaggactggggtcccaggagtaggaggaggccagactggcggccttgaaacggccaga

SEQ ID NO: 463279 - DNA, 74 bp, Homo sapiens
ggactgggaccagattacaagtctttccaattttcggctttgtgagaaaccttaccatcaaacacgatggccag

SEQ ID NO: 463280 - DNA, 98 bp, Homo sapiens
cgaccgccatggcgttcctcaaactccgtgaccagagtgctccaagctcccgaagccgaagtctcactttgctcccacatggaacacccaattctgcg

SEQ ID NO: 463281 - DNA, 80 bp, Homo sapiens
tgttgagaagtttattcagaaaagcctaaagtaagctgcaaattaggccggtctgcgtcgacgtcaggtgtgcctcctcc

SEQ ID NO: 463282 - DNA, 100 bp, Homo sapiens
tattgcactaggagtttttgctttagctggactaacagatttggatgtggttctgagacagtccctgtccctgatggcccacggagcgactcggtggaag

SEQ ID NO: 463283 - DNA, 97 bp, Homo sapiens
acgtgcagcctggcagtgcagtgagtttattaaccacttaacctctcagaactgaacaaagacaacattgttcctggaacgccctctttttaaaaaa

SEQ ID NO: 463284 - DNA, 90 bp, Homo sapiens
gtcagtgtggttgccttgcacgatgatatggagagccagcccctgattggaacccagtccacagatgcagccgtctgatgaggccacaac

SEQ ID NO: 463285 - DNA, 82 bp, Homo sapiens
ctcggcctcgcggcgacggcggcggtggcggcttggacgactcggagagccgaccatggtgaatccgggcagcagctcgcag

SEQ ID NO: 463286 - DNA, 90 bp, Homo sapiens
gcagtaggcaactttgcttccaaaagaagttaccaacatttagaatttctacttattctgaggatcttagaaatgaagttgaaaaattac

SEQ ID NO: 463287 - DNA, 148 bp, Homo sapiens
aggagctgcgggagcagctggagcgggagaaggaggcgctgggccagcaggagcgcgaacgtgctcggcagcggctttggggtggcctgccaccttggcgtccttacagacctgccgtgtgttggggtggccaagaaacttctgcagg

SEQ ID NO: 463288 - DNA, 100 bp, Homo sapiens
aaccaccgtttccatcgtctcgtagtccgacgcctggggcgatggatccgtttacggaggcactgaaagtattgaggacatcagagtttatgccctatgt

SEQ ID NO: 463289 - DNA, 75 bp, Homo sapiens
ccttcttcaagagaaatggagcccttctccaagtttgagttcatgatcgagtccatcctgtatgcccgggatgcc

SEQ ID NO: 463290 - DNA, 90 bp, Homo sapiens
attgaatctggtgttatcaacttaaaagatgccacctctaagattggcacttctctgtttgatgaagagggagccaagattgtcaaagac

SEQ ID NO: 463291 - DNA, 98 bp, Homo sapiens
agagcagggcggcggcgactcgtacctcctaaatggctctactttgaacctgctgggcaaggaagagattttcaaggaaaccatctaccgtgtgcaag

SEQ ID NO: 463292 - DNA, 100 bp, Homo sapiens
ggatctgtatcacctattcatggacagctcaccaaagctcatcgacaaggacacatggtgaaagtagattggctggatagattgacatttagagaaatag

SEQ ID NO: 463293 - DNA, 51 bp, Homo sapiens
tatccagaggagagagaaggagaatccagctgaagggaatacagtatttgt

SEQ ID NO: 463294 - DNA, 75 bp, Homo sapiens
cgcggggaccgctgtgctctcgattcctggtcgggtggcttccagtggtcttcagtctgtcgtgcaccgatgaga

SEQ ID NO: 463295 - DNA, 75 bp, Homo sapiens
ccgggagcaagctggtggactggctgctggctcaggggacggcaaaacagaacagaaaggcggagataaaaagag

SEQ ID NO: 463296 - DNA, 72 bp, Homo sapiens
tgcattactgcggatggaatgtgagactcaatgatgaggcacggcggctcattgctgatttggggagcacat

SEQ ID NO: 463297 - DNA, 53 bp, Homo sapiens
ccctgctggaggagcgcttccgggtggccataaaagacaagcaggaaggaatt

SEQ ID NO: 463298 - DNA, 52 bp, Homo sapiens
cttagattctacagagctggatattgagattactgagagtcttcagttacta

SEQ ID NO: 463299 - DNA, 75 bp, Homo sapiens
accagctcctggccagccgggaggacttcaggcagaaagtcgaggtactggaggcgcaaagaaggcatcagaagg

SEQ ID NO: 463300 - DNA, 138 bp, Homo sapiens
aggcatttgtcttctgtccatggtgctgaagtttattcactttcaaaccactttcagtaacagattttacagctgtaacttgtgtggatacaatgcaagaagaagaaggagataaaggggatgatgcctcagtcctga

SEQ ID NO: 463301 - DNA, 108 bp, Homo sapiens
atattagggtcagtagaatcatgattgatgatcattatgtccccactctacagatatgggccctcacattttccaaacctgtccatctgctaactattttgactgcag

SEQ ID NO: 463302 - DNA, 75 bp, Homo sapiens
agcttcaggggaaatggcttcagcgcagtatattactgcaggccataaaattttgagtagaaaaatccagaaatt

SEQ ID NO: 463303 - DNA, 50 bp, Homo sapiens
cgggagaacctgcggcggccggagcgagtaaagatggcaaaagtccactg

SEQ ID NO: 463304 - DNA, 95 bp, Homo sapiens
aaagcttggagataaagttgctttttactggttcattggcatggaaaaatgttcagtgggaggattagagttgactgaacagactcctgctttat

SEQ ID NO: 463305 - DNA, 128 bp, Homo sapiens
cctcgctcctcgatcgaggacgacttcaactatggcagcagcgtggcctccgccaccgtgcacatccgaatggagggagacgtggtgggcggtccttcctgtgacacgacccttgagtgacagttcta

SEQ ID NO: 463306 - DNA, 100 bp, Homo sapiens
gtggccagccggccgcccatcttccacaccatgtcggacggcgagggcccctccgccgacaagttggatggcttgaggactggtactaaaaggaaacgtg

SEQ ID NO: 463307 - DNA, 87 bp, Homo sapiens
cggtgcctgcggtgcctgagctgagtgaggccgaggccgggaggccgtgcccggagtccagttacaacacagggatcacaacaaaca

SEQ ID NO: 463308 - DNA, 101 bp, Homo sapiens
ggggcctgtatgtttatggagatgttgagatccgtgctcagctcacagagcagatgaaatgcctggaccagcagtgtgagcttcgggtgcaactgttgcag

SEQ ID NO: 463309 - DNA, 98 bp, Homo sapiens
ggaggaggccctggagctgatcaacggcttgagtgcagtggcgcaatcgtggctcactgcagcctccatctcccggggctcaggtgattttcccacct

SEQ ID NO: 463310 - DNA, 96 bp, Homo sapiens
catctgtgagcccgcggagtatacaccatgagcaaagctcaccctcccgagttgaaaaatgtgtatgtacagagaaccatcgctacatgaaattgg

SEQ ID NO: 463311 - DNA, 72 bp, Homo sapiens
ccagagagcgtcccagggcctgggactaccctcatgccacctacgctgctgccgtcctgttccgcatctccg

SEQ ID NO: 463312 - DNA, 100 bp, Homo sapiens
agcgccctgagagaacagggtggccgcttggtccaggtgaccgggttattgatgtgggatctgaatggcgaactttcagcaatgacaaagcaacaaaaga

SEQ ID NO: 463313 - DNA, 98 bp, Homo sapiens
gcccttttacttttgggcactgttgctggaatatttccgcacgtcagctaactgttcagatgatgcaaaatcctcagattcttgcagcccttcaagaa

SEQ ID NO: 463314 - DNA, 97 bp, Homo sapiens
ataattttcctcacacacagttacttgccaagacgattgaagagaacctccatttctaccagaatcctttgaccgaattcttctggatgcaccctgt

SEQ ID NO: 463315 - DNA, 75 bp, Homo sapiens
ggcaaggagagaatgtatgaagaacagtcacaggacagttagagatgtttatgattacttccgagctgtcctgca

SEQ ID NO: 463316 - DNA, 114 bp, Homo sapiens
gggcgtctgcggctctccgccgtccccagccctgcctctccctgggctctgggtccagattttggctatgtaactcgagggccccaaacagggggtatcagtggactggactcc

SEQ ID NO: 463317 - DNA, 100 bp, Homo sapiens
gaatattaaaaaatctggagggactccaacttcaatggtcaaaatgcagatcttcgtgaaaacccttaccggcaagaccatcacccttgaggtggagccc

SEQ ID NO: 463318 - DNA, 90 bp, Homo sapiens
cgcgaacgagcgacggcggaacccgtgggcctgtggactgcagcctcggcggtcagcaggagccatgtggctagaaatcctcctcacttc

SEQ ID NO: 463319 - DNA, 75 bp, Homo sapiens
ttgtgcagaccgggcgagcagagtaagaagcaggtggtggcctttatgaagtctccagtgggtcagtacttggac

SEQ ID NO: 463320 - DNA, 75 bp, Homo sapiens
tcagattgatttggagactggcaagattactgatttcatcaagttcgacactgccctactgccaataaagggaaa

SEQ ID NO: 463321 - DNA, 75 bp, Homo sapiens
tctcttacgtctgcggaagtgcagctgcctcagttcttagcgcagttacatgggaataggactctcggctcaagg

SEQ ID NO: 463322 - DNA, 90 bp, Homo sapiens
ccctaatggtctttttgttcaagataaagtgattttttgcctttgttgattaactggacaaattcagttggttagtctgctgctaattgg

SEQ ID NO: 463323 - DNA, 98 bp, Homo sapiens
ataagccaggcatgtctcccgaggagtgcaggcgcttcaccacagacgaccacattgtgcaacacatcattggacaacccaacccagagaaacaagga

SEQ ID NO: 463324 - DNA, 50 bp, Homo sapiens
agagagttggctgtgcagatccagaaggaaaggccgagggggacggcaag

SEQ ID NO: 463325 - DNA, 75 bp, Homo sapiens
agagaccagacctgcaagctctttgacacacagcagttcttgtcaggtccatgcctcccgcagcaacaacatggg

SEQ ID NO: 463326 - DNA, 82 bp, Homo sapiens
gacaggatcaaccggttcctcccaggcggcaagactacgtctactttgagaactcctccagcaacccatacctgatccggag

SEQ ID NO: 463327 - DNA, 100 bp, Homo sapiens
gtcgggttacccttggtggccttgcatggtttctgcagatccactccttcacagctataccaaacttaaaggaaattgagaggctgactgagcgactaga

SEQ ID NO: 463328 - DNA, 82 bp, Homo sapiens
cccgtttctggctccgggctgagcttcctggagaagaggaagatagcctgggctggaagctcttctacgtcacaggctgcct

SEQ ID NO: 463329 - DNA, 98 bp, Homo sapiens
aaaagcaaaccgatgtccaggggtcttgtgcaggacctgaaagtagtctcactctgtggtccaggctgaagtacagtggcatgatcccaggtcactgc

SEQ ID NO: 463330 - DNA, 50 bp, Homo sapiens
caagttccaacaaaagaatgctgccgcagctcccctcccacccggtcact

SEQ ID NO: 463331 - DNA, 89 bp, Homo sapiens
cttgcttttgcttcagcgttctgtggttgtcaacagacagtcgaccggcccaaggactggtacaagacgatgtttaagcaaattcacat

SEQ ID NO: 463332 - DNA, 95 bp, Homo sapiens
agagctggaaggaggaggagaagaaacctcaccttcagggcaaaccagtgcagtgctggagttcgtgggtgacgggatctataacaacaccatgg

SEQ ID NO: 463333 - DNA, 100 bp, Homo sapiens
gccagctacagccgagagaagtgcggggtccccttctcctgctgcgtgccagatcctgcgctggtaggtgagtgctgtcctcggctcactttcctcaagc

SEQ ID NO: 463334 - DNA, 101 bp, Homo sapiens
cggggccggaacatggctgcgtccggtctgcttgtagattttcagtggaaactgggtatggctgtgagctcagacacttgcagatctcttaagtatcctta

SEQ ID NO: 463335 - DNA, 101 bp, Homo sapiens
catcaccgagtttatgaaccacccttggatcatggccttatgatgggaaatggagtaaaacaatggtgggatttgggcctgaggatgatcattttgtcgca

SEQ ID NO: 463336 - DNA, 75 bp, Homo sapiens
aactggagccaccatcaagctgtctaagtccaaagatttttacccagataagacaaaacccctggcttctgtaac

SEQ ID NO: 463337 - DNA, 75 bp, Homo sapiens
cccggatgtggcgcggctgcgcgaggagcaggaaaaggacctacaagaacagtgaggagcttcggtctcgtattg

SEQ ID NO: 463338 - DNA, 74 bp, Homo sapiens
attcttcaactctacattcttctggagcatggacaagcgaatttcagtcagtcactcaaggccaaattatacaa

SEQ ID NO: 463339 - DNA, 100 bp, Homo sapiens
acacaagaagattcagccctgtcatcttgtgcaaacccctgcgaggaattggcatccttaagcaagccatagacaagatgcagatgaatacaaaccagct

SEQ ID NO: 463340 - DNA, 100 bp, Homo sapiens
ggactcagtattcacctaagcactccaaattgtacctgaatgacttatatatcctggaattacggccaggctctggagtggtagcctgggacattcccat

SEQ ID NO: 463341 - DNA, 100 bp, Homo sapiens
acacagcatttgttctttgtacgacttaccttacccagcagctccaaactgcaagtgtatattgttcttggaaagcagatggtggagctgaatatgccac

SEQ ID NO: 463342 - DNA, 74 bp, Homo sapiens
ccaaggtctctcgcgggcgggagaacggaaaactcccaacttcctgaacttgagagagatttgctgggataagg

SEQ ID NO: 463343 - DNA, 100 bp, Homo sapiens
cttcaatccagttccaaggactccacgggtcctaccctggtccaagcctggaaagtgaagacttcaacattccaccaattactcctccttccctcccaga

SEQ ID NO: 463344 - DNA, 74 bp, Homo sapiens
atctggttcgaagtctcagcggtattctggtgcttatggtgcctcaggtatctcagatgaagacatcatcaaca

SEQ ID NO: 463345 - DNA, 97 bp, Homo sapiens
gagcgacaagccgctggcagccgcggatctcaccgccgctcaggcgtccgtctccaagagagtatgaagagagtgcgtctgtagggcagggaagatg

SEQ ID NO: 463346 - DNA, 90 bp, Homo sapiens
gcctgccacagccggactccgccactccggtggtggaggtggatacagcagtcggagaacatctggcagagacaaatacggaccacctgt

SEQ ID NO: 463347 - DNA, 50 bp, Homo sapiens
tgctggacaccctgtcgcagcttctgaagaatcaggaaacccaggcccaa

SEQ ID NO: 463348 - DNA, 90 bp, Homo sapiens
tttgccaggactgatgcagatgcccctcctccaccagaggactgggaggagcatgtcaacagtcaaaccggcacgatgtccaggcaccag

SEQ ID NO: 463349 - DNA, 90 bp, Homo sapiens
ggtgtagctgccgtggttgccaggagagctgcgccggcgagaagcggccgagccagcagcaggccctgagacgggagttaaaggagaaag

SEQ ID NO: 463350 - DNA, 50 bp, Homo sapiens
ataaggctaaacttgcaatatgggaaggtgtcttgctgcaggtaactaat

SEQ ID NO: 463351 - DNA, 100 bp, Homo sapiens
cctctagtagccacggtgtggcagctgctctgaaccaggacctggacccggacccaaagtgccatgtctttaatgtaagaatgattgatgttggctgata

SEQ ID NO: 463352 - DNA, 100 bp, Homo sapiens
agcagcagcgaggaatcagacagtgatggggaggcaccggcagctgtgacctctgcccaggaccaagacccctggacctggggcccagtcggccctcaga

SEQ ID NO: 463353 - DNA, 90 bp, Homo sapiens
gaaatccttcctgtaccgcttatgccaggccgatcccgacctggactcagacaaggtcaaaatgcagatcttcgtgaaaacccttaccgg

SEQ ID NO: 463354 - DNA, 128 bp, Homo sapiens
caacgcgaggagctcatcgggcagattagcgacatccgagtgcagaacctgcaagggcgccctgcgtccggcagaggaggcgagcatcccgctcaggtgatgaggaacccctcgcgcacccagcgcag

SEQ ID NO: 463355 - DNA, 73 bp, Homo sapiens
aaggagcaggattaccaaaggctgctggagccagttctgcttctcggcaaggagcgatttgctggtgtagaca

SEQ ID NO: 463356 - DNA, 75 bp, Homo sapiens
tgatgcaattgtatatcagagtagtggaggacatgctagaggacgaggaagaagaagatgacaaagatgacaagg

SEQ ID NO: 463357 - DNA, 51 bp, Homo sapiens
atgaatgccaaatgggacacgaagaacttctgcttgggtggctgaactctg

SEQ ID NO: 463358 - DNA, 100 bp, Homo sapiens
gatgcaagcggtttgggaccttgaacaaggcaaatatggttttgactgtgccctgtccacggtgcctcctgcatgtcctgctgccctgagctgtcccgag

SEQ ID NO: 463359 - DNA, 83 bp, Homo sapiens
caggcacccgagttcagcgccacgcaaggtttggtgcacctcgatttggaggaagtagggcagggcccttatctggaaagaag

SEQ ID NO: 463360 - DNA, 100 bp, Homo sapiens
agcaccagcccagtgccatgagcctgctggccccgccatccagccgcagaaaggagtcttcaactccagagggtctgccatcatggatgttctcgcagaa

SEQ ID NO: 463361 - DNA, 89 bp, Homo sapiens
ttccttgtggagccggagctgggcgcggattcgccgaggcaccgaggcactcagaggagatagcctgggctggaagctcttctacgtca

SEQ ID NO: 463362 - DNA, 105 bp, Homo sapiens
cggagcctggaggagctgctgctggacgccaaccagctccgcgagctgcccgaggtctctgctggtggttctgaagccaaacctctgatcttcacatttgtcccc

SEQ ID NO: 463363 - DNA, 100 bp, Homo sapiens
gaggacatcacgtggaggcggccccagagctagagccggtgcaggccacgcagaacaagacagggaagtatgtgccgccgagcctgcgcgacggggccag

SEQ ID NO: 463364 - DNA, 101 bp, Homo sapiens
agcattactttgctgtgaatgtgaagaatcagaaatctttactgattccaatgaatatcacaggagtgatgctgtgttcttcactgcatgatttcaaaagg

SEQ ID NO: 463365 - DNA, 100 bp, Homo sapiens
gtcccaagtcgtccccctctccgccccccaggaggggcgagagggagccgcagctgatgtcagagctccttaataagcatttatagtcagtttttggcag

SEQ ID NO: 463366 - DNA, 82 bp, Homo sapiens
atctactactcggacaagtacttcgacgaacactacgagtaccgataacgaaggaggcccaacttcattcaataaggagcct

SEQ ID NO: 463367 - DNA, 98 bp, Homo sapiens
cagccaacctatgttgccctgagttacataaatagccagagaatctgctgtactacagcctggatgaagactccaaaatcatgatctccgactttggc

SEQ ID NO: 463368 - DNA, 100 bp, Homo sapiens
acgcttgcccagcctttcttcacgcataaatacaatcaagtggcatcttaaatttttgctggaagtggagtcatgagactaaagatatctcttttaaaag

SEQ ID NO: 463369 - DNA, 85 bp, Homo sapiens
ggacgaagctctctccagaaagacatcctgagaggacttggcagcttgccatcgagacatttataaaggagttgatatgagagga

SEQ ID NO: 463370 - DNA, 75 bp, Homo sapiens
ctgctgttctagagcagggatcagcaaacttgctgtaaagagccaggacaggcgacactaacaggtgaagatctc

SEQ ID NO: 463371 - DNA, 76 bp, Homo sapiens
aaacagctttacttagaacgagttttgaagggtgatgtggaaaaactttctgtacaagaaaattccccaggacaca

SEQ ID NO: 463372 - DNA, 76 bp, Homo sapiens
ctgtctcaggagtggcaaaggtggaagaaaattcttgtgtggccatcaagtcaatccggaaggacaaaatcaaaga

SEQ ID NO: 463373 - DNA, 75 bp, Homo sapiens
cccagctctgtcgctgacgggaggatctgaagccggccgcagagacagggcagggcattgttcatgcactgaccg

SEQ ID NO: 463374 - DNA, 100 bp, Homo sapiens
ctctgtatgaaaaccttactgcttctctcttcaggcttatgtgccttcagaggaagagaaaaatggtgaaattctggcaccaccagaaagtctgtgtggg

SEQ ID NO: 463375 - DNA, 75 bp, Homo sapiens
gtctcggaaaccggtagcgcttgcagcatggcagcagaagatgtcgttttcattggacctgacacacatgctatt

SEQ ID NO: 463376 - DNA, 100 bp, Homo sapiens
acctgactctctgaggctcattttgcagttgttgaaattgtccccgcagttttcaatcatgcctcccaggccggttcctgtggcaaattacccccactca

SEQ ID NO: 463377 - DNA, 75 bp, Homo sapiens
aacggggctcccaggacctccactaatcaccagaacaaaatgtgcaggacttaaagagagatctacttcagagcc

SEQ ID NO: 463378 - DNA, 75 bp, Homo sapiens
caatgatgatgctatgctgatcgagaagtttgtagacacaccgaggattcccagctagcactgaagctgaacgac

SEQ ID NO: 463379 - DNA, 74 bp, Homo sapiens
atgccaatctgaatatcaaaatagcaggcaattccgttccttgtgctcagatgacacaccaatggtacgacgtg

SEQ ID NO: 463380 - DNA, 48 bp, Homo sapiens
ccggggactgggcgctaccaggtgctgaactagatgcagagcacgccc

SEQ ID NO: 463381 - DNA, 100 bp, Homo sapiens
ccgccgccagggtctgcagggcctgggccgccgctgctacctgcagcgccgtgtggcacgacacaaaaatcagggtggagtccatgtccctggctgacag

SEQ ID NO: 463382 - DNA, 75 bp, Homo sapiens
aacaggaggcggccaaggcccaaactgcactgcacatgttatcaatactctggctgaccatcatcatcgtgggac

SEQ ID NO: 463383 - DNA, 100 bp, Homo sapiens
atgtagtcgccataaagtatgcattgctcaagattctcagactgcagtctgcattagtcaccggaggcttacacacagtaaggatggggatgataagaag

SEQ ID NO: 463384 - DNA, 75 bp, Homo sapiens
cggcatctgctttgaggccaaggatcacctgctgttaccagctaccacccataacaagaccacaagaccaaaaat

SEQ ID NO: 463385 - DNA, 98 bp, Homo sapiens
atggctagcaggaatgcttactgttgcgtggttcgttattaacagagagacaagagagacacctccaacttcgacaaagagttcaccagacagcctgt

SEQ ID NO: 463386 - DNA, 100 bp, Homo sapiens
atgacagaaccgcatctcaagggcagtggggccgtgcctgagagtagcagatcgactctatggtgtatataaagtacatgggaattatggtcgagttttc

SEQ ID NO: 463387 - DNA, 75 bp, Homo sapiens
ctggaaagtacgaggagaatcctgggtttagccattgaggtcaagttgaagaagcaagattaaaagaggcccaat

SEQ ID NO: 463388 - DNA, 50 bp, Homo sapiens
aacccggagaccaaatccttggtactccaaagattcaggtttactcacgt

SEQ ID NO: 463389 - DNA, 100 bp, Homo sapiens
ctaactacctcatcttcagtcaaaagcctgaatttcaggatctttcaggttgaccccctgtttacagtgccagcgccaccaccgccgatttccagcagtc

SEQ ID NO: 463390 - DNA, 74 bp, Homo sapiens
tgaccacccctgaagaaattgcacagacccttatagttgcctggatcaaagcaaacctaaatgtgtacatctcc

SEQ ID NO: 463391 - DNA, 87 bp, Homo sapiens
gtggcactctgtgcaggtgcagtactacaacaagaacagatctcggcccctttccaaacactcctgatgcctcatttgcctctcgcc

SEQ ID NO: 463392 - DNA, 99 bp, Homo sapiens
gtaacttcaccgagtaaagaggagtgtgttccactgtgtccactttgagtgtccagagcagcagagcagccagaaggaggaaaatagtgaggaatcggg

SEQ ID NO: 463393 - DNA, 83 bp, Homo sapiens
gtcttagaagaaaatcatgtggagcaccagcctcggtttttcagataatctggagctttcaaaatgtttgccaaagcaaccag

SEQ ID NO: 463394 - DNA, 73 bp, Homo sapiens
tactccagagcagtacaaggagtgtgcagatcctgctctggaagaaatcgacgttgacgtggagagcacggac

SEQ ID NO: 463395 - DNA, 97 bp, Homo sapiens
ggagcgggcggctgagacaaaggcgacgatgctaatactggagaccgtggacagaccaataatgctgcttctgcatcagcttccaactccacctgaa

SEQ ID NO: 463396 - DNA, 98 bp, Homo sapiens
gctgcttcaggaggacctgcaggaggacgcagacggatgttgtcttttggaaatgcaggtttaaggacaaattatctgcttaagctagaagatgggat

SEQ ID NO: 463397 - DNA, 75 bp, Homo sapiens
ctccagcagccttgttagggcgtggcctgaggcttggataagtgggacccactatgaaaatggagaatatattat

SEQ ID NO: 463398 - DNA, 90 bp, Homo sapiens
ttcaaaccgtcctctgtctccccacattactatctacagtgtggacaacagtgagtatatgcggaatggagacttcttacccaccaggct

SEQ ID NO: 463399 - DNA, 82 bp, Homo sapiens
cgcctggctcggagcagcagcctctgaggtcagttcaccgggacctggaggcccagattgcgatcgtgacggagaaccaggc

SEQ ID NO: 463400 - DNA, 100 bp, Homo sapiens
ctgaagagggaagacacgcggaaacagagatgacctgatcagagccatcaagaaactaaaggcacttggcactggcttcggcatcatccctgtgggcggc

SEQ ID NO: 463401 - DNA, 100 bp, Homo sapiens
agctgcctcagttcttagcgcagagcatattaaaaatcttcagactgaacaagcatctttgcagtcagaaaacacacattttgaaaatgagaatcagaag

SEQ ID NO: 463402 - DNA, 74 bp, Homo sapiens
attgggatcactacaagcaagacagcagatcactattatcttcaaagcccaccatgagtgtacagatcagaaag

SEQ ID NO: 463403 - DNA, 87 bp, Homo sapiens
tgtcagagactgaggacttaaatgaagccactgattagcaatttaaagatcctctccaagtcaaggagaagctgcgccttgatcctg

SEQ ID NO: 463404 - DNA, 90 bp, Homo sapiens
ccggcaactactttggattcacccacagcggggcggcggcggcggcggctgcggcccaatataggagctagagttaatgccaaagacagc

SEQ ID NO: 463405 - DNA, 88 bp, Homo sapiens
taatgaactaaacatagttttggaactagcagatgctggcgacctatccagaatgatcaagggatattggagaagatattccactaga

SEQ ID NO: 463406 - DNA, 82 bp, Homo sapiens
ggcccgcttcctggaatggcaagcgcagcaacaacagagagcacgtggtgcgcgcggagccatggttatcatgtcggagttc

SEQ ID NO: 463407 - DNA, 101 bp, Homo sapiens
ctcctttataagtgtcagctgtgagctgagtcagtgctgattctctcaaatagagcttgaaggataaatcttcatttttgtttcaacaaaacttcgaaaca

SEQ ID NO: 463408 - DNA, 83 bp, Homo sapiens
actgaagtatctgcccctgtcaaatcattccagaaaacatcggagcagtgtgggtccgagcaaacctgtttcccagccccggc

SEQ ID NO: 463409 - DNA, 100 bp, Homo sapiens
tgcctggaccagcttaatggttctgctggtgcccctgggtgaactgaccaagcacagcacatcagcggtggatctatccacctgctttgcccagatcagc

SEQ ID NO: 463410 - DNA, 51 bp, Homo sapiens
ctctcaacaggatttcctaagagagctggttcctatatgatagtggactct

SEQ ID NO: 463411 - DNA, 100 bp, Homo sapiens
tcagtggagctggtcgcagatcctgagacccggacagtggcagtgaaacagggagagcacatctgcctgatccgcaaggtgaacgagaactggtacgagg

SEQ ID NO: 463412 - DNA, 83 bp, Homo sapiens
cgcagtttctcacgacgggccgagcctgccactacacgtgactgatacacctgcctcccatcccctccgcactttgacctcgt

SEQ ID NO: 463413 - DNA, 51 bp, Homo sapiens
gcagtcaagtatgtcccaaacgtctacaaatcttcctattttcaagctgaa

SEQ ID NO: 463414 - DNA, 100 bp, Homo sapiens
aacgtcatgagcatagtgatcccattgggggttgatacagcagagacgtcatacttggaaatggctgcaggttcagaatatgcacttatttggccattac

SEQ ID NO: 463415 - DNA, 87 bp, Homo sapiens
atattgtgatgaagtggaggtttaaatcttggccagaggagcctgtctccccaggaccgtgcagcatataaagagtacatctccaat

SEQ ID NO: 463416 - DNA, 82 bp, Homo sapiens
ggggagccggccttggacacggttcaagaagacgtggaagctgcgggctctgaaggaaggcaagacaagcatgcatccgccg

SEQ ID NO: 463417 - DNA, 117 bp, Homo sapiens
ctccgtgaaccttagggacaacaccgggacacccgcgaggccggaaaatgatgccatggacaatattaccaggcagaaccaattctacgatacccaagtcatcaaacaagaaaacga

SEQ ID NO: 463418 - DNA, 82 bp, Homo sapiens
cccaggaagctttggatcagacttttgtgttgcagttcggttccagggtctccctccactgctgtagtaacccgggtccggg

SEQ ID NO: 463419 - DNA, 51 bp, Homo sapiens
cagcaagaaagaccatcaagtttaccagtcccaagctctttaaggagccca

SEQ ID NO: 463420 - DNA, 75 bp, Homo sapiens
aacaagaaaacatcaaagaggtctagcaaaggtgaccctggcagcaaccccaacaaacgccagaggcagccccct

SEQ ID NO: 463421 - DNA, 74 bp, Homo sapiens
aaaaatcccaaggtctgcaaaggagaggcagatgcgaaccagaacaatgggacctcctctcaggacacagcggt

SEQ ID NO: 463422 - DNA, 90 bp, Homo sapiens
ggatcatgctgtctctgtgtgctcaggatttgacacagacctctattgctgagtgcttgacataccttgataatggtgttgtgtttgtcg

SEQ ID NO: 463423 - DNA, 90 bp, Homo sapiens
tggcgttgctggtgcgagtccttgtggcacaagaatggctcaactctccaaatagagagaatttctatcagttgcaagtacgaaaatttc

SEQ ID NO: 463424 - DNA, 75 bp, Homo sapiens
catggactgaagtatccagcgctcattgggaatttagttaagatcatgcatgcattttcagttgctccttttgac

SEQ ID NO: 463425 - DNA, 98 bp, Homo sapiens
attgtggcccggtgcctgtgggaagaatcacgccttctacagactgcagccactgcggcccagggtagctctccagctggaagccttgctgatgccat

SEQ ID NO: 463426 - DNA, 82 bp, Homo sapiens
ctggatcttcagatgcacatgtttcaggagatgtgttacaaggcttatctagctattcgacagcatgccaatctcttcataa

SEQ ID NO: 463427 - DNA, 100 bp, Homo sapiens
gaatatttggagcaatcagaggagaagctgtggctgggagaacctgagggaacagccaccgatcgctggctcagtcacctttcccggttgccttgatcca

SEQ ID NO: 463428 - DNA, 75 bp, Homo sapiens
catgttctccgtgtcggctgccatgatggccatcgcgatcatgaagtgcatcccctcggcaattgtgagcttcac

SEQ ID NO: 463429 - DNA, 89 bp, Homo sapiens
aaaagccaagatgcaggaatcaggagagcaaactataaggtgggatgtgtgtgggctgaaattccgagctgcggttgtgcatgagaata

SEQ ID NO: 463430 - DNA, 90 bp, Homo sapiens
ggatccatttctcctattgaggagtcaacgtgtgtgcggattttaggcaaacaagaaaatattagagtgatgcaattggctttgttccag

SEQ ID NO: 463431 - DNA, 101 bp, Homo sapiens
acctgaagaggacctggcagcaataagtttttggtgaaataacaaagaggtgctggagaatctggtaaaagcaccattgtgaagcagatgaggatcctgca

SEQ ID NO: 463432 - DNA, 78 bp, Homo sapiens
agaagattccactcgtggtatgagagtggataatataatcaactcctctgcctggtatgttgagtctaaaaaggacag

SEQ ID NO: 463433 - DNA, 100 bp, Homo sapiens
gcaccctcgccttgtgtcaatggaggcacctgtcggcagactggtgacttcacttttgagtgcaactgccttccagccttgccttacacccagacaaaac

SEQ ID NO: 463434 - DNA, 82 bp, Homo sapiens
cagaacagggcgctcctgagaccctccagcgctgcctggaggagaatcaagagctccgagtgatcccggccgctgatctgtc

SEQ ID NO: 463435 - DNA, 100 bp, Homo sapiens
ctggtaggcacgggcggctccgcagtgaccggactcgggggagaaagtgaagtcactgcttttgctgtcttggatcaagaccagaaagaaattattgata

SEQ ID NO: 463436 - DNA, 74 bp, Homo sapiens
tttcatcctgagttgccaatcattatcacaggttcagaagatgatattgattttgccacccgcaagattgcagt

SEQ ID NO: 463437 - DNA, 50 bp, Homo sapiens
gcaagccccgctccggccaacaagacaactacacctttgcccaacctggg

SEQ ID NO: 463438 - DNA, 72 bp, Homo sapiens
aagccctactgggaggcacggagggtggcgaggcaggaatgtatcctgtcaggtataatgtcagtgaatggc

SEQ ID NO: 463439 - DNA, 101 bp, Homo sapiens
ggaagaataagcaggcttttttagatgagctgagctgaaatatgctaataccgtgatgcgctttgattacgtctggcttcgagaccactgccgctcagcat

SEQ ID NO: 463440 - DNA, 138 bp, Homo sapiens
aggccatcgaaatgccctcacaccagacctacggagggagctggaaattcctgacgttcattgatctgatgaataatacggcagctagtccaatgtctactgcaacttcaagtagtggaaggagtacagggaagtcta

SEQ ID NO: 463441 - DNA, 75 bp, Homo sapiens
ttctgggacaacgcgtacgagttcaacctcagcgctctgaaaaggccttcctactgaagaaataaaaaatgttct

SEQ ID NO: 463442 - DNA, 51 bp, Homo sapiens
ggaaaagaccctcttcagacttgaacaagtttaatggatcgagaagtggcg

SEQ ID NO: 463443 - DNA, 101 bp, Homo sapiens
ctgtgcttgccttattggtgatgtgcattgtcttacgcccttcaagaggtatagtggaggattacaagccaccgttctacgatgtggttcccaatgaccca

SEQ ID NO: 463444 - DNA, 101 bp, Homo sapiens
gtacgggggcggtggctacggacgccggagccgcaggcttatgcatctggatgtgacattgtaatactgggaagcgattttgaaagattacagataatccc

SEQ ID NO: 463445 - DNA, 100 bp, Homo sapiens
tctccacgcccagaaattcagacaagagcattctccttatctcatctgcacaggaagcaggtctaaggattacggtgggatcatggcagggctgggctcc

SEQ ID NO: 463446 - DNA, 87 bp, Homo sapiens
aactatgtggaaattatgggaagagatgttcaaggtgaatcaggtctaggaaaatcgactctcataaacagcctattcctaactgat

SEQ ID NO: 463447 - DNA, 83 bp, Homo sapiens
ctcagggagaagttgaaggaggaggagaacacagtgggtcaaaatgcagatcttcgtgaaaacccttaccggcaagaccatca

SEQ ID NO: 463448 - DNA, 100 bp, Homo sapiens
ggaacaggacgccctctgatatttggagcaagaggtggtggtggccttcccccgaagaaatttggtaatcctggggagcgtttgcgtaaaaaaaagtggg

SEQ ID NO: 463449 - DNA, 90 bp, Homo sapiens
gaaaattggttactgggtctcctctcaagaaatctcaagatattaaagttactgctgttaaaaaggtccaagacaagctgctgctatctg

SEQ ID NO: 463450 - DNA, 75 bp, Homo sapiens
ccctgtgcaagttcccttatctgcacaaaacatctagtatgtcttatggtgaaattgaaggtaaattcttgggac

SEQ ID NO: 463451 - DNA, 98 bp, Homo sapiens
aggaatgcaagatggtcatcctgtctgtctgttcacagaaggatgccttgttttgcaagagcttgatgaacttgctcttcagcctgcatgtttcgtat

SEQ ID NO: 463452 - DNA, 100 bp, Homo sapiens
caaagatgccagatgtgggagacacgccaaagctcccaagacacaaatgccagaccctaagaccttcaagcagcactttgagagcaagcatcctaagact

SEQ ID NO: 463453 - DNA, 75 bp, Homo sapiens
ctctcatcttgggaatctgcgtcagaagtcactcgcagtcccgtcagcccaggctgaaggggatgctaagggaga

SEQ ID NO: 463454 - DNA, 106 bp, Homo sapiens
attctgcaagcaggcaacctgaatacaggagtggagtcggttcttatacaactatgggctgaaaccatgaggcgtgctgagccgcacctgatcctgcaaccttcga

SEQ ID NO: 463455 - DNA, 51 bp, Homo sapiens
gttgatttctccaaggatctgctgaaagttgacatgatgaaagaagcatta

SEQ ID NO: 463456 - DNA, 75 bp, Homo sapiens
aatgaatccggggagctggtggccatcaaaagtccgctctatcaagctgaaggaagacattctgtcctgcacttt

SEQ ID NO: 463457 - DNA, 100 bp, Homo sapiens
cctgccagatagctcttattttgagttgaatctggtatcaagtgtcactctctccaagtccgcatcggaggcttctccacagagcttacctcatactcca

SEQ ID NO: 463458 - DNA, 83 bp, Homo sapiens
cgctcgctcaaggaactgatcccgataacgaaggaggcccaacttcattcaataaggagcctgacggatttatcccagacggt

SEQ ID NO: 463459 - DNA, 82 bp, Homo sapiens
ggcatttgaagtctttgaccatgagtcgaataatacagtggatgtgagcacttttcaggattagaagaggctgtgtatagaa

SEQ ID NO: 463460 - DNA, 90 bp, Homo sapiens
tggaacagaaacatagagaggaactggagcaattgaagctgactactaaggagaataagacagcaactctggaaagtggcttctaactcg

SEQ ID NO: 463461 - DNA, 75 bp, Homo sapiens
cgaggctgcgggaccccaggatgggggacaggaggctgcggggcctcagaaactggcgatggaatatgagaggag

SEQ ID NO: 463462 - DNA, 100 bp, Homo sapiens
agcggctgaggaggggccccagcagcccccgaaggccctatcaggacatggagtatgaaagacggttcgagaacttgtcttggacaattgcaaatcaaat

SEQ ID NO: 463463 - DNA, 82 bp, Homo sapiens
cggaacgcggcgcggggcagcaacagtcgcaggagatgatggagggtttttcgttggaatatacgttgcacatttatggcga

SEQ ID NO: 463464 - DNA, 100 bp, Homo sapiens
ccagtccccagtgagggtgtacaaatacccctttgaattaattatggctacctgtggatgaagagccagagtcctctgaggtcgatgctgctggtcggtg

SEQ ID NO: 463465 - DNA, 100 bp, Homo sapiens
cagcagcgaggaggggaagagaggtactgagcagtacagtgaatacacaggctatgctgagacatatcgttggtcccggagccacgaagatgggagtgaa

SEQ ID NO: 463466 - DNA, 100 bp, Homo sapiens
caagccctccaggaactcacgcaatctgaatatggcggtgtagtgtttggtggttgggcgcgaatggcccagcccattgtggctttcactgtcgttgaag

SEQ ID NO: 463467 - DNA, 90 bp, Homo sapiens
cttagaagtggtgatgcaagaagtttctaggaaaggccggacaccaggagcaggacatcgagactttacatggctctgttcacgtcacgc

SEQ ID NO: 463468 - DNA, 82 bp, Homo sapiens
gccaagcagctgtggggaaacgttgtctggaacaatgcagatcttcgtgaagactctgactggtaagaccatcaccctcgag

SEQ ID NO: 463469 - DNA, 74 bp, Homo sapiens
tatgaatggagcgtcaaactaaactggacaggtgctggagaatctggtaaaagcaccattgtgaagcagatgag

SEQ ID NO: 463470 - DNA, 100 bp, Homo sapiens
accatcgccttggcccttggggttgaaaggacccgaagtgagcttctgcctttccttacagtaagactttgaccccgacgcaggcttcagtgattgccgc

SEQ ID NO: 463471 - DNA, 100 bp, Homo sapiens
cagggcatgtgctaactaccagacgatgaaagaacatttcctctagtttctggataatgagcaggcacacaggtaatgactttacatgagtttggaactg

SEQ ID NO: 463472 - DNA, 101 bp, Homo sapiens
ttgctggtgacagcaaaaatgacccaccaatggaagcagctggcttcactgctcaggttcggctttccagtttggcagcagcactacaaatttcaacttca

SEQ ID NO: 463473 - DNA, 100 bp, Homo sapiens
gaaaaacggagacttggatgaggtgaaagactatgtggccaaggctgtggaaaatctctgttctcacaaagtctccccaatgctctacaagcaactgcgt

SEQ ID NO: 463474 - DNA, 75 bp, Homo sapiens
aggaggaagtaggggtgcacctcagcactatcccaagactgctggcaacaggactcagaattcatgattgaagaa

SEQ ID NO: 463475 - DNA, 83 bp, Homo sapiens
gcagatccttacagcctgctttgggtcattcgcccatggtggcaatgacgtaagggtctcggctcactgtagcctcaacctcc

SEQ ID NO: 463476 - DNA, 100 bp, Homo sapiens
ctgctgctgctggtcctcctgatcgccggcagtgctggggccgcgccacttccgcaaacaggtgcagggaagctatgcgaaattatttaaaagagcgagg

SEQ ID NO: 463477 - DNA, 100 bp, Homo sapiens
tactgagcgtgctcccctctgagactggagtgagagggtcttctggaaattggggagaatgtgcacatttacctgattgggaaagagtcatctcgtaccc

SEQ ID NO: 463478 - DNA, 97 bp, Homo sapiens
aagaaatagacgccttcccaagattgtggactcccatgttggcagataaattgaacatgactccagaagaagctgaaaggtggattgtaaatttgat

SEQ ID NO: 463479 - DNA, 129 bp, Homo sapiens
gcctggaagggctgaccgacgagatcaacttcctcaggcagctatatgaagagtcttggtgatgccttggacagcagcaactccatgcaaaccatccaaaagaccaccacccgccggatagtggatggc

SEQ ID NO: 463480 - DNA, 111 bp, Homo sapiens
gggctctggcctggccgacgaggctgccgaagacagtggtgaggagggcgcccctgaacctgcaccagcctctgaagagccaatccattcaggatgggaaaccacgcaggc

SEQ ID NO: 463481 - DNA, 98 bp, Homo sapiens
ccgtgagcctcccgcccaaggagaatgcgctcttcaagcggatcttgtagctgctgctggtggtgacaatgtcaaataacggcctagacattcaagac

SEQ ID NO: 463482 - DNA, 82 bp, Homo sapiens
ccggcctcggcggctgaggaaagcaggaggaggtggcggcggcgggaagatgaatgggcaaagaagtggggaatctgctact

SEQ ID NO: 463483 - DNA, 100 bp, Homo sapiens
ttcacttatctcgaaagcctatcagcatagttaaggtcatattgaacattccagatacctatcattactcgatgctgttgataacagcaagatggctttg

SEQ ID NO: 463484 - DNA, 100 bp, Homo sapiens
gatggcggatctggaggagcagttgtctgatgaagagaagaatagcctaacatggcagaccagagacagcgctcactgtctacctctggggagtcattgt

SEQ ID NO: 463485 - DNA, 83 bp, Homo sapiens
gggcagccgggggacagctgtagtgaaggatattagaaatggctactccccagtcaattttcatctttgcaatctgcatttta

SEQ ID NO: 463486 - DNA, 89 bp, Homo sapiens
cggcgggcgcggagatgtggcccctggtagcggcgctgttgctgggctcggcgtgctgcggtatggatcctggcgggagccagtcaacc

SEQ ID NO: 463487 - DNA, 99 bp, Homo sapiens
cgcccaggaagcttcatggctgggcaccaggccctgactaccaggtgctgggcgtcctcttctttgccatagcctgcttcttatacaagcccctgtcgg

SEQ ID NO: 463488 - DNA, 75 bp, Homo sapiens
atcgtcatcgtggcccactacgacgcctttggagtggcccccgcaggggagttcctgcgcctctgggagcagttc

SEQ ID NO: 463489 - DNA, 50 bp, Homo sapiens
cgcaaacttgacactcaccctgaccggtgtcagaacctcaaagataacac

SEQ ID NO: 463490 - DNA, 100 bp, Homo sapiens
tgaagaagcacaagaaaaagagggttgtccccaaaaagcctcccccatcaccccaacctacagacccatctctgacagttagagccgatatcactggaag

SEQ ID NO: 463491 - DNA, 75 bp, Homo sapiens
tcctcatcctggtcactagcggactcttcttcgccttcgacttaaagcttttcaagccaggccaagaagctgtga

SEQ ID NO: 463492 - DNA, 90 bp, Homo sapiens
cgaagttatggcagagttagctaaagaactccctcaagtttcatttgtgaagaatcagctgcctcaagtcttttcccgactctttccttt

SEQ ID NO: 463493 - DNA, 95 bp, Homo sapiens
cgagggcacaaaataaccacttaccccttctcaccgaggaagagcgggagaaagggtatcattggaacatttcaagatcatcaaatcaaattcca

SEQ ID NO: 463494 - DNA, 98 bp, Homo sapiens
catggcgaagcacgagcagatcctggtcctcgatccgcccacagacctcaaattcaaaggaaaaccagtagattcccagacatcgcgaagtgaatctg

SEQ ID NO: 463495 - DNA, 74 bp, Homo sapiens
gatctccgtggtgatcgctgtcaagatgcaggtcgcgtggggcaggcagtggcgctgcgggccaaggccttcgg

SEQ ID NO: 463496 - DNA, 99 bp, Homo sapiens
cggtgcctggccctctagccccgctaccggactacatgtcggaggagaagctgcaggagaaaggacgagtctcgaattaaggccactgtgatggacgtg

SEQ ID NO: 463497 - DNA, 90 bp, Homo sapiens
ttgtcttccggatggaacttatgccagcctggcggtctcattcagccagccaatcatgtattgccagcctcattcgggaattctgattgg

SEQ ID NO: 463498 - DNA, 50 bp, Homo sapiens
gctggatgcagccaggatccagccagagattatgcatgatgtgataaaga

SEQ ID NO: 463499 - DNA, 101 bp, Homo sapiens
aaaggagcaaaagaaaaaagaatgggtcaaccaagaacgtcaaacactccaacgattgagagcatttaaagatgtctgtccacgttctctgtgggttcatt

SEQ ID NO: 463500 - DNA, 75 bp, Homo sapiens
acgtgctcacggtcaacgagcggggcaaccactgcgagtactgcttcaccaggcactttgtgagtgtgccctcca

SEQ ID NO: 463501 - DNA, 100 bp, Homo sapiens
cctgctgaatagctggggctacaggcgtgtgtcactgcgcccagccgagcccaggaagtgcgtcccctccgtggtcgtgggcgtcgtgggcatgggccac

SEQ ID NO: 463502 - DNA, 100 bp, Homo sapiens
aagaatgctcgcgccacgctcagcagcatcagacacatgatccgcaagaacaagtaccgccccgacctgcgcatgcgtgtccggagcggtgactggaagg

SEQ ID NO: 463503 - DNA, 83 bp, Homo sapiens
ctccggcgcatcatggcggctggccgggcccaggtcccttcctcctatgacgccgtgcccatccagtccagcgtggtgttatg

SEQ ID NO: 463504 - DNA, 96 bp, Homo sapiens
ttgtcagcaaaggaagagatgggggttgtagaaggtgatttagctgccatagaagcatacaagtcatcaggaggagacattgcacgtcagctcacc

SEQ ID NO: 463505 - DNA, 75 bp, Homo sapiens
tggtgtgactggggcaggaccatcagaacccttaggagaaatcttgagagtggacagcaattgtgaagatcgcca

SEQ ID NO: 463506 - DNA, 75 bp, Homo sapiens
caggacaacccagatgtgcaacaaagtgcgatggctttgaagacgacccccaggctgtgctgcagacaatgagga

SEQ ID NO: 463507 - DNA, 101 bp, Homo sapiens
aaaaggatatgtgttgctaatacccatctttactggcatcctaaaggttgatgccgccttacctttggacatcctaacctatgaagagaagaccttgtcag

SEQ ID NO: 463508 - DNA, 88 bp, Homo sapiens
tccgggtctggggagtggggaatgaggcgggggtcggcccggggctcggagaatgggcagcataaagatgcctatcaagtgatattgg

SEQ ID NO: 463509 - DNA, 100 bp, Homo sapiens
ttacctatgtacctgttaccactttcaaaaattcccaggactccggctctctctgcttctgtttccggtggctgctcatctggttcaagagggaattccc

SEQ ID NO: 463510 - DNA, 75 bp, Homo sapiens
gggactctgcacactcttcggcctgacgcccaccctcaatggcgggagcggtggtgccccccccgggcacggggc

SEQ ID NO: 463511 - DNA, 85 bp, Homo sapiens
atagaaggaaaaactctaaacgggattacactgggagcagtatagcatcaagttctagaggaattgggagccattgcaaatctga

SEQ ID NO: 463512 - DNA, 83 bp, Homo sapiens
ccgcagaggaaaattcaggcaacgcctcgcgttggtcagaatggcggcagtggagcatcgtcattcttcaggattgccctact

SEQ ID NO: 463513 - DNA, 100 bp, Homo sapiens
acagcaacaaccagtgtattcagggggacaaagtctgggtataccctcctgaaaagaaggagaaaggatacccaaagttgctccaagatgaatttcctgg

SEQ ID NO: 463514 - DNA, 75 bp, Homo sapiens
gagggggaagcggcggcggcaaagggttaaccccaaagattggctttccttggagtgaaatcaggaacatctctt

SEQ ID NO: 463515 - DNA, 100 bp, Homo sapiens
ttgaacaaagtggatggagccaatgtggtggatgaaaatactaggaaaagtttatttaagttacgttctacatgggatgaaatattccctttgaagaaac

SEQ ID NO: 463516 - DNA, 80 bp, Homo sapiens
agcgggcggcagagctggagtgaagggagctagtgatttctcgaatgctggcagccaaaaccgttttggctatccgttat

SEQ ID NO: 463517 - DNA, 99 bp, Homo sapiens
attcaatccggaccattttctggagaatggacagtttaagaaaagggaagcctttatgcctttctcaatagagcatcttcaagaaagcaatggacattt

SEQ ID NO: 463518 - DNA, 100 bp, Homo sapiens
gcagatgctgctgaattctggagaaagttttttggagacaatttgggaagctgcagttctgctgttagtggttcctggagccagaatttgaattcagatg

SEQ ID NO: 463519 - DNA, 103 bp, Homo sapiens
ggaaagcatgatgggagccacgaagggactgtgtattttaaatgcagaatacagattctgttcatcttgctctgaaattaaataattctgaactcatggggag

SEQ ID NO: 463520 - DNA, 100 bp, Homo sapiens
agctccacgcagcaagacccgcgccgccgggacccccaggacgacgtgtacctggacatcaccgatgccttcaattaagttgcagagttctgatggagag

SEQ ID NO: 463521 - DNA, 99 bp, Homo sapiens
gaggatgtatctgtggcccttccaaataagcggcataaagcaattgagaattcaggacttgatagacgacctgaagtcagaactgagtggcaacttcga

SEQ ID NO: 463522 - DNA, 100 bp, Homo sapiens
cagagattatcagtgggcggatgacatttggtttgtaaagtcgatcttgcagtacacggagaacctggtggcttacaccagttacgaaaagaacaagtgg

SEQ ID NO: 463523 - DNA, 80 bp, Homo sapiens
gccttgaaaaagctgccctgagacggtgtcccgccgaaaggtaaagtcagtgataaatcttttgtttgctgcatatactg

SEQ ID NO: 463524 - DNA, 82 bp, Homo sapiens
aacaatacgagcagatccttgcatttgtccaaggacaagtaaatttttgtgaaacattgcagatgttagatggatttgggag

SEQ ID NO: 463525 - DNA, 90 bp, Homo sapiens
gcggcgcccagtggcggtgtgaactgtgaggagttcgccgagttccagcgtggggtagagcagcggctgccatgctcttctgtggcttca

SEQ ID NO: 463526 - DNA, 83 bp, Homo sapiens
ggaagatcgtcgccacctggatgctggagggagtggggaaggccagggccagattctgcagcgcttcccagagaaggactggg

SEQ ID NO: 463527 - DNA, 75 bp, Homo sapiens
ggtggccctgagcagcagctgaagggaagtgggaggtggccctcatgacactgacgctcttcccggtccggctcc

SEQ ID NO: 463528 - DNA, 75 bp, Homo sapiens
gagcccccgcgcgcccggccggcccggagcaccgagctcgcggcacgacaatgcagatcttcgtgaagactctga

SEQ ID NO: 463529 - DNA, 96 bp, Homo sapiens
ccgctattttgcccagcccgtcatgaaggttacacatttggatatgactattcgtgagcacagaggagaaatggaacaaaaaataattaaattaga

SEQ ID NO: 463530 - DNA, 75 bp, Homo sapiens
gcccaaggcaattgatcccaagttgtcgacgaccgacagggtggtgaaaggccctcgggaccaaggatcacgtca

SEQ ID NO: 463531 - DNA, 74 bp, Homo sapiens
catggagttactacatctgaagcatttagaacagtacctggcacagggtatatgaatgacctaaaggtacaaat

SEQ ID NO: 463532 - DNA, 90 bp, Homo sapiens
tccattcagagaggaggccatctcaaagcagccaggttacaagcctgatgaagggaaacgaggggatgcctgtgaaggtgacagtggggg

SEQ ID NO: 463533 - DNA, 77 bp, Homo sapiens
cctcgtcgggaagaatcgtttggtctcctgccgtgcccggtattgttgcagcatctggcagtgagactgaggatgag

SEQ ID NO: 463534 - DNA, 100 bp, Homo sapiens
agagatacaagatgaagagcaagcccctaggaatctgcctgataatcgattgcattggcaatgagacagggatgtgtttggccaaatgggagagtggtta

SEQ ID NO: 463535 - DNA, 98 bp, Homo sapiens
tccccaagaggcatgaactggtgaaggggccgaagaaggttgagaaggtcatgatgaatgagaccgcacaacaaaatatggaaaaccacccagtgatt

SEQ ID NO: 463536 - DNA, 100 bp, Homo sapiens
cggcctacgtgaacaacctgaacgtcaccgaggagaagtaccaggaggcgttggccaagggaagcgagcagctgcaaagcatctaatagaacgctactac

SEQ ID NO: 463537 - DNA, 111 bp, Homo sapiens
ctgctgacagttgctctcctggcttcttactcagtccatcttctgcttagtatgtgtattcagacagtatgaagaccacctgcttgcccatgtttggctacaaacacgtgc

SEQ ID NO: 463538 - DNA, 82 bp, Homo sapiens
aagagtccttcaaaaatgccagaaatcaacgccaagagtctgcaattcataatggagctactgtactggctattggaaggag

SEQ ID NO: 463539 - DNA, 98 bp, Homo sapiens
gggactcccccatcgggaacctggggaaggagctgggcccagacttgcagcctcctgacaaggtgatccgggcgggccccgcaggaattttatcccct

SEQ ID NO: 463540 - DNA, 83 bp, Homo sapiens
gaagcaagtgcagatagatggccttgagctgtgacttgaacaatgctattctgcatgaaattgagaaattgccagtgttccca

SEQ ID NO: 463541 - DNA, 100 bp, Homo sapiens
atgaagggaaggaaatcatgtcaagcgaagccttgaaaaagctgccctgagacggtgtcccgccgaaagataagctgtggttctgctgcctgtcccccaa

SEQ ID NO: 463542 - DNA, 98 bp, Homo sapiens
gatgatgaatttgaggatgatgatcccttgcctgctattggacactgcaaagctatctacccttttgatgatgcctgtgaggagccaccaacatttga

SEQ ID NO: 463543 - DNA, 76 bp, Homo sapiens
gaatcatccacgcacctgcagctctgctgagagagtgcaagccgtggggctatggagttactagtagagaaagcaa

SEQ ID NO: 463544 - DNA, 100 bp, Homo sapiens
tgatcggtgatgccgcaaagaatcaagttgcaatgaaccccaccaacacagtttttgcgattgaacaggagaagcaagcaggcgaatcgtaatgaggcgt

SEQ ID NO: 463545 - DNA, 80 bp, Homo sapiens
cttcaaagaatattaaaaaatctggagggactccaacttcaatgggccttaaagcggctgacaatgaccccacagctcca

SEQ ID NO: 463546 - DNA, 98 bp, Homo sapiens
gtagactctggaccaggagaggcccgcggtgaccgaggcctgggccccgggaaaagcttttgacatcacctatgtgcgtctcaagttccacaccagcc

SEQ ID NO: 463547 - DNA, 74 bp, Homo sapiens
ctcccttcatgtctgggtcatggtccaaaagcctgccaacccctgggaattctacattgggacccagttgatgg

SEQ ID NO: 463548 - DNA, 100 bp, Homo sapiens
cgcagatgctggagaagtccccttatgaccagcgcgtacttgctttgtaagtgatctgaagcgaggactaaaaatccaagcagcaaaatttaatattgat

SEQ ID NO: 463549 - DNA, 100 bp, Homo sapiens
cggtgctgcagacggcgagacctcctgcacaggacaactgtcatctgggaagtaacaacgcaggatgccccctggggtggactgccccatggaattctgg

SEQ ID NO: 463550 - DNA, 100 bp, Homo sapiens
caggaggccaggggtgtcgccatggttacttcttgctgcagattctgcgcaggatcggagctgtgggccaggctgtgtccaggacggcgtggtcggccct

SEQ ID NO: 463551 - DNA, 100 bp, Homo sapiens
tgcgctctcgggccactcggccgcaggtgtttgaggaactgtggaagagggaaggcaagactccagggcagattgtttcagaaaagcagcttgaactgat

SEQ ID NO: 463552 - DNA, 90 bp, Homo sapiens
gaattccggtcagggtcaagtcgtgttctgatcactactgacttgttgccaccaattaccctagttatgggcccatcatctcacctggac

SEQ ID NO: 463553 - DNA, 84 bp, Homo sapiens
cctgggagctgcctctgaggaacacgccgcaggtgagaagccctaccactgcaactgggacggctgcggctggaagtttgcgcg

SEQ ID NO: 463554 - DNA, 50 bp, Homo sapiens
ctcctccatcaactccgacctggagaaccaccgggaggaactgggccatt

SEQ ID NO: 463555 - DNA, 51 bp, Homo sapiens
ccagtgttcaccatcctggccccggaagggactttgaacatgtcggggatc

SEQ ID NO: 463556 - DNA, 90 bp, Homo sapiens
ctccagagtggctgggattacagagctgggatgtttgtgtctaagttctttgggggctatgtgcctgagatggtgctcacccctgatgat

SEQ ID NO: 463557 - DNA, 100 bp, Homo sapiens
attggactgaataaaggaagaaaattgggaatttcaggccaggagcactcactgtgggcctcgtgcgacagtgtcaaacaatccatggacgagaccggac

SEQ ID NO: 463558 - DNA, 75 bp, Homo sapiens
cctccttccctctcttcacatggatcctcttcaagcttaaacctggaacattctagtatgccagtagaaaaaaat

SEQ ID NO: 463559 - DNA, 76 bp, Homo sapiens
cgccgacgcggggcccatggccaggaccaccagccagctggttctgcggggagtgtctccagccctgcctgcaggt

SEQ ID NO: 463560 - DNA, 80 bp, Homo sapiens
agagaagatcatcgagcatttcaaacgcaatgtctcaggctgtgcagacaaacggaactcaaccattaagcaaaacatgg

SEQ ID NO: 463561 - DNA, 75 bp, Homo sapiens
agaatgccggtcacagcccaggaggttcctgcaatttatggagtggacacaagaatgctgactaaaataattcgg

SEQ ID NO: 463562 - DNA, 83 bp, Homo sapiens
ccggtactggagccaatcagcgcgggcagcgaaccgggggagcgaggcacgtgatgatgatgatgattttgatgatgaggaag

SEQ ID NO: 463563 - DNA, 98 bp, Homo sapiens
tcatttctaagtactttctcctactccataaagacttcaaagtctcactctgtcacccaggctggagtgcagtttgtgtgatctcaactcactgcaac

SEQ ID NO: 463564 - DNA, 51 bp, Homo sapiens
aaaacatcaaagaggtctagcaaagttgctgccaaacaaggtgaatccgac

SEQ ID NO: 463565 - DNA, 75 bp, Homo sapiens
aactgattccgcagccttccaatgaagcaaaatgatgcttcaacacccaggccaggtctctgcctcggaagtgag

SEQ ID NO: 463566 - DNA, 100 bp, Homo sapiens
cagacaccgagcttcagcaagctctctccaacgggcgaccctggacatctttgactacatctacatagatgcttttgggaaaggcaagcagctgacagtg

SEQ ID NO: 463567 - DNA, 98 bp, Homo sapiens
cgggtcgcgccgagccgagccgagccgagcggagccggcggagcctctggaatcacccgggtcgctgttcctgagtcggccgtatactaacaaggtaa

SEQ ID NO: 463568 - DNA, 101 bp, Homo sapiens
ccggctggcggtcatttccatcaaccagtgatgtcttggcattgcccattttcaagcaggaagattccagccttccattggatggtgaaacagagcaccca

SEQ ID NO: 463569 - DNA, 83 bp, Homo sapiens
tgtcattcacaaccccctgaaagccaaacggggattcagcgtccgatcctttggaacagggactcacgtgaagcttccaggac

SEQ ID NO: 463570 - DNA, 100 bp, Homo sapiens
ctttgttccctgcagccctcccacgggcgggaagcttcagagtacctttgtatttgaggaaataggacgccgcctaaaggatattgggcctgaggtggtg

SEQ ID NO: 463571 - DNA, 75 bp, Homo sapiens
ggtgccccatagatggccagctttcccccgagggtcaacgagaaagagatcgagcaagtgcaccggcacctggac

SEQ ID NO: 463572 - DNA, 100 bp, Homo sapiens
aaacttcgaggcactcaagtcctggctcagcaagactctcgagcccatgtgctgggactctggtgcccccaaccctgggcatcctcaggctttgaggaga

SEQ ID NO: 463573 - DNA, 71 bp, Homo sapiens
ataggcggccatggtccaaccttgaaggctcttgtcaggatggtgaagctgttcatcggaaacctgccccg

SEQ ID NO: 463574 - DNA, 50 bp, Homo sapiens
ctgatcccgagcagcgtcatgtacccctaactttcagccaacacagctgc

SEQ ID NO: 463575 - DNA, 50 bp, Homo sapiens
aaagaccatcaagtttaccagcttaacagcattgcgcagtgatgaagtga

SEQ ID NO: 463576 - DNA, 100 bp, Homo sapiens
tggctgaatcctgaagatggaaatgtagcttaatgacctccttgtcctggagtctcccttaatacagaatagctgaaacctttggacttcaagaaaatta

SEQ ID NO: 463577 - DNA, 100 bp, Homo sapiens
ggctgagcttcctggagaagaggaaggcattgaagttgatatcgatgtggagcacggagggaaaagaagccgcctgacccccgtctctccagagagttcc

SEQ ID NO: 463578 - DNA, 75 bp, Homo sapiens
acgggcccgtcaagctgcgcctgacaggatggatagaatgacagaagatgctcttcgcttgaatctgttgaagcg

SEQ ID NO: 463579 - DNA, 90 bp, Homo sapiens
cccagatgggaccttgtagttgcaagaaaacaagctcagggctcgcactgattttatattatggtggtatggtcaggaaaaagactacaa

SEQ ID NO: 463580 - DNA, 100 bp, Homo sapiens
ggttaacttgggagaaagtttcatctgtggatggagtattggatgtaatccctgttcattactacttaatacctccaccaacaaagactaagaatggcag

SEQ ID NO: 463581 - DNA, 82 bp, Homo sapiens
gcgggtctgctctgtgtgccatggacggggtgcggcgctgggctccatggtgggcctcatgacctacgggcggcgccaattc

SEQ ID NO: 463582 - DNA, 75 bp, Homo sapiens
gtgaaaaataccacgacaaaaccaccctagatggggtgcatgaagtccaagttcctccaggtcggaggcaataca

SEQ ID NO: 463583 - DNA, 75 bp, Homo sapiens
attgcagatcgaagccaagtgctcagcaagattgtgaataagtggaatacagctctcattggccttatgacatac

SEQ ID NO: 463584 - DNA, 90 bp, Homo sapiens
cacaaacaaactacccattttcttttttggaactcatgagacatatttgaatggtggtacttccataagcatggcacatcttttattgag

SEQ ID NO: 463585 - DNA, 100 bp, Homo sapiens
acgagctggggcaacctgatctcggctgtcggagtgggtgtcctcaagaaaggtgacttggtcctcgcggacgccagcaacccgatagcagaagggtcaa

SEQ ID NO: 463586 - DNA, 82 bp, Homo sapiens
ccttaaaaacaaaagattgagctgcactgtattccttttttcagaagaagtgaagtcaagatgaagaaccatttgcttttct

SEQ ID NO: 463587 - DNA, 50 bp, Homo sapiens
gtttttgtgaggcagtgagacctaaggtggtcctggctctgccatatgac

SEQ ID NO: 463588 - DNA, 98 bp, Homo sapiens
actcataaacttggcttcctcgcttctgctcctcaggcagtcgatgatgtgaagaaaggttacatcaaagcagaagaaaagtcctatcaattacagaa

SEQ ID NO: 463589 - DNA, 80 bp, Homo sapiens
ctcagttggaagcagccgatccagcctgcggagcctgtggggcaggtgtgagagggttgctgttgtattgcaatcatggt

SEQ ID NO: 463590 - DNA, 90 bp, Homo sapiens
ggagatcgtggctgccatgcgccggatacgggacctgagagtcagtatactaagactgcccaggagattgtgaacgtctgttaccagaca

SEQ ID NO: 463591 - DNA, 75 bp, Homo sapiens
ctatcctgccaactctatcgtggtcgtaggaggctgtcctgtctgcaggctggcgcccatgcggctctacacgct

SEQ ID NO: 463592 - DNA, 100 bp, Homo sapiens
gaatacctcgtatgcaacctcaggcttcagccagtgactggtatagtggtcccgcaactgaacttgatactgaacctgatgatgaatgggtgaaaaatag

SEQ ID NO: 463593 - DNA, 82 bp, Homo sapiens
ttagctgtgctcgcgctactctctctttctggcctggaggctatccagcgcaaggggagagccagttgcgcagagccctgca

SEQ ID NO: 463594 - DNA, 100 bp, Homo sapiens
aaagaaagcctcctgcgtggaagcttccctgaggaagagctgataacaccttaaacctcctctggattcaagttaaagcaactccaggtggttccgctat

SEQ ID NO: 463595 - DNA, 73 bp, Homo sapiens
cgacatggaacagggactcactgggggttgtgccatgagtgggctaattgctgatgctaagactttaattgat

SEQ ID NO: 463596 - DNA, 100 bp, Homo sapiens
cgagggggcggcagcctcggcccgaagtgatcgccatgatcaaaggcctgcaggtgctgatgggcaggatggagagcgtgttcaaccacgccatccggca

SEQ ID NO: 463597 - DNA, 50 bp, Homo sapiens
acactgactggcagagtcctgagtctaacgtgaagacattttgctccaag

SEQ ID NO: 463598 - DNA, 75 bp, Homo sapiens
ccacagcggggcggcggcggcggcggctgcggcccaatatagggggggccctcagcctcttggccttgaacgggc

SEQ ID NO: 463599 - DNA, 114 bp, Homo sapiens
gggaaggcgggagacgagaagcctgaaaagtcgcagcgagctggagccgccggagggtgataaaagaaaatgtggctgaagttacccgaagttcagcttgcagtgtaattcaga

SEQ ID NO: 463600 - DNA, 83 bp, Homo sapiens
cttcggtggactccttcggcagtccacccaccgccgccgcctcccagccatccagtccaatggatcagatgggcaagatgaga

SEQ ID NO: 463601 - DNA, 82 bp, Homo sapiens
agcgcttctttaagggctacgggaagatcctggaggtggatctgaagaacggcactgctccgtgtggagatggcgccctctt

SEQ ID NO: 463602 - DNA, 100 bp, Homo sapiens
gaaacacttcttttattttcctgtaatatatctgtatcatcggagtccaaaagaaactcttccttcaaaacctgtgaagaaagagaaggaacagaggaca

SEQ ID NO: 463603 - DNA, 118 bp, Homo sapiens
gagcgcgccggccgcgagcagaccggcctggaagcctacgccctggggctggacaccacaatgcagatcttcgtgaagactctgactggtaagaccatcaccctcgaggttgagccca

SEQ ID NO: 463604 - DNA, 90 bp, Homo sapiens
agaacgctctgccactctaatggtatatgaagatgtcgtccaaatagtatcaggattccaagttgatcatggccttgccaggttggtgac

SEQ ID NO: 463605 - DNA, 100 bp, Homo sapiens
tggaacccaagcagtggcgaagggaatcgcaaggctcttccctgaccattttctactgtccctgcgcgagacaccattcgcttttcacccaagatgattt

SEQ ID NO: 463606 - DNA, 84 bp, Homo sapiens
gcggcgtgtgcgcgcccgccagctgctccggagatacgacctgcctagagctggaacgttacctccagagcgagccctgctatg

SEQ ID NO: 463607 - DNA, 100 bp, Homo sapiens
aggggagtcatttgcacacagtataaaaacatggtttgagaggatgaaatctttgacatggtaaaaccaaaggatcctttgaaaatctctcttcaggatt

SEQ ID NO: 463608 - DNA, 100 bp, Homo sapiens
ccaaggtggcagctctcactgcggggaccctgctacttctgacagccatcggggcggcatcctgggccattggataagaaagctccagtctacaaacaaa

SEQ ID NO: 463609 - DNA, 100 bp, Homo sapiens
gccggccagaagcgggcggcgcgggggagatgatccagacatttaatgtggatgcaccatgccagaccgtggaagatttaacgaatggggttgtgatggc

SEQ ID NO: 463610 - DNA, 100 bp, Homo sapiens
gagggattacagaaaggagaacaccttatttcaggttattgagccacatgatatatcagtggcactcaacacccgaaaattgtggagcatgcaccttcat

SEQ ID NO: 463611 - DNA, 97 bp, Homo sapiens
gcctcgacctcttctgcctcttcatgggctacatatcgaaatcgaattgtgagccaaaatctcagcacaagggacagaaaagcaatacatactccca

SEQ ID NO: 463612 - DNA, 74 bp, Homo sapiens
ggcaagatcctgtgcactgactgcggccgaatacatcaagcaatggtaacatctttaaatgaagataatgaaag

SEQ ID NO: 463613 - DNA, 97 bp, Homo sapiens
ggaaaaccagatattggggataacattacgtcagcgtgatgctgaggtgactcgactaagagaattaaccagatccaaacgatcaaagatgttgctg

SEQ ID NO: 463614 - DNA, 96 bp, Homo sapiens
cagtgatctgccttaagggcagtcaatggtcagatattgaagagttctgcaatcgtggagtttcccgaagcccggatttatgaggagaccctgaac

SEQ ID NO: 463615 - DNA, 112 bp, Homo sapiens
tgctcagtcttttgaatgatttccactctggaaaacttcaagcatttggtttgtccaagactggttttcagaaaggatgcaagtggccaaagtggacttctctacagtgtta

SEQ ID NO: 463616 - DNA, 82 bp, Homo sapiens
cagacctgagcaggctgcaaaccaaagcaggtaccactgatgaaattatgaccaggtgggcccgagttagtaccacatataa

SEQ ID NO: 463617 - DNA, 98 bp, Homo sapiens
catcatctgtgtgttctcacagcaagaactcccctggagcaggaaattttcaacctcctccataagaacaagcagccagtgacagaccctttactgac

SEQ ID NO: 463618 - DNA, 87 bp, Homo sapiens
cagcctcctgagtagccgggattacaggtgggcagcaatgctggcatcgtggggatgaccaaagaacacctgggcttggcactggca

SEQ ID NO: 463619 - DNA, 98 bp, Homo sapiens
cctgctcctgctcatggacgacgcatccgtgtacaagatttgcagagaaatgtatgacgatggagtgggtttaccctttcaaagtcagcctgatctta

SEQ ID NO: 463620 - DNA, 90 bp, Homo sapiens
gggagagttagggagggatgcaatttgagagaagtggaaggcggaccgaggggtgtgtgagggcaggaagctgccacttttgctagagag

SEQ ID NO: 463621 - DNA, 75 bp, Homo sapiens
cagggctcctgtggctcctgctgggaactcaatgttcgaaaagttacactgtctacagataaaaacaagtatggc

SEQ ID NO: 463622 - DNA, 100 bp, Homo sapiens
gagagcggatcccagacgtggctgcattgtccatgggcttctctgtgaaagaagatcttatggttggtgatgaggcaagtgaattacgatcaatgttaga

SEQ ID NO: 463623 - DNA, 97 bp, Homo sapiens
agaacctgaagatccacaaccggtcgcacacagcctctactcaatagtccccccagctttgtgtgctggtctcggggcttcatggagatgaatgggc

SEQ ID NO: 463624 - DNA, 50 bp, Homo sapiens
ggggaaggcgcctgaagaggacgaagccaaaactggacaagccaaggcat

SEQ ID NO: 463625 - DNA, 75 bp, Homo sapiens
cgcagtggtcgcttcttctccttggcactattatcaaaagtcaaaatatgactcaagtgtgagtggtcaatcatc

SEQ ID NO: 463626 - DNA, 110 bp, Homo sapiens
accccgcggaaggtgcccttctctgcgcgtctcgccgagcccgggccacgctcctgtcccagatgatggatttggacatgcttctatgaagaaatgccacatggtccgag

SEQ ID NO: 463627 - DNA, 100 bp, Homo sapiens
cccacttcccgcttgggcgcccggacggcgaatggagcaggggcgcgcagttcgttcccacatgcagggcagcacaaggagaatgggcgtcatgactgat

SEQ ID NO: 463628 - DNA, 82 bp, Homo sapiens
catagaagccgggattgagcgcatcaagatggtcagtaggacagaaggtaacattgatgactcgctcattggtggaaatgcc

SEQ ID NO: 463629 - DNA, 95 bp, Homo sapiens
ctgccaaacccaagttggttggagatgtggattttgaaggtgaccaagaatatggcccaggtgaccaaagccctggacaaggccctgagcaccat

SEQ ID NO: 463630 - DNA, 75 bp, Homo sapiens
ggtcaagtacacagagagacggcagccgctgtacagattcatcaccacgggcaagtgtccagagaatggctggga

SEQ ID NO: 463631 - DNA, 108 bp, Homo sapiens
cggcagccgacggcaaaggtgtcgtggtggtcattaagcggagatccggctttatcctgtggataaacgcagagtgaacgagtttggggagtcctacgaggagaaggc

SEQ ID NO: 463632 - DNA, 108 bp, Homo sapiens
gaaccgcttcagggtgtccaagttccggcacaccgaggctcggccgccccgccgcgagacaatgcagatcttcgtgaagactctgactggtaagaccatcaccctcga

SEQ ID NO: 463633 - DNA, 100 bp, Homo sapiens
cagcattacacgatgcacttaatgaccctaaaaatggcgattctgcaaccaagcacctgaaacagcaggaccatcagcacgtgcccatcgacatccagac

SEQ ID NO: 463634 - DNA, 75 bp, Homo sapiens
ctccaggacggcgcccttagcgacaccatgacatgcgtcgggatgtccaggaaatttttcgcatgaccccccacg

SEQ ID NO: 463635 - DNA, 50 bp, Homo sapiens
cagaaccaaccaggctttacagtggccaatccgccatggtatagttgaag

SEQ ID NO: 463636 - DNA, 51 bp, Homo sapiens
gtctacagccggctcacagcacgaggcccttccttctaccatgattatagt

SEQ ID NO: 463637 - DNA, 74 bp, Homo sapiens
tgaaatctaggagtggcagttgagggcttctgttcacaaaggttatcaatactctggctgaccatcatcatcgt

SEQ ID NO: 463638 - DNA, 75 bp, Homo sapiens
caagtttggtggtcgcaatataaagaagcagtgctgcaactaaaggagcagcccagtggttttcaagaagtgcta

SEQ ID NO: 463639 - DNA, 100 bp, Homo sapiens
ccatggccacaggcttagctgttaacgggaaagttgacggactggacaaagcttctatagcaaactcagatggccccacagcaggttcccaaacacctcc

SEQ ID NO: 463640 - DNA, 83 bp, Homo sapiens
ggaggatgacggagctgcagtcggcactgctactgcgaagacagctggcagcagaggccacagtctgcacggtgacactggag

SEQ ID NO: 463641 - DNA, 80 bp, Homo sapiens
ctgcgctgttccacctcattcaacttcagggggatatgagactttctactcggaatatcctgagtgttgcgtggatgtaa

SEQ ID NO: 463642 - DNA, 87 bp, Homo sapiens
acatccagcagaggaggcgggggcagccgctgagacggtttttcacaagaccattaaaaatctcaagtgacgactttgggaaactct

SEQ ID NO: 463643 - DNA, 124 bp, Homo sapiens
gctctgccgtatccaagacagtatgcaaggccacgacccacgagatcatggggcccaagaaaaagcacctggactaagactcagcctggatttcaaaactgaacactgaagtggtttgcaacag

SEQ ID NO: 463644 - DNA, 128 bp, Homo sapiens
ggcgctcttctacgggacctgctccttcctcatcgtgcttgtcaacaaggcgctgctgaccacctacggtgggccccatgctgattgagtttaacatgcctgtggacctggagctcgtggcaaagcag

SEQ ID NO: 463645 - DNA, 82 bp, Homo sapiens
aagaaggagagatctctgctgcctgcattgagggggtcctgcagttctgagcttgggttccctttgcctggacaccaaccaa

SEQ ID NO: 463646 - DNA, 100 bp, Homo sapiens
tttgtggggaaaaaaaggagcttgccttctgagctttgtaccaaagacctgggaaaagtccggtttatcactaaaatatggcatcctaatattagttccg

SEQ ID NO: 463647 - DNA, 102 bp, Homo sapiens
tcatctgcctggggggagacgggacgctgctgtacgcttcctcgcttttccagattcttctgctgatcgacattgagcagtcctacatcaacacgaaccatg

SEQ ID NO: 463648 - DNA, 75 bp, Homo sapiens
tatgatccatcttagtgaagaattaggatacaggtgtctgagtccaacggagaattttttttcaagtcttctgaa

SEQ ID NO: 463649 - DNA, 98 bp, Homo sapiens
gccaggcgggactaagagagccgaggtcgctccccatccactctcacaagggtcgcggcgagcgcgcctatgacatctactcgcggctgctgcgggag

SEQ ID NO: 463650 - DNA, 100 bp, Homo sapiens
gccaactcttcgttcgattattagctttagtgaaatgggctaataatgctggcaaagtggaaaaatgtgcggcacaacccgatctcccagagaaggagaa

SEQ ID NO: 463651 - DNA, 100 bp, Homo sapiens
aaaggaggaatttgcctcttctacagatagagctgttaaggttagaaaggcagtggacgctctcttgacgcattgcaagtccaggaaaaacaattatggg

SEQ ID NO: 463652 - DNA, 100 bp, Homo sapiens
ggcgagctagccgggagttacaccgccaccgccaggtcgcaatggaagaagagatcgccgcgctggtcattgacaatggctccggcatgtgcaaagctgg

SEQ ID NO: 463653 - DNA, 99 bp, Homo sapiens
tcttataaaacaaatgctgctgctatgaatatgggtcgaccattccaaaaaaatcgggcaagcgacttggtaatgaaggtggatgctcttctgtcagcg

SEQ ID NO: 463654 - DNA, 75 bp, Homo sapiens
agccgccgccgcagcgcgaacatggacgccgtcaacgccttcaaccaggaggtactccaaagattcaggtttact

SEQ ID NO: 463655 - DNA, 83 bp, Homo sapiens
catattctgtctgtccacgatagtgccaggcctatgttggaggtttctaaggtaaacggagtcactcgaatgtcatctctggg

SEQ ID NO: 463656 - DNA, 99 bp, Homo sapiens
gtgcttttgaaccactggaaagtgaggaattttgaagtacaccgtggtgacattgtatcattggtgaatggccaacctgctgacgggccccaaacggaa

SEQ ID NO: 463657 - DNA, 100 bp, Homo sapiens
aagttgttcattgtttgtcaccacaaaaaggacagctgtgattgggttattatacccctgcattgacagacatctaggagaaccacataaatttaaaaga

SEQ ID NO: 463658 - DNA, 75 bp, Homo sapiens
ctttttcatgttgaacaaagacagtacatgtgcagattcactttataggaacagcttcagcttcagtgatgaaaa

SEQ ID NO: 463659 - DNA, 100 bp, Homo sapiens
gatcttataaaacaaatgctgctgctatgaatatgggtcgaccattccaaaaaaatcgggcggcgactggcggcgcgatggacctgaccgggctcctgct

SEQ ID NO: 463660 - DNA, 100 bp, Homo sapiens
gggaaaaacttaaaatggatatgaaaagtgaagaaagtgatcataggagaaaaccatttcagcaccggtttctgttccccttctttgactcagcctatca

SEQ ID NO: 463661 - DNA, 82 bp, Homo sapiens
tcatcacccctccaaaaacagtcctggacgaccacacgcagaccctctttcaggaccaagaatcgccttcagccctgtctgg

SEQ ID NO: 463662 - DNA, 98 bp, Homo sapiens
tccatgactgccttctgcctcttcacgtgggacaaatggcttaagaaacccttcgctgaagcagcagctgttctcatatgctatcctgggatttgcct

SEQ ID NO: 463663 - DNA, 78 bp, Homo sapiens
actggattgagtccagctcttgggatggtgactctgacatcattagaagcatgccagaacagactggtgaaaagtaaa

SEQ ID NO: 463664 - DNA, 90 bp, Homo sapiens
cactcgcgctgtacgggccgccactggacgcaggaattggcagcaatgaaacagattctcgttaagatgcatagtaaacattctgagaac

SEQ ID NO: 463665 - DNA, 83 bp, Homo sapiens
ccgcaccttcgtgccagcctcctcccccatgtaccacacctgtgtggccttcgcctggggttcgtgggcccccaagaaggagc

SEQ ID NO: 463666 - DNA, 83 bp, Homo sapiens
tttcaagaaaggagagaagatgaaagtcctggaggagttgaaggggcccggccaggactcggggaagggtggcctgagagcag

SEQ ID NO: 463667 - DNA, 101 bp, Homo sapiens
tcttcatattggcgatcctgttgtacttgaaactgcatctgcagagcactgattatggtaacttcctggccaacgaggcatcacctctgacggtgtcagtc

SEQ ID NO: 463668 - DNA, 100 bp, Homo sapiens
gcctgctcccagtagcccaccaaagttggtgtaatacggtgcccagtatgccgccaagaatgcagacagatagaccttgtggataattattttgtgaaag

SEQ ID NO: 463669 - DNA, 50 bp, Homo sapiens
tcatcaaaaatagtgatagctttgataaggttttggccaaattgggcgag

SEQ ID NO: 463670 - DNA, 98 bp, Homo sapiens
ctgtgccatccaaactgcacctacgggtctctaattaacagaagatggcaaagcccagccacagcagctatgtccttcagcagctaaacaaccaaaga

SEQ ID NO: 463671 - DNA, 100 bp, Homo sapiens
cccagtagcagttacaattttctttggggccaatgacagtgcactaaaaggcctccccatggccacccatggaccagtcggcattcacttcctcccttct

SEQ ID NO: 463672 - DNA, 100 bp, Homo sapiens
cagatgtgctgtaaacatcaaaagaagacggtgggatcaggagatggatgttttcactccagaatgcaaattcaaggaatctgtgtttgaaaactactat

SEQ ID NO: 463673 - DNA, 74 bp, Homo sapiens
ctggacggctctgtggacgtagacgagcaccgccggccggagggagaagaaatgggtgaccgttggtgacacat

SEQ ID NO: 463674 - DNA, 75 bp, Homo sapiens
aatcgacgtgctgttttcataggattggagctggagggagcatcactgggctgaagtttaaccctctcaatacca

SEQ ID NO: 463675 - DNA, 75 bp, Homo sapiens
tcactttctttgtttatgtcagtaatttcacctggcccatcaaaattcagctcaagactgcagtgcagatgacga

SEQ ID NO: 463676 - DNA, 74 bp, Homo sapiens
cgtgtatggagcataacctgaggcactgggacgttcgggcgggtgcacctggtgaaggagaagacagccaagca

SEQ ID NO: 463677 - DNA, 101 bp, Homo sapiens
agatctgtggagcagatccgatggagaggctgagctgctccaggacttgggagaaagagatgacttgatgtctgcactagtttccgtaaggagcagcttgg

SEQ ID NO: 463678 - DNA, 50 bp, Homo sapiens
cgccgtcgcggtggactgcaaggttttgacctgtagcagagaaccaattc

SEQ ID NO: 463679 - DNA, 83 bp, Homo sapiens
ctcctgcagctgggttacctgtacagacaatgcagatcttcgtgaagactctgactggtaagaccatcaccctcgaggttgag

SEQ ID NO: 463680 - DNA, 100 bp, Homo sapiens
cccgggtccttccttccagcctgatgctaccaaaggtggaaagtcctgaagaaatccagtgggcagcagaagatgtcgttttcattggacctgacacaca

SEQ ID NO: 463681 - DNA, 100 bp, Homo sapiens
ctatataaagtcaagtgtccattttctttcaactatatttgagcatacccaggtgctggagaatctggtaaaagcaccattgtgaagcagatgaggatcc

SEQ ID NO: 463682 - DNA, 100 bp, Homo sapiens
aaggagcaacagtttacagcccttccagatacagctaccagcctaagttcgaggcccaggcgcctccatcagcgccgcctgcgccccgggccgaggcaga

SEQ ID NO: 463683 - DNA, 76 bp, Homo sapiens
cggcgcctcattcgggtggagctgagccggagacaggagcgggacggtatgcgggccatcctggggtcctacgaca

SEQ ID NO: 463684 - DNA, 75 bp, Homo sapiens
gctcagcggctatgaccaggtgctccacgaagacgaaaccacgaccgagacatgggtgcccggcaccgcgcccga

SEQ ID NO: 463685 - DNA, 100 bp, Homo sapiens
ggacggagcgccggccgcaccaccgccctctggccgttgcctcaccgggtgctggagaatctggtaaaagcaccattgtgaagcagatgaggatcctgca

SEQ ID NO: 463686 - DNA, 83 bp, Homo sapiens
gttctctggtggaggcgctcttcctggtgtcccgcccagtagggcgaagctgtgctcaggcccgggctggacgcagagccaga

SEQ ID NO: 463687 - DNA, 112 bp, Homo sapiens
gtggtgttgtcgtggccggagcggcccgcgcctgggctgccggcacttcgcggcagggcgtgatggtgggcatgggtcagaaggattcctatgtgggcgacgaggcccagag

SEQ ID NO: 463688 - DNA, 50 bp, Homo sapiens
caaattcatcccagaaatctaagagggtgggagactacactggaaaataa

SEQ ID NO: 463689 - DNA, 82 bp, Homo sapiens
gctgcctggaacatcttcacccacagtggttttcaactcaggattagcagtacaagccagctgccatgttgtgagcacatac

SEQ ID NO: 463690 - DNA, 51 bp, Homo sapiens
gccgcgcccgcggaaccagaccaggtaaccagttaggggccttggtacatc

SEQ ID NO: 463691 - DNA, 82 bp, Homo sapiens
cgagatcctgtctgagaaggctggcatcattcaggacacctggcacaaggggcactatggcagacaaagttaggaggcagag

SEQ ID NO: 463692 - DNA, 92 bp, Homo sapiens
ggtccccgggtccgcagcttctggcggttcgggcggtcggcgaagcggccggcagggcgtctctggccgagcctctttttgtggaaaacgac

SEQ ID NO: 463693 - DNA, 100 bp, Homo sapiens
cagcactgccaaatagcagaagaataccatgaggtcaaaaaggaaatcaccctgcttgagcaaaggaaatggactagaggcttttaccagatttcttaaa

SEQ ID NO: 463694 - DNA, 100 bp, Homo sapiens
attgctgatcttgtacttggattcagcaaggaaccttccgggaactgctcgcagaaagaagaaggtggttcatagaacagccacagcagatgacaaaaaa

SEQ ID NO: 463695 - DNA, 51 bp, Homo sapiens
gaagagggaagacacgcggaaacagactccagcgggaggaagaagaggcct

SEQ ID NO: 463696 - DNA, 83 bp, Homo sapiens
caagaccaagtactaccttcaagcgcgtgcctgcagacgaggcctacttcatagtcaaagagattctcgctacagaacgaaca

SEQ ID NO: 463697 - DNA, 51 bp, Homo sapiens
cttttggcagcatgaaagttagcatagccggatcgagctgggagatgtgac

SEQ ID NO: 463698 - DNA, 100 bp, Homo sapiens
caaaaccaaagtaacaaccagtttgtattgtaccgcataactgaagccactaagacggagctcttgtccctggcaaagcgaaagcgcagtgactctgagg

SEQ ID NO: 463699 - DNA, 96 bp, Homo sapiens
ggcacagattagaggaaggaagaggtctcaggcaagattatgcttctacttcagcatctgtatcaagacatagttccagtgtgtcattgagttcag

SEQ ID NO: 463700 - DNA, 74 bp, Homo sapiens
ggcgaacccgcggcgcaataacgccttctcttggagtcaagaagcctaccaaagccctgctctttgtactcttg

SEQ ID NO: 463701 - DNA, 90 bp, Homo sapiens
ccagaacttgaaagacttgtcacctgttattgtaacgcaggttgcccgacatgtgagtgccattccttggggcatttctgccactgcagc

SEQ ID NO: 463702 - DNA, 75 bp, Homo sapiens
tgaagtaggaccgaattcctgtgccgaagaggcctgcagtgggagagcaggggtgctttcttctgcgacctggta

SEQ ID NO: 463703 - DNA, 96 bp, Homo sapiens
gcaccgaggcgagcaggagcagggaacaggatccaaggattctgtagctacaatgttgtcaagactttttcgaatgcatggcctctttgtggcctc

SEQ ID NO: 463704 - DNA, 98 bp, Homo sapiens
tggcggacttcgacacctacgacgatcgggcctacagcagcttcggcggcggcagagggaacagcttcagctgcggggctcctttacctgcacacatg

SEQ ID NO: 463705 - DNA, 58 bp, Homo sapiens
cacttcctgtgtctgtgggagcactgtgaggatgtgtttcacatggtagttgaagtac

SEQ ID NO: 463706 - DNA, 75 bp, Homo sapiens
ttggggccgtcttgagtggtttgtgacgagctcatctgcgcctttgtttagaacgcttaaaagttctgattccac

SEQ ID NO: 463707 - DNA, 100 bp, Homo sapiens
ctgacactctgcaccgggaggccaagggccaccatcgtcttgctggcccggattgcatttctacaaggcgaaagaaaaggtcaagagaacctgaagaagg

SEQ ID NO: 463708 - DNA, 131 bp, Homo sapiens
tcagaatactggagggttttttgtggcagtattggtgaaaaaatcttcaatgccgtggaataaacgtcagccaaagttgcctgacctggtaccccagctggggacactctaccagttaatggaaagcagag

SEQ ID NO: 463709 - DNA, 94 bp, Homo sapiens
cagtactgagagcctcctctccagaaattctgagagcccggagcatgtgtgctgctgctgctgggaggacgacggacggcagcggccaagcaag

SEQ ID NO: 463710 - DNA, 101 bp, Homo sapiens
gagaaaagaaaaatcattggggatacttttgttaagccccacaccagtgagaagcatcagcaccgtgaacttgtctgagaatagcagtgttgtcatccccc

SEQ ID NO: 463711 - DNA, 125 bp, Homo sapiens
acaaaggaatgaaatcttgactgccatccttgcctcgctcactgcacgccagaacctgaggagagaatggcatgccagggaaatgatcttcattggttagcatgtgccttatatgtggcttgcag

SEQ ID NO: 463712 - DNA, 96 bp, Homo sapiens
ttcgcgacatggccttcaattttggggctccctcgggcacctccggtaccgctgcagccaccgcggcccccgcggcaacaaaggagagagcgggaa

SEQ ID NO: 463713 - DNA, 75 bp, Homo sapiens
ccaagcagcaccagcgtgcctttgggtgataagggtttacagacaaggatcagcagccctctggaagtgagggag

SEQ ID NO: 463714 - DNA, 100 bp, Homo sapiens
cattgtggatgcactaggagatcggatttttggccttgaaggaagcactgccctacacttggccaccatctcctgccagccacagtgtgttaaggttctg

SEQ ID NO: 463715 - DNA, 83 bp, Homo sapiens
ctcgcccgcagccccgagaccgcagggggtccactggacggggcctgagctacaacttcacccacctggacgggtacctggac

SEQ ID NO: 463716 - DNA, 100 bp, Homo sapiens
gttgccggaggggcgcgcaaagccacgaaaagcaaactttttgagtttctggtccatggggtggtgaacaaagccctgaagcagaagtcagacatcgagc

SEQ ID NO: 463717 - DNA, 75 bp, Homo sapiens
cttggccatcccaaagctattctgggggcaacagagcttcttggacacttaatgattgttggcaagaaatgtgct

SEQ ID NO: 463718 - DNA, 101 bp, Homo sapiens
tcagattgcaacaggctgaagaaagcataagatattctcgtcagcatcacagtattcagatgatgttgatgttagtgaagattcacctcctcccctacctg

SEQ ID NO: 463719 - DNA, 50 bp, Homo sapiens
gaatcactgactggcacaggtgttggggtattctctgaaaccaaatgacc

SEQ ID NO: 463720 - DNA, 100 bp, Homo sapiens
gacgacttcaactatggcagcagcgtggcctccgccaccgtgcacatccgaatgggatgagagaagctgcaagaaaaatagaagaaaggcatttttccaa

SEQ ID NO: 463721 - DNA, 50 bp, Homo sapiens
ttgtgaccctgcagctcctcaaaatgaggacggggacttggttgcctttt

SEQ ID NO: 463722 - DNA, 75 bp, Homo sapiens
ggagagaccccgcggctgggcgttcatctaccacgctttcgtatattgagctcctggcagcttgcagagaagaat

SEQ ID NO: 463723 - DNA, 73 bp, Homo sapiens
tgatcgctcagctggagaacgcggctaaagttctgatgttttagaaagagcgttttcgctacgtaaagcacat

SEQ ID NO: 463724 - DNA, 75 bp, Homo sapiens
gaggaagtcaacagctgtgtggagtatgaccacaagcgaatctcaaagttgtcagagcggctgatacagaatata

SEQ ID NO: 463725 - DNA, 51 bp, Homo sapiens
gcgtcaggcatctcaatcatggtggacttagtagttttaagcagaaccatg

SEQ ID NO: 463726 - DNA, 95 bp, Homo sapiens
ccaagaatcctcatgctcctactatccatttcaactacagatactttgaagtagaagaagctgatggtgtctgtgggaggttatgtttatttgag

SEQ ID NO: 463727 - DNA, 100 bp, Homo sapiens
ctatggctcaaagaaagatgattatgtgaatcaggtctaggaaaatcgactctcataaacagcctattcctaactgatctgtacccagaaagagtcatac

SEQ ID NO: 463728 - DNA, 100 bp, Homo sapiens
aagagagacatttctggctctgaaggcgaacgcttcgctggccatttaggagctctgctcaaagccagacgctgttaaacgtttaatgaaagaagcggca

SEQ ID NO: 463729 - DNA, 83 bp, Homo sapiens
cgctactaccggcaacgtgctcactccaaccccatggcggaccacacgctgcgctaagctatcagcttcccagtttgcacaat

SEQ ID NO: 463730 - DNA, 51 bp, Homo sapiens
cgtgcacccagaggaccaggcggcgcgtgagtgcatctccatccacgttgg

SEQ ID NO: 463731 - DNA, 100 bp, Homo sapiens
tgacgtctccagccaaattcaaaaaggataaggagatcatagcagagtacgatactcaggtcaaagatggactagaggcttttaccagatttcttaaaac

SEQ ID NO: 463732 - DNA, 100 bp, Homo sapiens
gcttaccgcatctggctggagccctgcattcgcggcgtgtgcaggtgcagaggccaagaccgttttgcccaagaaggagaaaatgaagctgaggcgtgag

SEQ ID NO: 463733 - DNA, 85 bp, Homo sapiens
ggacggcgagcgcgagcggcgcgagaaaccacataaagaagatccctaatagtcatttctcaacaattatatagtcaactgatgt

SEQ ID NO: 463734 - DNA, 51 bp, Homo sapiens
ggatctccgccgtccaccctgtgagccccatgcccgtttctacgcggccca

SEQ ID NO: 463735 - DNA, 82 bp, Homo sapiens
cgagcgggcggcttcctggcctgggcgctccggtggcggcggaggtctgcagcccagagggcaccttctgcaaacatgtctg

SEQ ID NO: 463736 - DNA, 100 bp, Homo sapiens
cttgaaggaggctgcaaatgttgtggtcaagtgcctcacccctttctacaaggagggcaagtttgcttccaaggaaccgtccctgcccaggccagggcag

SEQ ID NO: 463737 - DNA, 101 bp, Homo sapiens
cgccgactgtcaatggagctggaaaacatcgtggccaacacggtcttgctgaaagccagggaagccaggcgggcaccacggcaggggctgagctaccctca

SEQ ID NO: 463738 - DNA, 83 bp, Homo sapiens
cgtgggaatggcaaactgtagaagctgtggccaccggactccaggatgaaaactttcggaagagaaagttgcctgtggtaagt

SEQ ID NO: 463739 - DNA, 75 bp, Homo sapiens
accatccacacatcataaagctttaccagtgctggctgaagatgcaatcaaggccgccctggctgattacaaatt

SEQ ID NO: 463740 - DNA, 100 bp, Homo sapiens
catgatcacaggagcagccctctggcccataatgacggccctgtcttcgcaggtggccactcgggcccgcagccctgccctcccctggagcctgctgccc

SEQ ID NO: 463741 - DNA, 100 bp, Homo sapiens
gccgccatggcgtccaacatggaccgggagatgatcctggcggattttcaggaacctgagaggtccttcccattggaggggcagggggaggagacccagc

SEQ ID NO: 463742 - DNA, 50 bp, Homo sapiens
ttgcgagcggcatctacctactggcagctgagcctccacccagaccgaaa

SEQ ID NO: 463743 - DNA, 100 bp, Homo sapiens
cgagcacgccggccccgcgcgcgcctcgaggccgagtcaaggcacagtgaaggtgaagagttctaacatccaagttggagaccttatcatcgttgaaaag

SEQ ID NO: 463744 - DNA, 50 bp, Homo sapiens
cctgcaagtcattagagtcacagttcccttgccccaccctcagaccctgc

SEQ ID NO: 463745 - DNA, 90 bp, Homo sapiens
cccaggagcagacagagaagctgctgcagtttcaggtgacactgctgagtgtggagatgactgccctaaaagaggagagagaccgactca

SEQ ID NO: 463746 - DNA, 75 bp, Homo sapiens
agaagagcagaaaatagcagccaggaaccaagaaaacttgagttcttcagatgctatatatttggcaaggcatgt

SEQ ID NO: 463747 - DNA, 50 bp, Homo sapiens
caggggaccaagctggagatcaaacgtacaggtgaacaaaggcagagtaa

SEQ ID NO: 463748 - DNA, 50 bp, Homo sapiens
gaaagctgtgaaagttctcaagtacaaaactttttaccaacaaaaaaaag

SEQ ID NO: 463749 - DNA, 82 bp, Homo sapiens
ccccttcatgagaggcgagcacaactcgacctcctatgactctgcagttagaaataatgaagatgtttcattttcaagacca

SEQ ID NO: 463750 - DNA, 75 bp, Homo sapiens
tttcaaccagtttggatgccaaggatgagttagaggagttctcctgtgcctcctgttggctctctttgcatctgg

SEQ ID NO: 463751 - DNA, 75 bp, Homo sapiens
cgccgccggggccgctgcaaggggaggagagaggccgcctcaggtgtaccttccggtttcccagcacggccatca

SEQ ID NO: 463752 - DNA, 82 bp, Homo sapiens
gaagaatgaggccaatggcagagagaccacagctcactgttaatgaagcggctgctcaactctgtgtgaaggataatgccct

SEQ ID NO: 463753 - DNA, 85 bp, Homo sapiens
acaggcccctgccaccatgcccagatacaaggtctcgctgttctacctaggctgttctagaactcctaatgtcaagctatcctcc

SEQ ID NO: 463754 - DNA, 82 bp, Homo sapiens
gcggcggctccgggacgagtgagtggatcctgggaagcgctgtgaaatgggctggctatgactttgcagccgtcctggagtg

SEQ ID NO: 463755 - DNA, 75 bp, Homo sapiens
ctgattacaagaatcctatagaccagtgtaataccctgaatcccggaactgctcgcagaaagaagaaggtggttc

SEQ ID NO: 463756 - DNA, 133 bp, Homo sapiens
gtcgcgcccgggaggaaggaacgaggcaaggagctaaagcagcgtgcgttcagccctgggcaaaatgatgcttcaacacccaggccaggtctctgcctcggaagtgagtgcttctgccatcgtcccctgcctg

SEQ ID NO: 463757 - DNA, 90 bp, Homo sapiens
ctctgctctctctatgagaacgactgcatctttgacaagtttgagtgttgctggaacggttcggataggatctcccagccatccagcccc

SEQ ID NO: 463758 - DNA, 82 bp, Homo sapiens
gtgaaggaagccgtggagctacactggaaatgaccctagcaaaaatcctctacactagcaaatatggaaagtctcaattcca

SEQ ID NO: 463759 - DNA, 90 bp, Homo sapiens
ggatgagcatgccaatttaactgagttgccaagtttccaggacagtgaagatgatgatgatattctgccaaatatggacaaaaatccaac

SEQ ID NO: 463760 - DNA, 87 bp, Homo sapiens
acgcacaggccgtcgctatgagcgggaccaccctgggcacagcaggcatcggagagcctggaaacctggccggcgtcaggcacatca

SEQ ID NO: 463761 - DNA, 83 bp, Homo sapiens
cagcgcgtcgtggggcgagcggcaggaccaagaatcgccttcagccctgtctggtgcatccttggcagaaagtgaggaggaaa

SEQ ID NO: 463762 - DNA, 75 bp, Homo sapiens
agcggctgaagcgcgtgcgcatggtggcctccatgaaccagcgccgtgtggatttctaccttgcctccatcgaag

SEQ ID NO: 463763 - DNA, 82 bp, Homo sapiens
actttcacaacccagcagacttctttgagattggtctggattttacagaacttgactgagagttttgctcttgttgcccagg

SEQ ID NO: 463764 - DNA, 50 bp, Homo sapiens
acaaggccttctacattaccggaggctgaccagtgtgtggcctgtgccca

SEQ ID NO: 463765 - DNA, 75 bp, Homo sapiens
aagccaactcataataaacaagatttcgactatactaatgagtacaggcgcagttgtgtagcagttgagtaatgc

SEQ ID NO: 463766 - DNA, 75 bp, Homo sapiens
gggggcttggcggcttttctcctcagttttctggagtgctttggaggagagcatgtagagcgcatgaagtacagg

SEQ ID NO: 463767 - DNA, 100 bp, Homo sapiens
gacccccgcaaggtcaacctgggagtgggagtgtggtttattgacaatcatttacaatgccgaagagtgctgtagtgagccagcacagtgggtaacacag

SEQ ID NO: 463768 - DNA, 100 bp, Homo sapiens
gaatgctggcggaggacgagctccgggatgctgtactccttgtctttgcaaacaaacaggtactaggttttgacaagcttgcatcatgcgtgagtataag

SEQ ID NO: 463769 - DNA, 82 bp, Homo sapiens
tttctaccttgtatgcctcaatttgctggatttaagcactgctgcactttatgagccgcggcgagtcctttgcacatgttgg

SEQ ID NO: 463770 - DNA, 100 bp, Homo sapiens
gagatggaagattttgatgcaaatatcgaagaacagaaagaagaaaagaaagatgcagaggaagaggaaagcgaactgggcttttttccagacttcaagc

SEQ ID NO: 463771 - DNA, 100 bp, Homo sapiens
tttaaccaaacaaccagaagaagtatttgatgtcttagagaaacttggagaagggttaatttggagtggcccctggagtcagtttcctacaccatccgag

SEQ ID NO: 463772 - DNA, 110 bp, Homo sapiens
tccaggctagttttctcttaaatccagagaaatatactgatgaacttgccactcagccaaggcgactgcttaacacactgagaacggtggcagccgaagttaggaagcag

SEQ ID NO: 463773 - DNA, 82 bp, Homo sapiens
ctaccctggttacctcatatatcttctgtctacatggtggtctctcgccatctatagatacactggatcatatcagagcact

SEQ ID NO: 463774 - DNA, 129 bp, Homo sapiens
cgccgctggcagccactctcctggccgccaaaccccagctggaactccggccacagccagcatgcagccaaggattacctttagaggaatggagaataagacagaagagggagggacctgaactagcca

SEQ ID NO: 463775 - DNA, 73 bp, Homo sapiens
agtagaaggggaagagtttgctctgcactagtccgaaggcatgtcggggaaaccagcacgatgtgccagtcat

SEQ ID NO: 463776 - DNA, 74 bp, Homo sapiens
gatgttgtcaaggtggcctaccaggaggccaggggtgtcgccatggaaaattgcctaagaattatgacccaaaa

SEQ ID NO: 463777 - DNA, 96 bp, Homo sapiens
ctagctttggcgaggggacggagccggatcaggagccgccgccgccatatcaggaaatcatcgagttccccatcctaaagctaaatggccggacca

SEQ ID NO: 463778 - DNA, 95 bp, Homo sapiens
aggaaccacacggggtgcactttgtggtttgccaccctgaccaccacacccaccagtgactttctcattctccctgggtacatcgacttcactgc

SEQ ID NO: 463779 - DNA, 100 bp, Homo sapiens
cccccccgcgccgaccgcgttcctatggacagacgcacagacacctgcagtctgaagatgatgagaaactgaaaaagaggaaggagcgatttgggattgt

SEQ ID NO: 463780 - DNA, 100 bp, Homo sapiens
aggagccgagcatctgggccgagaccattccgtatggagagccgggtctggtccgagagcaggaggctgggctgctgcagttcctccgcctggacggctt

SEQ ID NO: 463781 - DNA, 75 bp, Homo sapiens
ttttggcctaccctccaaagaaaagccatgaagactttgaatttatttcaggaacacgaatgcgcaaacttgctc

SEQ ID NO: 463782 - DNA, 104 bp, Homo sapiens
agccggagctgggcgcggattcgccgaggcaccgaggcactcagaggagtctctgctttctatccgtcaagatgataaagtcgtgtgcccgagaaccaaagaag

SEQ ID NO: 463783 - DNA, 100 bp, Homo sapiens
ttttgaattttttctccccgacaatgaagagggcctgaaaatcaggaagtggatctaggatccggcttccaacatgtggcagctctgggcctccctctgc

SEQ ID NO: 463784 - DNA, 100 bp, Homo sapiens
ggccctttggggaaatgcgtgcactgcgtccctctagagactggcacagcctccaggttggcgggctcatctgcgctggggttctgtgcgccatgggcat

SEQ ID NO: 463785 - DNA, 87 bp, Homo sapiens
aaattggccctgaaaaaagacagagaaactatgggacacagatatgttgaagctttggagtttaacccttctgccaatccagaggca

SEQ ID NO: 463786 - DNA, 82 bp, Homo sapiens
gaccacagctcccgaaagcgacgttcggccaccggaggagcgggagccaagcaggaagcgccgcggagccatcaacagcaag

SEQ ID NO: 463787 - DNA, 100 bp, Homo sapiens
gaacatcatggatcagaacaacagcctgccaccttacgctcagggcttggcctcccctcagggaggtggggaagacagggctccagctaccacaggacgg

SEQ ID NO: 463788 - DNA, 90 bp, Homo sapiens
gggaggacatctttatggagaccctgaaagacatcgtggagtattacaacgacagtaacgttagttgaatccatggacatgaaacccaca

SEQ ID NO: 463789 - DNA, 75 bp, Homo sapiens
gcatccccgcggacgccacagcgctgacagattgattcactttggagctgtaagtactgatgtattagggtgcag

SEQ ID NO: 463790 - DNA, 99 bp, Homo sapiens
cagtggtctgatgatgagaacacagccacgcttacggatgtcagtgggggaggacccgcacgttcttacccagttggaggcctttgttactatctttct

SEQ ID NO: 463791 - DNA, 105 bp, Homo sapiens
ctcaatatctgtcttcggtggactccttcggcagtccacccaccgccgccgcctcccagacctgatggccaaaagaaaggaagaaaatttttcctctcctaaaaa

SEQ ID NO: 463792 - DNA, 96 bp, Homo sapiens
ggacaagagctattgatagaagctaaaagatggcggcaaggcagcccaggcaaatgtaagaataggcgatgtggttctcagcattgatggaataaa

SEQ ID NO: 463793 - DNA, 74 bp, Homo sapiens
gcaggacgcggtgcagagagcggacttccgcgacgcgggtgcgtctaatgctagtgttggcacctgttatgtgc

SEQ ID NO: 463794 - DNA, 78 bp, Homo sapiens
ggagctagggctggagcctctccagcctcccgcgaagttggccacggacagagcgaaggggagaggatggtagtgtct

SEQ ID NO: 463795 - DNA, 100 bp, Homo sapiens
gatcgatctaagatggcgactgtcgaaccggacttgtttacactgggcatgtaaacgaaaccatggtcaggtggtctcttacctgttaaaatcaggagct

SEQ ID NO: 463796 - DNA, 98 bp, Homo sapiens
cattctgtggccgtgccagagtgcatacggatttcacgccaagtccctatgacactgactccctcaaaatcaagacgcatcttctctccagactgccg

SEQ ID NO: 463797 - DNA, 73 bp, Homo sapiens
gggggtggaggtggtgcctctggcagtgacgaggacgaagtgtccgagtatccatatattcctgcacatatta

SEQ ID NO: 463798 - DNA, 101 bp, Homo sapiens
ggcctctgcgagccccgggtcccgccctggggccggcgatgtgccaccgaggctgaggatgatggtagattgccaggaccgtataatagacgctggcccca

SEQ ID NO: 463799 - DNA, 100 bp, Homo sapiens
cagagaagcagctctttgagtaatactccccatgcatcagaagaatcttcaatggatgaggaacagtcaaaggatctcactggcatcgaatctatggatc

SEQ ID NO: 463800 - DNA, 101 bp, Homo sapiens
accatctacctattcttcaaatgatccagacatttaatgtggatgcaccatgccagaccgtggaagatttaacgaatggggttgtgatggcccaggttctt

SEQ ID NO: 463801 - DNA, 82 bp, Homo sapiens
ggcccgcccaccagttcgcccgtccccctgccccgttcacaatgtcatttcttcagatagctccccagctgtggaaaatgag

SEQ ID NO: 463802 - DNA, 100 bp, Homo sapiens
cgcagacctggtggaggtgttaaatgaaaaattctgcttggtcagaatcgtgatggcattgtgttcagcactgatgactattttcaccatcaagatgggt

SEQ ID NO: 463803 - DNA, 90 bp, Homo sapiens
gggctggtcccgggtctcgggcatcccctcccggcgccactggccggtgccctacaaaaagcataacccctactgtagaactaaatgcac

SEQ ID NO: 463804 - DNA, 82 bp, Homo sapiens
gcgccatggagggggtgctgtacaagtggaccaactatctgagcgggactggtgattgcagctggaagtgcccatgaccgag

SEQ ID NO: 463805 - DNA, 100 bp, Homo sapiens
ctacagtgttctcgacttcgtcgctgtactatactggcaattgctggagaagattttgcaattgttgcttctgatactcgattgagtgaagggttttcaa

SEQ ID NO: 463806 - DNA, 100 bp, Homo sapiens
cgtcaccgccgcccccccagacaagatggacaccgcggaggaaggtatcatgaactgatcactaaatatgggaagttggagcctttggcagaagtggacc

SEQ ID NO: 463807 - DNA, 75 bp, Homo sapiens
ctccttcagagcagaactcctctagggaacctggatgggaaacagtgcgttcaagattcaacttcacccgtaacc

SEQ ID NO: 463808 - DNA, 100 bp, Homo sapiens
atggaagcatacagatctgggaccgaaatttgactttggcaaacatgaattgactgggcataaagtagctgtgaagatactcaatcgacagaagattcgg

SEQ ID NO: 463809 - DNA, 98 bp, Homo sapiens
aagtggagagtcacagaggggaacagatttcagtgtcctccttagctctgcagtgctgtgttaaatgagaataatgtgcccctccccaaagagtctct

SEQ ID NO: 463810 - DNA, 50 bp, Homo sapiens
gagtttgtggacagatttatattgtgttaccggcggggagctgtttgaag

SEQ ID NO: 463811 - DNA, 99 bp, Homo sapiens
tacaaagatctgaggaaatttctgactctgtttgctggctacacggacaacctggtgcgagtgtggcaggtgaccattggcacacgctagaagtttatg

SEQ ID NO: 463812 - DNA, 75 bp, Homo sapiens
aaacggattgccagagaattggcagaagattcccaaatgctggaaaatcctctttgctaagttgtgtttctcatg

SEQ ID NO: 463813 - DNA, 82 bp, Homo sapiens
ttcgagatggcagatgttctggctacacaggaaccctggattgcttgttacagatggtcagtaggacagaaggtaacattga

SEQ ID NO: 463814 - DNA, 87 bp, Homo sapiens
gatgagaaatctttcgagaatattcagaactggatgaaaagcatcaaggagctgcaagctttcttcctggtggcagatgacatcatg

SEQ ID NO: 463815 - DNA, 74 bp, Homo sapiens
aattggtggaacttgttggaaatggaacatacgggcaagtttataagccctggtattgatgtcaccacagagct

SEQ ID NO: 463816 - DNA, 83 bp, Homo sapiens
gtcgcgtcccgggagcgtcgctgcctggtgaacggcttctcacggcattcagcagcagcgttgctgtaaccgacaaagacacc

SEQ ID NO: 463817 - DNA, 75 bp, Homo sapiens
aacaccatggctgcggcggcccagctctctctgacacagcaatcatttggggaagaatctacagttgctgatgga

SEQ ID NO: 463818 - DNA, 78 bp, Homo sapiens
acccctcctgtaacccagcctgtttcacttcttggttgcagccccacccacgtcacggtgtacagcgagtatggcgtg

SEQ ID NO: 463819 - DNA, 75 bp, Homo sapiens
ttcaagcacatgcagattcgggtgaatgcggagcctgctgctttctacagccccacgacctcagagcccaggtaa

SEQ ID NO: 463820 - DNA, 90 bp, Homo sapiens
ggaacacccggcagagcccacatccacgggagctggtctgctaaaaggtcagagtaatgcagaatgcgtgccttcatctcagatttgttc

SEQ ID NO: 463821 - DNA, 101 bp, Homo sapiens
ggactttaatcactgaccatcccaatatacaggatctagtgaaaagccatttgatgtatgcggtcagagaagaagtggaggtcctcaaagagcaaatcaaa

SEQ ID NO: 463822 - DNA, 83 bp, Homo sapiens
ctgatgtgaaaaataccacgacaaaaccaccctagatgggtttgtggagttcttccatgtagaggacctagaaggtggcatca

SEQ ID NO: 463823 - DNA, 83 bp, Homo sapiens
ccaagaagagagcattaaacccaagaacattgtggagaagattgactttgacagttttaaaatcaaagatgggaaaatcggag

SEQ ID NO: 463824 - DNA, 103 bp, Homo sapiens
cagtttacctgggatcacctccatcagggaaaccaaaggaccttcgggagaaaaactgggaagcaatggaagcattggcatcaactgaaaaaatgctgcagga

SEQ ID NO: 463825 - DNA, 100 bp, Homo sapiens
gcagcaacagcagcagcaagttagtggattaaaatctcccaagaggaatgacaaacaaccagctcttcagggccatcgatgcacccctcggagctaatag

SEQ ID NO: 463826 - DNA, 100 bp, Homo sapiens
atttccttgtgcctccattcccgggaggggggagcggcgttggaggccaccgtttccagcataagcagtactataatggatgtagacagcacaatttcca

SEQ ID NO: 463827 - DNA, 80 bp, Homo sapiens
tctataagtactagtagaagtctgcctgtcagaaatccaggataaattggatcaaatggtattcttctgggaggacatca

SEQ ID NO: 463828 - DNA, 100 bp, Homo sapiens
ttctgacagcagtggaggcagaagttcggcaccttatttctctgctgagtgtccagatcctccaaagacagatctgggaggtggggaagacagggctcca

SEQ ID NO: 463829 - DNA, 98 bp, Homo sapiens
accaaggatttccaagtgatttcttccaaagcacaggaatctcactctgttaaagctggtctgttctaactgagatgtcatttgtcagagtgaaccgc

SEQ ID NO: 463830 - DNA, 98 bp, Homo sapiens
atacaggaaaccaacagtcacacatgtacattacagcccctcatatggaaaatttgaaatgcagaggggaaacagtagcaaaggagatcagtgaagcc

SEQ ID NO: 463831 - DNA, 100 bp, Homo sapiens
cgacaccatgcgatccaaggcgagggcgaggaagctagccaaaagaccaagaatcgccttcagccctgtctggtgcatccttggcagaaagtgaggagga

SEQ ID NO: 463832 - DNA, 50 bp, Homo sapiens
cggccagccagtcatcaaacatgctgctgcagattgctgatgattttatc

SEQ ID NO: 463833 - DNA, 80 bp, Homo sapiens
ccgcggcggcagcagcagtgagagagcctggaaacctggccggcgtcaggcacatcatcctggtcctctcaggaaagggg

SEQ ID NO: 463834 - DNA, 75 bp, Homo sapiens
ggcaaaagttgtgcattggcccgatcaagcctgacttctagccaagtggagcacatgatccagaagaaccaatgt

SEQ ID NO: 463835 - DNA, 87 bp, Homo sapiens
tccgccgccgccgccttgctgctgctcaaagctgctgccgccccttgggctaaaagttttccaagagataacttcaccaagatgtcc

SEQ ID NO: 463836 - DNA, 75 bp, Homo sapiens
cgaccttgttgctgttgtggttcactgtggaaggaaaaaacttgctcagcgccttcaagattccgaggaacaggt

SEQ ID NO: 463837 - DNA, 82 bp, Homo sapiens
ctggagcctcagttggaagcagccgatccagcctgcggagcctgtggggcaggtacatggtgcagtggccgggagcacgcat

SEQ ID NO: 463838 - DNA, 50 bp, Homo sapiens
aaaccggtagcgcttgcagcatgagaaccatggagtctggcagtaccgcc

SEQ ID NO: 463839 - DNA, 98 bp, Homo sapiens
acacttgaaactacaggagaaagaaggatctagcgaaatatggctacagagagccctgctacgcgtcgggtccagttgttcccatgactttgccgact

SEQ ID NO: 463840 - DNA, 97 bp, Homo sapiens
tgttgccttgtgggatctgagaaatctgaaacttaagttgcattcctttgagtcacataaggatgaaatattccagaccccatatcatgtgaacctc

SEQ ID NO: 463841 - DNA, 78 bp, Homo sapiens
aaggaccgaattcttataaagctgtcatcaacctgggaaggaattcaggctggaaaatgttttctggcaaaggccttc

SEQ ID NO: 463842 - DNA, 87 bp, Homo sapiens
cgccgcggccaggcagggaggagaccggcacccagacaggtggcgaaggcagaggaggcttaccacccaaaagatgggaggcagaag

SEQ ID NO: 463843 - DNA, 82 bp, Homo sapiens
ctgccgcctgccaccgctgcccgagcccgcctcccgcgacgatgcccctcaacgttagcttcaccaacaggaactatgacct

SEQ ID NO: 463844 - DNA, 50 bp, Homo sapiens
gctcaccgcaacctccacctcccaggccacaagtgccagcagctgcacag

SEQ ID NO: 463845 - DNA, 100 bp, Homo sapiens
ctacctgtcgtttgtcatgcttttggctgccctgagctggcagtacctgaccactctctcccagggatatgtggtgcctgtcataagctccagagagctg

SEQ ID NO: 463846 - DNA, 99 bp, Homo sapiens
ctgcagcccaagacctacggccacagcagcgtggaggagctcttgggagcaattccacaggtcaaaagcgtcaggcagagagataagaaagcaagtgtg

SEQ ID NO: 463847 - DNA, 75 bp, Homo sapiens
ctgcagatgggaccctggaaacgtctccagatgtggtgatggctctactaccgcataccataaagtctccaaagg

SEQ ID NO: 463848 - DNA, 123 bp, Homo sapiens
gcgaaggccgggacccggttccccggcccacagtgggggtgtgcaaacccgagagaactgggaactgtggaaggtgcatcagtgaagaaatggaccaatgtgtataatcatggaatctccttg

SEQ ID NO: 463849 - DNA, 100 bp, Homo sapiens
ccaggacctgctgcttgtggagcactgacctggccaaggcctcatcctggtcatcgacatcctgagggggaaggccacccggcctgcttccacctcccag

SEQ ID NO: 463850 - DNA, 74 bp, Homo sapiens
ttcaccgtgtaccgcatgcagcagtacgacctgcagggccagccctacggtttggctcagaagaaggcggcccc

SEQ ID NO: 463851 - DNA, 75 bp, Homo sapiens
gttctcccggtgtggccacgagtcgggccctgaagaggaaagtgaggatgactctcatctcgaaggcagggatcc

SEQ ID NO: 463852 - DNA, 100 bp, Homo sapiens
cttgttctccatttcctcacttgatctttcacccgacaccacgttgcacagagcattgaggatcaccatcaggaagtgattggtttctgcagagagaatg

SEQ ID NO: 463853 - DNA, 83 bp, Homo sapiens
agaaattcgaggttaagagattatagaagtcttatcggtatatcaagttactgtgtatcaggcaggggagagtgatacagatt

SEQ ID NO: 463854 - DNA, 73 bp, Homo sapiens
actcggcaggcagtacccctcttctctgatttaagaggggtgcagatcccggaatgcctgaaccaactgtttt

SEQ ID NO: 463855 - DNA, 82 bp, Homo sapiens
tgaaggaccgcgctgcggtgcggaggccaccagcttgggctccccacggagggcagcaagtgggacttggggaacccggctg

SEQ ID NO: 463856 - DNA, 100 bp, Homo sapiens
gaagctggccgagcaggctgagcgatacgacgttaattggccttggtcctcacagctccaaaaagaaacaggatctcgataagctctatgagctgaagtc

SEQ ID NO: 463857 - DNA, 100 bp, Homo sapiens
aaaaaaccttcaggcggcccatgggtgcagtagacattgttgcaatcatgatcggcaatctgaaaggcacaaaaattctgcaatctattcaaagaggcat

SEQ ID NO: 463858 - DNA, 110 bp, Homo sapiens
cagcggtatccaattggcatccagggtcggactcccggggccatggccggaatgcagtaccctcagcagcagatgaacgactttcgaagtaaaatgcaatcaatatttcc

SEQ ID NO: 463859 - DNA, 100 bp, Homo sapiens
ggccacgcctcctcccgcctgccccctcagccctgtggctgggggcagagctcaggttggaatgttgcatcagcaggtagaagaacatgaaaaaatcaag

SEQ ID NO: 463860 - DNA, 100 bp, Homo sapiens
tggcccacgtccctggcacgggctgtctgattctccttcgctgtggcgggaagatggccggatttgaaggttttgcacactagggaccaagaagccctcg

SEQ ID NO: 463861 - DNA, 100 bp, Homo sapiens
agaatacagacagttcctgctctaagaggccatctgtgaggctcagtctcccaacacctctggacccttgaacatctgtgaagaaatgactattctgcat

SEQ ID NO: 463862 - DNA, 98 bp, Homo sapiens
gctgattactatatcattgctggagtgatctatcaggcaccagacttgggatcagttataaactctagagtgtgggtaattccagaattgattggcca

SEQ ID NO: 463863 - DNA, 90 bp, Homo sapiens
ctggtgggcatagtggctgccctgctggaccctgagacagggaagacctgtctgctgaaagccatgctcaacctgcacgacggacagaac

SEQ ID NO: 463864 - DNA, 75 bp, Homo sapiens
cagaacgtggcttatgagtacctttgtcatttggaagaagcgaagagctgaagaagcatctgtagggaatccaga

SEQ ID NO: 463865 - DNA, 75 bp, Homo sapiens
ccggtgcccgaggaggcagccaagctcgtggcctgcctctgcgtgcggtatttgtggtgcagcagattcccaaca

SEQ ID NO: 463866 - DNA, 82 bp, Homo sapiens
ctcagttggaagcagccgatccagcctgcggagcctgtggggcaggaagagagagaaaatccttcaaaacggagtagaattg

SEQ ID NO: 463867 - DNA, 105 bp, Homo sapiens
accaggcctacgcagagctgaaggaggcgctctctgaggaagatgacctgcccagaagccgtcgctccagatcatccgtgacccttccgcatataattcgcccag

SEQ ID NO: 463868 - DNA, 100 bp, Homo sapiens
gagcctcccctgcagcgactcggaagattcgaggcggcgggggacaagtcggcgccccagagcggacgagcttcgatgtttttgaagcaggcatttgaag

SEQ ID NO: 463869 - DNA, 95 bp, Homo sapiens
aatatgagcagcatggtagttacagcttaacagagcgttccaaaaagaggactctccagctactttttattgcatcagtatgcagtggtttagag

SEQ ID NO: 463870 - DNA, 82 bp, Homo sapiens
attcccttcaattcaagtaacagcccaagaagatgaaaggattgttcttgttgacaacaaatgtaagtgtgcccggattact

SEQ ID NO: 463871 - DNA, 74 bp, Homo sapiens
aggtcacacaatgtcggggatggacctccagatttccttactgatgcgtctgttactagagtggagagtctacc

SEQ ID NO: 463872 - DNA, 100 bp, Homo sapiens
gaggcggccatccagcaggagcaccgtgagaaggagctgcagaagcgctcggaggtggcggttatcaagactctgattctgccccggctgcagcaggaag

SEQ ID NO: 463873 - DNA, 100 bp, Homo sapiens
ttcctggaggcagcagatattcctccgagtagccaccccgcagaaggcgtgcgattcttccagcagatatgaagggaatgcagagagcaaccaatgtcac

SEQ ID NO: 463874 - DNA, 100 bp, Homo sapiens
gcccgggcggcgggcggagacgtgggcgccctccccgccaaggcccgtgcgagtggtggtctcaaggaaaacgacgtcataatcagcatcaatggacagt

SEQ ID NO: 463875 - DNA, 97 bp, Homo sapiens
agtcctgcagcggtggcggtgtgaggtaattaataatgcttgtgctactcaagccatagtgagtgtgttactgaactgtacccaccaggatgtccat

SEQ ID NO: 463876 - DNA, 75 bp, Homo sapiens
ctgagatttacctctttgtgaagggatatctgcattacctccacctcctccacctccaccaccaccagcagctcc

SEQ ID NO: 463877 - DNA, 144 bp, Homo sapiens
ctccaagctcaggtgcagtccagcaacaatgatgaaggcagaccacagacattttcctgaatgggaggtgagccccaggtgtatcccagagggatccgggtgacttctctgcagactgtttgccatgacagcccaccaaggacg

SEQ ID NO: 463878 - DNA, 100 bp, Homo sapiens
ggccggctgcagccccaagacagagcgctactcctggcagtgcgtcaatcagagcgtcctgtgcgattggaggtggacacaaaggaagaggcagccagac

SEQ ID NO: 463879 - DNA, 100 bp, Homo sapiens
ttccttcggtgctgcggctgtgtgttttctgagcgagccttgaaagagataaaagcggaagtttgccacacgtggcagaaatctgaagctatcatggaac

SEQ ID NO: 463880 - DNA, 74 bp, Homo sapiens
aggccttaaggagaaagtttcagtcagtaccccagcctgtggtctgtgagcaacggcgccgtcaccccgggctc

SEQ ID NO: 463881 - DNA, 100 bp, Homo sapiens
aactgtcaggagcatacaagaggctccagctggtatgaatatgagcccagtctctcgactaaaaaaaacttgggccaaagtgaagactgcaaaatttgac

SEQ ID NO: 463882 - DNA, 100 bp, Homo sapiens
gttggagtcaatatctgcttaggattcactgcacatcgaattaagagagcagaaggatgggaggaaggtcctcctacagatacttgccagaactaataca

SEQ ID NO: 463883 - DNA, 75 bp, Homo sapiens
atgaacgtctccggaaagagttttctccatttggtacaatcactagtgcaaaggccatcatgaggaagccacgag

SEQ ID NO: 463884 - DNA, 95 bp, Homo sapiens
ctcagaaacttgttaaagacattattgcaatggctgccatccggaagaaactggtgattgttggtgatggagcctgtggaaagacatgcttgctc

SEQ ID NO: 463885 - DNA, 100 bp, Homo sapiens
gggcagcagccaggaccacagctcctccagctcctttgtgaccttttccttcagcttcttcaaatactgggttagattagctctgctctggtatcatact

SEQ ID NO: 463886 - DNA, 100 bp, Homo sapiens
cggagcagtaggcacccgagcagcgccagcggccgagcgggcggcttcctggcctgggcgctccggtggcggcggagatagcagactccttgaaagcagg

SEQ ID NO: 463887 - DNA, 75 bp, Homo sapiens
attaggcacaaagcaggaacccatggtccggcctggagataggctttggggccatttggatcacacgatgttttt

SEQ ID NO: 463888 - DNA, 50 bp, Homo sapiens
ttttgccaggtgtttgttaccttgcttctcggacaaactatttagtggaa

SEQ ID NO: 463889 - DNA, 98 bp, Homo sapiens
ctgggaaagaccgagtgaagaaaggtggatcctacatgtgccatagggtcaccctgctgattgccttcatctgtgtgcggagctccctgtggaccaac

SEQ ID NO: 463890 - DNA, 75 bp, Homo sapiens
gtcacttccgactagtggagtttttagccttttaacattcaaggattaggtgggccatgcacagacacagctcat

SEQ ID NO: 463891 - DNA, 101 bp, Homo sapiens
tggtctgccccctccagctcccccaggattctccgggcctgtcagcagcccccaggtggcaggacaaattgcgcccatttagaggatgtggctgtaacctg

SEQ ID NO: 463892 - DNA, 80 bp, Homo sapiens
ctgtttaactgccttgccagacgaattctctccagctgtttcccaagcgcacagagattctagactttggctacccacag

SEQ ID NO: 463893 - DNA, 83 bp, Homo sapiens
cggaacaacgtcggcgagcgggggctgaagaagatgcagagcagcctgaagctggtggactgtatcatcgaggtccacgatgc

SEQ ID NO: 463894 - DNA, 74 bp, Homo sapiens
cttctggcatcctttaagaatgagggtgccgaaccagatctaatcagatctctggcttcctgctctgtttgttc

SEQ ID NO: 463895 - DNA, 50 bp, Homo sapiens
gacaccgcctgtgtggggcccaccctccgtgccaagatttcactatgttg

SEQ ID NO: 463896 - DNA, 75 bp, Homo sapiens
ctgaagcgactgagtccgcgatggaggacgtagacaagtttggcaacgagatcacccagctggcccggcccctgc

SEQ ID NO: 463897 - DNA, 105 bp, Homo sapiens
tactatattggaaaaacctcaaaatatgatggtggttggacagtcagcatttgcagactttgcctacaacacagcagtcccctcaggatgagcaggaaaagctct

SEQ ID NO: 463898 - DNA, 82 bp, Homo sapiens
agagcgccgcgcacttcgtcatgttcttcgcgccctggctggcctgccactcctcctgctatgatgcctgggcagatcccgg

SEQ ID NO: 463899 - DNA, 74 bp, Homo sapiens
gagtgaaaacgacccggcagatctggaactgattattgactcagaaaccggctttgcgtcttccacaaacatat

SEQ ID NO: 463900 - DNA, 99 bp, Homo sapiens
tctaaccagtatattggggaactgaaagatcagatagcagagctgaatcatgaggcatctccttggaaacaatgccatctttgaatgtgagagataaac

SEQ ID NO: 463901 - DNA, 80 bp, Homo sapiens
tccacacagtctcaagaagaatttaaactggaggacctgaagaagctagaaccaacactgctcagcacgcaggcatgtga

SEQ ID NO: 463902 - DNA, 76 bp, Homo sapiens
cgcttcactggggcagtctctgcatatcatggggagatagacgctgctgcctgattatgatgttgatgaagaggac

SEQ ID NO: 463903 - DNA, 75 bp, Homo sapiens
gtgagagacaaattgcttgttaaaggacaaggtgttgtgttggagcgctccatcttcagtgactttgtgttcctg

SEQ ID NO: 463904 - DNA, 75 bp, Homo sapiens
cgatggtcttcctgctggggctcatgtttgaggaatgtgaccaagtccatatagatgatgtttcttcagatgata

SEQ ID NO: 463905 - DNA, 75 bp, Homo sapiens
gaatccattatctttcgggaaagctctctggggcaggccttctccactcgtctgtttgctgtcctgagatttgaa

SEQ ID NO: 463906 - DNA, 50 bp, Homo sapiens
gacgaggagcagggcctgactgcgcagggcttccgagtggacctgccaat

SEQ ID NO: 463907 - DNA, 100 bp, Homo sapiens
tacccaaacaccctggagacgaattcctcattcccatggtttggcatggacatcggtggaacgctggttaaattggtgtatttcgagccgaaggatatta

SEQ ID NO: 463908 - DNA, 100 bp, Homo sapiens
caaaaatcttgtacctgatgccgatattcaacgctttcggtggccgtaacctttggcctggggcagctgcaggagcgctgcgtggctttcatagaggccc

SEQ ID NO: 463909 - DNA, 87 bp, Homo sapiens
tgaaggactcattgatgaaatttatggcattcagaacatttagatgcaaaatccacaagtattcaagtgattgttaaagagggaggc

SEQ ID NO: 463910 - DNA, 100 bp, Homo sapiens
ctccgcggccgccccctggggatccagcgagcgcggtctgtgagctggatattatctttaattttgaaaaggcttatttcatcctggacgagtttataat

SEQ ID NO: 463911 - DNA, 96 bp, Homo sapiens
tggatctgcctgctggcaagaatctccagtttttgacgggggccattcagcaactgggtggggtttgtctacagattttgagcgttcgaagttgac

SEQ ID NO: 463912 - DNA, 101 bp, Homo sapiens
gcatgatcaacctcgtcatgtcctacgcggtcgcctgcgaggccgctggccaggcctgagcctctgccaccatggccattgtgcagactctgccagtgcca

SEQ ID NO: 463913 - DNA, 102 bp, Homo sapiens
ggatatcgacgtcgtgatccagaagtccagagctgaggactgcctgtttgcaggtgtcgtgaaaactacccctaaaagccaaaatgggaaaggaaaagactc

SEQ ID NO: 463914 - DNA, 75 bp, Homo sapiens
ctgaattgtgctgccttggccaaaagagtacgaattggagcaatgttggcttatacacctctggatgagaagagc

SEQ ID NO: 463915 - DNA, 100 bp, Homo sapiens
caaatctaagcatttaaaagacaggatgggtttgtggagttcttccatgtagaggacctagaaggtggcatcaggaatgtgctgctggcttttgcaggtg

SEQ ID NO: 463916 - DNA, 48 bp, Homo sapiens
gaagagtatccagaaagtgcaaaggccttagaaaatttacgtgtatac

SEQ ID NO: 463917 - DNA, 76 bp, Homo sapiens
gtggggcctggctgagttccactgcccgaagtgtcggcacaacttccggcgatgacctcgccccccaggacctgac

SEQ ID NO: 463918 - DNA, 75 bp, Homo sapiens
gtgcgtgggcatcaccactctcatccagaccaccgtgggcatccggggctttttccctgtcgccttcggcttcct

SEQ ID NO: 463919 - DNA, 82 bp, Homo sapiens
gacagccgcgcgctgagggtctcggggcgggcgccgcgggacctctccgggccatggagctccacgcaggagatcggtgagg

SEQ ID NO: 463920 - DNA, 100 bp, Homo sapiens
ctcttccccacctgcccggtgcccgaggaggcagccaagctcgtggcctgcctctgcgtgcgtttggtgcacctcgatttggaggaagtagggcagggcc

SEQ ID NO: 463921 - DNA, 131 bp, Homo sapiens
aaactgtgcattaaaattcttcagacattacgagaaatgttagagaagaaagacagctttgtggaagagaagtccaaggcttgcgagaaggtcatttccgtgggtcaaacggtcatcacgaagcatcggaa

SEQ ID NO: 463922 - DNA, 90 bp, Homo sapiens
aataaccgtccccgccagtcagaagttgagatggaggagatgtataagaaagctcatgctgctatacgagagaatccagtctatgaaaag

SEQ ID NO: 463923 - DNA, 75 bp, Homo sapiens
cccaggacagcggaggtggaacttcgtcgcgctgcaacccccggctcggaactgatagtgcatcagctgacccag

SEQ ID NO: 463924 - DNA, 90 bp, Homo sapiens
gggcagaccagcaacggggtggccgatgaatcacccaacatgctggtgtacagaaaggtcatcagatttcgggacgtcctacaccaagct

SEQ ID NO: 463925 - DNA, 88 bp, Homo sapiens
gcctcgcggctggggaggcgcggcccgggacgctcgagcttagggaggtgtcactgacattcgaggacgtggctgtgctctttacctg

SEQ ID NO: 463926 - DNA, 100 bp, Homo sapiens
attccagcttcggaacaagagaccctgcgctgcaaactcctgcccctccagcccccggggagcggggtcttcagggtacaaggtgggccgagtgatgcca

SEQ ID NO: 463927 - DNA, 100 bp, Homo sapiens
aggtgttcccggacgcagtagatcctggagatgtggttacacagcttgaatgatcttcaagatgaagttcaaagggagaatactaatctgcaaaaactac

SEQ ID NO: 463928 - DNA, 100 bp, Homo sapiens
ttgagataatcaccagcagcatcaagaaaatcgcagactttctcaactcgttcgaagtgaatcacctagtttgacccaagagagagccaacctgagcgat

SEQ ID NO: 463929 - DNA, 96 bp, Homo sapiens
tctcgctggccgacgccatcaacaccgagttcaagaacacccgcaccaacgagaagctgaaaccaggaaattcagaggcagcagaaatgaaaacaa

SEQ ID NO: 463930 - DNA, 90 bp, Homo sapiens
gtgaaatcctgtcctgaagactgtaagggaagtcttctgaccaactggccctccgtccctcctaccataaaggaggaggaaaacagtgag

SEQ ID NO: 463931 - DNA, 50 bp, Homo sapiens
ctgcaccctgttgtggctctataagcagggttaccgtaatttctatgatc

SEQ ID NO: 463932 - DNA, 75 bp, Homo sapiens
tgtgggacctgcagcagctgagaaaggagctcggggactcccccaaagacaaggcctgagcgagctgtgttccgg

SEQ ID NO: 463933 - DNA, 75 bp, Homo sapiens
tcgtaaacaaccctgaagagaacagccaggcctgcttggatttacactgggcaacgtggttggaatgtatctggc

SEQ ID NO: 463934 - DNA, 83 bp, Homo sapiens
gtggactgttcatcattctgttgaagaaacgcttaacccagttacaggaggttccagtggcatcgggaagtgcattgctatcg

SEQ ID NO: 463935 - DNA, 75 bp, Homo sapiens
gatttctgctcacctggagaagggatggaaatacttcaacaagatggcctgatatgaaggagtcacgcctcccgc

SEQ ID NO: 463936 - DNA, 96 bp, Homo sapiens
atgtttggatgttggatctacactttctcaagcactgtgatcttcaaatgcaaggattactgcaaagtaatatttccatatgaggcacagaatgat

SEQ ID NO: 463937 - DNA, 73 bp, Homo sapiens
ttgctgctgacgctctgggtgaagaatggaaggatgaagcagcaaaggaatttcaggagaaacacaagaagga

SEQ ID NO: 463938 - DNA, 82 bp, Homo sapiens
tcattccttctcacttggcctatggaaaacggggatttccaccatctgtcccaggcccccccggcctgccacttcagtcaac

SEQ ID NO: 463939 - DNA, 83 bp, Homo sapiens
ccatgtcagacgcagccgtagacaccagctccgaaatcaccaccaagaggtcagctggcggctccagtcctgaaggcggagaa

SEQ ID NO: 463940 - DNA, 90 bp, Homo sapiens
gatgactcaccagaatgttgaactttttaaagaactcagattgccagcatactttgttgtccccacccctcttcctgaagagaatgtgca

SEQ ID NO: 463941 - DNA, 75 bp, Homo sapiens
actcgcgcggggcagccaagagacgagaccagagtgaactccgagcaggaacacttcctcattgtcccttttggg

SEQ ID NO: 463942 - DNA, 100 bp, Homo sapiens
gaagtagcactggctctagactaccttcacagacatggaatcatccacagaaatgcactcggtgatggaaagagagccactattctgaagaacacttggc

SEQ ID NO: 463943 - DNA, 88 bp, Homo sapiens
ccctggtcctgcgactcatgctgctggcttccaagggagatgacccagaggatgccaaggcaaagactgatgaagtatttctggaagc

SEQ ID NO: 463944 - DNA, 75 bp, Homo sapiens
gtcgtcttctgtccaagttggtcgcttccctgcgccaaaggagtacgaccccagcaaagcgacctttgtgaaggt

SEQ ID NO: 463945 - DNA, 87 bp, Homo sapiens
aatgtctctctatccatctctcgaagacttgaaggcgcggatcaagaagatcatgcagacggacgaagagattgggaaggtggcggc

SEQ ID NO: 463946 - DNA, 74 bp, Homo sapiens
tccaagatgcgagtctggttttatcgaggagcttccggaagagaccaggaatcagagatcattgatttcttcct

SEQ ID NO: 463947 - DNA, 82 bp, Homo sapiens
ggcgggctgggggcggcacgactggaggcacaaggaggacgccggcgtcttctgctcagcccgtggaccgggagcccgtgga

SEQ ID NO: 463948 - DNA, 100 bp, Homo sapiens
agcggaggtgcagtgtttaaaaaggatgatattggacgaaggaatgggcaagccaccaaaaccctcaacaggggcatctctgagttcatcgtgatggctg

SEQ ID NO: 463949 - DNA, 98 bp, Homo sapiens
tgtgttgaatgacatgggagacacgccgcttcatcgagctgcctttacaggacgaaagttgacatcacttgttagaagagcaactctgaaagaaaacg

SEQ ID NO: 463950 - DNA, 75 bp, Homo sapiens
cgcagtggtcgcttcttctccttgttacccggctgtatgtgaattcttacagcacaataacttgttatctatact

SEQ ID NO: 463951 - DNA, 90 bp, Homo sapiens
caaacattcagacaaaattggagagactgccatgaagcaagattttggcattagagaagctcggtgctgtcttcaatcaagtagccttcc

SEQ ID NO: 463952 - DNA, 100 bp, Homo sapiens
acgcagaacccgggagtaggagactcagaatcgaatctcttctccctccccttcttggtgttgatcctattatctgggaacaggccaaggtagataaccc

SEQ ID NO: 463953 - DNA, 76 bp, Homo sapiens
gcgattccggggtacctcactgcagaggtgctggagctggcagtattgagcaagtcaacaacctacgagagatcca

SEQ ID NO: 463954 - DNA, 100 bp, Homo sapiens
gccccaggcctcctgtgggacgccagtcaccagcaggagcagccaaccagcagcagccatcatggaggacctccacaaaaagtactcgtacatccgcaag

SEQ ID NO: 463955 - DNA, 75 bp, Homo sapiens
gaatgtcatccagcgagtgattagtgcttttttaggaccaaaggatatatttccttactcagaaaataaggaaaa

SEQ ID NO: 463956 - DNA, 82 bp, Homo sapiens
ccgcagtatcatgctggccaagaagatcatcattaaggacggaggcacggtactaggttttgacaagcttgcatcatgcgtg

SEQ ID NO: 463957 - DNA, 100 bp, Homo sapiens
tgacaatctggttatttaaaaatcatcgattccgcttcttgcatgaaactggaggagcaatggtgtatgggccgttgctccagggagaactgcaaatatc

SEQ ID NO: 463958 - DNA, 71 bp, Homo sapiens
tatatccatccttccagtgccctcttcaacagacagccagaatggtggagccgccaccaaaatgcagattt

SEQ ID NO: 463959 - DNA, 98 bp, Homo sapiens
ccggcctctccccgccggcccgcgggctcgccgtccggcgcagggcagcctgagaagccaggccccggcagcaaggaccccaaggccgacagcgtgcg

SEQ ID NO: 463960 - DNA, 100 bp, Homo sapiens
gacgggaccgagcgagcgaccgacgcgccacccgccgacgcctcagccgcttggggcccgcacggaccctctacttcatagggacggggtttcgccacgt

SEQ ID NO: 463961 - DNA, 154 bp, Homo sapiens
cccagcgccaccatccacgccagccgcaccatgccgctcctaagcctgcacagccgcggcggcagcagcagtgagaggtccgcgggagagctgtggggcttggtgagtgtttcgtggcctctcgggttggtcagcacccccagccagctggccc

SEQ ID NO: 463962 - DNA, 100 bp, Homo sapiens
tgagatttcacatattgttaatcgtattgctcctcagcacccttacccttctgaagaacagaaaaagcagttggcacaagacacgggactcaccatcctt

SEQ ID NO: 463963 - DNA, 100 bp, Homo sapiens
taaagaccagatcttgctggaaaaagaagctgaggtgtttggagaagagggattgaccctgaatcttgaagacgttcagcctcatgacttaggaaaagtt

SEQ ID NO: 463964 - DNA, 89 bp, Homo sapiens
ctacagtttacagtctgactactggaaggcattgacaaaggatccccaggattaccctgataaaaaaagcctacctcatgtacatgttg

SEQ ID NO: 463965 - DNA, 90 bp, Homo sapiens
cgaattcctgtgccacctcctcctttagaaaactgatcttaatacagggccaggaaggaatactgggagaatcttcggatagcctcaggc

SEQ ID NO: 463966 - DNA, 82 bp, Homo sapiens
tttcctttctccctcgcgttaggtgtgaacccacatccctgcccccagggccacctgcaggacgccgacacctacccctcag

SEQ ID NO: 463967 - DNA, 51 bp, Homo sapiens
tcactgtactggtatagcaatcaaatggcagcaatgaatgtggatcacgag

SEQ ID NO: 463968 - DNA, 100 bp, Homo sapiens
atgagcgaggagacggcgacttctgacaacgagttatcaatactctggctgaccatcatcatcgtgggactgactttggtggaagtccttggttacatgt

SEQ ID NO: 463969 - DNA, 100 bp, Homo sapiens
cgccgcgcccgggatgtattcgtccccgctctgcctcacccaggtccaaccgtgactgccagatcgaccagcaccaccggaaccagtgccagtactgccg

SEQ ID NO: 463970 - DNA, 82 bp, Homo sapiens
cgtgattgcgttacaagctttgtctccttcgacttggagtctttgtccaggacggcagaggtggaggagacactgaagcgac

SEQ ID NO: 463971 - DNA, 75 bp, Homo sapiens
ttagaatctgggactttcttcgttgccatgaggaaagaattctccgagcaaagcgagctgaattccttcttgtgg

SEQ ID NO: 463972 - DNA, 76 bp, Homo sapiens
gcgcgcctgatgggtcgaggcggacgcgcggctgcgtcagataacggaggagatgatggatcaggcaaatgataaa

SEQ ID NO: 463973 - DNA, 51 bp, Homo sapiens
ccggccgggagggcctcgggggactgactgcatatgagctatttgcattca

SEQ ID NO: 463974 - DNA, 75 bp, Homo sapiens
atggacagttagtcacccacctacatgttgagtgaaaatgcctcgtgtaaaagcagctcaagctggaagacagag

SEQ ID NO: 463975 - DNA, 100 bp, Homo sapiens
attcatcttcacccgtgatgttggcctttaaatgatttcttacaatctccagctacaacctgcttagcttgctactcagtacgtgaattaggatgcaggc

SEQ ID NO: 463976 - DNA, 98 bp, Homo sapiens
aatgctggacctggaggtagtgcccgaacgctctctggggaacgagcaatgggaattcacgctggtcaccaccaagtaagcgaagaaaattagagaaa

SEQ ID NO: 463977 - DNA, 88 bp, Homo sapiens
ctcctttcccggccgcacagggtacatgtcccagagcaagcacacggaggcccgggagctcatgtactcgggagccctgctcttcttc

SEQ ID NO: 463978 - DNA, 75 bp, Homo sapiens
cctcaccaaatacgctgagcagctgctccaggaatatgaacaggcctttgagagcagccagaagtacaaagaggg

SEQ ID NO: 463979 - DNA, 82 bp, Homo sapiens
ggcctaccaggaggccaggggtgtcgccatgcagaaggtgatttactacctctgcatcttattgaaagatccagtggaacca

SEQ ID NO: 463980 - DNA, 82 bp, Homo sapiens
tccaccgttgcctccagcccacccacctccaggtgctggagaatctggtaaaagcaccattgtgaagcagatgaggatcctg

SEQ ID NO: 463981 - DNA, 100 bp, Homo sapiens
ctctgcccgggctgacgcccaggaatgtggtcgacgagaagccccaacagcacggcgtggcctctcagcctcggtcaaaatgcagatcttcgtgaaaacc

SEQ ID NO: 463982 - DNA, 83 bp, Homo sapiens
caagctttgtctccttcgacttggagtctttgtccaggacggtgagaagccctaccactgcaactgggacggctgcggctgga

SEQ ID NO: 463983 - DNA, 100 bp, Homo sapiens
gacttccttgtgaaacctcctagtagaaaaagttcttgggacaaacttcatttgggagcaatggaccacagaaattctgcattgaaaaagttgggaaaga

SEQ ID NO: 463984 - DNA, 80 bp, Homo sapiens
aactggttcagcggagaataacatatcttcaggcatcccgggcccaaatcctagacaaagccacagaatatatccagtat

SEQ ID NO: 463985 - DNA, 82 bp, Homo sapiens
ccaacttcaccttcaacttgggcttctcgggcaagttctatcatactggctcctgctccagcccagcccccagagagcagac

SEQ ID NO: 463986 - DNA, 100 bp, Homo sapiens
cagcttcagtggcctgtcgttggaagagtacaagctgatcctgtccacagcatacatctgtggatggatatactgaaccacacatccagcctaccaagtc

SEQ ID NO: 463987 - DNA, 120 bp, Homo sapiens
gttttaggggccagcagatgcaggaaaatttcgatattgaagtgtcaaaatccatagatggaaaagatgatattgatgatgttaagaagttcaaaccgggttacctggaagctactctta

SEQ ID NO: 463988 - DNA, 75 bp, Homo sapiens
acgtgctgttcgaggatgtgtacgagctgtgcgaggtgatcggaaactacaagcctatcgtggaattcatcgatg

SEQ ID NO: 463989 - DNA, 98 bp, Homo sapiens
cctggctccagagattatctacagctcactgaacatggcaatgtgaagagaggtacagaaagcagtcaacactgcccagggattgtttcagagatgga

SEQ ID NO: 463990 - DNA, 88 bp, Homo sapiens
ttcagcctccaggctctccagtttttcgtcgagagattcactatggaatcgtactatactggcaattgctggagaagattttgcaatt

SEQ ID NO: 463991 - DNA, 99 bp, Homo sapiens
caagcactggaaccgcttccgagacgtactgggctgctgggggatcccaagtgagcagagtctgttttctaccctcgaggagctcagagaaaaggaaat

SEQ ID NO: 463992 - DNA, 82 bp, Homo sapiens
cctcgcgccggctgctctttccgggaagaggagcaggacttggatggtgagaaggggccatcatcggaagggcctgaggagg

SEQ ID NO: 463993 - DNA, 82 bp, Homo sapiens
cacctacgtcccgctgccgtcgccgccgccaccatgcccaagagaaagaacatccagtcatggataaaaatgagctggttca

SEQ ID NO: 463994 - DNA, 100 bp, Homo sapiens
tttgatcttgttgactatgaggaagttctagctgggaacttctggggtaggacgttgtctgctatctccagttccacagacccaaccagttacgatggtt

SEQ ID NO: 463995 - DNA, 100 bp, Homo sapiens
tgcgccgccgctgcctccatcctgggcaaacctgcggacgttgtgcacagggacctgaagcccagcaacatcctgtatgtggacgagtccgggaatcccg

SEQ ID NO: 463996 - DNA, 74 bp, Homo sapiens
cacacactgggaaacatcattaaatcgtgctggagaatctggtaaaagcaccattgtgaagcagatgaggatcc

SEQ ID NO: 463997 - DNA, 71 bp, Homo sapiens
agttcagtgtcatcgtcgcacagtcaggcccagatggtacaggaagacttggagaagacccgtgctgagct

SEQ ID NO: 463998 - DNA, 100 bp, Homo sapiens
cttgtgtcatctgccagcatttatgaaactgtgctccaagtagggggagctatccagtttgggaagatttcataaacaaagcaggaaagctgcagtccca

SEQ ID NO: 463999 - DNA, 100 bp, Homo sapiens
gtgctggcgaagcggaggccggaggtcttgggcgtctttggtactggcttttttaggggtctgcctggggattacccttgctgtggatagaagcaacttt

SEQ ID NO: 464000 - DNA, 90 bp, Homo sapiens
caggactaagagaagtcacaaaacagcagatttcccaagagcagcggaaaatgatccagtcacaggagtcacccacttgcaatctgttcc

SEQ ID NO: 464001 - DNA, 90 bp, Homo sapiens
gatttacgcgcacgttggaaccgaagagagctctgttgttgcagaatccaaaaatccttgtggagtgtcttactcctgattttcgaggtg

SEQ ID NO: 464002 - DNA, 100 bp, Homo sapiens
cagaaccagatccgggagcacgtcatcgccatcgaaggtgtcacccacacatcatccggtgggcacaggagagcagagacagcatgcgcacacggtcctg

SEQ ID NO: 464003 - DNA, 75 bp, Homo sapiens
tgtggaatattcattgtactgaatattacccttgtgcttgccgatactagagtaaaaggatggtttcttctggac

SEQ ID NO: 464004 - DNA, 90 bp, Homo sapiens
agctaatcaagcaattaatcccaagttgcttcagttggtcgaagacagaggttcaggccgctatgcagggtagcactgggaacaggagac

SEQ ID NO: 464005 - DNA, 74 bp, Homo sapiens
gggcaaaccctggtcctcctggatcgacgccgccaaattacactgctccgacattctgtcaggccaagcagaag

SEQ ID NO: 464006 - DNA, 98 bp, Homo sapiens
tttatcctagaggataaaggaaatctttgggaaagtcagtattttatatagcaagtgctggagaatctggtaaaagcaccattgtgaagcagatgagg

SEQ ID NO: 464007 - DNA, 82 bp, Homo sapiens
gacgtgtatccattcagctgtaaggctgtggcagggtacaagtgcactggatataggtcaccatcagaaaagctaagtttgc

SEQ ID NO: 464008 - DNA, 50 bp, Homo sapiens
ctcagcctgtgtggccgtctataaggctcagcaggagacacagaaggcag

SEQ ID NO: 464009 - DNA, 73 bp, Homo sapiens
aggctccctgacccccagaggacccatgtgatgtgggcaaccagcaagagctactcagagttgctgtttctcc

SEQ ID NO: 464010 - DNA, 82 bp, Homo sapiens
aaagccaaattgtgattgccgcctggtacaggagatatgcgaccaaactagagtcagaacgaatactagcatcagtggggaa

SEQ ID NO: 464011 - DNA, 50 bp, Homo sapiens
tgtggagagaaacatccgaattatgatcttcggaagaacggatgatcctg

SEQ ID NO: 464012 - DNA, 123 bp, Homo sapiens
tctagtcactgtcgcagggacaggagtactccacagaggataaatttcaacctccggggccacaatagcgaggctcgggttatgtatgattttgctgctgaacctggaaataatgaactgacg

SEQ ID NO: 464013 - DNA, 89 bp, Homo sapiens
ctccaaggagagcttaaaattgctgttttacagaaggtgtctgacttccggcagcagctgctggcctgtgccggggtggaagctgagcg

SEQ ID NO: 464014 - DNA, 82 bp, Homo sapiens
aggcccgcgaccgtccgccagtcgtcccgaggagcatcagatccatgctgctgctgactcggagccccacagcttggcacag

SEQ ID NO: 464015 - DNA, 100 bp, Homo sapiens
tcccagttcatcatggcttcaacatccagagagattggaacaattatcaggtcattaggatgctgtcctacggaaggagagctgcatgatctgattgcag

SEQ ID NO: 464016 - DNA, 100 bp, Homo sapiens
cagctatgctatcaagaatatccatggcattagcaccctgttgtccgcaatgccctgttttgcctggagtcagcctggaagacagcacaagaaggggacc

SEQ ID NO: 464017 - DNA, 83 bp, Homo sapiens
cacacattcataatcagggtcttgcagccattgaaaagtgtggagaagctgctttaaatggaatgcagagagcaaccaatgtc

SEQ ID NO: 464018 - DNA, 82 bp, Homo sapiens
ctctgactctcggactgagaaacgcaagaatatatacagccctgctctgggacacacctccattggatttaaaagacagtcc

SEQ ID NO: 464019 - DNA, 75 bp, Homo sapiens
ttggaacaagttttggattgcctcaaaccagctaaaagatggcggcaaggcagcccaggcaaatgtaagaatagg

SEQ ID NO: 464020 - DNA, 100 bp, Homo sapiens
tggaggagtacatccccacacaggagatccaggtcaccagcatccactggagctacaagaaaaatccatcctctcagtattggaaggaagtggcagaaaa

SEQ ID NO: 464021 - DNA, 74 bp, Homo sapiens
tcttcttgatctgtttcttgatatggaagcagctacagggcaggagcttgtcagctcatttgcagcttacattt

SEQ ID NO: 464022 - DNA, 100 bp, Homo sapiens
ccgccgtcccggctcacctggcggtgcccgaggagtagtcgctggagtccgcgcctccctgggttggtcaaagaaaaagtgatgtatgaaaaagaggcaa

SEQ ID NO: 464023 - DNA, 100 bp, Homo sapiens
agaataactgtcaagacaacagtgatgaggaaagctgtgaaagttctcaagggaaagtacggtggccagactttaaccaggaagcttatgttggagggac

SEQ ID NO: 464024 - DNA, 88 bp, Homo sapiens
accataagtatcgtaggcgctgccttaatgattactgacagccctgtcctaggagcacaacgtccgagaaatgctcagcttgactgct

SEQ ID NO: 464025 - DNA, 100 bp, Homo sapiens
cctccccactgatcgaagacctcaaggcatggaggagtgacggcaggaactttctgtgctctgacaacccttatgcaccaactagaaaaagaaaattccg

SEQ ID NO: 464026 - DNA, 50 bp, Homo sapiens
cccctttgaattaattatggctctgtagaaattcttgctgatataataca

SEQ ID NO: 464027 - DNA, 75 bp, Homo sapiens
ccccagcagaaccactttggacttcgataatggcacctggacacagctgtggcttgtttctgactatcatgagca

SEQ ID NO: 464028 - DNA, 85 bp, Homo sapiens
ctgctgtcctgcgaccccaagcaggtgaacctgagcaaggtgggcgagtattggtggaacgccatcctggagggagaagagccca

SEQ ID NO: 464029 - DNA, 83 bp, Homo sapiens
cgagcggcgagccggagcgcggagcccggctcccgcaccatggaggaggacgacagctacggcgccatgtcagaaccggctgg

SEQ ID NO: 464030 - DNA, 83 bp, Homo sapiens
ctgggatcccggccaccagcaattgtccggtagaagtaaaatctggagaagaagatgaagaaattttgtttaaagagagagcc

SEQ ID NO: 464031 - DNA, 96 bp, Homo sapiens
gtggatgattactacgacaccggcgaggaacttggcagcatcctgaggttagcattacacttctcccagtggagcccatgacttctgatcaggacg

SEQ ID NO: 464032 - DNA, 50 bp, Homo sapiens
cctcgcctcctcgcagcagcgccatgagtccctgcaggaagcatcaccca

SEQ ID NO: 464033 - DNA, 88 bp, Homo sapiens
taaaacagaggccatcagaatggagagaaatttctgaataaattggcagaagaacgcagacagaagaaggaaacttaagatgtgcaag

SEQ ID NO: 464034 - DNA, 97 bp, Homo sapiens
taacgagcggcggcggcggcagcgggtcttgggtcctccgagagcagcagcgggaactctaatgatccaggacaaagaagttaccctggagtatgta

SEQ ID NO: 464035 - DNA, 75 bp, Homo sapiens
actgatttgcaacccttccgggaagccatagctctgcatgagaagttgtcacattcaaccatttcctggaagcgg

SEQ ID NO: 464036 - DNA, 75 bp, Homo sapiens
gcaggctcggagcctacggggctggcctcggactggatggggataacgaaggaggcccaacttcattcaataagg

SEQ ID NO: 464037 - DNA, 100 bp, Homo sapiens
ctcggtcctggccgcgattttctgcaggccccacgagtgggaggtgctgagccgctcagatgatgttgaatttgaagtatcatcggaccgacggactggg

SEQ ID NO: 464038 - DNA, 122 bp, Homo sapiens
cgaaatctgctgggagatgacaccacagactgttccttcattttcctgtatattctctgtactatgtcgattcgacagtcttccgtgtgtgctaagatcgtgcagctcctggggcagaatga

SEQ ID NO: 464039 - DNA, 114 bp, Homo sapiens
attgtcttatatttcaagttaaggtccaaaaaaactccagctgtgaaagcaacataaatgggctgtgtggtctttgaggatgtgtttgtatacttctctcgggaagaatgggag

SEQ ID NO: 464040 - DNA, 80 bp, Homo sapiens
cccgacgcaaaccaaggatctggggatcttcgcactatcccaagagtgtgaacatggctacgcctcttcattcccgtcca

SEQ ID NO: 464041 - DNA, 90 bp, Homo sapiens
gacatctccaccggccacatgatcctgtcatccgtccttggctcaggatttggagagcttgcaccaccaaaaatggcaaacatcaccagc

SEQ ID NO: 464042 - DNA, 74 bp, Homo sapiens
cttgtattgagtcagcacaaatttgcaagaggcctgagggagctcaatcctggtagcaacacccctgaattcct

SEQ ID NO: 464043 - DNA, 74 bp, Homo sapiens
tgcaacacctgcggcctcactgggacccccaggaggtgaccctgcaggaaaatcctgccttgcttcgttgggcc

SEQ ID NO: 464044 - DNA, 95 bp, Homo sapiens
ctgttagtcggaaagagtgcatctgtagatgctgaaaaatcaatgctgtccaaacttaaacatggttaagctgaatgaacgaataatagccactt

SEQ ID NO: 464045 - DNA, 100 bp, Homo sapiens
ggtgggaggtgggagccatgtcgaaacggctccggagcagcgaggtgtgcgctgactgcagcgggccggctttggtgtcatccccagcactcctctggcc

SEQ ID NO: 464046 - DNA, 75 bp, Homo sapiens
accacatcttcctcaactttgtgcccacggttatcatggacccatcaaagattttctggcatccttaaatcttgt

SEQ ID NO: 464047 - DNA, 75 bp, Homo sapiens
tgtaattcgaggtgttacagccaagggccctgtaaactcttgtcaaggcaagcattgagaactgatgtgccttca

SEQ ID NO: 464048 - DNA, 98 bp, Homo sapiens
ccacctcaagcatgtattttggcaattggtgcttcagaggataaactggtccctgcagataatgaaaaagggctaaagtaaataatgccagcctgatt

SEQ ID NO: 464049 - DNA, 98 bp, Homo sapiens
aggacattaaagtgtcaatgtgtgcggataagtgatgtcttggcattgcccattttcaagcaggaagattccagccttccattggatggtgaaacaga

SEQ ID NO: 464050 - DNA, 100 bp, Homo sapiens
gtgagattggaagtggcggcggcggcaggcggcagaggggagaccccacttcagtctccagcacaagtacttccaaacagcagtaaagactcttctcagc

SEQ ID NO: 464051 - DNA, 50 bp, Homo sapiens
ggaggcccatggagcaagataccagaacctgagccagcagaagagtacac

SEQ ID NO: 464052 - DNA, 100 bp, Homo sapiens
cagcagcggcgggggctatggcgccagtaagaagaaaaaagcgtccgcttccagctttgcgcaggtgacttgcttttggagggcttcaacaactacacct

SEQ ID NO: 464053 - DNA, 51 bp, Homo sapiens
tcgccgggaccctcctgtgggcccagggatatcagttttagagaatgtggc

SEQ ID NO: 464054 - DNA, 50 bp, Homo sapiens
cggcgccttcggcaaggtttacaagatccagacatttaatgtggatgcac

SEQ ID NO: 464055 - DNA, 75 bp, Homo sapiens
tgtttgtggatcgctgtgatcgtcacttggatcgttccaggaagagaaaggagatccatctattaagtttttcca

SEQ ID NO: 464056 - DNA, 100 bp, Homo sapiens
ctggtgcggagcttcctccctgggaaccaagaggacccacacagacctcctgccccccgaggtctgcagtctcctgaacccagcagccatctacgccaac

SEQ ID NO: 464057 - DNA, 100 bp, Homo sapiens
ctgttgagatctccatccatcaaactgcgcaggagtaaggcaggaaaccgacgagaggacctcagctccaagcaaatccagtttgctgatgacatgcagg

SEQ ID NO: 464058 - DNA, 142 bp, Homo sapiens
gtggctgctcgataaatcagacagaacagttaatcctcaatttaagcctgatctaacccctagaaacaggaggtgttccctgtcttggctgcaaagcactgtatcatgcaggccaatgctgagtaccatcagtctatcctgg

SEQ ID NO: 464059 - DNA, 100 bp, Homo sapiens
gggacctgcagcagctgagaaaggagctcggggactcccccaaagacaaggagagaagatgactgaggaggaggtggagaccgttctggcaggacacgag

SEQ ID NO: 464060 - DNA, 82 bp, Homo sapiens
ccagcttcggaacaagagaccctgataaactcaagccatggagggattactgcattacatcaaccctgcacacgccatttct

SEQ ID NO: 464061 - DNA, 100 bp, Homo sapiens
tgactaatgacaacaaagaggctgatgaagatttctttgacatccttgtaaaatgtcaaagtcaaggaaacttttcttttgagctactgacagcttaact

SEQ ID NO: 464062 - DNA, 100 bp, Homo sapiens
ggagaagagaatgagaaactgtggagctttaccaaaaaggcctcgcacattcagttggacaggttaccacattctcatctggagccaggaggaagccagg

SEQ ID NO: 464063 - DNA, 101 bp, Homo sapiens
taactctccttatgctgggtgaaaacaaagcccgtgatgctgatgagcgagagaagtggatccatgccttagaagaaacaattcttcgacatactctccag

SEQ ID NO: 464064 - DNA, 96 bp, Homo sapiens
caaaaacagtgctggcggctgcctatggcgaaaaggcaaagagccaagtctgatcttcactaatcgaagagacatcaggaagattggcttagagag

SEQ ID NO: 464065 - DNA, 100 bp, Homo sapiens
agaatatcagatcttggtcttgcctgcgatttttccaaaaagaagcctcatgcgagtgtctcagcgatgagttgaaccagcagctggaggccgtgtgcgg

SEQ ID NO: 464066 - DNA, 82 bp, Homo sapiens
ctgccccctgtctactggctgccttccatccaccgatacatgtaccctgagatgaagtgccggtggtggtgtgcacattgag

SEQ ID NO: 464067 - DNA, 100 bp, Homo sapiens
tcactcaagaaatcgacattcaatgccggtggtggtgtgcacattgagccccggtatagacagttcccccagctgaccagatcccaggtgttccagagcg

SEQ ID NO: 464068 - DNA, 75 bp, Homo sapiens
agcaaccctgggaagtgcccttgatgagctggagggctgtgcctgcgcccagaagcagctacacttcatggacca

SEQ ID NO: 464069 - DNA, 90 bp, Homo sapiens
cagcggcagtggatcgaccccgttctgcggcccgtgccaagttggaggccgccattgccgaggctgaggagcgtggggagctggcgctca

SEQ ID NO: 464070 - DNA, 100 bp, Homo sapiens
ctcgctgggagagaggtacctctccttttccctctccctttccctaaggtacggaatggccacatcaaaagaatcactgataatgacatccagtccctgg

SEQ ID NO: 464071 - DNA, 101 bp, Homo sapiens
ttcctgaggccagggcatgaccctgtgcgggagaggctcaagcgggacctgttccagtttaacaaggtttggtgcacctcgatttggaggaagtagggcag

SEQ ID NO: 464072 - DNA, 104 bp, Homo sapiens
gtccggcttcggagcgggagtgttcgttgtgccagcgactaaaaagagacaatgcagatcttcgtgaagactctgactggtaagaccatcaccctcgaggttga

SEQ ID NO: 464073 - DNA, 82 bp, Homo sapiens
atcctcttctgctgttctggaaagaggcatttcatccttcatgaagccattcaggattttgaattgcatatgagtgcttggc

SEQ ID NO: 464074 - DNA, 85 bp, Homo sapiens
atccaagagattcagtatcactcgctcccttgatgatcttgaggcaatgcgcaagggcaagttttcagagggcgaggccacacta

SEQ ID NO: 464075 - DNA, 82 bp, Homo sapiens
tggagaccattggatgatgcattagattcctctagtattctctatgctagaaagaaaacaaccctttttgctgcacatgtaa

SEQ ID NO: 464076 - DNA, 74 bp, Homo sapiens
ctcgccgtggtcaagttcaccatgagagggatgcaaggtgttgtaaaccgactgtccaagttactgaaacctgg

SEQ ID NO: 464077 - DNA, 101 bp, Homo sapiens
tcttcacgcacatcatggaccagtacagctactgcaccccgtcccacatccctttctccaacagggatgaagactggaatgaattcaatgatattaacaag

SEQ ID NO: 464078 - DNA, 75 bp, Homo sapiens
cttcttcgagtatttgtagaaggatgatattgctgataggatgaggatggatgctggagaagtgactttagtgaa

SEQ ID NO: 464079 - DNA, 100 bp, Homo sapiens
gcgctgctggactacaaggacgagttctcgggcagaggcgacctccccgcgttccatgcgcacagggacagggagaaatgaccaagagtttcttcaatgc

SEQ ID NO: 464080 - DNA, 75 bp, Homo sapiens
cagactgtttgatgctgaacttcaccgttaaggagtctcaggagcaggggctgcggcagaggctgctggacgagc

SEQ ID NO: 464081 - DNA, 75 bp, Homo sapiens
ctccactttcgccagcccgtgccgcgagcgcggcctgcaggagtgctgctcacggccgtgaactgctacagcgtg

SEQ ID NO: 464082 - DNA, 83 bp, Homo sapiens
cggtattgcagaggagtcaatgctattgtgtggaagcaagaagcaagttttctcaggtatttgccacaggagcctggtggagc

SEQ ID NO: 464083 - DNA, 89 bp, Homo sapiens
gtgccgcagaatgatggccccaatcccgtggtccagatcatttatagtgacaaatattccatgcaagcatgttttttgctatgactgtg

SEQ ID NO: 464084 - DNA, 50 bp, Homo sapiens
cacagatgaaggcctagacgcaggagatgagtatgatgtatgtgccattt

SEQ ID NO: 464085 - DNA, 100 bp, Homo sapiens
aacccaagcagtggcgaagggaatcgcaaggctcttccctgaccattttctactgtccctgcgcgagaagaggcgacaaaggccgtgacagagatgaacg

SEQ ID NO: 464086 - DNA, 90 bp, Homo sapiens
ctgaacaagagaaaaaaaggaaaatgctttggcagggcaagaaagaaggggcaaggggcctggagagtcacataaaatcctatctgagca

SEQ ID NO: 464087 - DNA, 100 bp, Homo sapiens
tgcagccagtactctatatgaacaatccgtctggatcacggatgtaggaagtggtcctggcattgatgtgcctgctccagacatgagcacaggtgagcgg

SEQ ID NO: 464088 - DNA, 98 bp, Homo sapiens
cccgctctggtcgccggggctgcgccgtccccagctcagggagatgcagttaaagacttgatgcttcgctttctgggtgaaaaagctgcagcaaagag

SEQ ID NO: 464089 - DNA, 75 bp, Homo sapiens
aggcagcaagcagctgtttatgacagcctacttcttggtcagtgccctcgcaggaagaggtactgcaacatttga

SEQ ID NO: 464090 - DNA, 50 bp, Homo sapiens
tcggacgtggacgcctttttccggacagaagactgtgcagtctttgtaac

SEQ ID NO: 464091 - DNA, 100 bp, Homo sapiens
ccctgcatcctaagactcgaaggcagcacaggacctggaaaaattacatgaatcccccatcccagaagacaaagaccgcagatttgtcttctcttacttt

SEQ ID NO: 464092 - DNA, 75 bp, Homo sapiens
attagacaagaaacattggaaaagaaatcctgataagaactgctttcatgattccacctttccactgatagactc

SEQ ID NO: 464093 - DNA, 100 bp, Homo sapiens
cagtgcctgtgccaggcaggctacgagaaggtggaggatgcctgccagggtggtttgtgatgaaaatggttccaagggctatggatttgtacactttgag

SEQ ID NO: 464094 - DNA, 100 bp, Homo sapiens
cctgacgaggacgaggaggaggactatgagcagtggctggagatcaaaggcaacatattgctgaacgttctgattccacccaatatgccatgtacgcgaa

SEQ ID NO: 464095 - DNA, 107 bp, Homo sapiens
catggagatgaagaagaagattaacctggagttaaggaacagatccccggaggaggtgagaagccctaccactgcaactgggacggctgcggctggaagtttgcgcg

SEQ ID NO: 464096 - DNA, 82 bp, Homo sapiens
ctgatatcatgccaattgaatctgttattgcaagcacttcaaatgcttcaccttcagaaggcgcaccactagcaggaagtta

SEQ ID NO: 464097 - DNA, 100 bp, Homo sapiens
agttcatcagagtcagctccaggaaccatcatggcagtatttggcagtcgtattcagagataaacccctggagctatgggatgttaggacttgtaccctt

SEQ ID NO: 464098 - DNA, 100 bp, Homo sapiens
atggaaatgaagatgcagtcagagagactttcgaaagaatatgatcaactcctgaaagaacactctgaacttcagaccaagatcactccatggatgaaat

SEQ ID NO: 464099 - DNA, 80 bp, Homo sapiens
aatggtccggacttccgtgttgtactaatggtcacttgatgtgcgctggctgttttatccacctactagcagatgcccgg

SEQ ID NO: 464100 - DNA, 96 bp, Homo sapiens
acgtattcttaaaggcgaaaaaggtggatttgctagacaaacgagggagcaggagacaccccctgactttttttatttctctgactacgagaggca

SEQ ID NO: 464101 - DNA, 83 bp, Homo sapiens
tgtagcaaggaattaccttggagaggctgtgagccacaatgcatcgctggaagtagccaggaagatggaagagttgagtcagg

SEQ ID NO: 464102 - DNA, 83 bp, Homo sapiens
tggaagcagccgatccagcctgcggagcctgtggggcagaacactgatatttgcatttaatggggaacaaaagatgaagaagg

SEQ ID NO: 464103 - DNA, 75 bp, Homo sapiens
cgatgatggccaggccccggaggctaaggacggcagcagctggagctcctcagcccctttcaactctacttcaac

SEQ ID NO: 464104 - DNA, 100 bp, Homo sapiens
cgcgggcgaaaatggcgtacatccagcccacggccgccaatcccactctcgctcctgctgacagaagaggaagcagccctctacattcaatccttctgga

SEQ ID NO: 464105 - DNA, 96 bp, Homo sapiens
cagacgggctggtgcagcgactgcagccgacgccgttcaaaggaacgaggtatagctgtggaccaactgtatatgatcatgcgcaccttggccatg

SEQ ID NO: 464106 - DNA, 90 bp, Homo sapiens
cagcggcctctagtgtctggaggaggaagtgtcagcgctactgccgcaggtgtctgacttccagcaactgctggcctgtgccagggtgca

SEQ ID NO: 464107 - DNA, 100 bp, Homo sapiens
ttgctgcacagcgctgtcgcaagagaaaacttgactgtatacagaatcttgaatcagaaattgagaagctggtttatgaaggcgagcgtgccatgacaaa

SEQ ID NO: 464108 - DNA, 100 bp, Homo sapiens
gggaggtcgcccggcggacagcgtggcatgagccaggagcccgggccgaggtgccaagtcctgccctgccaacttcttggcagctgccgacgacaaactc

SEQ ID NO: 464109 - DNA, 90 bp, Homo sapiens
cgccgagcggccgaggcgccgcggtcggctctgggactcgtctggcgtccctcaggctgacgggcagcgagcccctgaccatcctcccgc

SEQ ID NO: 464110 - DNA, 90 bp, Homo sapiens
taaaggttatcctggagactacaccaagggtgtagagataacagggggtgatcgctgagctgaaggtgcgcagggacccccaggtgagcc

SEQ ID NO: 464111 - DNA, 74 bp, Homo sapiens
ccggagccgaggtccgctcggaagccccatgtgccactcccctgatctgcagcttcggtaggccggtggacctg

SEQ ID NO: 464112 - DNA, 83 bp, Homo sapiens
gaaatggaaggggcctccagggtctgcagacaaggcaggttgatattcactgatggactccaaagaatcattaactcctggta

SEQ ID NO: 464113 - DNA, 50 bp, Homo sapiens
atcctcctggccaccgactcctacaagaaactggcgatggaatatgagag

SEQ ID NO: 464114 - DNA, 100 bp, Homo sapiens
gcagccgcccgcttcaaccccaggggaccagaggaactcagccctgattgcggtttgttggcatccaaagctgttggggttgatggtgctgaaaaaaagg

SEQ ID NO: 464115 - DNA, 83 bp, Homo sapiens
gaagaaagctgaagacttgagttcattaaatggtcagctgcagggacattgctgctcggaatgttctggtgtcctcaaatgat

SEQ ID NO: 464116 - DNA, 75 bp, Homo sapiens
ctcggagtcaaccagctctagacataatagtgaaagtgaatctgtgccatcgacacttttccagccattaactcc

SEQ ID NO: 464117 - DNA, 100 bp, Homo sapiens
tcaagtaatggtgcaaagcctgaagacagcctctccctggggcgctcggagcagccgcaccccatctgctccttccaggatgacttccaggagtttgaga

SEQ ID NO: 464118 - DNA, 97 bp, Homo sapiens
tcagcctcccgagtacctgagattagcccaggttacaggaggttccagtggcatcgggaagtgcattgctatcgagtgctataaacaaggagctttt

SEQ ID NO: 464119 - DNA, 83 bp, Homo sapiens
tggaagcagccgatccagcctgcggagcctgtggggcaggcaatagccctctggaacaagacaattcatgtgagataagaaag

SEQ ID NO: 464120 - DNA, 94 bp, Homo sapiens
gacccagtgaacaaatccgggggcaaggccaaaaagaagatgatgaacaatggcctcctccaacagccctctgccttgatgttgctcccctgcc

SEQ ID NO: 464121 - DNA, 92 bp, Homo sapiens
acagatctctgggaaagggttcagtggcaccttccagctctgttttccctattatcccaggatggtggccgatcctgataaccctttggtgc

SEQ ID NO: 464122 - DNA, 82 bp, Homo sapiens
actccaatgggcctttccagcccgtggtccttctccatattcgagctggttgtcttcttgcctgccctgtgtcgtaaaatgg

SEQ ID NO: 464123 - DNA, 76 bp, Homo sapiens
gatcaacgtaacgtgagcatgaggttttccaatcagtaattcgccaaaatgacgaacacaaagggaaagaggagag

SEQ ID NO: 464124 - DNA, 97 bp, Homo sapiens
tcagcttctggtcaggactctattcagagactgaaggcactaaatatggctacacacacctttctgcaggagagctgcttcgtgatgaaaggaagaa

SEQ ID NO: 464125 - DNA, 100 bp, Homo sapiens
attttgtttactcattcagccctgttgcaggtcccaataaactcttcataaggttgacagaagcaccctctgccaagggttatgtggtccgaatcagtgg

SEQ ID NO: 464126 - DNA, 75 bp, Homo sapiens
ttggatgcagcctttaacgaaggacgcagacagcccacctgaggatattgaccataaggactcatatctcattac

SEQ ID NO: 464127 - DNA, 87 bp, Homo sapiens
gctgctggtccttctgtggcatcttctacaaacccatttcagaccaatgccagaggagcaacaggaaggcgtggaagtgcgagtggc

SEQ ID NO: 464128 - DNA, 87 bp, Homo sapiens
aagcgctgcgctcgcgcccggatccctcagcttctgaaagttctgctgaagacagtgagcaggaagatgagagaggtgctcaagaca

SEQ ID NO: 464129 - DNA, 73 bp, Homo sapiens
cctctgtggcagcattttttccagaacacaaaaggtctatcagccacagtctctgcaagtttccaagagcagc

SEQ ID NO: 464130 - DNA, 101 bp, Homo sapiens
ggcggcggaccgtcccgcgcggggcacgatgttgaacatgtggaaggtgcgcgagctggtggacaaagcggttcccagcaccatgagggcctggatcttct

SEQ ID NO: 464131 - DNA, 89 bp, Homo sapiens
caggacatggagtatgaaagacgattttaggtgatgggcaagtcagaaagtcagatggatataactgatatcaacactccaaagccaaa

SEQ ID NO: 464132 - DNA, 82 bp, Homo sapiens
ggtcatgagctttgtgaacctggtttttggtgttgagccagacttgaccagggaaggcggcagtattcccgtgaccttgacc

SEQ ID NO: 464133 - DNA, 75 bp, Homo sapiens
aaaatgacaaaacgggaagcagcattaatactaggtgtaagtgaacagcagagaatttcaaaggaccttgctaat

SEQ ID NO: 464134 - DNA, 85 bp, Homo sapiens
agcatgtggctcctggtcagtgtaattctaatctcacggatatcctctgttgggggagaagtccttcagcctgctccacatcaag

SEQ ID NO: 464135 - DNA, 100 bp, Homo sapiens
caccagaggcacctaccttgctttcagaaacaactctccaagttccatttccaaggaaagtcttaaccatttgtcccttctggcgtaccctctttcattg

SEQ ID NO: 464136 - DNA, 78 bp, Homo sapiens
cgtttaacccgaaggtcatcctcaatgccgccaccttaacaggaatctacggcggatccggaagtgtcaacgtggtcg

SEQ ID NO: 464137 - DNA, 100 bp, Homo sapiens
tttaaaaactacgccgagctgacgattatgaagactctggaagcccacaaagactcccataaggaggaaccgcggcatttgcagtttttcagcgaatttg

SEQ ID NO: 464138 - DNA, 82 bp, Homo sapiens
ccaccgccgtgaacggctgcgtgaccggttctgatggtcctttggctaccagcaaaccagtccctgcagaaaagtcaggtct

SEQ ID NO: 464139 - DNA, 100 bp, Homo sapiens
cagacctgagccactgcgcccagccttgatcttgagatgacacctttgaggccctgtgcatcgagccgttttccagcccgccagagctgcccgatgtgat

SEQ ID NO: 464140 - DNA, 90 bp, Homo sapiens
tccaagaaaagatggtcccaaacgttctgtactgtccaagtcagttcctgggtacaaggatgtcctgacactgtccagcagcacagaaag

SEQ ID NO: 464141 - DNA, 100 bp, Homo sapiens
ctctgctgtgggcgctgctggcgctctggctgtgctgcgcgacccccgcgcatgatgtacttgaaggatataatggaacaatatttgcatatggacaaac

SEQ ID NO: 464142 - DNA, 51 bp, Homo sapiens
ggctggactcctgttcctcatgacagatgatagtatttctgctgcaagtac

SEQ ID NO: 464143 - DNA, 75 bp, Homo sapiens
gacataaaattagtgattactttgagagcttgcccttgcatctctcttcagccttaatgccttatttgatttttg

SEQ ID NO: 464144 - DNA, 89 bp, Homo sapiens
aggcacgcaaaacggaaaagcgtgtgtaggggagcggaaaaggaagtcaccaccgtggcctgcgacggtcccagtcatgcagggaacag

SEQ ID NO: 464145 - DNA, 75 bp, Homo sapiens
ttggaaagaatttcaggatcaccggtttctcctgcttcatgcttttatccattaattgggtggaagattgggcaa

SEQ ID NO: 464146 - DNA, 75 bp, Homo sapiens
atttacgcggatgtcggcgaagagttcaaccaggtgaacttcacggtagaccagatccgcgccatcatggacaag

SEQ ID NO: 464147 - DNA, 82 bp, Homo sapiens
tcgcagtggtcgcttcttctccttgcaaaagatacagatattgtggatgaagccatctattacttcaaggccaatgtcttct

SEQ ID NO: 464148 - DNA, 82 bp, Homo sapiens
gtccggtactcagacgctggcgggcgcagtttctcacgacgggccgagcctgccactgtgcagattcactttataggaacag

SEQ ID NO: 464149 - DNA, 74 bp, Homo sapiens
tggtccctgaaaatgaacccttggtgctgtatatctacggagcccctcagtgggctcgggatgagtttgaaggc

SEQ ID NO: 464150 - DNA, 89 bp, Homo sapiens
tccagttggaattgaagaatattcccaagtccttcacccgggcattggaggtgatccttttaatggaacagattttattgactgcctcg

SEQ ID NO: 464151 - DNA, 80 bp, Homo sapiens
tcgtcccgctcgtcatggcctacccgggatacggaggaggggagcagacaagatggagacaaattcctctctccccacga

SEQ ID NO: 464152 - DNA, 100 bp, Homo sapiens
gctcgcgggcggcgggcccgggtgctgtgattctcttgggaagaaccaatatgtttcgctttaaccatccaaaggaagccgccaagctcagggagaagag

SEQ ID NO: 464153 - DNA, 75 bp, Homo sapiens
ggtcaacattgatggaaaacaaatcaaactgcaaatctgggatacgacctaatctgggagcctgcaagtgacaac

SEQ ID NO: 464154 - DNA, 83 bp, Homo sapiens
ccaaaagacagtaaagcttatgtactacttgtggatgtatgcagagtttgcggggtggtacagaagcgatagcacgattggat

SEQ ID NO: 464155 - DNA, 100 bp, Homo sapiens
ccaacatcctgctagacttgttaaggttgtttacattcagagctctatcaataagaggaatacatattacagtgaattcgacaaccgcacaagttggcag

SEQ ID NO: 464156 - DNA, 83 bp, Homo sapiens
gggagttttccggggccctctcagcaagaacgggaacaaaactctggtgctgaccttaaggaaagagccaaaatgagttccag

SEQ ID NO: 464157 - DNA, 96 bp, Homo sapiens
acttggaagcaatgtttgaacaaactcgaagaacagctgtggaaagaagttgcaaaacactggcaattctgtggtgttcttggtcacacatttatg

SEQ ID NO: 464158 - DNA, 78 bp, Homo sapiens
agcagaagctgataaaagggagtcgcagctctatttgttgacaagaataggagaagcaaccaagcctgatggaacagt

SEQ ID NO: 464159 - DNA, 110 bp, Homo sapiens
gaagtcttcgtcggtgagatagatctcaagcttcagaggatcgaccccctccgggagtggcctggccaggaggtcggccagcggagctggactggccattatggaggagg

SEQ ID NO: 464160 - DNA, 98 bp, Homo sapiens
gaggtgtcactggccccggcctttgccccaatcttgtgtgggcactgaagggggactacaggttcgagagttgtgggtctgtcttgaacacaaatggt

SEQ ID NO: 464161 - DNA, 51 bp, Homo sapiens
acactcaggagacacaggtgtggaaacagtatctggagtccatctttcacc

SEQ ID NO: 464162 - DNA, 51 bp, Homo sapiens
ctctctgctcattggggcgttgaggagaagatgaagtcctcagtacattct

SEQ ID NO: 464163 - DNA, 100 bp, Homo sapiens
aggtggaatgttttttgctgcaatgctgcaaattaattcatcattagagaaattagatctgggtgactgtgatctgatttcagatgcagaactccaggaa

SEQ ID NO: 464164 - DNA, 83 bp, Homo sapiens
attgggaggtcggcggccccaaaagtaaacactacacgtgaagagtggtgaaagggaacattgattactgaagtgccctggag

SEQ ID NO: 464165 - DNA, 97 bp, Homo sapiens
gtctggctgctgcagtgacccagaccctctcctttccctttgagaccgtgaagagaaagatgcaggctttgtccagggatctgaaaccactttgcag

SEQ ID NO: 464166 - DNA, 50 bp, Homo sapiens
agtacaccagcgctaagtaaacatgtggcaaaggagcagagaactttgac

SEQ ID NO: 464167 - DNA, 75 bp, Homo sapiens
atcggtgcacttgtaatatacttcatagattcatcaaacttccgggaggatttccattataatgacacagctggg

SEQ ID NO: 464168 - DNA, 95 bp, Homo sapiens
gcactctgggcgaaaattggatgtgaaaatgaagccagaccgagaatctgagttgcaagaactctctgaagtgcttgaactcctttctgctcctg

SEQ ID NO: 464169 - DNA, 48 bp, Homo sapiens
gtttttcaaagcctaccaaaatctcttggaagctcgaagtctggctgt

SEQ ID NO: 464170 - DNA, 74 bp, Homo sapiens
ttggaagaagtatatgcaggaaattttgtggaaatcatcactgttgaagaggcaaagcgcaggaagagcacatg

SEQ ID NO: 464171 - DNA, 100 bp, Homo sapiens
caaggagcgggtccgtcgcggagccggagggcgggaggaacatgacatcgcggagcgggtccatatggaatatttgctggtagggatgcctccagaggac

SEQ ID NO: 464172 - DNA, 90 bp, Homo sapiens
cggcgctggggcttcatgttcaagcggcacctgagcaaccacgtcaccaacagacgcaaacatgcagatctttgtgaagaccctcactgg

SEQ ID NO: 464173 - DNA, 80 bp, Homo sapiens
cttgctcttcatatcagcatgcaattctgtggtgttcttggtcacacatttatggagtttctgaagggcagtggagatta

SEQ ID NO: 464174 - DNA, 75 bp, Homo sapiens
gaattgacgccttttataataaagacacttatcttgcccaagagctgggtgccgtgagcgatgtggagatgcagg

SEQ ID NO: 464175 - DNA, 75 bp, Homo sapiens
gcaaaagattgtgtgcactgaagggggccaggccggccatgagcagggcagcttcctcttccaggccttcttgtt

SEQ ID NO: 464176 - DNA, 100 bp, Homo sapiens
tcaaacagctactaaaccccgcccaggtcttcgacctcatgaacggaggcccacacctcggttacaaggagaacatcatgcgcctctccagccttcacaa

SEQ ID NO: 464177 - DNA, 100 bp, Homo sapiens
ggccttccagctgtttgaccgaacagtgaacaaggggagaagaattgccttcagctccacgtcgttactgaaaatggcccccagcgctgaggagaggacc

SEQ ID NO: 464178 - DNA, 98 bp, Homo sapiens
tccaagaaaaaaaccacaaatgtttttctgttttgcctgaatacatgatttaaacaagagatttccacagaaggagccaagccgccatggcctaccac

SEQ ID NO: 464179 - DNA, 83 bp, Homo sapiens
agtccgatggcagcggctgtgccgaggcgcccaactcagtgagcaggggtgagcgcagccactgcccaacgcaaaccgtgaag

SEQ ID NO: 464180 - DNA, 100 bp, Homo sapiens
tcattctcttaccaaaagaagagagtggctcttaagaaaatccagtttgcttaaaaaggggaagatggtgaaaggaatgggaggtgctatggatttagtg

SEQ ID NO: 464181 - DNA, 82 bp, Homo sapiens
gtctggagtgcgtgggggaccggctgttggcggtgcccatgacgcttccggagacaaccctggaaacactgaagcataaaat

SEQ ID NO: 464182 - DNA, 98 bp, Homo sapiens
cggagaggttattcagcttcaaggtgaccaaagaaaaaacatctgccagtttctcttggagattctgacaatggagatattaattatgattatgttca

SEQ ID NO: 464183 - DNA, 134 bp, Homo sapiens
ggcccctatggcagatttgaaaattcacccttgtagagtcattcctgcctttgagcggactcccttttaagatgtggagatctgtgtgctctccattggatctcggcaaggctgtgactggaggatgcaaagct

SEQ ID NO: 464184 - DNA, 83 bp, Homo sapiens
cttcagagagaggaagccgaaaacaccctgcaatctttcagacagggctggaccccaatggagaacaggtggtgtggcaggcg

SEQ ID NO: 464185 - DNA, 82 bp, Homo sapiens
cctgttcttcaccgttatcatctatgttcggctggacttctccatcaccaaggtggacgacccaccggagcccgtgtacgcg

SEQ ID NO: 464186 - DNA, 90 bp, Homo sapiens
ggcggcagaggctacggggctcggtttggctgactggggagtcggcaggcggcagtagctgctgctggtggtgacaatgtcaaataacgg

SEQ ID NO: 464187 - DNA, 100 bp, Homo sapiens
agcctgaaaatgaaaaggaagcttcaggtggagacagcccgaaggttcctgatgctataaaatctcagtaccagtttccaccccctctcattgcacccgc

SEQ ID NO: 464188 - DNA, 87 bp, Homo sapiens
atggtggaaaaaggaatcattgacccaacaaagttggaagatgctggctcaagtagtttagataatctactaagtagatacatctca

SEQ ID NO: 464189 - DNA, 74 bp, Homo sapiens
ggcttgtcctggctcttgccctcatcctggttctggaatcctcagttcaaggtttcgactcattggttccccat

SEQ ID NO: 464190 - DNA, 75 bp, Homo sapiens
ctcctgatactaacagttttacgatttaaaacttcgccagaatttagctacttcctcagccgagcccagagcctg

SEQ ID NO: 464191 - DNA, 98 bp, Homo sapiens
gaaaaagtggatcttgtattgatgcactggagggataggatgggcattgctcaaaaagagtactatggactacaaattttggaaaatgtgataaaaac

SEQ ID NO: 464192 - DNA, 100 bp, Homo sapiens
aataacacaccggagacttttggggggaaactaggtcgatggtcggcggcgcccggatgggcagctgaggagcatcagatccatgctgctgctgactcgg

SEQ ID NO: 464193 - DNA, 100 bp, Homo sapiens
ccatgatgtgatgctggagaccttgacacttatatcctccctggattgagaggatccagaatccagatctctggaatagctaccaggcaaagaaaaaaac

SEQ ID NO: 464194 - DNA, 100 bp, Homo sapiens
tggatgacatggctgtggatagtgatgaggaggtggattatagcaaaatggaccaggtgtcctgggaagaggtgaagaatgagatggtgggagagaaggg

SEQ ID NO: 464195 - DNA, 89 bp, Homo sapiens
tcgctaacaactgcccagctttgagaaccattggaaagttggagccatcctacgtgatccgcaagtttctggatgcccagcgcattcac

SEQ ID NO: 464196 - DNA, 100 bp, Homo sapiens
tgctcgatgagagttttcagtggaggaaagaaatttctgtcaatggaggaagaagcagtacttttttgtctcatagcattagtaaccaagctaatgttca

SEQ ID NO: 464197 - DNA, 87 bp, Homo sapiens
tggagctcgagaacatcgtagcgaacacggtgctactcaaggcccgggaagacaatgcagatcttcgtgaagactctgactggtaag

SEQ ID NO: 464198 - DNA, 90 bp, Homo sapiens
ccgcggggctgggacccgatgcggttagagccgcggagcctggaagagccccgagcattttaggtgatgggcaagtcagaaagtcagatg

SEQ ID NO: 464199 - DNA, 75 bp, Homo sapiens
gccatctacaaagaattctccttccacaattttaatcagcagaaaaagtcctacctggagcgaagcgttaaggaa

SEQ ID NO: 464200 - DNA, 51 bp, Homo sapiens
tttacgtggagatcaagcgcagcgatgaaaatgaaactgaagccgtggtca

SEQ ID NO: 464201 - DNA, 74 bp, Homo sapiens
tcaggaccaggcaccttctgtggaaggaaaagcttttgacatcacctatgtgcgtctcaagttccacaccagcc

SEQ ID NO: 464202 - DNA, 92 bp, Homo sapiens
ccgagacctccgaaaagcgtttccgcagacagaagtggggagaagcggagacaatgcagatcttcgtgaagactctgactggtaagaccatc

SEQ ID NO: 464203 - DNA, 98 bp, Homo sapiens
ccgtcaacagcctggtcaatttgtacctgcaggcctcctacacctacctctctctgacctgcctagagctggaacgttacctccagagcgagccctgc

SEQ ID NO: 464204 - DNA, 100 bp, Homo sapiens
gcggcgcggcggccgggccctcgagacggggacgcttgatcctctcccagaaaaggttttacagcaaagacccaatgcaaacgctgtccgttccatggag

SEQ ID NO: 464205 - DNA, 71 bp, Homo sapiens
gtgtaccaggcgtctgtggggtttgtgtgtgagaggtggtatgcagatcttcgtgaagaccctgaccggca

SEQ ID NO: 464206 - DNA, 50 bp, Homo sapiens
gacgaactccgcaatgaggacgttcagtctcacagaaagttctccgctcc

SEQ ID NO: 464207 - DNA, 100 bp, Homo sapiens
gcgaaagggacctgctcaagttcactcagtctgacggtaactgctgtaaaagactcaggagaatggaatttggaggctggggcattagttcttgcagatg

SEQ ID NO: 464208 - DNA, 82 bp, Homo sapiens
gggcgaggagcggcggcggtggcggccgctggacatgcaagaaagcacttcagccaagcagaagggagccagctggacgagg

SEQ ID NO: 464209 - DNA, 75 bp, Homo sapiens
gttccgagggagaatatggaggccatttcacctctaaaaaatgggatgggtgggctcggtggtggccgtgggctg

SEQ ID NO: 464210 - DNA, 100 bp, Homo sapiens
aagagtcaaaagaactgttctgtgatgggggctgatctggtggtgatcaacaccagggaagaacagacagcaatgttcttactcctctcctgctgtaaag

SEQ ID NO: 464211 - DNA, 90 bp, Homo sapiens
caaacacagttgtttacagctctaacaaaatagacggcgtggtgtccctcgtggccgttcacccctccaccgtcaacccgctcgggaagc

SEQ ID NO: 464212 - DNA, 111 bp, Homo sapiens
cagggagcaggcacagccccgcaggatcccaagccctgcagactaccgcagccagcgtctaccctgacatttgcactatcagccttgtagcagtgagtgatgtgaataaac

SEQ ID NO: 464213 - DNA, 82 bp, Homo sapiens
ttaaagcaaagggggctccccctcgagatggaaaagatcttgtggaagccctgaagccagagtatgtggcacctcttgtcct

SEQ ID NO: 464214 - DNA, 100 bp, Homo sapiens
ccgagaccgtgaccgagagcgtgaccgagagcgcgaatatcgtcatcgttagaagcttggatttacactgggcaacgtggttggaatgtatctggctcag

SEQ ID NO: 464215 - DNA, 85 bp, Homo sapiens
aaacaatccctcgcctccggaggcggcgaggagcggcggcatcaagatggtgctcatgtggaccagtggtgacgccttcaagacg

SEQ ID NO: 464216 - DNA, 82 bp, Homo sapiens
gggaaagtaattttgtttgccgaagtgacccccacaacgatgcgtctcctggatgggtgacttaagagattaaaattaattt

SEQ ID NO: 464217 - DNA, 96 bp, Homo sapiens
ttgttctgagtgggcacttcatcaaggaggagcactgcgtcttccggagcgactccaggggaggcagcgaagactggggcagcacctactccgtgt

SEQ ID NO: 464218 - DNA, 83 bp, Homo sapiens
aagagaaagccagttatccacggactggaagatcaaaagagggtgtccctggccagtgtccttccacctgtccacaagcatgg

SEQ ID NO: 464219 - DNA, 75 bp, Homo sapiens
caccagtactaccaaggacagcttttttcctgcaaggtacctgtggaaaagtgaaaagccactctactactcatt

SEQ ID NO: 464220 - DNA, 120 bp, Homo sapiens
gccctaaccacactatttatatcaacaacctcaatgagaagatcaagaaggatggctgactgtgctgtcctgattgttgctgctggtgttggtgaatttgaagctggtatctccaagaat

SEQ ID NO: 464221 - DNA, 100 bp, Homo sapiens
tgtccaacagaacgacctagtatttgaatttgctagtaacgtcatggaggatgaacgacaggaaacttggatttaactggccagaagcaggtattcaaag

SEQ ID NO: 464222 - DNA, 100 bp, Homo sapiens
cagttcaagcgtgtaggagcagaaacaaatggaagtaaggatgcgttgaataagttttcagccttcgttcagaaaaacctggtctatggcacaactaaaa

SEQ ID NO: 464223 - DNA, 75 bp, Homo sapiens
ggcttgtcattctgacccggggattcctcacagcgtctggcagaaccaaaaacttttgctagaaaatcagctttt

SEQ ID NO: 464224 - DNA, 100 bp, Homo sapiens
tgaaaatcaacgacaacttgagcacagacatatgaaggagggtcttttcatattaaattgttttcctggcagcacctgaaccaaaggatcagacttaaaa

SEQ ID NO: 464225 - DNA, 75 bp, Homo sapiens
ggtgaagtaggagacatcgtagtgggacgaatcacagagaatgagtccctggaacgccagatgcgtgaaatggaa

SEQ ID NO: 464226 - DNA, 90 bp, Homo sapiens
aggacataagggagatagtgcagagactgaagggcgccatgttttggaagtttgacctgcacacaagctcgcacctggacacgctgctgg

SEQ ID NO: 464227 - DNA, 100 bp, Homo sapiens
cactgggtgtacctgctttgcttctctgcaggagacctgacagatgccaaaacaaaggaacagttgggatccaggcagcatgaggtagaatggcaaacct

SEQ ID NO: 464228 - DNA, 100 bp, Homo sapiens
ctcctatgactctgcagttagccagaagcggactcctagaagaggggagcagcaaggatggaatgacagccgtgggccggaggggatgctcgaaagagct

SEQ ID NO: 464229 - DNA, 100 bp, Homo sapiens
aaacggcgagagtgggcgagaacgtccactgcgggccggcgaaagctgcttcggaaccaaaaagaagcttcccagagccggggccaggagccccaagcgc

SEQ ID NO: 464230 - DNA, 100 bp, Homo sapiens
gtgatgacaaaccctttctatgtactgcgcctggatgtggccagaccgattattgaccgacctattcgaggtcgtggtggtcttggaagaggtcgagggg

SEQ ID NO: 464231 - DNA, 101 bp, Homo sapiens
acacaaggcagcttcccacagcaggttggacagttcacaggctatgagaaatataataccatgagggcagacccagccttatgtttcctagaaaaggctgg

SEQ ID NO: 464232 - DNA, 96 bp, Homo sapiens
tgttgccactgttcaaaatgaagaggaagcccagaaagggaaaaactaccagaacggagatgtgtttggcggggaatgactctgactttgagacgg

SEQ ID NO: 464233 - DNA, 83 bp, Homo sapiens
catcaagtattcaccagttaatagcaccaggaagatcttcctgttacagaggataactttgtgaaacttcaagttaaagcttg

SEQ ID NO: 464234 - DNA, 50 bp, Homo sapiens
gtcattcacaaccccctgaaagcgttcctaaagagaaagatgaaatggta

SEQ ID NO: 464235 - DNA, 74 bp, Homo sapiens
ctttgccatcactgccattaagggtgtgaacaaagactcctatctgatcctggagacgctgcccacagagtatg

SEQ ID NO: 464236 - DNA, 75 bp, Homo sapiens
tgcagagaaacacggaaactaggaagaggaaattaactatctgtacttataagttgtgagtacagaggtggtcag

SEQ ID NO: 464237 - DNA, 100 bp, Homo sapiens
tggtcaggtactattcggggaaagaattgaaccttcaccatataagggtaggagtcaatgaagacatcttagtcttaacaagttacagataatctctgac

SEQ ID NO: 464238 - DNA, 74 bp, Homo sapiens
cagccttcccagtagctggaactacagatcacaaggtttacatctggcacaaacgtagtgaactgccaattgcg

SEQ ID NO: 464239 - DNA, 97 bp, Homo sapiens
gctgaaggccccaaccatcgttgggaaatcatctctaaatcccatcctctttcgaggtgttggcatacacaagctgagggagaatgtctttcaagag

SEQ ID NO: 464240 - DNA, 101 bp, Homo sapiens
gcccgcttccccatcatcgccagctgcacactcttggggctctacctctttttcaaagatacttttgtggaactctatgggaacaatgcagcagccgagag

SEQ ID NO: 464241 - DNA, 95 bp, Homo sapiens
cttctcatggctgccctgtggggcctctacatgtccctggttaatgtgggccatgtctgccctgccctgcttggatagaggcctccgaacaggag

SEQ ID NO: 464242 - DNA, 100 bp, Homo sapiens
ctcagcctctcaatcccagtctcatgcttccagcctggataatgattgagccacctgtccagggtctcctatggacagaagtgcgggcaaggagctttgt

SEQ ID NO: 464243 - DNA, 97 bp, Homo sapiens
ggatggaatggatatcctgtgcgtccgagaggcaacaaggtttgctgctgcctattgtagatctgggaagtttgtcccgctggctggaagcctggca

SEQ ID NO: 464244 - DNA, 75 bp, Homo sapiens
ctgatttagaaggaggttcaggctacggtgagccgaagttcacaggaaacgggccgtgcgagatgcacagcgtgc

SEQ ID NO: 464245 - DNA, 80 bp, Homo sapiens
atcttcaatgagtaaacatattcctggttacacatcattttggaatgactgtatatcatctggattacgtggctgtatgt

SEQ ID NO: 464246 - DNA, 101 bp, Homo sapiens
agagatagaagaagacctttctgtggaaatagatgacatcaataccagtgataagcttgggatgtggtaatgccagccacactcctcagagccgtggccag

SEQ ID NO: 464247 - DNA, 90 bp, Homo sapiens
gtattggcttgcctggctgattcatgtgggagagtccttgtatgccatagtattgtgcaaagttgtctgctggttctcagcttgaagaag

SEQ ID NO: 464248 - DNA, 88 bp, Homo sapiens
gctgtccttggagctgtggtcaccgctatgatgtgtaggaggaagagctcagaaggcaccaccacagctgcccacttctggaaggttc

SEQ ID NO: 464249 - DNA, 75 bp, Homo sapiens
cgaaacccgattcaggtttgctggatggatttatgacggctccatctactctttgaagcttctgcccagcttgca

SEQ ID NO: 464250 - DNA, 100 bp, Homo sapiens
gtggtgtgtttgctgttcccagggttgaaaggaggagcaggaggtactgatggacaaggaggtaccttccggtacacctttcatggcgatcctcatgcta

SEQ ID NO: 464251 - DNA, 76 bp, Homo sapiens
tttggacacaggtttgcactgctgcttttctaacccaaactgtatgtcttgatgacactacagtaaagtttgaaat

SEQ ID NO: 464252 - DNA, 100 bp, Homo sapiens
gcacgcctgtgtcctcattgctccaaactgtgttgtttcagctgtattaggattaaagtcgccgtgtctgcagacagagattgcatccgggcctaccagc

SEQ ID NO: 464253 - DNA, 98 bp, Homo sapiens
cttgcccctcggccgggcggacgacattcacggcatggtgtaactcccacctccggaaggcggggacacagatcgagaacatcgaagaggacttccgg

SEQ ID NO: 464254 - DNA, 97 bp, Homo sapiens
tgccattgaggcctatcacggggtctgccagacaaacaggtgtgtgtgtaatattgactgttctcaaaccaacttcaatcccctctgcgcttctgat

SEQ ID NO: 464255 - DNA, 80 bp, Homo sapiens
gtctgcgagccaggattcccggaatggttttagggaagactgttgccggatgacaaggctgtcactattgttctgtacta

SEQ ID NO: 464256 - DNA, 50 bp, Homo sapiens
cagacaggctgtgtgcatgcaccaaaggttagcagaggagccggacacag

SEQ ID NO: 464257 - DNA, 97 bp, Homo sapiens
gccagaagggctacgccagcggcgtcgagaggaccatcctgggtgctggccctgtgctggaggacatcaaaggccagttctggaatgatgacgactc

SEQ ID NO: 464258 - DNA, 75 bp, Homo sapiens
ccgtggagaaggaagaactgtgctgaggttgagaacttgttgcttagtaaccaagggaccattaagctgtgtgac

SEQ ID NO: 464259 - DNA, 75 bp, Homo sapiens
tgctgctgccctagctggctacacagaggaggaagatgactatctctttgatgatcctctgccaatacctttaag

SEQ ID NO: 464260 - DNA, 100 bp, Homo sapiens
cacgaggcggcgggctggagacatggaccgcggcgagcaaggaggaggaagccaagaatctggtgagcgaagccatcgcagctggcatcttcaacgacct

SEQ ID NO: 464261 - DNA, 72 bp, Homo sapiens
gttcagtcaggacgtctacctgtccaccattgtgaccgaggtgttggagagcacaatggctgaacaagtcct

SEQ ID NO: 464262 - DNA, 90 bp, Homo sapiens
cccaggcagcttcgtggcgtgtgcggtttcgacccggtcacacaaagcttcagcatgtcatgtgacccaacatgagtgaagtttcctgca

SEQ ID NO: 464263 - DNA, 100 bp, Homo sapiens
cggagacacggtggaaacgcttatgggctgacgcgccactatgtagcgggtttcgggcgggccacgcgtgcgggacaggaacccaaccccagccgacctt

SEQ ID NO: 464264 - DNA, 75 bp, Homo sapiens
atggccgtggctaccccggatttgctccaagctatggctatcagttcccagatatggaatgtgcagatgtcccac

SEQ ID NO: 464265 - DNA, 75 bp, Homo sapiens
atcacctatgtttacagcgacaggaactgcaagcacatgttgaccagataactgaaatggcagcagtaatgagga

SEQ ID NO: 464266 - DNA, 100 bp, Homo sapiens
atgtagagtttattagacatgatagatgttttactgtgcctggctaactatagtcgagggggtgatggtcctatgtgtcgcccagtaattctgttgccgg

SEQ ID NO: 464267 - DNA, 90 bp, Homo sapiens
gagattgacgcggtgaactctgtccagttttcaaaccacacagcactgggcaaaaaccattccagaaaagatggactcagtgatgaaaga

SEQ ID NO: 464268 - DNA, 75 bp, Homo sapiens
cttcagcctgccgggcaggggacgtgaacatggatgaccctaagaaggaaggaaatctgaaatagagtactatgc

SEQ ID NO: 464269 - DNA, 80 bp, Homo sapiens
atggtgcagcaccgcatgatggtacccaaagtcaggccatcatgcacggacgaggcagaggagtggccggtcccatgggc

SEQ ID NO: 464270 - DNA, 98 bp, Homo sapiens
agtgtgcacactggctatcattgatccagacaccattcgcttttcacccaagatgatttgatgtcttataaaactctgatgaaccatgatggctacac

SEQ ID NO: 464271 - DNA, 101 bp, Homo sapiens
gtgctgagcgttctaaaggaaggcgtccgttggccttcgtacccgtcttgattgaggtgcaatggatgagcttcatagtctggatccaagaaggcaagagt

SEQ ID NO: 464272 - DNA, 87 bp, Homo sapiens
cgtgccgcagatgcccaccggaatggagaaggaagaggagtcggaagcagtcaattatagatttcttcaaaccagcttcaaaacaag

SEQ ID NO: 464273 - DNA, 74 bp, Homo sapiens
aggtttcaaagcattatatgaagattcttgaagacctggatgaacaaatttatatcattaccttagaggaagaa

SEQ ID NO: 464274 - DNA, 100 bp, Homo sapiens
tcctcccgggctggcgtgcgccagaggatccgcaaagtgctgaacaggttcatgtgtgcccagctgcccaaccccgtcctggacagcatcagcatcatcg

SEQ ID NO: 464275 - DNA, 120 bp, Homo sapiens
tgagcggctggaccacctggagaatgtcatcaagcagcacattcaagtaacactttcagctgctcctccctcctacttcagaggattcacattaattgccctcagagagaacagagaggg

SEQ ID NO: 464276 - DNA, 95 bp, Homo sapiens
aggactgaccgctgccgcccagcacgtccagtgctgctttcaaaatggaagaagatgacgcgcccatcaagcgctgccccaagtgcaaagtctac

SEQ ID NO: 464277 - DNA, 83 bp, Homo sapiens
ctgacctgtgtgtctgtgtattgcaggtgatgtagtcaaggtgatcgtctccgtccaggtactgaacgacacctgggtctcct

SEQ ID NO: 464278 - DNA, 82 bp, Homo sapiens
cagggcctgcagcgggagctggacggcgagcgcgagcggcgcgagaaagcgctggtgactgacctgggcactgcggagctgg

SEQ ID NO: 464279 - DNA, 75 bp, Homo sapiens
cactattccaaccaagaagagccaggctattcaagatctctggcagtggaggaagtctctttaagaaaatagttt

SEQ ID NO: 464280 - DNA, 112 bp, Homo sapiens
tgggtatccggtcttagaatacattccagaaaatgtatcaaggtgagagttacgtgtgtgcatccaatgaaccatttcgtaaagtcgattacaccaaaaatattaatccaaa

SEQ ID NO: 464281 - DNA, 100 bp, Homo sapiens
ggcagtggcgcttgagttggtcgggggcagcggcagtaatccagtccctcatagcactggtgaatgacccccagcctgagcacccgcttcgggctgacct

SEQ ID NO: 464282 - DNA, 74 bp, Homo sapiens
caccatttctttcacaaaccttgtgtctcaatttggctacaaaagatctgtgccatcattggcgggaccttcac

SEQ ID NO: 464283 - DNA, 98 bp, Homo sapiens
agtacttagcatcggaactgcaatgttaggagcagggagacgaaaccagacagagggtcaagtttacagatgaccgtgtctgcaagagtcaccttctg

SEQ ID NO: 464284 - DNA, 100 bp, Homo sapiens
cagctgaactgagcgtatgtgccacgccgcccaggagacccctctgctgcaccacttcatgccaggtgcccaggacagaagccccagccccagcctcatc

SEQ ID NO: 464285 - DNA, 100 bp, Homo sapiens
agctccaatgaatttgaggaagaattagtgtctccatcgtcatcagaaactgaaggcaactttgtctatcgcacaggatcccattgaagataccacgctg

SEQ ID NO: 464286 - DNA, 100 bp, Homo sapiens
gtttcacctatcctcactgatccgtggacttctgtatgatcaggctcctcctgctggaccctccagccccgggcctcaggagcccgagaaggaggagagg

SEQ ID NO: 464287 - DNA, 51 bp, Homo sapiens
agtgtggcaaccagatcggtgccaagtccaagtggtaagaagttcagaagc

SEQ ID NO: 464288 - DNA, 100 bp, Homo sapiens
cagggaagtggaccgccatctccgccctggaatacggcgtacccgtcaccctcattggtgttggtggaatgagcgttgcatgtgtcttgaagagaaaagc

SEQ ID NO: 464289 - DNA, 100 bp, Homo sapiens
atcctgggtagcctctaggaagcgctagacacatattgcttccaagtatgatcatcaggcagaagaagatcttcgcaattggatagaagaggtgacaggc

SEQ ID NO: 464290 - DNA, 75 bp, Homo sapiens
tacagcagcttcggcggcggcagagggattttttatcaagcagaaatgcatcgaacaacgagaatcaagatcact

SEQ ID NO: 464291 - DNA, 83 bp, Homo sapiens
tggcgctcggctgcgcgctgctcctcgccctcaagttcacctgcagcccccttacccaggaatggaacaacctccacaccatc

SEQ ID NO: 464292 - DNA, 100 bp, Homo sapiens
gacagcccatcgtgtgaactatagagtttgtggacagatttatattggttaaatgggccagggaaaactatcaccataacattggctcaccatattgctt

SEQ ID NO: 464293 - DNA, 99 bp, Homo sapiens
ccctcggcacccccggccccggagctgcctggaggcggccgcactcgggagacaaagaacccaacctcagagattcctcaactcggagacccagccagg

SEQ ID NO: 464294 - DNA, 98 bp, Homo sapiens
tataaccaagagagcgcacacaccaacaccaggcatctacatgggcagaccaactcagtctgtgcagacttttgcagacaaatcaaaacaagaagctc

SEQ ID NO: 464295 - DNA, 100 bp, Homo sapiens
ggatgtgatgttagagaactacagaaacctgatcttccttgggaagaaacccttttttcttggagccagcaataattatcacaattactgatgggagcaa

SEQ ID NO: 464296 - DNA, 99 bp, Homo sapiens
atatgcaaagattctgagtcaaataaacatttgtgctatgtatttgacagcgaaaagtgtcatgcagcagaactgattaaaacagtggcatctcgctat

SEQ ID NO: 464297 - DNA, 96 bp, Homo sapiens
tgggagctgtcagtgttttcctgagaaaggagcgagagatttgtactgtgttcgcagtgacctggggaacctgctcaaagccctgggtcgcttgga

SEQ ID NO: 464298 - DNA, 82 bp, Homo sapiens
gggctttgccatccccggctccagcttcctgatgaacgacaatctccttgagagctggagcgacctcgacgagctgaaggga

SEQ ID NO: 464299 - DNA, 98 bp, Homo sapiens
cttgtggccaagcctggaacatcacatctgtacgttgcaatctgtggatcagctacgagggaatctctgcatatagctacaaagtcacccagggaagg

SEQ ID NO: 464300 - DNA, 82 bp, Homo sapiens
tgaagatcgatgcttttcattatatccagctgggaactgtctacagtgaaagtgatgtcaagcagctctggttgcagctgaa

SEQ ID NO: 464301 - DNA, 98 bp, Homo sapiens
cggagccagaggagaggcgcccccgccggccgccgcgccgcccggcagcctcggcagcttccttcaaaatgtctactgttcacgaaatcctgtgcaag

SEQ ID NO: 464302 - DNA, 75 bp, Homo sapiens
cttacgtgtactttaccaacgagctgaagcagaaaatcgagagccttggttacaaccgacttatcctgcaaattg

SEQ ID NO: 464303 - DNA, 77 bp, Homo sapiens
tcagaatgctcagctagtcaactccctagaaggctgccagttgagcacagcaatggaggaaacagctatatgggaac

SEQ ID NO: 464304 - DNA, 75 bp, Homo sapiens
cacatcgctcagacaccatggggaaggtgaaggtcggagtcaacggttccgccatggtttttaaatcatccttcc

SEQ ID NO: 464305 - DNA, 90 bp, Homo sapiens
gcacttacctatgaggccagcaagcggaggtgctgggagcgagttggctgaggaacccatttactgttacaccccgcacaacttcacgcg

SEQ ID NO: 464306 - DNA, 110 bp, Homo sapiens
gtgaacaacctcaaatactgctgcattagtgaccagaaggatcccaaggatcgaatggttcaggttgtgaaatggtacctctcagcctttcatgcgggaaggaaaggatc

SEQ ID NO: 464307 - DNA, 100 bp, Homo sapiens
ctcatctggagatgatagagccatgtgttttacttgtagtgtatgcctcgtttgttgggaacctactgatgaaccttgatggagttttgctctgttgccc

SEQ ID NO: 464308 - DNA, 95 bp, Homo sapiens
cagtggcgggcgcaggagcccggccccggagccaccgtggccaatccgccatggtatagttgaagattgggacttaatggaaaggtttatggagc

SEQ ID NO: 464309 - DNA, 100 bp, Homo sapiens
gcgggtcctgcccccgcaggcagcgcgcgaacgtgggcgtggggatggccaccagtttccggacagcttcgtgctggggacattagtcatgagtgccgag

SEQ ID NO: 464310 - DNA, 87 bp, Homo sapiens
ctcagacaagaattactaaaggcaaacggtgaaattaaacatgtttccagtctgctggccaaggcttcaacggaccacaccaaaatg

SEQ ID NO: 464311 - DNA, 88 bp, Homo sapiens
aagagggtctggaggagccttctcaagaacagaggggccttggacaagttgttactgactatgttcatggggatgccttgcagaaagc

SEQ ID NO: 464312 - DNA, 100 bp, Homo sapiens
tctgcctggacctgtcagaggaaatgtcactgccaaagctggagtcgttcaacgggtttggagacttgaaggaggacaaagtgacgcgtcatgatggagc

SEQ ID NO: 464313 - DNA, 100 bp, Homo sapiens
gggatctttccggatcaatccagatggcagccagtcagtggtggaggtacttacaatttcatcagaaattcctaaaagaattcgaagtgccttaaaaaat

SEQ ID NO: 464314 - DNA, 105 bp, Homo sapiens
gaaggaacgaggcaaggagctaaagcagcgtgcgttcagccctgggacgagccaaactcaggctgtaccttgagcagctcaagcaactggtgcccctgggccccg

SEQ ID NO: 464315 - DNA, 100 bp, Homo sapiens
agcagttgtctgatgaagagaaggctgtggtggaggagagaacagtctcattcaaacttggagatttggaggaagctccagagagagagaggcttcccag

SEQ ID NO: 464316 - DNA, 82 bp, Homo sapiens
cgcatctgctgcccagcaacgagtgcgtggagctcttcagaaccgcctacttctgcagagacctagaggatcaagacataat

SEQ ID NO: 464317 - DNA, 74 bp, Homo sapiens
taccaagtggctgagtacaccttccgccaggtctcctctgagcctccggcctccataagacccaaaacagatga

SEQ ID NO: 464318 - DNA, 82 bp, Homo sapiens
tttctgaatgagacccaaacgcaggagttgaagtattgataacaccaaggaactctatcacaatttgaaaagataagcaaaa

SEQ ID NO: 464319 - DNA, 83 bp, Homo sapiens
gggtcaacgagaaagagatcggtgcaatgattctggactgagacgcgcttgggcagaggctatgtaatcgtgtctgtgttgag

SEQ ID NO: 464320 - DNA, 100 bp, Homo sapiens
cagggaaggagggcgtccgagtcaacaaccgcttcgagctgaaagctcctcctgagcttggataaactgcaggagcgaaggggctgaccgtttgtcggga

SEQ ID NO: 464321 - DNA, 83 bp, Homo sapiens
atgagttggggcgcccagctgccaacaccaaggttcgatacaagaggctgttttcctagcgtggcttgctgcctttggtaaga

SEQ ID NO: 464322 - DNA, 49 bp, Homo sapiens
agtgaccttctcccactgtaagtccatttgacgtggaggacatgaccgc

SEQ ID NO: 464323 - DNA, 82 bp, Homo sapiens
gaacagacaagcaggttgtcttgggtgactctggaggaccactggttagttcagatgctagagatatctggtaccttgctgg

SEQ ID NO: 464324 - DNA, 76 bp, Homo sapiens
gcacagaccctcgggcctcatcatggccaggaaggacactcatgaggaccatgatacttccactgagaatacagac

SEQ ID NO: 464325 - DNA, 100 bp, Homo sapiens
caaaaactccattttgctttggtactccaaagattcaggtttactcacgtcatccagcagagaatggaaagtcaaatttcctgaattgctatgtgtctgg

SEQ ID NO: 464326 - DNA, 80 bp, Homo sapiens
tttctcatggatgttcttcttcgagtatttgtagaaggtggcttctagaagagtgagtctggaaaatactgcccctactt

SEQ ID NO: 464327 - DNA, 100 bp, Homo sapiens
caggaagtgggaccggtgtctggcggatgcggtcgtgaagataggtgtgatgaatgcagactctgctaccattttggctgtttggatcctcctttgaaaa

SEQ ID NO: 464328 - DNA, 100 bp, Homo sapiens
ctgcaggcgaccaaacagagaggcattctggacaatgaagatgctctccgcagctttccaggtatcattggaacatttcaagatcatcaaatcaaattcc

SEQ ID NO: 464329 - DNA, 83 bp, Homo sapiens
gcagccaagatggtgaagcagatcgagagcaagatgcaggcctggggtagtctcctttctggactgagaagagaagaatggag

SEQ ID NO: 464330 - DNA, 75 bp, Homo sapiens
atggaagaaaaggacttttaaccaccattttgtgacttacagaaaggactctggcatctgtgaagatttctaaag

SEQ ID NO: 464331 - DNA, 83 bp, Homo sapiens
ctccgccgccgtcgcggcggcggggccaggcggcccgagtgggcttaaaattgaattcagtggatccaacaatgagcattgat

SEQ ID NO: 464332 - DNA, 90 bp, Homo sapiens
tgtaaccgccttgaagagctgatgaagccttatgtttgatcatcggccaaggtcctggcgagaactgcctctgcggctagctgattttgg

SEQ ID NO: 464333 - DNA, 100 bp, Homo sapiens
gaatatgaaggcttccccgtcccgatcaaggacgttgtgggctataactctttgggccactgcttcttcacggaagatgggccggaggaacgcaacactt

SEQ ID NO: 464334 - DNA, 100 bp, Homo sapiens
atggcgtgcgaggtcgccgcggggctggccgccatgcacaagctgcacttcctgcacagcttagcagtgtctgcaaaaacgaatcttttcctacaacctg

SEQ ID NO: 464335 - DNA, 100 bp, Homo sapiens
gaaattccccccgaagaagactcccccacatctggcatcatggcagaacaggatgtggaaaacgatcttttggattacgatgaagaggaagagccccagg

SEQ ID NO: 464336 - DNA, 100 bp, Homo sapiens
actgattttatgggaaaattaagcagatgctccagtttgagaaacctggatctgcgatctgtttgtggtttatggggaagtgctcttggtaacactgaag

SEQ ID NO: 464337 - DNA, 90 bp, Homo sapiens
cagagcctgcggggcaagatctaatctccctggaaaaggagacatgaatgtctgcaatgatacttcctgacaagaagttgatacaagaaa

SEQ ID NO: 464338 - DNA, 101 bp, Homo sapiens
aagcaggaggtgatccgaggctgggaagaaggggttgcccagggatataactggtgccatgaccggaatgtagtaacgattttcagtgctccaaactattg

SEQ ID NO: 464339 - DNA, 113 bp, Homo sapiens
agagcagcaactatgagaatggagaaataggggaaagtcaagtgaaaggtggtgaagagccaattgaggagaatggtgttgaacgcgtgtgtcctgagagcctgctgcagtcc

SEQ ID NO: 464340 - DNA, 90 bp, Homo sapiens
aagaagatgcctcgaactaaacaaattcatcccagaaatctaagagaactgtaagagtaaatgggtccagtaattggaatgactccagat

SEQ ID NO: 464341 - DNA, 90 bp, Homo sapiens
tccgcaaacattcagacaaaattggagagactgccatgaagcaaccatgctgtgacctacaagcaaactaaatagccaacatttctgaac

SEQ ID NO: 464342 - DNA, 83 bp, Homo sapiens
cgacaaaatgcaaaaaaggaggccaaagactttattgagattctaatgtattgccaactgaccagccgacagaagctgctata

SEQ ID NO: 464343 - DNA, 98 bp, Homo sapiens
tcctggccaccacagccaagccatcagtacccagtgctgacagtgagacacccctgacccagtgcgccgcgtggctcctcgtttctccatccctccca

SEQ ID NO: 464344 - DNA, 75 bp, Homo sapiens
cagtgtgttagctttccccaatggagccagtctacttgatgacttatacaagtatttcttcttccatcactccca

SEQ ID NO: 464345 - DNA, 80 bp, Homo sapiens
tggacatgtcaacagtggacgctgacaccgtcactgagctggcccagggaaatgtttcaacgtgcgcaagcgttgcggcg

SEQ ID NO: 464346 - DNA, 75 bp, Homo sapiens
gctccacgaaaggcagccgcggatcgccgcgctcagcgacaaacaagccaccagcccctcgggttccaagatgca

SEQ ID NO: 464347 - DNA, 83 bp, Homo sapiens
ctgggtcagtccgccgctcaccccgcggccgcaccttcccgccttctcagctacccgtacagtgaggacgcccgccagggtga

SEQ ID NO: 464348 - DNA, 75 bp, Homo sapiens
aaatccatataggatctttgagtatttgcaactcagcctagaagagggcctattccactagaagcaagatggctg

SEQ ID NO: 464349 - DNA, 100 bp, Homo sapiens
gtacttctcagggctaatatatggtgtcaagaagaattgtaagcagattgaatctgctaaattattacctgatacacccgttcaattcatacctccaaat

SEQ ID NO: 464350 - DNA, 100 bp, Homo sapiens
ttataacatcacatttaaaagcatctcagcctaccacactgtctgcacgccccgggatcttgctgtgcctgcagccctcacgcctcgagccagccctgga

SEQ ID NO: 464351 - DNA, 49 bp, Homo sapiens
cagagacatgagaagattcatactggacacattcagctaacgtatttta

SEQ ID NO: 464352 - DNA, 100 bp, Homo sapiens
ccccaacggggaggccaacgtgaagaaatatggctcgtggacagcagaaaattcagtctcagcagaaaaatgccaaaaagcaagctggacaaaagaagaa

SEQ ID NO: 464353 - DNA, 136 bp, Homo sapiens
agagccgcgagcgcccggccgaacccgcgatggaataatgcccagcggcccgccaggtcccgggagtgcctggcaacattggtgctcccggacccaaaggagcaaaaggagattccagaacaatcacaaccaaagg

SEQ ID NO: 464354 - DNA, 73 bp, Homo sapiens
ccactctttccgccctaatggaggtctccagtttcggaagggaaaaggccgaggcatcagcgtgtgaagaccg

SEQ ID NO: 464355 - DNA, 100 bp, Homo sapiens
gtttgccaatgttggagccgtctgcaaagtgtccccggcaagaagtgtcgtgtgggagccaatgggagatgggaagaaaatcatttccttggctgataac

SEQ ID NO: 464356 - DNA, 75 bp, Homo sapiens
gtaaactgtggaccttgaagttagcagatgtctttggtggacttgggaaagaggttgctagaagcagcaagaaaa

SEQ ID NO: 464357 - DNA, 100 bp, Homo sapiens
ttggcttctttgagactgaaatggcagattatgcggatcaaacctcaccaaggccagcacataggagagatgagcttcctacagcacaacaaatgtgaat

SEQ ID NO: 464358 - DNA, 74 bp, Homo sapiens
cagacagcataagcgagacgagtaggtggaggagaaggcgtgtgagcaggccaccggcgccaaggacacaaagc

SEQ ID NO: 464359 - DNA, 83 bp, Homo sapiens
gccatacctgatgcctctaagctgcaattcatcctagcaggacccttgaacatctgtgaagaaatgactattctgcatggagg

SEQ ID NO: 464360 - DNA, 88 bp, Homo sapiens
gggctggcctgcggcgcctgggcgctctgaggaggaattttgttgtcagagaataaaaggaggttgtccataattgactttaagcagc

SEQ ID NO: 464361 - DNA, 100 bp, Homo sapiens
ccggcagggcttctcctatgactacgtctttgactggaacatgctgaaattcgttggactccatgaaagaattgcacaaaacaaatcgacagcagcatga

SEQ ID NO: 464362 - DNA, 100 bp, Homo sapiens
ggaaggaaatcatgtcaagcgaagccttgaaaaagctgccctgagacggtgtcccgccgaaagaggatggcattccctgtggatatgctggaaaattgca

SEQ ID NO: 464363 - DNA, 74 bp, Homo sapiens
gcgcgtttcccgcctgagcgcaactagcggcgggtcgtgggcacctccagtaagaagaggaggaggccaggcag

SEQ ID NO: 464364 - DNA, 119 bp, Homo sapiens
gaaaaacgaactccgtccactaacaaaagatggctacgagggtaacatgttcgacaatgcagatcttcgtgaagactctgactggtaagaccatcaccctcgaggttgagcccagtgac

SEQ ID NO: 464365 - DNA, 100 bp, Homo sapiens
ctgccatattgtgtcttccccggccggtccctcgcctcccggccgagctgacgtatgtgcagaagcttataatcctgatgaagaagaagatgatgcagag

SEQ ID NO: 464366 - DNA, 51 bp, Homo sapiens
ttcgagacacactttatattgctggcaggtcacagggattatggacccaga

SEQ ID NO: 464367 - DNA, 95 bp, Homo sapiens
tggctcagccgcaagtacccgtccatcatagtcaactgcgtggaagagaagctgagatctgtatctgtggacctgaatgttgatccctcgcttca

SEQ ID NO: 464368 - DNA, 75 bp, Homo sapiens
gcccggccgcggcagcgcctctcctccgcgggatccgcgggaaatgaagctgttgtcatttctggaaggaaactg

SEQ ID NO: 464369 - DNA, 141 bp, Homo sapiens
gctggaccacctggtcggggaggagaccatggctgactacctgctgtacaccctcaacaaacaccagcgctttggtgagacggtttaagcggaagcatcttactgccattgactgccagcatttggctcggagtcacttgg

SEQ ID NO: 464370 - DNA, 101 bp, Homo sapiens
tgttctgcaggatcccatgagaaggccttgaaccggggcattgctgctgtcaaggaggatgcagtcgagatgctggccagctacgggctggcgtactccct

SEQ ID NO: 464371 - DNA, 75 bp, Homo sapiens
tggaatcgcccaagtccctctactcgcgagcttggctgaagaggaaataaaaacagaacaggaggtggtagaggg

SEQ ID NO: 464372 - DNA, 75 bp, Homo sapiens
gatgagcttgcaatgagaggtttcttacaggaaggggaccttatcagtatgtatgtccctgggaagctgcatgat

SEQ ID NO: 464373 - DNA, 75 bp, Homo sapiens
gaactctacccctcagacaagagagcaaaatatgctgtgaattccatcaagaagaaagtcaacgacaagaaccca

SEQ ID NO: 464374 - DNA, 51 bp, Homo sapiens
tctcagtgttgccctgttcagtctgaggtctccaattgagaaacatggcac

SEQ ID NO: 464375 - DNA, 75 bp, Homo sapiens
actgtctttatggtttagatgctgacttgcctttagaagaagccacactctctgaattaaaaactgtcctcaaga

SEQ ID NO: 464376 - DNA, 51 bp, Homo sapiens
acaatttccctgaactaagcgagctcttagaacaagctctggtgattgagg

SEQ ID NO: 464377 - DNA, 75 bp, Homo sapiens
caattacttggactagtttatatgaaatttgtggataatatagttggatcaaacaaaaacaacacaatttgtccc

SEQ ID NO: 464378 - DNA, 75 bp, Homo sapiens
gttggaagcagccgatccagcctgcggagcctgtggggcagtggagtacgacaaggagttctcccctcgtcagcg

SEQ ID NO: 464379 - DNA, 75 bp, Homo sapiens
gaggacccagaaacttgatgagaaaaggaagaaagtgaagcttgttacacaacagccaatgcggagtctgacaat

SEQ ID NO: 464380 - DNA, 127 bp, Homo sapiens
ggatggaactgaggttcaacactctggcaaaatgcccacactgcaaaaaaatgtaagaaccttgatgctgtccatgatatcactgtggcgtatcctcacaacattcctcaatcagagaagcacctcc

SEQ ID NO: 464381 - DNA, 98 bp, Homo sapiens
ccttcaaatccatcaagctcatcaaaagatcctatagcaatggaactcagcgatgcaaatctgcaaacactaacagaatatttaaagaaaacacttga

SEQ ID NO: 464382 - DNA, 100 bp, Homo sapiens
ctcggccccgcgcccgcccaggggtcgctgtcgcctgctgctggctcctcactgattgttaaaggaaatgggctggcaggaagacagtgaaaatgatgaa

SEQ ID NO: 464383 - DNA, 75 bp, Homo sapiens
aactgttcacgcagacctcgcctgtggcagatgcaccggtttgagtggccgcttctttgtcaccactctcccagc

SEQ ID NO: 464384 - DNA, 83 bp, Homo sapiens
agatcttcacagcacagttcctgggaaggtggagccaccagcctctccctggtcacggtctagatcacattctcgatccagag

SEQ ID NO: 464385 - DNA, 100 bp, Homo sapiens
tccggctgggtgggcttggccatggtcagcgtgaacgcgcccctcggggctccagtggagagttcttacgactgcctggcagctctttagaaagttgtgt

SEQ ID NO: 464386 - DNA, 88 bp, Homo sapiens
caggcgcgacgtgcggctcgcagaacggcgagtagcggagcgggacccgctgttatgcaatggtctctgcaagatggtttattcttga

SEQ ID NO: 464387 - DNA, 100 bp, Homo sapiens
ggggcttgccctggtcttgctcggccgatgaagtgcagaggtttttttctgttttgcacagtaataagttgactcacacagacttaaagcctgaaaacat

SEQ ID NO: 464388 - DNA, 75 bp, Homo sapiens
ctttcctctgctgccgctcggtcacgcttgatggaggaaaggaagtgctgtccatgcaccagattctcctgtact

SEQ ID NO: 464389 - DNA, 82 bp, Homo sapiens
ccgcggatctcaccgccgctcaggaggaaaggagcagtggcttccggttgaagccaccaacgctgatccacggccaagcccc

SEQ ID NO: 464390 - DNA, 100 bp, Homo sapiens
agtctacctgcctacccgcgagtacccgtctgaacagaccttcaacaattggatccatggctttgacagaaggggcattgtgtcagcatgatctcatcag

SEQ ID NO: 464391 - DNA, 76 bp, Homo sapiens
tttgagcaactgcttcaaaacatggacaatctaaaatatgtaaatcagttgaagaaggaaaatgaacgtgcccagg

SEQ ID NO: 464392 - DNA, 75 bp, Homo sapiens
attggccgccgcgatgtcagctcagtgctgtgcgggccagccccagcatgagaccagatgtaagctctcctccat

SEQ ID NO: 464393 - DNA, 99 bp, Homo sapiens
gagaaccaactggtcccgaaagaggaaactaaatatattttgccaactttggaaaaagaattattcttggcagagcacagtgaccttgaagaaggtgga

SEQ ID NO: 464394 - DNA, 118 bp, Homo sapiens
agagaagcacttggcgcctcggggaggggaccgcgcccgcctcatttgcgccttgcagcactgctggaccaggtcaaaatgcagatcttcgtgaaaacccttaccggcaagaccatca

SEQ ID NO: 464395 - DNA, 75 bp, Homo sapiens
atcgacagggacgtcctcattgtcctcgatcgagctgaaggactgcgcggctggctctcctctagtatggccaat

SEQ ID NO: 464396 - DNA, 100 bp, Homo sapiens
gcctgattcccactgagttacgccgagaggctctggccttacaggggtccctggagtttgatgatgctggaggtgaaggagcagacgcctccgcctagac

SEQ ID NO: 464397 - DNA, 80 bp, Homo sapiens
cggacgcagtgatttgctccccctcgtgcagcaacccccacacccagcaccagtatttgcaaccacgtggcttcacgagt

SEQ ID NO: 464398 - DNA, 101 bp, Homo sapiens
agaatggaatgcctccaacttagaggacttacagaaccgaggatctctcaaaggccttggttctgacagaaattggccccaaacgtgaccctgcgaccctg

SEQ ID NO: 464399 - DNA, 100 bp, Homo sapiens
cacatccagaagaggaggaaaatggctccgagcagggaccgcctgctgcactttgggttcaaggcgacagctgatcagctgaccgaagaacagattgctg

SEQ ID NO: 464400 - DNA, 83 bp, Homo sapiens
aacgggccacggccatttccttgatgcgcaagttcattgcctaccagttcacagacacggctggagtgcaatggtgcggtctc

SEQ ID NO: 464401 - DNA, 100 bp, Homo sapiens
caaagttgacccttcccacgatgccagcaaagtgaaggcagaaggcccagggctcagcaaagcaggtgtcgagcttggcaagcccacccacttcacagta

SEQ ID NO: 464402 - DNA, 113 bp, Homo sapiens
ggccaagtggtgtatgtgccggtcaagacgggctcgctcattgacacaattgcctcggagatcggagaactgaaacaggagatggtgcggacagatgtcaacctggaaaatgg

SEQ ID NO: 464403 - DNA, 111 bp, Homo sapiens
cacgcggttcttctccagcgccctggcctccctcaccttggacacctcgcttggggagtgcatccgccccaacccttttccccctcgtctcctgtgagaattccccgtcgg

SEQ ID NO: 464404 - DNA, 82 bp, Homo sapiens
caactctccgggcggccgcacctgccagtactatactggcaattgctggagaagattttgcaattgttgcttctgatactcg

SEQ ID NO: 464405 - DNA, 80 bp, Homo sapiens
gccggagctgagaccgggcggccacagtccgcagggatgaacctcgagttgctgggtccaggtgcaggtacagcagtctc

SEQ ID NO: 464406 - DNA, 82 bp, Homo sapiens
tgacaaggaatggatgttgtacattcagaaacttcttgaaggacagggttcatagcagtggcagcaatgcttatggatgctg

SEQ ID NO: 464407 - DNA, 100 bp, Homo sapiens
gctggatattgcgtgatcacctatatacttggagttggagacaggcacctggataaccttttgctaacaaaaacagatggagcagatggtgctttttacc

SEQ ID NO: 464408 - DNA, 83 bp, Homo sapiens
agaacacagtggatgtcgagaacggtgcttctatggcaggatatgctaaattctgtccaacgtttaataaatcaatggaggaa

SEQ ID NO: 464409 - DNA, 98 bp, Homo sapiens
ggtctaggcaggggaaattggggtgccaccagacggagacagcttggactaccagttttcggctttgtgagaaaccttaccatcaaacacgatggcca

SEQ ID NO: 464410 - DNA, 76 bp, Homo sapiens
gaagcacgtggcgcaaggatgcggagctttatctgttgtccgttattactcagggtccgcaagcaggtggtgaaca

SEQ ID NO: 464411 - DNA, 50 bp, Homo sapiens
cttggtcctgttaagtatctggctctgtgatcagccggcagtccattgat

SEQ ID NO: 464412 - DNA, 97 bp, Homo sapiens
taaggaacagctacagtcgctgttaaatgtgcctgaaaagcaatttgcaatctttgcattaggttcgaaaacatggccaaaagaaatgccgagaagg

SEQ ID NO: 464413 - DNA, 100 bp, Homo sapiens
gaatttggggtaaagatcctgcctttgcaagttcacttcttcaactgagatggacatgatataatctccattgagtcaaagaatggcatctagtcctgag

SEQ ID NO: 464414 - DNA, 83 bp, Homo sapiens
ttaacactaacagatcttcaatcacctaaaaagccctcttctgggtcacgctagaatcagatctgctctccagcatcttctgt

SEQ ID NO: 464415 - DNA, 142 bp, Homo sapiens
gctggttagtgtgctctgagggagggtccgagccagccgctgttttgccggaggagcccctcaggccgtcactcctggaagcaaggcggctctagctaatttatgtattggagatgtaatcacagccattgatggggaaaat

SEQ ID NO: 464416 - DNA, 100 bp, Homo sapiens
acggcacaaaccaaaccagaggacagatcccacagatactctactatagataacaacgaacttgatgcaagtgataggtttgccaaggtcagacctctca

SEQ ID NO: 464417 - DNA, 100 bp, Homo sapiens
cgggaagaatcgtttggtctcctgccgtgcccgcatcacaggacatggccccctcagccacctagctggggcccatctaggagtggcatcttttttggtg

SEQ ID NO: 464418 - DNA, 96 bp, Homo sapiens
agaggggagcacagagaaagagaatgatgaagagaaaggcccggagactgtgattgaagatagtactggagtccgccgggtggtggtcacacccca

SEQ ID NO: 464419 - DNA, 100 bp, Homo sapiens
gtacgcctagaacagtgccctctgcagctgaataacccttttaacgagtattccaaatttgatggcaaggtgccgtggccagcacagaagtgaagatgaa

SEQ ID NO: 464420 - DNA, 83 bp, Homo sapiens
caataggaagtacgagtgtgagtttttagaacttcagccataaaaatgggcagaattttccttgatcatatcggtggtacccg

SEQ ID NO: 464421 - DNA, 84 bp, Homo sapiens
caggacaatggggacccgggacgacgagtacgactacctattcaaagacctgcctagagctggaacgttacctccagagcgagc

SEQ ID NO: 464422 - DNA, 74 bp, Homo sapiens
gtaattaatgcagtaaaacgcttccatatttatccagaggagaaactcccatgtatggaatcccactgtatgat

SEQ ID NO: 464423 - DNA, 83 bp, Homo sapiens
atggcagtgactctggaccaaggtggaacaatccaaagttttaatcaaagaaggtggtattcagttgctgcttacaatagttg

SEQ ID NO: 464424 - DNA, 100 bp, Homo sapiens
cagcaacaagccttacaggagactttcagatgcaacagcattttgaatttgaataccagaccaaagtggatggtgagataatccttcatctttatgacaa

SEQ ID NO: 464425 - DNA, 89 bp, Homo sapiens
ggcggtggcgagaggtgcggcgaaggaggcagaggcacttatgcttgtcaggatgctgatatgctaactggtgatgagcaagtatggaa

SEQ ID NO: 464426 - DNA, 96 bp, Homo sapiens
aaaaaaaatagctcagttaatgaaggatcaacgtatcataaaagacctcagagttgggtgtcacagaacatgttgaaggagacccttgcaaatttg

SEQ ID NO: 464427 - DNA, 89 bp, Homo sapiens
agaaacctcgtggcctggtctccattatttgagatgagttacatcttggagccaacaaatggaattttcttgagcatgtttctaatcgt

SEQ ID NO: 464428 - DNA, 129 bp, Homo sapiens
ctgggtttgaattcaccagcttggtattttcagtctccttcccaccacaactatctgtaagagaggtagtaaacctattgatggcaattttgctgactgtggaagtgactcatccaaactccatgccag

SEQ ID NO: 464429 - DNA, 100 bp, Homo sapiens
atactgactactacagcaacacttccgtgcccctgataaagcagttccctgtaacctgtgagactggaccaggtgacttcatggtcatgacgattttctt

SEQ ID NO: 464430 - DNA, 50 bp, Homo sapiens
cgtctccttaacaccgaacaccggagtaccctgacttctaccggaagctc

SEQ ID NO: 464431 - DNA, 100 bp, Homo sapiens
ccgagagggggcgacggcggcggcggtggcctgaggaggcccgagcggcggcggtggcggcgaaggccgaggcgctgtcgcctggttgggcccggaaatg

SEQ ID NO: 464432 - DNA, 75 bp, Homo sapiens
gaaggactgggatgatacaccttttccacagggaattgagttggctcatgcacaattagttcgagaagttgatgt

SEQ ID NO: 464433 - DNA, 75 bp, Homo sapiens
ggagagcttcatcaaaaatagtgatagctttgataataatagttatgcacgagtgcgagctgtggtgatgacccg

SEQ ID NO: 464434 - DNA, 97 bp, Homo sapiens
gtacacgttgggggtgtagttagtgcacgttctgtgaagcttttggatcgtatccacaatcctgctcttcacagatggaatcacaaataaacttatt

SEQ ID NO: 464435 - DNA, 75 bp, Homo sapiens
gccgagcccgcccgcgcgccggttctccagcatttggctcaaggccccaagggcacatgtgacaagaaggcgcca

SEQ ID NO: 464436 - DNA, 98 bp, Homo sapiens
catccgggcccgggtgtcttccggcagctcctctgaggtctcctccatcaactccgacctggagaacacggctctagataaggaggggcagattttct

SEQ ID NO: 464437 - DNA, 100 bp, Homo sapiens
ctttccaccccgaaattcgccccgattaaagactgtgttgcattatcaggtttattacccagaactctttgtctgggtcagtcaagaaccatttccaaac

SEQ ID NO: 464438 - DNA, 96 bp, Homo sapiens
tgagtgtctgtccccagagcctcagtttgtgcaggacaccgacatggaacagggactcactggggatggcagtggcagcaccatgatgcaaaccaa

SEQ ID NO: 464439 - DNA, 100 bp, Homo sapiens
gataaaccttgttgttttacagaccttaaggtgtttgttgacctcttacctgctacacagtgtacaaaagagactgagtgccctttgcggcttgctgtct

SEQ ID NO: 464440 - DNA, 82 bp, Homo sapiens
gcctgcccaaccgcgtgaccttgattgagttaatgaacttcacgcctcagcgtccagaagtcggccagagcagcatgtggat

SEQ ID NO: 464441 - DNA, 104 bp, Homo sapiens
tccgccccgcgagcacagagcctcgcctttgccgatccgccgcccgtccacacccgccgccaggaagctcttcgtgggcggtcttgactggagcacgacccaag

SEQ ID NO: 464442 - DNA, 75 bp, Homo sapiens
actaggaggagtaataagtaactctgctctgttaaaagcgaaaatgaaacaattgcctgcggcaacagttcgact

SEQ ID NO: 464443 - DNA, 100 bp, Homo sapiens
aagactgccacacctagactgatgcttattagtcatcaccgttattcctactaacgtcctgtgtcactgagagaacacgtagcgactccgaagatcagcc

SEQ ID NO: 464444 - DNA, 75 bp, Homo sapiens
gatgaaaagagggactgccataacattcccaaagggcttatttcaaaacctttgtccctcagttccaggaggcag

SEQ ID NO: 464445 - DNA, 100 bp, Homo sapiens
tataacctgcccccagagctgtaccatgagggggagcaggtggaatatgcagaaatgagtatgtattcccgtgtgccagagtgccaggtcaccacatact

SEQ ID NO: 464446 - DNA, 98 bp, Homo sapiens
cggatccctgagctcgtcaagcagctgtcggccaagctcatcgccaacgaagctgccagtaactcagattctagccatgaaggtcaagaggaatcttc

SEQ ID NO: 464447 - DNA, 82 bp, Homo sapiens
gctccgaagaaacggattggagcctgtgacctaccacagggaagtgagctcacaatgactcaagctgccacatagtgttgat

SEQ ID NO: 464448 - DNA, 100 bp, Homo sapiens
attatatggttgattatttcagaagacaattacctaatcaaggtttggccgatggatgcactgactggtctatcgatatcaagaaatatcaagttttggt

SEQ ID NO: 464449 - DNA, 100 bp, Homo sapiens
taggtctcagcttttggccaacagatttctttaaagactcgtgcagcacatcattatcgctggatgcccggacatgtaatacacctgacagcatgtgaag

SEQ ID NO: 464450 - DNA, 75 bp, Homo sapiens
agcttttaagcctatactttctaccagaagcttgaagggtttggttaagtctttctctaatacacagaattctag

SEQ ID NO: 464451 - DNA, 81 bp, Homo sapiens
tgtacgtgtacatcatttacggcatgtacttctgcatgaacatctccagccaggaggtggggctggtgtccgagcacttct

SEQ ID NO: 464452 - DNA, 82 bp, Homo sapiens
gcgagtgactgcggccacgcctgaaaggcgactctcctataagaccatcatcatgtggaaactgaccagggatgagaccaac

SEQ ID NO: 464453 - DNA, 98 bp, Homo sapiens
ggaccccccccgcgcctgcacttagccccgcgcccgagagactctccaacatgtgccttctgaccatacaaatgaaacttccaacagtactgtgaaac

SEQ ID NO: 464454 - DNA, 100 bp, Homo sapiens
ccggggcttgccctggtcttgctcggccgatgaagtgcagaggtttttttctgtttgcaggtcgaagtaagaaggaaaccaaatattctcttaaggctgt

SEQ ID NO: 464455 - DNA, 90 bp, Homo sapiens
atcgtgaccgagaccgtgaccgagagcgtgaccgagagcgcgaatatcgtcatcgttagaagacaatactgtcagagttcaagacacaga

SEQ ID NO: 464456 - DNA, 100 bp, Homo sapiens
aattggaaggcatgaaaattcagaccttgttttacagcacgttcacgtccatgttcttcccaggaaggctggagactttcacaggaatgacagcatctat

SEQ ID NO: 464457 - DNA, 75 bp, Homo sapiens
ctgcactgagcgggacctgcgagcagcgcgggcggcagcccgggggaagcgggttcccagcaccatgagggcctg

SEQ ID NO: 464458 - DNA, 75 bp, Homo sapiens
atcatcgtctcctgtggctgggacaagctggtcaaggaacttgctactaccagcaccatgccctaccaatatcca

SEQ ID NO: 464459 - DNA, 100 bp, Homo sapiens
cggcgagctacgtgcagttgctggaggaatgtcgttgtctgctgggtcttcccctcttcattcccccaagattactccacatacttctcctgctcccaga

SEQ ID NO: 464460 - DNA, 75 bp, Homo sapiens
ccaaaaagcagctggacagcacaattggaatccaccctgtctgtgcagagactctgatgccagtatggactggag

SEQ ID NO: 464461 - DNA, 100 bp, Homo sapiens
tctcttcctcctccaccgagtcgtgctctcgccccaacccgcgcgccaggtgaaaatgaaatccttgcaactctgcatgccatttcaagcaaaaaccaga

SEQ ID NO: 464462 - DNA, 50 bp, Homo sapiens
aaaaaggaagctattcaccattgagccaacaaatggaattttcttgagca

SEQ ID NO: 464463 - DNA, 87 bp, Homo sapiens
cgccgccggcggcggcggcgtgagccaccgcgcagggactttcagttaccttgatgatgtcccatttaagacaggagacaaattcaa

SEQ ID NO: 464464 - DNA, 73 bp, Homo sapiens
accaggtggacggcacggacgacagaagcgactttggtgagactctgactgatgggaagaagagttactataa

SEQ ID NO: 464465 - DNA, 83 bp, Homo sapiens
gggagatcagctatgccattaagaacatccatggagtcaggtctcggtccagctcgacttccagctcaggctccagcaccagc

SEQ ID NO: 464466 - DNA, 98 bp, Homo sapiens
acacccaccctgggcttcagcactggcagcccccagagagaactcgatgccaccgcaacggtattggcgaaccggcaggatgaaagtgagcagtccag

SEQ ID NO: 464467 - DNA, 100 bp, Homo sapiens
ggggagatagacgctgctgcctgaaattcggcgccttcatcagtatgtgaaatttgctgtccaagatgtgaatgatgttctagacttggagtgggatcag

SEQ ID NO: 464468 - DNA, 90 bp, Homo sapiens
ggctgatttagaaggaggttcaggctacggtgagccgaaggtatgagtcgtcatccgaggactccagcacagcagagaacatctcagaca

SEQ ID NO: 464469 - DNA, 82 bp, Homo sapiens
cagaaacctgaagttagaaaggctcaacgagaacaagctatcaggtatttagaggtagagtgggaagttaaactaaaaactc

SEQ ID NO: 464470 - DNA, 75 bp, Homo sapiens
agagctcggtgctggagaacttcgtgggccggtgacttaagagattaaaattaatttggttgctgttggttctga

SEQ ID NO: 464471 - DNA, 82 bp, Homo sapiens
atgaaccacctgggggacatgaccagtgaagaagtgatgtctttgatgagttccctgagagttcccagccagtggcagagaa

SEQ ID NO: 464472 - DNA, 75 bp, Homo sapiens
ggagcttcgcgacggcagcggcaagaaggatcttttgccagaaatgagggcatactggcctgacgtaattcactc

SEQ ID NO: 464473 - DNA, 100 bp, Homo sapiens
cgccgagcgctactcgcaggaggtcttcggctgctctttggcgtaaattgcaatcgattagggatcgtttctcagaatcaagttagaagtgagagttcag

SEQ ID NO: 464474 - DNA, 98 bp, Homo sapiens
cagtttggaagaagcccttcgtcatgaatgggatctgcagagttcgggcgagaggaggcgagaggcgcaaaggtttggaagaggacagttgcccttta

SEQ ID NO: 464475 - DNA, 100 bp, Homo sapiens
atttgataacactggagatcagcaccaaatcccacagaggcatctgaggcaattttcgttctgctctcaatgatgtgacagctgccagaaagctaaaacc

SEQ ID NO: 464476 - DNA, 90 bp, Homo sapiens
agatgatcttcaacagctgcaggtcttgggcgtctttggtactggcttttttaggggtctgcctggggattacccttgctgtggatagaa

SEQ ID NO: 464477 - DNA, 128 bp, Homo sapiens
ctgggcgctgcttgctaaagagccgagcacgcgggtctgtcatcatgtcgcgttacgggcggtacggaggaggtttttagaacttcagccataaaaatgggcagaattttccttgatcatatcggtgg

SEQ ID NO: 464478 - DNA, 100 bp, Homo sapiens
gagactttaccatctttcgcagcctagggcaacgtccaagtctccgaacagagccacacgactcccgctggctcaatgaccaggatggagcagagcccag

SEQ ID NO: 464479 - DNA, 100 bp, Homo sapiens
gtgagctgcctgaaaatgcactcggatgccgccgctgtcaaatgcagagccagagccccggagcctctccctgggcggccatgtgggtttcgacagcctc

SEQ ID NO: 464480 - DNA, 75 bp, Homo sapiens
ggaggttgctgcattttgccacatgctggatatgtcactgcatctccctgctgctggacccacagcggaagcaga

SEQ ID NO: 464481 - DNA, 95 bp, Homo sapiens
gcgagtgcggcctcggctggcggcggcaccaggactcgctcagcagcagcctgaaaacttgctacaagtatctcaatcagaccagtcgcagtttc

SEQ ID NO: 464482 - DNA, 50 bp, Homo sapiens
caggactgcgccgcgtcttcctcaaggtgacttaagagattaaaattaat

SEQ ID NO: 464483 - DNA, 82 bp, Homo sapiens
tgacggttataagaccatttatttctttggagacaaaactatgccaagtcctgtgtatggaaactcacatgagtcagctcag

SEQ ID NO: 464484 - DNA, 100 bp, Homo sapiens
aatgtggacggactcactgccctgcaccaggttggaaaagagactgttcaaaccactgaggatcagattttgaagagagatatgccaccagcatttatta

SEQ ID NO: 464485 - DNA, 90 bp, Homo sapiens
gtctcttacgtctgcggaagtgcagctgcctcagttcttagcgcaggcaccatggctgaggaaacagctccagcagttcttgagcggcac

SEQ ID NO: 464486 - DNA, 100 bp, Homo sapiens
gatttctatgacagaactaaagcgggcaaagttagaccttccagaacctgcaacgaagtggtgaatctgttaaagtgcaccaactagatgttgccattcc

SEQ ID NO: 464487 - DNA, 75 bp, Homo sapiens
tcctcttcaagcttaaacctggatttggagcaagaggtggtggtggccttcccccgaagaaatttggtaatcctg

SEQ ID NO: 464488 - DNA, 74 bp, Homo sapiens
acaccatcaacattcacaagcgcatccatggagtaggtctgcggggtttccgagaggctcgccgggatttctgg

SEQ ID NO: 464489 - DNA, 74 bp, Homo sapiens
caggagctggcgtctctggagaaagaatagcctaacatggcagaccagagacagcgctcactgtctacctctgg

SEQ ID NO: 464490 - DNA, 111 bp, Homo sapiens
cacagtgtgaccttggagatacctcatcatatcacacaaaggtgttggtggaaataacccagatgaagaaaagaatagcacagccaattctggggtctcctctacagacat

SEQ ID NO: 464491 - DNA, 98 bp, Homo sapiens
agatatactactaactttgaaatggaataagtaggataagttctgaacgtcgaaaagaaaagtctcgagatgcagccagatctcggcgaagtaaagaa

SEQ ID NO: 464492 - DNA, 83 bp, Homo sapiens
agggaaccctggtcaccgtctcctcaggaatcagtaacatgatagccaagcttgccaaaacctgcaccctccgcatcagccct

SEQ ID NO: 464493 - DNA, 82 bp, Homo sapiens
caaagtcgaatatcatgctggtggctctacccagaattcaattaaagtggctcagaaaatgacagatggcgagacctggaca

SEQ ID NO: 464494 - DNA, 75 bp, Homo sapiens
cccaagacccttgtgctcgttgtcgccgcggtcctgctgttgatatggctcgtggacagcagaaaattcagtctc

SEQ ID NO: 464495 - DNA, 101 bp, Homo sapiens
ccaacggagcgctgaggcgggcgttttcttggatgaattgcttgctttggagacaatgcagatcttcgtgaagactctgactggtaagaccatcaccctcg

SEQ ID NO: 464496 - DNA, 75 bp, Homo sapiens
ccgcctcctctcaccaagaaaacttgttcaagttgctcaaaccccatggctgggggttatggagtgatgggtgac

SEQ ID NO: 464497 - DNA, 75 bp, Homo sapiens
atagacatacagctgaataggaagtatcacaccacacgtaagctgtcggaaaaggtaacagaagatggaactcga

SEQ ID NO: 464498 - DNA, 90 bp, Homo sapiens
agctaacatgttgtacctggaaaacaatgcccagactcaatttagtgagatgccttcaattaagttgcagagttctgatggagagatatt

SEQ ID NO: 464499 - DNA, 87 bp, Homo sapiens
tgaaggtagttgctggaaaccatgacattggcttccattatgagaagatgaagtcctcagtacattctgaagaagatgattttgttc

SEQ ID NO: 464500 - DNA, 76 bp, Homo sapiens
ccgagtccggaccggagactttggggcctaactagccaaaccaaacaggaagcttacttttctctacctagccaat

SEQ ID NO: 464501 - DNA, 90 bp, Homo sapiens
cagcgacagagccaaaatcagagctggaacctgaggagagaggtctcctctgagcctccggcctccataagacccaaaacagatgacacc

SEQ ID NO: 464502 - DNA, 100 bp, Homo sapiens
gtattcaagagaggatcatgtctacacctggaggagaggaagctattgaacgtttaaagaatctgactacccacttgttgatgaaccagggaagcatcgg

SEQ ID NO: 464503 - DNA, 75 bp, Homo sapiens
atcggaatgtgatcacagagcctatttacccagaagtagtccatatgcagtagaagactcagaaagtggtgttta

SEQ ID NO: 464504 - DNA, 110 bp, Homo sapiens
cgccattatcctctgtttctctgctgcaccgacctcgacgtcttgcctgtgtcccacttgttcgcggcctataggaatccagatcttacataagatggaagtctctcaca

SEQ ID NO: 464505 - DNA, 50 bp, Homo sapiens
cgttttcgcgtggttcttttgcaagcctcgaagcggaggatccctgtgtc

SEQ ID NO: 464506 - DNA, 98 bp, Homo sapiens
tttcccaggaaccattggataaggataaaggagatgagtatgatgtatgtgccatttgtttggatgagtatgaagatggagacaaactcagaatcctt

SEQ ID NO: 464507 - DNA, 75 bp, Homo sapiens
tcacgagtacaatgacatcaaggatgtggggcagatgctgatgggcaaactagagcatcctggccagaacaagcc

SEQ ID NO: 464508 - DNA, 100 bp, Homo sapiens
gaacaccatatggttacagcacagctgcccctgcctatgggatgcttgaagatggaaagaaatttgattcctcccgggacagaaacaagccctttaagtt

SEQ ID NO: 464509 - DNA, 74 bp, Homo sapiens
acccatcatttctagtctccctcagctgttgagcagtctgatgatttgaagaagagaagagagcctcacatctc

SEQ ID NO: 464510 - DNA, 51 bp, Homo sapiens
cgagctccagccgaaggagaaggggggaaaattctcaaaatgctccacttg

SEQ ID NO: 464511 - DNA, 75 bp, Homo sapiens
cagggccctggggaggaggtcccggacgtcactcctgaagacctcccaggagctacactgcctgatgtgggcctg

SEQ ID NO: 464512 - DNA, 82 bp, Homo sapiens
cgggtgccgaggagcgggaagagttgctgggaacatccagtcatggataaaaatgagctggttcagaaggccaaactggccg

SEQ ID NO: 464513 - DNA, 75 bp, Homo sapiens
ggtctgcccacccaacgcgaagacggtaacccgtgtgactttgactggaatgacctgaccggagagcactcgtgc

SEQ ID NO: 464514 - DNA, 100 bp, Homo sapiens
acgcagcagccgctgccgccgccgcgggagccgctgcccgaactcccggcccgaactccagggagaagtgagtcatctcattcccctccgtggatcagag

SEQ ID NO: 464515 - DNA, 90 bp, Homo sapiens
tgatcatcatggacacagttttgacagtaattcttttgggccggtgactctgacatcattagaagcatgccagaacagactggtgaaaag

SEQ ID NO: 464516 - DNA, 100 bp, Homo sapiens
tggaggaaggaagtgcggagccagcctgagttgggagaagagctccagagactgtgcctgcagtttgtggtgaaggtgctggatgtggacttggtttgtg

SEQ ID NO: 464517 - DNA, 110 bp, Homo sapiens
tggacctatgaatatccagtttgagccatcggatctaagatccaaaagggtgatgacaactccgtgagggtggagattatacatctctcatcatttcagcaacaaggaaa

SEQ ID NO: 464518 - DNA, 82 bp, Homo sapiens
agagagggaagagattcagccagcacactcctcgcgagcaaggtcagcttcccagacgtggaaaaggctgaatggctcaata

SEQ ID NO: 464519 - DNA, 75 bp, Homo sapiens
gaactaggatgtcccgacatgaagtgcactgacaggcagaactcaccagtcacatcaccaggatcctctcccctt

SEQ ID NO: 464520 - DNA, 100 bp, Homo sapiens
ggacaactgaattcaggcaaaaaacaaatagaaaaactggaacaggaacttaaaaggattcctaccggaagcaggtggtcattgatggggagacgtgcct

SEQ ID NO: 464521 - DNA, 90 bp, Homo sapiens
atgacagttcacataagaagttcttcgatgtatctaaacttggcaccaagtatgggataaacacacttgttacctatgatatggttccag

SEQ ID NO: 464522 - DNA, 100 bp, Homo sapiens
ggggactcagaggagtacttcgccacttactttaatgagaagatctccattcctgaggaggagggtacaggcatccttcacctgctattgttgcaagaac

SEQ ID NO: 464523 - DNA, 75 bp, Homo sapiens
ctgataaagaacttcttcccaaaatggaagacttgcactatctgccagatgctgcttcctaaccagtgcagttat

SEQ ID NO: 464524 - DNA, 98 bp, Homo sapiens
cagcggagcccacgagaggcagcgccatggcggagcagacctactcgtgagtttccaggatggcttctgcatcaacttctaaatataattcacactcc

SEQ ID NO: 464525 - DNA, 100 bp, Homo sapiens
ccgcactgagagccctggtttggtcaacagttgggctccaagtgataccaagaagaagcaggggatgaagaagaggagcaacagtgaagtggaagacgtg

SEQ ID NO: 464526 - DNA, 129 bp, Homo sapiens
agacctgccgacattgacatgtcatgcctgggtgcagcttctctagctggccttgctgttggtagctttggatatgttaaatcctcatgttactttgcctgttttttacccacatcttaagcatggtgg

SEQ ID NO: 464527 - DNA, 100 bp, Homo sapiens
ttccgcgccacagaccccagccaggaaggaatcgtgtctcctagtgacctggaccttgtcatgtcagaagggttgggcatgcggtatgcattcattggac

SEQ ID NO: 464528 - DNA, 82 bp, Homo sapiens
gagataatgagtttagctctgagggaggagtctgctactagtcttatcagctcttaaaaacagaaactcatctgtccaagtt

SEQ ID NO: 464529 - DNA, 98 bp, Homo sapiens
atgtgtttccgcacctgccgctcatcgccatcacccgcaacccggtgttcccgcgctttatcaagattatcgaggcagatataatgcacctgactgac

SEQ ID NO: 464530 - DNA, 82 bp, Homo sapiens
gattaaaaaattatgctgaataccagctcttagaacaagctctggtgattgaggaacagctgcgccgggctgcttacttgaa

SEQ ID NO: 464531 - DNA, 82 bp, Homo sapiens
caactattcgcagtccgagcgcattttgaaagcgaagcagaagccgtagaatcagcggcgagcctgttgaaagaacccacag

SEQ ID NO: 464532 - DNA, 75 bp, Homo sapiens
caaccttgttgcatgccagataaatgatcaggatttccagatgtgacttgcactcagaagatcagtggtcaactt

SEQ ID NO: 464533 - DNA, 50 bp, Homo sapiens
aaagaaggcaaggagacattgtcccagattgagattttagagaaaacaac

SEQ ID NO: 464534 - DNA, 104 bp, Homo sapiens
atggcacttcattggccacctacagaaacaaaatgtcaacaaattgatgggacagtcattttgtttactcattcagccctgttgcaggtcccaataaactcttc

SEQ ID NO: 464535 - DNA, 100 bp, Homo sapiens
gggagatcgcgggcgagcggagcgcaacactcgcttggttggggagatcggcgcttggccggactcgctcagcagcagcctgaaaacttgctacaagtat

SEQ ID NO: 464536 - DNA, 75 bp, Homo sapiens
ctggaattgatctcgccaaaaaggacatctttggagccagacctacgagatgttctcctggttcctgcggcccct

SEQ ID NO: 464537 - DNA, 100 bp, Homo sapiens
cgaatggggttgtgatggcccaggttcttcaaaagatgagttacttaaagatccactctacattggactacggcagagaagagtaagaggttctgaatat

SEQ ID NO: 464538 - DNA, 80 bp, Homo sapiens
ctggagcacttccacaagtatatggggattccgcagatccggcagctttccgaaaggagagtagttatcttgatggaatt

SEQ ID NO: 464539 - DNA, 98 bp, Homo sapiens
gacaagttgcatgaagagcatatcaatgcaggacgtacagttcagtccccaaagctccagagatagatccagtagagtgtttggtggcagataactct

SEQ ID NO: 464540 - DNA, 100 bp, Homo sapiens
cccaagtcggccactggagggatgacttgggggaccagagaggaagagcaggtacaggtttgcagattccgccagcagcacagcaagctctacagatgag

SEQ ID NO: 464541 - DNA, 82 bp, Homo sapiens
cgtggatccgctggagcggagccggccgtacgcggtgctgcgagggcagaacctgggtttctgcataaagaccaactcctcg

SEQ ID NO: 464542 - DNA, 74 bp, Homo sapiens
ctttgaaagccttgatcaggggaaagctatttcaagaagcccctgaatatctactttggatttattcctgaaat

SEQ ID NO: 464543 - DNA, 94 bp, Homo sapiens
ccggagcccctcggcggcgccaccatgtactcgggagccggccccgaaacctgatgtgagactctctcgaggcagtattgacagggaggatgga

SEQ ID NO: 464544 - DNA, 100 bp, Homo sapiens
ctgagatcaaatggcacttcattggccacctacagaaacaaaatgtcaacaaattgatggggggagtcggtgaagtacttcctggacaacttggaccgga

SEQ ID NO: 464545 - DNA, 82 bp, Homo sapiens
cgggtgccgaggagcgggaagagttgctggggccctgggaggagcggggacactgaggacctctctccaaattggcctctca

SEQ ID NO: 464546 - DNA, 100 bp, Homo sapiens
tggatcctgtaaatccctatccagagtttttggagctgtacagcttagcagtgtctgcaaaaacgaatcttttcctacaacctgttaactgactggactg

SEQ ID NO: 464547 - DNA, 82 bp, Homo sapiens
gacaattgatcctgtttggtggcttccatgaaagtacacgtttgctgacatggagacctgtaggaatggaggaagattcatc

SEQ ID NO: 464548 - DNA, 100 bp, Homo sapiens
aggactctagtaacccgcgaaatgatgggatagcgttgcaaatccttaaaagagtcttaacggagcagcatccagttggacttccccgaaccacaggccc

SEQ ID NO: 464549 - DNA, 110 bp, Homo sapiens
gtctggctctaagaaagactacaagctgaacttcttttcccacaaggagggaacgtacgctgcaaagcccttgaagataaggatggtcaaacaaaataatatcatacctg

SEQ ID NO: 464550 - DNA, 87 bp, Homo sapiens
tctcgactcggtcctgtttcgacagcgaacatgtcgcggcctgtcaggtggcctgtgagtacggcatggtgcacgtggtctcccagg

SEQ ID NO: 464551 - DNA, 74 bp, Homo sapiens
tacccttctgctcctttcctggcagcaggggtttcaatgggagggtgatgcagaagatggggaagaatatgatg

SEQ ID NO: 464552 - DNA, 50 bp, Homo sapiens
ctctgaggggcttagaaattaacaggatggaacagattaaaagggccaat

SEQ ID NO: 464553 - DNA, 75 bp, Homo sapiens
tgctcgccctggccggtgctctgctcgcgccctgcgaggcccgaggattacgggacagctaccacagtagaagag

SEQ ID NO: 464554 - DNA, 100 bp, Homo sapiens
tgatgagcttctttcttctggcatcattaacggaccttttaccatgaatagttctactccttctacaggcttgcacagaaatctggaggcagtatcacct

SEQ ID NO: 464555 - DNA, 102 bp, Homo sapiens
aggaagcaagcagttcagaagagccaaggaataaacatgcaatgaacccaaaaggactttgacccctggtggacaaacgactgtgagcagaatgagtcagag

SEQ ID NO: 464556 - DNA, 75 bp, Homo sapiens
cgcgcccggcccggctggggaacgcagaggagaccaagacacattccaccccagtggggggtcccataccactca

SEQ ID NO: 464557 - DNA, 100 bp, Homo sapiens
taaacggtggcagagcacaaaaagagatgtgaagcctgataacatgctgctggataaatctggacatttgaagttagcagattttggtacttgtatgaag

SEQ ID NO: 464558 - DNA, 98 bp, Homo sapiens
gcggctcaggttgtggtagaggcggaggctcaggcagcttgagctctactgagatgaagaaagaaaaagaatacctgctcagctccagagacacgtaa

SEQ ID NO: 464559 - DNA, 49 bp, Homo sapiens
cacggcgccgagccgcggtccgacttccttcaaaatgtctactgttcac

SEQ ID NO: 464560 - DNA, 90 bp, Homo sapiens
ggcagctggagcctcaggcggcagcgcttctaggccatttcataattctgaatcatgtctgataacggagaactggaagataagcctcca

SEQ ID NO: 464561 - DNA, 75 bp, Homo sapiens
acaggatgaagatgaatataagagtgaagatttaagcaatttgcaccatcctgggattgtaaacctggaatgtat

SEQ ID NO: 464562 - DNA, 100 bp, Homo sapiens
tcctggacatgactgctgttcttcttgcctgtggcataaacccggaaaaaagcatccttttccaacaatctcagggagggaagatccctgtgagatggac

SEQ ID NO: 464563 - DNA, 83 bp, Homo sapiens
ggctccctcgggcacctccggtaccgctgcagccaccgcggcccccgcggcaattctgtggtgttcttggtcacacatttatg

SEQ ID NO: 464564 - DNA, 82 bp, Homo sapiens
gacctggctgcagacgctgccccaggggcgccagctcctcaggtgagaagccctaccactgcaactgggacggctgcggctg

SEQ ID NO: 464565 - DNA, 100 bp, Homo sapiens
attccgggccagcgagccgatcctcagcgtcctgatgtggggggtgaaccacacgcgtctgaccaaacacaccaagttcgtgcgggacatgattcgggag

SEQ ID NO: 464566 - DNA, 98 bp, Homo sapiens
ttcaccttcatctcttcctcgggttttcacacatttacaaaacaatttgggaggaggctggaaatcatcttgactgaagaccaccaatggcagcagtt

SEQ ID NO: 464567 - DNA, 82 bp, Homo sapiens
ctgagccccgacgcccctgacagggccacgcacctgatcgccgcgcgagctggtgaaatgacaatggatgctctgttggctc

SEQ ID NO: 464568 - DNA, 90 bp, Homo sapiens
ggttggtaaaaggagattggaaaccagaaggtgatgaatggctgaagatgtcataaatggagctggtttgtcaaaatccaaaggaagccg

SEQ ID NO: 464569 - DNA, 82 bp, Homo sapiens
acctgaagaatttcatgactttgatcagccactgcctgacttagaggttttgacccaccacatcagagtgacacaagaacca

SEQ ID NO: 464570 - DNA, 83 bp, Homo sapiens
ctctgcggcgcatggaggaggaggaggttttaaaatcaaagatgggaaaatcggagaaaattgcccttccccatggccagctt

SEQ ID NO: 464571 - DNA, 100 bp, Homo sapiens
gggagacagccgggcgctgcaagtcaggtcaattcagtgaagatatgatacccacagtgggcttcaacatgaggaaggtaactaaaggtaacgtcacaat

SEQ ID NO: 464572 - DNA, 123 bp, Homo sapiens
ctggaatttaggcaaaatctcttacaagcagctcttgaatttcatggtgttgcccaagatatgaaaggttgtatcaaagttcttaaggaccaacctcctaatagtgtggaaggtcttctaaat

SEQ ID NO: 464573 - DNA, 75 bp, Homo sapiens
ttcacaactcatgttcaactatgtgtgttgtcagaatgctcttaatgagtccaagtggtaagaagttcagaagca

SEQ ID NO: 464574 - DNA, 100 bp, Homo sapiens
tggagggcctggcagtgcggttgctgcgcggcagcaggctggctgctttgtaccgcctcagtggagactggaatcccttacacattgatcctaactttgc

SEQ ID NO: 464575 - DNA, 100 bp, Homo sapiens
aagaatttgccaaatgtgattatcaatgagaagcgcaacatccacgcagctgctcatcaggagcccacgtccccagctcacttctcccccaggacctagg

SEQ ID NO: 464576 - DNA, 82 bp, Homo sapiens
agacatttcctgctcggaaccttgtttactaattaacggtttgatcaccactgtccctgggtaggcaactgtgtggggaaaa

SEQ ID NO: 464577 - DNA, 96 bp, Homo sapiens
tcccctcctcgccgccaccgcccaggaccgccggccgggggacgagctcggagcagcagccaggagctggccaagaggactcccggcaagcaccca

SEQ ID NO: 464578 - DNA, 75 bp, Homo sapiens
agaagtagagtatttcaaccataaagacatcttaattgggcacgaaagagggtatttgaagtataccatacaact

SEQ ID NO: 464579 - DNA, 75 bp, Homo sapiens
tgcccgacggctctcctctgactgcagcgtcactcagacactacaacaacaggagtgcaaacttctctacagccg

SEQ ID NO: 464580 - DNA, 75 bp, Homo sapiens
ttgcttactgtgagctaagacagttttgcctaacctcgaagtcatgaaggcggctgagccagaggccaactgcag

SEQ ID NO: 464581 - DNA, 48 bp, Homo sapiens
gggtttagcggcagcctcttcgcaagagtgagccatggagctacgtgt

SEQ ID NO: 464582 - DNA, 83 bp, Homo sapiens
ttcaaatgtaattcaggttacgtggtacaaacggtatccaactgttgaaaaacgagccagagtcttcaatggagcaagttatg

SEQ ID NO: 464583 - DNA, 75 bp, Homo sapiens
tcaccttggctctcccacccaatggagatggctctaatgaatggagatgaggcgcctggtgtttggatgatccca

SEQ ID NO: 464584 - DNA, 74 bp, Homo sapiens
aaggacgccgcggtcttcccaggcgtcgcggagagcaggaaacccttttccaaagagaaatgaagaagaaaact

SEQ ID NO: 464585 - DNA, 75 bp, Homo sapiens
tcaaaatcatgcgagtggggacagcttcttcctaggaatccccatctctaatgtaagcttggagatccgggcccc

SEQ ID NO: 464586 - DNA, 100 bp, Homo sapiens
ttaatcacccaaatcaagtcctatcaagactccacgataaaggatctctcccatgaagtgaccaggatagaggcatccgtgtcattctggaccttactcc

SEQ ID NO: 464587 - DNA, 110 bp, Homo sapiens
ccgtctccctggaccgctgtgtaggcacctgagttaacggacgctaagcggggtaggggaagagcatgaataatctttcatttagtgagctatgttgcctcttctgctgt

SEQ ID NO: 464588 - DNA, 98 bp, Homo sapiens
tccctacacaccctggttggacaggtgctgcttacaagactttctcttggctaaaatgtgtgaagagtcagatacatgaaccagagaacttaatgccc

SEQ ID NO: 464589 - DNA, 97 bp, Homo sapiens
gggaagagctgatgagaatgctggcggaggacgagctccgggatgctgtactccttgtctttgcaaacaaacaggccactccccacctgtcctgcct

SEQ ID NO: 464590 - DNA, 83 bp, Homo sapiens
ccagtccccgggccacggatccaccttcccatgtgagaagccctaccactgcaactgggacggctgcggctggaagtttgcgc

SEQ ID NO: 464591 - DNA, 100 bp, Homo sapiens
tggaattcctgagacttcggcacttccccacagaccccaaggctagcaactggggagtgttctgccagttctggataatccactgtccaagaaggttcga

SEQ ID NO: 464592 - DNA, 95 bp, Homo sapiens
cttggttcactgaaacctctgcctttctggttcaagcaattctcatgtttcagcctcccagggatcgtggaagaataccaattgccatattacaa

SEQ ID NO: 464593 - DNA, 100 bp, Homo sapiens
gatggcatcgggccagagctcatgctgcatgtcaagtccgtcttcagaggcatttcatccttcatgaagccattcaggattttgaattgcatatgagtgc

SEQ ID NO: 464594 - DNA, 75 bp, Homo sapiens
tggaccttccggagcttctcagaagacagagggttttcttttgagacctgcctagagctggaacgttacctccag

SEQ ID NO: 464595 - DNA, 100 bp, Homo sapiens
gcaaaatatatgccatgaaagtcctaaggaagaacggccggtttgtgggcgatgctgaccttgaaagacagaaattttcagatttgaaactcaacggacc

SEQ ID NO: 464596 - DNA, 100 bp, Homo sapiens
atgcggcctccaatcttctttataggacctggtgtccaagatgctacacgtggatccccaccagcgcctcacagctaagcaggttctgcagcatccatgg

SEQ ID NO: 464597 - DNA, 100 bp, Homo sapiens
ggaccaagagaacaatgggaaccagtctttcaaaataaactcagccacctgtgacaaatttgagtgtctctgttgaaaacctctgcacagtaatatggac

SEQ ID NO: 464598 - DNA, 100 bp, Homo sapiens
caagtcagagaaagcagtgaaagattatgaacaggaaaagtcttggcaagactcagagagaacactgatatttgcatttaatggggaacaaaagatgaag

SEQ ID NO: 464599 - DNA, 75 bp, Homo sapiens
tgagagaagaggaaaagaggagtggccaggcaagaagagtccagtgataagggatgaggaagaagaagagacaga

SEQ ID NO: 464600 - DNA, 74 bp, Homo sapiens
ggtcgccgaacccgcctggctagccggcgagttgagtggcgagtagctttgcagtttggggagggctgttttcc

SEQ ID NO: 464601 - DNA, 100 bp, Homo sapiens
ttagtgtctatgctcagaatccaagcggagagagtcagcctctggttcagactgcagtaaccagcattggaggtgatccttttaatggaacagattttat

SEQ ID NO: 464602 - DNA, 51 bp, Homo sapiens
cgagcgctcgcgggacatccaggcatcgttggcttcacagtatgactgatg

SEQ ID NO: 464603 - DNA, 82 bp, Homo sapiens
acatggaagggcagctggtcagcatccacagcccggaggagcaggaagtggcggtgcgagggctgctgcacagcgagcggag

SEQ ID NO: 464604 - DNA, 51 bp, Homo sapiens
agtggacattttactggctcaagtctttgatttgcgtcagtgtcatcgaca

SEQ ID NO: 464605 - DNA, 100 bp, Homo sapiens
gaaaataccacaggatggagactacgagtttatggcccactgcgtgaccttggttcagctgtccatttcctgtgaccatctcattgacaaggacatcggc

SEQ ID NO: 464606 - DNA, 105 bp, Homo sapiens
ctgggagctaccccatgcagccagtcactgcacctccatcctaccctcctaccagcatttacagccgaacaataccagcaacatcaacagcaactggcactcatg

SEQ ID NO: 464607 - DNA, 100 bp, Homo sapiens
tgtgtcctgagatcaaatggcacttcattggccacctacagaaacaaaatgtcaacaaattgatggcaaatgcagccctgaggatttggctactgcatat

SEQ ID NO: 464608 - DNA, 50 bp, Homo sapiens
aatgaacactgtccttcaaaacgaatgcaaataatacggcactccgaaca

SEQ ID NO: 464609 - DNA, 51 bp, Homo sapiens
accatgtctgcctcctggtgaaaaagggagtgcatccgccccaaccctttt

SEQ ID NO: 464610 - DNA, 100 bp, Homo sapiens
ggaacaacgcgagtcggcgcgcgggacgaagattgacctgcgttacgaagctcagaatctagaacacttccaggtcaacttccggaatgtgaaagccgtc

SEQ ID NO: 464611 - DNA, 75 bp, Homo sapiens
gccctagcaccccgagaaccgtcagtttgagccagatggatcaactcactatcctgaaggtccattctcccaaga

SEQ ID NO: 464612 - DNA, 82 bp, Homo sapiens
ctgattttaagctggcaaagtgggaaaaataaagtgttgagtaaacagaccaagttggatccctgcatgtcactgagtccac

SEQ ID NO: 464613 - DNA, 50 bp, Homo sapiens
ctccctggaaacctagaaatgggactggtgattgcagctggaagtgccca

SEQ ID NO: 464614 - DNA, 83 bp, Homo sapiens
ccgggattcccagccatggcagattcctccgggcagcagggagccttcacgtaaatgggtccagtcatgcctcccagtaagaa

SEQ ID NO: 464615 - DNA, 100 bp, Homo sapiens
aaacagatgactacccagggagaggaattacgggaacagaaagaaaagtccgaaagagctgcctgactgccggaatcagagccgcgggtgagatccccag

SEQ ID NO: 464616 - DNA, 83 bp, Homo sapiens
aacggtccttgaagttctattccagggctcccaggcagcagaatctgcccacagagttcggatccagaagcagcaaggtctag

SEQ ID NO: 464617 - DNA, 75 bp, Homo sapiens
ttcctctccagctcagccgcgtgaatgaaaactttgccattgatttgatagcagagcagcccgtgagcgaggtgg

SEQ ID NO: 464618 - DNA, 110 bp, Homo sapiens
cgaatccgaggtatttgagatcacggacttcaccactgcctcggaatgggaaagttccctgtattgaacactgatatacaaggaatgaatagaagtcaagaaaaacagac

SEQ ID NO: 464619 - DNA, 100 bp, Homo sapiens
ctgaccgccctgggccccttcccggacacacaggatgacttcctcaagctttcctgctctgggaccctaccaaggtgcccccacgactgcaggctgtgac

SEQ ID NO: 464620 - DNA, 115 bp, Homo sapiens
gccagacctgctgctgcttcaatgtccgcatcgcaaccaccgccctggccatctaccatgtggtctgtgcagacttttgcagacaaatcaaaacaagaagctctgaagaatgacc

SEQ ID NO: 464621 - DNA, 95 bp, Homo sapiens
gcggtaggaagccggagacagcagggtgacagttttccaagagataacttcaccaagatgtccagtgataggcaaaggtccgatgatgagagccc

SEQ ID NO: 464622 - DNA, 83 bp, Homo sapiens
atccgctaaaacatcaatgaatgtaaatgaaatattcatggcaatagcgccaaatcttaaaggcagaccacgcaaaaagaaac

SEQ ID NO: 464623 - DNA, 100 bp, Homo sapiens
cacgtgctgcccagtggcttccggaagttcctggtccacaatgtcaaggagctgagagtgctgctgatatgcaacaagtaaagggagaagatgaggaaga

SEQ ID NO: 464624 - DNA, 97 bp, Homo sapiens
gatgacagctgtaaagcacgaacaggaatacatggaagtccgggagagaatacacagagccagttcggctttccagtttggcagcagcactacaaat

SEQ ID NO: 464625 - DNA, 135 bp, Homo sapiens
ttgtctttctcagcaccttggcgaagccttgggtttctttcttaaaggactgatttttagaactccacatttgagaatgatggtcgactgaggttgagccgtcagggcatcatcttcaagaatagcaagacaggc

SEQ ID NO: 464626 - DNA, 75 bp, Homo sapiens
gatgattcagccttctgcatctggatctcttgttggaagagaaaatgaggaaaagctccagaaagctgtgacaaa

SEQ ID NO: 464627 - DNA, 100 bp, Homo sapiens
ccagcagcagctgtggctccagtatcagaaagaccgaagccaggacagcacagccgtagcactctcagactctagctcaacgcaggacttctttaatgag

SEQ ID NO: 464628 - DNA, 50 bp, Homo sapiens
tttgtttgtcatcatgcagttaagcagattagccgatgaattacatatgc

SEQ ID NO: 464629 - DNA, 82 bp, Homo sapiens
tgtggcagtggaaaatgcgctcgggctggaccagcagtgcagagcagagcgggcggaggaccccgggcgcgggcgcggacgg

SEQ ID NO: 464630 - DNA, 75 bp, Homo sapiens
gtctcatgaattttccttagttgctccaaatactgagaaatcaatgtggactgaacataaatcacctgatggaag

SEQ ID NO: 464631 - DNA, 75 bp, Homo sapiens
tccggacacataacaagcagcagtgaggacaccaaaggtgacttaagagattaaaattaatttggttgctgttgg

SEQ ID NO: 464632 - DNA, 83 bp, Homo sapiens
ccttgtggagcaaatagtagttctggtaccagctatcatgaacaggacaccatatctcagaagacggtagagattgcatctcc

SEQ ID NO: 464633 - DNA, 101 bp, Homo sapiens
gaatgtttttgaccagaaaaccgacaaccttcccagaaagtccaagctcgtggtgggtggaaaagtgttcgccgaggtcaccatcagaaaagctaagtttg

SEQ ID NO: 464634 - DNA, 99 bp, Homo sapiens
gaggtgaaagaagctgccaagatagccaaagacaagacgcaggagaaaatcgagacctcaagtaatcattcccaaactaactggatcttctgggtttgt

SEQ ID NO: 464635 - DNA, 97 bp, Homo sapiens
tcagattggagataaacttttagcaagagctgtagtacacatggatgaacgacgagaagaacaaattgtacagttactgaattctgttcaagcgaag

SEQ ID NO: 464636 - DNA, 82 bp, Homo sapiens
agccgccagcccaaacaggcgtgtcacaggctgagggtaaaaagctgggattggtaggctgggtccagaacactgaccgggg

SEQ ID NO: 464637 - DNA, 83 bp, Homo sapiens
cgagaccgcgtgcgaggaccggtctggccgtgggcctgggcttcggggcactggcagaggtcgccaagaagagcctgcgctcc

SEQ ID NO: 464638 - DNA, 100 bp, Homo sapiens
ctccgggatgctgtactccttgtctttgcaaacaaacagcccatcgccgaagcaccattcaagttcgacatggaattggatgacttgcctaaggaaaagc

SEQ ID NO: 464639 - DNA, 96 bp, Homo sapiens
aaaaagggttgccaccccagttgattggaaggcggtggagtacaacatcttcgagggtatggagtgccacggctccccactagtggtcatcagcca

SEQ ID NO: 464640 - DNA, 100 bp, Homo sapiens
cggtgcagtggtggctggcgcagtatatctacaagagcgcacctgcccgttcctatgtcctgcgtgcccaaggttgaagcaatgaataaaagactgggct

SEQ ID NO: 464641 - DNA, 75 bp, Homo sapiens
caagaatgaagccgcggaccctcacggaaacaaaccatcaggcctcccagaaagtatccgggatctgaaaatcac

SEQ ID NO: 464642 - DNA, 101 bp, Homo sapiens
gagatgctcatcacggggttttgcacacattaagtgggcagaccaacatccacctcagcaaaaacttcttcctgacgaatcgcgccagggagcgctcagac

SEQ ID NO: 464643 - DNA, 99 bp, Homo sapiens
cgggcaatcctgggggagcaaagcttcttggacacttaatgattgttggcaagaaatgtgctgctgatctgggcctgaataagggttatcgaatggtgg

SEQ ID NO: 464644 - DNA, 80 bp, Homo sapiens
gaagaaaagtggaccctgaggccttgcaggtctttaaagaggccagaagtgacgcatccaaagaagacattgacactgct

SEQ ID NO: 464645 - DNA, 75 bp, Homo sapiens
tatagctaagactccaggacacccctgaagccgagaaatggctgcgtcatcaccatctcgggacgcatgaccttc

SEQ ID NO: 464646 - DNA, 51 bp, Homo sapiens
tcatgatacagttgataaaattgttgagtccgaatgtcattcagaatttga

SEQ ID NO: 464647 - DNA, 87 bp, Homo sapiens
ttaagcccccatatctaagcaaaggaactggtttaccgacaagactgtgaaactttcgggatggtggtgaaaatgctgattgaaaaa

SEQ ID NO: 464648 - DNA, 100 bp, Homo sapiens
cagaaattggggaaagctgtagaaaccaaagatgaacgatttgaacaaagcgctagcaacttctaccaacaacagttggaatgttaaagaaattcatcag

SEQ ID NO: 464649 - DNA, 100 bp, Homo sapiens
gcagaaggcccaggctcatgacggagctggtctgaagctggtagtttcctcacccaccagtccgaaagcatgctctgaattgccatcggatgaagcctgc

SEQ ID NO: 464650 - DNA, 50 bp, Homo sapiens
cggcgagggcgcctacggcatggtgtgaattcctagaggacctgtgcaac

SEQ ID NO: 464651 - DNA, 82 bp, Homo sapiens
cgacaacctggccgaggacatcatgcgcctccgggagaacttctccagcagcgccagcactgtgtccaccactgcacccagc

SEQ ID NO: 464652 - DNA, 74 bp, Homo sapiens
aacaaaaagaaatcattgaacacggcatcgagctatcctgaggtgatatcagacttggtatttttgaaacagcc

SEQ ID NO: 464653 - DNA, 100 bp, Homo sapiens
taatcaagttgataaggaaagtactgtccaaatgaattatgtcagcaacgtatccaagaataactgaagtgaagtgatggactccgatttggagagtagt

SEQ ID NO: 464654 - DNA, 100 bp, Homo sapiens
ggcagcggctgggctccaaagcagactttgaacatgacatcgatacaagtgaaacagcattccagaacaatttctgaagaccatgcctcttgaagctttt

SEQ ID NO: 464655 - DNA, 100 bp, Homo sapiens
cgacgctcacagagctgagacgtacagtccagtccttggagatcgacctggactccatgagaaatctggatccctccccgcggcggcgatggcccgagcc

SEQ ID NO: 464656 - DNA, 75 bp, Homo sapiens
tggggaaccacaaggccttcaagaaggagctgcgacaatgcctaatgggattgtttgaaaaacgtcgcttcagga

SEQ ID NO: 464657 - DNA, 100 bp, Homo sapiens
tggaaatgtcagctcttccgcagtgattgaagctttgataaatgaaatcttcctaagtataggtgctatggtctttagaattgggtcactggatttctga

SEQ ID NO: 464658 - DNA, 76 bp, Homo sapiens
caaaaatagtgatagctttgataatggatccggattggtgccaatgtctccaacttcacttttgctcctagcacga

SEQ ID NO: 464659 - DNA, 75 bp, Homo sapiens
cgtccacagagatcccccagttctcctcctgctcccaccggttcagcaaggactggacctacagagacatctggg

SEQ ID NO: 464660 - DNA, 89 bp, Homo sapiens
cgctgctgctgcccggcctcgggaaggtagaagatagcaccatgccgattcgtcgaactgtgaattctacccgggaaactcctcccaaa

SEQ ID NO: 464661 - DNA, 100 bp, Homo sapiens
atcgaattcttgttattacatccaaagcaggcagaacaagctactgtaacctctgaattcgagagctacaaagtccgagttcataatgttctaaaacaac

SEQ ID NO: 464662 - DNA, 75 bp, Homo sapiens
gggcgtccgagtcaacaaccgcttcgagctgattgacgagatgcctgaggctgccgtgaaatcaacagccaacaa

SEQ ID NO: 464663 - DNA, 90 bp, Homo sapiens
atgccctgcagtacctgcagaaggtctctggagacatcttcagcagatatacgccagcggttaggaaaaagaccacattctccggaaaag

SEQ ID NO: 464664 - DNA, 90 bp, Homo sapiens
ggagtgaggccgcaggagaccttcccgacgacccctgctccggcggggaagtgagcaaggttttgggtcctgctcctcggtggtgttcct

SEQ ID NO: 464665 - DNA, 76 bp, Homo sapiens
cgggactctttcacaggctggatgaagattgggtgggctcccaggacagcttgctggagatcaccttccgctccgg

SEQ ID NO: 464666 - DNA, 88 bp, Homo sapiens
ggacgctcccagccctgaagagaaactgcaccttatcacccggaacctgcagggttacttcgtgacaaactgggctcctatgatgtgg

SEQ ID NO: 464667 - DNA, 78 bp, Homo sapiens
gacgctgggcaaggcctccaagcaggcaggctgtggtcgtctatctccctgttgttcttcccatcggcgaagatggcc

SEQ ID NO: 464668 - DNA, 95 bp, Homo sapiens
cactgaaattcatcctgagatgaggctgtattcatcaccaaagaaaaaacttacaccaatgcagaaatcggttagtccattagtttggtgcaggc

SEQ ID NO: 464669 - DNA, 100 bp, Homo sapiens
agtggtcgcacttggagggtctcgccgccagtggaaggagccaccgcccccgcccgaccatggccgaggagggtgctcgagaggaagacctcgatgctgt

SEQ ID NO: 464670 - DNA, 74 bp, Homo sapiens
tttgcctggtgccttcattacatcatctgcaggtggaagagatcatgcagctggtgaatgcctacttggccaac

SEQ ID NO: 464671 - DNA, 97 bp, Homo sapiens
gtactctccgagaggtcgttttcccgtccccgagagcaaggatttcctgtggatccacgaaaggtgctaatagtagctggccatcacaactggattg

SEQ ID NO: 464672 - DNA, 87 bp, Homo sapiens
agtcttcgccagcccaaaggcgactcgacaccgtcccagctgaagagagtcgtggcattcctggtggctttccatcagaacaagcag

SEQ ID NO: 464673 - DNA, 102 bp, Homo sapiens
cagtctgttgaggcatctggacaccacacacatcatcagtctgcctctctacatatgacatcgtgatcactacctatagcctcgtggccaaggagattccca

SEQ ID NO: 464674 - DNA, 50 bp, Homo sapiens
tccgcctgcggcctcctcgcaaaacaaggatcccctaacaacagtgagag

SEQ ID NO: 464675 - DNA, 117 bp, Homo sapiens
ttatttctcttgacaaccaagggcctccgtctggatttccaaggaagaatttcctctgaagcaccgggtttgccttcccggattgggcctacaagccagagtcgtcccctggctcaa

SEQ ID NO: 464676 - DNA, 82 bp, Homo sapiens
caacgacgttccatctgtggaaggacctaccaaccaggtcatgatgatgggcagcgcccgagtggcggagctgctgctgctc

SEQ ID NO: 464677 - DNA, 82 bp, Homo sapiens
atcaccacgcagaacgtcaacaccaagtgcatcaccatccccagttacagaatgtctgaaggggacagtgtgggagaatccg

SEQ ID NO: 464678 - DNA, 87 bp, Homo sapiens
agttcagaaatgagtggaaaaatacccatggtgggcaggaagaggtctatgctccatcagcaagcactgccgactacaatagggact

SEQ ID NO: 464679 - DNA, 82 bp, Homo sapiens
ctccaacaatggaggccagtggctggtctcaggtaactaggatttctacctcaaccgcgagacctatgcaaggacggtgtgg

SEQ ID NO: 464680 - DNA, 75 bp, Homo sapiens
agataatgaaggaagaaaacacaggagccggagcagaagcaaagagggaaacctgtttgacttcttacgcttgac

SEQ ID NO: 464681 - DNA, 75 bp, Homo sapiens
cagcaagttctgccaccccaggggtacatgcagccccctcaacagaggagaaggcagagcccccccaggctatga

SEQ ID NO: 464682 - DNA, 82 bp, Homo sapiens
cggcgatccgggcgctcgagacttaccagagccacaagctggtaggtgagtgctgtcctcggctcactttcctcaagctctc

SEQ ID NO: 464683 - DNA, 75 bp, Homo sapiens
tggccatcttcggaccccccaacaccctctacgaaggcggctacttcaaggtactattaccaaaggggtattctg

SEQ ID NO: 464684 - DNA, 100 bp, Homo sapiens
gggctgggcaccctccttccctggaacttcttcatcaccgccatcccggccatcaccatcgaggctgagccaagagctgatggcagccgccggaccaccc

SEQ ID NO: 464685 - DNA, 75 bp, Homo sapiens
gcaacacagtagtggtttctgctcctaaccaaccccgacaaaaggattcactttaagagatttggaaactcttcc

SEQ ID NO: 464686 - DNA, 96 bp, Homo sapiens
gggttttgggccgaggcctgggttacaagcagcaagtgcgcggttggggccactgcgaggccgttttagtttcggagcaacatcccctgtcacctg

SEQ ID NO: 464687 - DNA, 75 bp, Homo sapiens
gccgctgccgcctccgagcagcccgccaggtctccaggaaacctagagaaaaaccgttatggggatgtaccctgc

SEQ ID NO: 464688 - DNA, 100 bp, Homo sapiens
tttcctcggcaagaaatgtgtggttaatgactccagagagtaagatcagattcgtccacaaagagatgggcataataccaagctggggtggcaccacccg

SEQ ID NO: 464689 - DNA, 83 bp, Homo sapiens
ggaaccgggatggcgacgtctacactgagtcggaggcgaaggtgaaagaaaatggcccgaaccaagcagactgctcgtaagtc

SEQ ID NO: 464690 - DNA, 83 bp, Homo sapiens
ccggatcctggagaacatctcgctgtcggtgaagaaggtttgtggagaagtacactgagctacagaaacttggagaaacagat

SEQ ID NO: 464691 - DNA, 96 bp, Homo sapiens
gcacttggaatagtagcaggcggcggcggcggaacgccaggcagactgttatctcagtgtatggagtattttgatttgagatgccagttattagat

SEQ ID NO: 464692 - DNA, 100 bp, Homo sapiens
gcgaggaggagcctcgacatcctgcagaggcgggaggatccttgagggcactggtgcgactttcagttctccttgcagaggactggcgccgggacgcgaa

SEQ ID NO: 464693 - DNA, 90 bp, Homo sapiens
gaaactctgaaggggaggccactgagctcatcacagagactttcacaagcaaatctgccctgggagttaacccctcaactaccgggaccc

SEQ ID NO: 464694 - DNA, 75 bp, Homo sapiens
ctatgaccaggcccgccactacctcctggctgccgtgaataggcagcctaaagggttccccactgaaggacttgg

SEQ ID NO: 464695 - DNA, 96 bp, Homo sapiens
aacattggtctaaagtctttccaaaaggtcaaggttcacaagtacttcctcgcgtattgctaaaggaggagttgaccacaccaaaatgagtctaca

SEQ ID NO: 464696 - DNA, 100 bp, Homo sapiens
ctacagttaaccagccagctgatagcagatgcatgagtgagcccagctgagagcaggtacccactgatggtaatgctggcctgctggctgaaccccagat

SEQ ID NO: 464697 - DNA, 75 bp, Homo sapiens
aatgagagcgagaacacctgtcaaggtggtgctgtccgagaggctgcaggccctggtgaacagtctgtgtgcggg

SEQ ID NO: 464698 - DNA, 77 bp, Homo sapiens
cccggcgcttcggcccgggccgctcaggtgcagatgtggtgaagctgtagagaaaaacaagcgtctcatcacggcag

SEQ ID NO: 464699 - DNA, 96 bp, Homo sapiens
tcatcttaaagaagcgatagttgaaggaaaaggccgcctgtcttggttagatggctctggattaggattctcactggaataccccaccattagttt

SEQ ID NO: 464700 - DNA, 98 bp, Homo sapiens
atttttttgtggagtggtttgaatatcgtaagcgcacgtttaaacatctcaagggcatcaagttatcagcagatgtcaaaccatttgtccccagattt

SEQ ID NO: 464701 - DNA, 100 bp, Homo sapiens
gggggaacgtggtcatcagtggtcagtggggtgagttattctccccacctcagaagtaccagcttttggtgtatcatgcagattctctctttcatgataa

SEQ ID NO: 464702 - DNA, 83 bp, Homo sapiens
cagagcgcctgcgaccccagtcggtgctccggggaggtcacctgacgaggaggggcatggtctagtggcccagtcaggacgcg

SEQ ID NO: 464703 - DNA, 100 bp, Homo sapiens
ctactaaggaatgggctaaatcaactggatatgatccagttaaactttttaccaagattttgaagatgtaactgagtttctggaagaggtcattgaagcc

SEQ ID NO: 464704 - DNA, 74 bp, Homo sapiens
agagtatcgaaaccgtttccttcatatgcatgagctgcaggaatgtatttatggcagtgggagcttcaattgcc

SEQ ID NO: 464705 - DNA, 75 bp, Homo sapiens
ctcaaggaaacctttccaacacagatgtccaagctgccaaaaataacattccagctaattttaccaggagtggaa

SEQ ID NO: 464706 - DNA, 98 bp, Homo sapiens
gggacccaccgctgccctcagctccgagtccagggcgagcaaaatgatgcttcaacacccaggccaggtctctgcctcggaagtgagtgcttctgcca

SEQ ID NO: 464707 - DNA, 99 bp, Homo sapiens
ctttaggatccttttccactgtatttggagaagaatggaaagagaagactgatagagacttcgttaagtggtcagtatatatccgagccgctgtccgaa

SEQ ID NO: 464708 - DNA, 100 bp, Homo sapiens
gcatggggaaacttcactccaagccgggttatcaatagtctggctgtctatcgtcatcgtgagactgactttggtgtaggagttcgagaccaccctggcc

SEQ ID NO: 464709 - DNA, 100 bp, Homo sapiens
ggacattgtgatacaggaactgtttccagagctcaataaggttgatactgcctctccaagcccaatggaaacatctggatgtgcccctgcagaagaagac

SEQ ID NO: 464710 - DNA, 115 bp, Homo sapiens
agtagagcccgggaccgccaggccaccaccggccgcctcagccatggacgcgtccctggagaagcaggccaaggctggtgacagccttcatatatttaaagaggacaagagcccc

SEQ ID NO: 464711 - DNA, 128 bp, Homo sapiens
tttttctaaagagtcttgttatttcttctttgagaaaaacctgaaagatgtctcaagtgctgcagcagctcccagtccagtgctaggaaacattcccccaggagatggcatgccagtaggtcctgtac

SEQ ID NO: 464712 - DNA, 83 bp, Homo sapiens
cctcggccttccgacgtgggcggtgggccccagccccacagaccagcccagcattcagaatgattacggacctgaagccaaag

SEQ ID NO: 464713 - DNA, 80 bp, Homo sapiens
gaattgcaacaacaccaaacgccgcttttaactggaatacctttcttcaacgctctggtactaggttttgacaagcttgc

SEQ ID NO: 464714 - DNA, 90 bp, Homo sapiens
agagacatgaagaattggtatttcaaatgaccaccatgttgcaaaagctcctctggtgcaagtgtggtagctattgacaacaaaatcgag

SEQ ID NO: 464715 - DNA, 98 bp, Homo sapiens
cgagcccgagccatggcgtccgagcggctccctaacaggcccgcctgtctgctcgtggccagcggcgccgccgaagctgcttccagctgccatggtga

SEQ ID NO: 464716 - DNA, 100 bp, Homo sapiens
tgaggatgacgatgacgatgaggaagatggctcagagcccctacctcccacacagtggaggagtagatgtccatttctcaggagcagtggactgcttccg

SEQ ID NO: 464717 - DNA, 51 bp, Homo sapiens
cagattcgcagtggtcgcttcttctccttgatgatcctgagagacctgtgc

SEQ ID NO: 464718 - DNA, 100 bp, Homo sapiens
tgaggaggggccccagcagcccccgaaggccctatcaggacatggagtatgaaagacgaaagggctattgcaagacacgaagtccgagaaattgagcagc

SEQ ID NO: 464719 - DNA, 82 bp, Homo sapiens
aagaaagaagatgttaactttcaggtgaaagcagccttcacaagagcttacaataaggaagcccaccttactccatactcac

SEQ ID NO: 464720 - DNA, 153 bp, Homo sapiens
caccgatggaatcccagaggaaactgacggagacgcagatgtggacttgaaagaagctgcagcggaggaaggcgagggccatgctatgatagtggaagcttatccaaaataatagatccagaagaagtgacctgaagtttctgtgcaacactc

SEQ ID NO: 464721 - DNA, 90 bp, Homo sapiens
gtcgctggtgaagcccgcggcgcgcgcctctcccggaccctgcaggtgccggtggtggtgtgcacattgagccccggtatagacagttcc

SEQ ID NO: 464722 - DNA, 75 bp, Homo sapiens
ggagctcctttctcaaagggacagggttgtgagtcccggcccagcccctccacccccctgcccccccgatgcgac

SEQ ID NO: 464723 - DNA, 100 bp, Homo sapiens
gcgatcttccttccggagccatgtcagaaggagtggacttgattgatatatatgctgacgaggagttcaaccaggctctgtccagcagtgtaagctccag

SEQ ID NO: 464724 - DNA, 139 bp, Homo sapiens
agagtccagagctggtgaagaagcacaagaaaaagagggttgtccccaaaaagcctcccccatcaccccaacctacagggcccatcaaccgtgagatgcgccacctgattagtagtcttcaaaaccacaaccaccagct

SEQ ID NO: 464725 - DNA, 78 bp, Homo sapiens
agactcagggatcaaagagcaaacagattcagtggcctgcattgaaagcaagggcggaccatggtttgattccagatg

SEQ ID NO: 464726 - DNA, 87 bp, Homo sapiens
gattcgcagtggtcgcttcttctccttggattaacctccatttcagctaatcatgggagagattaaagtctctcctgattataactg

SEQ ID NO: 464727 - DNA, 100 bp, Homo sapiens
agcaagcctatatcacatgtttatgttctatgctccctaatgaagatgctattaaggaggatttcggctgaatgcgtcttcttggcccatgttccttttg

SEQ ID NO: 464728 - DNA, 74 bp, Homo sapiens
ctttgggggggcccgagcctctgatcacctacagcgccatcagcgatgagctgcgagacaaggtgcgcttcccg

SEQ ID NO: 464729 - DNA, 90 bp, Homo sapiens
gattggtttacataggtcaatgctcatctctcagagatctagaacttgcctaccaagtacatggccttttaaaaaccggagacaactgga

SEQ ID NO: 464730 - DNA, 100 bp, Homo sapiens
atatttgaaagaaattcttcaagatttggttaagaaccttacaagcaatatgtggcgagttcgagaatccagatcagacactcctctaatttacaaagca

SEQ ID NO: 464731 - DNA, 96 bp, Homo sapiens
agtgatgatgaagaggaggaagaagttgtgaaggacggcaggccaaagtggtaaatgggcttgatactgtgagagtgcctatgtctgtcgtgaact

SEQ ID NO: 464732 - DNA, 75 bp, Homo sapiens
taggcacactgctaatgtgtctgatccacatcttcaagtctggtttccgagagagcgcttttgcctacgccatcg

SEQ ID NO: 464733 - DNA, 75 bp, Homo sapiens
cctcaagacccagctattgttcaggtctgtgcagacttttgcagacaaatcaaaacaagaagctctgaagaatga

SEQ ID NO: 464734 - DNA, 75 bp, Homo sapiens
tgcttttgtaacttttgatgatcatgatacagttgataaaattgttgcaacttgagttggtggaaccaagtggct

SEQ ID NO: 464735 - DNA, 131 bp, Homo sapiens
agctttggaagatgcagatgagaaggttcagttggcaaaccagatatatgacttgaataactgaagtgaagtgatggactccgatttggagagtagtaagacgtgaaaggaatacacttgtgtttaagcac

SEQ ID NO: 464736 - DNA, 74 bp, Homo sapiens
aggttgtgtgtgggttagacttgtgcaaccagggcaactctggcatccgtgtcattctggaccttactcccaac

SEQ ID NO: 464737 - DNA, 108 bp, Homo sapiens
tgatcggcaactcaatggagaattctggtcactcagtgacacacacaactcgggcctccccagcgacaattgagaggatccagaatccagatctctggaatagctacc

SEQ ID NO: 464738 - DNA, 90 bp, Homo sapiens
gccccgagccccgtggatccgctggagcggagccggccgtacgcggtgctgcgagggcagaacctgggatatgttcaaggaatgagtgat

SEQ ID NO: 464739 - DNA, 112 bp, Homo sapiens
acagctatggtgatgattagagacatactaatgtacatgcaaaagcgaaagcttcggatctacatttccaatacgttcagtcccagcaaggcggaaggcgatagtgcaggaa

SEQ ID NO: 464740 - DNA, 101 bp, Homo sapiens
gcattcctgaaatacatccaggaaagacatggagattctcttaaaaaggtgcataagctggagcctgaggcgtggaaacacgtggaagccgtatatataga

SEQ ID NO: 464741 - DNA, 88 bp, Homo sapiens
ggaggacaaatatgaagaagaaattaaacttctgtctgacaaactgaaagaggctgagctggctgaccgacccaatccccctacccgc

SEQ ID NO: 464742 - DNA, 97 bp, Homo sapiens
cgctggctgtcggcatcgacttccacgctgatggcagtggcagcaccatgatgcaaaccaagaccttctcctcttcctcctcatccaagaagatggg

SEQ ID NO: 464743 - DNA, 100 bp, Homo sapiens
gttaaacaaccatcgagcatgtgtcaatggcattgcttgggccccacattcatcctgccacatctgcactgcaggtaatagcctgcagctggtgttttga

SEQ ID NO: 464744 - DNA, 87 bp, Homo sapiens
cttgagtctactctgtcgctcttgtgccctagcaccccgagaaccgtcagtttgagccagatgggtgtggatgaatggaacatagct

SEQ ID NO: 464745 - DNA, 100 bp, Homo sapiens
gggcgagcggctgtgtggatgtcggcgaagccgcgggcgaggattggaatacttttctgctacggttcaatgatttggacttgtgtgtatcagagaatga

SEQ ID NO: 464746 - DNA, 83 bp, Homo sapiens
catttgacaaatgtacagcttgttcttccaaaagatccgcacgcagctggtggagcagttcaaatgtctggagcagcaatcag

SEQ ID NO: 464747 - DNA, 89 bp, Homo sapiens
agaaaatacgtggttggagagctcatctggaattttgccgatttcatgactaaccagtgtggatattccatctattataaccaagaaac

SEQ ID NO: 464748 - DNA, 125 bp, Homo sapiens
ctctgtcgctcttgtgccctagcaccccgagaaccgtcagtttgagccagatgtcatccgtccttggctcaggatttggagagcttgcaccaccaaaaatggcaaacatcaccagctcccagatt

SEQ ID NO: 464749 - DNA, 100 bp, Homo sapiens
gaaaaactttcgcctgagcctattttgctttttctaaaggctcctgtgaacactgcagaactaacagatctcttaattcaacagaaccatattgggagtg

SEQ ID NO: 464750 - DNA, 90 bp, Homo sapiens
atggcatagtaaatgaaaacttggttcatacgttttatgaagctgtggggtacatgattggtgcacaaacagatcaaacagtacaagaac

SEQ ID NO: 464751 - DNA, 127 bp, Homo sapiens
tgtgtcctgagatcaaatggcacttcattggccacctacagaaacaaaatgtcaacaaattgatgggcatcaagcatgatggaaccatgtgtgatacctgccgccagcaaccaatcattggcattcg

SEQ ID NO: 464752 - DNA, 87 bp, Homo sapiens
acttcatcatcatctacttcacaggaattgccatttggtaatactgaacaacctgtccaaactagcaagattggacttggaagaaga

SEQ ID NO: 464753 - DNA, 71 bp, Homo sapiens
agtatttgtggtaataacccttaccgggagtttcactgaagtgagtgatagttgcttcaggaatcttgcag

SEQ ID NO: 464754 - DNA, 50 bp, Homo sapiens
aggagcgagagtgggaagaacagtcgttacatccttactattcaaagtgc

SEQ ID NO: 464755 - DNA, 75 bp, Homo sapiens
acaccaaccaaattgtcgccattaagaaagcgttacatagccatgtgccgcgagaagcagcccatggtgccagag

SEQ ID NO: 464756 - DNA, 82 bp, Homo sapiens
tgaggtggccggttcttggtgggatctgagcagcaaacggggattcagcgtccgatcctttggaacagggactcacgtgaag

SEQ ID NO: 464757 - DNA, 99 bp, Homo sapiens
acaacctggaagatgaccgctgtgagtgtgtggctctgcaggattttcgggctggagagcaggggatgtacaaataccttgagagatgtttctcagact

SEQ ID NO: 464758 - DNA, 131 bp, Homo sapiens
cactgagaccctggagcatctgcaagagatcaacatcgccaccaggaccaccttcctcctgccagcacccaccgcccagcccagggaccctggcagggactgcgtcgaccagccagagctggccaactgtg

SEQ ID NO: 464759 - DNA, 50 bp, Homo sapiens
agaagagaataagatttttggaagaaaagatatgaaagctttcaaaatcc

SEQ ID NO: 464760 - DNA, 96 bp, Homo sapiens
gttcaagcagctcaccagtggagagaagattttgcagttttgaagtacaggaagaaggttatctggcaaaaatcctggtccctgaaggcacaagag

SEQ ID NO: 464761 - DNA, 97 bp, Homo sapiens
cagaaattggtcgtctgagagctttacgtcatcttcgattagctaataaccaactgcaattcctacctccaggggattcaaaccgatgacaagggtc

SEQ ID NO: 464762 - DNA, 80 bp, Homo sapiens
attcgcagtggtcgcttcttctccttggttcctgctccagcgtggctcctggactggcgccagatgctggccctgggggt

SEQ ID NO: 464763 - DNA, 100 bp, Homo sapiens
tgtgattccatgctttgatagtgtaaactcagcacgagccattttgcagagatcgagatggtgatcatggagcgtagcaagctctcagagctggccgcca

SEQ ID NO: 464764 - DNA, 75 bp, Homo sapiens
gccggcccttgttaactacaacagaccatctggtctctaattaacagaagatggcaaagcccagccacagcagct

SEQ ID NO: 464765 - DNA, 100 bp, Homo sapiens
tgccaacctgatgattaatttcttccagaaggagctcattgccaagttagatcaggcagaaaaggagaaggtggatgctgctgagctggttcgggaattc

SEQ ID NO: 464766 - DNA, 75 bp, Homo sapiens
cgccgttccgtgcagctcacggagaagcgaatggacaaaggtctcgcatgaatttgccttgaatttcaaccccag

SEQ ID NO: 464767 - DNA, 100 bp, Homo sapiens
ccgggcaagagaccgactggcggagcaccgccttccggcagaagctgagacacctatggctgccgatgaaggctcagcagagaaacaggcaggagaggcc

SEQ ID NO: 464768 - DNA, 75 bp, Homo sapiens
ggagaaccgggcccagcagcactgggaaaattacttggggcacacagcaaaaaatgctgtgatcacagtcccagc

SEQ ID NO: 464769 - DNA, 100 bp, Homo sapiens
ccccgtcctcttgtcctcctcagcctcggcccgcagccgtgccgggtgctcttcagcatgtccttcatcccggtggccgaggattccgacttccccatcc

SEQ ID NO: 464770 - DNA, 80 bp, Homo sapiens
cagatgcccaccgggatggagaaggaggaggaatcgttactccacaggatccgctgaacataggatgttgccacaaaatc

SEQ ID NO: 464771 - DNA, 100 bp, Homo sapiens
ggagcgggtaccgggcgcgggcagagcgcggcggcgcgggcaatgagaagcacgaccttcatgttacctcccagcagggcagcagtgaaccagttgtcca

SEQ ID NO: 464772 - DNA, 100 bp, Homo sapiens
ccgagctttgcgggaaagcagcgtattctaccttgtaaatactgttatttgtatatactgtaaatgatgacatcggtgggcactaaccgagcccggggaa

SEQ ID NO: 464773 - DNA, 100 bp, Homo sapiens
atgtgacatggtttctccctatgttacgtggatgtttgtaacggcaagaatatcacggcatgggcatgagtagcttgaaactgctgaagtatgtcctgtt

SEQ ID NO: 464774 - DNA, 78 bp, Homo sapiens
ggctcagccgcaagtacccgtccatcatagtcaactgcgtggaagagaagtgaacacctacctcttcatgatgcaagc

SEQ ID NO: 464775 - DNA, 90 bp, Homo sapiens
ctaatcccagggtacagaaggacatcctgactcagctgaagattctcagacctcaggtcacccagtcagcttgaagagtttcaaatggac

SEQ ID NO: 464776 - DNA, 98 bp, Homo sapiens
ggcctctctggcatgaccaagaacacctttgagctcattcttggaatcccagaacaggccttaagtcttctccacatggccatcgagcccatcttggc

SEQ ID NO: 464777 - DNA, 76 bp, Homo sapiens
aacagagccgggagttcaagaagaacactccagagaaatggtgagagaactttggatgtggaacgtggaggaggag

SEQ ID NO: 464778 - DNA, 100 bp, Homo sapiens
gtgagcattaaacctgaaccagaagatcgagagcctaactttgcaaccattggtctgcaggacatcactttagatgatgaatcctcactatggatgggct

SEQ ID NO: 464779 - DNA, 50 bp, Homo sapiens
agttgacagcacttttcaaaaacctgcaggaaccgaatattgtatctgac

SEQ ID NO: 464780 - DNA, 100 bp, Homo sapiens
gacatctacaaccttcgatctcctgacgaatgacacacaataatttttggttgaagaagatagaaatcagtgtttcagaagcagaaaaacgaactggaag

SEQ ID NO: 464781 - DNA, 100 bp, Homo sapiens
gccgctatggatctattcgactttttcagagactgggacttggagcagcagtgaacaaaatccagtctcatagcagaggagaatataatgtttacagcac

SEQ ID NO: 464782 - DNA, 100 bp, Homo sapiens
cagatcctctggttccggggcctgaaccgtatccagactcaggacaagttccttacctccgagttaccgtcatgcccttgctgactttgccacaaaccag

SEQ ID NO: 464783 - DNA, 98 bp, Homo sapiens
gctgtacttgcgtccgctacagtatgtcaatcgcttgccccagcacagggggagctgatcaccttctattactattggaagaagacccccgaagcagc

SEQ ID NO: 464784 - DNA, 75 bp, Homo sapiens
cagacttgattgacgttgacttaatcagagtatatgaaaatgatgatcagctcctgtgggaccctgagtacttac

SEQ ID NO: 464785 - DNA, 74 bp, Homo sapiens
aaaaccgagctgctgggagaagggcgaagctgtgctcaggcccgggctggacgcagagccagagctgtccccag

SEQ ID NO: 464786 - DNA, 100 bp, Homo sapiens
ctgccctgtggcctcgctcctcggaggagcgcatcagcgaggaggtggggctgctgcagctccttggggaccccccgccccagcaggtcacccagacgga

SEQ ID NO: 464787 - DNA, 100 bp, Homo sapiens
cacgtgggtggtcctggggcactcagagagaaggccaagtggaggtgactggtgatgaatacaatgtggaaagcattgatggtcagccaggtgccttcac

SEQ ID NO: 464788 - DNA, 74 bp, Homo sapiens
acatcattgcaatcaagtcacctgacacatttgtgagaactatttatgcagatgaattacagtttatcgactgg

SEQ ID NO: 464789 - DNA, 75 bp, Homo sapiens
ggactcatacagagattgaaatgttccttagaaaggagcagcaggcaagaagctaccggatgtttcacgacgaca

SEQ ID NO: 464790 - DNA, 82 bp, Homo sapiens
gcgggcggagctgtgcgagagcctcctcacttgggtacaatgactcttcttgcttttcacctaagttgaataagcaccctgt

SEQ ID NO: 464791 - DNA, 100 bp, Homo sapiens
cactttgtttcccccatggctcactatgtgcctgatatcatgccaattgaatctgttattgcaaggagtgagctgagtcgacagaaacttcatacccaag

SEQ ID NO: 464792 - DNA, 74 bp, Homo sapiens
ttacagactgtggtgcctacccccatcactgcttccctcagccataacagatacctgtggaagggggacaggag

SEQ ID NO: 464793 - DNA, 97 bp, Homo sapiens
gatgaaatccaaaggtgaatcttttggttggtgattttgatgatagccacaaagcaagcaggaattttctttctaagcaatggtatggagagatttc

SEQ ID NO: 464794 - DNA, 100 bp, Homo sapiens
gaagaaacaattcctcctgattatagattagaagaggtcaagggtttcagtgagctcaaccctttagctttatacacgacatccagtggagggccagagg

SEQ ID NO: 464795 - DNA, 50 bp, Homo sapiens
gccgggcgaccccgcccgggcctcggggtctgggggtggtggcatctccc

SEQ ID NO: 464796 - DNA, 98 bp, Homo sapiens
ttcgacaagaatctgcaggacttggtccgcggcatccgtaaccacaaggaggacgagatcagcattgtggagctagagaagagccagcggcagcagga

SEQ ID NO: 464797 - DNA, 74 bp, Homo sapiens
atagtctccagcgggcctggactgtgggctggtgtgtggaactgctatttgatggcattgaatgtgaatttccc

SEQ ID NO: 464798 - DNA, 75 bp, Homo sapiens
agacctccaagaccttcacgaccaccaccacccaccccacgtagaccagactcctcagacccctgcacaattgag

SEQ ID NO: 464799 - DNA, 100 bp, Homo sapiens
tctgaacttcagttgccttacctgtaaggtcctgtccctgctatcagtggggcactgaagaaagcaggactgagtcttaaggacatggatttggtagagg

SEQ ID NO: 464800 - DNA, 82 bp, Homo sapiens
ccgattccatatggcatgtccaacattcagggtgtctatagcccgattggtcgttcttccctctttccaatagatgatggct

SEQ ID NO: 464801 - DNA, 95 bp, Homo sapiens
gacagtatgaggcaagcgcagggggacggggaccagcagctgtcgccgccgctctcagggccatgaagcccccaggaggagaatcgagcaatctt

SEQ ID NO: 464802 - DNA, 123 bp, Homo sapiens
gaaccagtaccggctgacctcgctgtacgccgagcacccaggcgactgcctcatcttcaagcccgtggaccgggagcccgtggaccgggagccggtggtgtgccaccccgacctggaggagcg

SEQ ID NO: 464803 - DNA, 75 bp, Homo sapiens
taacagtgccaccggtgttccaactgtttaaaatccttgccagcacattacagaatatttttgttgaaccttctt

SEQ ID NO: 464804 - DNA, 90 bp, Homo sapiens
aggcaatagctgaagaagaagaggaagtagccaaagagcaactaactgatgctgacaccaaagctgaaccaataacgtttccatctggag

SEQ ID NO: 464805 - DNA, 100 bp, Homo sapiens
accaggaccgtaggatgatgtttcctccgccaggaaaacggacgatgtattactaagctggaaaacatggggtttcgagtgggacaaggattgatagaaa

SEQ ID NO: 464806 - DNA, 100 bp, Homo sapiens
ttattatacccagtaaaggagaaagcccaccacacacgttctgcaaagtcgacaagaatctcaataacagtatgttagggcctagtcaaaattttgaagc

SEQ ID NO: 464807 - DNA, 75 bp, Homo sapiens
agggatgagtcatgtggcagtggaaaatgcgctcgggctggaccagcagcacacagcaagaaggaggccatcagc

SEQ ID NO: 464808 - DNA, 75 bp, Homo sapiens
cacacaaggcaggtgggtgaggaaatccagagctcacaatgtctctctgcaccaagctccatgactcaggatttg

SEQ ID NO: 464809 - DNA, 100 bp, Homo sapiens
tcaaaaaggaaaatcctttcttgaggcaagagtattttaaccacatcagcatcgaggactcgcgggtctacgagctgaccagcaaggctgggctgttgtc

SEQ ID NO: 464810 - DNA, 50 bp, Homo sapiens
cggaggggaaggctgaggaaaggaagcttgctgtcttcgatacgtggagc

SEQ ID NO: 464811 - DNA, 90 bp, Homo sapiens
tttggtaatctgtgaatgggctgctttacaaaaggaggagagacttcagcatgcaaaccttcatctgttcggcttgcaccgtcattttca

SEQ ID NO: 464812 - DNA, 100 bp, Homo sapiens
cggactgtggcggcttcggcggctcaggttgtggtagaggcggaggctcaggcagcttgagcttccatgcctatggctgttctaaaattgggccaaatat

SEQ ID NO: 464813 - DNA, 100 bp, Homo sapiens
ccaacacagtgatgcggctcatcgagaagcgggctttccaggacaagtactttatgatagacaaggacgagggtgaccaccccaacaacagcttcagccc

SEQ ID NO: 464814 - DNA, 82 bp, Homo sapiens
cgatgagacagagttgcgaccgcgcggcagcaaattgtggctactaatttgccccctgaagatcaagatggctctggggatg

SEQ ID NO: 464815 - DNA, 134 bp, Homo sapiens
gacgggaaagattgcaaggtgaataaagaagtggagcgtgtcctgaaggagttccaccaggccgggaagcccatcgggttttaaaacatgaatcctacactcatccttgctgccttttgcctgggaattgcctc

SEQ ID NO: 464816 - DNA, 83 bp, Homo sapiens
ccccatagatggccagctttcccccgagggtcaacgagaaagagatcgccgggcccctcagatgagagctgcacccaggccag

SEQ ID NO: 464817 - DNA, 82 bp, Homo sapiens
aagaccgcgcgcagggcctgcagcgggagctggacggcgagcgcgagcggcgcgagaaagagaatggggtactaagagaaaa

SEQ ID NO: 464818 - DNA, 75 bp, Homo sapiens
acgggcagccggaaggacaccaagatgcggatccgggcctttccgatctatgagtggatgagagagatcagtgag

SEQ ID NO: 464819 - DNA, 80 bp, Homo sapiens
cgatgtgcgagaactgcgcagacctggtggaggtgttaaatgaaaggtggtatttccaacattttggaggaactggttgt

SEQ ID NO: 464820 - DNA, 83 bp, Homo sapiens
cctcaccatacacctgaaggaaggccggaacctggttgtccgagatcgctgtgcttgcgcgatctctggcctcttcaactgca

SEQ ID NO: 464821 - DNA, 142 bp, Homo sapiens
ggcgtctggctgctgcggaccccgccgagtcctagcgcctggcctgcgcgccgctgcccgcgccacaggtactccaaagattcaggtttactcacgtcatccagcagagaatggaaagtcaaatttcctgaattgctatgtg

SEQ ID NO: 464822 - DNA, 100 bp, Homo sapiens
tcaggaaccaccagtgacagacgacatctcgaatcagcgatgcacacttggcagacacaatgattggcaaagcagtggaacatatgtttgagacagagga

SEQ ID NO: 464823 - DNA, 74 bp, Homo sapiens
cccagccatgcttcctgtacagcctgcaaaactagtgcgatgacatggatcctgcggacaaaccgccccagggc

SEQ ID NO: 464824 - DNA, 100 bp, Homo sapiens
aatattggaagcgctttgatttacagcagctgcaggcaccttggaagttgttttcaaccatatccagcctttgccgaatacatcctatctgccacacatc

SEQ ID NO: 464825 - DNA, 50 bp, Homo sapiens
cttcacacgcctccatctccaagcagcttccctattccctgagacacaac

SEQ ID NO: 464826 - DNA, 100 bp, Homo sapiens
cgccgcccctcaccagacagatcgctgtcaaaaccctaggtggtttgctctgttagaggttcagatgtgtattattttaatactttataaatatgactgt

SEQ ID NO: 464827 - DNA, 100 bp, Homo sapiens
tctgcctcttgatctccgccaccgtcttcaggccagagaagcctgtgtctcccaaatcaggaacactgaagagccctcccaaaggatttgatacgactgc

SEQ ID NO: 464828 - DNA, 110 bp, Homo sapiens
ggaagtgtagattctatagctgttgatggctcaggaactaaagccatgtttttggtatactgtgcactggagaaagaacctgtgccaatgtccttgcctccagccttggt

SEQ ID NO: 464829 - DNA, 98 bp, Homo sapiens
cacagatgaacgaagttatggcagagttagctaaagaactccctcaagtttcatttgtgaaggatcgaaaggactctgaagagtaaagtgatggaatg

SEQ ID NO: 464830 - DNA, 100 bp, Homo sapiens
aaattctgaactcaggacttggcaatttgctaatccagactttacacaacctatctcagaagttgtagatgaagtaattcagaattgtcctattgatgtc

SEQ ID NO: 464831 - DNA, 75 bp, Homo sapiens
aacttcacaggagaactctcctgcccttttaggagtgcaaaaagccaccagaaaggcagattgtggttggaatat

SEQ ID NO: 464832 - DNA, 100 bp, Homo sapiens
ctcggcgcgactcgcttctttcggttctacctgggagaatccaccgccatccgccaccatgggacaaactggcagagctccacgggaacatgtttgtgga

SEQ ID NO: 464833 - DNA, 90 bp, Homo sapiens
caacgtgctaatggagcatggtgtgccttggccctgaagctgcactatgttggaggtttccttgactaagagaaccacatgcggcattca

SEQ ID NO: 464834 - DNA, 75 bp, Homo sapiens
gatgattataggcgtgatgatagagcctgggcagaggagcagaataagttggtgcatggcggaccctgcgacaag

SEQ ID NO: 464835 - DNA, 53 bp, Homo sapiens
aaggaacatctcaccaattttaaatcagaaggcaggaatgtcaggcctctgag

SEQ ID NO: 464836 - DNA, 74 bp, Homo sapiens
ccaaaccagaccccatggcctgctcagcctcagcgactgcttttcaggaagccttggacgctgcaggtgataaa

SEQ ID NO: 464837 - DNA, 90 bp, Homo sapiens
gggcttccgcctcgtgggcggcaaggacttcgagcagcctctcgccatttcccgggcaagcgcaccccctggcgggggattctgctgttc

SEQ ID NO: 464838 - DNA, 83 bp, Homo sapiens
ccaggctttagattatggggcaccccctcatggaggaattgccttagaatgagtccctggaacgccagatgcgtgaaatggaa

SEQ ID NO: 464839 - DNA, 90 bp, Homo sapiens
ggaggccttgccgggccggaaggaacagacccctgtagcggaaatacaggtatcaggatgaagatacacctcctcaagagcatatttccc

SEQ ID NO: 464840 - DNA, 49 bp, Homo sapiens
caggatgtgagcaacacgggaccgacgggctcatcttcgcttgtgcctg

SEQ ID NO: 464841 - DNA, 100 bp, Homo sapiens
ctgagctgcgcctggacctggttctgccttctggacaatctttccgctgcaccaccaccgcctgtgctgatgcaccatggagagtcctcccaggtcctgc

SEQ ID NO: 464842 - DNA, 50 bp, Homo sapiens
cctgcctgtgtctgtagatgagcggtgaccacccgtcaggtgcgtaccat

SEQ ID NO: 464843 - DNA, 100 bp, Homo sapiens
catggagcagccgaggaaggcggtggtagtgacgggatttggtgctatggagaaatttttggtagaatataagagtgcagtggagaagaaactggcagag

SEQ ID NO: 464844 - DNA, 51 bp, Homo sapiens
ggccgatccgctccgctcacgcattgcagtgtcgagatggctatgaaccct

SEQ ID NO: 464845 - DNA, 99 bp, Homo sapiens
gtagatctagaagtcactttggaagaagtatatgcaggaaattttgtggaagatgtagatatgatggatcagaatggaatgacgcctttaatgtgggca

SEQ ID NO: 464846 - DNA, 100 bp, Homo sapiens
ctctaagcactgaagtcggtgtttggagaaaaggactcaggaatcggtgagtttcaaggatgtggctgtggacttcacccaggaggagtggggtcaacta

SEQ ID NO: 464847 - DNA, 100 bp, Homo sapiens
tttgagctggaggacctgaacctgcggcctgacccagagccacttctcaccgagatgattcatgaaattggccgcgtaatccaggttgctgctgggagca

SEQ ID NO: 464848 - DNA, 83 bp, Homo sapiens
tgctgctgctgacgctgctgctgcccggcctcggggaaaaatatattcagggggaagagatgtaatagatttcacattatggc

SEQ ID NO: 464849 - DNA, 74 bp, Homo sapiens
cagaagcgctggtcggcgtctggcggtgaatccaagtcgacttcctgtagttattggaggattacttgatgttg

SEQ ID NO: 464850 - DNA, 97 bp, Homo sapiens
aagctaccggccagggttttctttactctggggtcccggctgccctgtggcctcgctcctcggagggaaactactaaagttcctggggaagcaaagt

SEQ ID NO: 464851 - DNA, 75 bp, Homo sapiens
accaagccaaattcctcaacgcccgcctctcctccaggaacagcttcaggtcacagggattatggacccagaaca

SEQ ID NO: 464852 - DNA, 98 bp, Homo sapiens
cgtccaacgcctgaagggaaaacagggaaatggctagtgatgagctgaaagagatgcggaaaaacttgaccaaagaagccatcagagagcatcagatg

SEQ ID NO: 464853 - DNA, 74 bp, Homo sapiens
ctacttcaaggataagggtgacagcaacagctcggcgggctggaaggtggatgtgaaattggaccccaaggatt

SEQ ID NO: 464854 - DNA, 95 bp, Homo sapiens
ggcgccgaggcggccacccgagacgcggcgcgcacgctccggcctgcgatgaaggatttgggggcagagcacttggcaggtcatgaaggggtcca

SEQ ID NO: 464855 - DNA, 100 bp, Homo sapiens
tctccaaaccgtggctgctcgataaatcagacagaacagttaatcctcaatttaagcctgatctaacccctagaaacagctctagaggacaaaatcccag

SEQ ID NO: 464856 - DNA, 90 bp, Homo sapiens
caaaccactggacacatttttagaagagctagcagaaaactgtgttggctacaagtgccgagaaagattctgttttgaatatagccagag

SEQ ID NO: 464857 - DNA, 96 bp, Homo sapiens
ggaagttactgccgcgccaccgagtccggaccggagactttggggcctaactaggtgcttttgaagatgatgatatcacgcacgttgaaggaagtg

SEQ ID NO: 464858 - DNA, 80 bp, Homo sapiens
attgcacaagccaggaaaggacgcgtcgaagcgcgggcggcaggaagagagaagggcacagttacctaagtatcaacgta

SEQ ID NO: 464859 - DNA, 75 bp, Homo sapiens
tgtctgaggagcggtcagtgacgcgatggagcgggcaaggttggcctcattcagcttgggcaggagcaggtgcta

SEQ ID NO: 464860 - DNA, 98 bp, Homo sapiens
gtgccaaagtcttcctcatctacgagatcctggagagctcccagactttgctcagcgttctcaagagggaagctgggaacctgaccaaggctacagcc

SEQ ID NO: 464861 - DNA, 50 bp, Homo sapiens
ctcttcctggactcctgagcagaggcttttatcttgagaacatggtgtct

SEQ ID NO: 464862 - DNA, 51 bp, Homo sapiens
atgtgttactccattgctgaggagtgaaaatgtttcgatgaaagatcctcc

SEQ ID NO: 464863 - DNA, 100 bp, Homo sapiens
gggcccaggtggggccctgagcctggcccaggccctggatggatccccccatttggaagagatcagcccgagatgatcggccactacctgggcgagttct

SEQ ID NO: 464864 - DNA, 75 bp, Homo sapiens
aaagcacatgtttcagtgccactcacataagaagtgcccggtcggtgcccactttctggaggcagtggtgaggaa

SEQ ID NO: 464865 - DNA, 82 bp, Homo sapiens
ggacctgcagcagctgagaaaggagctcggggactcccccaaagacaaggtcaatgtgacggtggactacattagaccagcc

SEQ ID NO: 464866 - DNA, 100 bp, Homo sapiens
tgaaagcatcgctccgagcctcatgggaggaatgaaggaagaatcgagactagtatgacatgatgggaagaaatcagactgctgtgagagaagagatgat

SEQ ID NO: 464867 - DNA, 83 bp, Homo sapiens
tagctctgtatgagaaggacaacacctacttaggtcaaatgaagcgcaacagaggggaagaaatagattttgagacacctggg

SEQ ID NO: 464868 - DNA, 100 bp, Homo sapiens
ttttttgagaaaggaaggaatatatcctgactgattctccctgggaagctgaatgaagcggatcataacggagatctggcattagatctagccctctcac

SEQ ID NO: 464869 - DNA, 100 bp, Homo sapiens
aatgcgtggaattctcctacacttcctatttatgaggaccgtataatagacgctggccccaaaggaaactactctcgatttatgaatcacagctgccagc

SEQ ID NO: 464870 - DNA, 100 bp, Homo sapiens
ctgaggagaggagcgtcaacagcagcaccatggcttacgaggaaatatttcagtaaaagcagttaaaaaagaagtagaaaagaaactccgatgtcttctt

SEQ ID NO: 464871 - DNA, 75 bp, Homo sapiens
gaggagctcaatgccaccatcatgagaccatctagctggctgcccccgacagtgagtgtgttggctcttgtgaag

SEQ ID NO: 464872 - DNA, 75 bp, Homo sapiens
accaccctggtggcctttccctccagctctgtctatcctaccaaggtggcctcactccaggaaaaagtgacatcc

SEQ ID NO: 464873 - DNA, 100 bp, Homo sapiens
gctatgaccacgttgctcctggagatgagcacgccctttacctgcgtttcctggatgctcttaaagaaatctccaaattggacatccagagcagcattct

SEQ ID NO: 464874 - DNA, 100 bp, Homo sapiens
acatacccccagcttagaggtgcttcaccctgccccaagtgcctccagaaaaacctaaaaatttgagttgcattgtgaacgaggggaagaaaatgaggtg

SEQ ID NO: 464875 - DNA, 75 bp, Homo sapiens
accctaaaaatggcgattctgcaaccaagcacctgaaacagcaggctttccttaaagtttcccatgtctcaatgg

SEQ ID NO: 464876 - DNA, 98 bp, Homo sapiens
cgccgccgaagaagcatcgttaaagtctctcttcaccctgccgtcatgtctaagtcagaggtatcgagaaccttccctgcgaacttcagaggaacttc

SEQ ID NO: 464877 - DNA, 100 bp, Homo sapiens
tggcccagttacaatgctcaaatgccaccacctaaaaggcaaccaactctgggagtatgacccagtgaacacctacatctggacagtcagtatctacttg

SEQ ID NO: 464878 - DNA, 71 bp, Homo sapiens
gaacagcaatcttgccagtgtggaagaactaaaggaaattgaagttggtggtggtcggaaagctatcataa

SEQ ID NO: 464879 - DNA, 98 bp, Homo sapiens
caaaacaacctagccagccagctggataccactgagtgacctcagtagatgccacgtgggacaggagaattctctaaacttcattatgtgcgatatgg

SEQ ID NO: 464880 - DNA, 75 bp, Homo sapiens
agttcaggcggtatgattttgagtgtctgcaaaggtcacgagaagagaatgccttctagatgcaaaatcacctcc

SEQ ID NO: 464881 - DNA, 100 bp, Homo sapiens
caaggcagtggtcagcgacccgcagtccatctgactcctgcttcccgggtgttgctcgttacatcgcggtgcacgtggtcccggaccagctcatggcctt

SEQ ID NO: 464882 - DNA, 87 bp, Homo sapiens
tcaaaaggtgatctggacaaaggaacaggtatctcagatctgccgacaccccaggccatcgagccccaggccatcgtgcagcaggtc

SEQ ID NO: 464883 - DNA, 83 bp, Homo sapiens
ctgtacagacttctcgtgggcagcctcccctcggaactcgggcatcatggcctcaggtgagaagccctaccactgcaactggg

SEQ ID NO: 464884 - DNA, 75 bp, Homo sapiens
gaagaaactgtccgagaagcccaaaccttgcccctcttgctcgccttgaaaatggaaaagatgctcgcaggctgc

SEQ ID NO: 464885 - DNA, 83 bp, Homo sapiens
ataagattgaatgccaagcagaaaattacctaaatgcactctttcgaaagaaaggaaggatcgagatcgagaccgggatcgtg

SEQ ID NO: 464886 - DNA, 90 bp, Homo sapiens
gctgctctttgccggacagcagagtcccagggatgatcatggtgattttactgctgcttgtggctatcgtggttgttgcagtctggccga

SEQ ID NO: 464887 - DNA, 100 bp, Homo sapiens
atggagcaggtgttattatggactttcaaacatctgaagatgacaatttattagatggtgacactgcagttggtgtttgaaatgatcattaatcctggag

SEQ ID NO: 464888 - DNA, 100 bp, Homo sapiens
ccactctgcatggtgttccacatcattgacttactgctttgtgaggttgctccttgagggcaggacagttcttatggctttatccgttgcgtaagcacag

SEQ ID NO: 464889 - DNA, 106 bp, Homo sapiens
ggaactcccggggaagaagctgctctctgagaaaaagctggttggtgttcgaggaagagacattgttgttcttggtgtggagaagaagtcagtggccaaactgcag

SEQ ID NO: 464890 - DNA, 82 bp, Homo sapiens
agcccgacgcaaaccaaggatctggggatcttcgcactatcccaaggtactccaaagattcaggtttactcacgtcatccag

SEQ ID NO: 464891 - DNA, 100 bp, Homo sapiens
gccagagcctggagtctgcgaaggccgggacccggttccccggcccacagtgggggtgtgcaaacccgagagaactggactgtgaaccagaagagctgac

SEQ ID NO: 464892 - DNA, 97 bp, Homo sapiens
aaggagattgcctcggattccgacagcagattgctcatttagaaagtggatgtgtgggataacatgtccaatgtgtccgaggagagaagaaaaaggc

SEQ ID NO: 464893 - DNA, 90 bp, Homo sapiens
gaagccatcaaaaaacaaaacagaaaaaaacctctaggaaatgatctaggaaaatgactggtcgaattgacaaatcttaccctacagtat

SEQ ID NO: 464894 - DNA, 75 bp, Homo sapiens
ggacactcatacaatgcacttccacaacacaatggatcagagtgtgcagttcgtgcagccacagaaggcagaact

SEQ ID NO: 464895 - DNA, 75 bp, Homo sapiens
tctgtcaggaagtgccatggtaaactgttttaacagtccaatcagtgaaagtcgaagagtactacaggaatcatg

SEQ ID NO: 464896 - DNA, 75 bp, Homo sapiens
gcttcctatctaccctgccattgatattgatgcacagatgcacccactgggcctatgtaataacaatgacgaaga

SEQ ID NO: 464897 - DNA, 100 bp, Homo sapiens
ccgggcggcgggcggagacgtgggcgccctccccgccaaggcccgtgcgaggcctggtctccaagtcctctcctaagaagcctcgtggacgtaacatctt

SEQ ID NO: 464898 - DNA, 90 bp, Homo sapiens
gtactgaagttccctgatgatcagactcagaaaattttggaaagagaagatgctcggctgatgcttgcagaccaggattctataaagctt

SEQ ID NO: 464899 - DNA, 82 bp, Homo sapiens
ctccactccgtcccccgcgggtctgctctgtgtgccatggacgggaaccccggggttagcaccgtggtgctgggtgcctatg

SEQ ID NO: 464900 - DNA, 87 bp, Homo sapiens
ctcttttcctccgtccgtggcccgcctgggcggccttgttctttccgcagcagccaggtatgggaggacatggctatggtggagctg

SEQ ID NO: 464901 - DNA, 75 bp, Homo sapiens
cgccgccgcccccgggctcgcggcctgcagtccctggtgatttgggtaaccaactggaagccaagctggacaagc

SEQ ID NO: 464902 - DNA, 89 bp, Homo sapiens
cccatattgaactcgagttggaagaggcgagtccggtctcaaaatggagacaatgcagatcttcgtgaagactctgactggtaagacca

SEQ ID NO: 464903 - DNA, 99 bp, Homo sapiens
tgtgctcgcgctactctctctttctggcctggaggctatccagcgggatcctcttggtgtatgacatcaccaaccgctggtcctttgacggcatcgacc

SEQ ID NO: 464904 - DNA, 98 bp, Homo sapiens
ctgcaggccaacctacctcccacaaagcaggcacgagtcattcccatacaatgcaacatccggaatgaggaggagatggagaacttaatgttctggat

SEQ ID NO: 464905 - DNA, 74 bp, Homo sapiens
ctttattacagcattcaacctggcacactgttatctggaaggaactgcaagcacatgttgaccagataactgaa

SEQ ID NO: 464906 - DNA, 50 bp, Homo sapiens
ggaccaccgcggggtccccggcaaggtaaaacttccttttcctgtagatc

SEQ ID NO: 464907 - DNA, 49 bp, Homo sapiens
ttgtagctgatgccgtggccagtaaaagcagccagacacagtctccaac

SEQ ID NO: 464908 - DNA, 78 bp, Homo sapiens
tcgctgatcgcctaacttctactgacgaagcttggaagttgcagaaggatacaagtgatgccttcaaatttgagctca

SEQ ID NO: 464909 - DNA, 82 bp, Homo sapiens
agagcgtgccctacttcaaggataagggtgacagcaacagctcggcgggctggaaggtaaagggagaagatgaggaagagaa

SEQ ID NO: 464910 - DNA, 100 bp, Homo sapiens
tgatccaggctggacccacgtctgtctggtgataccaggggcagagggaccactctgacagacttcctagcatgggctgttgtgctggagagaacgagag

SEQ ID NO: 464911 - DNA, 51 bp, Homo sapiens
cgggatgcctgcaccattactgttgagcattatgaaagatgagccagaaga

SEQ ID NO: 464912 - DNA, 90 bp, Homo sapiens
aggaaaagttgagcacattgccaaccggagttccccaagtactggtgcgataccagcgggaggatggcaaagtccacgccgtgaacctac

SEQ ID NO: 464913 - DNA, 88 bp, Homo sapiens
ggaggccggcggcagcgacgggccccgaggaaacctgtccagtttaagtcgtcttggtctgagatataacagactgtcagcaataccc

SEQ ID NO: 464914 - DNA, 100 bp, Homo sapiens
atgcagctcgctccctgccggatgggtcatgggattctaaacatgaggcaggctgtccagtgaatacagagccatctggcccaacctgtgagaagaaaac

SEQ ID NO: 464915 - DNA, 129 bp, Homo sapiens
gacttggtgtgcattaacctgccgccgcccctcaccagacagatcgctgtcaaaaccctaggtcatggcaaaaccccaaaagatgccgcgtcagttcgagccacgcatccaataccagcagcctgtggg

SEQ ID NO: 464916 - DNA, 75 bp, Homo sapiens
cggcagagcaaggggcttacgcagaaggacctggccacgacatatctgaagagatggattaagaatgctttggat

SEQ ID NO: 464917 - DNA, 83 bp, Homo sapiens
ctacgaccacctcttcaagctgctcatcatcggcgacagcgatgtatcctccactcctcgctggccaccatcctgctgcccaa

SEQ ID NO: 464918 - DNA, 75 bp, Homo sapiens
agagtccccgtacgcctacagtaacggaccctgatgcttggtgtgacctgagtaaatttgacctccctgaggaac

SEQ ID NO: 464919 - DNA, 100 bp, Homo sapiens
gggggatttctacgacccggagcacccgacccctgattttatcttcaagacactaaaagtagtaatggtacttttataaatagccagagattgagtcgag

SEQ ID NO: 464920 - DNA, 82 bp, Homo sapiens
gagaggccgagggtttgatgaaggtggaggcagcgcggctctcagacaatgcagatcttcgtgaagactctgactggtaaga

SEQ ID NO: 464921 - DNA, 75 bp, Homo sapiens
cgggaacagccatgcaaaggcaggggaggaagccacctcgagagtcgacttcaatgttcctatgaagaacaacca

SEQ ID NO: 464922 - DNA, 75 bp, Homo sapiens
ataaaatcttcacttctgggctcaggaggacagtcattttgtttactcattcagccctgttgcaggtcccaataa

SEQ ID NO: 464923 - DNA, 97 bp, Homo sapiens
tggagctgagggacaacaacaccaggaaactgacctcggggttgcggcgaccttttggagtggctgggtttcatcaccttaaatggttttgaaccaa

SEQ ID NO: 464924 - DNA, 75 bp, Homo sapiens
agcctgccatctccctggctgacagcacagacctcagctggtcctatagtacccctcctcaggaatgtctcccca

SEQ ID NO: 464925 - DNA, 75 bp, Homo sapiens
atcaccttcaatccgctctactggaatgtgcgtcgtatgtctcgtggggtgaatccctccttggtgagctggctg

SEQ ID NO: 464926 - DNA, 133 bp, Homo sapiens
cgcggcgggacgcgagcggcgagccggagcgcggagcccggctcccgcaccatggaggaggacgacagctacggtttggtgcacctcgatttggaggaagtagggcagggcccttatctggaaagaagtttgg

SEQ ID NO: 464927 - DNA, 100 bp, Homo sapiens
gggaagcgcccacggggacggattggttgttttttcctgtatgaagcggttggcaccactgaagtgaccgaatgagatgcctgaaatgtgcagatgcccc

SEQ ID NO: 464928 - DNA, 73 bp, Homo sapiens
tagtaaaaaggacagaattgaatcacttgaaaagaggctcgagctggagaatgctggaggagaccttaaggat

SEQ ID NO: 464929 - DNA, 90 bp, Homo sapiens
gttttctttactctggggtcccggctgccctgtggcctcgctcctcggaggggagcagtaatgaatgcaatggaaacaaacctcgttgga

SEQ ID NO: 464930 - DNA, 90 bp, Homo sapiens
gcattctccagggaaaggatgacatatttttggacctgaaacagaaattctggaacacctatatgattagcctgaggcctgctcagtcgt

SEQ ID NO: 464931 - DNA, 100 bp, Homo sapiens
agtcttcagggacatgaaaaggagccactccttacaaaaagttggggagccctggtgtattgaggctggcagtgatggtgaaagcataggaaactgcccc

SEQ ID NO: 464932 - DNA, 50 bp, Homo sapiens
tacgagggccccgcccagtgtcccaagactgtatgaaaacaagggagagg

SEQ ID NO: 464933 - DNA, 90 bp, Homo sapiens
gcaggaaagggttcagggttgaaaatgagctcaggtcccgcagcccccggaagccaatagactccctcagggactctcggtccctcagct

SEQ ID NO: 464934 - DNA, 75 bp, Homo sapiens
gaggtggtgaaagccacttctaggggctgcatcaccatcataggcatctggtgtcgaaggctcagatattcctga

SEQ ID NO: 464935 - DNA, 73 bp, Homo sapiens
tttagtgcactcttctccttcacagtaaagtggctgtgtgaagatcattcaccgatgaagacagacccagttg

SEQ ID NO: 464936 - DNA, 97 bp, Homo sapiens
tcaattggcacacagcaatgggaacatagccctttgggagagttgtgtccaccagagcttagaaaccaagatagccaagtggaacctgcaatcaaga

SEQ ID NO: 464937 - DNA, 78 bp, Homo sapiens
cccagtgacgggtctggagtgcgtgggggaccggctgttggcggctcatctttgggtgaaaaattgtcgggatcttct

SEQ ID NO: 464938 - DNA, 75 bp, Homo sapiens
gtgttcgagaacgaccccgagacgggtatttctcaagctgccagatacgtttaccaacgactcatcaacgacggg

SEQ ID NO: 464939 - DNA, 100 bp, Homo sapiens
cacgacccctgggagccgaagccagactgggcacacaccggcagccacagctccgaagctggcaagaaggtgtatggctctgtgtatcacatcaatcacg

SEQ ID NO: 464940 - DNA, 75 bp, Homo sapiens
gaggtggagttgctgcccttccggagtccgccccgtgaggagaatgagagatggaaaacttgatgactagctcca

SEQ ID NO: 464941 - DNA, 100 bp, Homo sapiens
gaaagcatgggattttttaccaaggaagaatggttaaagggaatgacttcattacagaattatccagactgccttgccactagatgaatggaagacaatg

SEQ ID NO: 464942 - DNA, 95 bp, Homo sapiens
ttgatgaagatgaaagagactgcaggggagtctctcaggaaaaagaagcccagatctcttcagcaatcgtttcttccgtgcagagcaaaatcact

SEQ ID NO: 464943 - DNA, 82 bp, Homo sapiens
gtcggatgttgtgttgcccgccaccatgagctacacaggcaacatgagtgagaatgaggaagaggaaatttctcagcaagaa

SEQ ID NO: 464944 - DNA, 74 bp, Homo sapiens
ttcaagggaataaaattttctaagctcccagttgaggataaaatcaggatcattgcacagaagatctatggagc

SEQ ID NO: 464945 - DNA, 74 bp, Homo sapiens
gtgatgttggagaactacagaaacctcgtctccctggaggagacacaccttgaagaaacaacagagagccaaca

SEQ ID NO: 464946 - DNA, 100 bp, Homo sapiens
ctgtaaaactcaactctccactggaaaagataaactccttttcgccacagaaagaggaggcaaaacagattcagaatctgcagaaagcaggcactcgtac

SEQ ID NO: 464947 - DNA, 83 bp, Homo sapiens
cgcccctgttgcgatggcgcagaaaccccgttgacaaggcactgctttttcatgacgggtggacaagtccttcacttctcgcc

SEQ ID NO: 464948 - DNA, 83 bp, Homo sapiens
atggatccacgcctgatggctccacgcatttcccttcgtgggcaaatccagacagaacctttgacttggtgttgaaagtgaaa

SEQ ID NO: 464949 - DNA, 100 bp, Homo sapiens
gtcgtagctgcggtcgcgccgagaaagatgtgtcttgctgaatcagggctctcttatccctgccatcgacttacagtgggaagaagatcttcacctgcac

SEQ ID NO: 464950 - DNA, 100 bp, Homo sapiens
agaaactggaggagtcccgctcgaagctagaaacagagctgtcagtcagtgctgaattagtgcctacctcatcatggaacatctcaagtgaactcaacaa

SEQ ID NO: 464951 - DNA, 83 bp, Homo sapiens
ggaacatctctttcaatgacaaaaagtttgtcattaaacccatcgacaagaaggcacctatctattaatgagatgaagcggtt

SEQ ID NO: 464952 - DNA, 113 bp, Homo sapiens
ggctgggcaccaaataccaggctaccatggtctacaagactctcttcgctctttgcatcttaactgcaggtgtcatggagaaactccagctgggcccagagattctgcagcgg

SEQ ID NO: 464953 - DNA, 95 bp, Homo sapiens
tgatggggctggacctgctggtgttcgcccacgaccatgatgccttcaattaagttgcagagttctgatggagagatatttgaagttgatgtgga

SEQ ID NO: 464954 - DNA, 100 bp, Homo sapiens
ccagaacctgaggagagaatggcatgccaggcttcagcaaccaggagggattgactgagatcttaacaacagcagcaacgatacatcagcaaatccttat

SEQ ID NO: 464955 - DNA, 80 bp, Homo sapiens
cagacctcctcagctgaggaagatgttcccacctgcggtgctggagaatctggtaaaagcaccattgtgaagcagatgag

SEQ ID NO: 464956 - DNA, 101 bp, Homo sapiens
gaagatgaactaatgagagcagcaggatcagatggtactgaactttttgatcagattgggaaaatgaggtacgttagtgttcgcgattttaaaggcaaagt

SEQ ID NO: 464957 - DNA, 75 bp, Homo sapiens
cgataacgcgcttttgctcctcctgaagtgtctttggtccaacgttgttccagaaaggcttcccaactgatgcaa

SEQ ID NO: 464958 - DNA, 98 bp, Homo sapiens
gtgactgggacctgggaacctactgtggggccgcggccggaccgagcgcctcgacctcggtctgaggtttctgaaggattgtcattcttgcatagcag

SEQ ID NO: 464959 - DNA, 50 bp, Homo sapiens
tcagcgtcgctggcagccgctgtacttgtgtccatgggctattcctcaaa

SEQ ID NO: 464960 - DNA, 100 bp, Homo sapiens
gcttcgagggccgggagctcctggtcatcgagctgtccgacaaccctggcgtccatgagcctgccttggcaaatgcaacattatgtattcttgaacctat

SEQ ID NO: 464961 - DNA, 75 bp, Homo sapiens
ctcaggacaacccagatgtgcaacaaagtgcgatggaaagaattcagagcctgaagcagagcatagacttcatgg

SEQ ID NO: 464962 - DNA, 82 bp, Homo sapiens
cggagcgtgccctcgccgctgtgtggacgaatgtggaacctcgctctgtggctgtgttcccttggcactccttagtcccctt

SEQ ID NO: 464963 - DNA, 100 bp, Homo sapiens
gtgaagaaggcgcatcactcccagctgcgcaaagcttgcgaggtggcgttagaaaacacgagatttttctcctatttcagcagttggccacaacttcatt

SEQ ID NO: 464964 - DNA, 73 bp, Homo sapiens
catccccagccaggaggccgacaagatgttctttctaattgaggcatgttatttgaaagcaattgagacgcaa

SEQ ID NO: 464965 - DNA, 122 bp, Homo sapiens
gacgccgcgtgctcccaacgtcgccccggtttgacgcacacggcaccaaactgtgttacctcattttgaaagtcttgggaaacaggaaaaaattcctaacaaaatgtcagcttttcgaaatc

SEQ ID NO: 464966 - DNA, 75 bp, Homo sapiens
gcagggggccagctcaggacacacagacccagctggaactcggcacattgcaagcaacccgtgccttgatggtgg

SEQ ID NO: 464967 - DNA, 74 bp, Homo sapiens
accagtccaagctgcctggagtcaaggaaggtggaagacatgcagtgggctcatagagaacatactcacccggc

SEQ ID NO: 464968 - DNA, 82 bp, Homo sapiens
tcaggcaatttccctgagaaccgtttacttccagaagattggtggagcttgatctgaagggggatatgagactttctactcg

SEQ ID NO: 464969 - DNA, 90 bp, Homo sapiens
gtgtgaaagagggcgaccggatcatcaaaaacccgaaaacagtggccaaatgtcaggtaactcccagaagaaatgttctccaaaaacgcc

SEQ ID NO: 464970 - DNA, 100 bp, Homo sapiens
gacccgtccccggcaggggacaatgagattgagttcttcctgtccaagatccggtcccacgtggctacttgttccaaataccagaattacatcatggaag

SEQ ID NO: 464971 - DNA, 51 bp, Homo sapiens
catgctatatccagaagtaattcaacagatggctatatgcatccagttcat

SEQ ID NO: 464972 - DNA, 96 bp, Homo sapiens
cctggatgacttctcagacggggatgtctttggcccagagctggacaccctcctggactcgctggtcaaaatgtgggtacagctcctgattcccag

SEQ ID NO: 464973 - DNA, 95 bp, Homo sapiens
ttcgtcgcggcggcggtggagatcgcaggtcgctcagatgatcccagccctagactcagtgcacaagctcaggtggctgaggatattctggacaa

SEQ ID NO: 464974 - DNA, 99 bp, Homo sapiens
ataagatgatctgccatgtgttcgagtcggaggatgttattgttgtgggtaatccagccaataccaactgcctgactgcttccaagtcagctccatcca

SEQ ID NO: 464975 - DNA, 75 bp, Homo sapiens
gctttctctcgatgaggataacatccctccagaagatggttggtttgttggaccttgaactcaatcggctgacga

SEQ ID NO: 464976 - DNA, 82 bp, Homo sapiens
aggatatcgacgtcgtgatccagaagtccagagctgaggactgcctgtttgcagtttgctggcctagacctgaactcttcag

SEQ ID NO: 464977 - DNA, 50 bp, Homo sapiens
ggggcctcagggcagcctgcctggagatcaaatgatgccgtttggaaaaa

SEQ ID NO: 464978 - DNA, 82 bp, Homo sapiens
cctgcacttagccccgcgcccgagactcttccagctggagttggaggctgacgccctagtgaatttccatcagtattcttcc

SEQ ID NO: 464979 - DNA, 80 bp, Homo sapiens
ggccttcttcaggttcccgcgggaccctgccaggaaaaatgccagctgtgggacaaggagtgcaggccgcacaacctcgg

SEQ ID NO: 464980 - DNA, 83 bp, Homo sapiens
cgccaaccgcaaattcagatgcaaagccgtggccaacgggaaggcttcaacggaccacaccaaaatgccatctcaaatggaac

SEQ ID NO: 464981 - DNA, 100 bp, Homo sapiens
tgagattgaccatgctgagatggagctgcgccgaggccagatcctctggttccggggcctgaaccgtatccagactcagactacacttgctgctttgaag

SEQ ID NO: 464982 - DNA, 100 bp, Homo sapiens
ttatgaacctacggaagaagaatgtgaatggaaaccagatgaagaagatgagatttcgtgtgctggaattgatgttcgtctgtgtgatgttggtgaggcc

SEQ ID NO: 464983 - DNA, 101 bp, Homo sapiens
gggagatcattcgctgaaggaacatgagctcttggagcagcagaagcggaggagcaggtagcccaggacacagaggaggttttccgcagctacgtttttta

SEQ ID NO: 464984 - DNA, 100 bp, Homo sapiens
tctgaaccaggacctggacccggacccaaagtgccatgtctttaatggctactacaaagttctgggaaagggaaagctcccaaagcagcctgtcatcgtg

SEQ ID NO: 464985 - DNA, 89 bp, Homo sapiens
ggctcaacccaaacagctgaggccaaaaagagaggaggaagaagatttcataagagctcagagttctacagagtcaccactgaacaata

SEQ ID NO: 464986 - DNA, 75 bp, Homo sapiens
ctcagagtaaagctgctggacaacaccatggaaatatttgacattgagctgtgctccattgaagtgacttgtgaa

SEQ ID NO: 464987 - DNA, 100 bp, Homo sapiens
cgggacggccggtcaggctcgccgccgagctggtattgttgcagcatctggcagtgagactgaggatgaggacagcatggacattcccttggacctttct

SEQ ID NO: 464988 - DNA, 98 bp, Homo sapiens
gaaatcatgtcaagcgaagccttgaaaaagctgccctgagacggtgtcccgccgaaaggcacagtgaacgtgggtcaactaatcaaagaagtgaaaaa

SEQ ID NO: 464989 - DNA, 100 bp, Homo sapiens
tgaggatgaaacaagtaatcttatatggtgtgattctgctgttcagcaggagaaaatttcagagctgcaaaattatcagatgagacgtgcaggtaccatc

SEQ ID NO: 464990 - DNA, 99 bp, Homo sapiens
catagttgtgtatgatgtgacagatcaggaagtgcccaccgcgtgccccgattggagaggggaccttctgcaggttgtgcaagaggcctttgaaaaaga

SEQ ID NO: 464991 - DNA, 75 bp, Homo sapiens
cagtaccagatggggagcaccaaggtctttgtcaagaacccagagtcgtcatctggggacctggagaatgatgag

SEQ ID NO: 464992 - DNA, 75 bp, Homo sapiens
gcggaggcgaccgccatggcgttcctcaaactccgtgaccaggtggatcatccatgccatggagtatgaacttca

SEQ ID NO: 464993 - DNA, 115 bp, Homo sapiens
aaaatttattggatacacctgtcaagactcaatatgatttcccatcttgcagatgtgtagtttccgttactatggcaatgacggcagggactacaacaacctttcctatgagcaa

SEQ ID NO: 464994 - DNA, 100 bp, Homo sapiens
ccggaagaccatcttggaggatgaaaagaggctggcccaccccttctccttggccgtctttgaggtggacctgaatgaggaggaaaccattctcatcatc

SEQ ID NO: 464995 - DNA, 87 bp, Homo sapiens
ggccgctcgcggagggagaggctgcagagcgagggcaggaggagcaggagaaggaggcccggagcagggcggcctacatctctgcac

SEQ ID NO: 464996 - DNA, 80 bp, Homo sapiens
aaaagaactcttaacggccgatgcagctcttccaaagctaaggatgataatgaagataattcaaatgatgggacccagcc

SEQ ID NO: 464997 - DNA, 100 bp, Homo sapiens
ttatttatgtcatcaagaagaatgacgatgatctctatcccagactgtatccagagctctctcaatacatggggctgagtttaaatgaagaagaaatacg

SEQ ID NO: 464998 - DNA, 100 bp, Homo sapiens
ccctgtccagtcacctggagtttgtgggcatcctggcccgacataggaactgtctgtagatggacggcagatccgagtagaccaggcaggcaagtcgtca

SEQ ID NO: 464999 - DNA, 98 bp, Homo sapiens
ctagggtcgccgccactgccgcaggaggcgtgagagtgcctggtgaagaatgtgatgggatcactagcatgtctgcggagagcggccctgggacgaga

SEQ ID NO: 465000 - DNA, 83 bp, Homo sapiens
ttcaattgatgggagagtagttgagccaaaacgtgctgtagcaagagagttgataagcaatacaaatcggtaacaaaaccaaa

SEQ ID NO: 465001 - DNA, 82 bp, Homo sapiens
cctgagcctcgagccgcagcacgagctcaaattccgaggtgaatgaaaactttgccattgatttgatagcagagcagcccgt

SEQ ID NO: 465002 - DNA, 100 bp, Homo sapiens
actgcgcagggcggctgggcagctatgtcatcaacgggcgcaccaaggacctgatcttcaggtttgcatatccaaaaagcctacatgttgcaccaggaag

SEQ ID NO: 465003 - DNA, 83 bp, Homo sapiens
ctcgattgttggtgacagcgaaagaacgataacaaaatgccggagcgagatagttgtgaccgagattcccgacgagagagact

SEQ ID NO: 465004 - DNA, 99 bp, Homo sapiens
tgtgcaactgaagcctgaggtctccccaacgcaggacatcagatgttcctcctgctgatcaagagaagctttttatccagaagttacgtcagtgttgcg

SEQ ID NO: 465005 - DNA, 71 bp, Homo sapiens
aagggtgagaagcacggccgcggaagcagataccaggttcacagaatgattgcagagttcaagctgatccc

SEQ ID NO: 465006 - DNA, 74 bp, Homo sapiens
cggatcagccctgctggagccagaaatcaccgaagattcagctgtgaccacgtttgaggctctgaaggctcggg

SEQ ID NO: 465007 - DNA, 90 bp, Homo sapiens
aaaacacaggagccggagcagaagcaaagagagggaatctggaaaaattgcaatcaaaacatcatttctctaagaaaattttgggtaacc

SEQ ID NO: 465008 - DNA, 148 bp, Homo sapiens
cttctgcctctcgcccatcagcgcggcgctggccgagagccgcggctccgtgtttctggaaagtgacagcaggtatgactacgtggaagtcttcgatggagaaaatgaaaatggacattttaggggaaagttctgtggaaagatagcc

SEQ ID NO: 465009 - DNA, 89 bp, Homo sapiens
tctatgcttacggttttgagaagccttccgctattcagcagagagctattattccctgtattaaagaagatctgcccagaccctccatc

SEQ ID NO: 465010 - DNA, 51 bp, Homo sapiens
gtccaggcacgcgaggcccctcagggatttcagtcataatcggttgtctaa

SEQ ID NO: 465011 - DNA, 100 bp, Homo sapiens
ctgcaaggaccccctccggctcaagtgtgtcaagcaagcttgttctaaagacgaaggggaactccctagtgctacaggctgtttcaggaagccaattaat

SEQ ID NO: 465012 - DNA, 82 bp, Homo sapiens
cagcatcaactacctgcactttggggagcctaagtcctggtcctgaacgaggctgtgggggccctgatgtaccacaccatca

SEQ ID NO: 465013 - DNA, 96 bp, Homo sapiens
cttcagtttgattgtcctgaggatgccaacacatatattcacagagcaggtagaactgccagatatttaatgctacaagggagttgtctaacactg

SEQ ID NO: 465014 - DNA, 100 bp, Homo sapiens
ggagaccggagcgggagacagcggtgacaggagcagcggccgggagcccttagggaggcagcagtcctgcgttaactgcggccgggaggctatgagcgag

SEQ ID NO: 465015 - DNA, 100 bp, Homo sapiens
ccggggatcaccatggcggcctcattggtggggaagaagatcgtgtttgtaacggggaacgccaagaagctggaggaggagagtagttatcttgatggaa

SEQ ID NO: 465016 - DNA, 82 bp, Homo sapiens
gggtgtaccacctgtcgcggcgcgagacctctgtccaagtggtaagaagttcagaagcaagcctcagttggcaaggtacctg

SEQ ID NO: 465017 - DNA, 96 bp, Homo sapiens
ctagatgatgcaaatctacgcaagaatgaactggagacagagaatagaggaaggcggcaaattgtggaacagatggaaaagaaccaggaggagcga

SEQ ID NO: 465018 - DNA, 98 bp, Homo sapiens
ccacaggcacactccctctgggcgtcctctcaggaggcaagcagactatcgagacagagggatttgttattgcgaatgatgtggacaacaagcgctgc

SEQ ID NO: 465019 - DNA, 98 bp, Homo sapiens
ggcgcggtagcgaaggccgccgaacctgcctggctagccggcgacttgagtgacgagtatcactatgtatgctgttggggtaggaaaagccattgagg

SEQ ID NO: 465020 - DNA, 75 bp, Homo sapiens
caccgctaggccgtccccgaccttgcctgaacaaggtgctcctggagctgttggtgggaatatacccctcagggg

SEQ ID NO: 465021 - DNA, 100 bp, Homo sapiens
ctcctccctccatcctacaggtaactcctcagttacctttaatgggatttgtggccagagtccaagaaaatactaatggcagcattagccgctgttgggc

SEQ ID NO: 465022 - DNA, 124 bp, Homo sapiens
aagctatggaggcagggaccagcacgatagacctttggtggaggcagaaagcacattaccccaaaaccggtatacacagtaccccaaccccatggataaaaatgtcatctcagtaaaaatcatg

SEQ ID NO: 465023 - DNA, 100 bp, Homo sapiens
cgccatcatgagggaaatcgtgcacttgcaggccgggcagtgcggcaaccaaatcggcgccaaggagcgggatcgttacgcctacaagattcatcttcca

SEQ ID NO: 465024 - DNA, 98 bp, Homo sapiens
aacaaggatacctctttattggcttctgccaccgatccagaaccctgctcctcaccccacagtgacaaatggcctacagctgtgagagcaaatggaca

SEQ ID NO: 465025 - DNA, 90 bp, Homo sapiens
gtggctatgtgcaccagcaggcccccacctatggacatggactgacctccactcaaaggatcagtgaagtggagcccaaatactatgcag

SEQ ID NO: 465026 - DNA, 82 bp, Homo sapiens
cgaggaggacctggtggactcgctctccgagggcgacgcataccccaacggcctgcagggcttcccacggcacgacatggag

SEQ ID NO: 465027 - DNA, 50 bp, Homo sapiens
ccggggagcccgactcggaccgcggagaaataggaaggttgttgattact

SEQ ID NO: 465028 - DNA, 73 bp, Homo sapiens
ctgttcacgcaggggaaacttgaacattcgcaggtgtggagagagtatgctctgtgtcgtcccagacatttct

SEQ ID NO: 465029 - DNA, 75 bp, Homo sapiens
gccgacggcaaaggtgtcgtggtggtcattaagcggagatccggctttttgaaatgggtttcgcagagcagctgc

SEQ ID NO: 465030 - DNA, 107 bp, Homo sapiens
ttcggctcagggacgacccccgtggccatgctgaagcggaggcggccgctgctcgagatttaccaacagcatgaatcaagaaaagttagccaaacttcaggctcagg

SEQ ID NO: 465031 - DNA, 75 bp, Homo sapiens
atgaaagaagcagtagactggtatcaagaatcagtcagtagagacggggtttcaccgtgttagccaggatggtct

SEQ ID NO: 465032 - DNA, 82 bp, Homo sapiens
caacctgggagcagctggctctgggccttgaacattccgaaactgtcaagattggcaaggatgggtttgtggagttcttcca

SEQ ID NO: 465033 - DNA, 83 bp, Homo sapiens
cactgaccccgggggagcggcagcaggtgtcgtgaaaactacccctaaaagccaaaatgggaaaggaaaagactcatatcaac

SEQ ID NO: 465034 - DNA, 90 bp, Homo sapiens
agacagagtcgcttgaggactcaggagggtgtttgctgcgttgacaacagaaagtctggacagctgatcacctgaaagagaggagccaag

SEQ ID NO: 465035 - DNA, 98 bp, Homo sapiens
aactggatgtttacagacaagttcattccattattagacgttccctgccagcaacactaccacagattcatttcggaatgaaaggcttcatcatgatt

SEQ ID NO: 465036 - DNA, 75 bp, Homo sapiens
cacctgcgggaggagatcctcagcggcgccttgcggagggaccccagttttgctgttactgctcagtgtagtcac

SEQ ID NO: 465037 - DNA, 82 bp, Homo sapiens
acgtcttgcctgtgtcccacttgttcgcggcctatagctgtttttggaaggaagaaagatggaaagcggtgcagttctgctg

SEQ ID NO: 465038 - DNA, 100 bp, Homo sapiens
ctccgttgagagacgcggctttcggcaagaactggattcgtggcgccacaagctcattcactgtgtaggtacttcacatgactggaggttacggtgtggt

SEQ ID NO: 465039 - DNA, 100 bp, Homo sapiens
gcctggtttgatactgacctgtaaatcatcctttaggatcaccattaacaaggacaccaaggtacccaatgcctgtttattcaccatcaacaaagaagac

SEQ ID NO: 465040 - DNA, 101 bp, Homo sapiens
acttacccagtgatgaagtataacccaaatgtccttcccgttcagtgcactggcaaggaatggaagttggatacactttgtgacttgtacgagacactgac

SEQ ID NO: 465041 - DNA, 99 bp, Homo sapiens
cgaacgcttcgctggccatttaggagctctgctcaaagccagacgatttatgtgatcagtttggctgaaccccgtctgcccctgcagctggatgatgct

SEQ ID NO: 465042 - DNA, 79 bp, Homo sapiens
acgcggtgcgcgaccgggagctggacctccggggatttgcagatttacagaatggctgcacattaatggaaagagaagc

SEQ ID NO: 465043 - DNA, 74 bp, Homo sapiens
aatgagacagggcacaccaaactccatctgacttcgacccccaccacttctggcagtggagcagcttctcggac

SEQ ID NO: 465044 - DNA, 100 bp, Homo sapiens
aggtacggaaccagggccaggcgaggaccaactccacctccaaatgggacgtcggtcatcagatactgaagaagaaagcagaagcaagagaaaaaagaaa

SEQ ID NO: 465045 - DNA, 99 bp, Homo sapiens
gaagaccacttcagcagtttcggacctatctctgaggactgctgtggatgtttttcgaaggataattttggaggcagaaaaaatggacggggcagcttc

SEQ ID NO: 465046 - DNA, 100 bp, Homo sapiens
cctggcccgcgaggcgtgacactgtctcggctacagacccagagagaattttctctacatgtgcacccatttaaaggactcggcttcaagggaagcagct

SEQ ID NO: 465047 - DNA, 100 bp, Homo sapiens
aagctgatgaacaggaagttgtggctgaggttcaggaggaaacacaattattactagaaaacctgcatgtttatcatatgaattacttcctggttttgag

SEQ ID NO: 465048 - DNA, 100 bp, Homo sapiens
ccagagactgctgagcccgtccgtccgccgccaccacccactccggacacagggcgtgatggtgggcatgggtcagaaggattcctatgtgggcgacgag

SEQ ID NO: 465049 - DNA, 124 bp, Homo sapiens
cgagaaggtgtgcatggatctgccaaattttatatttcagatttgtggaagatgcaacaggaaggtcctcacaagatggctgaacagatgcaggtgctgtgcctctggactgcctagcctccag

SEQ ID NO: 465050 - DNA, 83 bp, Homo sapiens
ttcttagccctctacttttcaagacaccaagtgagaggccaaccagaactcccccactggaaaggattctgaaagaaatgaag

SEQ ID NO: 465051 - DNA, 100 bp, Homo sapiens
tgaagatcggccactacattctgggtgacacgctgggggtcggcaccttcggcaaagtgaaggacatatgtagagtgtgtcggtcagaaggaacacctga

SEQ ID NO: 465052 - DNA, 75 bp, Homo sapiens
tatatgagagtcgcgagtgtgcagcaggtttaccgacaagactgtgaaactttcgggatggtggtgaaaatgctg

SEQ ID NO: 465053 - DNA, 100 bp, Homo sapiens
gtgcagccagaaggcatggctcttgacagccttctagtagaatctctggaattgtgcatgcatccgagatgtttccaaatggagtgagagaacaagaaag

SEQ ID NO: 465054 - DNA, 115 bp, Homo sapiens
gagaacagctctgcgcggctttttgagcggtcccgcatcaaggctctggcagtatacagaagatgaagctaggaaaataggagtggttggctgggtgaagaataccagcaaaggc

SEQ ID NO: 465055 - DNA, 75 bp, Homo sapiens
caattggaccaagagaacaatgggaaccagtctttcaaaatgcttctccagggaaagtgaccgaggcagtgaaag

SEQ ID NO: 465056 - DNA, 82 bp, Homo sapiens
aagccaagatgcaggaatcaggagagcaaactataaggaacgtcaaggtcgtgggaaataaaaggcagttctacacagactg

SEQ ID NO: 465057 - DNA, 98 bp, Homo sapiens
gccatgattgtgaggcctccctagccatgtggaactgggacagccggaggctgaagggggccatccagaggagcacggagacgggcctggcagtggag

SEQ ID NO: 465058 - DNA, 133 bp, Homo sapiens
tgtcaagcaagctgggatctatgagtggaaaggtgaccaagcccaaagaggagaaagatgcttctaaggattgtctacaaagcctggctctgttcccagtattttgaagtcacacagtttaactgcagaaaga

SEQ ID NO: 465059 - DNA, 100 bp, Homo sapiens
atataatcccgtgttgccaacgaacagagcgtcagcatattttagactgaaaaaggtacttttgacttcagtgacattgctgtctatatattcaataaac

SEQ ID NO: 465060 - DNA, 100 bp, Homo sapiens
tgggattactgcacggggtcgcgccgtggcggagcaggttaaagaagaaggagtttagtttagaagagatatataccaacaagaattataaatctcctcc

SEQ ID NO: 465061 - DNA, 101 bp, Homo sapiens
ctactaaaccccgcccaggtcttcgacctcatgaacggaggcccacacctcggtctctggatggtcgtcagatccgtgtggatcatgcaggcaagtctgct

SEQ ID NO: 465062 - DNA, 100 bp, Homo sapiens
atggaattgggagactgactgcctatgaatttgctaaacttaaaagcaagctggttctctgggatataaataagacctactccaatgaagtccattgtgt

SEQ ID NO: 465063 - DNA, 155 bp, Homo sapiens
ggacaacatcgccctgtggatgactgagtacctgaaccggcacctgcacacctggatccaggataacggaggctgggaactgtggctgcaccatctgtcttcatcttcccgccatctgatgagcagttgaaatctggaactgcctctgttgtgtg

SEQ ID NO: 465064 - DNA, 98 bp, Homo sapiens
gggaagagtgtgactgtggtactccaaagtgtcacatttgaagacgagcactgaggatgaggaaccaactgaagaatatgaaaatgttggaaatgcag

SEQ ID NO: 465065 - DNA, 75 bp, Homo sapiens
tcctgcttctcgggctgctggtgctgtgcgcgaggctcctcactgcagcgaaggaaatgcactcggtgatggaaa

SEQ ID NO: 465066 - DNA, 97 bp, Homo sapiens
acctgtttgctgccatgctcctggcgtggacacacaagcaccccaataacctcaaggtgagaagccctaccactgcaactgggacggctgcggctgg

SEQ ID NO: 465067 - DNA, 104 bp, Homo sapiens
ctggagctgggtcagtccgccgctcaccccgcggccgcaccttcccgccttctcaggcagctgtgcctcctgctgaatgcggagaacatcttccactcaatggc

SEQ ID NO: 465068 - DNA, 74 bp, Homo sapiens
tggggccagggaaccctggtcaccgtctcctcaggacttggcgatgtacatcaatgaagttaaacgggacaagg

SEQ ID NO: 465069 - DNA, 100 bp, Homo sapiens
tcacccagccattgtcttccaatgagatgccacctggaatatcactgttcaatggctggctgtggacatcgcatgtcggacactgatgttcctgaaacta

SEQ ID NO: 465070 - DNA, 82 bp, Homo sapiens
ggagactgagtacttcgctgctctggtgtatgcaacagcgttattgcaacaggctaacgaaaacagacaaaattcaactgga

SEQ ID NO: 465071 - DNA, 100 bp, Homo sapiens
ctggcatgacgtgcaggtctctagcgcgtcttgggcgtctttggtactggcttttttaggggtctgcctggggattacccttgctgtggatagaagcaac

SEQ ID NO: 465072 - DNA, 78 bp, Homo sapiens
cctggggttactgtaaatgggaaggacaggcagagctaaacaagtgatcaggaacctccctattcaatgataacatta

SEQ ID NO: 465073 - DNA, 51 bp, Homo sapiens
atgacatccagcgacaaggactttaggtctccaggaaaagttgggctttca

SEQ ID NO: 465074 - DNA, 98 bp, Homo sapiens
acagacccgagtggaatctttagaatctcaaacaagacaacttgagctgaaagcgaaaaactatgctgaccagagacagtcattttgtttactcattc

SEQ ID NO: 465075 - DNA, 100 bp, Homo sapiens
gaagatttctgaagatacagccatattaaaactaagtaaactcgtccctgggaactacactttcagggacggaagaagtctatagtggctgtggagccca

SEQ ID NO: 465076 - DNA, 100 bp, Homo sapiens
cttggaccttggataacaccatcagtgaagagaacagagctgttattgagaaaatgttgttggaagaagaccaaaagttttggaaggtctccatcaagaa

SEQ ID NO: 465077 - DNA, 75 bp, Homo sapiens
aacaagacaacttgagctgaaagcgaaaaactatgctgaccagagtattgataggcatgtatggcctcctttatc

SEQ ID NO: 465078 - DNA, 100 bp, Homo sapiens
cgccgccgcgcacaaccgcacgtgcagctgcgtgcccagatgcgcgacctggcacggggcatgttcgtctttggctacgacaactacatggctcacgcct

SEQ ID NO: 465079 - DNA, 43 bp, Homo sapiens
gctggcgagcgccaccgcatggtgctgagcttgcaagacctct

SEQ ID NO: 465080 - DNA, 50 bp, Homo sapiens
ggaggacagctctgatgaggagggcatcctgtacctgaaccaggaggtgc

SEQ ID NO: 465081 - DNA, 50 bp, Homo sapiens
tggtctcgaactcccgacctcaggtgatctgcccacctcagcctcccaaa

SEQ ID NO: 465082 - DNA, 75 bp, Homo sapiens
gtgtggaccaggaggagcgctatatatttttgccatcatggatcagtttggagatatattagaaggtgaagtgga

SEQ ID NO: 465083 - DNA, 119 bp, Homo sapiens
gtttccctcggcgtgctactgtgcgctcgatccagcaccatggggaagcgggacaatcgggtgcagggagaaggttttaaggtgaaaacgaagaaagaaatccggcatgtggaaaagaa

SEQ ID NO: 465084 - DNA, 126 bp, Homo sapiens
aaagaggagttaagaaaagagctcttggaaaagcaccaaagggagcttcaggagggaaggtgcactacatcctccaggaggtggtgatgggtgggatggtgttggaaacaaacatgaatgaaatcg

SEQ ID NO: 465085 - DNA, 100 bp, Homo sapiens
ggagagagcaagcagggaaagagagcgccaggtgcttagcaggtatcatgatattagctggtttgacatcaagtcatttgtgagtcatcagatcttctcc

SEQ ID NO: 465086 - DNA, 51 bp, Homo sapiens
caccacagtgctgcaggctgactctgcaggatttttagactctgaggagca

SEQ ID NO: 465087 - DNA, 140 bp, Homo sapiens
ccgaccaccacatcagcccctgcagatgccaaagatgatgcctgaaaaccagtatccatcagaacagaggttgtttttgagcacgttcactctcgcagtgtcagctggggctgttttgcttttacccttctcaatcatca

SEQ ID NO: 465088 - DNA, 89 bp, Homo sapiens
ggcgcatgtctttccagcttcctggcggcatgatcatcacgggcttcatgctccagttctacaggccctggccaacgtcaacattggga

SEQ ID NO: 465089 - DNA, 82 bp, Homo sapiens
ctcttgggttttttgtggcttccttcgttattggagccaggcctacaccccagtttaagctatgaagaaggacatccctcac

SEQ ID NO: 465090 - DNA, 101 bp, Homo sapiens
ctctctcatctacaccttgcagaataacctccagtatgttgccatctctaacctaccagctgccactttccagagcttggcagagctgagagatcagcggc

SEQ ID NO: 465091 - DNA, 92 bp, Homo sapiens
ttcgcagtggtcgcttcttctccttgatatttgtcaggatacgaatcaggttctcttcaagtgctgccagggatctgaagaggtaccctgca

SEQ ID NO: 465092 - DNA, 100 bp, Homo sapiens
acatcgtcaaggtggccatagaatggccgggcgcctaccccaaactcatggaaattgatcaggattccagacagcattggaaaagacatagaaaaggctt

SEQ ID NO: 465093 - DNA, 51 bp, Homo sapiens
atgttgacgggcagccagctagctgggatatccacacagaagcagttcagg

SEQ ID NO: 465094 - DNA, 100 bp, Homo sapiens
taaagcaggtggagcaccctttgctgagtggcctcttataccccggactgcagtctatccagaagttaaaggagagattgctcgtaaagatgaaaagctg

SEQ ID NO: 465095 - DNA, 82 bp, Homo sapiens
ctttttggactatcgggatctaatcaagtttgatctgtggatgaaatgaatcatgattttcaagctcttgcattagaatctc

SEQ ID NO: 465096 - DNA, 99 bp, Homo sapiens
ggggctcccggaattctacaacattcctcagggatacacagtggagaagcgagagggctacccacttcggccagtcctgagaaacatctttgtcctcac

SEQ ID NO: 465097 - DNA, 100 bp, Homo sapiens
tggagtgtgaccacctgaggagtggggtgccaggtggaaggagaagaaagggacttccaaggaagatgccatgaaagcttacatcaacaaagtagaagag

SEQ ID NO: 465098 - DNA, 50 bp, Homo sapiens
cccgtgtacgtgcctgtgcctaaaattcatgatgttgctatcaaaagttg

SEQ ID NO: 465099 - DNA, 99 bp, Homo sapiens
ccacagtgtgcacagatgaacgaagttatggcagagttagctaaagaactccctcaagtttcatttgtgaaggtccacgctgcttttatgagctgtaac

SEQ ID NO: 465100 - DNA, 100 bp, Homo sapiens
ccgggatcgtgaccgagaccgtgaccgagagcgtgaccgagagcgcgaatatcgtcatcgttagaagagtgcacggcctggagatagagggcagggactg

SEQ ID NO: 465101 - DNA, 90 bp, Homo sapiens
cgcccctcgggccgacgccatgaagatcaaagatgccaagaaaccctgtcagtttaggggctggtgcaaaggatgagttgcacattgttg

SEQ ID NO: 465102 - DNA, 75 bp, Homo sapiens
ctgtcttggaggacatcagaagggcgtctactgggctgtctgaaggggctggcaggcagtgtgcgtgggttgcag

SEQ ID NO: 465103 - DNA, 100 bp, Homo sapiens
aaaaaaaccagactttctgcctgatcatcccattgtactgcaaaaaccagaaaagaaagctgcattggaaaaggagcgagaagaacggatagctgaagct

SEQ ID NO: 465104 - DNA, 87 bp, Homo sapiens
agagaagaaggaacggaaacaaagttattttgctcgttcaattttgtggggaaattgcttggaccaagaggaaactccttgaagagg

SEQ ID NO: 465105 - DNA, 99 bp, Homo sapiens
gaacccgtgggcctgtggactgcagcctcggcggtcagcagacctaatctgggagcctgcaagtgacaacagcctttgcggtccttagacagcttggcc

SEQ ID NO: 465106 - DNA, 82 bp, Homo sapiens
agaagggtgggaagccagagccgcctgccatgccccagccagtccccacagcataacagcctgtgggccaaagctgaccaac

SEQ ID NO: 465107 - DNA, 97 bp, Homo sapiens
agcctggcttcacctcggggactggtgtgctgggcatcaaggtgaagatcatgctgccctgggacccaactggtaagattggccctaagaagcccct

SEQ ID NO: 465108 - DNA, 100 bp, Homo sapiens
cggggaccagcagctgtcgccgccgctctcagagacctccccgattttgacagagaagcaggccaaacagctcctaagatctcggcgacaggatagacca

SEQ ID NO: 465109 - DNA, 100 bp, Homo sapiens
tctcagaagagtgagagagagctattagagattgtgaagaagaatttcgatctccgccctggggtcattgtcagtgtgtcccggcatggatatccggaac

SEQ ID NO: 465110 - DNA, 123 bp, Homo sapiens
ttcaccagtgacccagtcagtgcccttcagttaaagaccaccaggagcacacttgtccggtgtctaaaagactatggagaatttgaagttgatgatggcacttcagtcctattaaaaaaaaat

SEQ ID NO: 465111 - DNA, 51 bp, Homo sapiens
gcgctcggtccagtcttcccggctggaagaacatacggtccctaatgagca

SEQ ID NO: 465112 - DNA, 98 bp, Homo sapiens
ggacatgtctaaccccggaggccggaggaacgggcccgtcaagctgcgcctgacagaaaaacacaccttgactttagtcagatacatcactgtctgtt

SEQ ID NO: 465113 - DNA, 100 bp, Homo sapiens
ggtggtgcttccaactgcgggacaggaagtggccgtagcggcttgttggataagtaccaaaagaattggtggagctccatttgaagctgatgaggaaaat

SEQ ID NO: 465114 - DNA, 83 bp, Homo sapiens
cgggccctgcccctacatttggagcctggacacgcagtacagcaagacacatgcctcactcctgtcagcagttccaccttttc

SEQ ID NO: 465115 - DNA, 49 bp, Homo sapiens
aggagagaatgctgacagtcctgcaggttactataacaacagtaccaag

SEQ ID NO: 465116 - DNA, 82 bp, Homo sapiens
gaagaatgaaaccggcttgttgtcttcaattaaaaaatttattaaaggaagcacacctaagctttaaggaagcctcctattt

SEQ ID NO: 465117 - DNA, 100 bp, Homo sapiens
tcaagcggctgcagctccagatggacaacctggagtcccgcgtggccctcgaatgcaaggaaggttattcacagtcctatggtggttatgagaatcaaaa

SEQ ID NO: 465118 - DNA, 100 bp, Homo sapiens
gggaggcaacagtgtcatttgatgaccctccttcagctaaggcagccattgactggtttgatgaaaatgtggacacagacttgccaggcagcctggggca

SEQ ID NO: 465119 - DNA, 100 bp, Homo sapiens
gaatttaagtcccatcagtggtttggagcatctgtgaggtcgaaacaggataaaattttggtagcacagagtgaagctgaaaagaaattgaagaaggatg

SEQ ID NO: 465120 - DNA, 50 bp, Homo sapiens
aaaggaagtaccaggacttgcacagatgttctcaaatagtgatgaagctg

SEQ ID NO: 465121 - DNA, 100 bp, Homo sapiens
ccggccgtcagcagcatgcagggtcaaggcacttctggaagaaatattggagcgggtgacagacgagtttaacatcccagaactgatggccaaagtggag

SEQ ID NO: 465122 - DNA, 88 bp, Homo sapiens
gtcttcggtggactccttcggcagtccacccaccgccgccgcctcccagcacttctccaccgacccagtggccgcctccatcatgaag

SEQ ID NO: 465123 - DNA, 100 bp, Homo sapiens
cgctgtgtcaggacccgaaatccttcctgtacctcttgagccaggccgaccccgacccggactcggacaagggaagaaggagaaagggccaacccctgaa

SEQ ID NO: 465124 - DNA, 100 bp, Homo sapiens
cacggccgccaccaagatgagcagggcccttgcggagttccgcgtccgaggtgtgaaggggccttcctgctgtgctggacgcccttcttcgtggtgcaca

SEQ ID NO: 465125 - DNA, 100 bp, Homo sapiens
ctggtccacaggtccatacatgaagtcaccataaggatcccaagagaagccactttgtcttaattgctggggagccattaagagaaccagttatccaaca

SEQ ID NO: 465126 - DNA, 74 bp, Homo sapiens
ccggctgcagcgagcgctggacggagaggaaagcgcttgtcagctcatttgcagcttacatttttggtttcttc

SEQ ID NO: 465127 - DNA, 100 bp, Homo sapiens
caagcacggcctcagctacgaagtgaagcccttcctcaccgcgctggtggacatcgtcagatctgaacgaggctgccatcaccactttctctgtccttgg

SEQ ID NO: 465128 - DNA, 78 bp, Homo sapiens
accgaatgggccgaagtagggggagggttcctgagttacctgaaaaggctattcaggattatgaaactgctcaggaac

SEQ ID NO: 465129 - DNA, 120 bp, Homo sapiens
taaacgaggggctggaacacctcgccaaagcagagaaataattcccaacttcttctggagcctggggatcggtcacactggtgcgtggtggcatactgggaggagaagacgagagtgggg

SEQ ID NO: 465130 - DNA, 100 bp, Homo sapiens
ggaatttgagttctttgagaacaccattgtgtcccgcattgcccgcatctgcaaggatttcaaatatgcgtgcattagagaatgattttttcaattctcc

SEQ ID NO: 465131 - DNA, 100 bp, Homo sapiens
ttttaacatttgggagaaacacagccagaagtttcattcattggctcccatgtactatcgaggctcagctgcagctgttatcgtgtatgatattaccaag

SEQ ID NO: 465132 - DNA, 97 bp, Homo sapiens
ctgaggcagcggcaggctcaggtgcagccgctgatcatgaagagtgaagtgttgagagtcacccatgagctccaagccatgaaggacaagataaaag

SEQ ID NO: 465133 - DNA, 83 bp, Homo sapiens
gtggccgtggtgcgggctctgcagcgagcgctcgatggaacctcatcccagttacggctagatgaggctcaagaagcagaatg

SEQ ID NO: 465134 - DNA, 75 bp, Homo sapiens
ctgaaacagaaattctggaacacctatatggacgagattgaggagctgcgggccgagatgctggagatgcgggac

SEQ ID NO: 465135 - DNA, 75 bp, Homo sapiens
ggctgctcccatcattgatgtggtgcgatcgttgcctttccccatcttcctggttctgctccttcgtggcctagt

SEQ ID NO: 465136 - DNA, 109 bp, Homo sapiens
caaaggaaaagttggtgattctctgctagatgttgtggttgaaaataatctagatattgatggctttgtaatgtgtgtggctggtattggacttgttgtattattcttc

SEQ ID NO: 465137 - DNA, 50 bp, Homo sapiens
gcctcctttgactccacaaaaatagagacattgggatctaccagtattat

SEQ ID NO: 465138 - DNA, 97 bp, Homo sapiens
atttctcctcctccgctgggaactgcaaaacccatttatggcggttggctgctcctggctccagatgggaccgactttgacaacccagtgcaccggt

SEQ ID NO: 465139 - DNA, 82 bp, Homo sapiens
ctttctgatttcagagactctccgcaacagaaccatctcaagaagctcttcgtgggcggtcttgactggagcacgacccaag

SEQ ID NO: 465140 - DNA, 90 bp, Homo sapiens
cgacggcctgtccggcactgctgaaggagtcaaattgactttatcagctttaatcgatgggaagaacttcagtgcaggaggtcacaaggt

SEQ ID NO: 465141 - DNA, 100 bp, Homo sapiens
agaacctcaccatgccgggcctcaggttcgacaacatccagtcattgaagtcaacaagagagacatagtcttcctggtggatggctcatctgcactggga

SEQ ID NO: 465142 - DNA, 87 bp, Homo sapiens
gtgcaccggggcggtccgttgccaaagccaggatgtaatccctgttcattactacttaatacctccaccaacaaagactaagaatgg

SEQ ID NO: 465143 - DNA, 98 bp, Homo sapiens
agctctttcggaacccgcaccaagctctgctccacactgccaaccggccagaggacgagtgtgatgtggacgagtgccaccgcgtgccgccgccgtgt

SEQ ID NO: 465144 - DNA, 100 bp, Homo sapiens
gcgatgagtggtctcggcaggctcttcgggaagggctgccacctaaaagactttggagatttgagttttactccagtccccaaagatgatctctacaaca

SEQ ID NO: 465145 - DNA, 74 bp, Homo sapiens
gaagagaagctacaaaatatgctcgatggatagcattcactggaagaacaagctgaaagctggatacctaatgt

SEQ ID NO: 465146 - DNA, 75 bp, Homo sapiens
cctgaaggtaccgcggacctcgccccgggacagcgaggagctgagggaccctttccagggtctccctccactgct

SEQ ID NO: 465147 - DNA, 75 bp, Homo sapiens
gggtggtgggatctgaatacacacggttggatggcaagcatgtggtgtttggcaaagtgaaagaaggcatgaata

SEQ ID NO: 465148 - DNA, 75 bp, Homo sapiens
ttcactcaacaagtagaaacgtgagagaagaaaaaacacgctcagagataacctcaaagtggaagatgctttcta

SEQ ID NO: 465149 - DNA, 75 bp, Homo sapiens
tgaagttgaatctgcaaaacttattcgggataaagtagcagggagagtcccgtattctcagagtaaaagttgttt

SEQ ID NO: 465150 - DNA, 100 bp, Homo sapiens
gttgagcagagggaaagggataggagaaggatgtggactgcagtgctgcagtgccagatactctcagcccctgcatgaagaaatagcattgcataaacac

SEQ ID NO: 465151 - DNA, 83 bp, Homo sapiens
caccgcggcttaaatgatgtattttgtgatcgcagcgatgaaaggcttcaacggaccacaccaaaatgccatctcaaatggaa

SEQ ID NO: 465152 - DNA, 82 bp, Homo sapiens
catcgtgctcaaggccggcgagatcgagctcgagctgcagcgggttgctcgtgggggccccgcgggcagaagcgcttccact

SEQ ID NO: 465153 - DNA, 75 bp, Homo sapiens
gaatgtgaacatggttttggaagagttgtctgcaaagtgcctctggatatggacatttctggaattacagagccc

SEQ ID NO: 465154 - DNA, 75 bp, Homo sapiens
aaagttgcccaaggccaatcacaacaacatccgcgggacgaccctgggacagtctccactggggcagatccagct

SEQ ID NO: 465155 - DNA, 80 bp, Homo sapiens
agaactcagcgaggattctgaggcctgctggtgggtacccttgatgttgtgttggactccagcgcccgggtcgctcctta

SEQ ID NO: 465156 - DNA, 76 bp, Homo sapiens
aactgttcaaccaggagaaaagacagcaatggaccgagaaatatcctccagtcagaaactgagaaattaacttcac

SEQ ID NO: 465157 - DNA, 83 bp, Homo sapiens
gagactcctgccctccacccccaagatttggtcgtattgggcgcctggtcaccagggctgcttttaactctggtaaagtggat

SEQ ID NO: 465158 - DNA, 80 bp, Homo sapiens
aagaacctgaacgaggacacgaccttcctgcccttcacgctccaggagctaggtgagaagccctaccactgcaactggga

SEQ ID NO: 465159 - DNA, 83 bp, Homo sapiens
tcccggaaactccagcgtgtctccagccgtggagaagacagactgctgctttggacctgttggtaatgatggcctgagctaaa

SEQ ID NO: 465160 - DNA, 80 bp, Homo sapiens
agcttgacgcgctggagcttgagaggcaagtgtcgtggacttcgtactgctaggaagctccgtagtcaccgacgagacca

SEQ ID NO: 465161 - DNA, 88 bp, Homo sapiens
acgtatttctactaaggaatgggctaaatcaactggatatgatccagttaaactttttaccaagctcagaattctgcaaatgcagatt

SEQ ID NO: 465162 - DNA, 101 bp, Homo sapiens
aaagcttccaggaacaagccatggagggtcaaagaaactcctggttgagctcaaagttattttacattgaatatgtttatccagaagccagagacagacaa

SEQ ID NO: 465163 - DNA, 76 bp, Homo sapiens
cgcagcaaagagggctctatctggaaccaccagaaaaacaagagctggatctcagaggatgacttctaccggcctt

SEQ ID NO: 465164 - DNA, 98 bp, Homo sapiens
gcaagcccacgggtagcagccgaggccccagaatggatgccccttacctagacctggccccctacatgcccgactactacaaacctcagtacctgctg

SEQ ID NO: 465165 - DNA, 75 bp, Homo sapiens
aggttccagaggcttctgaagcaagctgagaagcaggttatcaatactctggctgaccatcatcatcgtgggact

SEQ ID NO: 465166 - DNA, 75 bp, Homo sapiens
tcgacaagtccgggagctgggcggccatttaccagatgtcctaaacgatgctatatttgatgaagatcatgatga

SEQ ID NO: 465167 - DNA, 100 bp, Homo sapiens
ttgcagcaccatcaacagatgcccctgataaaggatacgttgacgaaggggaggaccaggctggcgatgaagatgaagatgatgaatgggatgactgagt

SEQ ID NO: 465168 - DNA, 75 bp, Homo sapiens
caaagccttcttcaagaggaccatccaggtctcttcaagaaaatgaggaggaggagattgggaacctagagcttg

SEQ ID NO: 465169 - DNA, 82 bp, Homo sapiens
atttgaacaaagcgctagcaacttctaccaacaacagaaacattgaatgaggaggataaagcaaagattgctaaaagcaaga

SEQ ID NO: 465170 - DNA, 100 bp, Homo sapiens
ccttggcctctcctgggatcggcccaaggccagttctccgcagtcttgttggcctaggcacaggcgagttaacggcactatttttggtggcatctgtgag

SEQ ID NO: 465171 - DNA, 80 bp, Homo sapiens
cgtggtggaggcggcctctctggcagcagacatcagccacgcatctgaccttgttggctttatcctgtggataaacgcag

SEQ ID NO: 465172 - DNA, 51 bp, Homo sapiens
ccactcacagtgccatccctgccccagactgcaaaattcaaaatggggctc

SEQ ID NO: 465173 - DNA, 100 bp, Homo sapiens
actccgccgccaaactggaggagcgacggaagccagaccccaggagtttctccttggaccaagatgactgatggaaaactctccacctctacaaatggcg

SEQ ID NO: 465174 - DNA, 100 bp, Homo sapiens
taacgaaccacaaatacctggctatattgtcgatgattcagtcagagattcatgatgttgctatcaaaagttgagaaattgtcagaagaaatcatggaga

SEQ ID NO: 465175 - DNA, 115 bp, Homo sapiens
cctctctgaaatctgacacctgctctcccggcaaggaaacttcgcaggctgaactgataaatttcaaacggaagagagtggcagcatttagaaagaatctaattgaaatgtctga

SEQ ID NO: 465176 - DNA, 100 bp, Homo sapiens
cccgttctctgatttgcagcaggttatcaactggcaaacatctcttcacattccaccacaagctaaactcagtcctgaagcttctgatcttattattaaa

SEQ ID NO: 465177 - DNA, 83 bp, Homo sapiens
ggaaaacggggatttccaccatctgtcccaggtcccagctagtccacagggaccagcagtgccatggaaggatttaacatgtc

SEQ ID NO: 465178 - DNA, 75 bp, Homo sapiens
tctggcaaacagtgtttgcctctggttcagctcatacaacagcttcttagataaagagttctatctgtcttctac

SEQ ID NO: 465179 - DNA, 50 bp, Homo sapiens
gcaagagcgatgtctactacttcagttggaaaatggatataccttatttg

SEQ ID NO: 465180 - DNA, 50 bp, Homo sapiens
agttcaagaagaacactccagaggtgactctgacatcattagaagcatgc

SEQ ID NO: 465181 - DNA, 75 bp, Homo sapiens
cagatacaactatactgtttgtaaaaggagaagcacctgtggaatcctctcaagaggaacagtcattgtgtgaag

SEQ ID NO: 465182 - DNA, 99 bp, Homo sapiens
ggagctgtccacacagtcatctttgctggcttcagtgcagagtccttggctgggaggatcaatgatgaaactcccacgttaacccacgaaaccttcaaa

SEQ ID NO: 465183 - DNA, 98 bp, Homo sapiens
caaccacctgaatgagctgggccaggtggaggaggagtacaagctgcggaaggtgcgggcggcacccagagactcacccgtgctgttgggaagtcgct

SEQ ID NO: 465184 - DNA, 102 bp, Homo sapiens
atccagcgactacgcggccgcggagacctacctgcggcgtcggcagctgctgctccgagtgaacagcagagaatttcaaaggaccttgctaatatctgtaag

SEQ ID NO: 465185 - DNA, 100 bp, Homo sapiens
tctgtttactctgaattaccatcagctgaagggaaaatgaagccccatggctgggggttatggagtgatgggtgacgatggttctattgattatactgtt

SEQ ID NO: 465186 - DNA, 80 bp, Homo sapiens
gaagagtaccaaggctgctagtgaacagcgacgtgacgcaaacatgcagatctttgtgaagaccctcactggcaaaacca

SEQ ID NO: 465187 - DNA, 100 bp, Homo sapiens
cagggaatcatcgtcgtgaacacagaaggttcatcatgcctagtggcgtataagaagaccccgccaccggtccctccacgcaccacttcaaagccgttca

SEQ ID NO: 465188 - DNA, 100 bp, Homo sapiens
tggccccaggtgtaagcgcagaaagcaggcgaacccgcggcgcaataacgttggagtgcttagtgcagttggtgagagcgggagccacactcaacgtctc

SEQ ID NO: 465189 - DNA, 75 bp, Homo sapiens
ggaacccgacatggattccacagactcgctctttactgagcgtgtttgaagaagatgctggcaccctcacagact

SEQ ID NO: 465190 - DNA, 82 bp, Homo sapiens
catcgagtgtgacgtggtgaaagatcaatgtccgagttaccaccatggatgcagagctggagtttgcaatccagccaaatac

SEQ ID NO: 465191 - DNA, 100 bp, Homo sapiens
gctgggcagaggcttgggccgccgagctggacccggaccggttttggaggaacccatttactgttacaccccgcacaacttcacgcgcgaccaggcgctg

SEQ ID NO: 465192 - DNA, 51 bp, Homo sapiens
tgagatgctaggaagacttggcttagcagtgtctgcaaaaacgaatctttt

SEQ ID NO: 465193 - DNA, 74 bp, Homo sapiens
ccattgcatgtgggaccttcagccgtgaactgtttttatgactacgcaagcaaagtgaatgaggagagtttgga

SEQ ID NO: 465194 - DNA, 99 bp, Homo sapiens
gacacgagcggcgccttctcagggctcgacagcctcagcaagctggggagctgatcaccttctattactattggaagaagacccccgaagcagccagct

SEQ ID NO: 465195 - DNA, 90 bp, Homo sapiens
cggagctgagaggagctgctgctcggaccagcgcggttttgcacactagggaccaagaagccctcggggacactgctgagaaaagactgc

SEQ ID NO: 465196 - DNA, 74 bp, Homo sapiens
gtgaaagggtggggagcagaataccggagccatgtggctagaaatcctcctcacttcagtgctgggctttgcca

SEQ ID NO: 465197 - DNA, 98 bp, Homo sapiens
cattgaagcagaggacaacatgaactgccagtcaagtaagggagaattgactacgcttatacatcagcttcaagaaaaggacaagttactcgctgctg

SEQ ID NO: 465198 - DNA, 88 bp, Homo sapiens
cactagaaaagaagtctaactatgaagtattagagaggaaactgaagagacatcctcacaagagtctgccgaagaggactagggggcg

SEQ ID NO: 465199 - DNA, 96 bp, Homo sapiens
caaaccaggacgtgctggatgacagcgttcagactcctcaaggcaactttttcctgtacctgtgaggagcagtacgtgggtactttctgtgaagaa

SEQ ID NO: 465200 - DNA, 100 bp, Homo sapiens
ttccagcatgcaggggctgctcaggttcaagcactgtcttcctgttggccctgacaatcatagccagcacctgggctctgacgcccactcactacctcac

SEQ ID NO: 465201 - DNA, 48 bp, Homo sapiens
aataaaccagctgaacttataggtgccgtgagcgatgtggagatgcag

SEQ ID NO: 465202 - DNA, 75 bp, Homo sapiens
tggaccctggagtacaccccgcagcacagccgcgacttcaaggaatactcccccagttgcaagaggcgcaggacc

SEQ ID NO: 465203 - DNA, 75 bp, Homo sapiens
ggggagcgcctcgtcgacatgagtgatgtggaggaaaacaacttcgagggcagacagctgctgaaatgggttgcg

SEQ ID NO: 465204 - DNA, 75 bp, Homo sapiens
gactggtgtcaccgggatcatgattgcccgattacagagtcacgggagacaccgttctgtgttactgctgtggcc

SEQ ID NO: 465205 - DNA, 90 bp, Homo sapiens
tgatgctaccatatttaaacttgaattacctttgaagcagaaggggtgaccaagaatatggcccaggtgaccaaagccctggacaaggcc

SEQ ID NO: 465206 - DNA, 75 bp, Homo sapiens
catcgagtctctgcgaacattccttttaacctatgtcttacaaaggcccaagtacggcggcgaagtgctaaaagg

SEQ ID NO: 465207 - DNA, 75 bp, Homo sapiens
gagcgccgcgcacttcgtcatgttcttcgcgccctgagtgtgaacatggctacgcctcttcattcccgtccatgc

SEQ ID NO: 465208 - DNA, 87 bp, Homo sapiens
tatatccagaatcatggacggacagaggatgcacttgtccaatcctcaatcctgactcaatgatgaggcacggcggctcattgctga

SEQ ID NO: 465209 - DNA, 98 bp, Homo sapiens
tgctgatcgggacccccccgcagaaggctgaagccgacgtagcttctctgaacagacgcatccagctggttgaggaagagttggatcgtgcccaggag

SEQ ID NO: 465210 - DNA, 121 bp, Homo sapiens
caacttcgggccccggccccgcgcgccccggcccggccccgcgaggtcaaaatgcagatcttcgtgaaaacccttaccggcaagaccatcacccttgaggtggagcccagtgacaccatcg

SEQ ID NO: 465211 - DNA, 90 bp, Homo sapiens
gaaattcggagggtggccctggactcgttggtgctgcagggacacggccaacacggtgaaggaaaagttcgggaggaagctttatgaatc

SEQ ID NO: 465212 - DNA, 83 bp, Homo sapiens
cccgcggtggagcgggacacgaacgtgttacagaatgtctgaaggggacagtgtgggagaatccgtccatgggaaaccttcgg

SEQ ID NO: 465213 - DNA, 74 bp, Homo sapiens
gaacgtcttgcaacagtggccgcacgcatagaaatgcactcggtgatggaaagagagccactattctgaagaac

SEQ ID NO: 465214 - DNA, 100 bp, Homo sapiens
gttctcaattatttgagcctccgggcgacagagcaagaaaaggctgctggtggtctacccttggacccagaggttctttgagtcctttggggatctgtcc

SEQ ID NO: 465215 - DNA, 82 bp, Homo sapiens
tgttgcagggttttgtttatataactcaagttgtttggctaaattcttcaggaaggatgccaattctgcgcttctcagtaac

SEQ ID NO: 465216 - DNA, 50 bp, Homo sapiens
aaactaaagtacatttattctgccaggacaagggtgtcccccacctgaag

SEQ ID NO: 465217 - DNA, 84 bp, Homo sapiens
aaaccccttcgcatggcagccggttccggttcggaaccaaccggtgagccctctcctaagagacccaggggaagacccaaaggc

SEQ ID NO: 465218 - DNA, 90 bp, Homo sapiens
ggaccagcagctgtcgccgccgctctcagtgttgctgtggatgtatggtcgacgctggctgatttctgtaacatactgactgcagtgaat

SEQ ID NO: 465219 - DNA, 82 bp, Homo sapiens
acactggaaaactggatgctgcagacactgaacgaggagccagtgtgggcaggcttggctgaaatgagaactgctgaagcaa

SEQ ID NO: 465220 - DNA, 87 bp, Homo sapiens
gcggttgcttgggtgggacaacaagtccacaacctgcttctcacctacctgatagataacgaaggaggcccaacttcattcaataag

SEQ ID NO: 465221 - DNA, 82 bp, Homo sapiens
agatggcggatgccctgcagtacctgcagaaggtctctggagacatcttcagcagcctcttctgaaacagtctccctggagc

SEQ ID NO: 465222 - DNA, 100 bp, Homo sapiens
cccccaccgtttccccctgttgcagggttttgtttatataactcaagttgtttggctaaattcttcagtgataacctcctaaggagagcagcctgtcaag

SEQ ID NO: 465223 - DNA, 80 bp, Homo sapiens
cctctcccggccctctcgcgctgcactgtctctccgacgcaagactgtcccggcccgggaatacaggagtttccagaaaa

SEQ ID NO: 465224 - DNA, 75 bp, Homo sapiens
tcagtaaaaaggagctcaactccaaccacgacggggccgacgagacctcaggctgaccccgcactacatctaccc

SEQ ID NO: 465225 - DNA, 75 bp, Homo sapiens
ttgatggaatgtgctttagaagttaaaaaggtctcggcgcggaagatggccggcggcgtggacggccccatcggg

SEQ ID NO: 465226 - DNA, 100 bp, Homo sapiens
caattttcaagcattgaagaggaggacaatcctatctggtccttgattggcagcctaaggttcccatcgtgagtttcaggaagggaaattcatggaggaa

SEQ ID NO: 465227 - DNA, 100 bp, Homo sapiens
atctccttagtgaggctcagagatgcctgtaccgtgatgtgacgctggagaacctggcacttatgtcctccctggctggattgccttttgcaattcttac

SEQ ID NO: 465228 - DNA, 98 bp, Homo sapiens
ttgtctccggtcgttcccgttcaggagcaggtgtattacccaaatttgggatggatgtgcattgatgccactgatccagagaagggaaactggctgcg

SEQ ID NO: 465229 - DNA, 100 bp, Homo sapiens
gtaaggaagaaattgagaaagaatgtgaagataccagtttgcgtcaggagacacaggtgttgcagtatctcaacaaaatggctgggaatgaatacatggg

SEQ ID NO: 465230 - DNA, 100 bp, Homo sapiens
ctcccgagtggctgggactacagtttaagatgctaccagaactatttcaagatgatgagaaggccatcagtccaacttcagccacctcctcagggcgcac

SEQ ID NO: 465231 - DNA, 83 bp, Homo sapiens
ctcatggatggacgaatcatctttggatacaaagaagacatggatttgattgacatactttggaggcaagatatagatcttgg

SEQ ID NO: 465232 - DNA, 97 bp, Homo sapiens
gagactggagtcgaaggccgtgaggtgatttgatgaaggctgctgcaggagagttcgcagatgatccctgctcttctgtgaagcgaggcaacatggt

SEQ ID NO: 465233 - DNA, 75 bp, Homo sapiens
caccttattcctgtgatccaagcggcagtgatttgcctcaaggctaacagagaccctgatgctggaattgatgaa

SEQ ID NO: 465234 - DNA, 90 bp, Homo sapiens
taaaatggatatgaaaagtgaagaaagtgatcataggagaaaaccatttcaggtggttaccctaacagctaatgataagacaagtgtttc

SEQ ID NO: 465235 - DNA, 100 bp, Homo sapiens
cctattatctcccctgcccagagatcttgtattttcctacgttggaatagatcctctaagtatttggatgaagcatatgaagaaatggttaacatcattg

SEQ ID NO: 465236 - DNA, 74 bp, Homo sapiens
cacacctccggaccgagggacgcgggtaagaagtttgatagctgtaggactgggtgttgcagctcttgcatttg

SEQ ID NO: 465237 - DNA, 111 bp, Homo sapiens
cgcaaagcggggacccagaccctggagcctcagttggaagcagccgatccagcctgcggagcctgtggggcagcattactctactgactggcagagacaggagaggtagat

SEQ ID NO: 465238 - DNA, 50 bp, Homo sapiens
ccggaccccggcgcgctgaatgcaggacccagatgatgtggtaccagttg

SEQ ID NO: 465239 - DNA, 100 bp, Homo sapiens
tccatggtagctgggatgttagggctcagagctgttgcgcagccattggtacctgtattggggaaacatagcatacaagcaagaagcttacagcctcagt

SEQ ID NO: 465240 - DNA, 78 bp, Homo sapiens
actgggggattcgcagggaggatgtcgggacaccccggaagctgggaaatggatgacactcctgtccaggacactaaa

SEQ ID NO: 465241 - DNA, 50 bp, Homo sapiens
tgacgacaggcagcaaaagaccaggtactgggcctaatcgctacgtgcct

SEQ ID NO: 465242 - DNA, 82 bp, Homo sapiens
ctcgatcttgggacccaccgctgccctcagctccgagtccagggcgagatgcgagccacccctctggctgctcctgcgggtt

SEQ ID NO: 465243 - DNA, 82 bp, Homo sapiens
ctggcaagaagcgtgcggggaccgatggactaatagggatgccaaaggaaaaatatgatcctccagatcctcgcagaattta

SEQ ID NO: 465244 - DNA, 83 bp, Homo sapiens
ccggtgtgtggcgcgcccagagccccgcgtttcagccctagggaagatagcctgggctggaagctcttctacgtcacaggctg

SEQ ID NO: 465245 - DNA, 74 bp, Homo sapiens
cgccgtggcgcggcccggctgacaggttttttgcatgtctgacacccatgactccacctggaccttatggctcc

SEQ ID NO: 465246 - DNA, 50 bp, Homo sapiens
ttaagagcgcggccggaaagcagaaatacactttcgggaaatggcctcta

SEQ ID NO: 465247 - DNA, 100 bp, Homo sapiens
tgagcgtgctgataatggatcaactcctatgcataaagctgtattctgtacgggtggaagagatggcaacattatggtctgggataccaggtgcaacaaa

SEQ ID NO: 465248 - DNA, 75 bp, Homo sapiens
ctgcccagcttgagcagtaccagaaagccattgagatctatgagcagatgtgttcagagcaacattgttttgttg

SEQ ID NO: 465249 - DNA, 82 bp, Homo sapiens
ggcatcattgtgagtggctccagggacaggacggccaaggcccagaataaagagaccagtgttttagctgctgcaaaagtga

SEQ ID NO: 465250 - DNA, 100 bp, Homo sapiens
cggaagtgtaacgttgaggcccttcttgtgtatctggagaaaatagagatacgagatcctgacacccaatgccatccccaagggcttcatggatgggaag

SEQ ID NO: 465251 - DNA, 75 bp, Homo sapiens
gccttgcacgagatctactcctacatcaccaagtacaaggatgagccaaaacagagtggagtacgagaaaagggt

SEQ ID NO: 465252 - DNA, 98 bp, Homo sapiens
catggaagtttctctggactccctggatctccgagtcaaaggaattctgtcttcacaagcagaagtaggtaaccagttaggggccttggtacatcaaa

SEQ ID NO: 465253 - DNA, 100 bp, Homo sapiens
gttcaagatcaaaatgaagactgcctttacttaaacatctacgtgcccacggaagatggtggactatcatctccgaacactcctaagaaatggaagatag

SEQ ID NO: 465254 - DNA, 100 bp, Homo sapiens
attttcagcatcagcctgtgcaacagcacatagccaacataagaatcaaagaatcttcaggatggcagcaagtgtttacgagcccatatttggattggac

SEQ ID NO: 465255 - DNA, 55 bp, Homo sapiens
gtcgacccgggggctccgggcatgcagctcagagtcaagatctccactgaagttg

SEQ ID NO: 465256 - DNA, 82 bp, Homo sapiens
tctctttctggcctggaggctatccagcaattgtgacctggatcagcagagcattgttcacattgtgcagagaccgtggaga

SEQ ID NO: 465257 - DNA, 90 bp, Homo sapiens
ggccaccaggggccgattggccaagaagaaactaatctggattcactccctctggttgatacccactcaaaaaggacacttctgattaag

SEQ ID NO: 465258 - DNA, 95 bp, Homo sapiens
cgatcactagccaccgctcctcgcaccctgagcgctgggccacctcgtcccaggtatcactatgtatgctgttggggtaggaaaagccattgagg

SEQ ID NO: 465259 - DNA, 82 bp, Homo sapiens
taaacttgtaatctgagtaccatgaactcgaacacttgcaggataattacggtctcagatgatgataaagaaaagggagagg

SEQ ID NO: 465260 - DNA, 83 bp, Homo sapiens
ctcagccaggccgactacctcaacctggtgcagtgcgagacgctagagggatctggaaatagtatattcctatttacatggta

SEQ ID NO: 465261 - DNA, 75 bp, Homo sapiens
cagaaattgagcaagcagcaagtcggctttcagatcagatgcctgtcttagatgtcaagctgaaaacaaacaaga

SEQ ID NO: 465262 - DNA, 98 bp, Homo sapiens
agcgcttgatgtgcgcggagagcaatcgccgggacagctgcaagaggtccagttccggccgtaccgcacagacgacttcatcacgcgcctgtactatg

SEQ ID NO: 465263 - DNA, 75 bp, Homo sapiens
acattttctctctcaggcagacttcctagtgtgtactttttcatcccaggtccagtccaggtgcagcagcaagga

SEQ ID NO: 465264 - DNA, 95 bp, Homo sapiens
ggagtctgcaaagtgttaatccaggcctaaagacaagggaagatggtgaaaggaatgggaggtgctatggatttagtgtccagtgcgaaaaccaa

SEQ ID NO: 465265 - DNA, 83 bp, Homo sapiens
gtaagaagtgccttttgcctcccaccgtgattctgaggcctccccaaccatgtgcaattgtgacttaagagattaaaattaat

SEQ ID NO: 465266 - DNA, 73 bp, Homo sapiens
cagcccccgaaggccctatcaggacatggagtatgaaagacggtgccatggataacagaggctttcagcaggg

SEQ ID NO: 465267 - DNA, 74 bp, Homo sapiens
tgaacttggcattttagatctaattcaagctcatccaaaatacttgagttgtattgcaatcagctgttttttcc

SEQ ID NO: 465268 - DNA, 75 bp, Homo sapiens
gaaagaaaacaatttctcctgctctgcagcttctgttcagttgctcaggtacctgaatattggctttgtgtctaa

SEQ ID NO: 465269 - DNA, 100 bp, Homo sapiens
tggaatgtaatcaactgggagaatgtaactgaaagatacatggcttgcaaaaagtaaaccacgatcgttatgctgaatggagtctcgctctgttgcccag

SEQ ID NO: 465270 - DNA, 101 bp, Homo sapiens
gagcagttgtctgatgaagagaaggtagatgtgttggagtctcagttctcccagctgcttcatcagatcaattctacccgagactttgaaagcatccgatt

SEQ ID NO: 465271 - DNA, 75 bp, Homo sapiens
cgcaactgcatctcctacgtgtttgaggggaaaatgcttgaggccaagaagctctttgctgaagagcaagcagag

SEQ ID NO: 465272 - DNA, 100 bp, Homo sapiens
cccgagcctggacactgcgccagagttcattgtcgaaatgctggacctgtagctgtagctgagaagagcattacccaggttgcagagaaattcatattaa

SEQ ID NO: 465273 - DNA, 156 bp, Homo sapiens
ctccgccatgacccgcagaccaccaacctcctgtatctggagctgggagacaagcccgcgcccaacaccttctatgtagtgttcgagcaataccagaaggccaggacccagttcgtgcagatggtggcggagctggcgactagaccccaaaacatc

SEQ ID NO: 465274 - DNA, 88 bp, Homo sapiens
cgggctcgtggggcgcctggagtgagggttctggttcccgccggcgagataatttgcggtaaaagcctttcagtgaatgaaatgactc

SEQ ID NO: 465275 - DNA, 100 bp, Homo sapiens
gtccagcgctcggacccccctacccacgctgaacgagagggacacggagcagtattaattttaaagacccacagtttgctgaagattacatttttaaagc

SEQ ID NO: 465276 - DNA, 96 bp, Homo sapiens
cctggatgagacatttgctacagcatcccacattaagtcaacggacaaccctccatatgataagggagccttcagaatcgaaatcaactttccagc

SEQ ID NO: 465277 - DNA, 75 bp, Homo sapiens
ggctggaactgccctcctggaactcccccagcctacaacctaggagagcctgcggcatcccgggatcgtgaacct

SEQ ID NO: 465278 - DNA, 76 bp, Homo sapiens
ggcgatgccttccatcagtcggatacacacatattcatcatcatgggtgcatcgagtgtcaatccatatctacaag

SEQ ID NO: 465279 - DNA, 100 bp, Homo sapiens
gagttcagctgcacatatttactggaagatgccaaagtgcactggcaattttacagagaaaagaaaccttgtttattccctgtgaaaatgagaagatttc

SEQ ID NO: 465280 - DNA, 96 bp, Homo sapiens
cgagaaggatatcctgacggccatcgccgccgacctgtgcaaggaatgaatctgaagtctgctgcagtaaaacacagaaggctttaaaatgttttc

SEQ ID NO: 465281 - DNA, 100 bp, Homo sapiens
agccccggcactgcctggctgcgagcacatgatggcgatacgggagctcaaagtgtgccttctcgggtttggaaattttagcattcaggtgccaggaatg

SEQ ID NO: 465282 - DNA, 100 bp, Homo sapiens
catgatataccctgccattccaaaagtagaagggatcgcttacacctgagacgaactacagaacagcacgtaccagaggtggaagtccaagtcaaacgca

SEQ ID NO: 465283 - DNA, 100 bp, Homo sapiens
agaaactggacaaccaacggctcaagaatttcaagaacaaaggccgcgacttggaggacctgaaggagaagaaggagaaggtggaggagaaggcaagccg

SEQ ID NO: 465284 - DNA, 97 bp, Homo sapiens
cccttctttgtcttttgcagatgatcgccgggtgtcgatccttttccctccagtcaggccaggggttatcaccatgcaagctttgtcggaagaggac

SEQ ID NO: 465285 - DNA, 100 bp, Homo sapiens
ttcacataagaagttcttcgatgtatctaaacttggcaccaatggaaattgcaacactaacaagagagaatggaaagacagtaatcagagttctcaaaca

SEQ ID NO: 465286 - DNA, 100 bp, Homo sapiens
tttcatgcagtgacatgttgataaaaaatgatggtccagcctttcctgccaaggtggctggctgagcctaactgtgtcagaaggaatgtcaccgaagacc

SEQ ID NO: 465287 - DNA, 75 bp, Homo sapiens
ggaaaatgggacattagttcaagtagcaactatatcaggggaaaatatctttgcatttcttcgttggtatgctca

SEQ ID NO: 465288 - DNA, 50 bp, Homo sapiens
aaacgccatagaaaaggcgaaggcctcagaacttgcaactttaattcaga

SEQ ID NO: 465289 - DNA, 100 bp, Homo sapiens
tgcgtggggctagtggtgctggacgtcatcagcctggtggacaagtaccctaaggaggactcggagataaggtgtgatgaatgcagactctgctaccatt

SEQ ID NO: 465290 - DNA, 98 bp, Homo sapiens
atgactatgaggggcaggagcatgatgagctgagcttcaaggctgagagatggctgcccaaagattgtcaatctggggagctctaagacagacctctt

SEQ ID NO: 465291 - DNA, 101 bp, Homo sapiens
gttccacatcctcacgaagcaggtccagaagcccttcctcagaccggaatctgcaggagtctgaagaggaggaagtcccccaggagtcctgggatgaaggt

SEQ ID NO: 465292 - DNA, 98 bp, Homo sapiens
ccagggcagcaaggttacccaggacagcagcagggctacggtccccgttctccgtgtcctgctgtccgctgacctgaaggggttccagtacttctcta

SEQ ID NO: 465293 - DNA, 100 bp, Homo sapiens
cccggaaaacctaaccatgaagacttgaacttaatacagcaagaaagaccatcaagtttaccaccaaatttgtatcctactgtggggcttcaaacaccag

SEQ ID NO: 465294 - DNA, 90 bp, Homo sapiens
cctgccctgccctgcgcccggggcgcgcccaccgcgccgcatccatgttcgagggttggccggagacctacgacatgaatacctcggagc

SEQ ID NO: 465295 - DNA, 98 bp, Homo sapiens
tctgccttcgtcatttcctgccggccggtcggtttccggatgaaacgaggagccagagagagcaggagattcggatgggtcagatggctatgggaggt

SEQ ID NO: 465296 - DNA, 75 bp, Homo sapiens
gcggatcacagcaacaaagagagaaacagcagcaacatttttgaaaaaggacgccaggaaagcatgtgcagatgc

SEQ ID NO: 465297 - DNA, 83 bp, Homo sapiens
gcaacacagtagtggtttctgctcctaaccaaccccgacaaaaggcatcaactcaattgtggccattgcatcatacactggat

SEQ ID NO: 465298 - DNA, 82 bp, Homo sapiens
gtggccaataagttcgccaaagcgacaggagctgtggacaagagcaaggaccaagtgtggaaggtcttaatgtaccaacaaa

SEQ ID NO: 465299 - DNA, 75 bp, Homo sapiens
ggacagcgtgcagcacaagaagcagcgtgtgaagatcaagatcatctggataaagaaatagaaaaactgcggaag

SEQ ID NO: 465300 - DNA, 75 bp, Homo sapiens
agaagaagaaccggaagaaactgtccgagaagcccaaactttccccagacatggccaacaagggtccttcctatg

SEQ ID NO: 465301 - DNA, 100 bp, Homo sapiens
attagaatcagattatatggccgcatcttcacaactccgtcttacagaggacacaatgtaggaagtcttttccacatggcagatgatttgggcagagcga

SEQ ID NO: 465302 - DNA, 90 bp, Homo sapiens
gtccttgaagctttacagttaatttagtaatggaggggaaagttccagtcgcagcgctgagaagcgatcagctgaagaagaagctgccga

SEQ ID NO: 465303 - DNA, 75 bp, Homo sapiens
cccaagtgcattgcctttggaaacgaggttcttctgctggtgatgcagtgtggtcagggcattccccacctccac

SEQ ID NO: 465304 - DNA, 100 bp, Homo sapiens
ctactgcatctcacagctgaacaggttttagatggagcaggattagatattgatttccatcttgcctctccagaaggcaaaaccttagtttttgaacaaa

SEQ ID NO: 465305 - DNA, 100 bp, Homo sapiens
tcagctggagcaagaagaggacctgtgcagggcagagcaggaggccccccgagctctttcgacgtgtagcagcagctttgccgggaatggaaagcacaca

SEQ ID NO: 465306 - DNA, 75 bp, Homo sapiens
cgccgggcacggcatcgggggcctggactgcacggcccggcagcagggggaagacgttttcatcccgctaatctt

SEQ ID NO: 465307 - DNA, 98 bp, Homo sapiens
gctatggagatgtctatggaatttgcaccaaattgaaaacatctcccaatgaaggctttttcatggagccgaccgtgttcacagatgtggaagactac

SEQ ID NO: 465308 - DNA, 96 bp, Homo sapiens
cagcaaccatgagtggttccatgatgggaagtgacatgctcctattaaggaaccaaaaaagttgatgcccaaaacatccctccccacagtcaagaa

SEQ ID NO: 465309 - DNA, 100 bp, Homo sapiens
tcgtaatcaacttgactcaagattgactctacagactcagaagatgatgctaacagtgtatcgagaaccttccctgcgaacttcagaggaacttccagct

SEQ ID NO: 465310 - DNA, 75 bp, Homo sapiens
gcgggacctgctcggaggaatggcgccgccgggtttcagactgaaattcaaacagtgaataaacagttcccatgt

SEQ ID NO: 465311 - DNA, 75 bp, Homo sapiens
caactgcagctctctagaacaggaggatttcatccctctacttcaggtgtgtatgtaatatagattgcagtggat

SEQ ID NO: 465312 - DNA, 71 bp, Homo sapiens
acagaccaccccacaggctcagcaaggacagcagcaggcaagatcgtggacgccgtgattcaggagcacca

SEQ ID NO: 465313 - DNA, 100 bp, Homo sapiens
ccccggttgacatgcatgatcagagggatcggagacccactagtgtcggtgtatgcccgtgcctacctgtgccgggttaaacccatccagagtaatggct

SEQ ID NO: 465314 - DNA, 98 bp, Homo sapiens
agcgaacgaccaagagggtgttcgactgctagagccgagcgaagcatgccgacaaaaggatcaaggtggcgaagcccgtggtggagatggatggtgat

SEQ ID NO: 465315 - DNA, 82 bp, Homo sapiens
cgcggggcggtcggctgcggtggcggcgtttggatgattgtctctcggcggcggagtcgcccccaaatacatcaagatgttt

SEQ ID NO: 465316 - DNA, 98 bp, Homo sapiens
cacagtaacatacagcactttgtggagaaagtcgtcttccacttgcacgaaagctttcctaggccaaaaagagctatcagaggactcctgaaacctgg

SEQ ID NO: 465317 - DNA, 100 bp, Homo sapiens
cgggcagcgtgggtgagcggcgcagcggcggcagcggagagcgagagaggggagcaggtgtgactgcacagaaaagttacaaaacaaatttgactttttg

SEQ ID NO: 465318 - DNA, 101 bp, Homo sapiens
acgacgaggacgcgttgctgcggcgtctgcgaggcccgaggacaagagtgagaatggtgaggcatatcagagaaagaaggcggcagccactggccttccag

SEQ ID NO: 465319 - DNA, 82 bp, Homo sapiens
ccatcacctacccgcagggcctggcactggccaaggagattgtccagggccgcttccagcttggagatacacagctccgagc

SEQ ID NO: 465320 - DNA, 76 bp, Homo sapiens
ggaggaactggcccggaaacaggaggacgtgatctgtgaaaatggttcgctattcacttgacccggagaaccccac

SEQ ID NO: 465321 - DNA, 51 bp, Homo sapiens
caggacctggaaaaattacatacagcaatgttcttactcctctcctgctgt

SEQ ID NO: 465322 - DNA, 98 bp, Homo sapiens
tcgacatcgccagcatcgacatggtttccgaagtcaacatggctcctggatttggatttggaattgcaatatctggtggacgagataatcctcatttt

SEQ ID NO: 465323 - DNA, 100 bp, Homo sapiens
ctgtcaccacaccaaaatacaaatggggatctgtgactcatcagagtgtgggggttgtgaaagcctccttctgaagaaataaaaacaggtgaggatgaag

SEQ ID NO: 465324 - DNA, 82 bp, Homo sapiens
agcgccagcggccgagcgggcggcttcctggcctgggcgctccggtggcggcggaggcacagcgtcaccttcgtcccctccg

SEQ ID NO: 465325 - DNA, 82 bp, Homo sapiens
caacttttattgctagaatggcccaatatagctttgacaagttaatttggagtggcccctggagtcagtttcctacaccatc

SEQ ID NO: 465326 - DNA, 90 bp, Homo sapiens
agcagctgaacgagtgtaagcagctgaacgagaaccaagtgcggacgctgtgcgagaaggttgagataagtcgaagagtgactctggaaa

SEQ ID NO: 465327 - DNA, 100 bp, Homo sapiens
tgttggagaactacagaaacctggtctccctagatagtcgtgcaagcactgcagtgttcccattattcgattctttggcagttggtgaaaattactgatg

SEQ ID NO: 465328 - DNA, 100 bp, Homo sapiens
ccgcaagtcccccccggagaaaaagttgaagcgttataaattgacattgaacgctgtgtgagagaatctatcaacctgttttgttggactcctaaaagtg

SEQ ID NO: 465329 - DNA, 50 bp, Homo sapiens
gtccagggcagagcctcagttaggactcaggatgtgcagaaggcgatgga

SEQ ID NO: 465330 - DNA, 83 bp, Homo sapiens
gttctgttgctgccggtgaggcgggagagcgccggggccgacacgcgccgtgataccgtctgaagctcctggaggaggacgat

SEQ ID NO: 465331 - DNA, 97 bp, Homo sapiens
tttgtagtaagcttcgaaatttgctacatgacaatgagctgtcagttctggacatggcaagacatgtgccactctatcgggcactgctggaattgct

SEQ ID NO: 465332 - DNA, 97 bp, Homo sapiens
ggacatggccgccaacatgtacagggtcggaggatgaaacaggcgcctatttaatcgacagagaccccacctactttgggcctgtgctgaactacct

SEQ ID NO: 465333 - DNA, 98 bp, Homo sapiens
cagaaggtctctggagacatcttcagcaggcctgccttgctctgccaggaaccatgagtgaggcccgcagggacagcacgagcagcctgcagcgcaag

SEQ ID NO: 465334 - DNA, 100 bp, Homo sapiens
cttgaaactgcatttcttgagcataaagaacagagctggtggagttgagatctataatggagatcgtaaaataaaggtttccaacaccctggaaagccgg

SEQ ID NO: 465335 - DNA, 73 bp, Homo sapiens
ccgtgaagaccttcaatagcgaggtcaatgagctgaaggagaaaggcaacaaggccctgagcgtgggtaacat

SEQ ID NO: 465336 - DNA, 100 bp, Homo sapiens
tggagcctcagttggaagcagccgatccagcctgcggagcctgtggggcaggagcagcctcagaacaaagtgagacagtccagcctggagatgaaatctt

SEQ ID NO: 465337 - DNA, 82 bp, Homo sapiens
ggtgggtcctcgcttgcagttcagcgaccacggatgcctaaatcaaaggaacttgtttcttcaagctcttctggcagtgatt

SEQ ID NO: 465338 - DNA, 75 bp, Homo sapiens
ctttggccacatatatgcgaatctataagaaaggtgatattgtagacatcaagctcactggacagccagtgctca

SEQ ID NO: 465339 - DNA, 82 bp, Homo sapiens
gggacctgccggcacgcgactccccccgggcccaaagcggaaggtgctctaccagcgtgcacccaggaatatccaccgccat

SEQ ID NO: 465340 - DNA, 90 bp, Homo sapiens
gattgatgacatactcagtgtggcctccgtgcgtccagctgtcttgcaggtgaagaaataccaccggttgaaagaagaagccagcaagag

SEQ ID NO: 465341 - DNA, 90 bp, Homo sapiens
cttgaatttgctaatgccacacctctctcaactctctcccttaagcactgggatcaggtgaccaagaatatggcccaggtgaccaaagcc

SEQ ID NO: 465342 - DNA, 95 bp, Homo sapiens
aagcgaaattggtcattctcgctaacaactgcccagctttgaggtttccacttgagcggcacagtgacagaacctgcaatacaatcggagccaga

SEQ ID NO: 465343 - DNA, 50 bp, Homo sapiens
agcaggaatggaaatttgtcagtgaagaaaaccacaatggacactgccag

SEQ ID NO: 465344 - DNA, 135 bp, Homo sapiens
ttcacttgcttgacctacaaggaatctgagggtgccctcaatgagcacatgaccagcttagcttctgtcctaaaggttctggcccagactcgcctgggaaatggatggtggatgactccagagagcattcaggag

SEQ ID NO: 465345 - DNA, 100 bp, Homo sapiens
tcaatatgtgccgccagtgtttccgtcagtacgcgaaggatatcggtttcattaagcttttctccatggaatccttctgtacatgatgaagccagagaaa

SEQ ID NO: 465346 - DNA, 100 bp, Homo sapiens
aaaaagatgtgcagtttgaacacggctaccggctcggcttcacagatgtcaacaaggtgtagaagacatcgtggccataatgattcctgagccaaaaggg

SEQ ID NO: 465347 - DNA, 100 bp, Homo sapiens
gttatgggccagcaggagaaacactcagatggaggatgaagctgtcctggacagaggggcttccttcctcaagcatgtgtgtgatgaagaagaagtagaa

SEQ ID NO: 465348 - DNA, 75 bp, Homo sapiens
cctggaacttcatcatcatctacttcacaggaattgccattttgcacgatctgattttctggagagatgtgaaga

SEQ ID NO: 465349 - DNA, 100 bp, Homo sapiens
gggctttaggctggaagcgccttagaggagccatttttccagatgagcagcaccagcagtaagagggctccgaccacggcaacccagaggctgaagcagg

SEQ ID NO: 465350 - DNA, 80 bp, Homo sapiens
ggatgtctgagaactttgagagaccgaaaaagaaggacgtatgctctacaagtttatgttccatctgagaagatctccat

SEQ ID NO: 465351 - DNA, 90 bp, Homo sapiens
ggggctcagagatccaagtgcgcgccctggcgggtccggaccaagaatgcctgtctggggaggtggaaacaagtgtggggcctgtgggag

SEQ ID NO: 465352 - DNA, 75 bp, Homo sapiens
ctgtaccagtccgccattttgctaccaagaaagccaaagggatccttctaaagtaaatattctggtacctggtgc

SEQ ID NO: 465353 - DNA, 90 bp, Homo sapiens
aaaattcttcagacattacgagaaatgttagagaagaaagacagctttgtggaagagtgtttgagcaacacacctccacttactgagtat

SEQ ID NO: 465354 - DNA, 100 bp, Homo sapiens
ggtgaagaccacgccctgtgcacgcttggaatgctggatcggctgaccggttccctgatgtgttacctgcttctgctactgatccaaactgcagaacttc

SEQ ID NO: 465355 - DNA, 83 bp, Homo sapiens
gcttctgtctcgactgcactttgagaaggaatagcgggttttgcagcaattgttgcatatggattatataaactgaagagcag

SEQ ID NO: 465356 - DNA, 101 bp, Homo sapiens
cctgaaggagaccaggggccccaaggtattgttgcagcatctggcagtgagactgaggatgaggacagcatggacattcccttggacctttcttcatccgc

SEQ ID NO: 465357 - DNA, 83 bp, Homo sapiens
aaactggatgctgcagacactgaacgaggagccagtgggtgaggtggctttgaccccgggttgcccggccagcacgaccgagg

SEQ ID NO: 465358 - DNA, 80 bp, Homo sapiens
gcgccgcgcacttcgtcatgttcttcgcgccctggagctgacatggacccaaatcctcgggccgccctggagcgccagca

SEQ ID NO: 465359 - DNA, 100 bp, Homo sapiens
tcggttcgctaccagtgtaagaactactacaaactgcgcacagaaggagatggactgcaggatgccggctggaagaccgagaagcaccagctagaggtgg

SEQ ID NO: 465360 - DNA, 75 bp, Homo sapiens
caagatcctgggcaataccttcggcatgtgtgtgctgcagctttgtgtccctggtgatgttggaacattaatgat

SEQ ID NO: 465361 - DNA, 100 bp, Homo sapiens
gacatccaggcgaactcggcctatcgctaccctccgaagtccggtgtcagttgtacccgaggcgttctcagcagcagcaagtacctgtggtggatttcca

SEQ ID NO: 465362 - DNA, 100 bp, Homo sapiens
cacatataccatctctggctccagggaatgtgaggaaatgggtcctgatgaatatgaagagatggaagaagaggaggaggaggaagaggaggaagacgag

SEQ ID NO: 465363 - DNA, 117 bp, Homo sapiens
agcgatgttaccattgtgaaagaaggttgggttcagaagagggaaccattccccttgcaatatgtatatccatggccattgtcaccattggctatgtgctgacaaatgtggcctact

SEQ ID NO: 465364 - DNA, 75 bp, Homo sapiens
cgtcagtttgtccacatcaaaaaaggtttaatgaagaaattcattcgatgttctacacgtgtaactgtgggaact

SEQ ID NO: 465365 - DNA, 101 bp, Homo sapiens
acttaaaataattgggcagaagagaagcagtgaaggagtgcagaggcatcacctgaaagctctctgatgtaaaggatggagtaaatcaagcagcacctgca

SEQ ID NO: 465366 - DNA, 100 bp, Homo sapiens
ataaggatgtcatccccatggctgatgcagcaggcatcatccgctatgcaattggggagcgcctggaccatgctgctgagcgcctactggcacggcctcc

SEQ ID NO: 465367 - DNA, 82 bp, Homo sapiens
cggggaggtcacctgacgaggaggtgagcatgggtttatgcgtcttaggcattattgtgatggcgagcaccaattctctgat

SEQ ID NO: 465368 - DNA, 75 bp, Homo sapiens
tctggccaagctgtggatgattttaagattggcacttctctgtttgatgaagagggagccaagattgtcaaagac

SEQ ID NO: 465369 - DNA, 100 bp, Homo sapiens
cacccttccagatgatttttgagatggtgaccctctttcagatgtgggttgttcccctctatttcacagtgaagctgcactggtggaggttcctagtgat

SEQ ID NO: 465370 - DNA, 82 bp, Homo sapiens
cctggaggtgcccgaatcgcacacagcctcggaactcaagcttggagctgacggcagtgggggctgttgtggttccgactat

SEQ ID NO: 465371 - DNA, 75 bp, Homo sapiens
ctgaggagcatcatcgagaccatgaaggaccagcagaagtgatctgtgaaaatggttcgctattcacttgacccg

SEQ ID NO: 465372 - DNA, 75 bp, Homo sapiens
gtgcaaacccgagagaactggggtgtgggccgaagatatgctcatgtggtgttgaggaaagcagacattgacctc

SEQ ID NO: 465373 - DNA, 76 bp, Homo sapiens
cgaaaaaaaacgggctatgctgctgttgcgttgatgcagccaacacgaacggttgtcatgtgtaacacaactttcg

SEQ ID NO: 465374 - DNA, 100 bp, Homo sapiens
gattgagtttatattcaaccagctggaagtgaaggaaaccatcaacacaggcccttttgtgatgcgttccacgtgtaggagatgtggtggccgcggctcc

SEQ ID NO: 465375 - DNA, 90 bp, Homo sapiens
tcaggcgatgcctatccacatcaggccataggaaaaggatacagagtagagtttcatgaacctgaaacttggtggaaatttgatcctgaa

SEQ ID NO: 465376 - DNA, 101 bp, Homo sapiens
gcgccgggcgctggaggaaggggcgcgccgcgtgggagccacgcacatcgtgacagccaggtaccccgcctctctgcaatgcgtgaacatcaacatctccc

SEQ ID NO: 465377 - DNA, 75 bp, Homo sapiens
ggaaggggcaaaatttggccttcaacagttggtggttgccaagtgtgtgtcagttcctggagctgtgtcagagcc

SEQ ID NO: 465378 - DNA, 82 bp, Homo sapiens
gccagggcagaaattgagcaagcagcaagtcggctttcagatcagaaaaatctggtccttcatcagaactaggaaagcactg

SEQ ID NO: 465379 - DNA, 76 bp, Homo sapiens
tgcctgcagtttttcaccctcacgctgatgaacttgtacttcacgcaggacatggatttgattgacatactttgga

SEQ ID NO: 465380 - DNA, 83 bp, Homo sapiens
gcagagcaagcgcggggaaccaaggagacgctcctggcactgcagctacaaaagaccccacagctgtagagagagcaaacttg

SEQ ID NO: 465381 - DNA, 97 bp, Homo sapiens
gttccccggcccacagtgggggtgtgcaaacccgagagaactgggatcgcgtcttcgccaggaggactttcccccgcggattgtggagcatccttcc

SEQ ID NO: 465382 - DNA, 100 bp, Homo sapiens
aaatacttgtaaaagtcctccaaaaatgagcaagctgcaccgttttgtgtctgtgagcaaactcaagtatttttttgctgtggacacagcctacgtggcc

SEQ ID NO: 465383 - DNA, 82 bp, Homo sapiens
tcaacaccaaaaagctttctgctagggggaagagcaagaagagacgtctgcaattcgagtgggttttatcacatataacaaa

SEQ ID NO: 465384 - DNA, 93 bp, Homo sapiens
ggaagctgaaaccacagacatgactgagtcctccatgaagaagacaagaggagcagcagcggcaccgcccctcaccctggagggtcctgtaca

SEQ ID NO: 465385 - DNA, 82 bp, Homo sapiens
aacctttttcatcattcacggatggacgatgtctttggtggacttgggaaagaggttgctagaagcagcaagaaaaggccaa

SEQ ID NO: 465386 - DNA, 75 bp, Homo sapiens
gggggcgcgggcggcggcgccggcaggaagggaggaaataatgctggccatacagttgttgtggattctgtggaa

SEQ ID NO: 465387 - DNA, 78 bp, Homo sapiens
tatactgtttgtaaaaggagaagctttcaccaacaatcaccagtggtttacacaacattgcaaggagcattgaaactc

SEQ ID NO: 465388 - DNA, 100 bp, Homo sapiens
gaagaaaagcactagcaacttcaaagccgacggcctgtccggcactgctgaaggtgcttttgaagatgatgatatcacgcacgttgaaggaagtgtagat

SEQ ID NO: 465389 - DNA, 98 bp, Homo sapiens
tggattagctcaagttagctttgacaaggaggcctcgtgggtctggtagattatcctgatgatgatgaagatgatgatgaggatgaagataaggaaga

SEQ ID NO: 465390 - DNA, 99 bp, Homo sapiens
acatggagattctcttaaaaagcccccaaatacatcaagatgtttgtactggatgaagctgacgaaatgttaagccgtggattcaaggaccagatctat

SEQ ID NO: 465391 - DNA, 100 bp, Homo sapiens
accctgaagggcaaaatcaccgtgcagttctctgacatgcggacgtgtcgcgtttgcccattgaatcagctgaaaccacctgactcaattatgaatgctt

SEQ ID NO: 465392 - DNA, 101 bp, Homo sapiens
tggctggctacgaatacgtgagcccggagcagctggctggctttgataagtacaagatattctctaagccgctttcatcatgggagaaatagagcagaggc

SEQ ID NO: 465393 - DNA, 98 bp, Homo sapiens
ggggaggtggtggatgtcatcgagaagaacgagagcggttatgagtgccagtgagccgccttagatagaagcatcgtcagcactttattaatgatgga

SEQ ID NO: 465394 - DNA, 83 bp, Homo sapiens
ctctcagcaagaacgggaacaaaactctggtcagcccaaggccaaccccactgtcactctgttcccgccctcctctgaggagc

SEQ ID NO: 465395 - DNA, 75 bp, Homo sapiens
gcttcctgctcgacctgcggcagtacttggtactatactggcaattgctggagaagattttgcaattgttgcttc

SEQ ID NO: 465396 - DNA, 50 bp, Homo sapiens
agctcagagtccagccgcaaaaccaaggcagccacctggacagccaccgg

SEQ ID NO: 465397 - DNA, 101 bp, Homo sapiens
agcctcccaagtagctggtactacaggtatctcgggggagctttgtgccttgatggatcaagttcatcatatgcagcactcaaaatggcagcatccttcgg

SEQ ID NO: 465398 - DNA, 80 bp, Homo sapiens
ggttgagggtctccagggttctttggggcccgagcgtctggatggttccatcaagggagaaatccgaaaacaggcactgg

SEQ ID NO: 465399 - DNA, 75 bp, Homo sapiens
gaggacgccaaagaaggctacaggattatattccatcacaacaagatattctgcttgccagaagacccaccaaag

SEQ ID NO: 465400 - DNA, 82 bp, Homo sapiens
cttgggctcacttccacaaatgctgcccttttcttgggcctgggggtgttgttctccttggtcagcattcccttggtcatct

SEQ ID NO: 465401 - DNA, 73 bp, Homo sapiens
ccagccccacagaccagcccagcattcagctcagtgtggaggctgctggccctgccatctgtaagaagatgtc

SEQ ID NO: 465402 - DNA, 73 bp, Homo sapiens
aaaagccaagaggaggacagttcgctacacagcaatgcatcgaggttgattgtacacagcactatgaactctg

SEQ ID NO: 465403 - DNA, 82 bp, Homo sapiens
ctgtctgtccgtggtggatctaagtgccattcaggaattctgagtgggggccattacgtcacttatgccaaaaacccaaact

SEQ ID NO: 465404 - DNA, 75 bp, Homo sapiens
ccagtagcgttgcattggataaatcttcctctactctcagctaaattttcaggagtgaaaagaaaaagaggaagg

SEQ ID NO: 465405 - DNA, 90 bp, Homo sapiens
tcttaaagtggaaattcaggttcaccaggggcagtgatcggtgatggacagtctgctgtggccagtaacattgccaatactacctaccgg

SEQ ID NO: 465406 - DNA, 50 bp, Homo sapiens
ccagcctgttgctgacactagtcattgttggaaactgttactacattttt

SEQ ID NO: 465407 - DNA, 112 bp, Homo sapiens
ggctagtgcctaatgtcagaatccacatggatgggacctttccaaagtgaaactgatgagatttgatgatccactgttggggcctcgacgagttcctgtcctgggaaaggag

SEQ ID NO: 465408 - DNA, 75 bp, Homo sapiens
ccaggtcttgtagcagcgcctcctcgttagagatgtttatgattacttccgagctgtcctgcagcgtgatgaaag

SEQ ID NO: 465409 - DNA, 80 bp, Homo sapiens
cttgccattcagctgctgaaacgtctggccacgatcaaagacatcttaaagccagaaataatggaggagattgtgatgga

SEQ ID NO: 465410 - DNA, 101 bp, Homo sapiens
gattctccggggacccttccgtatctgcctaggcattttgctgtctcctcctaatacgctatctcccctggttcgaggtattttataagctgcttaacatc

SEQ ID NO: 465411 - DNA, 100 bp, Homo sapiens
agcacttgaagctcacaggcaaaggctaagagtctaaatcccatcccgccttcctacaacagcagccagtacccctgatgccgttgacaagtatctcgag

SEQ ID NO: 465412 - DNA, 50 bp, Homo sapiens
tcctgagtagctgagactatagtctggacagctgatcacctgaaagagag

SEQ ID NO: 465413 - DNA, 99 bp, Homo sapiens
aagaaaacgagccagtgatttacaatagagcaaggttctgaatcaaacggaggatcaccgccagagggttctgcaggcagctgctaagaacatccgtgt

SEQ ID NO: 465414 - DNA, 50 bp, Homo sapiens
ttgaacattgaaatgcacaagcaggtaatcattaccaaatgaggaggaaa

SEQ ID NO: 465415 - DNA, 100 bp, Homo sapiens
gctgtgaaaaccgcattttatttagcagagttttttgttaatgaagaaattgcaggtgctgcagtgtctgaaatttccgggcctttctcaacagaggatg

SEQ ID NO: 465416 - DNA, 75 bp, Homo sapiens
aaagagcctgtacaaccagcgcctgcgcctacagaacgagcatcgagttactccacaggatccgctgaacatagg

SEQ ID NO: 465417 - DNA, 50 bp, Homo sapiens
ctggcttacaaattggattgaggaagagtttttcagcctggcgtggtggc

SEQ ID NO: 465418 - DNA, 75 bp, Homo sapiens
aacacattgctgagcttgaaatccagacacaacacaatggccatcggcattgcagtggacattctgggatgcacg

SEQ ID NO: 465419 - DNA, 82 bp, Homo sapiens
gccccgcgagtggcgcgccggggatcgtccgtctccaagagagtatgaagagagtgcgtctgtagggcagggaagatggcgg

SEQ ID NO: 465420 - DNA, 91 bp, Homo sapiens
ggtccctcctccggcttcccgcaatgaggagggcccttcacagaaccgggcaacaaaggagagagcgggaagctagaaggcagcaggaacg

SEQ ID NO: 465421 - DNA, 100 bp, Homo sapiens
ggcggcggcggcggactggcgggatggtgctgctccactggtgcctgctgtggctcctgtttccactcagctcaaggacccagaagttacccacccggga

SEQ ID NO: 465422 - DNA, 82 bp, Homo sapiens
ctcatcctgccatacagcctctgcaggcggaagtgtttcgagacacagtccacatgctgttggagtggctttctgaagcaga

SEQ ID NO: 465423 - DNA, 75 bp, Homo sapiens
gcggccccggcgccaagccgccgtcatcttcttcctgtgccagggagttctgggaaatcgttcattcatttacag

SEQ ID NO: 465424 - DNA, 83 bp, Homo sapiens
atggaagccaaagttcatcagagtccaaaatggtgatcaggaagatattagaaatggctactccccagtcaattttcatcttt

SEQ ID NO: 465425 - DNA, 90 bp, Homo sapiens
tttgcacggagcagcaaacgcagagacaaaagaaacgggccccgactgctcattcttggaatcccagaacaggccttaagtcttctccac

SEQ ID NO: 465426 - DNA, 97 bp, Homo sapiens
gcggatcaggatcggaagcctgcgtaactttctcccttgatccgggagtctttccactgggagacatggaaatttacactacagaaggcaagacaaa

SEQ ID NO: 465427 - DNA, 50 bp, Homo sapiens
gaaaaggaacgggagggaggaagaggccagtgcctctgccaagtccgagg

SEQ ID NO: 465428 - DNA, 76 bp, Homo sapiens
aatggtttattaagacaaccgcttatgcaaaggctgtggatccctcctctgttgccttggtaaccctgggctcctc

SEQ ID NO: 465429 - DNA, 123 bp, Homo sapiens
agacttatgaacgccttgttgcccagttccccagttctggcagattctggaaactgtacattgaagcagaggttcaaaccttgtactactcagctgatcacaagctgcttgatgggaacctac

SEQ ID NO: 465430 - DNA, 99 bp, Homo sapiens
cgtctacacaggcgcgggaatcagcacgatcccagcatggtgagtgcctacatgtacccagcaggggccactggggcgcaggcggccccccaggcccag

SEQ ID NO: 465431 - DNA, 100 bp, Homo sapiens
tgaagatggaacatggccaaggggtccttctactcctaagtagcctttccagtaaatatatgactcagggaaaagcctcagcgaagaggacccagcagga

SEQ ID NO: 465432 - DNA, 90 bp, Homo sapiens
ggccagggttttctttactctggggtcccggctgccctgtggcctcgctcctcggaggatatttggagttcttacaacatggcagacatt

SEQ ID NO: 465433 - DNA, 75 bp, Homo sapiens
agagcgctcccaggagaaacaaggtcctgaggacaccgtgagccagccaggcctggccgctgggcctgaccggcc

SEQ ID NO: 465434 - DNA, 98 bp, Homo sapiens
gccgatactgagcttcttcctatttgccatgggctattcaagatctctggcagtggaggaagtctctttaagaaaatagtttaaacaatttgttaaaa

SEQ ID NO: 465435 - DNA, 90 bp, Homo sapiens
cagctaaacaagacaccatccagctccaagaaagtcacctttgggctgaacagaaacatgactgccggtcctggcattgatgtgcctgct

SEQ ID NO: 465436 - DNA, 100 bp, Homo sapiens
agactgccccgatggagctgatgagaatgactgccgagtcctttggaacctctcctcatgcgatgcactcaaaatgccaatcatccaggatgccctagca

SEQ ID NO: 465437 - DNA, 75 bp, Homo sapiens
caagacataaactcaaccccttctcttccaaaagcattgcagtgtcgagatggctatgaaccctgtgtaaatgaa

SEQ ID NO: 465438 - DNA, 75 bp, Homo sapiens
caaggcttgaagatttctatgcaggaccccaaaatgcagctatgctgggactcatgtatgtctactggactcagc

SEQ ID NO: 465439 - DNA, 76 bp, Homo sapiens
cggtggtggtgactgagcggagcccggtgacaggatgattatgctgctgcccagttacgccagtatcatcggttga

SEQ ID NO: 465440 - DNA, 76 bp, Homo sapiens
tgcacgcttatctttatctgtggcatgcaactgtgcctgaaacagtacatgcagctggcaatccgagaaggatgtg

SEQ ID NO: 465441 - DNA, 75 bp, Homo sapiens
gcttggagtgcctcaccgagccaggtaatctgtaagtcagatgctccaacaggggatgttcttcttgatgaagct

SEQ ID NO: 465442 - DNA, 90 bp, Homo sapiens
caaagattctgatttggcaacacagaatcgtcctctttggcaatgttttcttggacggcaatgtctacttcgatctgaagtctagaggag

SEQ ID NO: 465443 - DNA, 83 bp, Homo sapiens
gctggacgtgcacgcagcccggcgggaggataaagaccaccacgggaggaggtacaggagaactgtgtgcggtggcgaaagag

SEQ ID NO: 465444 - DNA, 95 bp, Homo sapiens
gaacgcggagagcacgccatgaaggcctcgggcacggtatggcctcacaagtcttggtctacccaccatatgtttatcaaactcagtcaagtgcc

SEQ ID NO: 465445 - DNA, 83 bp, Homo sapiens
cccagaccctggagcctcagttggaagcagccgatccagcctgcggagcctgtggggcagggcttgtcaatgaggcagatcag

SEQ ID NO: 465446 - DNA, 100 bp, Homo sapiens
agtgtgctggagagccctgagaatgcctttgggctgcctgaggatgagttcctggtggtgctgcgctgtgtgggaccttcttcagattcgatcgtatgtg

SEQ ID NO: 465447 - DNA, 75 bp, Homo sapiens
ccctgacctctatatccccagtcatctgctacgtctacttcacccgcatcatcgccatcctgctgcaggtggctg

SEQ ID NO: 465448 - DNA, 96 bp, Homo sapiens
gggtctggaggagccttctcaagaacagagatgcagttcgaacattaagcaatgccgaggactatctcgatgatgaagactcagattaattccttt

SEQ ID NO: 465449 - DNA, 75 bp, Homo sapiens
ggagagagaggtgctagtggctggacttgacctggaaaggatcttagaaatgaagttgaaaaattacgcaatgaa

SEQ ID NO: 465450 - DNA, 75 bp, Homo sapiens
tgtttttgaccagaaaaccgacaaccttcccagaaagtccaagctcgtggtatataatgtttacatggcagggag

SEQ ID NO: 465451 - DNA, 75 bp, Homo sapiens
gcgccggagccgaggcgagcgccgcgcgcaccactgttgtgaatgggagagttcacatccgcgactggcgagagg

SEQ ID NO: 465452 - DNA, 100 bp, Homo sapiens
ctgagacccggacagtggcagtgaaacaggtcattgattacaacggggaacgcacgctggatggttttaagaaattcctggagagcggtggccaggatgg

SEQ ID NO: 465453 - DNA, 83 bp, Homo sapiens
actgcgtcaagcaggtgccccgaataacgttatggaaacaaaggacatgctttacatcgtcactgaatttgctaaaaatggag

SEQ ID NO: 465454 - DNA, 98 bp, Homo sapiens
gtccagcctaggttccacccttttctgggaacgttcatatgcttgctaccttccaaacagctcttcaggcagaagcaggtacacagacagtgctggcg

SEQ ID NO: 465455 - DNA, 75 bp, Homo sapiens
gctgtctcgagctgagccccctaccgggccggatcccgaggctgagtcatcactagagagtgggaagggcagcag

SEQ ID NO: 465456 - DNA, 75 bp, Homo sapiens
ccactacagctgttcccagcttggttgcacttgagaaaattaatgtggcaggttgtctgcattcaaaagagcatt

SEQ ID NO: 465457 - DNA, 89 bp, Homo sapiens
caacgttttgctggcagcaggatcatgtgacttcaaatgcaggtgtgatccctcacatccacaaatctctgattggaaagaagggacag

SEQ ID NO: 465458 - DNA, 93 bp, Homo sapiens
caggtgccggtgcctgtccccgggggcgccatggcgaccggagcgaacgccacgccgttggattttgcaagaacgaggctcaaggatgtgagg

SEQ ID NO: 465459 - DNA, 82 bp, Homo sapiens
aagaatttcaagaacaaaggccgcgacttggagcattttgaaagcgaagcagaagccgtagaatcagcggcgagcctgttga

SEQ ID NO: 465460 - DNA, 100 bp, Homo sapiens
gacagatcctgtgtcacccggcaactcagaaacatcaggtccaaggccctgtttgtgctcttcgtcctggcctacatccacatcgtcttctcccgctcgc

SEQ ID NO: 465461 - DNA, 75 bp, Homo sapiens
cagcgaggggctcggagaggtgctcggattctcgtagctgtgccgggtttgaacaggccatccaggcagccagcc

SEQ ID NO: 465462 - DNA, 75 bp, Homo sapiens
ctgctgctgctattgcttacggcttagacaaaaagggtgtgggccgaagatatgctcatgtggtgttgaggaaag

SEQ ID NO: 465463 - DNA, 97 bp, Homo sapiens
cctaacggggtgcaccgtcttccgccgcacgtggattcagcgcgatgcccaaatccaagcgcgacaagaaaggttttaaaatcaaagatgggaaaat

SEQ ID NO: 465464 - DNA, 82 bp, Homo sapiens
tcgccaaggagatcgtctctctcatcgaggcccaaaccgccaaggacacattcagctaacgtattttagcaggtggagtgag

SEQ ID NO: 465465 - DNA, 98 bp, Homo sapiens
ggagaaagaagtgggaaggatctgcgcgggttttagatggagcaggattagatattgatttccatcttgcctctccagaaggcaaaaccttagttttt

SEQ ID NO: 465466 - DNA, 50 bp, Homo sapiens
gcgtgcaacatggggcttgagaaagggccaatgagtgccaggagcgccct

SEQ ID NO: 465467 - DNA, 50 bp, Homo sapiens
caaacatgttcacaacgggcatggcctgtcccaggctctctatcttctct

SEQ ID NO: 465468 - DNA, 90 bp, Homo sapiens
ttaaaagatgatgagaaataaggacaaaagccaagaggaggacagttcgctacacagcaatgcatcgagtttgtgaatagcacaatggaa

SEQ ID NO: 465469 - DNA, 75 bp, Homo sapiens
tcctcggagcgcggtccctgtattggtctcctgctcctagagacaaatttacatgtattggagaccagaccagaa

SEQ ID NO: 465470 - DNA, 82 bp, Homo sapiens
cgggcccaggtcccttcctccatgaggcctgcctgtgttaatacacctagtgaggagtggagctgaatttgaatgcaagcct

SEQ ID NO: 465471 - DNA, 75 bp, Homo sapiens
ccgggtccgggacttcgtcgccaagctggccaacaacacgcaccaggactcacaccacccggcaagaactgctca

SEQ ID NO: 465472 - DNA, 90 bp, Homo sapiens
cgcgccgccctctcgtcccactttccagactgctgagaaggaagaatttgaacatcaacagaaagagctggagaaagtttgcaaccccat

SEQ ID NO: 465473 - DNA, 100 bp, Homo sapiens
ctgctccaatgctggcttgatcgtcaagtccttcaagcagttcgcactacagcgggagcaggagctggaggaatatatatgtcccagatgtgaatcaggc

SEQ ID NO: 465474 - DNA, 89 bp, Homo sapiens
gcaggatttggtttcagcatgtccttctctgaatgatgaatacttttactactgtgacaacattaacgagaggtgagagacttcagagg

SEQ ID NO: 465475 - DNA, 96 bp, Homo sapiens
gccactgccccacgcgcccgcggcccgcgcgccgaggtgctggagaatctggtaaaagcaccattgtgaagcagatgaggatcctgcatgttaatg

SEQ ID NO: 465476 - DNA, 80 bp, Homo sapiens
cgccttgtatctcaacaccctgagtgcggatttctgctatgatgacaggtacctagtcgatagtcgctggttcaaacagt

SEQ ID NO: 465477 - DNA, 100 bp, Homo sapiens
ccccggcgcgatgcccttcaggaaaggactccagaagacctttccagattcgtggttgagctgcagcagagggagcttgccttgaaggacaagaacagcg

SEQ ID NO: 465478 - DNA, 100 bp, Homo sapiens
cggcaacaacctccttcaccagccgccagcctggacagacagctactccacgtgcaatgatttgaagaccttgcttctcatcacccactggattatgccc

SEQ ID NO: 465479 - DNA, 100 bp, Homo sapiens
caaattcaaaaaggataaggagatcatagcagagtacgatactcaggtcaaagcctcaaggaataggttctcctagtgtctatcatgcagttatcgtcat

SEQ ID NO: 465480 - DNA, 51 bp, Homo sapiens
gggcccttcacccattcctgcatcctgggcatggatgagttgatggaggtg

SEQ ID NO: 465481 - DNA, 100 bp, Homo sapiens
gctatgggagtcccggcgttcttccgctggctcagccgcaagtacccgtccatcatagtcaactgcgtggaagagaaggctgtgttctagatcctcagaa

SEQ ID NO: 465482 - DNA, 74 bp, Homo sapiens
gctgcagatgccgttaaacaaatcctggaggcagttgctgggctgacgtttaccctacgtcctggtgaggtgac

SEQ ID NO: 465483 - DNA, 100 bp, Homo sapiens
cccatgaggctggcgatccccagctcttcaagtgcctgcagtgcagctatcgttcccgccgctggtcctcgctcaaggtccagacccagtacttattatg

SEQ ID NO: 465484 - DNA, 98 bp, Homo sapiens
tgacatatgtggctccttggcagatggcttggggttcttcgtttcacgtgtttgctcagctctttgccattcctctggcctggacaatgctggaaaga

SEQ ID NO: 465485 - DNA, 100 bp, Homo sapiens
agagacgtcccaacagctccagctccgggtgcagggaaaggagaaacaccagacactggaagtctcactgtctcgaaaatgacgctcctctcctcccagt

SEQ ID NO: 465486 - DNA, 100 bp, Homo sapiens
agagcttcatcaaaaatagtgatagctttgataaggcagcccaatggatccaatggtgatgaagagacctcagttgtatggcatgggcagtaaccctcat

SEQ ID NO: 465487 - DNA, 101 bp, Homo sapiens
atctgaactttctggggaacagaccagttgtgttacagatgtagagctaaaacgactgaaggatgctttcaagaggacctgtggactctcatattacatgg

SEQ ID NO: 465488 - DNA, 100 bp, Homo sapiens
cgtcctcttccgcttggccccagaaagtttcggttctgcccggcggtggacccacgagcgcgatggttcacatttgagtaaagacaggggagtttgtttt

SEQ ID NO: 465489 - DNA, 98 bp, Homo sapiens
ctcttggcaagagagctctgcatcaatgcgccggccatagaagtggtgaaaatacagcatcagttttacaaaaagatcactatcttgattcatcttgg

SEQ ID NO: 465490 - DNA, 101 bp, Homo sapiens
tctcgctgtgagacatgtctgagactcctgctcagtgtagcattaaggtaccctccagtatatggcaccagaaataatagataaaggaccaagaggctacg

SEQ ID NO: 465491 - DNA, 101 bp, Homo sapiens
gaacaattatcaggtcattaggatgctgtcctacggaaggagagctgcatgatctgattgcagagtatttgattttcatcaagcagctgatggtatccagg

SEQ ID NO: 465492 - DNA, 96 bp, Homo sapiens
gagaggccggacggcgcgggcgccggcgaggagagcccgcggctgcaggttggcgtgcagtggtgtgatctcagctcattgcaacctctgcctccc

SEQ ID NO: 465493 - DNA, 75 bp, Homo sapiens
agcgccgcggacggccggggcaccgccatcacccacgctctgacctctgtgttcctctgaacaacagggagaata

SEQ ID NO: 465494 - DNA, 115 bp, Homo sapiens
tgaacttaggggcacttctgttttcctgagggctacaccgttttcttttgaaagagtttgaagaaaacaggtctgaaacaaggtcttacccccagctgcttctgaacacagtgac

SEQ ID NO: 465495 - DNA, 84 bp, Homo sapiens
cgccggcccgcgggtctacttcctcaaaggtgacttaagagattaaaattaatttggttgctgttggttctgaacaaataatga

SEQ ID NO: 465496 - DNA, 50 bp, Homo sapiens
gtggacggccagacagagtccccggaggataattctgaaataatcagcag

SEQ ID NO: 465497 - DNA, 100 bp, Homo sapiens
cagaaaggaagatggcttactgcctgacaaattgttatcagcttgtctttaaccgaactgtcacactgaaggaagacccaggaaaggtgtgagctggaag

SEQ ID NO: 465498 - DNA, 73 bp, Homo sapiens
aggccgtaaggcaaaggcggcggcagcagcagcggcagagaaagaagctggatcaccatccatcttcaagaag

SEQ ID NO: 465499 - DNA, 100 bp, Homo sapiens
caacattccagttttttaagaagggacaaaagggagaatgtgctacgaaacctagcggataaggcctttgaccggcccatctgcgaggccctcctggacc

SEQ ID NO: 465500 - DNA, 75 bp, Homo sapiens
aatgctggaacgagttataggaagatgtagtccaacccacatcagcaggattttctgccgtctcttggcaaaaat

SEQ ID NO: 465501 - DNA, 103 bp, Homo sapiens
acgagaatgagaacatcaccgtggtgaagggcatccggggggtcctgatgacaacttaattgaaggtggaggaacaaaatttgtctgcaaacctggagccaga

SEQ ID NO: 465502 - DNA, 75 bp, Homo sapiens
gactgctttggggagtatgtggaaccgcaggactgcagggtctctccagctcttccttcaaaagttcctgccttt

SEQ ID NO: 465503 - DNA, 100 bp, Homo sapiens
gccgacacgactaccaacctgtgtaagtggaactgtggctgcaccatctgtcttcatcttcccgccatctgatgagcagttgaaatctggaactgcctct

SEQ ID NO: 465504 - DNA, 89 bp, Homo sapiens
gggcgcgagcgaggcgccctagacatcttctccctcccttgcctcagcgcggagacccacatcaagggcttcacactgaacgatgctgc

SEQ ID NO: 465505 - DNA, 51 bp, Homo sapiens
tcgttacagccggcgaagaagaagcagcacctgtgagaatatgaacttctc

SEQ ID NO: 465506 - DNA, 96 bp, Homo sapiens
agggcatccagaagatctatggctgccagctgttggtatatccaggagcttttaatctgaccactggaccagcccattgggagttacttcagcgaa

SEQ ID NO: 465507 - DNA, 75 bp, Homo sapiens
tctacgagctgtttctcatctttatactcttccagaggctgaggggatctggcggtggagcgctaggatcagacg

SEQ ID NO: 465508 - DNA, 100 bp, Homo sapiens
caggtggacttcttgcaacaggttaacgtgtatggcgtgtgcgtgccaggaacttgctactaccagcaccatgccctaccaatatccagcactgaccccg

SEQ ID NO: 465509 - DNA, 48 bp, Homo sapiens
tatgccagtgaattaatttttgaaattgtatgctgctatgcatgaacc

SEQ ID NO: 465510 - DNA, 90 bp, Homo sapiens
gaaaaagtatgcagaccttgaaaagcggcacgacaacattaaaccatcagatgagcccaagagtggggaagtaactccaagctgcccact

SEQ ID NO: 465511 - DNA, 76 bp, Homo sapiens
cctggagcctcagttggaagcagccgatccagcctgcggagcctgtggggcagcttacggttattccagaagtttg

SEQ ID NO: 465512 - DNA, 88 bp, Homo sapiens
atctccttctcttgcctgggtcttatataataaatgtgacaaacagcatgtttggtgcttcaagaaagaagtttgtagagggggtcga

SEQ ID NO: 465513 - DNA, 100 bp, Homo sapiens
ccagcatcgcgtggtaccagtgccgctgggcacactggcttcacgccggctccgcctcaccagcaagcgcattcccagatcctaatgctttggctggcca

SEQ ID NO: 465514 - DNA, 100 bp, Homo sapiens
cttcttcgagaattacaccggggtccaggtgtggcaggtgtttccagtgccatggaccacaccttctcaacaacatcaaaagatggggaaggatcgtgtt

SEQ ID NO: 465515 - DNA, 100 bp, Homo sapiens
cccaccccacaggatctgccccagagaaagtcctcgctcgtcaccagcaagcttgcgggtactatactggcaattgctggagaagattttgcaattgttg

SEQ ID NO: 465516 - DNA, 100 bp, Homo sapiens
gtcctagtctcttttctccgcactggaagacttgaacacttccttctctctatttcaagaagcccctgaatatctactttggatttattcctgaaataat

SEQ ID NO: 465517 - DNA, 75 bp, Homo sapiens
gtcctgggccccgggcggcggtcgccaggtctcagggccgggggtacccgaggtcgccgccctggagaggcaggt

SEQ ID NO: 465518 - DNA, 100 bp, Homo sapiens
tcggacagatggcacagaaaccgctgcgcctacaaatcttcctattttcaagctgaaagaatctactgttagaagaagatacagtgactttgaatggctg

SEQ ID NO: 465519 - DNA, 75 bp, Homo sapiens
gctctcacaggagagggcgttcaggtgagcgagatggaagtgaacgggcagttcgagtccgtgtgcgagtccgtg

SEQ ID NO: 465520 - DNA, 100 bp, Homo sapiens
ctctctgcgggagaggctgcagcggaggcggaagcaggactcggggcacttggacagacagtctagcagtgcttccttggagaccctgttagcacttctt

SEQ ID NO: 465521 - DNA, 89 bp, Homo sapiens
gccgccggcgggtcgggccgggcaatgcctcgcgggcgcaatgaatccgcggcaggctctatctaatgttcctcctctccggaactact

SEQ ID NO: 465522 - DNA, 100 bp, Homo sapiens
cctccctggaaaacagcgaggagctcctcttccagtctgccattcgcctggagaccaacctgcacttgttaggaaagaccacagcaagattctttcattc

SEQ ID NO: 465523 - DNA, 80 bp, Homo sapiens
agtggtgtgtggcacaaaatgcaacacgccatccaacatattctttacaatggatgatgtggtcaaggttggagactttg

SEQ ID NO: 465524 - DNA, 100 bp, Homo sapiens
gccgtgtggagtaggtctggacctggactcacggctgcttggagcgtccgccatgaggagaagtctccagcttgtacctcatatcagatgactccgcaag

SEQ ID NO: 465525 - DNA, 78 bp, Homo sapiens
ccagctcaatcctgccggttgcgccttcttcctggacatgaccaactgggagcgacagtgcccaggggtctgagtctc

SEQ ID NO: 465526 - DNA, 59 bp, Homo sapiens
tgtcggggaaccatggctgccccgagaggcaacggacagccaagacgtagatccatcca

SEQ ID NO: 465527 - DNA, 51 bp, Homo sapiens
actaactatactctctactattgggcagcagccgctactcaaagaaaagcc

SEQ ID NO: 465528 - DNA, 82 bp, Homo sapiens
cttggtgaggcaacagcaggcctttcctcacgccagaacaatggcccagagcatgattcccatcaatgagccctatggagat

SEQ ID NO: 465529 - DNA, 98 bp, Homo sapiens
gagtcatgtggcagtggaaaatgcgctcgggctggaccagcagactagacgcttgaagcaaagctgccatcccagaagacgacatgctctcagcaacc

SEQ ID NO: 465530 - DNA, 76 bp, Homo sapiens
agcagtgcagcagattctgagtgcaaaaagtggatgactgtgagcggtgccgggaatttttcaacaaagaagggcg

SEQ ID NO: 465531 - DNA, 75 bp, Homo sapiens
ccagcagccaagatggtgaagcagatcgagagcaagggttcatagtggcgtcatgcacgcagactcctgcaagtt

SEQ ID NO: 465532 - DNA, 100 bp, Homo sapiens
gttcacagagctagccggacgtcctccgactcaagggttctccaaaaaatgtggaatcctttgcatctatgctgagacattctcctcttacacagatggg

SEQ ID NO: 465533 - DNA, 82 bp, Homo sapiens
cgagaggtgcggcgaaggaggcagaggcacttatgcttgtcagcaccgaacaagatttgtgatgaaatggagcctggaacaa

SEQ ID NO: 465534 - DNA, 100 bp, Homo sapiens
cggggcttcttggtggggccggagccgagacccagccggagcgagcaacagacaatgcagatcttcgtgaagactctgactggtaagaccatcaccctcg

SEQ ID NO: 465535 - DNA, 80 bp, Homo sapiens
gggtgctgacggcaggccactgcatttccagggggattctggagggccattggcttgtgaagttgagggcagatggattc

SEQ ID NO: 465536 - DNA, 82 bp, Homo sapiens
ctccctgagtctttgaggacacagcctcgctggaggcagtttctgatcttcgtgaagactctgactggtaagaccatcaccc

SEQ ID NO: 465537 - DNA, 96 bp, Homo sapiens
cggatcgctgtcattaaaaattaagcgtggcttttgaggaagatgtgacaactaccggagggtgagaactctgtctcagtcgacgggaagtgcagt

SEQ ID NO: 465538 - DNA, 75 bp, Homo sapiens
gagggactgccataacattcccaaagttttatgtgctgaaagagttggccagatgactaagacatataatgacat

SEQ ID NO: 465539 - DNA, 75 bp, Homo sapiens
atgcctagcacagaccttctgatgttgactgggctggcttagatgaagatgaagatgcacatgtctgggaggata

SEQ ID NO: 465540 - DNA, 75 bp, Homo sapiens
aatatttaatggaaaatcgcttggttaaaacctgacacttttaacagatgtccggtctgtgctacgacagcaaaa

SEQ ID NO: 465541 - DNA, 88 bp, Homo sapiens
tgaaactgaattggagactgttaggcccagaagaacaattagggtgacgtgtgcattgagtaaacgagctgctgctcttcctccagaa

SEQ ID NO: 465542 - DNA, 89 bp, Homo sapiens
gtaccaggcagacatcaccgacttgttaaaagaaggtctcaagattctgccctccaagaaagtcttgccatgattggataggaccccca

SEQ ID NO: 465543 - DNA, 100 bp, Homo sapiens
tcatcatctacttcacaggaattgccatttcctttcagcaatggattggtgactgtgatggttccccagctgcggagggaaaacagccttctcctgtgga

SEQ ID NO: 465544 - DNA, 74 bp, Homo sapiens
catagcaactctggctgatcaaagaagagcagcccatggtgtctgctttttcaacgtgggagaaggagttgcac

SEQ ID NO: 465545 - DNA, 129 bp, Homo sapiens
aaggagcaatcaaatccagctttggcaataaaaaggaaaagaacagaggccttagaacaagcccagtcagaacaatggtccaggataacaaggatgggacatactacatttcctacacccccaaggaac

SEQ ID NO: 465546 - DNA, 99 bp, Homo sapiens
atcaacgcaaccacagaaacaagtggtacagggcaagaagttgcaggaaaaatggcttctagcagtggaacttcctcatacacgtgatctgtttctgat

SEQ ID NO: 465547 - DNA, 80 bp, Homo sapiens
ccgcatcgcaaccaccgccctggccatctaccatgtgaggctgtggccaggccagctgggctcggggagcgccagcctga

SEQ ID NO: 465548 - DNA, 75 bp, Homo sapiens
ccatcctttaaatctgcacatgaaacgttttgtcaaagacctggaaatgtatcttctgtaagaagcggaggaaaa

SEQ ID NO: 465549 - DNA, 51 bp, Homo sapiens
gtctccgcccgcaccatgcggctgggcaggaattacatgaacgacagcctt

SEQ ID NO: 465550 - DNA, 100 bp, Homo sapiens
ccaggacggagataacaccatcttcaagaatcctcactatggatgggctcattgaggacattaagcatcggcggtattatgagaagccatgccgccggcg

SEQ ID NO: 465551 - DNA, 80 bp, Homo sapiens
agggcattcatttcaggctccttctaaatggccaagatgagtgaccgaggaggtggcgttcctttgaggaaaattgacag

SEQ ID NO: 465552 - DNA, 75 bp, Homo sapiens
attcctcctccttggtcgccgcgtccttggctggcgtttttctttttaaaagcggaaggagagttttacatggaa

SEQ ID NO: 465553 - DNA, 100 bp, Homo sapiens
ctggacccagcctacaccaccctggaatttgagaatgtgcaggtgttgacgatgggcaatggtctgccggaagagctcatccagaaggggaaggatatca

SEQ ID NO: 465554 - DNA, 100 bp, Homo sapiens
accctcacggagctgggcgacgagctgaccctgggagacatcgacgcttcggaaccaaaaagaagcttcccagagccggggccaggagccccaagcgccc

SEQ ID NO: 465555 - DNA, 82 bp, Homo sapiens
atgtttgacccagttcctgtcaagcaagaggccatggaccctgtctcagtgattgtagaaggcatgaaacaaaaaatgtgga

SEQ ID NO: 465556 - DNA, 96 bp, Homo sapiens
gcaaaagctcattgacgatcaagatatcagtggccagcatcgaaatgttcagccttttagtgatgaagatgcatcaattgaaacaatgagccattg

SEQ ID NO: 465557 - DNA, 98 bp, Homo sapiens
tgctgccagtggtagcgctcgtctggcggagctgggtgtggccgacgacgatgccctcgctgaggagcgcatgcggagaggccagaacgccctgccag

SEQ ID NO: 465558 - DNA, 98 bp, Homo sapiens
cgagctgggtggtctggagaccatggagaccctcacggagctgggcgacgagctgaccctgggagacatcgacgacacaagatggtgaaggagaccca

SEQ ID NO: 465559 - DNA, 90 bp, Homo sapiens
cagaagctggtcagtcaaatatcaacagtacaaattctgaagtttgtaaacttgctgatggtggtggtaagccatggcagatgataaagt

SEQ ID NO: 465560 - DNA, 82 bp, Homo sapiens
gaattagaaggacaagtcatctcttgcctgaagctgagatatgctgaccagaaaataatgttgagtttccatgaagaacagg

SEQ ID NO: 465561 - DNA, 119 bp, Homo sapiens
tatgactctctgcagcgggatcaagctgtgtgcattagtacaaatgaggacagttatgggatggatgggaaggttaatcagccccgtctcactgcagacatcaactggcaaggcctaga

SEQ ID NO: 465562 - DNA, 83 bp, Homo sapiens
ccagcctcgggaggtggtggagtgacctggccccagtgctgcgtccttatcagccgagccgacaatgcagatcttcgtgaaga

SEQ ID NO: 465563 - DNA, 83 bp, Homo sapiens
cttttacaaagcatgggagtgcagctgcctgacaacaccgatcacagaccaacaatgctgcaggtggagaaattttcagcctg

SEQ ID NO: 465564 - DNA, 82 bp, Homo sapiens
gacaagccgctggcagccgcggatctcaccgccgctcaggttaacctgtggaagatctacaaagcagtggagaagctggggg

SEQ ID NO: 465565 - DNA, 100 bp, Homo sapiens
cgaaccgtcatttccatgggacgagattctgaactcattgtccatggaaataaaaggcacatgaacaagtgcattctctctcttagagaccttaaagtgg

SEQ ID NO: 465566 - DNA, 75 bp, Homo sapiens
agaaagcccacatcaacctggtgagtgcctccggagccagcgtggtggccatagacaacaagatcgaacaggcca

SEQ ID NO: 465567 - DNA, 97 bp, Homo sapiens
acaccttacctcaggtgatcctcccacctttgggattacagggctactttcagctgaaagccaacccaggagcttggatcctcagacttaggaaggg

SEQ ID NO: 465568 - DNA, 82 bp, Homo sapiens
gctgcggctcggacgccagcggacacgcgggcgagtaaagatgacggcgccttgaggtaagctacaggcaacaccacttccg

SEQ ID NO: 465569 - DNA, 97 bp, Homo sapiens
gcctcggcggcctcgggcgccgcgaggtcgtgttcccgaacaggtactgagtttgagggtgcagtcatagctctgttccatttgttggccaccagga

SEQ ID NO: 465570 - DNA, 76 bp, Homo sapiens
gaggctgggctggacccgagccagcgaccgaagcagaagggggcaagcgcgatgaagagctggttctgcccatcaa

SEQ ID NO: 465571 - DNA, 74 bp, Homo sapiens
ccccggggaactagggagcgtctccggctgcacagcgctcagtggaagcatcagttcacagcagtaatgcacac

SEQ ID NO: 465572 - DNA, 101 bp, Homo sapiens
acatgttccaggtcccggatagcgagggcggccgcgccggctccaggatgaaacaggcgcctatttaatcgacagagaccccacctactttgggcctgtgc

SEQ ID NO: 465573 - DNA, 75 bp, Homo sapiens
gccccagcactcccagctgcgcagggcctgccaggtggcgctcggcaagaaattatagagcagcttctatcaaat

SEQ ID NO: 465574 - DNA, 82 bp, Homo sapiens
ggctcccggaattggaacagctggagcgcattggactgttcagtcatgcggagattaagaaaaatgccagctgtgggacaag

SEQ ID NO: 465575 - DNA, 100 bp, Homo sapiens
gtcctgggtcatgaaacttaatccacagcaagctcccttatatacagagatttgggattagaatctaccttaatatcgtcaaaacctcagtctcattcac

SEQ ID NO: 465576 - DNA, 83 bp, Homo sapiens
cagggtccctgaagagggaagacacgcggaaacaggagtctactcttcatcttgtgttgagacttcgtggtggtgctaagaaa

SEQ ID NO: 465577 - DNA, 100 bp, Homo sapiens
ttccagctcacccactgccagcagagtgtgtcccggcatggatatccggaacaacctcactaggttgcatgagctggagaattgctctgtcatcgaagga

SEQ ID NO: 465578 - DNA, 74 bp, Homo sapiens
aggagaagaaatccgcagaagcttattaaagttaagccaagagtcgaagctaaaccagaagttcaatctcagcc

SEQ ID NO: 465579 - DNA, 71 bp, Homo sapiens
gggagggaagaagccggagccgccgcaagccacacggtattatagctgcaaatgtccttgtattctgttta

SEQ ID NO: 465580 - DNA, 96 bp, Homo sapiens
ggtactgcatgtgcttccagaggagcccaaagacttaattcagtgcacaaatgagatgaatgtgaacatcccacagttggcagacagtttatttga

SEQ ID NO: 465581 - DNA, 96 bp, Homo sapiens
cgcggctgccgtacgtggccctcgatgtgctctgcgtgttgctgggtatgccattgcattggccttaagggaaaagcagcgtgtaatatttaccag

SEQ ID NO: 465582 - DNA, 106 bp, Homo sapiens
gttactgtctctttggggatacagtcaacacagcctcaagaatggagtctaatggggaagaacctcaagaaggcatgaagccagcccctgcagtgccgtccacccg

SEQ ID NO: 465583 - DNA, 113 bp, Homo sapiens
cggcggctaccggcggcggcgcgcagcgtgtcaggcggagagacccgccgccaggctgcacttaccagtgggctaccatggccgtgcctcctctgtcgtggtgtctggcaccc

SEQ ID NO: 465584 - DNA, 100 bp, Homo sapiens
attctggtggggagatgaacccaacctagtgggtgtaatacatcatgaactgcaggattgggctaatggatactacagacaacagagaaaacttgttgaa

SEQ ID NO: 465585 - DNA, 75 bp, Homo sapiens
ttctgctgcttcttgtccggggccagggatcgagcggtccacggaccaggtcatcaagcctgttaacctggaagc

SEQ ID NO: 465586 - DNA, 50 bp, Homo sapiens
gtgaacacgcaccgtgacaagccaacttcttctcaagtcttaggattgca

SEQ ID NO: 465587 - DNA, 88 bp, Homo sapiens
cgggacccacttcactccagtgcctccgacgcctcctgatgaatctctaccctttgccgaggagctgaagtaaaccagcacatgtttt

SEQ ID NO: 465588 - DNA, 80 bp, Homo sapiens
cagagcccggggacggcgaggccctcatgtaccacacgtacctggagtagaacagaaaaattattatgtctgtgttccct

SEQ ID NO: 465589 - DNA, 74 bp, Homo sapiens
ccaggagaagccgcccaaagaactgggcaccctcatccagcatctgaaggagcacctgctgcacggcaacatga

SEQ ID NO: 465590 - DNA, 54 bp, Homo sapiens
tggcgctcatcaccggtatcacaggccagaatgaggagaaacctgtgcaaatga

SEQ ID NO: 465591 - DNA, 82 bp, Homo sapiens
tgtcactaatgaaaacgcaattattcctttaccaacaatcaaatggaaacccttaattccaaagccttctagacaagctcag

SEQ ID NO: 465592 - DNA, 75 bp, Homo sapiens
cggcggccctgcccgcccctccctccagcatacagtgaagttgttctctgaagttcctcatctgccttaagtctg

SEQ ID NO: 465593 - DNA, 100 bp, Homo sapiens
gcagagagagaggaataccgcaagagctggagtaccgccacctccccgctgggtggggagaggcccttcagatgaacagactagccactttgcattgact

SEQ ID NO: 465594 - DNA, 83 bp, Homo sapiens
ccaaatttccttttccaactaagcttgtctttagcttcaatgaaaagctttttggcttactggtgaaggacattgaagccatg

SEQ ID NO: 465595 - DNA, 50 bp, Homo sapiens
aagaaattgagggttcttgccatgatcagccatgcagaagctggggacag

SEQ ID NO: 465596 - DNA, 75 bp, Homo sapiens
cggcagcaagcgtgggaacgcgggcggcgagacggcggcaggacggcggcaggctgtttgaaaatctggtggcca

SEQ ID NO: 465597 - DNA, 100 bp, Homo sapiens
cgacgaagaaaaaaagagcgacgagtgcaagctgattcagaaaggcaccaagttagttttggaacaagttgtgacatccattgcatcagttgccgatact

SEQ ID NO: 465598 - DNA, 75 bp, Homo sapiens
gtccagattgtcatcgagatgcagggctggttgatatgtgaagagccaacctgtcgcaatcgaactcgtcacctt

SEQ ID NO: 465599 - DNA, 100 bp, Homo sapiens
agccacctgtcagtgcgggagatgagggaagatgagaagcccctggtgctggagatgctgaaggctcccgtcttcgtcaggaagattttccacctcgcat

SEQ ID NO: 465600 - DNA, 98 bp, Homo sapiens
agcgtcgggattaggtgaaaaccgagacatgggtgcccggcaccgcgcccgagcccactccattcagatcatgaaggtggaggagatcgcggccagca

SEQ ID NO: 465601 - DNA, 50 bp, Homo sapiens
ttcattgccaccgtcgacaatggtgttcctgaaaagaaggtacttccaat

SEQ ID NO: 465602 - DNA, 80 bp, Homo sapiens
agaaggagctggcggacatcactttagaccctccacctaattgcagatgtcatttgtcagagtgaaccgctgtggtcccc

SEQ ID NO: 465603 - DNA, 90 bp, Homo sapiens
gctggaactgcagtgctgcatcgactggacccatgtcactgaccccctcatagctattgcattaatgaccacagcggtcatctctacctg

SEQ ID NO: 465604 - DNA, 50 bp, Homo sapiens
cggactcactgccctgcaccagaacccttaggagaaatcttgagagtgga

SEQ ID NO: 465605 - DNA, 100 bp, Homo sapiens
cgccagcagctggactatggcatctatgttatcaaccaggtttctctccgtcgacgaaaacgggaagtactagtagaagacatggtatctcaagaagaag

SEQ ID NO: 465606 - DNA, 82 bp, Homo sapiens
gtcgcctgccaccgagccgggcccacctccccaccaaggaagctctgtgatcagcagctgcccgggcctgctctacctcaac

SEQ ID NO: 465607 - DNA, 75 bp, Homo sapiens
ttgataaaactaccaacaggcacagagttgatttggagcatatgcgaacaataaaacctgaaaaacacttacggt

SEQ ID NO: 465608 - DNA, 97 bp, Homo sapiens
ttcatcatcatctacttcacaggaattgccattttggaatgagaccgtggagctttttcgtgctaagatgccgttacggaaacatcgctgtcgtttc

SEQ ID NO: 465609 - DNA, 100 bp, Homo sapiens
gctagtcagctccctgaagggagtgacggcggttgggtgcccgcggccacttttgccttcccgggggtcgtctttctctaccgagagggctctgcccgct

SEQ ID NO: 465610 - DNA, 104 bp, Homo sapiens
gtgggatccggttccttggtgtcatccagccttagcaaaccagagggtccaaattccaagcctgtagtgtccttcattgctggtttaactgctcctcctgggag

SEQ ID NO: 465611 - DNA, 75 bp, Homo sapiens
agtcaatgaattaaagacaagaaggtttccaatcagggaggtggggaagacagggctccagctaccacaggacgg

SEQ ID NO: 465612 - DNA, 90 bp, Homo sapiens
gggaataggagctggggagcccttctgcgccacagcctaatcacacggatgctacagagagatcccaagagaagggcttctttagaagag

SEQ ID NO: 465613 - DNA, 100 bp, Homo sapiens
tgaatggtttgaagtaaatagatcttgccctgagcacccttcagattaagcgtcagcttcctgttttataggccataaaattttgagtagaaaaatccag

SEQ ID NO: 465614 - DNA, 100 bp, Homo sapiens
ccatggcggagaagactcaaaagaggatcgaagtagaatgtatgacagtttgaatatgcactctttggaaaattcccttatcgatattatgagagcagag

SEQ ID NO: 465615 - DNA, 90 bp, Homo sapiens
gtacagtggcaaaatcatcactacgaaggcagacatttggactggtgaattttcagctcgtttccttttgaagctgcccgtagatttcag

SEQ ID NO: 465616 - DNA, 98 bp, Homo sapiens
gagacggtcagagtccaaggtccgggtatcttaccaggatgctttcattggatttggaggaaatgtgatcaggcaacaagtcaaggataacgccaaat

SEQ ID NO: 465617 - DNA, 100 bp, Homo sapiens
cctcggtcgcccacccgcctgcccgccatgtattgtgcacgcgccggagcagcggcgcaccagcccccggctccggcgccaccatcttcgcgctaagctc

SEQ ID NO: 465618 - DNA, 100 bp, Homo sapiens
aaacaggctgtgaagaagctgtatgacattgatgtggccaaggtcaacaccctgattcggttggtcaaagaaaaagtgatgtatgaaaaagaggcaaaac

SEQ ID NO: 465619 - DNA, 100 bp, Homo sapiens
agccacaatgtgatcttcaccttggattctttgttaaaaggagacctaaagggagtcaaaggagcatggattccgtgaaggaacaacacctaaacccaag

SEQ ID NO: 465620 - DNA, 90 bp, Homo sapiens
aggaggacgagccgtggtacgaccaccaggacctccagcaagtgctccagctgaggctgcaacaaaggaggacgagagaacaactagtgg

SEQ ID NO: 465621 - DNA, 100 bp, Homo sapiens
agcagtatcctgcatcgggagaaaacaagtccaaggatgaatcccagtccctgttacgggtccgggcccaccagctggtcttgccaccttgcgacgtagt

SEQ ID NO: 465622 - DNA, 83 bp, Homo sapiens
ggaaagcgctcagaagaacgcttcgcccgttggtgctatttcaaacttctcatggaacatctggaccctgatgaagaagaaga

SEQ ID NO: 465623 - DNA, 82 bp, Homo sapiens
ccctctcaggacaacccagatgtgcaacaaagtgcgatggttaatttggagtggcccctggagtcagtttcctacaccatcc

SEQ ID NO: 465624 - DNA, 100 bp, Homo sapiens
aattggctgagttcacatatgggctccatcaataactagcggccaggtgagattagtgaacgatactaatgttcagtttttggaccaagacgatgatgat

SEQ ID NO: 465625 - DNA, 76 bp, Homo sapiens
tccaaacctcgcacgcccaggaggagcaagtccgatggagaggctaagcggtttcctatcgctgaagtgttcacgc

SEQ ID NO: 465626 - DNA, 80 bp, Homo sapiens
aggatgcggctcgtggtggatggcatggggcgctttggcagccgcggcgagtcctttgcacatgttggcaacacacgcat

SEQ ID NO: 465627 - DNA, 83 bp, Homo sapiens
cttaatatatacctgcactgtctgtaggcagcggctgcttacctgtttcagagacagctttcaccaactccaggttacccaag

SEQ ID NO: 465628 - DNA, 50 bp, Homo sapiens
cagagctcccatggagacattttttcacaaacactcgtgaaactgctcag

SEQ ID NO: 465629 - DNA, 98 bp, Homo sapiens
ttcttgctgcccgaactgtttccatctcagtccagattatcagagcctgtggtctgcaagcagcagccaaactctgatgccagtatggactggagatg

SEQ ID NO: 465630 - DNA, 76 bp, Homo sapiens
ccgcgccgtggaccctgacggggacgaggctgtggccaggccagctgggctcggggagcgccagcctgagaggagc

SEQ ID NO: 465631 - DNA, 97 bp, Homo sapiens
gaaccagaccgcggccagagcgttcagggacttcagtactagtgctaataacatccagattgataaaaccaagcctttgtggcacaactatttctta

SEQ ID NO: 465632 - DNA, 100 bp, Homo sapiens
ggctgccatggtctgcaaagaattgactctcatgactgaagaagaaacacgattaagagagtctgttgtacagatgctgtttgcagacaaggtcccaaag

SEQ ID NO: 465633 - DNA, 74 bp, Homo sapiens
ggatttgttaaggattccaagtaactcttatttgtgctgccttaacaatttcaggaaaagactaaaatgcttcc

SEQ ID NO: 465634 - DNA, 75 bp, Homo sapiens
tgctgaggagcagacgagtggccaggcttctggggctgactcaactggtaaataccatgatttagaatgccagct

SEQ ID NO: 465635 - DNA, 75 bp, Homo sapiens
ctggtggaggtgttaaatgaaaggttctctataaaggtgtcttaaaaaggttgattttgttatatgagcctttgt

SEQ ID NO: 465636 - DNA, 74 bp, Homo sapiens
aggaactcttggttgggataagtagaagatgtgttacaacgttgtcgagaatatttaattaaaaaaataaatgc

SEQ ID NO: 465637 - DNA, 82 bp, Homo sapiens
agaaggagaaaagtgcccaagatcctttcaggatttttagactctgaggagcagttggagctaatccacattatggaaatgg

SEQ ID NO: 465638 - DNA, 51 bp, Homo sapiens
cgcgaagtcatggggctctgtcgggaaggttgaggaacaggttagcaccac

SEQ ID NO: 465639 - DNA, 50 bp, Homo sapiens
agtgtgtgtgcagcgagggctggtcctacccactccggggcagccacagc

SEQ ID NO: 465640 - DNA, 76 bp, Homo sapiens
cgcagatcctgagacccggacagtggcagtgaaacaggcatccgtgtcattctggaccttactcccaactaccggg

SEQ ID NO: 465641 - DNA, 50 bp, Homo sapiens
aaccaagccagcaagatcaccacattgtatgcaaacctgttccattcttt

SEQ ID NO: 465642 - DNA, 90 bp, Homo sapiens
gccaatgttggagccgtctgcaaagtgtccccggcaagaaggccaggtcagagcagcccaccatgggatggggagggggtggaggctgca

SEQ ID NO: 465643 - DNA, 48 bp, Homo sapiens
gacgcccggcgccagcacatcgcaggtcttcaaagcttcacctttctc

SEQ ID NO: 465644 - DNA, 74 bp, Homo sapiens
cctgtcacaggccatgctctggcaaaaacgttcctgttgcatgtaaatcatgtccttgtggttacatatttatt

SEQ ID NO: 465645 - DNA, 75 bp, Homo sapiens
ccggaaaactggcacgaccatcgctggggtggtctataaggttcggtgatgctgtgaaaggtaatttggtggtag

SEQ ID NO: 465646 - DNA, 75 bp, Homo sapiens
aaggagaaaattcttaaattggagtcatatgaaatcactatgaatggaggaaatggtattaagctcatcatggaa

SEQ ID NO: 465647 - DNA, 95 bp, Homo sapiens
aagaagaccattcagatgggatctttccggatcaatccagatggcagccagtcagtggtggagggcacattcactgaaatccccgccagcaatat

SEQ ID NO: 465648 - DNA, 75 bp, Homo sapiens
attcagtcagaagaaggctgctattgaaagagagtatgcacagctctcccggggctgaagctgagtgcagatcag

SEQ ID NO: 465649 - DNA, 83 bp, Homo sapiens
cggacgcgtcatcgagtgtgacgtggtgaaaggtgttagctactggcgggtgcctcatgagctgatagagtgttggactctag

SEQ ID NO: 465650 - DNA, 82 bp, Homo sapiens
cgccgagggcgggggagagcgcgccgctgctcccggaccgggccgcgcacgccgcctcagaaatcttcccaaggctgcagac

SEQ ID NO: 465651 - DNA, 100 bp, Homo sapiens
aaatgggtctgttcctggagacagaattacttttgatgctttcccagagtgcaagagcagaacttgaaaggctgcggctcagtgaaaagtgtgataaaga

SEQ ID NO: 465652 - DNA, 107 bp, Homo sapiens
aaaaacaccacagtactatcgtctatcattggatgaagtggctccggagatttgtcgagatgtccacagaaggaggatttggtggtactagcagcagtgatgcccag

SEQ ID NO: 465653 - DNA, 90 bp, Homo sapiens
gtttcctgtgtccagcgctgccggagccgcctgaggctttcttcgagagtcacccagctccttcagctgagcgtaccatccagcagtgtt

SEQ ID NO: 465654 - DNA, 90 bp, Homo sapiens
gtccagcagatggcggatgccctgcagtacctgcagaaggtctctggagacatcttcagcaggtggtgaccatcgctatgtgaacaacta

SEQ ID NO: 465655 - DNA, 74 bp, Homo sapiens
ggcccggggctccggcgcgcccggtgacggcggagaggcgccccccgcagcagcccgagcgggaagaagttccg

SEQ ID NO: 465656 - DNA, 51 bp, Homo sapiens
ggcgatggatccgtttacggagagggtctcgctgttggagttggatttggg

SEQ ID NO: 465657 - DNA, 76 bp, Homo sapiens
gaaatggtcttgtcacctttcaacttcgaggactggaattccgagaaggagctcaaaaagtgggatgagtttgaag

SEQ ID NO: 465658 - DNA, 104 bp, Homo sapiens
attttggaagagggagtcaccactggacctccaaggaagccacgtgcagacatctacaaccttcgatctcctgacgactgctacaggagctgagagaccctacc

SEQ ID NO: 465659 - DNA, 51 bp, Homo sapiens
gaggattctaccaggatgtttaaaaaggtatgatctcgtgaaatcttgaga

SEQ ID NO: 465660 - DNA, 87 bp, Homo sapiens
aaccttataccctcatgagcatggtggccaacctcttgtatgagaaacgggtatggacagtggatttgcaggtggagaagatgaaat

SEQ ID NO: 465661 - DNA, 98 bp, Homo sapiens
tggtgcggcaccggcgagccagcgatccaatgatagctggacaagtcagtaagcccttgctgtcagtgcggagtgaaatgaatgcggagttgagaggt

SEQ ID NO: 465662 - DNA, 74 bp, Homo sapiens
gcggaacccgtgggcctgtggactgcagcctcggcggtcagcaggacggggaggtttactgcatcgacgcgcgg

SEQ ID NO: 465663 - DNA, 95 bp, Homo sapiens
gtgctaattaataagatggatgatccaacagtaaattggagcaatgagagagcgagatgcgagaacacttttggctaaaaatctcccttacaaag

SEQ ID NO: 465664 - DNA, 98 bp, Homo sapiens
accaacactcctagccaatggtggtcatggagtagaagggagcgatactacagctggtaagcgggcccctcagtgctaccccagttccgtcaactctg

SEQ ID NO: 465665 - DNA, 75 bp, Homo sapiens
tggagctcatcagactgaccgtgtcttacatcagttcagagagattctggggagcaggtcctggtggatgtggag

SEQ ID NO: 465666 - DNA, 82 bp, Homo sapiens
ttgttaaacacaaaccaccctttaaattttcaagggaaggacaggaaacatgatgaaagtattgagggggcatcagaattgg

SEQ ID NO: 465667 - DNA, 82 bp, Homo sapiens
agaagctcagcgcagccctgcaggccaagcgcagcctccaccaggattttttatcaagcagaaatgcatcgaacaacgagaa

SEQ ID NO: 465668 - DNA, 74 bp, Homo sapiens
ctcatttcccccatcccccacagtgcaccctgctggtgaaggacaagctgagatctgtatctgtggacctgaat

SEQ ID NO: 465669 - DNA, 98 bp, Homo sapiens
gatggctttgtacggcttagaggacttccctttggatgtagcaaggaagaaattgttcagttcttctcaggaggaatgcaggctcaggttggaatgcc

SEQ ID NO: 465670 - DNA, 50 bp, Homo sapiens
cacctctgcgtttttccctccagagttgcatgctgagaatttgaaaaatg

SEQ ID NO: 465671 - DNA, 90 bp, Homo sapiens
cgttcttgcctcaggccagtcgcctccaggccaagagggatccttcacccgtgtctggaaaaccaattctgtgtcctcggaggaccacag

SEQ ID NO: 465672 - DNA, 89 bp, Homo sapiens
gtgccgtgcgccgcagcccgggcccaggccccggcagcgcctgggacaagatggttggaatccattttcgtacccatacaaaaaactgg

SEQ ID NO: 465673 - DNA, 75 bp, Homo sapiens
gtttttcggatgatgccttcaatactacctttatttccaccatagctgccactgcagagccccgccatggaagac

SEQ ID NO: 465674 - DNA, 100 bp, Homo sapiens
gctggctggagaggagggtggacgaagctctctccagaaagacatcctgagaggacttggcaggcagcttcgaaccagtgcaatgacgatgccagtcaac

SEQ ID NO: 465675 - DNA, 101 bp, Homo sapiens
gttgcattgtggatgcaaatctgagcgttctcaacttggttattgtaaaaaaaggagagaagatgactgaggaggaggtggagaccgttctggcaggacac

SEQ ID NO: 465676 - DNA, 85 bp, Homo sapiens
attctgtagacgagtatctgatttaggaaagtcctatcggatgctgagatcattcagactgtgccataacacacatttgatgctg

SEQ ID NO: 465677 - DNA, 75 bp, Homo sapiens
ttggccgcctctcccgcggccccattttccttcgaaggagggaaggtgtaccttgaaagacttttaacatacgca

SEQ ID NO: 465678 - DNA, 83 bp, Homo sapiens
cgcgcaactgtctgatctcagttcatgggatccatatggctttggagacagtcgagattcaaggcgtgatcgatccccaattc

SEQ ID NO: 465679 - DNA, 97 bp, Homo sapiens
gccgccctcgccaccgctcccggccgccgcgctccggtacacacaggcgccggtgtccggaaaggtgttcattcagcgagactacagcagtggcaca

SEQ ID NO: 465680 - DNA, 129 bp, Homo sapiens
gcttcctaacgcagactcgagtgcgaagcgcgcagtcgccgggtgggtctctccccagcgacgatttgggtgatggaggagatgtataagaaagctcatgctgctatacgagagaatccagtctatgaa

SEQ ID NO: 465681 - DNA, 90 bp, Homo sapiens
gagctcgctaggcgccctaagcaacagaggaagaacctctctatccagggcctccgctggtggctacagtggctgggcatcaacttcacc

SEQ ID NO: 465682 - DNA, 90 bp, Homo sapiens
cgataccgaagcgggctgtgtgccccttctccacccagagcatgcttttcacttccactgcatctctcgctggctcaaaacacgacaggt

SEQ ID NO: 465683 - DNA, 83 bp, Homo sapiens
cgtcatccgcggctacgtgggcaaccgggcggccacgttcccgctgcagctgcatcttcctcccgtgaggctggccgagctcc

SEQ ID NO: 465684 - DNA, 89 bp, Homo sapiens
cccagcacgaccagctcatgcaggttggatggcaagcatgtggtgtttggcaaagtgaaagaaggcatgaatattgtggaggccatgga

SEQ ID NO: 465685 - DNA, 80 bp, Homo sapiens
ctgctgggtccgctgagcggggcgacccgaggaaattgatgaagcctgtaagagaataaagcgtgaagttgatgatttgg

SEQ ID NO: 465686 - DNA, 98 bp, Homo sapiens
aaaaccaatggcctatccaaggacatgagcagtttacacatctcacccaattcagattggcggcagtaagcacacaatgaatgatcacctgcatgtcg

SEQ ID NO: 465687 - DNA, 75 bp, Homo sapiens
tggctatgaacccagaggtcgtggaggtggccgtggaggcagaggtggcatgggatcgtaaagctgaaaattgaa

SEQ ID NO: 465688 - DNA, 123 bp, Homo sapiens
ggggaccggcggcgctggaggagcgaggcagctgtactaggactgggaacgggtacagcagggaagaactggaaactcagagaaagaaactgcccttccatctacaaaagctgagtttacttc

SEQ ID NO: 465689 - DNA, 75 bp, Homo sapiens
gaagattagcaaaggtgctaatccagtggaaatcaggagaggtgcaggttttgcagcatttggacaaacaaagcc

SEQ ID NO: 465690 - DNA, 100 bp, Homo sapiens
ctgcctccccggctgattggattcgttactgctttgcaacgcgcacctaactccagcccacttataagaagcgaaggttggatgagtgtgaagaagcctt

SEQ ID NO: 465691 - DNA, 75 bp, Homo sapiens
aagaagaatattggctcactatttttcctctgggcatctatccagacagagcagctaccctcagctctagctgat

SEQ ID NO: 465692 - DNA, 102 bp, Homo sapiens
ttaacagaacgagtcctttactacactggcagaattgcaaagatgcatgaggtggcttaccttatccaacaaaatgttatcccacctttttgcaacttgctg

SEQ ID NO: 465693 - DNA, 50 bp, Homo sapiens
gaagaaagagcgtgccgaacgaaggtggcaggatcccattttctcactgg

SEQ ID NO: 465694 - DNA, 50 bp, Homo sapiens
cagggctacacatttttcatcccttccggatgtgatggtggcaggtggga

SEQ ID NO: 465695 - DNA, 100 bp, Homo sapiens
ggacatttactggctcatgatttccagatgcagtttcgaaaatgaaacctttcaacgaagtctaaaaataggaagcttccagaaccaccagacaatgagg

SEQ ID NO: 465696 - DNA, 106 bp, Homo sapiens
ggccttccagtacacagacgagcatggggaagaggccaaactgagcagtttctggcagttgattgtggatgagaaaaagcaggttttcacttctgagaaattcctg

SEQ ID NO: 465697 - DNA, 49 bp, Homo sapiens
cccggccgagaccccgtctgggaggtatgtgaggagcagcgctgtgagg

SEQ ID NO: 465698 - DNA, 87 bp, Homo sapiens
ccactgccgcaggaggcgtgagggacagtatgatttggtgaaatgcctggctcctattcgagaccccaagaccgagcaggatggaca

SEQ ID NO: 465699 - DNA, 100 bp, Homo sapiens
atggatgttcttcttcgagtatttgtagaagggaccagatggcctttgaggatgtggctgtgtacttctcccaggaggagtgggggctcctggacacagc

SEQ ID NO: 465700 - DNA, 75 bp, Homo sapiens
acctaaacagcacaatgcaccctgggacccggaagagagccgagtcgtccggaaatccattgcccgtgttctcac

SEQ ID NO: 465701 - DNA, 87 bp, Homo sapiens
accttagatttgaaattaactgcatcccaaacttaattgagtatgttaagcagatgatgaagaacgagagcttcaaatggatcctgc

SEQ ID NO: 465702 - DNA, 75 bp, Homo sapiens
gaagagtttatatctgaaatggacaatgagtccctggaacgccagatgcgtgaaatggaagagaactttgccgtt

SEQ ID NO: 465703 - DNA, 83 bp, Homo sapiens
gaggttttgagcacttaagcgagccacagaccacccaggagtgcgagctgtggcctgttacgaagacagtgacccgcccattc

SEQ ID NO: 465704 - DNA, 89 bp, Homo sapiens
tctatatgaacaatccgtctggatcacggatgtaggaagtgctgaagaggaggcaaatgaagaagatgtactgggagatgaaacagagg

SEQ ID NO: 465705 - DNA, 100 bp, Homo sapiens
agatggagagagaaaggattcgaatgcgccaagaggagctcatgaggcagcttgcaagtagaagtctcaggcaacagattaaaccagcagtgactataaa

SEQ ID NO: 465706 - DNA, 78 bp, Homo sapiens
tggcagatggcaacagaggatgtcaacaattttttggaggacaggcgacactaacaggtgaagatctcgggagaccat

SEQ ID NO: 465707 - DNA, 78 bp, Homo sapiens
tatattactcggaaatcagcatcttgtgcccaccagaagtatgtccgacaagcctggcagaaggcagacatcaataca

SEQ ID NO: 465708 - DNA, 100 bp, Homo sapiens
cgtgctgccccgccccgctccacccgtgaggggatctgtgaacaagaggaacctcagcagccaggacaggcaggagcagtggaatagctactatggcttc

SEQ ID NO: 465709 - DNA, 99 bp, Homo sapiens
ggagccggtgctgcagaaccagatccgggagcacgtcatcgccatcgaagggtggtttataaaatcctccaatgaagctactaacattactccaaagca

SEQ ID NO: 465710 - DNA, 97 bp, Homo sapiens
cgcacgtgcagcgagtccactcagagaccctgacgaccagtacaagctcacggaggacacccggcagctgggcctcgtggtgtgccggggcacgtcc

SEQ ID NO: 465711 - DNA, 83 bp, Homo sapiens
ctgcacctgactttggccaacgtgggtgtcgtgaaaactacccctaaaagccaaaatgggaaaggaaaagactcatatcaaca

SEQ ID NO: 465712 - DNA, 100 bp, Homo sapiens
ggaagtggtgaaacccaaacaacatctcctgctattccttgggctgcctttcctgcaggtatcagacttggtgataattctgaattatgaccgtgctgta

SEQ ID NO: 465713 - DNA, 100 bp, Homo sapiens
gccagagcctggagtctgcgaaggccgggacccggttccccggcccacagtgggggtgtgcaaacccgagagaactggtgaaagagtttctagccaaagc

SEQ ID NO: 465714 - DNA, 98 bp, Homo sapiens
atggaaaaaggccctcttcaagcctgcaaggatggaacattactgtggacctggtcattggccctaaagggatccgccagctgactagtcaggacgca

SEQ ID NO: 465715 - DNA, 100 bp, Homo sapiens
cggatgccctgcagtacctgcagaaggtctctggagacatcttcagcaggaatacttttttgatccagatgtgttaactgaaggagagctggccccaaat

SEQ ID NO: 465716 - DNA, 100 bp, Homo sapiens
gctctgaggactacgacagtcaccgcaggttcgaagaccagagtctcactgtcgcccaggctgcagtgcagtggtgccatcacgcgtcactgcaacctct

SEQ ID NO: 465717 - DNA, 80 bp, Homo sapiens
ggaactctacaacccaatccagtatctggagtccatctttcaccatcttctcctgagattgtactggaccgtgaccactc

SEQ ID NO: 465718 - DNA, 82 bp, Homo sapiens
tgagtcagtgcgccgctctccagcccgcttgaacgcagaaaaatatggctcaggagactaaccagaccccggggcccatgct

SEQ ID NO: 465719 - DNA, 82 bp, Homo sapiens
ccggcagcagcccgacgcaaaccaaggatctggggatcttcgcactatcccaaggattttttatcaagcagaaatgcatcga

SEQ ID NO: 465720 - DNA, 100 bp, Homo sapiens
aggatctcttctaacatccagaagatcacacagtgttgtttgttggagactgaaccgttgcaaggaacagacgaagatgcagtagccagtgctgacttct

SEQ ID NO: 465721 - DNA, 100 bp, Homo sapiens
ggagccgaagcccaaaaagctgaaggtggaggcgccgcaagcgctgagggcttttttccagacttcaagctcccattccaacagtaagagcttcttccac

SEQ ID NO: 465722 - DNA, 100 bp, Homo sapiens
gttggaactccgcgatggagatatcgttgatgtcatggaaaaatgtgacgatggatggtttgttgatctgaacataaagtctggtctcctctggtgacgg

SEQ ID NO: 465723 - DNA, 95 bp, Homo sapiens
acctcgacgtcttgcctgtgtcccacttgttcgcggcctataggtgatgtgtccaatctagatcccaacttctcatttgaaggcaccaaactgga

SEQ ID NO: 465724 - DNA, 90 bp, Homo sapiens
gaatccacaaacggagacggcagacagtcacaggcaggattgctgtcacgtctaatgtggctgctgcctcgtgtcacatctgaaactcat

SEQ ID NO: 465725 - DNA, 98 bp, Homo sapiens
aggaccccagatgtctgacagccctgtgtgacaccaagataagtaacgatctgtgccagttcagaagcaggcgagcctcttccctgatgaaaaagaag

SEQ ID NO: 465726 - DNA, 100 bp, Homo sapiens
caaggatgaagacctccatgatgagccatctccacttaatgactgtctcacattggccggcaacttgttccagaccacaccaccccagagccaagtgcac

SEQ ID NO: 465727 - DNA, 83 bp, Homo sapiens
cgtgctggcggcggcggcggcggcggcggcggcgctgctcccgggggcgacgggccatttgcatcccactgtccttgtgttcg

SEQ ID NO: 465728 - DNA, 98 bp, Homo sapiens
taacgagttctctagcgctagtgatgtggttggaatgttgcatcagcaggtagaagaacatgaaaaaatcaagcaagagatgaccatggaatataagc

SEQ ID NO: 465729 - DNA, 75 bp, Homo sapiens
acccagtggggcagccagcactgaaaactgaggagcgcaagaaatgaagccacttattcccagtaaggaagctgc

SEQ ID NO: 465730 - DNA, 73 bp, Homo sapiens
gggccttccatccgcttggccccacaggaagctgaaccatctatctccagaaatgtcttcagaaagtaaagag

SEQ ID NO: 465731 - DNA, 75 bp, Homo sapiens
cacctgtgaacctcggcagtgcgtccccgggactctgttctgtgaggcccccccggcctgccacttcagtcaact

SEQ ID NO: 465732 - DNA, 94 bp, Homo sapiens
ccaaagacaagacgcaggagaaaatcgagacctcaagtaatcattcccaagggaagttggttaaccacccgtgtccaccctatgccttggcatg

SEQ ID NO: 465733 - DNA, 87 bp, Homo sapiens
cccagaaacgtcactatcaagaagctgatgatgggagaaccagttactaccttctctaacacaggctccatcctatctcttcatctc

SEQ ID NO: 465734 - DNA, 87 bp, Homo sapiens
agagcctgacccactggaagataaacagccctggaagaaagcgggacttttcccctgttccttggagtcagtattttgagtccatgg

SEQ ID NO: 465735 - DNA, 90 bp, Homo sapiens
gttcaacctccaaagcagcaaccaatgatatatatctgtggaggccattcaatgtcccttcttcaggaatttggaaaaaggatggagaga

SEQ ID NO: 465736 - DNA, 95 bp, Homo sapiens
ggactcgccctcctatgtcctgtacagaaaaaggatcctgtttgctgtgtaatcctgagaatggactgcaagagaggaaaaactgggcgtctgct

SEQ ID NO: 465737 - DNA, 90 bp, Homo sapiens
cggcgaccccactccggcggcgcgtcccccgagcttgcttcggaaccaaaaagaagcttcccagagccggggccaggagccccaagcgcc

SEQ ID NO: 465738 - DNA, 90 bp, Homo sapiens
gccccgcaacctcaaccctggcatggcatgatgggcccacctcctggtatgagacctcctatgggtcccccaatggggatcccccctgga

SEQ ID NO: 465739 - DNA, 50 bp, Homo sapiens
cggcaactcagaaacatcaggtccaagccctgggcgctgcctatggcaca

SEQ ID NO: 465740 - DNA, 75 bp, Homo sapiens
aaagacgcaatcaggagaagccaagcacgctgacgaggttctgtgagagcatcaacttgagttggtggaaccaag

SEQ ID NO: 465741 - DNA, 98 bp, Homo sapiens
tgagtttgcaattgctgagtacaatgctccttgcagcaaagatctggaaagcatgaagactgggctttttttcctatgtctcttgggaactgcagctg

SEQ ID NO: 465742 - DNA, 100 bp, Homo sapiens
cgatgccaacatcctttcgagccccaagcagcacttccagtgttctcactgttccaagagatttgccacagagcggctattgcgggaccacatgcgcaac

SEQ ID NO: 465743 - DNA, 101 bp, Homo sapiens
gtgagcctgcttctgtcaattactgaagctataaggagattttttaaaaattaaacttcaacacaatgagtacatccagcagtggtcattcgacaacgaaa

SEQ ID NO: 465744 - DNA, 87 bp, Homo sapiens
cccagggctctgatgtgtctctcacagcttgaaaaggagttgtaagacgttcatcgccgtgttatccttgagtaaaggtgagtatta

SEQ ID NO: 465745 - DNA, 83 bp, Homo sapiens
cccaaacttgctggtcactgggagatgcctgctctgtgcctgtatctgagatcatcgccgttgaggaaacagacgttcacggg

SEQ ID NO: 465746 - DNA, 104 bp, Homo sapiens
gcgagcacagagcctcgcctttgccgatccgccgcccgtccacacccgccgccaggaggccgccgagcggctgaattccgtggagccggtcaggttcaccatct

SEQ ID NO: 465747 - DNA, 83 bp, Homo sapiens
gttgtcgtggccggagcggcccgcgcctgggctgccggcacttcgcggcaggaagcaggtcctggggaccaaggtggacgcgg

SEQ ID NO: 465748 - DNA, 90 bp, Homo sapiens
ccgtgaccgagagcgtgaccgagagcgcgaatatcgtcatcgttagaagagatcaatggcttttcaaaagcagcacaccaaactgtcaaa

SEQ ID NO: 465749 - DNA, 100 bp, Homo sapiens
ctagaccataaaaataaaaaacatatccgagggtgtcctgttacttccaagtcatcaccagaaagacatgcacatgatggtgtccaagccagaacagtgg

SEQ ID NO: 465750 - DNA, 113 bp, Homo sapiens
ttggggagaagaggattggaggtgtcagtgttaaaggaacctctacaacgaaggtgaagccacggaagataagtggacagaggactgcagaaaatcaacctatcctccttcag

SEQ ID NO: 465751 - DNA, 75 bp, Homo sapiens
aatcacttgggttcattctattcaggtgactgaaaactcctgaggcatttcctggactagaatgggtagtgaaga

SEQ ID NO: 465752 - DNA, 97 bp, Homo sapiens
accaagccaacgatggtctttcctctgcattgctgatcttgtacttggattcagcaaggaaccttccgcatgcttttcacttccactgcatctctcg

SEQ ID NO: 465753 - DNA, 75 bp, Homo sapiens
gtgccgcctccctccggaggtgcgcggaggcttggtgtgccaggttcacagcaaacaggattcctaaatgccctt

SEQ ID NO: 465754 - DNA, 89 bp, Homo sapiens
gaagaggggcttattaactcgtctgctgcaggtcatgaagaaggagccagcagagtcgtctttcaggcgcctgtgtctggcagagctgg

SEQ ID NO: 465755 - DNA, 75 bp, Homo sapiens
gggcttcagtactcgggcaagaccaccttcgtcaacgtgatcgcgggcggccaggcggccaggctgcaggaggag

SEQ ID NO: 465756 - DNA, 97 bp, Homo sapiens
cctcgtgcagcaacccccacacccagcaccagggtgacgtcccctatgttgctggtggctctggctgtctttttcggcgcctgttacattctctatc

SEQ ID NO: 465757 - DNA, 100 bp, Homo sapiens
ctcagtattgcctcaaatgctgctcatggaagatccaaatccggaagcgaaatgtggtgattttaaagctgttatagtggaagtatcaggacaagcccat

SEQ ID NO: 465758 - DNA, 100 bp, Homo sapiens
tcgacgccgttctgaatctgtgcacctaccatcaccctgaaaacatccagctcccaccggggccaccagcccctcgggttccaagatgcagctactggag

SEQ ID NO: 465759 - DNA, 82 bp, Homo sapiens
ggaacccgagctggagctgaagcgcaggctgcggggcgcggagtcgggagctcattgctatggacagtgctatcaccctgtg

SEQ ID NO: 465760 - DNA, 100 bp, Homo sapiens
gaagatgtgccgccgctgccaacgtcgagcggcgacggctggaggaaacacaattattactagaaaacctgcatgtttatcatatgaattacttcctggt

SEQ ID NO: 465761 - DNA, 82 bp, Homo sapiens
cagcgaggcgccggcccagactccactccccagctgtgaaagggactccctccccagctcggtcattagtgccatcagtgga

SEQ ID NO: 465762 - DNA, 83 bp, Homo sapiens
gagggccaccccacggcccagcatgagaaaatgctctgtgacacctggtgtatcgagctgatcacagaacaggccgatatcgc

SEQ ID NO: 465763 - DNA, 90 bp, Homo sapiens
aggctcagagcttggagacagacggacctgctgtcctttgagctgttggatataaacattgttcaagagttggagagagtgccccacaac

SEQ ID NO: 465764 - DNA, 99 bp, Homo sapiens
agaaactggaggcagaaatggaagcagctaggcatgaacaccaattaatgctaatgaggcaagattgtctcctaaccctctagttttaattggacactt

SEQ ID NO: 465765 - DNA, 98 bp, Homo sapiens
gctcccgcgggcccgcggacccagctgtcaggcaagcggacaaggcaaaatctcagcaagttcggacctctagtacaataaggcgaacctcctctttg

SEQ ID NO: 465766 - DNA, 75 bp, Homo sapiens
cctcctccgcctcctcctctcccgcgggcaccgaggactccgctcctgcccagctgatgtagcccagcagttcca

SEQ ID NO: 465767 - DNA, 98 bp, Homo sapiens
acgaactcgtccagagggtcggcagcggcacctacggggacgtctataaggtgcagctaaatcaagtccagcagctaaaccaggatccacaccttctc

SEQ ID NO: 465768 - DNA, 100 bp, Homo sapiens
gggaagcagagtgtctggatggaacctgagctgggtctctgactcacttctgactttagcaacgcacctcttgctttttcctccaaagtatgttatgtta

SEQ ID NO: 465769 - DNA, 100 bp, Homo sapiens
gaagatacaatgttgaatggcccttcagactttgtgtggacagtaatgacctcacgtttccgattgcctgctggcagaacctacaatgtacgagcatcag

SEQ ID NO: 465770 - DNA, 100 bp, Homo sapiens
agaagcagcaggagcagcagctgcagctctactccaaggagaggctcagggacctcaaagcgcaagtcccagcagcccaggccccacgtgcacaggccgc

SEQ ID NO: 465771 - DNA, 89 bp, Homo sapiens
gaagatctgggtgcccgtggaccacaggccctcgttgcccagatgtgccagaaccctgtggagcatcatgaactgggaagagtagctga

SEQ ID NO: 465772 - DNA, 75 bp, Homo sapiens
gtccgctttgccaagaagatggacaagatggtgcagaagaagaacgcgttggcttggacgccttttctggctgca

SEQ ID NO: 465773 - DNA, 100 bp, Homo sapiens
agtatgttatgaaaatgttttgaagcaagtaaaggctggacaccaggtgtctcaatgcttgtacctactgcaaaactaaacacgccagaggaaatttggc

SEQ ID NO: 465774 - DNA, 100 bp, Homo sapiens
gcggcccaccgggactcgccgttggaatactcccccagttgcaagaggcgcaggaccgtggaagacttcaacaaattctgcacctttgtcttggcctatg

SEQ ID NO: 465775 - DNA, 100 bp, Homo sapiens
cagctgccggcggcgcggcgagagagcggctgacagaggggatgcgagaaagctcctcctgagcttggataaactgcaggagcgaaggggctgaccgttt

SEQ ID NO: 465776 - DNA, 83 bp, Homo sapiens
gtccgtgtcaccgccggaacctggcgcaggtttttagaacttcagccataaaaatgggcagaattttccttgatcatatcggt

SEQ ID NO: 465777 - DNA, 102 bp, Homo sapiens
agcaccatccgcatcggggacgtctatggcttcctggtggagcactacgtgcggaaggaggaataccagacgtagagacggggtttcgccgtgttagccagg

SEQ ID NO: 465778 - DNA, 75 bp, Homo sapiens
cgtgagacagatcaagatcaagaccggcgtggtgaagcggtgtcagcttcctctggtgcaaccagcaagtcttcc

SEQ ID NO: 465779 - DNA, 88 bp, Homo sapiens
agctctgcgcagtgagacggagctgctgctgtctgggaagatggccctggtgaacggggtctgcatggaggggaagcagcatggggac

SEQ ID NO: 465780 - DNA, 98 bp, Homo sapiens
taaaattgcaaatgcatatatcatcaaggagcattttgaggctgctgatactttggctgtgaggcaaaaaaggagaatttatgatatcaccaatgtct

SEQ ID NO: 465781 - DNA, 98 bp, Homo sapiens
gagaagaaccgctcgctgcagtccgagaacgccgcgctgcgcatctccaacagcgacctgagcggacgagattgaggagctgcgggccgagatgctgg

SEQ ID NO: 465782 - DNA, 100 bp, Homo sapiens
agatggcggatgccctgcagtacctgcagaaggtctctggagacatcttcagcaggtaccttgaggttatgcggaaactccagaaaacatacaggatgga

SEQ ID NO: 465783 - DNA, 74 bp, Homo sapiens
aatgtgctgccttctgctcagctgatgatggacaagatgctgagggttggaaaagcaaaagcagatgtgtggcc

SEQ ID NO: 465784 - DNA, 100 bp, Homo sapiens
cttgcacccagacacgacaccatgcatctcctcggcccctggctcctgctcctgggaggagatcgggcagttggtgaagcagatgctggatgactttgga

SEQ ID NO: 465785 - DNA, 100 bp, Homo sapiens
aaggactcggagcgcatgcagctgctgctgaccctggccttcaaccccgagccgctggtgctacaggccactaaagatgctggccagatatctggactga

SEQ ID NO: 465786 - DNA, 100 bp, Homo sapiens
cgatggtcggcggcgcccggatgggcagctgaggaattccgtcagaaatcgctggactgggagaagcaacgcttgatttatcagcaacaggtatcttcac

SEQ ID NO: 465787 - DNA, 100 bp, Homo sapiens
gtctttatatcctgacactatgaatgctacttggatgcctcttaaggtgcaaatagtctacaaaccagttgacctgagcaaggtgacctccaagtgtggc

SEQ ID NO: 465788 - DNA, 75 bp, Homo sapiens
gtcatacaccagtactaccaaggacagcttttttcctgcaagacgcaaacatgcagatctttgtgaagaccctca

SEQ ID NO: 465789 - DNA, 82 bp, Homo sapiens
ggacctgtttgctgccatgctcctggcgtggacacacaagcaccccaataacctcaagggggatatgagactttctactcgg

SEQ ID NO: 465790 - DNA, 100 bp, Homo sapiens
aaaaacctggtgaaaaaggattttttccgttccttgaatttctacgtgaattttaggatcagcttgtccatttctgcaaagaagccagctgagcttttga

SEQ ID NO: 465791 - DNA, 90 bp, Homo sapiens
ggaacttcggtacacaggcctttagtgatgtggtggtaagatgtatggtcactttggaacttcttgggtgaagcactactgtacatatca

SEQ ID NO: 465792 - DNA, 75 bp, Homo sapiens
cttccctccgtgtcctgaaaagtgcgaccgttctcccaaggaatttccacggtactccaaagattcaggtttact

SEQ ID NO: 465793 - DNA, 80 bp, Homo sapiens
tggagtcaccttttagcccgggactctttcacaggctggatgaagattgggtttggtgccctggttgtcagatgttggaa

SEQ ID NO: 465794 - DNA, 50 bp, Homo sapiens
tcattaagcagtgcagaaacacaggaacgtcaaggtcgtgggaaataaaa

SEQ ID NO: 465795 - DNA, 75 bp, Homo sapiens
cctgccgtcatgtctaagtcagagatgccccctaaaaagggaggtgatggaattaaaccacccccaatcattgga

SEQ ID NO: 465796 - DNA, 50 bp, Homo sapiens
gtccagcccaggaaaatggagaggctggacggcgctgcacgaggcctgta

SEQ ID NO: 465797 - DNA, 90 bp, Homo sapiens
gattgctgcatagaaagagaactccagagatctgcagagggtcctgcttgaggattcaggtctctaattaacagaagatggcaaagccca

SEQ ID NO: 465798 - DNA, 100 bp, Homo sapiens
ggcctcacactagtatcgcatgtccactatccagaacctccaatctttcgcttcctaatgaagatcctgagatttttgatgtttcatccaagtgcctgtc

SEQ ID NO: 465799 - DNA, 75 bp, Homo sapiens
ctctgcgctcctgcatctgcctccccatgtaactaggatttctacctcaaccgcgagacctatgcaaggacggtg

SEQ ID NO: 465800 - DNA, 75 bp, Homo sapiens
tattaaatgaaaacacagtttctgcaggaaaagatctctctacttctcctaagtctattgcgtctgcagacatgg

SEQ ID NO: 465801 - DNA, 100 bp, Homo sapiens
aaactcccaggctcaagcaatcctaccatgtcagccttcccagtagctggaactacaggctaaagtaaataatgccagcctgattggactgggttatact

SEQ ID NO: 465802 - DNA, 74 bp, Homo sapiens
ggcggcggcggcgccgggcccgggggtggtgacagcaggtctgaggagacgcaggtcagaatggaaatgggctg

SEQ ID NO: 465803 - DNA, 100 bp, Homo sapiens
gcttaccagagtacctggtgggctggcagagcataagtacatccaggccatggtaggggaggagtgtgtaggtgccatcgtttgcaagttggatatgcac

SEQ ID NO: 465804 - DNA, 74 bp, Homo sapiens
gaaaaccccgaggagccctgttccaaagcctcctggaccgtccaagaagagattgctgcgatgattgacactga

SEQ ID NO: 465805 - DNA, 73 bp, Homo sapiens
ctcggcggactcgccatggaggaggagggtgaagatgaagccatgtttgtagaatatagaaaacaactgaagt

SEQ ID NO: 465806 - DNA, 100 bp, Homo sapiens
gaaagctcattgactggtgaatcagatcatgttaaaaagtctttagataaggatcccttacttctatcagaaatgagccgtcagactgctacagcattac

SEQ ID NO: 465807 - DNA, 147 bp, Homo sapiens
accaagaaaaccttatcagcactatttgaaacttttatctcatctggcttggcgcctgaggttctcccattaggcgagttttgtggcatctggaaaccggacagatatttctttagatgatcccaacttctggcaaaaatgggctaa

SEQ ID NO: 465808 - DNA, 100 bp, Homo sapiens
ttaaatacttgctttactggaaagacccagaatatgccaagtatctaaacgggacgaccctgggacagtctccactggggcagatccagctgaccatccg

SEQ ID NO: 465809 - DNA, 98 bp, Homo sapiens
ctcccaaagggctgggattacagcaatactacatcctgctgatcctgacggacggcgtggtgaccgacatggccgacacacgggaggccattgtgcgt

SEQ ID NO: 465810 - DNA, 74 bp, Homo sapiens
ggcccatctctgtagccatcactgagaaatctggattttcaaggaaactgggtcccttgaagaatctacagatg

SEQ ID NO: 465811 - DNA, 98 bp, Homo sapiens
cccagaaaatcattctgccttattacgccgtctccaagatgtagctaatgaccgtggttcccactgagccagtcagaggaggaggaggaggtgtttgg

SEQ ID NO: 465812 - DNA, 100 bp, Homo sapiens
gcgctgcgggcgggcggcgcaggaggcgagcggcggaacatcgggacacagctggtgatgcctctgagtcagctctgctcaagtgcattgagctctcctg

SEQ ID NO: 465813 - DNA, 100 bp, Homo sapiens
caatgctgctgttagatgaaagacaagatgtccatcttctcatgaccaactgtatcaagaagtatgaacatgctaatgatgataagagcagtttgaaatc

SEQ ID NO: 465814 - DNA, 83 bp, Homo sapiens
gtgacgttgtggagatggggagcgtcctggggctgtgctccatggcgagctggacaatgcagatcttcgtgaagactctgact

SEQ ID NO: 465815 - DNA, 90 bp, Homo sapiens
ttggctgataaaattgccctgaaactggttggtgaagaaggatttgtagcgatggcaagccggcaggtggatattgcaactcagggctgg

SEQ ID NO: 465816 - DNA, 90 bp, Homo sapiens
tggcggatggccccaggtgtaagcgcagaaagcaggcgaacccgcggcgcaataacggcgttcccgttgcccgctctctcccggaagcag

SEQ ID NO: 465817 - DNA, 50 bp, Homo sapiens
tggaaattcctgacgttcattgatctggctgagtttgagaaagctgcaga

SEQ ID NO: 465818 - DNA, 50 bp, Homo sapiens
gtttgagcccggaagcgcagaagctgcgagtaaccagctcataaatcaca

SEQ ID NO: 465819 - DNA, 90 bp, Homo sapiens
ctcagaggctaagaaggtggagaccggagaagctgtgaggttgaaatgactccaaagtagatggtttagtaaactttgagaagttaagaa

SEQ ID NO: 465820 - DNA, 88 bp, Homo sapiens
cggatgccctgcagtacctgcagaaggtctctggagacatcttcagcagatgagcagcaccagcagtaagagggctccgaccacggca

SEQ ID NO: 465821 - DNA, 99 bp, Homo sapiens
gaatgcttcaggtgtcagaagttcattgaattggcagagggggtcgatttgggaggaaaggtgtggctataaactttgttactgaagaagacaagagga

SEQ ID NO: 465822 - DNA, 100 bp, Homo sapiens
aagaaatttggattattttagaaacaaatttggaaagaaaaagaatggcgtccgtttcagatgcagagtttgcggggtggtacagaagcgatagcacgat

SEQ ID NO: 465823 - DNA, 72 bp, Homo sapiens
tcaccctgccgtcatgtctaagtcagaggggtgagcccctccagactccgaataggagatcaagagtttgat

SEQ ID NO: 465824 - DNA, 75 bp, Homo sapiens
ggctcttattgctgaaagactacccatgctatatccagaagtaattcaacagttgacaacggcagtgaccagtgc

SEQ ID NO: 465825 - DNA, 87 bp, Homo sapiens
ctcacaatgaggctccctgctcagctcctggggctgctaatgctctgggtctctgatctgaacagaattaagacgaacgagctttca

SEQ ID NO: 465826 - DNA, 83 bp, Homo sapiens
agcgagcccggacggcgcctctcgaacgagtgtgggcgcgaggcaggtttggtgcacctcgatttggaggaagtagggcaggg

SEQ ID NO: 465827 - DNA, 46 bp, Homo sapiens
aatcagaggagatgtaactatcgttaatagaagatgaaattgcaac

SEQ ID NO: 465828 - DNA, 98 bp, Homo sapiens
tccagcagggctattcccccacacccctacccactggaaaggagtgttgtaagactaggttttggctaagtgtctcatgcgggagcctccatgtcatc

SEQ ID NO: 465829 - DNA, 83 bp, Homo sapiens
attctctcggccagcgcctccgcgaagctggcagggcggagatgctggaccacgccgtcctgcttcaggtgatcaaagaacag

SEQ ID NO: 465830 - DNA, 90 bp, Homo sapiens
gcctggtctccattatttgagatgagttacatcttggagaccaagatcactccatggatgaaatgacagctgtggtgaaaattgaaaaag

SEQ ID NO: 465831 - DNA, 100 bp, Homo sapiens
ggacgggacagggtcgggggacacgcaggatgagccccgcgaccactggcacattcttgctgacaggtgctggagaatctggtaaaagcaccattgtgaa

SEQ ID NO: 465832 - DNA, 50 bp, Homo sapiens
agcagatcgtccgtggcatgaaccagagctcagagtggaccctggcccgc

SEQ ID NO: 465833 - DNA, 100 bp, Homo sapiens
cagcgccgggccaaggccaaggccagccggactaaaacaaaggttatgatgtgattgctcaagcccaatctgggactgggaaaacggccacatttgccat

SEQ ID NO: 465834 - DNA, 90 bp, Homo sapiens
catcatcggtgccaaggaccacgcatccatccagatgaacgtggccgagggtcctcactgagcagcgagtcgtcccccgtgtcctctccg

SEQ ID NO: 465835 - DNA, 101 bp, Homo sapiens
gctccagagagacgtgaaacatgtgaacactcaagtgaagcaaaagccttccatgattactttggaaattttagcattcaggtgccaggaatgcagatggg

SEQ ID NO: 465836 - DNA, 97 bp, Homo sapiens
gctctctaaattgactcagctccagagaaatggtcaatgcatggtttgctgagagagttcacaccatccctgtgtgcaaggaaggtatcagaggcca

SEQ ID NO: 465837 - DNA, 100 bp, Homo sapiens
agatgtgccgccgctgccaacgtcgagcggcgacggctgatttgtcccatcagatgaaaagaagaaacaaggttgtcaacgagaaaatgaaactctaata

SEQ ID NO: 465838 - DNA, 75 bp, Homo sapiens
attcagagttggataagcacttggaatcacgggttgaaggtggcctaggtggtagtcatgccttgcttctactac

SEQ ID NO: 465839 - DNA, 109 bp, Homo sapiens
gcaccatgccgctcctaagcctgcacagccgcggcggcagcagcagtgagagctgggagtgtccactcgccttccaccagcatggcaacgtcttcacagtaccgccagc

SEQ ID NO: 465840 - DNA, 100 bp, Homo sapiens
cttaaagatccaaaaagaaaagaaggtgctgggtccctagccaggtcagaagccaatgacctggccctgaggctggctcgccactacacgggacaccagg

SEQ ID NO: 465841 - DNA, 100 bp, Homo sapiens
tccatgaaatggtacacgcagaacatggacacttagagatggtgcgatttcttttggaagcaggcgcggatcaagagcataaaacagatgaaatgcacac

SEQ ID NO: 465842 - DNA, 100 bp, Homo sapiens
ggggtcagccccccgcccggccagccgccccgtccgggagaccagatgatgtgcttctgcatcgcactcatgatgagattgtcctcctgcattgcttcct

SEQ ID NO: 465843 - DNA, 100 bp, Homo sapiens
ggaacatgggtgaccttcggaggccagatcaccgatgagcccgagaccgaggacgagaagaagcgctttgaggaaggcaaagggcggtacctgcagatga

SEQ ID NO: 465844 - DNA, 75 bp, Homo sapiens
agcgcagaaagcaggcgaacccgcggcgcaataacggagcaggccgggctctcgccatgggtcactgtcgcctct

SEQ ID NO: 465845 - DNA, 100 bp, Homo sapiens
cgtcaccactgtgaggcctacagctctgccggggaggaggaggaggaggaagaggaggagaaggtacagcagggaagaactggaaactcagagaaagaaa

SEQ ID NO: 465846 - DNA, 80 bp, Homo sapiens
tgaaatcactgacacaaaaagttcaagctggtgcctatcctacagaaaagtgcagtcattggagaaatcgatgaagaaac

SEQ ID NO: 465847 - DNA, 82 bp, Homo sapiens
cgactccaagctgaacttccggaaggcggtgatccagctcaccaccaagacgcagcaagagtgagccatggagctacgtgtg

SEQ ID NO: 465848 - DNA, 100 bp, Homo sapiens
caggccgcgacgagggcgctgagtgtggaaccatcagagaatctacaatccctgatggagaagaatcagtccctggtagaggagaatgaaaaattaagtc

SEQ ID NO: 465849 - DNA, 75 bp, Homo sapiens
actggtcgccatcaagaaagtattgcaggacaagagatttaagaccaggtccagggaacagtcaccatccggaac

SEQ ID NO: 465850 - DNA, 74 bp, Homo sapiens
gtggagccttctcagacccacagaaagatcaactgaaatcggcaaacttctgagttcctacttgcaaaagaaaa

SEQ ID NO: 465851 - DNA, 87 bp, Homo sapiens
tcactccccagaatgagcccggctttgcggctgggtcctaaactgcgggactggtgattgcagctggaagtgcccatgaccgagctg

SEQ ID NO: 465852 - DNA, 100 bp, Homo sapiens
gagcaatcgccatggagtttgtgatgaagcaggctctaggagaaaaagcttgtggtgaaggggggcaaaaaaaagaagcaagttctgaagttcactcttg

SEQ ID NO: 465853 - DNA, 83 bp, Homo sapiens
ccgtgctccattatgtcgtgtgcttccccgacatgccaatatttggtttctgtccagcccatgatgatttctacttggtggtg

SEQ ID NO: 465854 - DNA, 90 bp, Homo sapiens
cgaggaccagccctggctgctccgggtcaacggcaaatcaggcaggaaaaggtgcttcctggaggggcctgccccactgttcctgtgctg

SEQ ID NO: 465855 - DNA, 100 bp, Homo sapiens
ctctgcagggcatgtgctaactaccagacgatgaaagaacatttcctctagtttctggataatgagcaggcacacagatgtagaagacagaagtagctca

SEQ ID NO: 465856 - DNA, 100 bp, Homo sapiens
gcttcaaagagacaatcaagataggatccgaggttcaggctgttttggagtcagcggaagatcaccaaggccagggagtggttccaccgcactgtgaaga

SEQ ID NO: 465857 - DNA, 74 bp, Homo sapiens
taatcaggcaattatgtcttctaaaaatattgcacagcttgtagattttcagtggaaactgggtatggctgtga

SEQ ID NO: 465858 - DNA, 100 bp, Homo sapiens
atggcggcggcggcggcggcggagtgtaggaagaggcactgctgagggggcgcgaggggaacggaggccagagctgcggctggagtgcggtggcgtgatc

SEQ ID NO: 465859 - DNA, 75 bp, Homo sapiens
gtaaatgggttaccagaggaagagctaaggttattctggtacaagttaacccaggagaagcatttacaataagaa

SEQ ID NO: 465860 - DNA, 75 bp, Homo sapiens
cctggaagcaagccgccgtggagaaggaagaactgtgctgagactgcagaatccgcaacggtgagaatggaatac

SEQ ID NO: 465861 - DNA, 60 bp, Homo sapiens
cgaactcaggcagagcactacctgtggtatggcaagtctattatcctcccagtccacaac

SEQ ID NO: 465862 - DNA, 97 bp, Homo sapiens
aaaggcatggggctgtccatgggcaccatgatctgtggctgggataagagaggccctggctttgatgaactaggtggacttctcaaaccaacagtgg

SEQ ID NO: 465863 - DNA, 82 bp, Homo sapiens
catgatggcctactgcgaccagatcttccaggacgagacgggcaagaaccgatccagcacacggaagacatggagaacgaga

SEQ ID NO: 465864 - DNA, 76 bp, Homo sapiens
cttgacttccagactctcagactgtgtggaaagacccaacatgagtgaagtttcctgcaagaaacgggacgactat

SEQ ID NO: 465865 - DNA, 80 bp, Homo sapiens
ctgcccgagaaattgaggccgttgtacaaccatccagcaggcaggaaactgcatatcttctggtttacatgaagatggag

SEQ ID NO: 465866 - DNA, 75 bp, Homo sapiens
agagaattatgggaacgtggtctcactggtctatgcagatggtagtatatgtctggacatacttcagaaccgttg

SEQ ID NO: 465867 - DNA, 75 bp, Homo sapiens
acctttgtcaccagaatgaatgaagtgcttcagatttaaatacaacgaagtaaacgaggaggttggtccaaagga

SEQ ID NO: 465868 - DNA, 50 bp, Homo sapiens
tgggggaccacaagatcctcatcgacaggaagctgtcttctgctgttggc

SEQ ID NO: 465869 - DNA, 74 bp, Homo sapiens
gagactcctgcgtcctccgacttttcatgatatatgcttaaaggaggtaacgtcgatggccgacagtctgtata

SEQ ID NO: 465870 - DNA, 83 bp, Homo sapiens
gatcgatgtttcaatattggaagcgctttgatttacagcagctgcaggttgtatcagagtaagatggacggtagctttgattg

SEQ ID NO: 465871 - DNA, 145 bp, Homo sapiens
ctcggggccatgattgcacccttgcacttcctggaggtgaaactgggcaagaggccccagcccgtgaaaagtgagatcacagattctgctggccatattctctactccaaagaggatgcaaccaaggggaaatttgcctttacca

SEQ ID NO: 465872 - DNA, 100 bp, Homo sapiens
cagcatactgaagtggtttgcaacatccttcttctggataacactgtacaagctttcaaagtcaatgttcacttatgtagttcccatttgttacttcgac

SEQ ID NO: 465873 - DNA, 100 bp, Homo sapiens
cggagagagccgtaggcaggaccccgggacaccctggaagccaggaaatggcagaatattactgaagaatgatcctgttcaacctcctagtgcctctact

SEQ ID NO: 465874 - DNA, 50 bp, Homo sapiens
ggaacccctggaagcctagaaatggacgccaggaaagcatgtgcagatgc

SEQ ID NO: 465875 - DNA, 90 bp, Homo sapiens
gaaaatgtcactgtcccattggccatattttagaggagaatttgcgctttggcttgatggagatctctaccatggaagaagccattcttg

SEQ ID NO: 465876 - DNA, 96 bp, Homo sapiens
gaagatcatttatatacacatgagtttggagcctcttccatcaagtggacctgattttggaggattaggagaagaagctgaatttgttgaagttga

SEQ ID NO: 465877 - DNA, 74 bp, Homo sapiens
gcttgaggccactggcgtcacctgctatgcagcccacccaggtttccctaatgtgggaaagtcctcgctgatca

SEQ ID NO: 465878 - DNA, 100 bp, Homo sapiens
cagatctcgaggaagttctcgtcctgacagatctccagctattgaaggtgccggtggtggtgtgcacattgagccccggtatagacagttcccccagctg

SEQ ID NO: 465879 - DNA, 100 bp, Homo sapiens
ggcggcgacaagggtgttcccgaactagagtggttacagaatgtctgaaggggacagtgtgggagaatccgtccatgggaaaccttcggtggtgtacaga

SEQ ID NO: 465880 - DNA, 100 bp, Homo sapiens
gcctacctggagggcacgtgcgtggagtggctccgcagatacctggagaacgggaaggagacgctgcagcgcgcagaaggcaccaccacagctgcccact

SEQ ID NO: 465881 - DNA, 74 bp, Homo sapiens
gtggagacacggccagatctgccctccaagctggaagtcgagtgtgctactcaactcaggagatttggagacaa

SEQ ID NO: 465882 - DNA, 98 bp, Homo sapiens
tggcatccggggctcttccacgaccttggatccctacagatacaaccggagccagccaccttctgggtgaaccctcagttcaagatccggctggatga

SEQ ID NO: 465883 - DNA, 100 bp, Homo sapiens
gtatttgctaacgtttagagagtgcttccccttgccgagcactggcaaagtgaaaaggagagcttgttgaaggaaagagatcacattttgtcaactctgg

SEQ ID NO: 465884 - DNA, 50 bp, Homo sapiens
atcatgaactagtgacctggaaagggatagctgggagtatggccaccctg

SEQ ID NO: 465885 - DNA, 101 bp, Homo sapiens
cgggcttgtgggacacctatgaagatgacatctcggaaatcagggcagagcggcttgggtaaatccaccttaatcaacaccctcttcaaatccaaaatcag

SEQ ID NO: 465886 - DNA, 50 bp, Homo sapiens
gaacaaatccaagattagcacaggtactattttgaagcgctggaagaaga

SEQ ID NO: 465887 - DNA, 96 bp, Homo sapiens
gccgggaggccgagggcgcagaaggggcactgctgggcctctcgctcttgctgaatggccgggacattggcatcgccctggctgacgtgaccggga

SEQ ID NO: 465888 - DNA, 109 bp, Homo sapiens
tgcgctgtgatgcctgcagagctgtggcttaccaggtaaagagaaatgtgtatgaccttacaagtatccccgttcgccaccaattatgggagggctggccaacttctgc

SEQ ID NO: 465889 - DNA, 82 bp, Homo sapiens
gggaaatcgtgcacttgcaggccgggcagtgcggcaaccaaatcggcgccaagataagatgctcccaagtcccttgcagctc

SEQ ID NO: 465890 - DNA, 75 bp, Homo sapiens
gtgtctgacatttcttttgtgcaagatgagcctcaagtgcttctgcattacagtttacaggtacatacattacac

SEQ ID NO: 465891 - DNA, 80 bp, Homo sapiens
ctgaggcacccggacctcgtcaggccgctgcagatgaccattccaggagtggaagctggacacactatgtgacttgtatg

SEQ ID NO: 465892 - DNA, 49 bp, Homo sapiens
cgaggaggcggatcccccggcgtcaggctcagctgtcgcaggccctgga

SEQ ID NO: 465893 - DNA, 99 bp, Homo sapiens
gcggcggactggctcgcggtgcagggctggaaacaggattgttgaaatactccctgaacatctgaaagagtttcagtcccttgaaactttggaccttag

SEQ ID NO: 465894 - DNA, 100 bp, Homo sapiens
gtgatcccattgggggttgatacagcagagacgtcatacttggaaatggctgcaggttcagagctgcgggctgaactaccacaagcgctgtgccttcagc

SEQ ID NO: 465895 - DNA, 100 bp, Homo sapiens
tgctgcagcccctcagcaacgccgtgcagctgcccatcgaccaggtgtggtcactcacctgtctaccactcccgtgaaatggcagctcgtgccttggtcc

SEQ ID NO: 465896 - DNA, 75 bp, Homo sapiens
ctgaagcagatgttgaacaacaaggtaaaaaagctccagttttatttaataaagaaatgattgagtcaatgaagg

SEQ ID NO: 465897 - DNA, 73 bp, Homo sapiens
ctgcatcagcccctcctcctttctcagaggtggaggagacactgaagcgactgcagagccagaagggagtgca

SEQ ID NO: 465898 - DNA, 83 bp, Homo sapiens
cttgaacattccgaaactgtcaagattggcaagggtcatgtaggtacaacagcaaccaagaagatcgatgtctacctccctct

SEQ ID NO: 465899 - DNA, 83 bp, Homo sapiens
ctacgggagttgggaggacccgggacaccgcacagccgggaaatggtgcagagcattgtagaccaaggagccatggataggag

SEQ ID NO: 465900 - DNA, 96 bp, Homo sapiens
gcagtacggccagatgtacatcaaggcctccggcagctatgcaggtggtcaagtaccccctgcacgccatcatggagatcaaggagtacctgattg

SEQ ID NO: 465901 - DNA, 101 bp, Homo sapiens
gcgctgacaggggggcctggccgcgcagccggtgctggagaatctggtaaaagcaccattgtgaagcagatgaggatcctgcatgttaatgggtttaatgg

SEQ ID NO: 465902 - DNA, 107 bp, Homo sapiens
aaaggagcaagagcaagatcaccgtgacatccgaggtgcctttctccaaaaggtgctggagaatctggtaaaagcaccattgtgaagcagatgaggatcctgcatgt

SEQ ID NO: 465903 - DNA, 100 bp, Homo sapiens
ccaaaggactcgccctctgggaggcttaccgagagtttgaaagtgcgattgtggaagctgctcgggattctcatcgctttggaaggcacctgaaagaagc

SEQ ID NO: 465904 - DNA, 83 bp, Homo sapiens
acaggacgaaggcgtgctgaagagcctggcagagagcaggtgtgtgatacacgtcgtcaggtgactgaccgaggaattcaggg

SEQ ID NO: 465905 - DNA, 86 bp, Homo sapiens
gctaacaccagatagtggaaagaaaccatgtgctgaaatgtttgacgacactgatggtttgagtggccaaatcaatgaaggtccct

SEQ ID NO: 465906 - DNA, 128 bp, Homo sapiens
atttgttggggagaagaggattggaggtgtcagtgttaaaggaacctctacaacgaaggtgaagccacggaagataagtgtgtgtcagttcctggagctgtgtcagagcccagaaggtggctttggag

SEQ ID NO: 465907 - DNA, 75 bp, Homo sapiens
agaagaactgttgaaactagcaacatctataagtgaaaccttggaagagaagttaagctcaaatcttcgtcatgt

SEQ ID NO: 465908 - DNA, 100 bp, Homo sapiens
ctgagttcgtcaagaggcctgggggtcagcacggaggggactggagctggagagtgactgtagagcctcagattgactggggcgactttggggtagaggc

SEQ ID NO: 465909 - DNA, 82 bp, Homo sapiens
cggctctcgtcagcctcccgccggccgtctccttaacaccgaacaccgatgagcaattcttaggttttggctcagatgaaga

SEQ ID NO: 465910 - DNA, 100 bp, Homo sapiens
tcaagttggagaaaggcgaggagccatggatattagaggaaaaatttccaagccagagtcatctggatttacctttggagtccaacccttctgaccatcc

SEQ ID NO: 465911 - DNA, 75 bp, Homo sapiens
aaggaactgatagcttatggttctccattgtgatgaaagcacatggtacagaactccatccggcacaacctgtca

SEQ ID NO: 465912 - DNA, 100 bp, Homo sapiens
attattttggtgatgctttcaaacagtgtcaatacaaagatactctccccaaggagtcagtggatcggtggggaaaatgctgcttaccctgggccctggg

SEQ ID NO: 465913 - DNA, 96 bp, Homo sapiens
agaaggcggcgatcctgggctgcgggcaaggcgacacactaaagggcaccactgaggatgacgtgttgacaggtcaggtggaggagcagtgtgtgc

SEQ ID NO: 465914 - DNA, 90 bp, Homo sapiens
gaggactggggcctcattttggatatctgtgataaagttggtcagtctcgcactgggtttttggattcaaagcataaaaaccattacaag

SEQ ID NO: 465915 - DNA, 100 bp, Homo sapiens
ggcgccctgaagaagtgcaagagcagaggccttctctagaccttgccaagatggcacagtttagcccgatggccaaaggctctcaaagatacatggtttc

SEQ ID NO: 465916 - DNA, 83 bp, Homo sapiens
cccagagacgcggggacgggccgtgggcccccggaacgagacaatgcagatcttcgtgaagactctgactggtaagaccatca

SEQ ID NO: 465917 - DNA, 90 bp, Homo sapiens
cttgctggcttgtctggagtcacatgggcagctgcaatgactctccgcacggtattattgtcattgcaagcactattggcagctgcagag

SEQ ID NO: 465918 - DNA, 75 bp, Homo sapiens
gtcgagcacataacggggttcgggtgtctcgtgtgtgaacatcacaggtcaaaatgcagatcttcgtgaaaaccc

SEQ ID NO: 465919 - DNA, 98 bp, Homo sapiens
ccaagccccagccccctgtggctgaggctacaccccggagccaggagggtgacagagctgaatgaacctctctccaatgaagatcgaaatctcctctc

SEQ ID NO: 465920 - DNA, 110 bp, Homo sapiens
ccggcctcggcggctgaggaaagcaggaggaggtggcggcggcgggaagatggacaaagtggccttcatcacaggaggcggctctgggattgggttccggattgctgaga

SEQ ID NO: 465921 - DNA, 75 bp, Homo sapiens
gcaagggggtagacgcttatactccaggtatgctgccccacaaaaccaagcgaggccaggccgctctggaccgtc

SEQ ID NO: 465922 - DNA, 97 bp, Homo sapiens
catcaatcctcatcaaggaaatgctatacttgaaaagattataagcacaccacagagactaaccagttcaggaagtgttctgattgggagtccatat

SEQ ID NO: 465923 - DNA, 95 bp, Homo sapiens
ccagaaaacctgcagaagaactggcttcgggaattttaccagggggatatgagactttctactcggaatatcctgagtgttgcgtggatgtaaaa

SEQ ID NO: 465924 - DNA, 82 bp, Homo sapiens
gtccgcgggaagatggcggcgccgctcatccccctctcccagcaggctgcttctgatgcttggaagatatcctctcagccac

SEQ ID NO: 465925 - DNA, 74 bp, Homo sapiens
ttagcttcgcagtctggaaagctttaggagttcacagtaataataataacctggatgcctgctgtgctgttctc

SEQ ID NO: 465926 - DNA, 75 bp, Homo sapiens
tcggagtggaggccgcctgggggcaggcgggctagaggagcagcctgttcgacatgggcggtgagtattactgct

SEQ ID NO: 465927 - DNA, 100 bp, Homo sapiens
cccagatctgggccgcttgcctcctgctcctcctcctcctcgccagcctgaccagtggctctgttttcccacaacaggcatagcgcgctggctaggactc

SEQ ID NO: 465928 - DNA, 102 bp, Homo sapiens
gccaaagtggtgtgcttctaccggaggcgggacatctccagcaccctcatcgccctggccgacaagcacgcaaaggctgtggccaggccagctgggctcggg

SEQ ID NO: 465929 - DNA, 82 bp, Homo sapiens
agcggggtccgggtccggagcgccacagtcattcccaaaagcaagttcgtcttggtgaagttcgacacccagtacccctacg

SEQ ID NO: 465930 - DNA, 74 bp, Homo sapiens
ttctcctagttgcagtcaggcttcatacgctattgtcctgcccattttgaagatgatgatctctacggccagtc

SEQ ID NO: 465931 - DNA, 100 bp, Homo sapiens
cgtacttggtctggcttgggttggagcaccttcagatacgtttgaaatggtttctgaagatgaagatgggaaattgggatttaaagtaaattaccactac

SEQ ID NO: 465932 - DNA, 100 bp, Homo sapiens
cgacaagtccgggagctgggcggccatttaccaggtgtggaagatttccttacaagggccgtgttacatgacactgttaatgattgcatttggcttgctg

SEQ ID NO: 465933 - DNA, 83 bp, Homo sapiens
agcaaataaccgttttgaaattgtgcagaccatgaattacgtggggcagttagccggccaggtgtttgtcaccgtgaaggagc

SEQ ID NO: 465934 - DNA, 46 bp, Homo sapiens
aaacaaggtggacccgggaagaggtgatggcatcagctgagaaggg

SEQ ID NO: 465935 - DNA, 82 bp, Homo sapiens
atggacgtcctgcatcggacatactcggcaccagctatcaacgccatccagagcagcccgacggccatggaggctgaagaga

SEQ ID NO: 465936 - DNA, 100 bp, Homo sapiens
cgaccctaaacacctcaacgatgacgtggtcaagactcaggatgtgcagaaggcgatggacgagaggagatttcaagatgcggttcgactccgagggagg

SEQ ID NO: 465937 - DNA, 90 bp, Homo sapiens
ctaccaatggacagctctcagtccacactcccaaaagggaaaggccccggctgaaaaacgtggacaggagcactgcacagcagttggcag

SEQ ID NO: 465938 - DNA, 75 bp, Homo sapiens
ctcagcctcttcagatccaaccaggtctgcttgcccagggtttttgggaaagccaaatggagctcagaaagctgt

SEQ ID NO: 465939 - DNA, 74 bp, Homo sapiens
tcatgaaaagcatgcccatacgattaaacctgctgctacagctagaatgaagcacatcaacctatcatttgcag

SEQ ID NO: 465940 - DNA, 82 bp, Homo sapiens
ggcaacctccgggactctgacggtgaccaacttattagaaaagggtgacgcatccaaagaagacattgacactgctatgaaa

SEQ ID NO: 465941 - DNA, 50 bp, Homo sapiens
agaaacctgtcaggaatacgagcttctggcatggcttctcgctgtttctg

SEQ ID NO: 465942 - DNA, 74 bp, Homo sapiens
caagaagtaggcattgaccccttgtccagttactctaacaagtctggagttgaaccaagactctgaggctgata

SEQ ID NO: 465943 - DNA, 83 bp, Homo sapiens
tggacacatttttagaagagctagcagaaaactgtgttggtgtatcaatattcagtttgaaagagattcagttgcaaaaggac

SEQ ID NO: 465944 - DNA, 100 bp, Homo sapiens
cagggattacaaggcctgtcaatcaaaggggagaaggtagcagcagcagcagcagcagcagcagcagcagcagcagcagcagcagcagcagcagcagcaa

SEQ ID NO: 465945 - DNA, 50 bp, Homo sapiens
agttactctaacaagtctggagacgaagttatacggaagcgtctcctcat

SEQ ID NO: 465946 - DNA, 83 bp, Homo sapiens
cactgggaaacatcattaaatcggggatatgagactttctactcggaatatcctgagtgttgcgtggatgtaaaacccatttc

SEQ ID NO: 465947 - DNA, 75 bp, Homo sapiens
actagttgagaagcagaacccagctgaaggactgggtttggaatcacttgctaggagtcttgtctctctgccacc

SEQ ID NO: 465948 - DNA, 74 bp, Homo sapiens
acaagtacaagttagaactctttatctttctgtggatccttacatgcactgtgctcacctggggtgctgcaaac

SEQ ID NO: 465949 - DNA, 87 bp, Homo sapiens
aaaactctttgagtttcggagaggagtaaagaggaatgtatcctgtcaggtataatgtcagtgaatggcaagaaagttcttcatatg

SEQ ID NO: 465950 - DNA, 101 bp, Homo sapiens
ggaaatggctgcgagaccctagaggcctgcggtgatggcttggacaacagtgtagcttcccccagcacaggtgacgatgatgaccctgataaggacaaaaa

SEQ ID NO: 465951 - DNA, 137 bp, Homo sapiens
tctgaagattctgaaataactcttcctctctctgcagagaaggatggtgcttcatcctgtttagggcatgtatatcttcctgcacacggtgaaggggacaccctttgagaccccggaccagggcaaggcgaggctgc

SEQ ID NO: 465952 - DNA, 74 bp, Homo sapiens
aagaagatgcctcgaactaaacaaattcatcccagaaatctaagaggttgtctgcattcaaaagagcattctat

SEQ ID NO: 465953 - DNA, 75 bp, Homo sapiens
catgaggggatgcagttatgggctctgtcgccgtgggataaacgtcttgtacccggaggtggagcaacagaaatt

SEQ ID NO: 465954 - DNA, 102 bp, Homo sapiens
cgtctgtctggtgataccaggggcagagggaccactctgacagagatccgtgctcagctcacagagcagatgaaatgcctggaccagcagtgtgagcttcgg

SEQ ID NO: 465955 - DNA, 83 bp, Homo sapiens
actactgcaaagacaaggctaaggacttcatgcccgccagcaaagaacaggccgcccgcctgaagaaactacaagagcaagag

SEQ ID NO: 465956 - DNA, 101 bp, Homo sapiens
gggcgagcaccgagtcatcctgccggacgacgtgcgtgacttcatcgacaacctggacagggatttgtatcgttgtgcccgtgtcagctcctggggagatc

SEQ ID NO: 465957 - DNA, 100 bp, Homo sapiens
tgaaccggcttccggatgactacgacccctacgcggttgaagagcctagcgacgaggagccggctttgagcagaataactgaagtgaagtgatggactcc

SEQ ID NO: 465958 - DNA, 75 bp, Homo sapiens
cccatcatcagctcggtccagaagctggttctgtatgagactagagctctgttaaacgtttaatgaaagaagcgg

SEQ ID NO: 465959 - DNA, 75 bp, Homo sapiens
gcccagaggagaaactcgctcgccttcagaagacaggtcccttcaccgatgttgtcaccaccaacctaaagcttg

SEQ ID NO: 465960 - DNA, 50 bp, Homo sapiens
gtatagagcggaagcaagagagtgctggacccaaaggagacaacatttat

SEQ ID NO: 465961 - DNA, 97 bp, Homo sapiens
cgctgctggcgctctggctgtgctgcgcggcccccgcgcatggccccttcccagctgcctgcctgccctagccagctcccaggtgaagagactctcg

SEQ ID NO: 465962 - DNA, 90 bp, Homo sapiens
caagaagaatctagacagacaggcctttctaggagcgaatccagccacagacctgagaggcgcaggcttccttgccctcctgcatctgct

SEQ ID NO: 465963 - DNA, 100 bp, Homo sapiens
atttgtttgagtacgaagggtgcaaagtgggacgcggcacctacggtcacgtctacaaggcgaggcggaaagatgggccctcgggaccaaggatcacgtc

SEQ ID NO: 465964 - DNA, 114 bp, Homo sapiens
ctgtgtcttccgagatggtctttgagctagaaggtgtggagctaggagcagacgggaagttatgaggagtcaaatcctaaggatccagcggcagtgacagaatccaaagaggga

SEQ ID NO: 465965 - DNA, 51 bp, Homo sapiens
tggaggccctggtcaaggagaaggggtttgccttcccggattgggcctaca

SEQ ID NO: 465966 - DNA, 75 bp, Homo sapiens
cagcacacagaagccgagacggctggaaagacagaccgaaaagaatttgtgaggaagaaaaccaaaacaaatcca

SEQ ID NO: 465967 - DNA, 100 bp, Homo sapiens
ggcttctcccctacgcgctacacaagtggagctccttttcctccacctaccttcccgagaaaaatgaggaagctgtgagtaccagtggaaggaacgagcc

SEQ ID NO: 465968 - DNA, 83 bp, Homo sapiens
ccccggcccacagtcaacggggaggtctgggtcttcaacaagacaatgcagatcttcgtgaagactctgactggtaagaccat

SEQ ID NO: 465969 - DNA, 131 bp, Homo sapiens
gccagacaacttctggcagaaacagaggactaattttggcagttctaaatttgaatttgaggttattcaaggacacggaaaagccaacaccatggtagcattaatgaaagtttaccaagaggaagatgaag

SEQ ID NO: 465970 - DNA, 51 bp, Homo sapiens
gcagatcgaatgtttgacatgggatttgtctcttgcatggcaccaagaatg

SEQ ID NO: 465971 - DNA, 49 bp, Homo sapiens
tgctcccatccctgcagcatgaacaagcacaaacgtgcagatatctgat

SEQ ID NO: 465972 - DNA, 98 bp, Homo sapiens
gaagatgccacagggatcctaaaatctaaacagcatctcttggaggtaaacccttatgagacaggaaacagcaaaggctagctttaggagagaaagta

SEQ ID NO: 465973 - DNA, 74 bp, Homo sapiens
gccgcgcagccagaggtcaccggagcatcttcggagctgaaagggtgcttcattgaagaggtccaagtgttgca

SEQ ID NO: 465974 - DNA, 75 bp, Homo sapiens
ggacaagtgtaatgaaattatcaactggcttgataagaatcaggaagcagtgtggttcctctccaacatcactgc

SEQ ID NO: 465975 - DNA, 100 bp, Homo sapiens
atgacatatttttggacctgaaacagaaattctggaacacctatatggttgacagcagggactgggcccttaatgggaacaccctctcccttgatgaaga

SEQ ID NO: 465976 - DNA, 50 bp, Homo sapiens
agattggacagcaggtcgacagcggccatcgtgagaatcatgaagatgag

SEQ ID NO: 465977 - DNA, 101 bp, Homo sapiens
agaaaatacaaggagctggacatcgagcctgagggaggggaaaggcgcagggtgagaagccctaccactgcaactgggacggctgcggctggaagtttgcg

SEQ ID NO: 465978 - DNA, 79 bp, Homo sapiens
agacagaacagttaatcctcaatttaagcctgatctaacccctagaaacagggttatgagagaatttacaatgaaattc

SEQ ID NO: 465979 - DNA, 50 bp, Homo sapiens
ccccagtccaaccccagagcggtattctaccttgtaaatactgttatttg

SEQ ID NO: 465980 - DNA, 100 bp, Homo sapiens
cgtccatacttaactactgaatgtgaagatgtcctcttagtgcttggcagattagtactgcgccaagcccatctttgtgtgcttgcatccaactgtgatg

SEQ ID NO: 465981 - DNA, 83 bp, Homo sapiens
ttgcagacttcaggtcgtggcagagaaaaccagctgagacagggcgccacttactagacatgggaaagcggaaccaccaaaag

SEQ ID NO: 465982 - DNA, 117 bp, Homo sapiens
aggcggaagaccgcgcgcagggcctgcagcgggagctggacggcgagcgcgagcggcgcgagaaatctctgctttctatccgtcaagatgataaagtcgtgtgcccgagaaccaaag

SEQ ID NO: 465983 - DNA, 100 bp, Homo sapiens
agagctggtcccctgtcccctggcaggaatgtatcctgtcaggtataatgtcagtgaatggcaagaaagttcttcatatggatcgaaacccttactacgg

SEQ ID NO: 465984 - DNA, 110 bp, Homo sapiens
cgagggccgggtaacccggtgcctggccctctagccccgctaccggactacatgtcggaggagaagctgcaggagaaagaacccacaatacattatatgcaccagaaatg

SEQ ID NO: 465985 - DNA, 83 bp, Homo sapiens
attggatttaaaagacagtcctcgtcagcactgactttcagctatggaatcgtgctgtccccggcataggtccatctctgcag

SEQ ID NO: 465986 - DNA, 76 bp, Homo sapiens
tgcagcaggaggcagagccacagaagcaggtgcagccacagaaaaggtgtgagcggtactgggcccaggagcagga

SEQ ID NO: 465987 - DNA, 100 bp, Homo sapiens
gcgaactgggtggcgaacggggcgagcctggaggattgtcactccaacctcttttcgctggtactccaaagattcaggtttactcacgtcatccagcaga

SEQ ID NO: 465988 - DNA, 82 bp, Homo sapiens
tcttcccgcgtccgccgattcctcctccttggtcgccgcgtccttggctggcgtatagcctgggctggaagctcttctacgt

SEQ ID NO: 465989 - DNA, 100 bp, Homo sapiens
cagccgacggcaaaggtgtcgtggtggtcattaagcggagatccggcttttacctgatatccccatcagaatttgaacgcttctccctaagtgcccggaa

SEQ ID NO: 465990 - DNA, 75 bp, Homo sapiens
gttctgcacaccgaggaaatgcgcttcctgagggagtgggtggagaggtcatactccctgtcacaaactccagct

SEQ ID NO: 465991 - DNA, 83 bp, Homo sapiens
cgaaggtactcgcagcacttggagcgcagaaccggccgcgcccgcatgccaatgaagatgtggaaagaatgttactaggaaac

SEQ ID NO: 465992 - DNA, 100 bp, Homo sapiens
gggatctgcgctgcagccaccgccgcggttgatactactttgaccttccgagtgcagtgccatgaaccagagaatcagtcagagtgctccagtgaaacag

SEQ ID NO: 465993 - DNA, 50 bp, Homo sapiens
gcaagatcattagttgaatcgctcgcaaaggatctccttcatccctctcc

SEQ ID NO: 465994 - DNA, 75 bp, Homo sapiens
gctagaattacctggaacttcatcatcatctacttcacaggaattgccatttatttctctatgaatcatcatcaa

SEQ ID NO: 465995 - DNA, 100 bp, Homo sapiens
gaaaactgcagtggaagatgaggacagcatggatgggctggagacaacagaaacagaaacgattgtggaaacaggatgaatattctatctttcctcagac

SEQ ID NO: 465996 - DNA, 100 bp, Homo sapiens
tataggaaagtaccaaatctgcgaattctggcctgtggtggggatggaacgactccagcgggaggaagaagaggcctttgccagcagtcagagcagccaa

SEQ ID NO: 465997 - DNA, 75 bp, Homo sapiens
gggagatcccaggcggtgacagagtggagccatggctagaggtcaccagtgaaaagttgtgcagagcccaacatg

SEQ ID NO: 465998 - DNA, 75 bp, Homo sapiens
tctcaaccttgtgggatgtgaaaactctgttactgaagtgcagagcagagcgggcggaggaccccgggcgcgggc

SEQ ID NO: 465999 - DNA, 83 bp, Homo sapiens
ttggagtagaagtgtccagcgacagcttctgggagatcgtgttcgacgagtgtcacaaagccaagaatgccggctccaccaag

SEQ ID NO: 466000 - DNA, 99 bp, Homo sapiens
tcaggcggaagctgcattcatggaagaagagtgtgtggacactccaaaggtatggcctcacaagtcttggtctacccaccatatgtttatcaaactcag

SEQ ID NO: 466001 - DNA, 83 bp, Homo sapiens
catgaagctgaattgggctgtggcagctggagccgaggatccaggcatccgtgtcattctggaccttactcccaactaccggg

SEQ ID NO: 466002 - DNA, 87 bp, Homo sapiens
gagacgcacggagcggccgggggctcggccgggccgtcccggcctgcgcagcctgaggatttcggctgaatgcgtcttcttggccca

SEQ ID NO: 466003 - DNA, 83 bp, Homo sapiens
ggcaccttccagaggctttgtggtgcgggacgcaccctggaccgccagcagcagtgagaagtgattatgagcaaccactggag

SEQ ID NO: 466004 - DNA, 100 bp, Homo sapiens
tgacaccgaatgaggccccgcgccgtcggccccaaggttctgatctacaatggccaactggacatcatcgtggcagctgccctgacagagcgctccttga

SEQ ID NO: 466005 - DNA, 100 bp, Homo sapiens
gacttctgaagaacaaatcagcctggtcaccagcttttcggaacagcagagacacagagggcagtcatgagacctgtggatgaagagccagagtcctctg

SEQ ID NO: 466006 - DNA, 100 bp, Homo sapiens
catgggccatgcccggtgaccacttttggaccaaaggcctgtgtgctgcagaacccccagaccatcataaccaacatcccgggtaaccgggtggctgaag

SEQ ID NO: 466007 - DNA, 51 bp, Homo sapiens
ctcctcgccgccgtttctgagaaggtatcatgatattagctggtttgacat

SEQ ID NO: 466008 - DNA, 97 bp, Homo sapiens
agccttgaacgtctggactctagggaccctgctgaatagctggggctacaggcgtgtgtcactgcgcccaggcatggttgaagaaacgcactgcaca

SEQ ID NO: 466009 - DNA, 100 bp, Homo sapiens
cctgctcggaaccttgtttactaattccaaaatgaagtttaatccctttgtgacttccgaccgaagcaagaatcgcaaaaggcatttcaatgcaccttcc

SEQ ID NO: 466010 - DNA, 98 bp, Homo sapiens
gcggacgaagatggcgaccgccatgtacttggagcactatctggacagctgcagacgggctggtccgtgcacacctaccagacggagaagcagaggag

SEQ ID NO: 466011 - DNA, 100 bp, Homo sapiens
tatttgcggatagctccaaactgggatatggggacttgatctcatcttcatgccaggccttgggtttgacaaacatggcaaccgactggggaggggcaag

SEQ ID NO: 466012 - DNA, 82 bp, Homo sapiens
tcgcctttgccgatccgccgcccgtccacacccgccgccagctacccagccttcatgctgttttggaacatgtcaagcacat

SEQ ID NO: 466013 - DNA, 100 bp, Homo sapiens
tgagcttggaggaggtggccccagtgctgcagcagacattacttcaggacaacctcttgggcagggttatcctgaatacatgtctaacaattttccttgc

SEQ ID NO: 466014 - DNA, 90 bp, Homo sapiens
tgcagggacccggtgacagcgtgagaggggagtaggttgcatctttgttgaaatgatccaaggagttgctgcttttccaggaatgaaaga

SEQ ID NO: 466015 - DNA, 87 bp, Homo sapiens
agcgacagcggcgagcagaactacggcgagcggttgtctgtgctgtgaatgccctcgcccaccatgtgctcaacaaggacctcaagg

SEQ ID NO: 466016 - DNA, 75 bp, Homo sapiens
gccggcgtcgtcggatgttgtgttgcccgccaccatgagctacacaggtactccaaagattcaggtttactcacg

SEQ ID NO: 466017 - DNA, 75 bp, Homo sapiens
tcaatttgaactctgcatcttcatggtttacagaaattggtgcaggattcttacagaagcagagattgatgctca

SEQ ID NO: 466018 - DNA, 97 bp, Homo sapiens
gaagtcaaaacaagaagacaaaaacattgctgaggcctgagagaagcaaggtccagttccggccgtaccgcacagacgacttcatcacgcgcctgta

SEQ ID NO: 466019 - DNA, 50 bp, Homo sapiens
gggcagcctcagcccttgcagccaacataccagggtctagagagtctaga

SEQ ID NO: 466020 - DNA, 100 bp, Homo sapiens
cattgccagcctggacgatctggacaatgatgggttcccaggttcttcacacacccccattcggcgtagtacccagagagctcaagatgtgtggcagttt

SEQ ID NO: 466021 - DNA, 100 bp, Homo sapiens
cagataactgggcccctgcgctcaggaggccttcaccctctgctctgggtaaagctgataccccaatgtccttctttgactttgtggttgatcctcattc

SEQ ID NO: 466022 - DNA, 100 bp, Homo sapiens
tgatgaactttctgcggtgactgtgtcgggtcatgtatacaataatcagtaaactgttttggctgggcctacttcacctataccttctctgggaaatgtg

SEQ ID NO: 466023 - DNA, 98 bp, Homo sapiens
ggcgatcctgccaccgggaggtgtggaagagccggaaactggatggcttctacagggagccaggcctctgatatagacgagatttttggattcttcaa

SEQ ID NO: 466024 - DNA, 75 bp, Homo sapiens
ggttgggcattgggtggaggagcagaatttactacagcatgtgatttcagatatctaacagtgatacgccttcac

SEQ ID NO: 466025 - DNA, 86 bp, Homo sapiens
acaccctcaacaaacaccagcgctttgggcctccggtgtggctgtctctgatggtgtcatcaaggtgttcaacgacatgaaggtgc

SEQ ID NO: 466026 - DNA, 100 bp, Homo sapiens
acttaatcctactcagaagaacttgtacagagatgtgatgttggagaactatagcaatctggttttcttgggcatggaagaggagatggttcgtgttacg

SEQ ID NO: 466027 - DNA, 74 bp, Homo sapiens
agagagcggaggcggtggtggtggcggccgctggccagtatatgggtttagagtgtccagtatgcaaagaagat

SEQ ID NO: 466028 - DNA, 82 bp, Homo sapiens
gggaaatggcggagtatctggcctccatcttcggcaccgagaaagacaaggaaaagagtgcaaattcggaaagcacctcaag

SEQ ID NO: 466029 - DNA, 100 bp, Homo sapiens
cctctgagaagggagacgacgctgctgggtccgctgagcggggcgacccgagctgtcaggaatgacaggaacaagaaaaagaaggagacttcgaagcaag

SEQ ID NO: 466030 - DNA, 82 bp, Homo sapiens
gcatcggcagcggcacctacggcgacgtctacaagattgtggtggtgccatgcagcaagaatcagagagatgcagagttaga

SEQ ID NO: 466031 - DNA, 99 bp, Homo sapiens
gtcttctatcgctcccatcgtcatctttgcatccaaccgaggcaactgtgtcatcaggcaaaatggcaatacctgtgctttggaagtttctggagaagt

SEQ ID NO: 466032 - DNA, 114 bp, Homo sapiens
ctctggaagagtttgtgaaagagaaccaacaggaggaggcccgctgtctggaagaggttatcaatactctggctgaccatcatcatcgtgggactgactttggtggaagtcctt

SEQ ID NO: 466033 - DNA, 95 bp, Homo sapiens
agcaccacgggctccaccctgctgcagcccctcagcaacgccgtgcagctgcccatcgaccagcattcctctgaatattgatttgctgaatagcc

SEQ ID NO: 466034 - DNA, 75 bp, Homo sapiens
gcagatgcccaccggaatggagaaggaagaggagtcggtttaaatgtgatactggtgtagatctccttgttctaa

SEQ ID NO: 466035 - DNA, 100 bp, Homo sapiens
cgacgcgatgaagcccagacctgcagggttcgtggataataaactcaagcagcgagtcatccagaacaccttccaccatgaccacctcagcaagttccca

SEQ ID NO: 466036 - DNA, 80 bp, Homo sapiens
gaccttgccaaccctcccaagaagttcagaggttggaatgttgcatcagcaggtagaagaacatgaaaaaatcaagcaag

SEQ ID NO: 466037 - DNA, 98 bp, Homo sapiens
cagggcaaggcggcggacggctgcgtcgcccgaggcgaggaggagcgctggcgttgtcacaggtagtactgatggaattggaaaatcatatgcagaag

SEQ ID NO: 466038 - DNA, 50 bp, Homo sapiens
ggccagtttggcatcgtttatggaggaagatgttggatccagggttgatg

SEQ ID NO: 466039 - DNA, 100 bp, Homo sapiens
caggtcctactccaggggcgctcaggtcgcaatggaagaagagatcgccgcgctggtcattgacaatggctccggcatgtgcaaagctggttttgctggg

SEQ ID NO: 466040 - DNA, 80 bp, Homo sapiens
cttgaattgggaggggggcagctggagcctcaggcggcagcgcttctagcaattctgtggtgttcttggtcacacattta

SEQ ID NO: 466041 - DNA, 75 bp, Homo sapiens
caccctcgctccctctgctcttcctcccttcgctcgcaccatgacaaagagagacttgttgaaatgctccgtgcc

SEQ ID NO: 466042 - DNA, 75 bp, Homo sapiens
caaatttagtggccatcccaaaggcggacatctacgacaaagtgtcgggcgacatgcagaagcaaggctgcgact

SEQ ID NO: 466043 - DNA, 133 bp, Homo sapiens
ctggacttctgtgctcatccccacagggacattcacaacatgaataatggaagcactgtgctgcactgggtgttcaacagccatcactccttggagcatctcctaccatttatacacagcaaactgcattggc

SEQ ID NO: 466044 - DNA, 120 bp, Homo sapiens
tactttgccttttaaaagaaatgccacccacattcagagacacaagtgcagcagtttgatatgaggccccaggattcctggcgaggtcctcctccccttttccagcagcaaaggtttgac

SEQ ID NO: 466045 - DNA, 100 bp, Homo sapiens
atcagctcctggttcaacgaggccattgacttcataggacactcccagttgccgggatgacctgctgagtgactacttccgaaaggccagcgatccccca

SEQ ID NO: 466046 - DNA, 74 bp, Homo sapiens
gccccagctccgtctcggcggcggcggctcttccaccaaagccacctaagccaatgacttcagcagttccaaat

SEQ ID NO: 466047 - DNA, 82 bp, Homo sapiens
cgcagtggtcgcttcttctccttgaatcttgccctgtcgctcaagctggggtgcagcggtgtgatcttggctcactgcaacc

SEQ ID NO: 466048 - DNA, 75 bp, Homo sapiens
agtgggagcaccaggatctcgggctcggaacgagactgcacggagagagaagctcttcagaaacagctggatgaa

SEQ ID NO: 466049 - DNA, 82 bp, Homo sapiens
cagcagcccccgaaggccctatcaggacatggagtatgaaagacgataatagtaccaatactgataagaattgcagatgtgc

SEQ ID NO: 466050 - DNA, 83 bp, Homo sapiens
ctgggttacaagcagcaagtgcgcggttggggccactgcgaggccgttttaggtatgtgacgcattcccagactcttcagcca

SEQ ID NO: 466051 - DNA, 90 bp, Homo sapiens
gttcgttggatggctcttgaaagtctggttaataacgagttctctagcgctagtgatgtgggtagaatccgccaagctttgagagaaggc

SEQ ID NO: 466052 - DNA, 83 bp, Homo sapiens
ggcggatggccccaggtgtaagcgcagaaagcaggcgaacccgcggcgcaataacgatcatccccccgaaggagtggaagccg

SEQ ID NO: 466053 - DNA, 100 bp, Homo sapiens
ggtgcggctccaccccttccacgtcatccgcatcaacaagatgttgtcctgtgctggggctgacaggcctaagatcccgtccatcgccactgggatggtg

SEQ ID NO: 466054 - DNA, 98 bp, Homo sapiens
agccctgtcccactcactctttcccctgccgctcctgccggcagctccaaccatgggaggccgcgtctttctcgatcatggaagggaagtggttgctg

SEQ ID NO: 466055 - DNA, 101 bp, Homo sapiens
ggtgatggagattttgatgtggatgatgccaaagttttattagataatgagtgtgtatatggcaactaccctgaaatacctttggaagaaatgccagatgc

SEQ ID NO: 466056 - DNA, 100 bp, Homo sapiens
caggatgtctgatctccatgttctgctgttaatggctctggtgggaaagacagcctgtgggctgttcgggggtcttgtctggattttggttgcctcctcc

SEQ ID NO: 466057 - DNA, 75 bp, Homo sapiens
acgcggggcccatggccaggaccaccagccagctggtctcggtccagctcgacttccagctcaggctccagcacc

SEQ ID NO: 466058 - DNA, 76 bp, Homo sapiens
tggctacttctcgctctgcttcatcccactattattttggcacaacaggaagatattgatgatgttaagaagttca

SEQ ID NO: 466059 - DNA, 100 bp, Homo sapiens
caaaaagcttcagagttctctaaaaaaactggctgtgaataatatagctggtattgaagaggtaaatgagctggatggtatcccgttgatcctggacaac

SEQ ID NO: 466060 - DNA, 100 bp, Homo sapiens
cccggttccccggcccacagtgggggtgtgcaaacccgagagaactgggtttggagaaaattgaagttttacagcaacatgaaaatgaagacatatataa

SEQ ID NO: 466061 - DNA, 80 bp, Homo sapiens
gaccttgaaaagcggcacgacaacattaaaccatcagatgaggctttatcctgtggataaacgcagagtgaacgagtttg

SEQ ID NO: 466062 - DNA, 98 bp, Homo sapiens
agcattggatttgctaaaggagcttaagaatattcctatgaccctggaattactgcaggttatgaagttcatggaatggaaaaaataccagaagatgg

SEQ ID NO: 466063 - DNA, 74 bp, Homo sapiens
ctgactttcagctatggaatcggtttgatttcctctgcatgcctgtcttccatccgcgtttcaagagggagttc

SEQ ID NO: 466064 - DNA, 50 bp, Homo sapiens
gcagagaccagcatccttggagaaggaattgaatgatctggcacgggacc

SEQ ID NO: 466065 - DNA, 90 bp, Homo sapiens
ctgctttctctcgatgaggataacatccctccagaagatgggattttatattggaagacatggatcttgctgccaacgagatcagcattt

SEQ ID NO: 466066 - DNA, 75 bp, Homo sapiens
gcggagacggtggagtctccgcactgtcggcggggcacagagcatggagaatgatgaacttccgtcagcggatgg

SEQ ID NO: 466067 - DNA, 100 bp, Homo sapiens
gggccgaggcctgggacagctaccgcagcatgagcgaaagctacacgctggagatggatgagatcaaagggaaagaccgtgtgattctggccttggagaa

SEQ ID NO: 466068 - DNA, 100 bp, Homo sapiens
tacgggctgaatgtggagagggtcttccaggacgcctaaatgcgatggccaggtattactgacacaagtgtggaagcgtttaaacctggtagaatgtgac

SEQ ID NO: 466069 - DNA, 90 bp, Homo sapiens
ggaaattgaaggaacttggagttaatggtctaatttatgatagacagagtctcgttctgtcacccagcctggtgtgcagtggttcaagcc

SEQ ID NO: 466070 - DNA, 98 bp, Homo sapiens
tacttctagagtctggaatatttaaaaaggtgtcatggagaaactccagctgggcccagagattctgcagcgggaaaatccaaggcttatttatgcca

SEQ ID NO: 466071 - DNA, 97 bp, Homo sapiens
cggcgacgacatgtatgggccagaaaaggttgctccttgagggcaggacagttcttatggctttatccgttgcgtaagcacagagaggtctgcgagg

SEQ ID NO: 466072 - DNA, 98 bp, Homo sapiens
cggatacaggagggacgtgcaccaggttctgcttggattctgctagacagacccgacaaagactgtctatcaactggtccaattttagcttgaaaaaa

SEQ ID NO: 466073 - DNA, 90 bp, Homo sapiens
cagaagctcagagaagtgaagcaacttgcccagctatgagagacagagccaggatttgaaaccagggaaaagaagatctcccggagcagt

SEQ ID NO: 466074 - DNA, 74 bp, Homo sapiens
tctaaaattggggataaaaccatccatcaattactaccaagctcagatcaccatgaaagtaatccaaggcttgt

SEQ ID NO: 466075 - DNA, 83 bp, Homo sapiens
cctcggtcttgggttcccggagagctactggtcagaagttatatgtaaggctctttcaacgtaaattaagctggattaagatg

SEQ ID NO: 466076 - DNA, 100 bp, Homo sapiens
tgtgtacttgcttcctaagaaaatgggtccaatgaagcgtcaagtggcagtaaaatcaacccgaggctttgctcttaaatcaacccatgggattgcaatt

SEQ ID NO: 466077 - DNA, 100 bp, Homo sapiens
ccagtcagttcagagccaggccctccactaccggaacagagagcgctttgccacgatcaaatcagcatctttgggcgacctccggcggatgtggtctgag

SEQ ID NO: 466078 - DNA, 74 bp, Homo sapiens
cgtgcattaactgaagcaaagaaattggcttctgcctctgcaaagctaaaggctggagcattggatttgctaaa

SEQ ID NO: 466079 - DNA, 82 bp, Homo sapiens
cgcgctgagggtctcggggcgggcgccgcgggacctctccgggccatggactaatagggatgccaaaggaaaaatatgatcc

SEQ ID NO: 466080 - DNA, 101 bp, Homo sapiens
ggtttccggatgaaacgaggagccagatttccagtgggttcaaggagatgtgtgtgaagttcagctgatggtatataacccaatgccgtttgaacttcgag

SEQ ID NO: 466081 - DNA, 75 bp, Homo sapiens
tttcagtattgtaagaccaagaagacttctctacatggcaatagatggagtggtcctggatgcctcatcccttag

SEQ ID NO: 466082 - DNA, 75 bp, Homo sapiens
ttcgctgagggccttgagaaacttaaggagtgtgtgttgcgtgacgtgagcagcggttccatcgcagtgaacgcc

SEQ ID NO: 466083 - DNA, 90 bp, Homo sapiens
tggaagcgcccttcctagttggcattgaaggttcactcaaaggcagaggaagaggaggtgacatacacagtcattaatcaattccagcag

SEQ ID NO: 466084 - DNA, 90 bp, Homo sapiens
ccatgatggaatgcttgacagagatgagtttgcagttgtgctggagaatgccgaaggtgccagaaccaccccttcagttgtggcctttac

SEQ ID NO: 466085 - DNA, 82 bp, Homo sapiens
ttcagacagcatatttgagtcatttccttcgtacccacagtgcttcatgagaggtgtgataaagcggaattgggaatatata

SEQ ID NO: 466086 - DNA, 100 bp, Homo sapiens
aaaacctattacgaactcaaaagtcaaccgctgaagagcaggttaattcctgtaccaatggtgggttttaaggaacttctccgaagactgaaggttcaag

SEQ ID NO: 466087 - DNA, 98 bp, Homo sapiens
caaaagatagggattacagaagagaggtgatgcaagcaacagccactagtgggtttgccagtggaagcccggattgcatttctacaaggcgaaagaaa

SEQ ID NO: 466088 - DNA, 75 bp, Homo sapiens
ttccaaggaaccaaggcggccctggctgggggaaccactatgatcagtcagcccaaggccaaccccactgtcact

SEQ ID NO: 466089 - DNA, 100 bp, Homo sapiens
caatagcacgaggcctgttgtctaccaagtgcagtttaaataaatgtcaaaactggaccaatggggccaggctgaagtattgaactttctgctacgctac

SEQ ID NO: 466090 - DNA, 75 bp, Homo sapiens
agagaagggcaccatcacccagaatgaaaggagagttgatctctctaatgtattagatcttcatgcctttgatag

SEQ ID NO: 466091 - DNA, 82 bp, Homo sapiens
ccaagtctcaataaaaacatccccgtcatcgagtatgagcagttcatcgcagcttcctgggtctgcaggtccagccggctgg

SEQ ID NO: 466092 - DNA, 74 bp, Homo sapiens
aaggaacccaaagaaccatctcccaaacaggatggcttcaggtgagaccacaggagttgacatcactaaaattc

SEQ ID NO: 466093 - DNA, 100 bp, Homo sapiens
cattccgagaatgcgagagaaagagcctccgtcaccacatagattcgctaaatattgtaatggatcaaggagatacacctacactagaggaagatttgaa

SEQ ID NO: 466094 - DNA, 116 bp, Homo sapiens
gcagccttgggcctcgcgccggctatggccgtgccctggggctgagccctcagtaagactttgaccccgacgcaggcttcagtgattgccgcggatcagaagcctgagcactttgg

SEQ ID NO: 466095 - DNA, 80 bp, Homo sapiens
agaggtcccaatcccccactctttccgccctaatggaggtctccagtttcgatgaaggatttgggggcagagcacttggc

SEQ ID NO: 466096 - DNA, 90 bp, Homo sapiens
aacaaaaagatgtatgaggagttcaagcagctggctctggaggacgccaaagaaggctacagaaactgacttatgcaaaggaaactgtaa

SEQ ID NO: 466097 - DNA, 80 bp, Homo sapiens
cactaaagtggacaaaggaagcattgctgatggccgcttaaggaacaatggcgctgtcttcagtggcacagtggagcagc

SEQ ID NO: 466098 - DNA, 75 bp, Homo sapiens
gacgagcttgttttgtcccggactcggatgaaaactttcggaagagaaagttgcctgtggtaagttcagttgtta

SEQ ID NO: 466099 - DNA, 82 bp, Homo sapiens
cgcccccccccacgcgccgcgtgcccggccgcgcccagcagttccagggtctccctccactgctgtagtaacccgggtccgg

SEQ ID NO: 466100 - DNA, 100 bp, Homo sapiens
ggggcatacctatggctttattgacctcgactcccatgcgccaacaaatggaattttcttgagcatgtttctaatcgttttgccattggaatccatggct

SEQ ID NO: 466101 - DNA, 82 bp, Homo sapiens
attgaccgcgagacttctggcaatttagagcaactactccttgctgttggggacatcctgaagttcttgaaaaagaagaaac

SEQ ID NO: 466102 - DNA, 100 bp, Homo sapiens
ggagtcataccttctatctttgattctccatatcacctacagatcgagacgctccctccggagctcttccagtgccggaagctgcgggccctgcacctgg

SEQ ID NO: 466103 - DNA, 98 bp, Homo sapiens
atgacacacatacatgctgtaacctcccctcagctgagaagccttcaggcagaagtcagtgttctaagaacggaagcatctgggctggatggaattta

SEQ ID NO: 466104 - DNA, 75 bp, Homo sapiens
gattttgatacaaaagcagcggttgccgcacatattcaagaggtaactatggccaagatcaatcctccatgagta

SEQ ID NO: 466105 - DNA, 100 bp, Homo sapiens
gagtccccaagttttacagatggatctcagagcggtatccctgtctcagcgaagtggtgaaagagcatcaggttggtactaagaagtgcctttcctgacg

SEQ ID NO: 466106 - DNA, 100 bp, Homo sapiens
catcattgtcaccctggccctcgcggtggctgcctttaattttgctggaggagcttgccaacagcgatcccaagttagccctcactggagttcctatagt

SEQ ID NO: 466107 - DNA, 90 bp, Homo sapiens
aatgacatccagcgacaaggactttaggttgcttgtctggagatggagccactacaggcgggcctgggcgcctggagtcgggcatgaaag

SEQ ID NO: 466108 - DNA, 74 bp, Homo sapiens
aatgaaatgctctccacacaagccggaagatggaagagttgagtcaggccctggctagtagcttttctgtgtct

SEQ ID NO: 466109 - DNA, 100 bp, Homo sapiens
ttatttctccgttggcccaaccagtcccagcgctgtcgtgctcctctactcgattgtccgtgtggagcccttggtgaccatgggccaggtgactgccctg

SEQ ID NO: 466110 - DNA, 100 bp, Homo sapiens
ccgagatgtctcgctccgtggccttagctgtgctcgcgctactctctctttctggcctggaggctatccagcacatgcaagaaagcacttcagccaagca

SEQ ID NO: 466111 - DNA, 98 bp, Homo sapiens
gcggcccagtccgagacagcaggctttaacaacaccgagagaacatgtgataaagagtttattatacggagaacggctaccaatcgagttctgaacgt

SEQ ID NO: 466112 - DNA, 94 bp, Homo sapiens
ggagctgcagtcggcactgctactgcgaagacagctggcagtccctgaagaggaaggagaaggaatatgagcatgaaatggagcggctggcacg

SEQ ID NO: 466113 - DNA, 80 bp, Homo sapiens
gtcccgcagcagctgcatctgtttcccttgggggctttgaaataacaccaccagtggtcttaaggttgaagtgtggttca

SEQ ID NO: 466114 - DNA, 50 bp, Homo sapiens
ctggcagtgacgaggacgaagtgtccgagactgcttctcggaggagtgcc

SEQ ID NO: 466115 - DNA, 127 bp, Homo sapiens
actcagaatgctccaggcagtgtaatctcattccatcttcattcatgactccagacaggatctagtgaaaagccatttgatgtatgcggtcagagaagaagtggaggtcctcaaagagcaaatcaaa

SEQ ID NO: 466116 - DNA, 100 bp, Homo sapiens
ccaacgtgggggatccctccatccgcaaagccaggtgaccctggcagcaaccccaacaaacgccagaggcagccccctctcctgggagatcaccccgcag

SEQ ID NO: 466117 - DNA, 96 bp, Homo sapiens
gtcagcctggctgccggcttgttcttactggccctgagtctttgggggcagcctgcagaggctgcgacaggtgatttggcttctgcacagttagga

SEQ ID NO: 466118 - DNA, 76 bp, Homo sapiens
ttgcgaaccagttcagcagtgcctcaggtggcttcgtcctgttcatcgccaactaggggaagcgaatgaggagttt

SEQ ID NO: 466119 - DNA, 90 bp, Homo sapiens
cgtgggagccagcgagcctctctccctgatcttacgtgctcaagggtgtcgtagtcattcttcagcacaattcttaattggagaccaaga

SEQ ID NO: 466120 - DNA, 101 bp, Homo sapiens
accatgtccaccaaagcggagcagtaacgaagtcggcctactggagttcttccaaaatgtgataaaagaaactagggcagagccaaaaaaggtgactagtt

SEQ ID NO: 466121 - DNA, 100 bp, Homo sapiens
gtggctgctcgataaatcagacagaacagttaatcctcaatttaagcctgatctaacccctagaaacagttacttgttctgagtcaggccgagaaggttc

SEQ ID NO: 466122 - DNA, 83 bp, Homo sapiens
cagcaatcacagaagccgacaaggcgttcaagcgaaaacatgaccgctgagcccatgagaccatggtgaatccgggcagcagc

SEQ ID NO: 466123 - DNA, 75 bp, Homo sapiens
agcgtgaccgagagcgcgaatatcgtcatcgttagaagacaggtgatttggcttctgcacagttaggaggagcac

SEQ ID NO: 466124 - DNA, 74 bp, Homo sapiens
cagatttgctggatacgtgacatcaattgctgcaactgaacttgaagatagaatagtgacagtggtacaggaaa

SEQ ID NO: 466125 - DNA, 75 bp, Homo sapiens
ttcagttgcgatgcatgcaagtcggaggaaacgctagtgcagaagtgatggtgtctgcttcttttgcagtgatcg

SEQ ID NO: 466126 - DNA, 74 bp, Homo sapiens
ggagctgcaaggctcgcccctgcccggcgtggagggcgcggggggcgcggagattaacattgatgggcaggata

SEQ ID NO: 466127 - DNA, 50 bp, Homo sapiens
ctcctgcgtagctgggattacaggggctaagtgatggatcttgtactccg

SEQ ID NO: 466128 - DNA, 100 bp, Homo sapiens
agaggaggaagaaaaatctgaggttatcaatgacgaggtaaaatgttgggacatagccaccttggagtgcagctggacccttccttcccttggtgggttt

SEQ ID NO: 466129 - DNA, 74 bp, Homo sapiens
tcgtacccacagtgcttcatgagagattcgcttcaagctcagcttatcaatatgggtgttattcctaccttagt

SEQ ID NO: 466130 - DNA, 75 bp, Homo sapiens
aaatttaagaccatttatatgttcaactgatgaaaacactggaaaattgcctaagaattatgacccaaaagttac

SEQ ID NO: 466131 - DNA, 100 bp, Homo sapiens
gaagtgggaaggatctgcgcgggggttggtcatgttccaggatctgtctatagacttctctcaggaggaatgggagtgcctggacgctgctcagaaggac

SEQ ID NO: 466132 - DNA, 100 bp, Homo sapiens
ctcgtccagagtctgcggacagcgcacgtccagatgctcacctggtagaggttatcgactgccaacaagtgccttggtgaacctttctcatgggagtcgc

SEQ ID NO: 466133 - DNA, 100 bp, Homo sapiens
cagaattgggtgtacagctgtgcattctctcctgactcttctatgctgtgttcagtcggagccagtaaagcacctacgaggacaagcagaaactcaagcg

SEQ ID NO: 466134 - DNA, 75 bp, Homo sapiens
ctaaagagagcccggagccagcgtgggaggccgctgccgtcgcgcgccttggtctcctctgagcctccggcctcc

SEQ ID NO: 466135 - DNA, 100 bp, Homo sapiens
ttgtcatgaagaaactcaatgatcgtgtcatgagagccagaagcggactcctagaagaggggagcagcaaggatggaatgacagccgtgggccggagggg

SEQ ID NO: 466136 - DNA, 96 bp, Homo sapiens
taggaactcctctgatgtcctggtttatgttaccagcaatgacactacgggtctttttggagttcctgagctgagtgccccagaaggatttcatat

SEQ ID NO: 466137 - DNA, 96 bp, Homo sapiens
agtccccagtgagggtgtacaaatacccctttgaattaattatggctgctgatcctggagaaacaccatcagaggctccaagtgaagcgagaacga

SEQ ID NO: 466138 - DNA, 100 bp, Homo sapiens
agacaaggagatggtgacgactgtgaagggggtcatcaaggctgtgctggatggagtgaagactgctgcagtaagaatgtcttttccacctcatttgaat

SEQ ID NO: 466139 - DNA, 100 bp, Homo sapiens
agcctcccgagtagctaggattacagggagtcaaggtggacgcgagagaccacagtggagccacagcccggatgctggccaagcagtacggacacatgaa

SEQ ID NO: 466140 - DNA, 97 bp, Homo sapiens
gcggacagcgaggcgggcctcctggaggcagcacgggcgaccccccggcgcagcagcatcatcaaggacccttcccgaaggccccgcgtccctggag

SEQ ID NO: 466141 - DNA, 83 bp, Homo sapiens
agtgcccttgtggcgaatggggctcacgtcgagggcactatgaacgaagaggagcagtttgtaaacattgatttgaatgatga

SEQ ID NO: 466142 - DNA, 75 bp, Homo sapiens
cggacgagagctgggccctcaaggccatcgaggcgctttcagggtcgcggcgagcgcgcctatgacatctactcg

SEQ ID NO: 466143 - DNA, 80 bp, Homo sapiens
aaagccatgggcaacctgcagatcgactttgccgacccctccagagcggctgctggaagactacgtggaagccatcgagg

SEQ ID NO: 466144 - DNA, 100 bp, Homo sapiens
actcctagtatcagcgaggaacaaattaaggtcacagtagacacaccaactagcccagttaccagtggacttccacttttctttgttataactgttacag

SEQ ID NO: 466145 - DNA, 100 bp, Homo sapiens
cacttcaatgagcgagaagccagccgagtggtgcgggacgttgctgctgcccttgacttcctgcataccaaaggaggtgtcctgtgggacctggagagcc

SEQ ID NO: 466146 - DNA, 98 bp, Homo sapiens
agactgtgaaagacgagggagaaatgttttgtttgactccagtgttaagagaagaaatgaggacatatcagtatcggctttatgaaggcaaagaacag

SEQ ID NO: 466147 - DNA, 50 bp, Homo sapiens
gggcccgtcaagctgcgcctgacaggtacaggtttgcagattccgccagc

SEQ ID NO: 466148 - DNA, 74 bp, Homo sapiens
ccgacttcgatgatcgtgtgtcggatgaggagaaggacacaactcagatgggaagttcatcgcccgggcacagc

SEQ ID NO: 466149 - DNA, 101 bp, Homo sapiens
gccggccgcgcgggccgggaggggacggccgccggagccgcgaggccaaagttgcatgctgagaatttgaaaaatgaagatgatgtagacactggactatt

SEQ ID NO: 466150 - DNA, 82 bp, Homo sapiens
cttcatgattctttggctcaaaggagttgtatttagtgtgacgactgttgacctgaaaaggcaacaagattgacctggctga

SEQ ID NO: 466151 - DNA, 75 bp, Homo sapiens
gtggatcgctgtgatcgtcacttgttccgagaggaacccgtgcaatagttcggtgccgcgtgacctccggcggcc

SEQ ID NO: 466152 - DNA, 100 bp, Homo sapiens
tgcagaaagtgggcctgagcctcgaggatgacggtgctgcaggaacccgtccaggatgagcacaagcctgggagatggcagtgatggaaatggcctgccc

SEQ ID NO: 466153 - DNA, 97 bp, Homo sapiens
ggaagctttggagcagtgtattttgtgggagaaggagagaaattggtgagggctctttttgctgtggctcgagaacttcaaccttctataattttta

SEQ ID NO: 466154 - DNA, 89 bp, Homo sapiens
agttacttggcgaggtcctcactcagctgtcctccaggttcaaacctcgagtccctgtgatcaaggtggaatatcacccttacctcaac

SEQ ID NO: 466155 - DNA, 113 bp, Homo sapiens
gctgtcaaccctggagacaactgctactccgtgggcagcgtcggggatgtccccttcacgctctactgagatgaagaaagaaaaagaatacctgctcagctccagagacacgt

SEQ ID NO: 466156 - DNA, 82 bp, Homo sapiens
aacatccgccccaacatcatcctggtgctgacggacgaccaggatgtggagctgggtcagcccaaggccaaccccactgtca

SEQ ID NO: 466157 - DNA, 98 bp, Homo sapiens
ccgccgccttcagtactttccacaacccccaaaacagaaatggttttggggtcaaccaggacctcgaagaggagcaggacttggatggtgagaagggg

SEQ ID NO: 466158 - DNA, 80 bp, Homo sapiens
ctttgaaaatatttacccaagtgcagtagacattgttgcaatcatgatcggcaatctgaaaggcacaaaaattctgcaat

SEQ ID NO: 466159 - DNA, 123 bp, Homo sapiens
ccaggcatcctactatgcttcctgagtgcttctttcttggagctgaccatgaatgcgattcacacctttgtgcagtccggatctcacttggcggcaagggagaaggcaaatctgtgaggccgg

SEQ ID NO: 466160 - DNA, 83 bp, Homo sapiens
caaatgtgtccctgaaaacttcagctgccgcgtttggcaccaggaaatggctagtgatgagctgaaagagatgcggaaaaact

SEQ ID NO: 466161 - DNA, 90 bp, Homo sapiens
ctgcagcccgcgcacagctgctcccttcgccttcgccctttccacctcgcggcagttcggagggcatcctggctgtttcacccgtggact

SEQ ID NO: 466162 - DNA, 90 bp, Homo sapiens
cacagtagataaagctggcagtaagaaatgctaaggcctgcctggtgtcctgcttccagcagctgatggtggagacctgctcctgtggct

SEQ ID NO: 466163 - DNA, 100 bp, Homo sapiens
gtgccctaagcacacctggagcaacaacctggcggtgctcgagtgcctgcaggatgtgagggaggataccggtgaatgtacagataatgcatacatcgat

SEQ ID NO: 466164 - DNA, 82 bp, Homo sapiens
ccagagctgaggactgcctgtttgcagatccagtccttctgtggaacttctgaacatcttttattagtggaaatattttcta

SEQ ID NO: 466165 - DNA, 100 bp, Homo sapiens
ctgcaggtcctgcatccaatggatgctgcccagagatcgcagcatatcaaagttaagcagctgcaggaggaaacgccacctggtggtcctttaactgaag

SEQ ID NO: 466166 - DNA, 101 bp, Homo sapiens
cgcgttcgggttcaccgccctgatgaaagccgccatgcagggtcgaacggactgcatccgagccctgatgctagcaggtttttcgttggaatatacgttgc

SEQ ID NO: 466167 - DNA, 98 bp, Homo sapiens
agaaccattgaagcttgagagaaaagcccccaaaagcagctattcagggcttccgagtggacctgccaatcaagtcggcccgctaccgtggccagtac

SEQ ID NO: 466168 - DNA, 100 bp, Homo sapiens
agtcccgcttctttgcctcccagggctgcgcccagagtccattccaggttctctacttaaaagacaatgactactgatgaaggtgccaagaacaatgaag

SEQ ID NO: 466169 - DNA, 101 bp, Homo sapiens
caaccagggagtctgtggttgactactgcaacagtttgctggagatccttcacgaacagcttcctgagagtaccaagagatgctaggttaatggagttcac

SEQ ID NO: 466170 - DNA, 96 bp, Homo sapiens
tgcagctccctaatgatgatgctcagtttgatgcgtcacactacgacagtgagaaaggaggcagtggtttgcagtggcttactggagcccttcact

SEQ ID NO: 466171 - DNA, 102 bp, Homo sapiens
ctctttagaagatggccagaccttggggaccaagaaaagcagcagaattcctcctgatcagcagagactgatctttgctggcaagcagctggaagatggacg

SEQ ID NO: 466172 - DNA, 97 bp, Homo sapiens
gggatgattctgatgcatcagtcatttgtcaccagctgcagctggggtgtcattccacacatccacaaatctctgattgggaagaaaggacaacaga

SEQ ID NO: 466173 - DNA, 51 bp, Homo sapiens
tgatctctcagagcagttggaagtcatgtagagacggggtttcgccgtgtt

SEQ ID NO: 466174 - DNA, 101 bp, Homo sapiens
ccttgcccgccctggaaaacgccctctgcggtgaaggagagttcaacgtggacaaggaagcaggggagaggcagatctaccaccgatactgcatggaaagg

SEQ ID NO: 466175 - DNA, 105 bp, Homo sapiens
cccggctgccggtcgacgaccgccccgcgtcatgcggctcctcggctggtggaatactcccccagttgcaagaggcgcaggaccgtggaagacttcaacaaattc

SEQ ID NO: 466176 - DNA, 51 bp, Homo sapiens
gttcttgacgattaatcaacagttggtgtaatacggtgcccagtatgccgc

SEQ ID NO: 466177 - DNA, 126 bp, Homo sapiens
cagaaggagagattcctctgccatggagtcctacgatgtgatcgccaaccagcctgtcgtgatcgacaacgcgtcgattagcaaggtaaaagtaacagaaccatggctcagtttccaacacctttt

SEQ ID NO: 466178 - DNA, 98 bp, Homo sapiens
aactcgaccggatccaacccagttagttacttcctgtctagagttgtagcttccacctgaacaagttgaaatcatcgcagaaggataaagttcgtcag

SEQ ID NO: 466179 - DNA, 100 bp, Homo sapiens
acaaagggccccttacacaccagacaggatgaccatgaaagctgtggttctaattctaccaaccgtagtactgctgagagcacaaaatcatcaatcaaac

SEQ ID NO: 466180 - DNA, 75 bp, Homo sapiens
tcagcctcctgagtagctgggactacaggtggccaagactaagcagcagattgaggagcagcgggtgcaggtgca

SEQ ID NO: 466181 - DNA, 100 bp, Homo sapiens
agcagctgcggcggccacaccctggatgagatgccggtggccgtgggtccctacggacagtcccagccaagctgcttcgaccgtgtcaaaatgggcttcg

SEQ ID NO: 466182 - DNA, 90 bp, Homo sapiens
gcaagtaacaacaaacttggatcattaccagaagagataggtcagctcaaacagttaatggagctgagaatgaagacctttcgaatccgt

SEQ ID NO: 466183 - DNA, 90 bp, Homo sapiens
aggtcgctaactacaagaaatgttacactcgggctgagccggatcttgaagactcgtggggaaatggtgaagaaccggactgtggactgg

SEQ ID NO: 466184 - DNA, 101 bp, Homo sapiens
cggcgcaccgactggaccgggaaggagcatcccaggacctaccagaatctggtgctggagaatctggtaaaagcaccattgtgaagcagatgaggatcctg

SEQ ID NO: 466185 - DNA, 100 bp, Homo sapiens
ttttttgggaaaacacttcaaatgctgagcctgtggacatctctacagcaatgagtgaacgggcacttgctcagaaaagactcagtgagaatgcatttga

SEQ ID NO: 466186 - DNA, 100 bp, Homo sapiens
tgggaacgcggagcggacggattcgattcaacggggttccggaccgcgctgcgctatggagcaggtgattcttcagaactgcacggaggaaggcctggcc

SEQ ID NO: 466187 - DNA, 101 bp, Homo sapiens
tagagacagataaaaatggatttttgcagtacgatgtggatcctcacaaagctacaagaagcaagagaaccttctccgagcctctgacagagaacactgcc

SEQ ID NO: 466188 - DNA, 100 bp, Homo sapiens
caggtaggctgcgttgaggatctttgctcttccatccgcctttgatcgtcttcctcttcagccatccagttgcaggagaaataacaaggcattgaagaat

SEQ ID NO: 466189 - DNA, 100 bp, Homo sapiens
cgctgaggatgaactggcgggtgtggacgccactacagttcatcaacatcaactacgtccctctgaaggcccgccaagctgccccctgtgtgctattctt

SEQ ID NO: 466190 - DNA, 88 bp, Homo sapiens
tgatccgcactgccctttttgcaccccagggagctgctgctgtccagcctagggtgaatgtttccccctccaagaaggggcccttgca

SEQ ID NO: 466191 - DNA, 98 bp, Homo sapiens
tttgagtccgcatcgccacagctgaaggctgcgagggactaagagcagagttcgatacaagaggctgttttcctagcgtggcttgctgcctttggtaa

SEQ ID NO: 466192 - DNA, 74 bp, Homo sapiens
gggaggatgatggtgaggcaggagaggaggacgaagagctgtggaggaagatgcagagtcagaagatgaagagg

SEQ ID NO: 466193 - DNA, 90 bp, Homo sapiens
ggcgcctcctcgctcccgccaccgccggacttcaatgcccagtccccagctcgccagcgctggcagtgatggtgaaagcataggaaactg

SEQ ID NO: 466194 - DNA, 82 bp, Homo sapiens
tgcagaactgagcccaggccacagtaccctattcacgctctgtgcttgtgccaaggtcagcccaaggccaaccccactgtca

SEQ ID NO: 466195 - DNA, 80 bp, Homo sapiens
gcgtccgccgattcctcctccttggtcgccgcgtccttggctggcgtatgctgtgtgctgtggacccacctggggttcat

SEQ ID NO: 466196 - DNA, 75 bp, Homo sapiens
attcagatgggatctttccggatcaatccagatggcagccagtcagtggtggagacagagtctccctctgttgcc

SEQ ID NO: 466197 - DNA, 75 bp, Homo sapiens
ggagtgcaagcttagagcgtctggccaagaatcagaggaagtggaaatacatgctacaggatttaactatcagaa

SEQ ID NO: 466198 - DNA, 101 bp, Homo sapiens
gggagaagttcatcatctcggactggagatttgtcctgtctggatcttacaggaacgtgttgtgggctttcacgtactgggtccaaatgctggagaagtta

SEQ ID NO: 466199 - DNA, 50 bp, Homo sapiens
cgagcagcccggggatccagcacgcaggtttccagccaatggattctggt

SEQ ID NO: 466200 - DNA, 82 bp, Homo sapiens
tcgtgtctcgaccgcgtcttctgagtcaggtgtgttccggggtggtcatgacatcctggtgcgctcccggctgctgcttttg

SEQ ID NO: 466201 - DNA, 96 bp, Homo sapiens
acgtgggcggtgggccccagccccacagaccagcccagcattcagttttgattacgaagatgcaggctaccagactgcagaacttgtaaaaatgga

SEQ ID NO: 466202 - DNA, 89 bp, Homo sapiens
ctgggacgttggggagggggctgtgccgggcggagagaactcagcgaggattctgaggtaccttaacatggggaatcttcttaaagttt

SEQ ID NO: 466203 - DNA, 100 bp, Homo sapiens
cagcaggttgagcaagacatttcttacagcagctgtgacacaagcctcactgcagtctataattcataagtttcttactgctggaccatctgctttcaac

SEQ ID NO: 466204 - DNA, 75 bp, Homo sapiens
ctggacatggctcagatgctgcatcggctcctgggtcacatcaagaacgtgccttagagacagggtttcgccgtg

SEQ ID NO: 466205 - DNA, 75 bp, Homo sapiens
gacgaggaagttttctactgtaaagtcaccaacgagatcttccgccactacgagctcctacccagagattctacc

SEQ ID NO: 466206 - DNA, 75 bp, Homo sapiens
caggcttttccatcctcatcctcacagggaacaacatcaagcctttttgtatcagttaatgcaacatcaccacca

SEQ ID NO: 466207 - DNA, 101 bp, Homo sapiens
cgagcgcaccgacatctgcctgctcaaagagtttatgtggccgaggcagacaagtggaattaggccttgctgcaggggacttcatttccttctcagtactg

SEQ ID NO: 466208 - DNA, 75 bp, Homo sapiens
agatcgactgttacaacagcctggcagtattctaccttgtaaatactgttatttgtatatactgtaaatgatgac

SEQ ID NO: 466209 - DNA, 90 bp, Homo sapiens
ggatcaaagtgtaccagtcggcagcatgggtgcagacattccatggaggcctgctgcagcacatggagaagaacaccaagctggacatgc

SEQ ID NO: 466210 - DNA, 100 bp, Homo sapiens
gctccgccagtactttgcagagaccgagaggcatagagaagaacgacgctgctttgaatgctgcatcaagtgtctgggaggagtcccctacgcctccctg

SEQ ID NO: 466211 - DNA, 101 bp, Homo sapiens
tcgtggtcgtctggtcctactacgcgtacgtggtggagctctgcgtgtgaatatatgcagaacatgtcctgcggcccaagaatcttggacttgcacatcag

SEQ ID NO: 466212 - DNA, 98 bp, Homo sapiens
gcggatgtcggcgaagagttcaaccagttgctctaggtcgtaaccagcctttgaaaaaggagaaaccaaaatggaaaagcgattatcctatgacagat

SEQ ID NO: 466213 - DNA, 51 bp, Homo sapiens
gcgagattataagaagcttgggttcattatccctaaagaagtggctgacat

SEQ ID NO: 466214 - DNA, 90 bp, Homo sapiens
gaggctccctgctcagctcctggggctgctaatgctctgggtctctggctctcgaacagtgtggcctgatgaaactatgggaccctttgg

SEQ ID NO: 466215 - DNA, 98 bp, Homo sapiens
cagcaatgaaatcctgctttcttttcctcagaactactatattcagtggctaaatggctccctgattcatgggatctgctaagctagaaaaagccgag

SEQ ID NO: 466216 - DNA, 75 bp, Homo sapiens
gatagtggaaagaaaccatgtgctgaaatgtttgacgacactgatggtttggagctccttcccttaacagagctg

SEQ ID NO: 466217 - DNA, 83 bp, Homo sapiens
gaagcgcggacggcgcacgacgagtactggcatgcgcacgtggacaaggatctggtggaacgagactgcaatggggacacgcc

SEQ ID NO: 466218 - DNA, 100 bp, Homo sapiens
caggccaaggagacccccctgacaacatgaaggcatgttatttgaaagcaattgagacgcaaccgaactttgcagtagcttggagtaatcttggctgtgt

SEQ ID NO: 466219 - DNA, 95 bp, Homo sapiens
tgggggttgcggcggcgctgagccagcggggccgctgaacaaaaggttcatcctcagttttctccatgcccatgggaagctgtttacccggattg

SEQ ID NO: 466220 - DNA, 100 bp, Homo sapiens
agcgaggcggaggcgatcggtgctgattcggcgcgatttgaggagctgctgctgcagcggatgtgatgctggtacaacccagagtagaatttattctgtc

SEQ ID NO: 466221 - DNA, 99 bp, Homo sapiens
aaaaatacttgaaggacgaaagtggcttcaaagatccttccagcgactgggaaatgtcacagtcttcaaccaagactggagtaagaccttttaaccctg

SEQ ID NO: 466222 - DNA, 74 bp, Homo sapiens
tggaattgaagcagttggtggcaaattaagcaggaggccactgtctgcagctcccgtgaagatgtccactccag

SEQ ID NO: 466223 - DNA, 50 bp, Homo sapiens
agacaatcgaaaacagagttcagaagggataaggatgacattcggctgct

SEQ ID NO: 466224 - DNA, 51 bp, Homo sapiens
agtaccagtagctttaaaaaaagtgcagcattcctacttcattgcccctga

SEQ ID NO: 466225 - DNA, 100 bp, Homo sapiens
ttgactactattattttcttcttataaccatggcatcatatataccttgatatggctttagttgcccctgaagctccttcagaacaagccagaagagttt

SEQ ID NO: 466226 - DNA, 100 bp, Homo sapiens
atcttggagttctttgagctgtgaagtgctgtgcatcgtgtgattctgtgtcccttttgtgcaggtaaccacctgctgttccaacaagtgcccatggttg

SEQ ID NO: 466227 - DNA, 78 bp, Homo sapiens
gtggatcagcgcctacccgagtgtgcgaagctagccaagttggaaatggaggatgaagatacaattgatgtgttccaa

SEQ ID NO: 466228 - DNA, 75 bp, Homo sapiens
acagaagttttggaacttttggataatggtgcaggctatgaccagggccagagcactcagatctcagtcagagga

SEQ ID NO: 466229 - DNA, 100 bp, Homo sapiens
cggcagcgctgcccgccaagcctcccaacctggacgccgctctggcgctgctccgcaaagagatgaccgagacatgggtgcccggcaccgcgcccgagcc

SEQ ID NO: 466230 - DNA, 75 bp, Homo sapiens
cgaagacgggatactgctcagcaaggtgttgtgaatttcccatatgatgatggaagcagtgggacttgcagttcc

SEQ ID NO: 466231 - DNA, 89 bp, Homo sapiens
acgaaggcattggtcaaggggacctgagtgaactgcctgaggagctgtggatgaggagggacgcatgcctttctatgcagaagaatgtg

SEQ ID NO: 466232 - DNA, 100 bp, Homo sapiens
aatccataactctgataagccgtacaggatggtattgagcctatgtgggaagatgagaaaaacaaacggggaggacgatggctaattacattgaacaaac

SEQ ID NO: 466233 - DNA, 100 bp, Homo sapiens
gtggcagagtcgggaccacaaacatgcaatggcaccagcatgatatcattgatcattcctcccaaagaccagatttcacgagtggcaaaaatgttagcgg

SEQ ID NO: 466234 - DNA, 100 bp, Homo sapiens
gacccgtggttcgcggcctcctcctcagtcgggatcaaccgatggaggtgactgtggccttcccccagatgtacctaatgcccagccagctttggaaggc

SEQ ID NO: 466235 - DNA, 51 bp, Homo sapiens
gcggaggtggtggtggaggtggaggcactacctggcagcaccatctaaacc

SEQ ID NO: 466236 - DNA, 83 bp, Homo sapiens
gttgagcctgtgggacacttcggacacgatgaggcgagtggtacgacagagcaagtttcggcatgtatttgggcaagcggtga

SEQ ID NO: 466237 - DNA, 83 bp, Homo sapiens
atatatactcctacatataaaatccatcttctaatcataatcactagtccgtttgaggaagtccccgaggcgcacagagcaag

SEQ ID NO: 466238 - DNA, 103 bp, Homo sapiens
agggagagcatttacccctatctagaggatataccagaccctggagtgaactggattccatgtagagacccctggagatttggccagaccccagtacaagaaa

SEQ ID NO: 466239 - DNA, 100 bp, Homo sapiens
cgaaggccctatcaggacatggagtatgaaagacggtcttttatcagaaatcaccgatccagagagcttcctgaaggacctgttgaactcagtcccctga

SEQ ID NO: 466240 - DNA, 97 bp, Homo sapiens
gctttaagacctctaagagccttatcccggtttgaaggcatgaggagcaatgttgatcccagggatgatgtatttggatatcctcaacaatttgaag

SEQ ID NO: 466241 - DNA, 74 bp, Homo sapiens
tttggaaggagtgttttctacaggatcctttcaacagggaatgacagaggaagaggaagacaaacttctggcac

SEQ ID NO: 466242 - DNA, 95 bp, Homo sapiens
ggatgattggtagctaagactcccgaatacttcagaagtggggaaatgatgagcagcaccagcagtaagagggctccgaccacggcaacccagag

SEQ ID NO: 466243 - DNA, 50 bp, Homo sapiens
cagcgcggcaacgtcgccaagacctcggaatcagagatcattgatttctt

SEQ ID NO: 466244 - DNA, 100 bp, Homo sapiens
gtgaccatctcgcaggatgccggcaggcttcagaaactagctttaagaaataattctgcatctacaactcaacatttacgactgcttattagaggacaag

SEQ ID NO: 466245 - DNA, 100 bp, Homo sapiens
cgcgctgggcgtccgcacacgcagccgagcaagccgaggttcgatacaagaggctgttttcctagcgtggcttgctgcctttggtaagaacatgtcgtcc

SEQ ID NO: 466246 - DNA, 75 bp, Homo sapiens
agaggatgatgtttttggtgaagttggattggatgctgctggcaagacaaccattctgtataaactgaagttagg

SEQ ID NO: 466247 - DNA, 98 bp, Homo sapiens
aagaaaacacagagccaccctggaaaggtgtcatggagaaactccagctgggcccagagattctgcagcgggaaaatccaaggcttatttatgccagg

SEQ ID NO: 466248 - DNA, 100 bp, Homo sapiens
cctttgtgggatttgactgcattgcaacaactgtcactgcttcaaccacctgtgagaaattagaaaaagccaggaatgagttacaaacagtgtatgaagc

SEQ ID NO: 466249 - DNA, 82 bp, Homo sapiens
atgaaaattgggaaggttccctcaagtccaagtctctagtgatccctgaaaagttccagcatattttgcgagtactcaacac

SEQ ID NO: 466250 - DNA, 100 bp, Homo sapiens
agaaggtgaagaaggagaagaggaggatcccctaacaacagtgagagagcaatgcgagcagttggagaaatgtgtaaaggcccgggagcggctagagctc

SEQ ID NO: 466251 - DNA, 100 bp, Homo sapiens
gcaagaggcgtttctataagaattgggatacattggcctgcaggtcccagttcacatgtagtcccctgctcaccattggagaatcagctcactgctctct

SEQ ID NO: 466252 - DNA, 99 bp, Homo sapiens
caagtaaagagaaggaggccggaactacaccagcaaaaggttgaaatcacaaagattagacacctttttagataggtgttcttcagcaccactgacaac

SEQ ID NO: 466253 - DNA, 90 bp, Homo sapiens
ataggggggttccatctcccaacttgtccatgttgaatgtcaaagctttcattagcaatgtgaagacagctcttgctgcaacaaacccag

SEQ ID NO: 466254 - DNA, 100 bp, Homo sapiens
ctgggaccatggccactgactcatgggccctggcggtggacgagcaggaagctgcggctgagtcggaggaggcctcggtggtaccagaagaggaggggct

SEQ ID NO: 466255 - DNA, 83 bp, Homo sapiens
atttgttaaggattccaagtaactcttatttggtgagaaaccttaccactgtgactgggacggctgtggatggaaattcgccc

SEQ ID NO: 466256 - DNA, 100 bp, Homo sapiens
gggccccgggacctgggctgggaacccgcggtggagcgggacacgaacgtgagcggttctggtgaggttggaaggatgcagccacccggttgtcatgaaa

SEQ ID NO: 466257 - DNA, 90 bp, Homo sapiens
tctcgatgaggataacatccctccagaagatgacaagctgtaacccttcacgtgccttaccttcactcaatactggcagctcttccccca

SEQ ID NO: 466258 - DNA, 50 bp, Homo sapiens
cttcccatcaccatcacagagagcgatagaagcattggaagtgattccca

SEQ ID NO: 466259 - DNA, 98 bp, Homo sapiens
gttaagtcccccaaagatgagatttacctgtgagatgtttcatcccaacagtgaccatgctttgggattttcatagtttgagtaattcctatgggctc

SEQ ID NO: 466260 - DNA, 98 bp, Homo sapiens
tttacacggtcctgcctctgtaccacgtgatgggacttgtcgttgggatcctcggctgcttagatctcggacatgatccacatcgcggacaccaaggt

SEQ ID NO: 466261 - DNA, 82 bp, Homo sapiens
tcgggatctcggtgctgcagacggcgagacctcctgcacaggcaaagcgaaggctggagctaggagaaagcggtcatcagta

SEQ ID NO: 466262 - DNA, 82 bp, Homo sapiens
gggcgccatggcgaccggagcgaacgccacgccgttgggaaagaccacagcaagattctttcattcgtctcctcctagcctg

SEQ ID NO: 466263 - DNA, 99 bp, Homo sapiens
gcggagcacgggcaaggcggagagtgacggagtcggcgagcccccgcggcgacaggtaagaatgattgatgttggctgatattggagtgctcattcaca

SEQ ID NO: 466264 - DNA, 75 bp, Homo sapiens
tcttgctccggccgcggccagcggagccctgggctggggcaggagccggtgagccggcctcatcctagtgactac

SEQ ID NO: 466265 - DNA, 82 bp, Homo sapiens
cagaatacaagatgggaagaatgagaagtcatggaatgacaggtggaagatggtatcttgaagttgaggaatgctggcaatg

SEQ ID NO: 466266 - DNA, 82 bp, Homo sapiens
caaaattgtggaaaagtcactctgaggtggggctggtgtccgagcacttctcgcaggccccgcagaggctgtccttctacag

SEQ ID NO: 466267 - DNA, 82 bp, Homo sapiens
tgtgacgctgctggaggaaacacctcaggacacggcctacaacaccaagaggtcccagagggtggaaggagccaggacgcac

SEQ ID NO: 466268 - DNA, 100 bp, Homo sapiens
tttatcaccaattgtggaaaaaacagcttttaccttgagtggttccatcaaggtcctaatccctacaatggagcacaggactggatttactctggcagct

SEQ ID NO: 466269 - DNA, 98 bp, Homo sapiens
cgggtggctggctttgccattagcgggggcctttcctgaggacggcgtacggagtgtgggtaaactaacattatggatttttccaagctacccaaaat

SEQ ID NO: 466270 - DNA, 117 bp, Homo sapiens
cgcgcccgccagttgcttgatcaggtggaacagattcagaaggagcaggattaccaaaggttccacaggcgcatgggccacgtttccagtgcttggtggccatgtggggctgacgtg

SEQ ID NO: 466271 - DNA, 50 bp, Homo sapiens
ctttctccacccatcccgagaacagtgagactgctgctcctcgggccatt

SEQ ID NO: 466272 - DNA, 139 bp, Homo sapiens
catccagtggggaggaaaaggccaagagtagctggtttggcttgagagaagccaaggacccgactcagaaacccaggtatgacctggacgcgtgtgacattcaagaaaaatacccggatttatttcaagtgaacctgga

SEQ ID NO: 466273 - DNA, 73 bp, Homo sapiens
aactgctgacgcttgatgagaaggacccacggcgtctgttcgaaggtggcaatggctacatcaatgactttcc

SEQ ID NO: 466274 - DNA, 97 bp, Homo sapiens
ccagtcgtgtctccagtgatgtcattgaccagaaggtgtatgagatccaggacatctatgagaacagcatgcttttcacttccactgcatctctcgc

SEQ ID NO: 466275 - DNA, 100 bp, Homo sapiens
ggaaagcgggctggcaggcgagggagcccgcgtcggctgagagcccacaggcccccacagccaaaactggacaagccaaggcatctgtagccaaagtaaa

SEQ ID NO: 466276 - DNA, 100 bp, Homo sapiens
aggggttaattcaacagttcaccaccattaccgctgatgactatcagccagttcgtctgctcagtaaacctggggaactgagaagagaatatgaagagga

SEQ ID NO: 466277 - DNA, 74 bp, Homo sapiens
tttttctaggaggaggaagtgatccattgtgtaagctcctgacccctgaggattaccagcgatttctagacctg

SEQ ID NO: 466278 - DNA, 50 bp, Homo sapiens
tttttcctccagggaggacctcattaaggatggcacagtgttcgacggcc

SEQ ID NO: 466279 - DNA, 75 bp, Homo sapiens
actcctggagaagggattgcccagtcagcaaaggttcagccctccaagacatgggaaagcggaaccaccaaaagg

SEQ ID NO: 466280 - DNA, 75 bp, Homo sapiens
gcaagaaggccctggacacagcaatatctctgggctttcacagcggaagtgaaacgtgtaggagacacacttttg

SEQ ID NO: 466281 - DNA, 83 bp, Homo sapiens
caggccgggcacctccgagcgcaaggacagcgcgaggtccgcgcagcccagcgcagccatctgggagtgtccactcgccttcc

SEQ ID NO: 466282 - DNA, 74 bp, Homo sapiens
gcagacatcagctacagatatatcttcaggaactgtggctgcaccatctgtcttcatcttcccgccatctgatg

SEQ ID NO: 466283 - DNA, 98 bp, Homo sapiens
tcgaggaggtcatgaaggacctgagcctgacgcgggccgcgcgggattcagtggcctttgaggatgtggctgtgaacttcaccctggaggagtgggct

SEQ ID NO: 466284 - DNA, 98 bp, Homo sapiens
ggaggccgaggcgggcagatcacctgaggtgactgctggctgctggcagccattgcctccctcaccttgaatgaagaaatcctggctcgagtcgtccc

SEQ ID NO: 466285 - DNA, 100 bp, Homo sapiens
ggaagaggggctggagcccacctgctttgagaagagcaatgacattgggggcctgtggaaattttcagaatttgaagcctacattaatgcttctggagaa

SEQ ID NO: 466286 - DNA, 82 bp, Homo sapiens
gatatatggagctctacacgtatcctcctgcctagcgcaggggccagtgtcattcaaagatgtggctgtggatttcacccag

SEQ ID NO: 466287 - DNA, 75 bp, Homo sapiens
ctgctgctattctccgagcttcgcaatggtgtggactggatgaacaaggtgatggcacgtttcgtgaggggggat

SEQ ID NO: 466288 - DNA, 100 bp, Homo sapiens
gctgttcgatctggtggagctactggcgtggtagttaaaggcccagatgataggaatcccatctcatttaggatttctctgcctcttccaaacttttcct

SEQ ID NO: 466289 - DNA, 75 bp, Homo sapiens
agcagcaggagcagcccgcggcgaccaagatcaggaacctgccctgtgtcactactccatccagaagggagctgc

SEQ ID NO: 466290 - DNA, 75 bp, Homo sapiens
caagcttgaaaaaacaacgtacatggatcctactggtaaaactaggagcggaaagaatgtcggagcgggccgcgg

SEQ ID NO: 466291 - DNA, 82 bp, Homo sapiens
gcagcagcaccaggctctgcagcggcaacccccagcggcttaagccatggcgaactgctcaaacctgtgccccaaagatgag

SEQ ID NO: 466292 - DNA, 75 bp, Homo sapiens
tcgatctccgccctggggtcattgtcagatggacttccaggacttgggtctagtgttgctgagggtggatctgca

SEQ ID NO: 466293 - DNA, 83 bp, Homo sapiens
tggcggtgcgcgacctgggctggctccgggggtggcgggcgcagctgctgtgacaggtcatcatcagatttgaaatatttaaa

SEQ ID NO: 466294 - DNA, 82 bp, Homo sapiens
aaatatacgacacatccaggagtttattggagcgcagactgatggcgcaaaggtgtcaacagcatctccaccctggagcctg

SEQ ID NO: 466295 - DNA, 75 bp, Homo sapiens
agtcagtgagaccaagaacccaccaattccggacacggaaaacaatgaagagtcgttatatggaactctatgacc

SEQ ID NO: 466296 - DNA, 73 bp, Homo sapiens
gggcggcagcgcggacccgcccggagatgagggaaaagcttcactctgaccatcactgtcttcacaaacccac

SEQ ID NO: 466297 - DNA, 82 bp, Homo sapiens
cccaactcaggactccacacaattaaccttgctggcaacccactggaggatagagcacatggattaattgatgtatgttgag

SEQ ID NO: 466298 - DNA, 96 bp, Homo sapiens
aacttgacctcacaagacgtgggctctggcaccagcaataacagccaagcctgtgcccaggattttaaagctggagaagaagttctggctcgttgg

SEQ ID NO: 466299 - DNA, 100 bp, Homo sapiens
agacggccagaaagttccgccatgagctggggcacggagctgtggattgcagcaaaaattggaggtgatgcagggacatcactgaattcaaatgactatg

SEQ ID NO: 466300 - DNA, 100 bp, Homo sapiens
agcgatgctgaggatcgaggaacgttgtctggtatgaacgctgccgtccgtgccgtggtgcgcatgggtatctacgtgggggccaaggtgtacttcatct

SEQ ID NO: 466301 - DNA, 75 bp, Homo sapiens
ctggcagcccctttcctctggaagctgtggcccccaccaagcctagcaagcaggttcaggagaagtggcacctgg

SEQ ID NO: 466302 - DNA, 100 bp, Homo sapiens
ataacactctccccagcaatatctggcactccacagaaggatgttattatcaagtcagatgcaccggacactttgttattggagaaacatgcagattata

SEQ ID NO: 466303 - DNA, 96 bp, Homo sapiens
gtacatgattgggtcaatacgtactatactggcaattgctggagaagattttgcaattgttgcttctgatactcgattgagtgaagggttttcaat

SEQ ID NO: 466304 - DNA, 74 bp, Homo sapiens
gagattcagccagcacactcctcgcgagcaagacactgccctaaccatcatggaggtggccgaggtggaaagtc

SEQ ID NO: 466305 - DNA, 101 bp, Homo sapiens
caagtaggtagtgaataccgggagtcctggccccctaactcaagttggccttggggaggcactattagaggctgaaactattgaagaacaagaatctccag

SEQ ID NO: 466306 - DNA, 80 bp, Homo sapiens
gccgctctgcgggactctgaggaaaagctcgcaccaggccccatctccttggctaacccctgatccagcctctgttcagg

SEQ ID NO: 466307 - DNA, 98 bp, Homo sapiens
ctgtcctgtggaaatgctggggcaagtggtcaccctcatactcctcctgctcctcaaggtgtatcagggcaaagttcagtgatcggattttgtggttg

SEQ ID NO: 466308 - DNA, 75 bp, Homo sapiens
catgtctgtgagctgcggaggctgcggcccccagttctacttgtccaattctgaaaaggaacgttatgaaaaaga

SEQ ID NO: 466309 - DNA, 83 bp, Homo sapiens
gtcatcagtgtgtccattggagcaaggaaccgtcaacgggaaatactgctgtcctcagctcttcatcaaccacaggtgtttct

SEQ ID NO: 466310 - DNA, 82 bp, Homo sapiens
cccaagtggcggggactactggtgcctgcgctgaaaaagcttccatgaggcaggctgaacctgcagatatgcgcccagagat

SEQ ID NO: 466311 - DNA, 121 bp, Homo sapiens
cagaaagcggcttatcgaacagagccgggagttcaagaagaacactccagagggagtaccctgacttctaccggaagctctacggcctcttggacccctctgtctttcacgtcaagtaccg

SEQ ID NO: 466312 - DNA, 98 bp, Homo sapiens
ccattgaaaccagcaaaaggacttatgagttacaggataattacagctttctcctctaaatcttggtctcttgtttggaagtgactaacagcattttg

SEQ ID NO: 466313 - DNA, 100 bp, Homo sapiens
tatgagacagatactggaagctctacgctactgccatgataataacataattcacagggatgtgaaggccccgagaagctgccatcactggagcaccggg

SEQ ID NO: 466314 - DNA, 83 bp, Homo sapiens
ggcaggagattatagctctgtatgagaaggacaacacctacttagggtcggtcagagctgacgatgaagttgatgtggatggt

SEQ ID NO: 466315 - DNA, 100 bp, Homo sapiens
ggctacctggtactgagtgaaggtgcagtgctggcgcccagctcaacattggcaatgtgctccctgtgggcaccatgcctgagggtacaatcgtgtgctg

SEQ ID NO: 466316 - DNA, 139 bp, Homo sapiens
gccattttcaactctccactggaggctgctatggcgttccctcacctgcagcagcccagctttctactggatattaccttccaaatgatgatggagaattttatcagttctgttacgttacccataagggtgaaattcg

SEQ ID NO: 466317 - DNA, 83 bp, Homo sapiens
ctgaattctgtggattttcgtctaaaaataacaagaatgggaggagaagggttttaaaatcaaagatgggaaaatcggagaaa

SEQ ID NO: 466318 - DNA, 111 bp, Homo sapiens
ccgaagtcgtcttcatcggggactccttggtccagctcatgcaccagtgcgagacagcaactctggaaagtggcttctaactcggcgcattttcttagtggatgcagtaag

SEQ ID NO: 466319 - DNA, 98 bp, Homo sapiens
gccagatgaagttccagctccgctgcacccctgtgcccgcccggctcaggcccgctgcctggtgagacgagtggaccggatggagcattccatcggca

SEQ ID NO: 466320 - DNA, 101 bp, Homo sapiens
ccgcgccgcgttcgagttctcggaggggagggggcgttagccccgcgcagccgccggcgtcgccgccatggacctagggtgaggtggctttgaccccgggt

SEQ ID NO: 466321 - DNA, 100 bp, Homo sapiens
tacggcaataaagcaaagaaacaaaagacaactctgcttttccagaaactgtgccaggatcacgaggagaaggcagagcccccccaggctatgaatgccc

SEQ ID NO: 466322 - DNA, 100 bp, Homo sapiens
gcctcttcatattggcgatcctgttgtggccggtcactccgcgcaagtttgggttcctgttttagaactgccacctaagcccctcttatttcatctttcc

SEQ ID NO: 466323 - DNA, 100 bp, Homo sapiens
ccctgctccgcagcgacatcaccaagctggaggtggacgccatcgtcaacgccggtgctgttgggaacacagaggaagtgactggctgggggttcaggga

SEQ ID NO: 466324 - DNA, 99 bp, Homo sapiens
ctccgaaccccttcatgcccaaatcccggaaactccagcgtgtctccagccgtggcaagagcggtgagcggggcgcctatgcctccttcgggagagacg

SEQ ID NO: 466325 - DNA, 75 bp, Homo sapiens
cgcagatgcgggccctgctggaccagctcatgggcacggctcgggacgcctacagatgaattttcagatctgcct

SEQ ID NO: 466326 - DNA, 100 bp, Homo sapiens
cgcgacaccatcttcgacaacatcctcaagggtgtcttttatgaataatcaaaagcagcaaaagccaacgctatcaggccagcgttttaaaactagaaaa

SEQ ID NO: 466327 - DNA, 100 bp, Homo sapiens
gcaggacaccttcattgtgcacaccattgaggagatccagaacaacctccctcctagcatgatgacccgcagaaacacctacgtttgcacagaacgcccg

SEQ ID NO: 466328 - DNA, 75 bp, Homo sapiens
tacaggacaggctaacaccaatggaggctttacttcagacaaggatttttcaagccacattcaattgataggatg

SEQ ID NO: 466329 - DNA, 90 bp, Homo sapiens
ggggcaccaagagcagccccggtctctcggacaccattttctgccgctggacgcaagacagcccacctgaggatattgaccataaggact

SEQ ID NO: 466330 - DNA, 74 bp, Homo sapiens
gcagcctcggttttcccaccacctccaaatcatgcaagacacaggtggacctgacgctggaccctgacacggct

SEQ ID NO: 466331 - DNA, 75 bp, Homo sapiens
actgacgcagtcactgcagcactggtggaacttgaggacactgatgaaattcaagttaactatcctggaatgttt

SEQ ID NO: 466332 - DNA, 100 bp, Homo sapiens
cgtgttcaataccatccttaccaccagaagctatccacaacttcgcagagtactttggaagtgttgctgaaatcatcaggaatcatcaacatagtccttt

SEQ ID NO: 466333 - DNA, 89 bp, Homo sapiens
gggacaccccggaagctgggaaatgtattagttcagaagcaggcctagaaattgatagccagcaggaagaagagccggttcaagcatct

SEQ ID NO: 466334 - DNA, 83 bp, Homo sapiens
ctgagagcttgattccagggcctgccctgctcctggtggcacccagtggcctgtactactggagcggcggcatggaggctctc

SEQ ID NO: 466335 - DNA, 83 bp, Homo sapiens
ggagcgggaagtgctgcagctgcagcctggtccgacccccagtggcactaacgtgggatcctcagggcgctctcccagcaaag

SEQ ID NO: 466336 - DNA, 74 bp, Homo sapiens
agtgacgagaacagcaatccagacctctctggagacgagaatcactttcagaccatgctgaagtctaaattgaa

SEQ ID NO: 466337 - DNA, 100 bp, Homo sapiens
tttttaaaatggaagccagattatgacagtgccgcttctgaatatggaaaagcagtcatggttcatcagaatgtattaagattcagaaccaaaggttata

SEQ ID NO: 466338 - DNA, 75 bp, Homo sapiens
tcgtgcacatccaggcgggccagtgcggcaaccagatcggcgccaaggacagtcattttgtttactcattcagcc

SEQ ID NO: 466339 - DNA, 75 bp, Homo sapiens
ataacactggagatcagcaccaaatcccacagaggcatctgaggacagtcattttgtttactcattcagccctgt

SEQ ID NO: 466340 - DNA, 100 bp, Homo sapiens
gccgctgccgctgccgccgctgctgctgttgctcctggcggcgccttggggacgggcaggtgaccagtatgcactgaagatgaggtttgtggaccatgtg

SEQ ID NO: 466341 - DNA, 74 bp, Homo sapiens
agatctagttcacttgaaggcttccataaccactttgtgtctgctttttcaacgtgggagaaggagttgcacaa

SEQ ID NO: 466342 - DNA, 50 bp, Homo sapiens
gtttgctcctaacttgctcttggacaggttttcaaatggaacattttgat

SEQ ID NO: 466343 - DNA, 100 bp, Homo sapiens
gcggggccttccacaccccctccgtgggtgtgtggtgagtgtggatcaggatcctcatgaccagccaaagagaagaagaattaggaagcataaatcaaag

SEQ ID NO: 466344 - DNA, 100 bp, Homo sapiens
gctggactgagtttgtagacatgaaggtccatgtaccctgtgaaaccctcgaatacattgaagccaactatgattctctcgggcctagccgtccttggaa

SEQ ID NO: 466345 - DNA, 50 bp, Homo sapiens
tgcccacctgcgtaagggggcagagacagcagaacagccctgtggccccc

SEQ ID NO: 466346 - DNA, 80 bp, Homo sapiens
cagccagacgagagcttcagccatcacgaggatgatttcggaacctggagaaaatattgtagaaggcatgaaacaaaaaa

SEQ ID NO: 466347 - DNA, 75 bp, Homo sapiens
ctgggttacaagcagcaagtgcgcggttggggccactgcgaggccgttttagtgtatcgcattaagttcaaggag

SEQ ID NO: 466348 - DNA, 90 bp, Homo sapiens
aaaatttgtctgcaaacctggagccagaaacattaccgtcatattccacccattactaagattatgtgtgacaatccaagaagccaacca

SEQ ID NO: 466349 - DNA, 112 bp, Homo sapiens
taaaatgtaaaccagacaaacttccattattcaaacggcagtatgaaaaccacatatttgttgtatgaagcatgtctttaggactttctgtgccatctggtatccatcaagg

SEQ ID NO: 466350 - DNA, 83 bp, Homo sapiens
tggatttccaaggaagaatttcctctgaagcaccgagacaagaggagcagcagcggcaccgcccctcaccctggagggtcctg

SEQ ID NO: 466351 - DNA, 75 bp, Homo sapiens
gaaagatttgatatagctattatctattacaccagagccattgaatataggaagttaaatgaagttcgaaagaga

SEQ ID NO: 466352 - DNA, 75 bp, Homo sapiens
tatggtgctgggtgcagatgcagtgtggctctggatagcaccttatggacagctacgagttccagggagctctgt

SEQ ID NO: 466353 - DNA, 51 bp, Homo sapiens
gctcagacatgttctcaccacccttggcctttctgcagaggtctaacctcc

SEQ ID NO: 466354 - DNA, 100 bp, Homo sapiens
ctctggctccactaaagagtttttcagggttggtgagaccagatgcaaaaaagtttgtacttctaagtctgatctgagatctaatgacttcagcattgtt

SEQ ID NO: 466355 - DNA, 90 bp, Homo sapiens
tgagcgcctatctgcgagaacagagaagggagctctatagtcggagtggagaactgcaagactgggctggcttagatgaagatgaagatg

SEQ ID NO: 466356 - DNA, 90 bp, Homo sapiens
cggaaacttaggggccacgtgagccacggccacggccgcataggaagagagaagggcacagttacctaagtatcaacgtaatcttcctcg

SEQ ID NO: 466357 - DNA, 100 bp, Homo sapiens
ctaaatggtgcgtggctgacaccgtagtgttttcaaaactggatatggccaggatgctatagcattgtcagtgtgaaccactgtctaccagagaagattg

SEQ ID NO: 466358 - DNA, 73 bp, Homo sapiens
tttagggtcctttatatagaagggagagtagccaagaaaaccatgtgggaaaggctgacagcccctgaagatg

SEQ ID NO: 466359 - DNA, 74 bp, Homo sapiens
cccaagtgggtggtgaataaatcttctcagttcctggctcccaaggcgttcgtggcattcagggatgtggctgt

SEQ ID NO: 466360 - DNA, 83 bp, Homo sapiens
catgaccttggagctgccgtggagcgccgaccgcgccatccagcagttcgggcggcgactggcggcgcgatggacctgaccgg

SEQ ID NO: 466361 - DNA, 100 bp, Homo sapiens
tggattggagtgaaccggagaccccgaaaacggaagcgcagggagaaggaagaggtgtttgaaaagaactgtaagagtaaatgggtccagtaattggaat

SEQ ID NO: 466362 - DNA, 82 bp, Homo sapiens
gccaggtgtccatccccgtgctgaggaatgtatcctgtcaggtataatgtcagtgaatggcaagaaagttcttcatatggat

SEQ ID NO: 466363 - DNA, 81 bp, Homo sapiens
gggctgccgaggaccttctgggcccccacattaatgagagatgccctgtatccaagcccaatatgggacaccagcaccgag

SEQ ID NO: 466364 - DNA, 83 bp, Homo sapiens
aggtccatgtaccctgtgaaaccctcgaatacattgaagccaactatgataaccatgatgactacacagacttctactatgac

SEQ ID NO: 466365 - DNA, 75 bp, Homo sapiens
cgacgcccggcgccagcacatcgcagatgaagactggcccatttgcagagcactccaaccagctgtggaacatca

SEQ ID NO: 466366 - DNA, 100 bp, Homo sapiens
gcgcagggggacggggaccagcagctgtcgccgccgctctcaggttatcaatactctggctgaccatcatcatcgtgggactgactttggtggaagtcct

SEQ ID NO: 466367 - DNA, 100 bp, Homo sapiens
acctaatgaaatgtagcccagccttgaatgtcccatgcagttccaaagccccgcagtttctcattgaggtagaattactactgccaccacctgacctagc

SEQ ID NO: 466368 - DNA, 50 bp, Homo sapiens
aggacgacgacgatggggatatcggaatgcttctagtcacaacagacacc

SEQ ID NO: 466369 - DNA, 100 bp, Homo sapiens
ttggaagaattatgaatttaacagtaatgctggctatttttatgattcccacaaatccaccaccaacattcagaaagccagaactttggtccgatgattt

SEQ ID NO: 466370 - DNA, 100 bp, Homo sapiens
acgggtggagatcctgcaccgactctgtgattaccggctggatgcagacgatgtcttcgatcttctaaaggctgctctttggcgtaaattgcaatcgatt

SEQ ID NO: 466371 - DNA, 83 bp, Homo sapiens
atcggtggaagaaaggagccttctgtgagtggtcaccatctcacaacttgaagagcctgagaaagaagcaacttgcaactcga

SEQ ID NO: 466372 - DNA, 89 bp, Homo sapiens
ctttatatcatcgcaaaactcctggcgggagatacagatgacccaccaagaattactcagaaccctgtgatcaatgggaatgtggccct

SEQ ID NO: 466373 - DNA, 86 bp, Homo sapiens
gtgggagagtttgcagccctagtgtttgccggagccatggaatttgctgaaggtgtcgtgcgccaggtgcggcccatcgtgggccc

SEQ ID NO: 466374 - DNA, 98 bp, Homo sapiens
cgacctcgacgtcttgcctgtgtcccacttgttcgcggcctataggccttttccctcagaggagaccacagagaatgacgatgacgtctaccgcagcc

SEQ ID NO: 466375 - DNA, 75 bp, Homo sapiens
atgactcgctgccacagtccgtggtgttggaaagacagcggagatttaccgcattgtttctcagaagcaaatgtc

SEQ ID NO: 466376 - DNA, 100 bp, Homo sapiens
cagaaacaggacaaaggaaaatatcaactggactaagaagtcagttggaattaaaaggtctcatgctctcactcaggctgcagtacagtggcacaacctc

SEQ ID NO: 466377 - DNA, 90 bp, Homo sapiens
taattttagggtcctttatatagaagggagagtaggttctacaagctacacgaaagaaagtgtgaacctatcatcatgactgtgccccgc

SEQ ID NO: 466378 - DNA, 100 bp, Homo sapiens
atggcatcttattttggatataccgttgtcgtatcagatgttaacagtgatggatataagagttcggaccgcccagcacacaaggtcagcatgctgctcc

SEQ ID NO: 466379 - DNA, 75 bp, Homo sapiens
taagtacaaacaaaaaccaactgaagcagctgacagaggtattggtggtaatttggtggccattcaggctagcag

SEQ ID NO: 466380 - DNA, 98 bp, Homo sapiens
accaggtcaagcccgaccaatacactgaggccctggcccagagggacaaggcttttttccagacttcaagctcccattccaacagtaagagcttcttc

SEQ ID NO: 466381 - DNA, 83 bp, Homo sapiens
ctccaggtcgatgggaaaagattgcccacgaattgggtcgatctgtgacagatgacctgaaggagaagaaggagaaggtggag

SEQ ID NO: 466382 - DNA, 100 bp, Homo sapiens
tggcgaatggggctcacgtcgatattgtgcttctgctaagccaaaaacaggcacttgaagaactgaaacagtcagtccagcagctgagatgcactgaagc

SEQ ID NO: 466383 - DNA, 100 bp, Homo sapiens
cttgtctcgtcccagccaccagcgtggctgtccgcagagggacctgctgtgccatcaacaagtctgaacagcagaagaagcaacaggaggctgagaaact

SEQ ID NO: 466384 - DNA, 108 bp, Homo sapiens
gcgggggcctggagcccgcggccgtggcccgcgacctattgagggggctgttttgctgcagcttctgaagtgttaaagcacttgaaggaacgatttccgcctaatagt

SEQ ID NO: 466385 - DNA, 75 bp, Homo sapiens
caagacgcagatgggaagaagcgttagagcgagcagcactcacatctcaaggcatgggtagcaagaaactaaaac

SEQ ID NO: 466386 - DNA, 78 bp, Homo sapiens
aaaaagaagaccagcgacaaatttagagaaacctcggcaggacatccaggcagaaattgatgcccacaatgacatatt

SEQ ID NO: 466387 - DNA, 80 bp, Homo sapiens
gagacgcggcgcgcccgccctgcagctgcccaagcaccacataaagaagatccctaatagtcatttctcaacaattatat

SEQ ID NO: 466388 - DNA, 90 bp, Homo sapiens
atcttgatgctttaatacagaaccagcatgatcatagaactcaatggtggacaaccgcctctaacttataaaagattccagactctcatc

SEQ ID NO: 466389 - DNA, 75 bp, Homo sapiens
cctacccactacaatacctcttgggactgggctcgatttgagctatcatggtgaacttacttcagattgtgcggg

SEQ ID NO: 466390 - DNA, 83 bp, Homo sapiens
tctgctgcaccgacctcgacgtcttgcctgtgtcccacttgttcgcggcctataggaggagagacttcagcatgcaaaccttc

SEQ ID NO: 466391 - DNA, 80 bp, Homo sapiens
aggagctaaagcagcgtgcgttcagccctggggcacccaggcatgtggaatatgctcatagtggcgatgtgcttggccct

SEQ ID NO: 466392 - DNA, 51 bp, Homo sapiens
cagcattcctacagatataaatagaatatttctcttagaagatgacatcca

SEQ ID NO: 466393 - DNA, 100 bp, Homo sapiens
ggactatgaccaggcccgccactacctcctggctgccgtgaataggcagcctaaagggaaatcctcattgacgattcaatttgttgaaggccaatttgtg

SEQ ID NO: 466394 - DNA, 83 bp, Homo sapiens
caggcgtgcagtgtgcgctgaggtgtcgtgaaaactacccctaaaagccaaaatgggaaaggaaaagactcatatcaacattg

SEQ ID NO: 466395 - DNA, 75 bp, Homo sapiens
cgctggcagccgcggatctcaccgccgctcaggactaatagggatgccaaaggaaaaatatgatcctccagatcc

SEQ ID NO: 466396 - DNA, 75 bp, Homo sapiens
gtgtactttgccctcagcatctcccttcatgtctgggtcatggctgggctaagcagttccaagctttccatgtcc

SEQ ID NO: 466397 - DNA, 92 bp, Homo sapiens
gccaaccacgacctgacggacaccacccgggcggacgaagttatacggaagcgtctcctcattgatggagatggtgctggagatgatcggag

SEQ ID NO: 466398 - DNA, 100 bp, Homo sapiens
atggcatgatccttgtaggactctggttaattcagtggctgctcttaaaatacaaggaaaacagaaggggatccattttgggacaccattcgggaccaga

SEQ ID NO: 466399 - DNA, 90 bp, Homo sapiens
aggccccagaactatcttttcggtggttatcaccaggctaaaactggacaaggatcggaaaaaaattcttgaacgcaaagccaagtctcg

SEQ ID NO: 466400 - DNA, 83 bp, Homo sapiens
acatgagacaaatgcgctcagcttcaattggggcgagaggtcaatgatcttaaaagaaaatctccttcagatctttggaaaga

SEQ ID NO: 466401 - DNA, 99 bp, Homo sapiens
cgagtgacccgggtgccgaggagcgggaagagttgctgggacgagccaaactcaggctgtaccttgagcagctcaagcaactggtgcccctgggccccg

SEQ ID NO: 466402 - DNA, 90 bp, Homo sapiens
gatagttgttccttgtgcagaagtcaccaggagactaaagtccatcaaaaacatccagaaaattaccaagtctatgaaaatggtagcggc

SEQ ID NO: 466403 - DNA, 75 bp, Homo sapiens
gtatagagctgaccaagatgctatgtgagatcttgaaagtgggcgagttgccctaaatggaaacctgataaaacc

SEQ ID NO: 466404 - DNA, 137 bp, Homo sapiens
gtgaccatgaaagacaccaggttgacagcactggaaactgaagtaccagttgtcgctagaacagaacatgctggagcaactcctgatccaccagcccgaagatcccatccccttcatgatccagcacttgcatagag

SEQ ID NO: 466405 - DNA, 50 bp, Homo sapiens
gaataatatagctggtattgaagaggagcttgaaatcgtcattggagatg

SEQ ID NO: 466406 - DNA, 74 bp, Homo sapiens
ggccttggaggtgctgaccgatgctgcagccagggagcatgtggacaaagccattgctctccagccagaaaacc

SEQ ID NO: 466407 - DNA, 95 bp, Homo sapiens
cgctgtgtccgtcgccatgacaggtgtccctggccagtgtccttccacctgtccacaagcatggggaacatcttcgccaacctcttcaagggcct

SEQ ID NO: 466408 - DNA, 75 bp, Homo sapiens
tgatttctgcatttccatctgaggtagaacatctgggaggtcccttgctgaccactggaagaagatgagctcgag

SEQ ID NO: 466409 - DNA, 49 bp, Homo sapiens
cttcaagcagcgccgcaccttcgtttttatggcacaggcctcatcgcgg

SEQ ID NO: 466410 - DNA, 100 bp, Homo sapiens
atgatgtatggaaagcagcagagtttctacaaatgctagaagctatcaaagcccttgaagtcagaatgtcatacccaggctatcccccaacaggctaccc

SEQ ID NO: 466411 - DNA, 75 bp, Homo sapiens
cagaggatgcagtggaggccatcaggggccttgataacacagagtttcaagattggtttttcagcagcagatgct

SEQ ID NO: 466412 - DNA, 75 bp, Homo sapiens
cagtattgctactgcttatagagagaagggtgatgaatcagaggttcttctgtgtggcagttcagaatgatggat

SEQ ID NO: 466413 - DNA, 75 bp, Homo sapiens
gttacgtataggctcactcaaggttgtctgcattcaaaagagcattctattaaagctaccttaatttggcgctta

SEQ ID NO: 466414 - DNA, 100 bp, Homo sapiens
cttctacttcaactacaagaagaggcagaacctcgatgagatcttgcagcagcacaagctgaagatgatggcggcagctatgccatccacgactcccagg

SEQ ID NO: 466415 - DNA, 99 bp, Homo sapiens
gccatacccaataaccaggtgcttggcaaaatcgagcgggccattgagatgaaatctcaccatgttgcccaggctggtcttgaactcctgcactccagt

SEQ ID NO: 466416 - DNA, 85 bp, Homo sapiens
cttgagaagagagaagaatcagtgaaataatctcttgactggaagagctgcctgctgtttcccggggagatcatgaaacgaggtc

SEQ ID NO: 466417 - DNA, 75 bp, Homo sapiens
cctggagtaaccctcactggagaatccagaggtgaagtcagcactgtgcttaagctggataacacagtggtgggg

SEQ ID NO: 466418 - DNA, 82 bp, Homo sapiens
ggaagtgaaaccaatattgaactactacagagaaaacattgttagtgaacagaatttcctcagtatgtttcagaaaattatc

SEQ ID NO: 466419 - DNA, 100 bp, Homo sapiens
agagatgcctgtaccgtgatgtgacgctggagaacctggcacttatgtcctccctgggaatatacagatgttgccacaggaatctaatctgaaatcgtac

SEQ ID NO: 466420 - DNA, 74 bp, Homo sapiens
gttctctaggccttttagaaaacatgtggtattcatgggtagtttgaaatatccagatgagaatggatttgatg

SEQ ID NO: 466421 - DNA, 100 bp, Homo sapiens
tacacagacgagcatggggaaggttctttcagagcacggcttcggccccatcactaccgacatccgggagggacagactttctactatgcggaagactac

SEQ ID NO: 466422 - DNA, 83 bp, Homo sapiens
ctggcagccgcggatctcaccgccgctcaggtcccgcagcgtggacaagcagcatgccgtcatcaactacgaccaggacaggg

SEQ ID NO: 466423 - DNA, 98 bp, Homo sapiens
tggccttagcacatgcagatgagaagtccttaggcaatccctattcaacagaggaaaatgggtcaacttgcttctggaattagatcatcacttcttcc

SEQ ID NO: 466424 - DNA, 100 bp, Homo sapiens
gggagcggcaacgccggtggctcggggccccgcggaaaagaaattcattgagtttgaagatgctctggaacaagagaagaaagagctgcaaatccaggtg

SEQ ID NO: 466425 - DNA, 124 bp, Homo sapiens
cttctttacaaaagccactccactctcttcaacggtgacactcagtatgtctgcagatgtaccccttgagtctcgaatccacctcacgggaacaaaagaaagctgaccacaaacatctaccagc

SEQ ID NO: 466426 - DNA, 100 bp, Homo sapiens
ccttcacctccctgctgctgctggcgtcgacagactcactctgtggagacaccatacggctctgtcactttcactgtctatggcacccccaaacccaaac

SEQ ID NO: 466427 - DNA, 100 bp, Homo sapiens
ggctccatccgggaagccggtggggccttcggaaagagagagcaggctgaagaggaacgatatttccggaacgtggaggaactctgccgcttccctgagc

SEQ ID NO: 466428 - DNA, 100 bp, Homo sapiens
gattgtacaccttagaagtgcttaaggaagagtgatgaaggagctgcttcaagaagaaacccggcagaagctcaacgtgtctacgaagctgcgccagctg

SEQ ID NO: 466429 - DNA, 49 bp, Homo sapiens
tccctgcagtgtggcttcttagacatagggcctgattacattccaacag

SEQ ID NO: 466430 - DNA, 95 bp, Homo sapiens
ttgagccaggtcatcgcaagtttgacatccggctatacctccctttgaatttgctttcaaagatgagcgtatctcttttactattctggatgctg

SEQ ID NO: 466431 - DNA, 75 bp, Homo sapiens
tctgatcgaaggggagtttccacagtgattgatgctgcctcaggtcgtgataaactgtgccattcctaaagggtt

SEQ ID NO: 466432 - DNA, 83 bp, Homo sapiens
acaacagttatcatatggcaagttgatccggtgaaatgtgaccattactggccattcacggaagaacctatagcctatggaga

SEQ ID NO: 466433 - DNA, 83 bp, Homo sapiens
gagatcctgatgaagttcgagcactaatatttaagaaagaagatgttaactttcagatattgatgatgttaagaagttcaaac

SEQ ID NO: 466434 - DNA, 100 bp, Homo sapiens
agatgaccttaaccctcaagccgaagccttcagtgggactcccccagcagatacattctcagtaatgagaggccctaagatcccagaggatgccataaga

SEQ ID NO: 466435 - DNA, 100 bp, Homo sapiens
ccgaggcggagcccggctccccacagaagctcatccgcaaggtgtccacgtcgggtcagatccgacagaaggttcagccgtctgtatatctccccagata

SEQ ID NO: 466436 - DNA, 75 bp, Homo sapiens
ttttccgaaccagtctcatcattcttcagggaacctggttctggcaggtttggacttctcccactgagcatgaca

SEQ ID NO: 466437 - DNA, 82 bp, Homo sapiens
ctggagacggtcgtagctgcggtcgcgccgagaaaggaactttatattgctgttggaatatctggagccatccaacatttag

SEQ ID NO: 466438 - DNA, 90 bp, Homo sapiens
tttatacagagcttttttcctctaggttgctgcttcatatctgattcagctcagatcatcctgcacttgaaaaatgaagttttaccacca

SEQ ID NO: 466439 - DNA, 90 bp, Homo sapiens
ctttcaagtcatcccaaatatggttccatccctaaacttatacgtttaatagcatacaggccctgtcagaaacctcatttgcaggactga

SEQ ID NO: 466440 - DNA, 100 bp, Homo sapiens
cggtgccccatagatggccagctttcccccgagggtcaacgagaaagagatcggttattcacagtcctatggtggttatgagaatcaaaagcagagctca

SEQ ID NO: 466441 - DNA, 50 bp, Homo sapiens
ccgggatcggttgccttgagcctggtttgaaagagaagatagtgaggagc

SEQ ID NO: 466442 - DNA, 82 bp, Homo sapiens
cgcggaggagaccggaccgaagacggaccgtgccgggaagagacaaatttacatgtattggagaccagaccagaagcccttc

SEQ ID NO: 466443 - DNA, 98 bp, Homo sapiens
cgagcgcaaactttactctggggcgcagaccgacggcaagttccttttcctcactgcttggaggaagatgagaattctcagaggtccttatgctgccc

SEQ ID NO: 466444 - DNA, 100 bp, Homo sapiens
cggaacccgtgggcctgtggactgcagcctcggcggtcagcagggtcctgtagcatccacagtatcagcgttttctgtcctctcctctgggcctggcctt

SEQ ID NO: 466445 - DNA, 75 bp, Homo sapiens
atcctgctgctgaagatctggaagacgcgctcctgcgccggtaagtcaaatctcatggatgccatcagctttgtg

SEQ ID NO: 466446 - DNA, 98 bp, Homo sapiens
caccgtgttcttcgacattgccgtcgacggcgagcccttgggccgcgtctcctttgagaaggtggtcttctgccctgttaaagaagccctggaggtgg

SEQ ID NO: 466447 - DNA, 80 bp, Homo sapiens
catcctgtacaccctcgtcagcggctccctgcccttcgacgggcacaacctcaagagtggaatgttggctgtccgtgaaa

SEQ ID NO: 466448 - DNA, 100 bp, Homo sapiens
caatagagtcactgtatttgaccttaaaaaggctgttgataatcaggtgtatgtggccacagcctctcctgcccgggatgacaaagcctcctatgttgcc

SEQ ID NO: 466449 - DNA, 83 bp, Homo sapiens
atttcaacctccggggccacaatagcgagacctgcctagagctggaacgttacctccagagcgagccctgctatgtttcagcc

SEQ ID NO: 466450 - DNA, 75 bp, Homo sapiens
ccgaggtgctggacaccctgtcgcagcttctgaagataaaggataggttacagttacgggtgctcttgcgtcggg

SEQ ID NO: 466451 - DNA, 83 bp, Homo sapiens
aaggattccaagtaactcttatttgttaccggtattgtaagaacaagccgtacccaaagtctcgcttctgccgaggtgtccct

SEQ ID NO: 466452 - DNA, 100 bp, Homo sapiens
ggaggattttgatattcatgaactacatagagctcatgcaaatgaacaaaccatttcagagatgtcttccagaagtaccaaagatttaattaaaagtaag

SEQ ID NO: 466453 - DNA, 74 bp, Homo sapiens
aaaaatgtggcaaagaccatccagttatacagtgtaaaatcagagcagcttagccctcaggactgcccccggac

SEQ ID NO: 466454 - DNA, 75 bp, Homo sapiens
gctcaatgaccatggcaagaactggcgtcacgtttacaagcttcggaaccaaaaagaagcttcccagagccgggg

SEQ ID NO: 466455 - DNA, 118 bp, Homo sapiens
gccgtggacaagagatgcctgggcgtcaccatgccacagctacccacttgttgccaccagttgctgggcatattggattttacccatcataggcgctgttctcttaggtttcctgtac

SEQ ID NO: 466456 - DNA, 100 bp, Homo sapiens
acaatttttgctccaccaaacacttcagatatggaagctgtgggtggccgtgaattaagtgattttattagctatctacaaagagaagctacaaaccccc

SEQ ID NO: 466457 - DNA, 100 bp, Homo sapiens
gaaaacaacactcagtggctaatgaagagatgccctgtatccaagcccaatatgggacaccagcaccgagtccgggaccccgtgaccacctggcaagcga

SEQ ID NO: 466458 - DNA, 51 bp, Homo sapiens
atgggtgaagatccaagatgttctacaggctcaacggcgtgctgatggaag

SEQ ID NO: 466459 - DNA, 74 bp, Homo sapiens
cgaatctgctctgagggcggatgggctggccttgggtgaccctctctgtcctgggattcctgtactgctactcc

SEQ ID NO: 466460 - DNA, 75 bp, Homo sapiens
tgacccctttgacctcttcgatgtgcgagactttggaaagccatcccaggcctcaggacctgagttctccgacgc

SEQ ID NO: 466461 - DNA, 75 bp, Homo sapiens
acagtcaattgtgtactagcattccaagtctgaacaacccagtcctgccagctccagctccagctccagctccag

SEQ ID NO: 466462 - DNA, 100 bp, Homo sapiens
tgcaaagtctgaagacccctacgctcaaggtgttcatgcacgaaaacctctacttcaccaaccggaagttcgtctaatgattgaaaatccttacgagacc

SEQ ID NO: 466463 - DNA, 95 bp, Homo sapiens
tcttccagcttctgctgtccttctttgtggagagcaaggtaggcgaaaaccaagagtacatcggcctcgttctcctatattggaagaaaaagaca

SEQ ID NO: 466464 - DNA, 75 bp, Homo sapiens
agcaggcggaggcggataagaaagccgctgaggacaagtgcaagcagatggcccactgcgtgaccttggttcagc

SEQ ID NO: 466465 - DNA, 51 bp, Homo sapiens
cggaagaggagaaggggggcaaagcacgagaagccctgccaacgtgggata

SEQ ID NO: 466466 - DNA, 125 bp, Homo sapiens
atcgtcaagaccatcatcactttcattgtctcggacgtgcggggcctgggcctcccggtccgcaagcaggagtggaagctggacacactatgtgacttgtatgaaaccctgaccatcacccaggc

SEQ ID NO: 466467 - DNA, 83 bp, Homo sapiens
cacaaacgccgcaccaggtcttgtagcagcgcctcctcgacagcccacctgaggatattgaccataaggactcatatctcatt

SEQ ID NO: 466468 - DNA, 74 bp, Homo sapiens
gagattatagctctgtatgagaaggacaacacctacttaggtgccaagtctagtggtggcagggaagacttgga

SEQ ID NO: 466469 - DNA, 100 bp, Homo sapiens
tgccctgctctcagggctgggagtacgaccactcagaattctcctctaccattgcaactgagcatatctggggatcgtactggaaagaaggccgatgggg

SEQ ID NO: 466470 - DNA, 82 bp, Homo sapiens
ctggagaccttacgacgggttggggatggcgtgcagcgcaaccacgagacggccttccaagttcaaaaggtgatgacctatc

SEQ ID NO: 466471 - DNA, 50 bp, Homo sapiens
cacactggctatcattgatccaggactcagaattcatgattgaagaaatg

SEQ ID NO: 466472 - DNA, 83 bp, Homo sapiens
gtgcgctgctcaaggacacggtctacaccgacttcgacgcaaaagctggcaggctgacagaggcggcctcaggacggaccttc

SEQ ID NO: 466473 - DNA, 75 bp, Homo sapiens
agaagttcttcgatgtatctaaacttggcaccaagtatggctttctgtgaagaattggaatcaatgatacaggag

SEQ ID NO: 466474 - DNA, 75 bp, Homo sapiens
gtacaagtggaccaactatctgagcgaagttaatattatgtgggccggacaccaaacacatcatagttctgaaga

SEQ ID NO: 466475 - DNA, 74 bp, Homo sapiens
cagcctcctgaatagctgggattacagaaatgcgcccatgctggttccagctggatcagatccccttcaaggac

SEQ ID NO: 466476 - DNA, 100 bp, Homo sapiens
ttgcatcttccagttacaaattcagtgccttctgcagtttccccagagctcctcaagaataacggaagggagtttctttcaagatggcttgaaaacagct

SEQ ID NO: 466477 - DNA, 90 bp, Homo sapiens
ggaaaagtctttcagaataaaatggaactcttaggaaagaatattgtagaattctgtcatcctgaagaccagcagcttctaagagacagc

SEQ ID NO: 466478 - DNA, 100 bp, Homo sapiens
tgtacctgccttgggatccggagggaggaagctgggacacccgggagtcaggaaatgactaagaaaaatggctttgtcagcccaacagatacccagatgg

SEQ ID NO: 466479 - DNA, 100 bp, Homo sapiens
gggagggggtgaaccaactcagctgacccttgtgaccagtccgggggcatggggtgtacagaaaatctcccttcagtccaacgtggagcacctgacggag

SEQ ID NO: 466480 - DNA, 100 bp, Homo sapiens
cagaagacagtgcatgaagccaggggacatccgccatgctccaaacaacttggcctcaggtgccttatgcccgctcagaggcccacctcacagagctgct

SEQ ID NO: 466481 - DNA, 140 bp, Homo sapiens
tttccttattggagcaagggaaagaaccctggctggggaaaagggaagtgaaaagagatctgttttcaggaaacattaaagaatgtgcttcagagagaaaggaaatgaaaccaaatggaaatctggatctacacaaacga

SEQ ID NO: 466482 - DNA, 101 bp, Homo sapiens
cgcagtggtcgcttcttctccttgtgtctaccatcagagggagatctctgccccctggggctgagagaccccaacctttccccaagctgaagctgcagggt

SEQ ID NO: 466483 - DNA, 90 bp, Homo sapiens
ctgaaggggacatcatctgtgtgttctcacagtcatcatcagatttgaaatatttaaagtggatacaaaactatttcagcaatgcagaca

SEQ ID NO: 466484 - DNA, 50 bp, Homo sapiens
attccaagtaactcttatttggttactgaagctaaaggagatgtttaact

SEQ ID NO: 466485 - DNA, 96 bp, Homo sapiens
ttatgcacccctccgacctgcgcgccaaggaacacgtgcaggaggtggactcccattattgtcccagttgtttagaaaatatgccatcggctgaag

SEQ ID NO: 466486 - DNA, 50 bp, Homo sapiens
ttcgggaaaagcaacgtggggcattccagtggtggacttgctttgtgaag

SEQ ID NO: 466487 - DNA, 97 bp, Homo sapiens
cccaattcctacttcatggatgtgaaatgcccaggacacagctagaggaaaaggcaaggacatcagcaagtatggcagtgtgcagaaaagctttgca

SEQ ID NO: 466488 - DNA, 75 bp, Homo sapiens
ttatgccctgttggttccaatgctgggattggctgcttttcggcgaccattgacgaggtggagacggacgtggtg

SEQ ID NO: 466489 - DNA, 75 bp, Homo sapiens
ctggaaactgacaagacgcggcttttatcttcacctttctctatagagactgggtttcaccgtgttagccaggat

SEQ ID NO: 466490 - DNA, 90 bp, Homo sapiens
ctccgccgctgcgggcccgctccgacgcggaagtaactatgtttccggtagcccctaaaccccaggattccagtcaaccatcagacagac

SEQ ID NO: 466491 - DNA, 101 bp, Homo sapiens
cgccttgttgcccagttccccagttctggcagattctggaaactgtacattgaagcagaggaaaatgatggactccggacagattgatttttaccaacatg

SEQ ID NO: 466492 - DNA, 75 bp, Homo sapiens
agctgccgctgtcgctgctgctcgttcgagtcgcagtccaatatcagatggaaatgatgcggagccttcgccatg

SEQ ID NO: 466493 - DNA, 74 bp, Homo sapiens
atttacagaagcagtacgagaactggcagccaaggatacccataatatctgccgaacatctgactagccacaag

SEQ ID NO: 466494 - DNA, 132 bp, Homo sapiens
gactgttcccttcgctcggccaaatcctccttcagcctcctggcgcccatccgcagcaaggacgtccgcagcagcgcccgggggctggagaaggccaggcagcagctgcaggaggagctccggcaggtcagc

SEQ ID NO: 466495 - DNA, 80 bp, Homo sapiens
gcaaatcccctgctcagggtcttcatccagaaacgagaggccacaagaggaagctgaatgaagaggacgccgccagcgag

SEQ ID NO: 466496 - DNA, 100 bp, Homo sapiens
gcctccggaccttcaagactgtctttgctgagcacatcagtgatgaatgcaagaggcgtttctataagaattggagagagcaagccacatcagtgctcct

SEQ ID NO: 466497 - DNA, 82 bp, Homo sapiens
ctcggctgcagacttggccaaatggacgggactattaagtatttgcaaccacgtggcttcacgagtccgccaaaccatcagg

SEQ ID NO: 466498 - DNA, 83 bp, Homo sapiens
gggtaaaccagctattactaagagaaaattttctcctggtagacctcggtccaaacagaatcccctactttgaaactagtgct

SEQ ID NO: 466499 - DNA, 100 bp, Homo sapiens
aggccctgctccaagccctgcagcgactgagactgtctattcaggacatcaccaaaaccttaggacagatgcatgagtctcgttctgtcacccaggctgg

SEQ ID NO: 466500 - DNA, 74 bp, Homo sapiens
tgaccttgattggaatgttggcagctataacttacacaatggccctgctgtggcaccagtgaccaacgggaaca

SEQ ID NO: 466501 - DNA, 90 bp, Homo sapiens
ctcttctgcggcgcctacctctacaaacagggctttgccatccccggctccagcttcctgatagatcagatactgattcatcagcaaatt

SEQ ID NO: 466502 - DNA, 86 bp, Homo sapiens
aaagtggctcacaacattttgtcaggtgcagattcactttataggaacagcttcagcttcagtgatgaaaaactgaattctccaac

SEQ ID NO: 466503 - DNA, 88 bp, Homo sapiens
gaggcctacacgccgccgcttgtgctgcagccatgtcacaaggacatagtagctgaggggttgcgccagctgctgggggaggagaaat

SEQ ID NO: 466504 - DNA, 98 bp, Homo sapiens
ctctgagctcaacggaggattgtgcctgagaagaacccacagagagaaggaagcaccctcactatgtggctctacctggcggccttcgtgggcctgta

SEQ ID NO: 466505 - DNA, 101 bp, Homo sapiens
ccagacaggaacaagacccggacattccaggccacagtcctgggaagtcagatgggattgaaagcaaagaaatgatgactttattgaattagactacacca

SEQ ID NO: 466506 - DNA, 100 bp, Homo sapiens
ggcaataagactctttaaagaaggcaaggagagaatgtatgaagaacagtcacaggacaggtttaactatagatcaacacatcatcttgcatctcatggg

SEQ ID NO: 466507 - DNA, 75 bp, Homo sapiens
ggtctatcccggccctgtcattactccactgggttctggcaatgagaagcacgaccttcatgttacctcccagca

SEQ ID NO: 466508 - DNA, 50 bp, Homo sapiens
cctacccgggatacggaggaggggttaaagatcgaggtccggaagccact

SEQ ID NO: 466509 - DNA, 96 bp, Homo sapiens
aatttccatgtcaacatagtcctgggagttcccattagacttgaagttgggccacgtgatatgaagagctgtcagtttgtagccgtcagacgagat

SEQ ID NO: 466510 - DNA, 100 bp, Homo sapiens
agaggagctgatagaaattgagattgatggaacagagaaagcagagtgcacagaagaaagcccccacgcacacattactccaacattgaggccaacgaga

SEQ ID NO: 466511 - DNA, 100 bp, Homo sapiens
gttgtgtttgtgaaacagagaaagataggcggccatggtccaaccttgaaggagcagcgggaccccacggtgcatgatgatgtgctggagctggagatgg

SEQ ID NO: 466512 - DNA, 100 bp, Homo sapiens
tgctgggcacccacggagcctccggggctgtgaagatagtgatccggggagacaggaacacgggcaagacagcgctgtggcaccgcctgcagggccggcc

SEQ ID NO: 466513 - DNA, 75 bp, Homo sapiens
tgccaacaacggctcttctcaagtttcccttgggggctttgaaataacaccaccagtggtcttaaggttgaagtg

SEQ ID NO: 466514 - DNA, 100 bp, Homo sapiens
gcaaaagaacaaattcagtcccttctccatgaaatggtacacgcagaacatggctctgtgtggctgcacagtgaacgtccccactctggacggcaggacg

SEQ ID NO: 466515 - DNA, 87 bp, Homo sapiens
tatgcccaattcttcaactcctaccagccagatcaacacaattgataactaagaaaaatggctttgtcagcccaacagatacccaga

SEQ ID NO: 466516 - DNA, 83 bp, Homo sapiens
tcctgaagaggaagaagatgaggacaaggaagctattaatggcagtggaaacgcaggaactgaaacatttgatcttggaggca

SEQ ID NO: 466517 - DNA, 83 bp, Homo sapiens
caacggctccccgtcgtcctggtgctgcagcgatgtggacgagtgctcactagcagaaaaaacctgtgtgaggaaaaacgaaa

SEQ ID NO: 466518 - DNA, 74 bp, Homo sapiens
cgcggtcggcccggtccccgccgcacccagcccagaatgtccagcaaggaagtgaagactgctctaaaaagtgc

SEQ ID NO: 466519 - DNA, 103 bp, Homo sapiens
tgccgtccttctccactttcgccagcccgtgccgcgagcgcggcctgcaggagcttcgagagctgtgcccaggagtgaacaaccagccctacctctgtgagag

SEQ ID NO: 466520 - DNA, 74 bp, Homo sapiens
gctcttggatgttcttggacttgacggtgtgatgaatgcagactctgctaccattttggctgtttggatcctcc

SEQ ID NO: 466521 - DNA, 90 bp, Homo sapiens
cagctctctgggagaaagttacagaactggggtcctggtcccggcttctcgcaccctcatgtcagccccggccccgcccggcggcctgcg

SEQ ID NO: 466522 - DNA, 82 bp, Homo sapiens
cacctccgagcgcaaggacagcgcgaggtccgcgcagcccagcgcagccatattattttcgaaataccagtatttcgactcc

SEQ ID NO: 466523 - DNA, 50 bp, Homo sapiens
atcgagctcaactccttcaccaagatcttgtggaagccctgaagccagag

SEQ ID NO: 466524 - DNA, 74 bp, Homo sapiens
accacgagcttttcctccaggcctttgagagtgaattcacataaaagggcatcagaaaaatacaaagacaaccc

SEQ ID NO: 466525 - DNA, 90 bp, Homo sapiens
aacgtatttcgcagcgtattacgcccctgaaaaggccagcatccaccggctgatggaggccttcatcctcaggctgcagacccagttccc

SEQ ID NO: 466526 - DNA, 100 bp, Homo sapiens
gcaaaatgctagctcctcttcacagcaaaacaatggtcctatggatgtaatcagcccccattcttacaagctccagtgatcattctacatatattgtaca

SEQ ID NO: 466527 - DNA, 90 bp, Homo sapiens
cttttatcctcgcttatgaataaggagatcgacgcgtacatcgtgcaggccaaggagcgcagctacgagaccgtgctcagcttcgggaag

SEQ ID NO: 466528 - DNA, 99 bp, Homo sapiens
aggaagttccagctctgcgccgatctatgcacgcagatgctggagaagtccccttatgaccagagcgaaaagctgttgctatatgatacagtccagagt

SEQ ID NO: 466529 - DNA, 74 bp, Homo sapiens
caaaggctcagcccacaactcttgtcctaccacctcaaggtggtgcggagctcctgtttgacggtattaagaaa

SEQ ID NO: 466530 - DNA, 99 bp, Homo sapiens
gagctgtgtaacagttgtgaaatggaaaatgaggtacttaaagtgctttccgaagctgctatttcaggtaggaggtgggctgatagcacaagcattgga

SEQ ID NO: 466531 - DNA, 76 bp, Homo sapiens
atgctgtcgtgcttcctgtatagctgcagaactgtgccaggggagagcaagaaacagtggaaaccagccctggttg

SEQ ID NO: 466532 - DNA, 100 bp, Homo sapiens
gaatatctggaacatcaacctgcagttgcggcccagcctcataacagggatcatgaaagacagtgggtgggttaggagtacagaagatgctgtggactat

SEQ ID NO: 466533 - DNA, 89 bp, Homo sapiens
gagaactattaactgcctttcttctgtgggctgtgattttcagaggggaatgctaagagaagttgattcaagtcagttgagacgccagt

SEQ ID NO: 466534 - DNA, 75 bp, Homo sapiens
caaacgtctggccaatgtcgttcgccaagtacagcatgctgatcccattttcaatgaagaattgcttccagttac

SEQ ID NO: 466535 - DNA, 100 bp, Homo sapiens
cacacattgcgcagtcgggaccatcgccggagcctgaggacacttctctgtcgtcacagttagctttaaggaagcctcctatttcagtttctcaacatga

SEQ ID NO: 466536 - DNA, 75 bp, Homo sapiens
caaagcagcagccttctcgacagccttttactgtgaacagaatggcttattcagaagagcataaaggtatgccct

SEQ ID NO: 466537 - DNA, 101 bp, Homo sapiens
ccagaataaagccaagctcatctctgagacccggaggaggttcgaagctgagtatgtgacaggattgatcggaagatgtcaagtactcacaccagctacaa

SEQ ID NO: 466538 - DNA, 82 bp, Homo sapiens
ggagcctgttccagaactgctggaagctgaggatggcgtcgtgcgggcagggcagtgtgcggctctggcggctgcgtggcgg

SEQ ID NO: 466539 - DNA, 100 bp, Homo sapiens
ctaaactgccaaagttcaccatcctccaaacaagtgaagctgcctgctgtttcccggggagatcatgaaacgaggtcgccttcccagcagcagtgaggat

SEQ ID NO: 466540 - DNA, 75 bp, Homo sapiens
aataatgcaccttatgatcaataactttatcgatggtcgactggcaaaactaaatgcaggaaggggtttctctga

SEQ ID NO: 466541 - DNA, 82 bp, Homo sapiens
gggcccgggctgcggcgtgtgcgcgcccgccagctgctccggagatacgatcaggatcctcatgaccagccaaagagaagaa

SEQ ID NO: 466542 - DNA, 90 bp, Homo sapiens
agaaaaattacagcacatctcagtgaatttgcaagtggaactgcaagcacatgttgaccagataactgaaatggcagcagtaatgaggaa

SEQ ID NO: 466543 - DNA, 100 bp, Homo sapiens
ggagagccacaagctgggtggcacttgcgccctcttcaatgccatcatcccagatcaccatgcagaagccttctctcctcctcgcctggccccctcaggc

SEQ ID NO: 466544 - DNA, 101 bp, Homo sapiens
tcctgccattgtccacatcaatcatcagccattcctagagagaggcgatgggcctattgaagccttaaaaatgtcatgctggtattgggctacaaccggaa

SEQ ID NO: 466545 - DNA, 100 bp, Homo sapiens
tgggccagagcgtggttgctgaccagttgaaagacacagggctgggtgactccgtatgctccagccccagtatctccagcaccaccagccccaagctcga

SEQ ID NO: 466546 - DNA, 100 bp, Homo sapiens
tgctgctgctgctgcccgcgtccgaggctcgcgggcggcgggcccggtccttccggttcccgaccttcaacacctaaaagtgattcagaattggtcagca

SEQ ID NO: 466547 - DNA, 100 bp, Homo sapiens
tcagcctggattggtgaaactgaatcacaggagatatttccagttggcccgccacaataaactgttgcagcagatgctcaaaccaggatcggatccagat

SEQ ID NO: 466548 - DNA, 100 bp, Homo sapiens
gcctgcctcccagagggaagacagcttaacctgtgtggcagccaccaccttccagggcttaaagaagacatgtgtgaccatggaccaggaacgcccacgc

SEQ ID NO: 466549 - DNA, 83 bp, Homo sapiens
gtcctggctcttgccctcatcctggttctggaatcctcagttcaaggagaactgcgacacatcaccaagctgaagccctggag

SEQ ID NO: 466550 - DNA, 82 bp, Homo sapiens
aagtacaattaccatttggactccagtggtagctatgatctggagaagggactcctgaaagccctgaaggttttagacaatt

SEQ ID NO: 466551 - DNA, 82 bp, Homo sapiens
acatggaggagaaggtccgcttcaagcagaggtgtccaggacctgcctgctcacggttcgtgtcctgcaggcccatcgccta

SEQ ID NO: 466552 - DNA, 80 bp, Homo sapiens
ttcagcagacagcgccatcatgaatccagctagcaaagtaattgcactgaaagttttagaaagagcgttttcgctacgta

SEQ ID NO: 466553 - DNA, 135 bp, Homo sapiens
gacgagcggccccgggacgggcagctagcgcgaccctgagccggcgcccgtggtccggccatggacgacctcgactgctgcctcatatccgggggaatgtgggctttgtgttcaccaaggaggacctcactgaga

SEQ ID NO: 466554 - DNA, 51 bp, Homo sapiens
gcctcccgagtagctgggactataggtgcccgccaccatgcccggctaatt

SEQ ID NO: 466555 - DNA, 83 bp, Homo sapiens
gatgactccctggagcacactgacagttcagagttgctggagaatgtaaccctaatccataaaccagtgtcgttgcaaccccg

SEQ ID NO: 466556 - DNA, 75 bp, Homo sapiens
tggataattttgtggccttagctacaggagagatgaaggatttgggggcagagcacttggcaggtcatgaagggg

SEQ ID NO: 466557 - DNA, 74 bp, Homo sapiens
aggagctgctggttgactgttacaaacccacagaggccccggggctgggaacgcctgtgccttcctgcgccgaa

SEQ ID NO: 466558 - DNA, 102 bp, Homo sapiens
attttccttgacctttaggtgcttttatattcatctcaaaaacaaaattctgaactcaggacttggcaagacagtcattttgtttactcattcagccctgtt

SEQ ID NO: 466559 - DNA, 100 bp, Homo sapiens
agtgtcttgggccctgtgaacctgggaccagtgtgaatttggaagggatcgtgtggcatgaaacagaagaagcctcagttttatgaccctgtggagccag

SEQ ID NO: 466560 - DNA, 89 bp, Homo sapiens
attatattccaagacagagcacctaggattaaattggtttcctaagttgggggccgtcccgctcctaaggcaggaagatggtggccgca

SEQ ID NO: 466561 - DNA, 100 bp, Homo sapiens
gccccacagcctactatcagccggcgccccaacctggccagcaggtaatgaatttgggcatcctgaatggttagacttcccaagaaaaggaaataatgag

SEQ ID NO: 466562 - DNA, 100 bp, Homo sapiens
gaatggaagtttcaaggaagctttgaatgtcatcaatactcacaccaaagtgttagccaaatgtgttcagagcaacattgttttgttgacacaagcattt

SEQ ID NO: 466563 - DNA, 100 bp, Homo sapiens
taggggtttctgttaaggaactcgatttatatttggcatactttgtgcatgcagcagcctttctgagaaaagtctacagcattctttctctgcaggttct

SEQ ID NO: 466564 - DNA, 100 bp, Homo sapiens
cgaaaggagctggtgcctgtgcaagttgttgagccatttaaatggatgttccctggaaatgctaagcaggccttccctacttatcacagattcattcaat

SEQ ID NO: 466565 - DNA, 100 bp, Homo sapiens
ctgaagcagctttcttgaatgtctacaaaagattgattgacgtcccaggactctgtctactagtgacgatgtcgaagacagggaaaatgaaaagggtcgc

SEQ ID NO: 466566 - DNA, 73 bp, Homo sapiens
cagcccaggagctcctggaagatctccgcactctggagcataatgtatttgtgtaagaattgtcatcatgtaa

SEQ ID NO: 466567 - DNA, 100 bp, Homo sapiens
gatgactcggatgtctggtggggcggagcagacacagactatgcagatgggaggaatctgcaggagtctgaagaggaggaagtcccccaggagtcctggg

SEQ ID NO: 466568 - DNA, 106 bp, Homo sapiens
gacggactctccattccagaaccatggcccaatttgtccgtaaccttgtggagaagaccccggcgctggtgaacggattttctggagacggcaggttcacttgcgg

SEQ ID NO: 466569 - DNA, 100 bp, Homo sapiens
aggggaaatggaaggggcctccagggtctgcagacaaggcaggaattccttgtgtggatatcagatccggatggaatctcgagcttgtgaatctaccagg

SEQ ID NO: 466570 - DNA, 120 bp, Homo sapiens
gagctcaggacagggctgaggaaccatgtctccatccccgaccgccctcttctgtcttgctctagaggacaaaatcccagtccttggcacaaactcaggaaatggaagccggagtctgtt

SEQ ID NO: 466571 - DNA, 96 bp, Homo sapiens
ggaggcagagatcacagtggtgtggctacaagccaagaaataccgaagccatcagaagttggaagagtcaggatttgcatgaagatgtcgaagaag

SEQ ID NO: 466572 - DNA, 75 bp, Homo sapiens
gtgcctcctgcgattaaccagttcacccaggccctggaccgccaaacaggcagctgtgttactggagcaggaacg

SEQ ID NO: 466573 - DNA, 126 bp, Homo sapiens
tgaacgccataaacatcacatcggccctagacaggggtggcagggtgccacttcccattaatgacctgaaggagggccttctttgaatcctggggggagccagtcatctgatgtggtgcttttgaa

SEQ ID NO: 466574 - DNA, 100 bp, Homo sapiens
caaggggaaacttagaagttgttcatcatcgagccctggttttagctcagattcggaagtggttggacaatcactgctgggctgaggtggccaatcatca

SEQ ID NO: 466575 - DNA, 87 bp, Homo sapiens
cttggtctgagtggactgtcctgcagagcaaatttttcagaacataaaacaagaatatagtcgttatcagaggtggagacatttaga

SEQ ID NO: 466576 - DNA, 50 bp, Homo sapiens
ctggacgatgccttggagcctcggcaggaatcagagatcattgatttctt

SEQ ID NO: 466577 - DNA, 100 bp, Homo sapiens
cgaaaccacaagtttgccgatgatccaaggagctggttctgctggttggaccaaacctcgtgagccagccacccctgacccaaatgaggagagctctgat

SEQ ID NO: 466578 - DNA, 126 bp, Homo sapiens
cttgtggacctgcgctccggagagctcaagctcatcgacttcggttcgggtgcgctgctcaaggacacggtctacaccgacttcgacgagtttcactcttgttgcccaggctggagtgcaatggca

SEQ ID NO: 466579 - DNA, 83 bp, Homo sapiens
ccagcaggacctccgccctcctctccggctttgccatggaattgaatgatctggcacgggaccctccagcacagtgttcagca

SEQ ID NO: 466580 - DNA, 50 bp, Homo sapiens
ccactagcctaaagccgggcggactgcgacagatgcaccatcaggaatgg

SEQ ID NO: 466581 - DNA, 80 bp, Homo sapiens
gaagaaattagagaagcattccgtgtgtttgataaggatggagatgaagatgaggaagctgagtcagctacgggcaagcg

SEQ ID NO: 466582 - DNA, 100 bp, Homo sapiens
ttggagcatgacgtgaacatccagtttcctgataaggacgatgggaaccagtatgcatacttcaggatgggaattaagcatccagacattgtaaagagtg

SEQ ID NO: 466583 - DNA, 100 bp, Homo sapiens
ttgctcacaacatccgccgccactgtgacttgcagtcatcatccattaccacaaaattaggcaaattgcaacttgatctgtggtgatgaatatggtccag

SEQ ID NO: 466584 - DNA, 100 bp, Homo sapiens
tagggaaaatagagtgtgtatcagcagagaccaccgaagactgcatcgccaagatcatgatccataatgagatggcatcaacatcagataaaggtgccca

SEQ ID NO: 466585 - DNA, 60 bp, Homo sapiens
gatggacggtcactcagcctatggaggcagtatttggcagtcgtattcagagataaaccc

SEQ ID NO: 466586 - DNA, 80 bp, Homo sapiens
tcccagatgaacacactggaagagattactccaaaggtttcggcggcaaatacggtatcgacaaggacaaagtggataag

SEQ ID NO: 466587 - DNA, 99 bp, Homo sapiens
tagaagatctgtataatggcaagacaaccaaactacaacttagcaagaatgtgctctgtagtgcatgcagtggatctcaggaaacaggctcgacagctg

SEQ ID NO: 466588 - DNA, 98 bp, Homo sapiens
cactcccagctgcgcaaagcttgcgaggtggcgttagaggtcctgctgtactagccaccaaagcagctgctggtactaagaaatatgatcttagtaaa

SEQ ID NO: 466589 - DNA, 75 bp, Homo sapiens
cgagtcggtgtgcgacgaccctacagttgtggcctccaatatcatgctgtttgcagacaaggtcccaaagacagc

SEQ ID NO: 466590 - DNA, 83 bp, Homo sapiens
aacagcagccacaggaaccttgatttttcagaagaagtgaagtcaagatgaagaaccatttgcttttctggggagtcctggcg

SEQ ID NO: 466591 - DNA, 74 bp, Homo sapiens
aaagaagtgggaaggatctgcgcgggacaaagcaggacctcataaggaaatctacccctatgtcatccaggaac

SEQ ID NO: 466592 - DNA, 96 bp, Homo sapiens
ggacgtgctggtgtctgagtggatggggacctgcctgctgctcttggagtttgacaaggagttgtctgtctttaaggacagactgtatgaactgga

SEQ ID NO: 466593 - DNA, 98 bp, Homo sapiens
aattgttgcctgaagaataccaaggaggatcttttagatgaccttgaatgatgccatgaggaacaaggcaaggctgtcaattacaggaagtactggag

SEQ ID NO: 466594 - DNA, 50 bp, Homo sapiens
gagggttctggttcccgccggcgagattgtccgaagatacatcaaggatt

SEQ ID NO: 466595 - DNA, 100 bp, Homo sapiens
ggggtttgtactatcctcggtgctgtggtgcagagctagttcctctccagctcagccgcgtaggacactcatgaggaccatgatacttccactgagaata

SEQ ID NO: 466596 - DNA, 100 bp, Homo sapiens
gcgtaccctgtgcgttagtcaccagctgctcctccgtcttctcaggagaccagctggtccaacggcgaactttctgaccaagtatacaactacccagagg

SEQ ID NO: 466597 - DNA, 90 bp, Homo sapiens
taaggattccaagtaactcttatttgttcaattttgtggggaagattcttggaccacaagggaatacaatcaaaagactgcaggaagaga

SEQ ID NO: 466598 - DNA, 75 bp, Homo sapiens
agtacaaccagcatatcaatagattaccagaagcccagttgggcaaatcataccccttcagggggccattcccac

SEQ ID NO: 466599 - DNA, 98 bp, Homo sapiens
cctcgcctcctcgcagcagcgccatgatgatatcatcaagttgaatcgaaaggaagggaagaagcagaattttccaagactaaatagaagactcctcc

SEQ ID NO: 466600 - DNA, 82 bp, Homo sapiens
gaggactgactggggttctgagactccctgtcccggaccgcagaaaagactgtatcttcaccattgacccatcaaccgcccg

SEQ ID NO: 466601 - DNA, 74 bp, Homo sapiens
tacctcacacaagaagccagagatctgcttaaaaagcttcagaggatgattccgaagaagacggagaccataac

SEQ ID NO: 466602 - DNA, 82 bp, Homo sapiens
tgtgcagccgcgaggaggcgcgggaggtgttcgagaacgaccccgagacggtatcacctcttctgggctcaagatggacaac

SEQ ID NO: 466603 - DNA, 75 bp, Homo sapiens
tgtaatagaaaaacaagcaagaaaccttttagggttttggccaaattgggcgagggcacaaaataaccacttacc

SEQ ID NO: 466604 - DNA, 88 bp, Homo sapiens
agtcacccaagtgcattgcctttggaaacgagctggaagaagaactgagacagcagaaagaagcagcttgtttcaaggctcgtccaaa

SEQ ID NO: 466605 - DNA, 51 bp, Homo sapiens
atgacagtctgcctctatcttacagccaaatttgagtttcatcatggtgac

SEQ ID NO: 466606 - DNA, 83 bp, Homo sapiens
gaagttgcgaaggatccccaacggggaggccaacgtgaagaaggacgcatggaatacctcgtgaaatggaagggatggtcgca

SEQ ID NO: 466607 - DNA, 50 bp, Homo sapiens
aacagagccgtatcataattaccgataaaatgtttattggaggcttgagc

SEQ ID NO: 466608 - DNA, 87 bp, Homo sapiens
gcagagctggactacaccatcgagatcccggatcagccctgctggagccagagaaaatatgttgtgttcttcttttaccctcttgac

SEQ ID NO: 466609 - DNA, 100 bp, Homo sapiens
ggtaaggaaggggccttaacctctgctggtgaccagaagcctgcatttctgcattctgcttaattccctttccttagtgctgatgagctccttctaactg

SEQ ID NO: 466610 - DNA, 90 bp, Homo sapiens
cgggaggggggagcggcgttggaggccaccgtttccaggattcagtggtcccaatttaaaggctattttattttcaaactggagaaagtg

SEQ ID NO: 466611 - DNA, 75 bp, Homo sapiens
caccgccgctgccccggctgcctcctccctgagacttcgacccccaccacttctggcagtggagcagcttctcgg

SEQ ID NO: 466612 - DNA, 75 bp, Homo sapiens
ttcttaggagttgactttggctactactggttccatcgtatggctcatgctgcagaaccttggcctgaaaatgct

SEQ ID NO: 466613 - DNA, 83 bp, Homo sapiens
ccagaagtttcttcagtccctgatcagatcagaggagatctggtggctggacccagagctgacctatggctgcgccaagccct

SEQ ID NO: 466614 - DNA, 100 bp, Homo sapiens
cggatggatgtgatgcctgctagccaaaagggccctgtgcaccaaggtgccggaactgatcagaaccatcatgggctggacattggacttcctccgggag

SEQ ID NO: 466615 - DNA, 50 bp, Homo sapiens
agctacctccccaataggtgcatcaggacatagttgacggcaaggaaaaa

SEQ ID NO: 466616 - DNA, 82 bp, Homo sapiens
cgaagaagtgcttcagcgggccaggaagcgcatccaggagcaaaagactgttgaagtagagagcattttgcccagctcactc

SEQ ID NO: 466617 - DNA, 100 bp, Homo sapiens
cctgtctgcaagcttgtgcagggaatttatcatggcatccagcattgaccactacaagtaaaatgcgaattccacattctcatgcatttattgatctgac

SEQ ID NO: 466618 - DNA, 100 bp, Homo sapiens
ggaggccctcagtgccatcattgcatcatgtttgggagagcccatggtgactgcgtgagtggagcccagctgtgtggatgccccagcatggatgactaca

SEQ ID NO: 466619 - DNA, 75 bp, Homo sapiens
tgccaaaagatgaagacattctccaagtgctgtcaattccatgccagtggataacaggaaccacaatgaaggaat

SEQ ID NO: 466620 - DNA, 75 bp, Homo sapiens
tcaaaaccttccagggacacacaatgctctaaacgtccctgccatctggtccagatggagtcctcaggcaaccca

SEQ ID NO: 466621 - DNA, 100 bp, Homo sapiens
gagaaagcatccgtggaaacgctgacagagatgctgcagagctgcccctgagggagggagctgtcagccagggaaaaccgagaacaccatcaccatgaca

SEQ ID NO: 466622 - DNA, 100 bp, Homo sapiens
agaagaaatccgcagaagcttattaaagttaaggagttgatccctgaattttattatctccctgagatgtttgtcaacttcaataattataatcttggag

SEQ ID NO: 466623 - DNA, 97 bp, Homo sapiens
gggagcagggagcattgcagcagccactggctttgtcaaaaaggaccagttgggcaagcaattcacagaagctgtgagtccttcagtgctaccccct

SEQ ID NO: 466624 - DNA, 75 bp, Homo sapiens
actattgttgcttgcttacttactcttatcaatttctatgagaggtacatggactatatcgcacaacaggtgcta

SEQ ID NO: 466625 - DNA, 107 bp, Homo sapiens
ccgacatggagctgttcctcgcgggccgccgggtgctggtcaccggggcaggcaaagcacttgcacctcctgcgccgccgccccccatccaaggatatgccttcaag

SEQ ID NO: 466626 - DNA, 100 bp, Homo sapiens
gtgacggaggagcttgtaccaccgacccctgaatggttggacagtgattcctgccaaaagtgtgatcagcctttcttctggaacttcaagcaaatgtggg

SEQ ID NO: 466627 - DNA, 75 bp, Homo sapiens
cgacgagctcttccgggcgggctccagactcagcccctgcccacacccccacacctgcaggcggagccagagaac

SEQ ID NO: 466628 - DNA, 120 bp, Homo sapiens
tggattcaaagcataaaaaccattacaagatatacaatctcttagaccatgctcagcctccaagcagccttgtcatcgacaaagaatctgaagtttacaagatgcttcaggagaaacagg

SEQ ID NO: 466629 - DNA, 136 bp, Homo sapiens
ctgttttccttgcggcggccgtggaaggcgacccggcggctgtggaggccacgctcagctcgccaggcggcgcaggagaccgatcagaaaggatttcttaactggcactgctggcagagacggagaccgcggctgg

SEQ ID NO: 466630 - DNA, 82 bp, Homo sapiens
gtggccttagctgtgctcgcgctactctctctttctggcctggaggctatccagcccccaccattgctctctctgtcttcag

SEQ ID NO: 466631 - DNA, 100 bp, Homo sapiens
agcggcggcggcatcctccgcaatgtgtccagcctcgtcgccacccgtgaggactacaggcatctgcaggaaccacaccacactttggaggccatgctgc

SEQ ID NO: 466632 - DNA, 100 bp, Homo sapiens
atgggtacaggtcacattcttggagctcaaggtgacaggccagagcccaggtccccaggacagtgcaggtggatccataaagaacccagccaacccgcag

SEQ ID NO: 466633 - DNA, 101 bp, Homo sapiens
tagctacacagaatctacacagcaaagttaacctgacacagaaaatccttgtgcaaataaatgcttacttcctgcctgacacagctcacttcaagaagtgc

SEQ ID NO: 466634 - DNA, 90 bp, Homo sapiens
gtccgactgggagcagaggaagccttgaggacctactcacagataggaattgaagatcagtcgcatcgaatacattcattcaaagaactt

SEQ ID NO: 466635 - DNA, 100 bp, Homo sapiens
gtaaagaaggactgtctaaagtcaagtctatcctagaatctgtcaccagaatctgtatctgtatcaagatgatctgaagaacagcttctacctttaggaa

SEQ ID NO: 466636 - DNA, 90 bp, Homo sapiens
gttcatgcagcacctctacccacagagtacaggggctcaggtccaggtggcaggggatatgctacccaactcaactgagcgggccatcac

SEQ ID NO: 466637 - DNA, 90 bp, Homo sapiens
gaaggagagctgtcactttgggagcggttctgtgccaacatcataaaggtgccttctccaagagaggcagcagggagggagaaatggcaa

SEQ ID NO: 466638 - DNA, 88 bp, Homo sapiens
aaacgcttgtgcgagtaaatgtagagtcattaacaaggagcatgtactggccgcagcaaagataccatgtttgtgtggaagtgccccg

SEQ ID NO: 466639 - DNA, 82 bp, Homo sapiens
gcctcagttggaagcagccgatccagcctgcggagcctgtggggcagggttcgggggtgattaaagctggctttgcaggaga

SEQ ID NO: 466640 - DNA, 100 bp, Homo sapiens
aaatcagtgcactgcgggctgagattgctcggctgcagatggagctgatggagtataaggcgctcagactcgctgttgtctcatgtggagcagctgctcc

SEQ ID NO: 466641 - DNA, 75 bp, Homo sapiens
tatatgagagtcgcgagtgtgcagcaggccggagcctcaacagaaagctcctttagttcctcctcctccaccgcc

SEQ ID NO: 466642 - DNA, 75 bp, Homo sapiens
cgtggaccagcgctgcctggacaggcagttccggcgaggggggagcctcagcaggattgctgtgtgaaaaccgag

SEQ ID NO: 466643 - DNA, 87 bp, Homo sapiens
ggagggtacttcattgatgccacaaccataatagaatgtctacattcctgttcgagactataagaggcttacccccatttctgtgct

SEQ ID NO: 466644 - DNA, 101 bp, Homo sapiens
tatccccgttcgccaccaattatgggagggctggccaacttctgctacagacgactcagctttggtcctcttagatgtcactcctgaccagtcaatggtag

SEQ ID NO: 466645 - DNA, 100 bp, Homo sapiens
gcagcacttatacctggtggtctttctgatggtcagttttattcccctcctgaatccgaagcagtgaataaccctataccttccaatttgaaatcagaag

SEQ ID NO: 466646 - DNA, 100 bp, Homo sapiens
gttgaacatgaagaatactggaaagttgctatgttttggaacagggcggatacctgaccaactcgtgatcctagacatgaagcatggagtggaggcgaaa

SEQ ID NO: 466647 - DNA, 95 bp, Homo sapiens
aaaaagggactgctaagaagataccaccagggaggaaataatgctggccatacagttgttgtggattctgtggaatatgattttcatctcttacc

SEQ ID NO: 466648 - DNA, 99 bp, Homo sapiens
gtccgcggccggcaggaccatgctgctgaaagagtaccggatctgcatgccgctcaccgtagacgagcctacttctgcttcctcctggccgctctgggt

SEQ ID NO: 466649 - DNA, 74 bp, Homo sapiens
agacaacagaaacagaaacgattgtggaaacagaatacttggctttctctgactcaagtaaatgggtttttgag

SEQ ID NO: 466650 - DNA, 101 bp, Homo sapiens
ccgcggcctggggcaggaatgcgtcctgagcagcagccccgcggtgctgggagttaaagttcctcgtaattttcgcttgttggaagaacttgaagaaggac

SEQ ID NO: 466651 - DNA, 100 bp, Homo sapiens
ctacctcttgggtgaactctagcaattacaaggtggtttccagaagtgcagaatatttattaccaaggtaataaaaaaaagcaattgccaactggtgaca

SEQ ID NO: 466652 - DNA, 87 bp, Homo sapiens
ccaacatgctgaggacgttcagcagcattcccgtctcacggatatgcaaggaaccactcgttttgactattattttatcactctttg

SEQ ID NO: 466653 - DNA, 83 bp, Homo sapiens
acgacgttccatctgtggaaggacctaccaaccagatggagcagctatcagatgaagaaattgatcatggtgctgaagaagac

SEQ ID NO: 466654 - DNA, 88 bp, Homo sapiens
aggagctgctggagcatggagtgtgtgaggaggtggagagagttcggcgctcagagagatggtctcctgatcctggctgataagctcc

SEQ ID NO: 466655 - DNA, 100 bp, Homo sapiens
agaacgtgccatggagacgcttaacggagctcagtctgaatattcttggagaaagatgctgagtggcattgcagccttcctacttgggctaatcttcctt

SEQ ID NO: 466656 - DNA, 82 bp, Homo sapiens
caggagaaggcggaggacaagcccagcaccggactgcctccgggcctgccaggagcagatcgaagccctgctggagtcaagc

SEQ ID NO: 466657 - DNA, 100 bp, Homo sapiens
tatttctgcatggtcctaccatctggaaagaggcttctaggaaaccaggcacaattgtaaagggttacatggacacagaacagtatgaagaagcagtacg

SEQ ID NO: 466658 - DNA, 75 bp, Homo sapiens
cacgctgattagagcgaagagagagaaagcccagggtgtgggccgaagatatgctcatgtggtgttgaggaaagc

SEQ ID NO: 466659 - DNA, 73 bp, Homo sapiens
gcagctcagcagccacatatagctcaagataaatgtgctttgggtacccatgggtgtcagcacatttgtgtga

SEQ ID NO: 466660 - DNA, 101 bp, Homo sapiens
ccagtattatcaggcatggagatgctactgatgtcaggtgtgctttctggtgaccatgaatggatgctgtcagtagatgccttggtgctctttacggtgct

SEQ ID NO: 466661 - DNA, 97 bp, Homo sapiens
gacatctacctccatcaggaccccagatgtctgacagccctgtgtgacaccaagataagtaacatctttgtagaatttgatggctgtaactggaagc

SEQ ID NO: 466662 - DNA, 83 bp, Homo sapiens
gtttgcatatatcaactgtggccttaatgagcatgttgacagcatcgatgctagacagacagaattgaatgatctggcacggg

SEQ ID NO: 466663 - DNA, 100 bp, Homo sapiens
gaaaaacttaaaatggatatgaaaagtgaagaaagtgatcataggagaaaaccatttcagggcacttctgtatcttcaggaactggctgaagagctctca

SEQ ID NO: 466664 - DNA, 51 bp, Homo sapiens
tctcagaagacagagggttttcttttgagggtcaacatatttcactggcac

SEQ ID NO: 466665 - DNA, 100 bp, Homo sapiens
gccgcaggagagacacgctgggccgaccccagagcggcgctggacaggccgccagatcccacccttggacccccatgaaaatggaaacaatggaacaatc

SEQ ID NO: 466666 - DNA, 75 bp, Homo sapiens
caccgtcttcggtctcctggggtcggcgccgagtgggaggatggcggaagtctcctccgggctggggctgagcaa

SEQ ID NO: 466667 - DNA, 75 bp, Homo sapiens
acaactttgggcaaagtcatttcagccttggccgaggtgtgggctcgggatgagtttgaaggcctcttcaagcag

SEQ ID NO: 466668 - DNA, 96 bp, Homo sapiens
tgaagaccccgaaggaaaaggaggaattcgccgtgcccgagaatagctccgtccagcaggcaggtgacagcagggacatgtctcgggagatgcagg

SEQ ID NO: 466669 - DNA, 113 bp, Homo sapiens
ccttgaactctgcacagcaagcccaggctcattatcaggacagcctttcctgcctcagggaagaagagagagacagactacagtgatggagacccactagatgtgcacaagag

SEQ ID NO: 466670 - DNA, 101 bp, Homo sapiens
gcagatccgcaggcgcaaggcttcaggcgacccgtactgggcctactctgctttgacagatccaaatgcttctgctgcccagcaggctgttctccagcagc

SEQ ID NO: 466671 - DNA, 75 bp, Homo sapiens
ttggctcaagtgattctcctgcctgagcctccctagtagctaggactacaggagaagaatttggattggtttcct

SEQ ID NO: 466672 - DNA, 100 bp, Homo sapiens
acaggagaacttggaactcttactaatgtctataaagccagtatgatagcaatgatggcaggtcagttaaccatgattgtgggccaagtaggatgtggga

SEQ ID NO: 466673 - DNA, 83 bp, Homo sapiens
cagactcctggagatcgacccgtacttgaagccctacgccgtggacttccagcgcagacaatgcagatcttcgtgaagactct

SEQ ID NO: 466674 - DNA, 82 bp, Homo sapiens
cctggccctggccctgatcatcctgctgggcttcgtccagatcgggaaggactccatcaagaatgctggaggaagggtgttt

SEQ ID NO: 466675 - DNA, 78 bp, Homo sapiens
gtggcagaaggaggccttccccgggcggagagcccctctccaggtattggcatactccacacatctgtaccattcttg

SEQ ID NO: 466676 - DNA, 98 bp, Homo sapiens
ccaccccagtaactcatggaactgaaagctcttggcatgaaatagcagctacatcaggtgctcatcctgagggagtccatagaggccactgtattcta

SEQ ID NO: 466677 - DNA, 82 bp, Homo sapiens
aagaagctgatcgagcccctcaccaatctcatccacagaaaggacccaggagcgataacagtaaatcaaataagatatttgt

SEQ ID NO: 466678 - DNA, 100 bp, Homo sapiens
aggaagcagatgtccaggaagtgaaggcaaggcagcgcccggttaccacatggccaagctgatcatcaagttggtcacctccatcggcgacgtcgtcaat

SEQ ID NO: 466679 - DNA, 98 bp, Homo sapiens
tgcagtgacaagtcagatgaactggattgttccgctgtgtccagatgttggaatggtttgagcatcatggtcacatttgcattgtttttgaactattg

SEQ ID NO: 466680 - DNA, 98 bp, Homo sapiens
cggggcccggacagaagatggtgcagaagaaaccagccgaacttcagggtttccaccgttcgttcaaggagcagaagttctgccagcgctatgaccag

SEQ ID NO: 466681 - DNA, 100 bp, Homo sapiens
gctacttgccattctcacaggactaatagctggcaaatttctgttccatcagcgtttgtttgtttgggaaggtggtagtgtatgggatcttcctctggac

SEQ ID NO: 466682 - DNA, 83 bp, Homo sapiens
aaatttgaaatacttgcaccatgaatatccaggtagcccgggaccctcgctttgatgatctgtcaggggaatataatcctgag

SEQ ID NO: 466683 - DNA, 82 bp, Homo sapiens
cgcgcagcgtgtcaggcggagagacccgccgccagcaagagtgagccatggagctacgtgtggggaacaagtaccgcctggg

SEQ ID NO: 466684 - DNA, 90 bp, Homo sapiens
gcccttttatgatgtccttgatgttctcatcaagcccacgagtttagtttcctgttttccagcacccaacataacttgtaaggattccag

SEQ ID NO: 466685 - DNA, 111 bp, Homo sapiens
atacgtcgaaagagcaacatggaatgaccgtttctccacggatgataccatcggggaccttaagaagctgattgcagcccaaactggtacccgttggaacaagattgtcct

SEQ ID NO: 466686 - DNA, 104 bp, Homo sapiens
ccaggactacagtaaggctgaaatcattgaagtgcttggagtgcagaactgaaagagtggtagcaactgcccttgctaatcaccgtaacctcggctgagaaaga

SEQ ID NO: 466687 - DNA, 101 bp, Homo sapiens
tcacggaggcaatagctagccgggacaggagagagtggcaagagtacgtttatcaagcagatgagaatcatccatgggtcaggatactctgatgaagataa

SEQ ID NO: 466688 - DNA, 87 bp, Homo sapiens
attgtcatcatgtaatagccagacatgagtatacattcagtatcatggatgaatttcagctctggtagctgaagaacatctcacagt

SEQ ID NO: 466689 - DNA, 82 bp, Homo sapiens
gggattggagattccacccaaacttgctggtcactgggaggtctcggcgcggaagatggccggcggcgtggacggccccatc

SEQ ID NO: 466690 - DNA, 99 bp, Homo sapiens
tgcaaaacgtgactccccacaataaggctttgttcgcgggggtcacagctctcatggctgcagctagcgtgaccccccctggctccctggagttgctac

SEQ ID NO: 466691 - DNA, 74 bp, Homo sapiens
tcttggcagccttcctgatttctgcagctctgtgtgaagaatgtctgtaaacctgtggaggagacacagcgccc

SEQ ID NO: 466692 - DNA, 100 bp, Homo sapiens
cgaccgggtgcccgctgtgtgccaggccgggtgctgggcacggtcccgcgagtgtggtttattgacaatcatttacaatgccgaagagtgctgtagtgag

SEQ ID NO: 466693 - DNA, 83 bp, Homo sapiens
cagaagtcgcgtgtctaggtgagtcgcggtgggtcctcgcttgcagttcagcgaccacgatcgaagacctgcaggtgaagctg

SEQ ID NO: 466694 - DNA, 100 bp, Homo sapiens
aggaagatgagctgtcctttcaggaaggagccattatttatgtcatcaagaagaatgacgatgcatttaaatcaaacggtattgagatggattgggttat

SEQ ID NO: 466695 - DNA, 74 bp, Homo sapiens
caaatatgtggacattggagtcttagcgtctgatttacaaagagtgtacagggtatgagtattatagaacaatt

SEQ ID NO: 466696 - DNA, 95 bp, Homo sapiens
cgggtcttccagagcgtgaagatcaagatcgagcctggagacacaggccccatccttcccaatggggacacttcagggagcggctctcaggtccc

SEQ ID NO: 466697 - DNA, 100 bp, Homo sapiens
ggcgcgagtgaggaaaggaggtactgtagtgagaaagatcagtctaaagaaaaggagaagaaagtgaaaaaaacaattccttcctgggctaccctttctg

SEQ ID NO: 466698 - DNA, 97 bp, Homo sapiens
caatatcatgcaagtgtggcaaatgcagtctctggtcccagcccaccccatggcccctcccagtcccagcaccaccagcagtaataacaacagtagc

SEQ ID NO: 466699 - DNA, 50 bp, Homo sapiens
gcaaattcactccccagtacaaagatcatccagctgaccccggtgcctgt

SEQ ID NO: 466700 - DNA, 82 bp, Homo sapiens
caagaagaagaagttgcgaaggatccccaacggggaggccaacgtgaagaagtcatcgtgatgtcaggtcatgagaccatcc

SEQ ID NO: 466701 - DNA, 109 bp, Homo sapiens
gctgcccccaagcccttcccggggggcaccgggccccccatcaaggctgagcccaaggctccctatgccccaggggccagctcttccgaggctccagcctgcttttccg

SEQ ID NO: 466702 - DNA, 73 bp, Homo sapiens
acaagacgagaatgtaactccgttgaagcatgggtaattccagaattgattggccataccattgtcactgtat

SEQ ID NO: 466703 - DNA, 90 bp, Homo sapiens
tccttgaaagaaatagaaccaaatctgtttgctgatgaagattcacctgtgcatgccaaaatgaagtttaatccctttgtgacttccgac

SEQ ID NO: 466704 - DNA, 98 bp, Homo sapiens
ctcgacgaggccttccagcgctatcgtgacctgcttttcggttccgggtcttggccccgtccttacctcacagaatttagcttgggttaaatcatata

SEQ ID NO: 466705 - DNA, 50 bp, Homo sapiens
cctgagggactggctcctgggtgtactaatggtcacttgatgtgcgctgg

SEQ ID NO: 466706 - DNA, 96 bp, Homo sapiens
gaacgaccagttcgttatattagaaaacctattgactatacaattctagatgatattggacatggagtaaaggcctttttgcaaatgtgtaacttg

SEQ ID NO: 466707 - DNA, 90 bp, Homo sapiens
ggcctcccgtttctggctccgggctgagcttcctggagaagaggaaggaatgtatcctgtcaggtataatgtcagtgaatggcaagaaag

SEQ ID NO: 466708 - DNA, 101 bp, Homo sapiens
ctctgatgaggtcacagctggcttgcgcatctcagatggagtggtccttttcattgatgctgctgagggggtgctggacgtcattgctcctccttatacct

SEQ ID NO: 466709 - DNA, 83 bp, Homo sapiens
cagctgagcacggaggggataggcacggacgcaacacttttggaacttagacgctacaaacggggattcagcgtccgatcctt

SEQ ID NO: 466710 - DNA, 98 bp, Homo sapiens
acttagctcagcaattcttaccttgaggaagttaacatccctaataggagggttctggttactggtgccactgggcttcttggcagagctgtacacaa

SEQ ID NO: 466711 - DNA, 97 bp, Homo sapiens
gagccccactgctcggggaggaggagccacggccggggacaggacaacaacaggctggagttgttgcccatcctcctgcagtgcctccaagaccaca

SEQ ID NO: 466712 - DNA, 100 bp, Homo sapiens
aggcttggcaacatcgctcggttggaacttaattactgcgtccccatgggagtacagacaggcgacagtaatccagtccctcatagcactggtgaatgac

SEQ ID NO: 466713 - DNA, 100 bp, Homo sapiens
tatacctcctgagattcagaaaagttgtcttaatatgttgattcagtccttatatatgaaaatgatgatcagctcctgtgggaccctgagtacttaccag

SEQ ID NO: 466714 - DNA, 82 bp, Homo sapiens
gcggatggccccaggtgtaagcgcagaaagcaggcgaacccgcggcgcaataacgttgcttctgcaggaagcctttttggtg

SEQ ID NO: 466715 - DNA, 100 bp, Homo sapiens
tgattgcatggtcaagatttaccgccatgagtccgtgtttcccattaaacactaccaggacaaaatcaggccttacatccagctgccatcgcacagcaac

SEQ ID NO: 466716 - DNA, 82 bp, Homo sapiens
gggtgaggctggatgacgatgatgagttcaaaagaatgctgaaccgggagctgacacacctctcagagatgagccgatcagg

SEQ ID NO: 466717 - DNA, 82 bp, Homo sapiens
aaagaagttgctgttggggactcggaaggccgtatttgggtctatgacgttggagagcagtgttgccacaaactatatggtg

SEQ ID NO: 466718 - DNA, 90 bp, Homo sapiens
cttttgaagattttgcatgcagcaggtgcgcaaggtgaaatgttcactgttaaagaggtcagaatggcggcagtggagcatcgtcattct

SEQ ID NO: 466719 - DNA, 74 bp, Homo sapiens
gttcgagaacgaccccgagacggttcgggtctggcggtacttgaagggcaaagacctggtggcccgggagagcc

SEQ ID NO: 466720 - DNA, 50 bp, Homo sapiens
gaaattgttcagttcttctcagtgataaaaagttgattgcagaaggacct

SEQ ID NO: 466721 - DNA, 101 bp, Homo sapiens
tctccgcagctctggttcctgttgcggccgaatcccaaggactgcagcaaagccaaaaagctggtgtgtaatatcaacaaaggctgtggctatggctgtca

SEQ ID NO: 466722 - DNA, 90 bp, Homo sapiens
acaaggaggccggcggcagcgacgggccccgagagatatactgccattggagaactggggaaagctactgatacactagattctacgggg

SEQ ID NO: 466723 - DNA, 97 bp, Homo sapiens
ggatcgtttcatactttacgcttgtgtgataaaactggggtgtgcctacaggggttgtggaaggagacgctgcccccggtctatgccctggaattgc

SEQ ID NO: 466724 - DNA, 95 bp, Homo sapiens
caaacaggattccacagtgtcctctggaaaatgcatttaaatcaaacggtattgagatggattgggttatgaaacataatggtccaaatgacgct

SEQ ID NO: 466725 - DNA, 100 bp, Homo sapiens
gaaagttctcttcaccaaggagactgcaggctacctcaggggccgtccccaggacactgtccggatcttccctccctgggctggtgaattaccagatctc

SEQ ID NO: 466726 - DNA, 100 bp, Homo sapiens
gtggaatattggggggctcggctgcagacttggccaaatggacgggactattaaggaagttggtgaaccatctaaagaagagaaggctgtggccaagtat

SEQ ID NO: 466727 - DNA, 74 bp, Homo sapiens
cctgatctaacccctagaaacaggtcaataactgggagatggacaaactagagatggaagatgcagtcacattt

SEQ ID NO: 466728 - DNA, 73 bp, Homo sapiens
ggacttgtgcaaaatgtacaccacacttacagcccttgtcagatatgactcggtgaccttcgcagacgtggct

SEQ ID NO: 466729 - DNA, 76 bp, Homo sapiens
ccagcagcagcagtagctatggcagtggcagaagattttaattagccgtcatggaaatgatgagtcagaagattca

SEQ ID NO: 466730 - DNA, 100 bp, Homo sapiens
cgtagatacaaatttttggatgatgatggatccatttctcctattgaggagtcaacgggtgagtcaggtgctgggaagacagaaaatacaaagaaagtta

SEQ ID NO: 466731 - DNA, 100 bp, Homo sapiens
cttgtactcgggctggtgctgccattaatcctgtgggccgacagaagtgcagtaggtcccattagtccaccacagccaccttcagtcagtgcatggaata

SEQ ID NO: 466732 - DNA, 83 bp, Homo sapiens
accatctccatcacccaccaacaacaccacaataatccacagccaagatggcatgatcaacattgacatgactggagagaaga

SEQ ID NO: 466733 - DNA, 129 bp, Homo sapiens
ctcgcccggcctgccagcgctgctctccgccgcagcttcagcacctcggcccaggtgctttgcaagtattgatagagatgaaaaaccaagatgtgaagttcaccaaagatacctatgttcttgcttttg

SEQ ID NO: 466734 - DNA, 88 bp, Homo sapiens
atttgaaatgcagtccaggaaaagagttccatctggaatatgacaaattagaagaacggcctcacctgccatccaccttcaactacaa

SEQ ID NO: 466735 - DNA, 95 bp, Homo sapiens
gaagttgcccagtatgatggggcatacaagatgcctgaggaagtgcaccatggagaggaggaggtggagacttttgcctttcaggcagaaattgc

SEQ ID NO: 466736 - DNA, 52 bp, Homo sapiens
tgaagctctgcgtctcttccaagataggtggcagcacaccctgggcccccca

SEQ ID NO: 466737 - DNA, 100 bp, Homo sapiens
tccggagttgccatgaaatatggaaacgactcctcggccgagctgagtgaggaaacttggatttaactggccagaagcaggtattcaaagcagagaacaa

SEQ ID NO: 466738 - DNA, 83 bp, Homo sapiens
cttctttgtcgcagcgttccatgagctgcagaggctggagacagagttgggccaacccgctgagcgctggaaggacacctggg

SEQ ID NO: 466739 - DNA, 50 bp, Homo sapiens
ctactaaaaagcagagcatttctgagaaagtttcattgtgcaaatctaac

SEQ ID NO: 466740 - DNA, 100 bp, Homo sapiens
agttgagctaatggtggagccaaaatgctattgccctgtcttcatcaacatttaatcagttgctacaagcctcaggaaaaatcagattacttgatgttgg

SEQ ID NO: 466741 - DNA, 74 bp, Homo sapiens
cgacgcctttggcggtaaattcgggagatacaactcgtcaacgaatcaaattcagtgatgacagagtatgcaag

SEQ ID NO: 466742 - DNA, 100 bp, Homo sapiens
cctacacttgcctatccagaaagcaacagcagagcaggtggtccattatggctgacatgcaaaatctggtagaaagattggagagggcagtgggccgcct

SEQ ID NO: 466743 - DNA, 100 bp, Homo sapiens
ctctcctgggatcggcccaaggccagttctccgcaggatggctggctgtggtgaaattgatcattcaataaacatgcttcctacaaacaggaaagcgaac

SEQ ID NO: 466744 - DNA, 75 bp, Homo sapiens
gaagcagaaaatgtgtggcggattactgggacagatgcacctgaaattcttagaggttgtgcctatggacctgag

SEQ ID NO: 466745 - DNA, 97 bp, Homo sapiens
gggtctccgggccaacctgagggtgcatgcctacatcatcagctacctgaagaaggagatgccaagtgtatttggaaaggaaaacaagaagagagag

SEQ ID NO: 466746 - DNA, 50 bp, Homo sapiens
ctcagcttctcaagtagctgggattacagtaatctatgccagcaattatg

SEQ ID NO: 466747 - DNA, 75 bp, Homo sapiens
tcgccctggagctggagcatgccctcagcgccatcggtgagaagccctaccactgcaactgggacggctgcggct

SEQ ID NO: 466748 - DNA, 100 bp, Homo sapiens
gaatggagtgtccaaatataaccctaacccagaccaatcagtttctgtcactgtgaccaccaaccaagcagggcctgctttcttccccgggcgatgtgca

SEQ ID NO: 466749 - DNA, 75 bp, Homo sapiens
ggagtgttccaggattcgccttgctccagaaacatgacaaggaggactttcctgcctcttggagatcagaggagg

SEQ ID NO: 466750 - DNA, 90 bp, Homo sapiens
cctcaagcaggccctgttggaattgaagaagataatgcctcacaggaagaaaaagccctttatagagaagaagaaagctgtgtcttttca

SEQ ID NO: 466751 - DNA, 90 bp, Homo sapiens
ggaggctacaacttacagtgtcaagatcttaccagcgcaggggaagctgacatccgggtggacccaagtggagagattgtggaactggcg

SEQ ID NO: 466752 - DNA, 82 bp, Homo sapiens
gcctggctcggagcagcagcctctgaggaaggtgctcgggtcttcggggcactgggtcccatcggtccctcctcacctgggc

SEQ ID NO: 466753 - DNA, 100 bp, Homo sapiens
tcgaccccggcccggaggaggctcatgcgggatttcaagcgggttgtggacttcctgctgaaggccatcatgcgcaccatgtggttcgccggcggcttcc

SEQ ID NO: 466754 - DNA, 74 bp, Homo sapiens
cagagctgctgattctcaaaacagtggtgaagctgaggaccaggaagagaaagaagatgctgagaaagaaaaca

SEQ ID NO: 466755 - DNA, 82 bp, Homo sapiens
gcccgactcggtgattgaggacaagaccatcgagctcatggaaatcttactgatgaggggcagcagtattgttgtagattag

SEQ ID NO: 466756 - DNA, 100 bp, Homo sapiens
aggatgaatcccagtccctgttacggtcctaccctggtccaagcctggaaagtgaagacttcaacattccaccaattactcctccttccctcccagacca

SEQ ID NO: 466757 - DNA, 100 bp, Homo sapiens
gccctgaaactggttggtgaagaaggatttgtaggaggaagaacgtgcaaaacgtgaggagctagagcgaatactggaagagaataaccgaaaaattgca

SEQ ID NO: 466758 - DNA, 75 bp, Homo sapiens
ggaaggcgcgggcaggagcctggcgaggatgcaccttcccctgccttggaaaggaattgaatgatctggcacggg

SEQ ID NO: 466759 - DNA, 98 bp, Homo sapiens
aacagagatggcggggagagacggccaagcagcaccagcgtgcctttgggtgataaggggatacaatgtctctttgctatatgaccttgaaaatcttc

SEQ ID NO: 466760 - DNA, 75 bp, Homo sapiens
gagtggcaccatggacctgcccttccagtgcacagccagagaacaacacatcacacacaggaaacagttgtgctc

SEQ ID NO: 466761 - DNA, 100 bp, Homo sapiens
ccgacttccgaaggccgccgtccgggcgaggggataagagcactgattatgctaatttttaccagggattgtgggattgtactggagctttttctgatga

SEQ ID NO: 466762 - DNA, 106 bp, Homo sapiens
aggtgatccagcaaggtcggcagagcaaggggcttacgcagaaggacctggccacggtgtttcccattaaacactaccaggacaaaatcaggccttacatccagct

SEQ ID NO: 466763 - DNA, 100 bp, Homo sapiens
ctggcggagaccctgatggccaaggagtccacccagggccaccggagctatttgctgacgtgctgtattgcccagaagccatcgtgtcgctggtcggggt

SEQ ID NO: 466764 - DNA, 82 bp, Homo sapiens
agagctatcaggggaagatatgcatcagttccatcgagccattactacagggggatatgagactttctactcggaatatcct

SEQ ID NO: 466765 - DNA, 100 bp, Homo sapiens
actacactgtgtttgaccgtgacaacaacaggagctggccacggtagtacggcggttctcccagaccggcatccaggacttcctgacactgacgctgacg

SEQ ID NO: 466766 - DNA, 100 bp, Homo sapiens
tttgcatcctacgtaaccagaccaagctgtggggaatggtctgccgaaaaccgaccgacccggttgattggccaccacttgtcctgggactgctcactct

SEQ ID NO: 466767 - DNA, 89 bp, Homo sapiens
tagcccacttagaaatcacagtaatctcagccaggaaaggagagtttgaaactggatttgaaaaaggaggacagacaagagaacatgca

SEQ ID NO: 466768 - DNA, 100 bp, Homo sapiens
caggacaaacgcttgtgcgagtaaatgtagagtcattaacaaggagcatgtactggccgcagcaaagaagtgttcctgaaaactcgtcaattacaggaaa

SEQ ID NO: 466769 - DNA, 101 bp, Homo sapiens
tgaaggtaccctagaatccatcaatgagaagactttttcagctactatcgtcattgaaactcttgcctttctcacttggcaaggaagatggaagtggggac

SEQ ID NO: 466770 - DNA, 82 bp, Homo sapiens
cttgaacagactagaaattgcaccacagatatatgggttgtaactcagatgattcaccgtgagccagataaacgtttagagg

SEQ ID NO: 466771 - DNA, 96 bp, Homo sapiens
caagctggcagacgtctaccaggcagggaaacatgaagccattgtgaagaatgtacatgatctcctggcaaaattggcatgggatttttctcctga

SEQ ID NO: 466772 - DNA, 82 bp, Homo sapiens
cgacaagccgctggcagccgcggatctcaccgccgctcagggctatgactttgcagccgtcctggagtggttcgcggagcgt

SEQ ID NO: 466773 - DNA, 97 bp, Homo sapiens
tgggaaagatctaccttctggaagctactactacgtggtgcttggaaaggttgtgaccgagattcccgacgagagagactgaggggaagagaggaag

SEQ ID NO: 466774 - DNA, 98 bp, Homo sapiens
gcggcctgattgggaagaaactcttagcgcaatgccaaaagaatgcaatggtgtaaagattccagttgatgccagtaaacctaatccaaatgatgtgg

SEQ ID NO: 466775 - DNA, 75 bp, Homo sapiens
cttggaccccggcttctgggacgcgtcagatttggagcaagaggtggtggtggccttcccccgaagaaatttggt

SEQ ID NO: 466776 - DNA, 83 bp, Homo sapiens
gccccatgtgccagaaggagttcgcccccagacacgcagcccaagaaggtccggaaggtcccgccgggtcttccatcctcggt

SEQ ID NO: 466777 - DNA, 74 bp, Homo sapiens
gaaaatcgcttggttaaaacctgacacttttaacagtgaattttgaagattgcaccggtcgacaaaggacagcc

SEQ ID NO: 466778 - DNA, 73 bp, Homo sapiens
aaattacctccgagggaaacaagaaaacatcaaagaggtctagcaaagatgttttactgtgcctggctaacta

SEQ ID NO: 466779 - DNA, 75 bp, Homo sapiens
gctggggcgacgaggcgattgcgggggcctgggctagacacatcttcggcctctgaggatgagggctctctgaga

SEQ ID NO: 466780 - DNA, 100 bp, Homo sapiens
gtgatggaaggggagctggaggccagagaccttgtcatcgaggccctgcggccattttgcagactctgatcacagtgaaacgttccatgggaacttgggc

SEQ ID NO: 466781 - DNA, 75 bp, Homo sapiens
gtccgccaccgacccctggcacctggatcacctggattcagaccaaacctggaccacccaaaaagccgaagaccc

SEQ ID NO: 466782 - DNA, 74 bp, Homo sapiens
gccttggtggaggattggcaccgagagaccaggactgcaggacagtcggttattctcgttcaagttaatccagg

SEQ ID NO: 466783 - DNA, 83 bp, Homo sapiens
cccaccgccgtgaacggctgcgtgaccgttcttgcattggcataatgaggagcaggagggaaaaggcctttactagattcttg

SEQ ID NO: 466784 - DNA, 101 bp, Homo sapiens
gtaggagtggcatcgcctgagcccgggacggcagcggcctggggacccagcaaggaaggatttgatgccctggatccctttattcccatcctggtttccaa

SEQ ID NO: 466785 - DNA, 100 bp, Homo sapiens
atatggtactcctgatggtttgggtggttatgtgcagagtagaagaggtgaggcatttaatttttttaatggtttttgctagagaattgggggctctcaa

SEQ ID NO: 466786 - DNA, 50 bp, Homo sapiens
cgtcaatcagagcgtcctgtgcgcaggagcattggtttgaaaaggcccta

SEQ ID NO: 466787 - DNA, 98 bp, Homo sapiens
tctgtcttcggtggactccttcggcagtccacccaccgccgccgcctcccagagctcaggccccggggcctccagcggcaccagcggagaccacggtg

SEQ ID NO: 466788 - DNA, 50 bp, Homo sapiens
cagcatccccaagcagggggagtcttccgtgtgtgctaagatcgtgcagc

SEQ ID NO: 466789 - DNA, 75 bp, Homo sapiens
caagaatccactgttgctactgaaagggaaagaatacccacctcatgtccaaaaagttgaaattaatcctgtaag

SEQ ID NO: 466790 - DNA, 90 bp, Homo sapiens
ctgaagaaggtgacgataatttggctaatatgaatgccacaatacgaaggattgaccagttaaccaacatcttagcccccatggctgttg

SEQ ID NO: 466791 - DNA, 82 bp, Homo sapiens
gccatggcgaagcacgagcagatcctggtcctcgatccgcccacagacctcaaattcaaagagtgaagacatttccacctgg

SEQ ID NO: 466792 - DNA, 74 bp, Homo sapiens
aaaagaagatatgtatgacgagattattgagttaaagaaggcctgtttaaagaagaaaacccgtatgctagatt

SEQ ID NO: 466793 - DNA, 100 bp, Homo sapiens
cgcctctgcttcaatgtgggccgggagctgtacttctatatctacaagggggtccgcaaggtcatcatcagatttgaaatatttaaagtggatacaaaac

SEQ ID NO: 466794 - DNA, 100 bp, Homo sapiens
gtggaatatctactgaagtggaaaggcttttctgagggtgggaaccgccaaacctctcccttctttttgacttcacccttggataccatcaaggccagag

SEQ ID NO: 466795 - DNA, 83 bp, Homo sapiens
gctacgcatagaagccgggattgagcgcatcaagcgtctgcttctgcgctttgcctgggagaggccctggtggcctcgttcct

SEQ ID NO: 466796 - DNA, 100 bp, Homo sapiens
tttggagaatttcagcattgcatagaagcagccttacagatattaataaggcagcggaaagaagaaatatgaatacggctccatcaagacccagccccac

SEQ ID NO: 466797 - DNA, 90 bp, Homo sapiens
attccatcgtgtaatcaaggacttcatgatccagggcggagacttcaccaggggagatggcacaggagagcagcccgacggccatggagg

SEQ ID NO: 466798 - DNA, 100 bp, Homo sapiens
gtgggcaagacctgccttctcatcagctacaccaccaacgcctttcccggagagtacatccccaccgtgttacgggcaggacttgagtggcttcggacag

SEQ ID NO: 466799 - DNA, 74 bp, Homo sapiens
aactgtagggatgctttggctcaagaatatctcatggagtgtattattcagaggaggaagatgactatctcttt

SEQ ID NO: 466800 - DNA, 83 bp, Homo sapiens
ggaagctgggacacccgggagtcaggaaatgtacaatgcttgcacactgcacggtggaaaaggccaggagcagcgagagtttg

SEQ ID NO: 466801 - DNA, 90 bp, Homo sapiens
gttctgttctcgccttcacccggaccttcattgctacccctggcagcagttccagtatctcaacatcaaactaactgacatcagtgtcac

SEQ ID NO: 466802 - DNA, 75 bp, Homo sapiens
cctgcagcctttgtgcccatcaccagctctacagatgctttcttcacatgtcgaaaaaatgtccttctggcgaac

SEQ ID NO: 466803 - DNA, 97 bp, Homo sapiens
tctttctcagcaccttggcgaagccttgggtttctttcttaaaggactgatttttagaactccacatttgaggtcctcgatgggcttcctggaatat

SEQ ID NO: 466804 - DNA, 100 bp, Homo sapiens
tgaacaagaagatgaagatgccatcgtcaacaggatttcatgttaaggacatgttcacttccagatctctcaaagctgttcagaacccttatggatgttc

SEQ ID NO: 466805 - DNA, 100 bp, Homo sapiens
ctagtactcttctttgtcagtatatcaacctacagctcctgaatgcaaagccacaagccctggtacctgacagtgtaaagaaggagctcctacaaagaat

SEQ ID NO: 466806 - DNA, 100 bp, Homo sapiens
ggggctaaagagcgtcgtgtggcagagcatctccttggaaacaatgccatctttgaatgtgagagataaacctagtttcagcatgtctgcagcagagacc

SEQ ID NO: 466807 - DNA, 90 bp, Homo sapiens
atgatctccagatacactcggaaggcggtgccacagagcttggagctgtctcaagtattcccatgtgttttaaaagcctgaagtcagtga

SEQ ID NO: 466808 - DNA, 96 bp, Homo sapiens
aaactggggagtcttgagggacccccgactccaagcgcgaaaaccccggatggtgaggagcagtcttccctgcgttgactatttggaatgtgatct

SEQ ID NO: 466809 - DNA, 100 bp, Homo sapiens
cacagaggcagcgccacctcgcttggagatggaataaactgagactgcaggacaaagagaaacgtctgaagctggaggacgattctgaggaaagtgatgc

SEQ ID NO: 466810 - DNA, 101 bp, Homo sapiens
gcatcttattgatcctccagtcgagcccccacagggtggctggtctacagatgaccctgactgagctccgggcctttctggaccagatgaacaacctgcct

SEQ ID NO: 466811 - DNA, 75 bp, Homo sapiens
tttgttaggttctgctggtcacacaaccctcgggatcacacttatgattgttgtatatgaacacagatcaagatt

SEQ ID NO: 466812 - DNA, 75 bp, Homo sapiens
caatgcctactctagtccaagtgtagtcctggcctcatacaatcatgatggccgatgtgtccagatgctagaatg

SEQ ID NO: 466813 - DNA, 75 bp, Homo sapiens
gccaaacctgagtttctacagaaatgagatccgcttcctgcccaacggctcaaagtgctgacaaataaagcttct

SEQ ID NO: 466814 - DNA, 77 bp, Homo sapiens
gggattacctgggcctgtgccggagtggcgccctgaaggagctcagcaagagcgacgagtagaacagcccctctatg

SEQ ID NO: 466815 - DNA, 75 bp, Homo sapiens
gaaggggaaggcgcctgaagaggacgaaggaaatgaggaccggccggacgatgccctgcagactgctctgaagag

SEQ ID NO: 466816 - DNA, 74 bp, Homo sapiens
ttgtctttatatcctgacactatgaatgctacttggatgcctcttaaggatgaactcaactttggttggtcaga

SEQ ID NO: 466817 - DNA, 82 bp, Homo sapiens
aagaccgcgcgcagggcctgcagcgggagctggacggcgagcgcgagcggcgcgagaaaggctggaccccaatggagaacag

SEQ ID NO: 466818 - DNA, 100 bp, Homo sapiens
gcccaggccgcggaacggtgatgctcgggccggacgggcgggcgcggatccctgcgtcccggttgaggaacaggttagcaccactgagagagtgtttcag

SEQ ID NO: 466819 - DNA, 98 bp, Homo sapiens
cggaattgtcctttccaacatccagagctgcatcattccttggggcaaaatgtggacaagggtactccaaagattcaggtttactcacgtcatccagc

SEQ ID NO: 466820 - DNA, 100 bp, Homo sapiens
aggcagggagaccagactggttttggaggtggcccagcatttgggctgaaaagcattattggcatgggaacaggagcaggcgcctacatcctaactcgat

SEQ ID NO: 466821 - DNA, 100 bp, Homo sapiens
ggtgccggaggccgtgggcggcgacatgcagcagctgaaccagctgggcgcgcagggctgtgaacaattcaaattatggttggagagccctgagactatt

SEQ ID NO: 466822 - DNA, 75 bp, Homo sapiens
gccagtcaataggaagtacgagtgtgaagacagggcagggcattgttcatgcactgaccgacctcagcagccccg

SEQ ID NO: 466823 - DNA, 90 bp, Homo sapiens
agaaaagcctctgggagcagaagggaggctccaagacctcatcaacaattaaggaagaatccccagcacaagatagaatatagacataat

SEQ ID NO: 466824 - DNA, 96 bp, Homo sapiens
gacatttaattttagggtcctttatatagaagggagagtaggtacactgaggaggggacggctccgtcttcacattgtgcacagatctgaggatgg

SEQ ID NO: 466825 - DNA, 101 bp, Homo sapiens
aactacaccagccagcccgaccagggattaaagcctgtggtttccacagaagcaccacctatcatatttgccacaccaactaaactgacctccgattccac

SEQ ID NO: 466826 - DNA, 83 bp, Homo sapiens
ctcaaccagatgaggaagtacaactttgagcgccctcacaaagccaatgctgaggagatgaccaagtaccacagcgatgacta

SEQ ID NO: 466827 - DNA, 100 bp, Homo sapiens
gctgaggaccaacctggggcccaaagggaccataaagatgagcgcctggaccatgctgctgagcgcctactggcacggcctccacccgggctactacctg

SEQ ID NO: 466828 - DNA, 71 bp, Homo sapiens
aagaaggtgataaccatgtttgtacagcgacagctgccactgcagagccccgccatggaagacacgccgtt

SEQ ID NO: 466829 - DNA, 75 bp, Homo sapiens
cttttggatcgtatccacaatcctgaaattggaatgggattaacaggatttggagtgtttttcctgttctttgga

SEQ ID NO: 466830 - DNA, 80 bp, Homo sapiens
atgacaacgccttacccttcgctcccagcccaggcctttgaactggccacaggtgactatttgtttgaacctcattcagg

SEQ ID NO: 466831 - DNA, 48 bp, Homo sapiens
cgctgactctggtctcggcgatgacagactttgtgttgctgaaagagc

SEQ ID NO: 466832 - DNA, 90 bp, Homo sapiens
atcttgacgaggctgcggtgtctgctgctattctccgagcttcgcaatggaaggaggctgcagtgtgccagtagccgtgcatacagctat

SEQ ID NO: 466833 - DNA, 95 bp, Homo sapiens
agcacgcgggctgctcatcgtcagcagggagaggctggtgtatgcccacgcaggcgcgacgctggaggggaagatgtatatcacctgcggccgca

SEQ ID NO: 466834 - DNA, 100 bp, Homo sapiens
ccacgacttattttcacctccgacctttccttccaggcggtgagactctggagttttttgagaaccctgcttttcgtcccgatgggctgaaactctatcc

SEQ ID NO: 466835 - DNA, 90 bp, Homo sapiens
ggggagagcagcaccgaggccagcaagacgctgcccgccatcgagttgcctgtgtccctggagtgttacacagtgcctcctgaagacaac

SEQ ID NO: 466836 - DNA, 74 bp, Homo sapiens
ggtgcaggaaggcagtctttgctacgtacagcaaaagaatcttgtggaagaagaatgaagttgctgattatgaa

SEQ ID NO: 466837 - DNA, 50 bp, Homo sapiens
ctggagtccgcgcctccctggagcccaaatcttgtgacaaaactcacaca

SEQ ID NO: 466838 - DNA, 84 bp, Homo sapiens
ggatttgttaaggattccaagtaactcttatttggtgacaaccaaagccaagcaactgaaggattcagtgacctgctccccagg

SEQ ID NO: 466839 - DNA, 89 bp, Homo sapiens
ctggaggacatctgggggccacaaatgctccttctcctggagacgcaactcaaggctgctagcttgtataagctagaagaagaaaacca

SEQ ID NO: 466840 - DNA, 82 bp, Homo sapiens
aattaaaacatttttcagggacgtagccatccagagttcatagccctgatgaagcaagttactctgctctcctaataaatgc

SEQ ID NO: 466841 - DNA, 74 bp, Homo sapiens
taattttcaacaatttcttggaatgtggtgtatcagatgaaaggttctgccattacaggaccagtagcaaagga

SEQ ID NO: 466842 - DNA, 83 bp, Homo sapiens
ccgggacccggtgtctgctcctgtcgccttcgcctcctaatccctagccactatgctgggagtgtccactcgccttccaccag

SEQ ID NO: 466843 - DNA, 83 bp, Homo sapiens
aatggcacaaagttctctcgatcagggcatacatctttcttcgacaaaggggatcatggcccaagttgcaatgtccaccctcc

SEQ ID NO: 466844 - DNA, 100 bp, Homo sapiens
ccgtcaagctggccaagcacaaagagcttgctccctacgatgagaactggttctacacgcgagctggctgtggtccaaggccatttttgctggctataag

SEQ ID NO: 466845 - DNA, 74 bp, Homo sapiens
atattttgcactccagcatgccgatagttcaaacttctatatcacagaaaaggatgatcgctgcaagatccctt

SEQ ID NO: 466846 - DNA, 88 bp, Homo sapiens
cgcgcacagctgctcccttcgccttcgccctttccacctcgcggcagttcggctccactttgaggctctgatgaacattccagtgctg

SEQ ID NO: 466847 - DNA, 96 bp, Homo sapiens
attttaaagcagctgtcagtgacttggacaaactccttgatgattttgaacagaacccagacacgttggtcgtcattgcctccgagcccactttag

SEQ ID NO: 466848 - DNA, 101 bp, Homo sapiens
cacgaggcaaacgacttctcccttctttgaactggaccccgcgagcaccagagtcggcgtaactatcgcctgacaggataaacaggggtcacatgacgaca

SEQ ID NO: 466849 - DNA, 90 bp, Homo sapiens
gtccagtgtccaaccagggctacatgccttatttaaacaggttcattttggaaaaggcctcatcatttctgtctcctgtttctccacttc

SEQ ID NO: 466850 - DNA, 100 bp, Homo sapiens
tcacagctgcccattgcctaaagaattggactaaatgctcttccttcagaggattatccggggcatctactcaatgaaaaaccatgataattctttgtat

SEQ ID NO: 466851 - DNA, 100 bp, Homo sapiens
cagaacctgcgggccatctaccagtgcttcgtgtggagcggcacggctgaggcccgcaagcgcaaggcgcccacggcctgcgagaggagcccgagtttgt

SEQ ID NO: 466852 - DNA, 85 bp, Homo sapiens
cacaatatgctcttggacgtcatgcacacagttcatcagttctactgccctctgcctgcggctggagagcagtggcatgatctcg

SEQ ID NO: 466853 - DNA, 98 bp, Homo sapiens
cctacagcgacaacagcctggaccccggtactctgtggatatccccttggacaaaactgtcgtcaataaggatgtcttcagagatcctgctcttaaac

SEQ ID NO: 466854 - DNA, 100 bp, Homo sapiens
cttcttctttcagctaccatgaagcctcaggttatgtctgtatctgtcagcctggattcacagatccaacttagaaataatgtttcattcaagataaggc

SEQ ID NO: 466855 - DNA, 95 bp, Homo sapiens
ctcctgtgctcacccaagaccgagactgggaggcgtattggcggctactctttaaaaagatgttcccacaagcctgcatttccagagcatgctga

SEQ ID NO: 466856 - DNA, 75 bp, Homo sapiens
cggatgcaggacagacccctcaggttatgatgtgattgctcaagcccaatctgggactgggaaaacggccacatt

SEQ ID NO: 466857 - DNA, 80 bp, Homo sapiens
ggtgatttctgcatttccatctgaggtgctggagaatctggtaaaagcaccattgtgaagcagatgaggatcctgcatgt

SEQ ID NO: 466858 - DNA, 80 bp, Homo sapiens
gtttgggaagaaaaacagaggagttctattaagacgcaacagtatcaaagtgctctattttgggcagataaagtagcttc

SEQ ID NO: 466859 - DNA, 98 bp, Homo sapiens
agatggagaaataaaagtggccattagtactgtgagcatgaaccttgagaattctgagacttatggttggtcatatagaagagtaccttgaacctata

SEQ ID NO: 466860 - DNA, 88 bp, Homo sapiens
ccgactgacctggatagtagttgttcttcaggtcctgagaagtatttctcgttttcattggagatcacagcatacaaaagccaatcga

SEQ ID NO: 466861 - DNA, 100 bp, Homo sapiens
gtgctgacgacctgctacaacagaaattatgatgcatcattatcacagaagaaattcgtgtctatagcttttaaggacttgattacatcattttcaagcc

SEQ ID NO: 466862 - DNA, 52 bp, Homo sapiens
ggaatatcgatacaacaccaacaggggaacacttaagaatctgtcctcagga

SEQ ID NO: 466863 - DNA, 124 bp, Homo sapiens
cagagcctcgcctttgccgatccgccgcccgtccacacccgccgccagtcaccttcaggccattcagaggaggaaagagaggggaatatgaagtcagccaagccccaagtgaaccacagtcagc

SEQ ID NO: 466864 - DNA, 76 bp, Homo sapiens
ctagcagcaagggcgggctccacatggctgaagcaggcaaccaggagattgctagtcatagtggctatgtgcagat

SEQ ID NO: 466865 - DNA, 148 bp, Homo sapiens
gcgagctgaccacactgacgagccagtacatcaagttcatcagcgagactctgcggcgcatggaggaggaggagcttcgagagctgtgcccaggagtgaacaaccagccctacctctgtgagagtggtcactgctgcggggagactgg

SEQ ID NO: 466866 - DNA, 85 bp, Homo sapiens
ctcccggctctcgtcagcctcccgccggccgtctccttaacaccgaacaccgtgacttaagagattaaaattaatttggttgctg

SEQ ID NO: 466867 - DNA, 101 bp, Homo sapiens
cctagccatggaagggctggaggaggcagaggccaactgctccgtggcgttcgctgaggctcagagatgggtggagcttgtagattttcagtggaaactgg

SEQ ID NO: 466868 - DNA, 100 bp, Homo sapiens
gtacagtccgcagggcatcagtgagtgttcagcctgggtgttcctgtagatgctctcttctttattggtaaccagttggtggccacgagtcatacaggga

SEQ ID NO: 466869 - DNA, 82 bp, Homo sapiens
cattccaggatcttaaagaactagagagacttttcccagcgaggtggtcattcagagcctacacatctgttctgtattttaa

SEQ ID NO: 466870 - DNA, 74 bp, Homo sapiens
ttctcaatcgctactcagagccgccgggcagccctgagcgtgcaggtggagtctcgctctgtcgcccaggctgg

SEQ ID NO: 466871 - DNA, 80 bp, Homo sapiens
ttcaccaaaggacccagtcctcccaatgaaattttttacacaacctgaaaagctccgggttgacaaatggtggggtaaca

SEQ ID NO: 466872 - DNA, 100 bp, Homo sapiens
agatcaccgtgacatccgaggtgcctttctccaaaaggttacaggaaatacaggaggcagaggaacaaataaaagacaccacgagaaacagacacatcca

SEQ ID NO: 466873 - DNA, 100 bp, Homo sapiens
gccgtcccttcgcctccttcaccgccgcagaccccttcaagttctagtcatggacataagcagctctatgaccaatagcacagctgccagtagacccccg

SEQ ID NO: 466874 - DNA, 90 bp, Homo sapiens
ggtgccacatcctagcccctttccttactggatcctcaaaccagaagaaaacctgaatctctgaggttctgaatcaaacggaggatcacc

SEQ ID NO: 466875 - DNA, 100 bp, Homo sapiens
aaggcacaccactcactaatactgaagatgtgttgaaaaaaatggagattctgtttctggcgtctgcatacgcaagtccccaactcgctgaggagagctg

SEQ ID NO: 466876 - DNA, 100 bp, Homo sapiens
gaaaagcgcctggtcatcactgcttcacagtcactagaaaataaagaactatgcatccttaggaatgactggagtattttctgcattgcgtgctgttcct

SEQ ID NO: 466877 - DNA, 98 bp, Homo sapiens
ccagccgagacggagccggacccgccgcctcccgggctctgtggatagcaactggatcgtgggtgccacgctggagaagaagctcccacccctgcccc

SEQ ID NO: 466878 - DNA, 121 bp, Homo sapiens
gccaagcgcccgtcggacggggaggaggagcaggagctggaggaggagccgccgccgccagggttcatagtggcgtcatgcacgcagactcctgcaagttcccctaagttcttagaggact

SEQ ID NO: 466879 - DNA, 55 bp, Homo sapiens
agggaaccctggtcaccgtctcctcaggttttgagcaaaattttggactgtgaag

SEQ ID NO: 466880 - DNA, 51 bp, Homo sapiens
caaaatgccaataagaccagatctccagacagacttcatgcttcaggtgtt

SEQ ID NO: 466881 - DNA, 74 bp, Homo sapiens
tgtcttctacctggaaaacaggcttcgtgggacacatatgcaacatgcctatgatttttacaagcctgatatgc

SEQ ID NO: 466882 - DNA, 76 bp, Homo sapiens
atcaaggtccagagaaggtggaggaatcctgatactgagcgtggtactgactgtcctcacccacacccctgcccct

SEQ ID NO: 466883 - DNA, 101 bp, Homo sapiens
agaagatcggggggctgaaatccatcttcatcctaccgctccgcccaactcacgtgctgtgtgtcagactgagctttccctgattcattctacaatccaag

SEQ ID NO: 466884 - DNA, 50 bp, Homo sapiens
ctttctgtggatccttacatgaaacctctgtagaggagcaggatgcaacc

SEQ ID NO: 466885 - DNA, 100 bp, Homo sapiens
catgcctggggttacacctaaacagctcggggagtacagacagtgaggaaagtacagactctgaagaagaagatggagcaaagcaagacttgtttgaacc

SEQ ID NO: 466886 - DNA, 100 bp, Homo sapiens
gataattatccaaataaattgcaagcattctatccaaatggtggtcctggctctgccatatgacacccccgtgcccggctacatgaataacactgtcaac

SEQ ID NO: 466887 - DNA, 82 bp, Homo sapiens
cacaatgtcggggatggacctccagatttccttactggcaagataacccctgtgacagaaggctactgttgctgtaacaaag

SEQ ID NO: 466888 - DNA, 74 bp, Homo sapiens
tcctgcctcagcctcctaagtagctgggactacaggtatcacctcttctgggctcaagatggacaacaagaagc

SEQ ID NO: 466889 - DNA, 100 bp, Homo sapiens
gttcgttttattcagcggcagtggtgctttcccgaatctcagaatgccggggattcccgaagtcttccgttttctgagaatgtgagtgctgttcaaaaat

SEQ ID NO: 466890 - DNA, 100 bp, Homo sapiens
cggggacgcggaggccgaggacgcggaggacgcggctctgccaggtctggccgtgggcctgggcttcggggcactggcagaggtcgccaagaagagcctg

SEQ ID NO: 466891 - DNA, 85 bp, Homo sapiens
atgctatgaagattctgaagaaagaagtcattattgcaaagagaaagagatgacttgatgtctgcactagtttccgtaaggagca

SEQ ID NO: 466892 - DNA, 100 bp, Homo sapiens
aagactgtgggcgtggagccggcagccgacggcaaaggtgtcgtggtggtcattaagcggagatccggtgctggacgtcattgctcctccttatacctct

SEQ ID NO: 466893 - DNA, 80 bp, Homo sapiens
gaggtgcccacgcagctgcctggacaagtatttcaggacagccaggagggggcgcacatccgccgcgaaactgtgagcaa

SEQ ID NO: 466894 - DNA, 83 bp, Homo sapiens
ggaggtcctgccgtccatgcggaagatcgtcgccacctggatgctggagcatgatgccttcttctgtagagtgggcgctttgc

SEQ ID NO: 466895 - DNA, 82 bp, Homo sapiens
gcgcgggaggtgttcgagaacgaccccgagacggacggctgtcctcagcgaggggccgtgcacccgctcctgagcagcgcca

SEQ ID NO: 466896 - DNA, 100 bp, Homo sapiens
tgttgactttacaagaatatgaattcgaaaagcagttcaacgagaatgaagccatccaatggatgcaggaaaactgttccggctgaagcgctgtggtctg

SEQ ID NO: 466897 - DNA, 74 bp, Homo sapiens
agaaagatggcatcatttttgccctcaaaagaaatggcaggagcttcaggatggttcgtactaagacatggacc

SEQ ID NO: 466898 - DNA, 98 bp, Homo sapiens
ttcggctgtgtcaatgccattgaattctccaacaatggaggccagtggctggtctcagatggaccacacatccccgacctacatgcttgctaacttaa

SEQ ID NO: 466899 - DNA, 100 bp, Homo sapiens
cggacctgtgaggggatccgacttgccggcagaacttacgctgcgggaccccgggcactgttgctgctgcgggaggtggcccgggagagtggcccacccc

SEQ ID NO: 466900 - DNA, 100 bp, Homo sapiens
cgatttgaccaaatttctggaagaggggagagaccattctaacacaggtaccgtccagacagtgcctctgagaaagggaacctaaaggcgtgtttccgac

SEQ ID NO: 466901 - DNA, 82 bp, Homo sapiens
ctcgtcggcggcgccctgcaccgcgcctcgcaaaaggaaaggagcagtggcttccggttgaagccaccaacgctgatccacg

SEQ ID NO: 466902 - DNA, 75 bp, Homo sapiens
aatactactctgaggggcttagaaattaacaggatgatagtatttctgctgcaagtacttctgatgttcaagatc

SEQ ID NO: 466903 - DNA, 75 bp, Homo sapiens
catagactccggagtctgccggagattggtagagctgctgatgtgtggaggcacagttggtgctattttcacttg

SEQ ID NO: 466904 - DNA, 74 bp, Homo sapiens
tttggaggccggggccgcgctgagggcgcccagctgtcatcagtgagttctgcctcagtcagctcccaagtgag

SEQ ID NO: 466905 - DNA, 74 bp, Homo sapiens
agcgactgtgtctgtccaagaccacgcggaggactggaatgaaattgaccccattaaaaagaaagaccttcatc

SEQ ID NO: 466906 - DNA, 100 bp, Homo sapiens
ccctgcccctgccgaggcaggcgcccaccgccggcggtgatgcggctgtgaagccctagtcggagtatgctgctgctgttccgctttgcgtcctcgctac

SEQ ID NO: 466907 - DNA, 74 bp, Homo sapiens
cagtacctgcagaaggtctctggagacatcttcagcagtcacatcgatcagacaacaacatggcaggaccccag

SEQ ID NO: 466908 - DNA, 83 bp, Homo sapiens
gccgagccgtctcctgcagcggcccccgccggactccagcgggaggaagaagaggcctttgccagcagtcagagcagccaagg

SEQ ID NO: 466909 - DNA, 100 bp, Homo sapiens
agccgcagcgccgggcgaccccgcccgggcctcggtactatactggcaattgctggagaagattttgcaattgttgcttctgatactcgattgagtgaag

SEQ ID NO: 466910 - DNA, 89 bp, Homo sapiens
gaaggaacttggttccccctccctcagcttccgccccaaaaggattttttatcaagcagaaatgcatcgaacaacgagaatcaagatca

SEQ ID NO: 466911 - DNA, 95 bp, Homo sapiens
agcagccgccgccagagaggcccgcccaccagttcgcccgtccccctgccccgttcacaatcaacaggaacaggaccccacaaatttatacatct

SEQ ID NO: 466912 - DNA, 74 bp, Homo sapiens
aagttgatggagattacctttgggcttattgtgtaacagaacctggagcaggctctgatgtagctggtataaag

SEQ ID NO: 466913 - DNA, 85 bp, Homo sapiens
acggggcggccgggggctcagagatccaagtgcgcgccctggcgggtccggaccaagttttcattgctggcagaagccatatcac

SEQ ID NO: 466914 - DNA, 100 bp, Homo sapiens
agtaaataaagctcatggcccaccagctagaaaggggcgacctatctactgctcttgaggtcgccattgactgctatgaaaagtataaagtattaccaag

SEQ ID NO: 466915 - DNA, 96 bp, Homo sapiens
tgcagccgcaccacattggcgtggccgtcaaggagctggacctctacctggcctacttcgtgcgtgagcgaggtcccctcttgctgttggctgcac

SEQ ID NO: 466916 - DNA, 100 bp, Homo sapiens
gcttttggaataaaaagattcccaggatgtgagcaacacgggaccgaaggacagaataacgggctcccagattcacaagccccaccaagaggatcacccc

SEQ ID NO: 466917 - DNA, 75 bp, Homo sapiens
ccgccgtttccgcaaacagaatcgcgtttggctgtgctgaagctgaaacctatcaacactcttcaaaatgcaatg

SEQ ID NO: 466918 - DNA, 100 bp, Homo sapiens
gaaccaggacctggacccggacccaaagtgccatgtctttaatctggacccacaaaccgtggagaccaagaactggcacacggacgtgattgagatgaac

SEQ ID NO: 466919 - DNA, 90 bp, Homo sapiens
ggcctgcgtccgagtctccgccgctgcgggcccgctccgacgcggaaggccatcatgcagaagggggatacaaacataaagcccatcctc

SEQ ID NO: 466920 - DNA, 90 bp, Homo sapiens
ctatgatgctgatggtgatggagattttgatgtggatgatgccaaagttttattagccttgaaaagatcttttgaggtcgaggaggtcga

SEQ ID NO: 466921 - DNA, 75 bp, Homo sapiens
agaaacattggaaaagaaatcctgataagaactgctttgccactcgaccggatatgatcaggatcttgtcagcag

SEQ ID NO: 466922 - DNA, 75 bp, Homo sapiens
gcgttggggtgagaccctcacttcatccgcacccaactggtcagctaactttgatgtcccaatggaaacaaccca

SEQ ID NO: 466923 - DNA, 75 bp, Homo sapiens
cgcttcttccccactcccgagacagtctgaaccaatcagagtccttgtgactggagcagctggtcaaattgcata

SEQ ID NO: 466924 - DNA, 82 bp, Homo sapiens
gcaaaggccaatgttggtgctggcaaaaagcttaacaaacaacagttgcagttactgaaagaacggttccaggccttcctca

SEQ ID NO: 466925 - DNA, 96 bp, Homo sapiens
gtcggaggacccggttgccatggtgaaggaaaaagatcctgataacttaagtgactctctcttttccggtgatgaagaaaatgctgggactgagga

SEQ ID NO: 466926 - DNA, 98 bp, Homo sapiens
tgcagcgggagctggacggcgagcgcgagcggcgcgagaaaaccaaatacacgctgatcgatgagcaggacatcccgctggtggagagctactccttt

SEQ ID NO: 466927 - DNA, 82 bp, Homo sapiens
gctatgcagctatcgtggacgtcactggccctggtggggattgacagccacgggaagcttccccgggcgctgcctggacagg

SEQ ID NO: 466928 - DNA, 144 bp, Homo sapiens
aattattagaaattccgcgggcggtgtagaggcggcggacgggccggagggaggatgttaaagccccgcggacaggcgacactaacaggtgaagatctcgggagaccatgactaagaaaagaattgctgtgattgggggaggag

SEQ ID NO: 466929 - DNA, 75 bp, Homo sapiens
ctgcgcaccatcaagagagtccagttcggagtcctgagtccggatgaactggcaaaatttggtttctctaatatt

SEQ ID NO: 466930 - DNA, 100 bp, Homo sapiens
cggggcgctagcgttcgccttcagccaccatggggaatgggatgaacaaggccctgcatgtttttcttcgggaaggctgtgcagtctgctctgaggagac

SEQ ID NO: 466931 - DNA, 51 bp, Homo sapiens
cggcgaggccctcatgtaccacacgatatgtcttctccgactactatgaag

SEQ ID NO: 466932 - DNA, 74 bp, Homo sapiens
cttcgggagttgatctctaatgcttctgatagacgagttgtactgctgtcacaggaaatggacgctggattaca

SEQ ID NO: 466933 - DNA, 98 bp, Homo sapiens
caggaatcccaatttgcctccacttagtgagcggaagaatgatgagaaggaagagagtatcctgggcagcatccccctcctgagcttccgggtagccg

SEQ ID NO: 466934 - DNA, 97 bp, Homo sapiens
caagatgcggatccgggcctttccgaactgtcaagtaatccacctctggctaccatccttattcctcctcatgctcggattcaagcagctgcttcaa

SEQ ID NO: 466935 - DNA, 100 bp, Homo sapiens
cttcgattagctaataaccaactgcaattcctacctccagcatgtacagaagcatattcccaatctgatgagcaatatgcttgccatcttggttgccaga

SEQ ID NO: 466936 - DNA, 101 bp, Homo sapiens
cagatgagctgccctcggcgggcggcgacggcggcaaatctaagaaatttgaaacaatgtgatgagaaccattcatggggtgggagagatgatgacccaga

SEQ ID NO: 466937 - DNA, 100 bp, Homo sapiens
tctccttgcagctgcttagacgctggatttttttcgggtagtggaaaaccaggttaattggaaggcctgccgatggtcttcatcaggggtgattcctaat

SEQ ID NO: 466938 - DNA, 75 bp, Homo sapiens
catgggcaaaggacagatccaggacttggatgttgtgggtgatggtatgcagtgtcctccttcacctttgctttt

SEQ ID NO: 466939 - DNA, 50 bp, Homo sapiens
cccacacctccggaccgagggacgcgggcctgtaaattactctctgatga

SEQ ID NO: 466940 - DNA, 100 bp, Homo sapiens
agcagagttggaaagtgatccaccttacatggaaatgaagaacattgatgatggcacctcagatcgcccctacagccatgctctggtggctggaattgac

SEQ ID NO: 466941 - DNA, 83 bp, Homo sapiens
cccgcgagcacagagcctcgcctttgccgatccgccgcccgtccacacccgccgccaggcgcctgtgtctggcagagctggtg

SEQ ID NO: 466942 - DNA, 90 bp, Homo sapiens
agggaaaacactatcctctgagatcccagatcatgagcttttcagaagatggaaatgagacagttgagtccaaaccccaatgctgacagc

SEQ ID NO: 466943 - DNA, 100 bp, Homo sapiens
gagctgtggcagaagcttgtcagccaggtgtagaaggtgtgaatcccatgacacagtggagagactttgctaaagaagtggatgggttacttcgaattgg

SEQ ID NO: 466944 - DNA, 82 bp, Homo sapiens
gtgaggagatcgtggtctatgggatggtcagcgacagctactgcagggggatatgagactttctactcggaatatcctgagt

SEQ ID NO: 466945 - DNA, 101 bp, Homo sapiens
ctcatccacgatggcctagcacgtggaattcgcgaagctgccaaagccttagacaacccgaccctgcccgccctggactggcagctgccgtcccactcagg

SEQ ID NO: 466946 - DNA, 83 bp, Homo sapiens
ggtgagatggcagtgtgtgcaaaaaagcgccccccaggcggaaggtgctctaccagcgtgcacccaggaatatccaccgccat

SEQ ID NO: 466947 - DNA, 106 bp, Homo sapiens
ctcacatccgggggctgatgtgcttggagcatgaggatgagaagctggtttggctggggttgaacgtcttcctctttgtctggtattaccgggtttatgatattcc

SEQ ID NO: 466948 - DNA, 101 bp, Homo sapiens
ggcgcagccaccccgcgggatacgcctcagcgcgggggaaatttgcagtggtgagaaaatgtataaagaaagattctgggaaagaatttgctgcaaagttc

SEQ ID NO: 466949 - DNA, 100 bp, Homo sapiens
gaccggctgagcccccatcattgggagaaatccccactcctccaagaaccaacccccaaattggctgggacagcattgcagtgtcgagatggctatgaac

SEQ ID NO: 466950 - DNA, 117 bp, Homo sapiens
tctcacctgggttttcttagccctctacttttcaagacaccaagtgagaggccaaccagacaatgcagatcttcgtgaagactctgactggtaagaccatcaccctcgaggttgagc

SEQ ID NO: 466951 - DNA, 90 bp, Homo sapiens
gaatgccacagttcagtgtattcgttctgtgcctgaactcaaagatgcccttaaaagggtgataaaagaaaatgtggctgaagttacccg

SEQ ID NO: 466952 - DNA, 75 bp, Homo sapiens
cgggactgcggcggcgccggcctccggggagaaacgtactatactggcaattgctggagaagattttgcaattgt

SEQ ID NO: 466953 - DNA, 100 bp, Homo sapiens
cgcctcagtgtcatggaggaggaccaggcctgtgccatggagagccggcgctttgctgtccagaacagccctaagggttgccaccgggacaagaggaccc

SEQ ID NO: 466954 - DNA, 75 bp, Homo sapiens
tgcacattgtgccagcgtctacaagcactcctgggaatcttgtacgaagacaaggagagacaggacttcatcttc

SEQ ID NO: 466955 - DNA, 90 bp, Homo sapiens
ctgctgctgctcgtcgctgccccggggtccacgcaggcccaggccgccccgttccccgagctgtgcagatggagtctcgctctgtcgccc

SEQ ID NO: 466956 - DNA, 75 bp, Homo sapiens
cgcacctcccgcatggcccctccggccagggacacggccaacacggtgaaggaaaagttcgggaggaagctttat

SEQ ID NO: 466957 - DNA, 87 bp, Homo sapiens
ggctggagaagagtaaggggaccctggactttggtgctgacgcagaaaacgccaggtcttcaagggtgtctgccaccaccatgcctg

SEQ ID NO: 466958 - DNA, 100 bp, Homo sapiens
ggcgagaggtgcggcgaaggaggcagaggcacttatgcttgtcagaattgagcccctgagtcctgagttggtggcagctgcatctgctgtggcagattct

SEQ ID NO: 466959 - DNA, 74 bp, Homo sapiens
tttttctcaacctaacagtacaaaagtccagagggtgatggtgaggtagtagaacaggtaattgggcagcaaac

SEQ ID NO: 466960 - DNA, 100 bp, Homo sapiens
acaaagttcggggttctgctttgatcctgcagcttgctcgaaatcctgataacttggaagaactactattgaatggtcacacatcccgggtcctgagtct

SEQ ID NO: 466961 - DNA, 98 bp, Homo sapiens
acaacctgttacgagttctaccttttgagctgggaaaactgtttcagttgcagactttaggcctgaaagttgaggagctcaagcttgggaaaatggtg

SEQ ID NO: 466962 - DNA, 87 bp, Homo sapiens
tcatctttacagaggaatagtctacaaaggaagacttgtaacctggagaagaggatgttcacggaagaccagggtgtagatgacagg

SEQ ID NO: 466963 - DNA, 80 bp, Homo sapiens
accgactccaagctgaacttccggaaggcggtgatccagctcaccaccaagacgcagacaatgcagatcttcgtgaagac

SEQ ID NO: 466964 - DNA, 90 bp, Homo sapiens
agcagatttacaaactggccaagaagggccttactccttcacagatcggctctgcttgaccccctcataggcctgctgtgttctgttgcc

SEQ ID NO: 466965 - DNA, 83 bp, Homo sapiens
cagcttttcagaactgcagggaaacagccatcatgagcagctggcttgaggacacccctggcagtgcccggcccatatcctgc

SEQ ID NO: 466966 - DNA, 74 bp, Homo sapiens
acctggatggaggatgctgacagtgagctctttgttcaatgcctagccacctattcctacagacacggcagtgg

SEQ ID NO: 466967 - DNA, 122 bp, Homo sapiens
attatgtctcggatcgaatccctcacgcgggcgcggatcgaccggagcagagagctggcgagcaaggtgctggagaatctggtaaaagcaccattgtgaagcagatgaggatcctgcatgtt

SEQ ID NO: 466968 - DNA, 99 bp, Homo sapiens
ctgagccagtccctagggctcagggagcaggagcttcaggttgtccgagcatctgggaatggaatgcagtagccctctgggcctgggatattgtggttg

SEQ ID NO: 466969 - DNA, 51 bp, Homo sapiens
tcgcagtccccgcgcgtggtcatccagtcattgcacgtgcagaagagcgac

SEQ ID NO: 466970 - DNA, 98 bp, Homo sapiens
acatccccgggaatgctgccgtggtgaagcatgaagtcacagggctactgttttccaatcctcaggtgaaagaacttgtcctggacaacagtcggtcg

SEQ ID NO: 466971 - DNA, 75 bp, Homo sapiens
tggctgaggtcttggtcaccggggaacagctacggagctatgaagacatgattggtgaggaggtgccatcggatc

SEQ ID NO: 466972 - DNA, 111 bp, Homo sapiens
tttagataaactcaacatcgacagcattatccaacggctgctggaaggtatcacagatgtcgtaagaatctgaatcctccaaaagacagatgatgcggaggttcctggggg

SEQ ID NO: 466973 - DNA, 75 bp, Homo sapiens
ctggtggtgaagtttggtgagactcttccaaagagtaacacagcatctggtggaatgacacgacgaaatacttat

SEQ ID NO: 466974 - DNA, 90 bp, Homo sapiens
acggcagtgcttggccctgcccgacgagccacatatggatcagaaactttcgaagttggtagaagagctcacaacttcaggagaaccccg

SEQ ID NO: 466975 - DNA, 75 bp, Homo sapiens
gcccgacgaaaggatgccaaattgatgaacggcagcagccactcaccaacagccatcaatggtgcaccgtgcaca

SEQ ID NO: 466976 - DNA, 50 bp, Homo sapiens
agaataccttgtctcagctgctgaagctgcacctggaaatggagatggtg

SEQ ID NO: 466977 - DNA, 82 bp, Homo sapiens
gaccgggaaggagcatcccaggacctaccagaatctggatgaccgagtgggagacagcagcaccagcggtggcagagacccc

SEQ ID NO: 466978 - DNA, 117 bp, Homo sapiens
cagaagttgggctaattgaacaagtattgctgaaaatgagtgctgtagatgacatgatagcagcttctccaaacaggctggtgtacagggagcaacaccggagctggtgcacgctgg

SEQ ID NO: 466979 - DNA, 101 bp, Homo sapiens
gcgggtttccaccccggcgggagctgtcaggttggctccgcagctccaaacgagaatggaagccgctggaggaccgtagctgcacagacataccatggctg

SEQ ID NO: 466980 - DNA, 74 bp, Homo sapiens
gtgacctcaccgcctcggttcgccctcagccgccccggaggcaacgcacgggccacaggcatgttcctgcagta

SEQ ID NO: 466981 - DNA, 75 bp, Homo sapiens
aagaaatcaaaataaaggaaacacatttcatatactgcaggtgctgctagctgaggaggggatagctcctctttc

SEQ ID NO: 466982 - DNA, 89 bp, Homo sapiens
cattaacactcaagcctttctacatgagggataatgaagatggccctcagcacacggtgctggtctcagtgtcagtgataatgaatctg

SEQ ID NO: 466983 - DNA, 100 bp, Homo sapiens
actctcccgccgcccaaccctccaaaggagcatttctaccagaggcagcaccggctgcccgagccctcctgcccacagctggccacactcaccagccagt

SEQ ID NO: 466984 - DNA, 74 bp, Homo sapiens
gaacaacaaggtgttgatgccgccggacggatgcctttgtggaactgtacggccccagcatgcggcctctgttt

SEQ ID NO: 466985 - DNA, 100 bp, Homo sapiens
caccgatgtctgggattactgcacggggtcgcgccgtggcggagcagaaggccagaaatgctcacatcaggatccgattgagagctctgactcctatggt

SEQ ID NO: 466986 - DNA, 141 bp, Homo sapiens
gcactctggcgggcataccagcgggccctggccgctcacccgtggaaagtacaggtcctgacagctggaagccctcctatgacactgaaacagatcctagtgagggattgatgaatgttctaaagaaaatttatgaagatg

SEQ ID NO: 466987 - DNA, 100 bp, Homo sapiens
ctcattgtttctgcgtggtataataagtgattcgcctttgccagtctcatctcgtgtctgctttgttaagttccatgatccagactcagcagttgtggca

SEQ ID NO: 466988 - DNA, 112 bp, Homo sapiens
tgcatttgtgtatgaagctcaagatgtggggagtggcagagagtatgcattaaagtctctgctttctatccgtcaagatgataaagtcgtgtgcccgagaaccaaagaagtc

SEQ ID NO: 466989 - DNA, 74 bp, Homo sapiens
tacaactccctcaaggactgcctttcctggacagtcattttgtttactcattcagccctgttgcaggtcccaat

SEQ ID NO: 466990 - DNA, 73 bp, Homo sapiens
cgagcagtctcaggcctttagtgatgatggaaatacaactggagcacgcaaagcaagcctttgtgcaacggga

SEQ ID NO: 466991 - DNA, 123 bp, Homo sapiens
gggaagagctgatgagaatgctggcggaggacgagctccgggatgctgtactccttgtctttgcaaacaaacagggtagaagagcagaggatggctctgtcattgattatgaactgattgacc

SEQ ID NO: 466992 - DNA, 75 bp, Homo sapiens
gaagctcattaagagcttggaggcggcccgcgggagaagctaaaacttacttatgaggaaaagtgtgaaattgag

SEQ ID NO: 466993 - DNA, 100 bp, Homo sapiens
caggaacagggcagacgttagcgtgagtgatcactctcaatcccgggtctacttccccagcaggacagcatcattctcctatatcttctagacatcactc

SEQ ID NO: 466994 - DNA, 74 bp, Homo sapiens
acagagagaaaattgagacggagctaagagatatctgcaatgatgtactggttgttcggaatcctataattgaa

SEQ ID NO: 466995 - DNA, 82 bp, Homo sapiens
cctcagccaccctgaccactatcatcaccatggaaaaagtgacttgagcaggaacaagcacatcatgattgacttggggact

SEQ ID NO: 466996 - DNA, 82 bp, Homo sapiens
cgtggaggagctgtgcagccgcgaggaggcgcgggaggtgttcgagaacgaccccgagacgcccgtggaccgggagcccgtg

SEQ ID NO: 466997 - DNA, 101 bp, Homo sapiens
cagaagttgactgagatcagaggccctgtgatgatcgtgtcaggtgaaagaactcttttcttctttgggagtcgaatgtaatgtcttggaacttgatcaag

SEQ ID NO: 466998 - DNA, 88 bp, Homo sapiens
tggaagctgggaaacccacaggaggcaaccacactagtttagatttgtgacattatttccaaatgggaacaggcttccaaagaacagc

SEQ ID NO: 466999 - DNA, 75 bp, Homo sapiens
tcaggactcattattttaacatttgggagaaacacagccagaagatacagcagcacgtctttcctatcagaatga

SEQ ID NO: 467000 - DNA, 50 bp, Homo sapiens
gggagagcaaacttggctcagcccatgctgggctttgacaaacttcctct

SEQ ID NO: 467001 - DNA, 100 bp, Homo sapiens
ctcgaactcctgggctgaagcaatcttcctgccttggcctcccagagggttggaattgcagatgtgagcttatcaagcaaccggttgtctcaccccagct

SEQ ID NO: 467002 - DNA, 83 bp, Homo sapiens
acggcgacagtggcggcggcgccatggcagggcttgcaggctgaccccgcactacatctacccaccagccatcgtgcagccca

SEQ ID NO: 467003 - DNA, 75 bp, Homo sapiens
cttccaacaagatgtgggcacaaaaactaccattcgcctgatgaactctcagaagaccctctacactcaggatgc

SEQ ID NO: 467004 - DNA, 100 bp, Homo sapiens
ccgaaacgccgccgcggagccgaggcggagccgctgtcctcgtccccagcggtcccgcccaacgcccgactctgtaccagcgtggctgccgatctttggc

SEQ ID NO: 467005 - DNA, 51 bp, Homo sapiens
aagagctgtcttgccacagacccgccccaggagatgggcactgagaaagtg

SEQ ID NO: 467006 - DNA, 88 bp, Homo sapiens
cagctggcggacaggtgcttctccagggctgggagcgtctactgcaaggaggacttcttcaacctctgcctgtgagtttctggatatt

SEQ ID NO: 467007 - DNA, 83 bp, Homo sapiens
catggctgtgctggaggaaattcaacaggagctgatcaaccaagatgatcaagttccagatgatcctcagtgagggataccat

SEQ ID NO: 467008 - DNA, 51 bp, Homo sapiens
gctggcaaattcagtgcagatcagggaaggacaccactggtaccagctgcg

SEQ ID NO: 467009 - DNA, 100 bp, Homo sapiens
atgacctatctgacaagagcatcaaccctctgtcctgacacagctctccctgaggagcagccacattccagctcccagtgcgcccctctccactgtctct

SEQ ID NO: 467010 - DNA, 82 bp, Homo sapiens
tcttcggtggactccttcggcagtccacccaccgccgccgcctcccagaacgtgctggccaaagcgctctatgacaatgtgg

SEQ ID NO: 467011 - DNA, 101 bp, Homo sapiens
cattctggaaccgggaaggtacacccaggcatgacaatagcttctctcctcacagaaatttaactgaccaggtgataggtttgatcgagacagaccgttga

SEQ ID NO: 467012 - DNA, 100 bp, Homo sapiens
agggacaaccaatgggaaactatggtcccagaccaaatatgagtatgcagccaaaccaagatgggaatttcttagccataggctcacatgacaactgcat

SEQ ID NO: 467013 - DNA, 82 bp, Homo sapiens
ggcggtggcggctgcggcaacagcggggccgtaagactttgaccccgacgcaggcttcagtgattgccgcggatcagaagcc

SEQ ID NO: 467014 - DNA, 50 bp, Homo sapiens
cagaaatattttttcagccatcacaagggccgcgatgggcctcttggaac

SEQ ID NO: 467015 - DNA, 100 bp, Homo sapiens
ggacctgtgcagggcagagcaggaggccccccgagggaatcatcgcagaagagaacaagaacctgcagccccagggagacgaggaccccgggaagttcaa

SEQ ID NO: 467016 - DNA, 83 bp, Homo sapiens
aaatgatgtattttgtgatcgcagcgatgaaagatgatatcatcaagttgaatcgaaaggaagggaagaagcagaattttcca

SEQ ID NO: 467017 - DNA, 88 bp, Homo sapiens
caccccgacgcctcagcccaagggtgaaaatcctatttataagagtgccgtaacaactgtggtcaatccgaagtatgagggaaaatga

SEQ ID NO: 467018 - DNA, 100 bp, Homo sapiens
cagaggaaccacacgctgatcatgtggaagcatcagttcacagcagtaatgcacactgtacagataagacaattgaagctgctgaagccctgcttcatat

SEQ ID NO: 467019 - DNA, 100 bp, Homo sapiens
acaagacaagggtcctaaaacaggatcagtaaagaaggaaaaagcagtaaagccagaggaaggtttacccaaggtccagcctagcccctaggcaccatgt

SEQ ID NO: 467020 - DNA, 101 bp, Homo sapiens
gaagacttatgaacgccttgttgcccagttccccagttctggcagattctggaaactgtacattgaagcagaggggtcgggccccggctcagtggtcccag

SEQ ID NO: 467021 - DNA, 90 bp, Homo sapiens
cgctgactttgtaggctccgccaagaggcgccgcaggagttttcggctttgtgagaaaccttaccatcaaacacgatggccagcaacgtt

SEQ ID NO: 467022 - DNA, 75 bp, Homo sapiens
tgctcaaggacacggtctacaccgacttcgacgatctctgttgaggagctggcgcggaatctggtcatcaaggtc

SEQ ID NO: 467023 - DNA, 100 bp, Homo sapiens
ctctagatgggcacgaatgccattggcaggcaatggggcagactccatggaaagatgcttctcttcctcaagcgccagcagccctgtggtggcgacgacg

SEQ ID NO: 467024 - DNA, 106 bp, Homo sapiens
cagactgtggcgcaactggtcttggtagcggaggcacccgaatgctgcccgggtgaggaatactcccccagttgcaagaggcgcaggaccgtggaagacttcaaca

SEQ ID NO: 467025 - DNA, 75 bp, Homo sapiens
agaggtcgtggaggtggccgtggaggcagaggtggcatggggctttcttcgagagtcacccagctccttcagctg

SEQ ID NO: 467026 - DNA, 83 bp, Homo sapiens
cgccggctcccaccccggcccgaccccgacccggcccggtcaggccccatactcaggactgagcagggggaggaacatttaag

SEQ ID NO: 467027 - DNA, 75 bp, Homo sapiens
accgcagtgggataaatctcaaagatctcgtacaagatccttctttatgaagaaactgaggttcagagaggttaa

SEQ ID NO: 467028 - DNA, 75 bp, Homo sapiens
aggaacatggggaagccagcccagcctggaaacattggcaaatttggagcgacagatctatgcttttgagggaag

SEQ ID NO: 467029 - DNA, 80 bp, Homo sapiens
ccagcccgggtccccgcgttcacagccccagcgcagatcaggatcctcatgaccagccaaagagaagaagaattaggaag

SEQ ID NO: 467030 - DNA, 83 bp, Homo sapiens
atcgtggtggaggcggcctctctggcagcagacatcagccacgcatctgaccttgttggtgtcgtgaaaactacccctaaaag

SEQ ID NO: 467031 - DNA, 100 bp, Homo sapiens
ggggtcccgaagccccctgcaggaactctacaacccaatccaggttcagtaccttgaaatagttccagaaaccagaaggtaccctgtggcagtagccgct

SEQ ID NO: 467032 - DNA, 82 bp, Homo sapiens
ccgcaaacacgcgcagaccttcgttgccctctgtgccacagtggacatcctcatcatggatgatgacgacgtccccagctgg

SEQ ID NO: 467033 - DNA, 90 bp, Homo sapiens
ggaagagaagagggtggctaatgattaaggttacaagatgttcacctaagattgagacctagtgactacatttcctacgggaacaaataa

SEQ ID NO: 467034 - DNA, 98 bp, Homo sapiens
gggccctccagtgggggccatgcttcccagagcggagacaacagcagtgagcaagcatgcagtgacctggagttcagggaagtggcaaacagattgcg

SEQ ID NO: 467035 - DNA, 82 bp, Homo sapiens
cccagcccggggctacctcctcggtcctggacaccatctgcactctgtcagccagctgcggttggatttctcacgatgtcca

SEQ ID NO: 467036 - DNA, 100 bp, Homo sapiens
ttgttcccccaaatgtctgactctgactctcggactgagaaacgcaagatcaggatcctcatgaccagccaaagagaagaagaattaggaagcataaatc

SEQ ID NO: 467037 - DNA, 100 bp, Homo sapiens
cgagccatcacctcgctgcgggccaacggtgtggagatcaaccgtgagcagtggatccaggctgaccccgcactacatctacccaccagccatcgtgcag

SEQ ID NO: 467038 - DNA, 108 bp, Homo sapiens
atgcacgtgatactcacacagtggcttctgctcaccaacagatgaagacagatgcaccaacgagatgtcatctgggtgattctcagtgtggaggtgggtggactttta

SEQ ID NO: 467039 - DNA, 98 bp, Homo sapiens
tgtgcattgttggtgggattctgctcgtgttccaaatcatcgcctttctggtgggaggcttgattgaaagggctattgcaagacacgaagtccgagaa

SEQ ID NO: 467040 - DNA, 132 bp, Homo sapiens
aacggcgacctcaagaagcagctccacgaaaggcagccgcggatcgccgcgctcagcgacaaacaagaattgtcttagaagaaagaaggcaagccaccattttacccacgtaaatatatgaatatatttctg

SEQ ID NO: 467041 - DNA, 75 bp, Homo sapiens
cacctgtgcgggatggaacaaaaggtggatccataaagaacccagccaacccgcagagggaggggaggggctgag

SEQ ID NO: 467042 - DNA, 50 bp, Homo sapiens
tcatgtaagaatggagggtgttcaaaggctaccggctctctgaccagttc

SEQ ID NO: 467043 - DNA, 50 bp, Homo sapiens
aaatgccatcaaggggccaagcagatggaatttcactcttgttgcccagg

SEQ ID NO: 467044 - DNA, 83 bp, Homo sapiens
tctcccacccaatggagatggctctaatggctggtcgtctgatgataaggaaattagttgcagagaaattgaatatcccttgg

SEQ ID NO: 467045 - DNA, 100 bp, Homo sapiens
aagaagatggcgggatcagtggccgacagcgatgccgtggtggctctgacgcccgctctgcggcttcggtgtttgaacaggccacagtccaggagcgctt

SEQ ID NO: 467046 - DNA, 138 bp, Homo sapiens
agcaaacgtctacactgtacatgctttttattacaagactacggagcataggaggaaaattcatcatctgaactatcattgagtggtcagagtcccatgatagaggctatggaaagtttcagactgctagaatggaag

SEQ ID NO: 467047 - DNA, 50 bp, Homo sapiens
tggagacttcataatttttctaggaaagctcgatgcattctatttctcat

SEQ ID NO: 467048 - DNA, 97 bp, Homo sapiens
ttgttggattgccaaatgttggatgagtgaccgaggaggtggcgttcctttgaggaaaattgacagacttttcaactacatgtattcaactgcacca

SEQ ID NO: 467049 - DNA, 101 bp, Homo sapiens
tatctcccccatctcattgccacggctgaaccctccttctcaatcttggaacagcacccccttctttaagtgaaatccggcccaactccaccgtgcagtgg

SEQ ID NO: 467050 - DNA, 98 bp, Homo sapiens
gcagggggtgctcacagctttgaaactgccatgatggagtccacgtttccacagcagaaggaatccaaatgagactcagaacaatagcacaagctggc

SEQ ID NO: 467051 - DNA, 100 bp, Homo sapiens
aacagaagagaaacctgatggccttatcaatgaagctactagacagcaactctggaaagtggcttctaactcggcgcattttcttagtggatgcagtaag

SEQ ID NO: 467052 - DNA, 97 bp, Homo sapiens
atcgacgtcgtgatccagaagtccagagctgaggactgcctgtttgcaggtacatgtcccagagcaagcacacggaggcccgggagctcatgtactc

SEQ ID NO: 467053 - DNA, 98 bp, Homo sapiens
gcggatctcatatcttcacttggcaaactcaacaagagtttattaaccacttaacctctcagaactgaacaaagacaacattgttcctggaacgccct

SEQ ID NO: 467054 - DNA, 75 bp, Homo sapiens
tgaaggacttcctccccagcctttgggcttctatccgcagagaggtctataagaaggagaaagctcgagtcatca

SEQ ID NO: 467055 - DNA, 98 bp, Homo sapiens
ggtcagtgcgcacgttgtaatcagctgaggccatgtcaggagacggagccacggagcaggttatgggtgctacatgtgtgctttcagagcagtagtgt

SEQ ID NO: 467056 - DNA, 97 bp, Homo sapiens
ccaggcagcatcctggcgcccctcaccaaagccacagcagcagaaagtagtgacgggagcatcaagataaaatggaccagttgctacagatgctgca

SEQ ID NO: 467057 - DNA, 75 bp, Homo sapiens
ctaaaaacaaagagttatatgaaatcaatcctccagttagcatggcctcattgaaagaactagatcaaagactct

SEQ ID NO: 467058 - DNA, 75 bp, Homo sapiens
acaactgtccacgtaggcattcaccccagcaagatccagcaatttatccaagaccggtcggacatctgggcagag

SEQ ID NO: 467059 - DNA, 90 bp, Homo sapiens
ccggagtgtgaaggagtttgagaagctgaaccgcattggagagggtacctacggcattgtgtgttgctccttgagggcaggacagttctt

SEQ ID NO: 467060 - DNA, 130 bp, Homo sapiens
tggacctccaaggaagccacgtgcagacatctacaaccttcgatctcctgacgactatcatgagaagtttttctctcctacaagaagccataatcccctacatccctactctcatcactcagcttacaca

SEQ ID NO: 467061 - DNA, 75 bp, Homo sapiens
aggctcttgcgggatggcctgtttcgttccccagtgaggacacagcattgttggttttgccatgtactattttac

SEQ ID NO: 467062 - DNA, 82 bp, Homo sapiens
cgggagctgggcggccatttaccaggtgtggaccaattagtggtgactgcaggtccagcagcagcttccgacagctcccctc

SEQ ID NO: 467063 - DNA, 82 bp, Homo sapiens
caccaacaacaccacaataatccacagccaagagggagaaccgaagattacaggaggccagcatgaggttggaacaagagaa

SEQ ID NO: 467064 - DNA, 100 bp, Homo sapiens
gacaccgagcttcagcaagctctctccaacgcagcgtcaccctttacaccagaaagctggcgggcactatggggaaaaaacaaaacaagaagaaagtgga

SEQ ID NO: 467065 - DNA, 83 bp, Homo sapiens
ctgcggagctgcttcgccgctgcgagctgagctcaatgtgcagcaatggatgacgacagcctggatgagcttgtggcccggag

SEQ ID NO: 467066 - DNA, 100 bp, Homo sapiens
ctgcggatggcagtgaaggagctggagactgtgttggctgatgaaccgggactactgggtcctaaggaattacatgaatgacagtcttcgaaccaatgtg

SEQ ID NO: 467067 - DNA, 97 bp, Homo sapiens
gacggccgggagggctgcctccccgtccagaagcctgtaggaaagcggaagcggcctggcaggggaaggatcgagctgcctgtggaggaaccgattg

SEQ ID NO: 467068 - DNA, 75 bp, Homo sapiens
cgcatccccgcggacgccacagcgctggagtgcatccgccccaacccttttccccctcgtctcctgtgagaattc

SEQ ID NO: 467069 - DNA, 50 bp, Homo sapiens
gtcgggaaggtcactgaacctattagtgggatggtttggccatgaactca

SEQ ID NO: 467070 - DNA, 75 bp, Homo sapiens
gatcctaatgaggacattgtggagagaaacatccgaattatgatagaatcacttgaattcctggatgaaatggag

SEQ ID NO: 467071 - DNA, 75 bp, Homo sapiens
atctggagaactgtggaagcctgtcccgttgtcagagtggaaggcacagaaaactgaatctgtagataacgaggg

SEQ ID NO: 467072 - DNA, 97 bp, Homo sapiens
gtatgctgctgcagatgggaccctggaaacgtctccagatgtggtgatggctctactaccggtgaatcacaagcctttgagaacagcctgagccttc

SEQ ID NO: 467073 - DNA, 100 bp, Homo sapiens
gccagctcgggggtgaagctggaggtgaacgagaggatccggaagtccacctacctgcgtctgcagctcctggccaaggaggagtacaagctgagcctgc

SEQ ID NO: 467074 - DNA, 74 bp, Homo sapiens
gcagattttggggtagcaggtcaacttacaatcaatgagctgagcaatgttcctgttcctgtcatgctaatgcc

SEQ ID NO: 467075 - DNA, 98 bp, Homo sapiens
agggcatcgaggacccccaggcactcctggagggtgtgaaggtgaaaggtgtagcagtcactcggcctacacccacagcatcgaccttgtgaacccag

SEQ ID NO: 467076 - DNA, 82 bp, Homo sapiens
tgaagggaggcaaggaggcggactgagcgctcccaattggggtcgcaatggaagaagagatcgccgcgctggtcattgacaa

SEQ ID NO: 467077 - DNA, 74 bp, Homo sapiens
cgtgagccaccgcacccggccgccaagaagacgctggagggaggctgttaggagggactctgagcttcacacct

SEQ ID NO: 467078 - DNA, 100 bp, Homo sapiens
gaggaagccgactgctgcctggtctgcaaagaagtcctttcaagtctctaggactggactcttcctaagcaagtccggtgcagtagacattgttgcaatc

SEQ ID NO: 467079 - DNA, 100 bp, Homo sapiens
tgggatcctacgtgcatgaagatggacgaggtcctgtacagcatcgccgagaagcaatgtctcaggctgtgcagacaaacggaactcaaccattaagcaa

SEQ ID NO: 467080 - DNA, 100 bp, Homo sapiens
tgcatcccagacccccgatgtcgtgttcgcaagcatcctagcagccttctccaaagccacatgaggaagttaagtcttcagagcctactgaggatgtgga

SEQ ID NO: 467081 - DNA, 100 bp, Homo sapiens
cagcaagcggcgtggacgaccgttgctgagctggtgtggaacgtctgtgatcaggttccttgcattgactccatggagagtatatcacctgatttccgtc

SEQ ID NO: 467082 - DNA, 98 bp, Homo sapiens
atttagcatcaggcaaaggaagcaccgcacatttttcagatatttgttcagtcgaatcaaggtgaagaggaaacaacaagaatttcatattttacttt

SEQ ID NO: 467083 - DNA, 99 bp, Homo sapiens
ggaaggatggcctctggacatccgagtgggtgaccaagaatatggcccaggtgaccaaagccctggacaaggccctgagcaccatggacctgcagaagg

SEQ ID NO: 467084 - DNA, 100 bp, Homo sapiens
caggaacagaaatttttatgaactgagccctcacatagttgaacaatgaccatagttgacaaagcttctgaatcttcagacccatcagcctatcagaatc

SEQ ID NO: 467085 - DNA, 100 bp, Homo sapiens
aaacggggtgaggtcacattcggttatctctaacgttggaaaacggctgttcacggaagaccaggatgtagatgagggacttgtctatgacactgtattc

SEQ ID NO: 467086 - DNA, 83 bp, Homo sapiens
gacatgttgataaaaaatgatggcacttccgttccggcgcccctccggtcatcaacccgctgggcaccagcttcccggacgac

SEQ ID NO: 467087 - DNA, 102 bp, Homo sapiens
cgactgtgacgaggacgaggaggcagccacggggcccctgggttttaaaatcaaagatgggaaaatcggagaaaattgcccttccccatggccagcttgttc

SEQ ID NO: 467088 - DNA, 96 bp, Homo sapiens
ggagcttgacccgtccatcgctgtggtatcgagaaccttccctgcgaacttcagaggaacttccagctgatgcgagagctggaccagaggacggaa

SEQ ID NO: 467089 - DNA, 100 bp, Homo sapiens
agcattcaagggatggtgaaatggatgatagtcgagatggcttgttcaatcagtatatcagtcaacaggaatataagccacgatggagtcaaatcattcc

SEQ ID NO: 467090 - DNA, 87 bp, Homo sapiens
gagcagatttacaaactggccaagaagggccttactccttcacagatcgggggtcctggtcttcatgatccttgtgagcgagaccca

SEQ ID NO: 467091 - DNA, 82 bp, Homo sapiens
cctccacaccccccgccgcagcagcaccggcgacagaggccgagcatggttatgcgtccctgtgcccgcatcgcagtccagg

SEQ ID NO: 467092 - DNA, 98 bp, Homo sapiens
cgcttatctttatctgtggcatgcaactgataccatgtttgtgtggaagtgccccgtgtttgctatgccgatgctgtcctagtggaaacaactccact

SEQ ID NO: 467093 - DNA, 87 bp, Homo sapiens
ggagtgatgtctgtggggccgccggcggcccggcttcagatggactcaccctgtcacccaggttggactgcactggcctcaacctcc

SEQ ID NO: 467094 - DNA, 80 bp, Homo sapiens
tcagcagttggcacacatggttaaggaacaggaggaaaccattcagagatacgtcggtaacctttccagagatgtgacag

SEQ ID NO: 467095 - DNA, 100 bp, Homo sapiens
cggcaacgtcaccttgacggcagtgctgttccctcgtcacaccaatgccagtgctcgagacaacaccatcaacctgatccacacgttccgggactacctg

SEQ ID NO: 467096 - DNA, 75 bp, Homo sapiens
cagcctcaggcctgcacggacggtgttggttgggggcagctgcaatgactctccgcacggtattattgtcattgc

SEQ ID NO: 467097 - DNA, 82 bp, Homo sapiens
tagccttttctctgccttgcttgcttgagcttcagcggaattcgaaatgacctgcctagagctggaacgttacctccagagc

SEQ ID NO: 467098 - DNA, 101 bp, Homo sapiens
atcagtgcattaattgttcttttcactttctaggctggagtaaaagggacattgggaagattagttggaatttttgaggtccaaactgaatccagagattt

SEQ ID NO: 467099 - DNA, 83 bp, Homo sapiens
gtcccgaccctggccgccccgagcggagcctggaggagggagccatggatttgctgcgggagctgaaggccatgcctatcacg

SEQ ID NO: 467100 - DNA, 90 bp, Homo sapiens
tgctatggctggagattttgtgaatatggtggaaaaaggaatcattgacccaacaaaggtggttgtgtcaaaccgattggtgacatctcc

SEQ ID NO: 467101 - DNA, 83 bp, Homo sapiens
ccccaacaccgccagcgcccaccctggctcaccgtgcggatctgcctccgcagaaggtgagaagccctaccactgcaactggg

SEQ ID NO: 467102 - DNA, 100 bp, Homo sapiens
ccacgtaaaggaaatctctccaaccaggaacaaacacctgccttgcaatattagattgggctaatggatactacagacaacagagaaaacttgttgaaga

SEQ ID NO: 467103 - DNA, 89 bp, Homo sapiens
cgcctccgaagatgggggatttctacgacccggagcacccgacccctgagacaaggaagatggggagccaaagaccaagcatctcagag

SEQ ID NO: 467104 - DNA, 100 bp, Homo sapiens
acttggcaggcttcgaagagctacagaatatgctccaaagaagaggtctctaattaacagaagatggcaaagcccagccacagcagctatgtccttcagc

SEQ ID NO: 467105 - DNA, 100 bp, Homo sapiens
ggcgaagtcatgatgtattctcccatctgtctcactcaggtgaaaggtgtagcagtcactcggcctacacccacagcatcgaccttgtgaacccagcgac

SEQ ID NO: 467106 - DNA, 100 bp, Homo sapiens
ctggccaaagcctgcccagacggctcacctgtgcgggatggaacaaaagggtctgggggtggtggcatctcccctaaaggaagtggtccctctgtggcaa

SEQ ID NO: 467107 - DNA, 80 bp, Homo sapiens
ctccctctgcccccccttccccacgcaaccccagatccatttacactttacagatttttagactctgaggagcagttgga

SEQ ID NO: 467108 - DNA, 100 bp, Homo sapiens
cttttaaatacttaagagaagaagttaaaacatttcagggcaagccaattatggccataggaaaaggatacagagtagagtttcatgaacctgaaacttg

SEQ ID NO: 467109 - DNA, 100 bp, Homo sapiens
aaaggtggaagggtcacttgacccagggagttgaaggctgcagtgagccctgtttttgccaccacactccagcctgggtatctctcctaaatgtgtgatc

SEQ ID NO: 467110 - DNA, 90 bp, Homo sapiens
cttttgatcaccattggctgggaaggaaaaacagaatcagctgttccctgcgaaagcttactttgcaaagaaggaagatggttgtttccg

SEQ ID NO: 467111 - DNA, 100 bp, Homo sapiens
gcgctgtcccccagcagaggtgtccctggatacaggcccgtgtatttaatgaaactcccatcaaccctcggaaatgtgcccacatcctcaccaagattct

SEQ ID NO: 467112 - DNA, 101 bp, Homo sapiens
cctccaaggaagccacgtgcagacatctacaaccttcgatctcctgacgaaaaacattcagaactctcagaacttaatgtgaaagtgatggaggccctttc

SEQ ID NO: 467113 - DNA, 100 bp, Homo sapiens
ctcacatctgtggtccagggcagggccactccaggtctttcatggtgctgattcagacatagaatggctacagaaagactttgggttgtatgtagtaaac

SEQ ID NO: 467114 - DNA, 100 bp, Homo sapiens
cagatgagttgagtggagatgcttctgtggaagatgatgcttttatcaagcacaagctccgggtggataaggcagctgctgcagcagcggcactacaagc

SEQ ID NO: 467115 - DNA, 73 bp, Homo sapiens
ttgaggatcgaatcttcactcccgctgtctcagcagtctacagcacggatgagaacaagttgagcagtgccaa

SEQ ID NO: 467116 - DNA, 100 bp, Homo sapiens
gtgatactaccagacaagttcagagaatatcatgcttccagtctactgtaaagagtgcctggaagagctgggatgtctggttgagtcctatggcatgaat

SEQ ID NO: 467117 - DNA, 83 bp, Homo sapiens
tttcccttggtcaaaagcgcactaaatcgtctccaagtgtcaaaccagaagagaagtaaaattcaacaaaaatttatgtgtgg

SEQ ID NO: 467118 - DNA, 80 bp, Homo sapiens
cccacctgccaccgaggccccctcttcgcctcctccaggcagcacacttctgcttttgttccttcatcaggacgaattta

SEQ ID NO: 467119 - DNA, 98 bp, Homo sapiens
gaagatggaagacttcgagacccatttaggatcacggcgctacggcaacatccctaatcctgaccagccatggagaggttcggttcttacaaggaaaa

SEQ ID NO: 467120 - DNA, 97 bp, Homo sapiens
ctgaggtctgcatcacccatcaggaaggggaaaagagtacaggggctcaggtccaggtggcaggggatatgctacccaactcaactgagcgggccat

SEQ ID NO: 467121 - DNA, 90 bp, Homo sapiens
tctgacgtcatcaggcttgttcaagacacaccggaggcgacggccatggccacagtgatgcagcttggtttaacgaatcttggttaagcc

SEQ ID NO: 467122 - DNA, 50 bp, Homo sapiens
cgatctaaggatgaccctggaaagacctgcctagagctggaacgttacct

SEQ ID NO: 467123 - DNA, 84 bp, Homo sapiens
ctgggtggtagtgcggctggacggccggaatttccatcgaagccctgcagcagtgttgtgacctctcccagctctggttccgag

SEQ ID NO: 467124 - DNA, 116 bp, Homo sapiens
cgtgtctgggagaaacctcgtggcctggtctccattatttgagatgagttacatcttggagagactctgacctgtttttgttggacacccgtgtagtatgggcctcagaagaaggc

SEQ ID NO: 467125 - DNA, 100 bp, Homo sapiens
cccttgtctgcaaacagtggtatcgacttatcaaagctgataggaagatgtcttcaggaaatgctaaaattgggcaccctgcccccaacttcaaagccac

SEQ ID NO: 467126 - DNA, 75 bp, Homo sapiens
gttaatcctcaatttaagcctgatctaacccctagaaacagaatcaaaggcatgggaggttgatacctgccgggg

SEQ ID NO: 467127 - DNA, 100 bp, Homo sapiens
gacagaaatcattatcttagccaccagctattttcctggacagtgtgagtggatctattgcccaggggatgcaatttcttcagttgctgcttccgaaaag

SEQ ID NO: 467128 - DNA, 83 bp, Homo sapiens
tctgccatggcatggtgtacaaacttcccaagtaagaagcggaagaggagccgctggaaccaagacacaatggaacagaagac

SEQ ID NO: 467129 - DNA, 83 bp, Homo sapiens
tgcacgtggagggccgcccgaagggcactctcggacattaacccgcattctgatagcctgggctggaagctcttctacgtcac

SEQ ID NO: 467130 - DNA, 83 bp, Homo sapiens
cctgcttggcacctcacccaaagcctcactggtccttgctggtgcagacgaagcggcgggctctggagaagattgaccttaag

SEQ ID NO: 467131 - DNA, 75 bp, Homo sapiens
gctgcaccgacctcgacgtcttgcctgtgtcccacttgttcgcggcctataggatccggccccagctgtcgaagg

SEQ ID NO: 467132 - DNA, 75 bp, Homo sapiens
ttttgtaacttttgatgatcatgatacagttgataaaattgttggtgaccaagaatatggcccaggtgaccaaag

SEQ ID NO: 467133 - DNA, 90 bp, Homo sapiens
cgtggttggagagctcatctggaattttgccgatttcatgactaaccagtatcctgataacttaagtgactctctcttttccggtgatga

SEQ ID NO: 467134 - DNA, 136 bp, Homo sapiens
gcccccctctggccagcctgcaagatagccatttcctcaccgacgccgacatggtcatgagcttcgtcaacctcggctgaccccgcactacatctacccaccagccatcgtgcagcccagcgtggtgatcccagcc

SEQ ID NO: 467135 - DNA, 50 bp, Homo sapiens
cagatccatttacactttacaacttaattcagtgcacaaatgagatgaat

SEQ ID NO: 467136 - DNA, 90 bp, Homo sapiens
gagatggagagactgtggagtttgatgttgttgaaggagaaaagttttctttttaaaagcggaaggagagttttacatggaagtggctta

SEQ ID NO: 467137 - DNA, 100 bp, Homo sapiens
catgggtcttttcaaatcaagccggtatgacccaagcatttctttttctggaatgtcattatcagacacaatgaattatatccagatcgagagacagaag

SEQ ID NO: 467138 - DNA, 74 bp, Homo sapiens
tgtaaggtgcggccgccgccggtgtccttaagtttgctcgcttggtcaagtcctacgaagcccaggatcctgag

SEQ ID NO: 467139 - DNA, 88 bp, Homo sapiens
cggggtctctatcgcactgctaggggttctgctgctgggtgcggcgcgcctgccgcgcggggcagagtgtgaacatggctacgcctct

SEQ ID NO: 467140 - DNA, 87 bp, Homo sapiens
ttacaccatctgaattgcctgcaaacccaggatgacgcggcatggcaagaactgcaccgcaggggccgtctacacctaccacgagaa

SEQ ID NO: 467141 - DNA, 82 bp, Homo sapiens
ttctacccttacatggagggcgcgtccacaggaggaagaggacctcccctatgaggaggaaatcatgcggaaccaattctct

SEQ ID NO: 467142 - DNA, 119 bp, Homo sapiens
ggcagctgcaaggagggcggcgggactgcactcgagtgtccagacctgctcgatgacatccacgacagcgatggcagttccagcagcagccaccagagcctcaagagcacagccaaatg

SEQ ID NO: 467143 - DNA, 75 bp, Homo sapiens
aaaccttatagcctgcttatgggggaagacgcaaacatgcagatctttgtgaagaccctcactggcaaaaccatc

SEQ ID NO: 467144 - DNA, 75 bp, Homo sapiens
acaaaccatgcggcctccagcgaagccttccactagcaaaggtggggtggaagacaacccgtgagtattacacct

SEQ ID NO: 467145 - DNA, 100 bp, Homo sapiens
gttggcagccacttcaaaatcagacctctgtggcagcattttttccagaacacaaaaggattaaagcaaggagagccaatcatgactggcaaaacacaga

SEQ ID NO: 467146 - DNA, 88 bp, Homo sapiens
agcggcggctccggggcagctccggcgggcggtccggggttacccagagccccaggtgacatggcacagaaacgggcaacccatcacc

SEQ ID NO: 467147 - DNA, 100 bp, Homo sapiens
aaaatgaggatgaagacgatgatgacagtgacaaggaaaaggatgaagaggacgaggtcattgacgaggttcatctctaacaagtatttagtgaaacgac

SEQ ID NO: 467148 - DNA, 119 bp, Homo sapiens
cctggatcaccgacagcacagacagaatccctgctaccaaaggacagaataacgggctcccagattcacaagccccaccaagaggatcaccccaggaacgcttggaggctgaggagttc

SEQ ID NO: 467149 - DNA, 75 bp, Homo sapiens
gcggcatccgtaaccacaaggaggacgagaatcaagccagggaggacttcaaccaggacatcggctggtgtgtct

SEQ ID NO: 467150 - DNA, 50 bp, Homo sapiens
caccccaagaggatggtctccaagtctggctgcatgttaaatggccaaga

SEQ ID NO: 467151 - DNA, 74 bp, Homo sapiens
ctgagccaggccagcgccgacctggagccgtggtccttcagcatatctctgtgctgcagacaacacaccttcct

SEQ ID NO: 467152 - DNA, 102 bp, Homo sapiens
tgcaccccggcgtggccaggacagagctgggcagacacacgggcatccatggctccaccttctccagcaccacactcggctggagtgcagtggcgtgatctc

SEQ ID NO: 467153 - DNA, 75 bp, Homo sapiens
gggatgacaccactctgaatgcactgaacacagctcttgagatctgtcaacagagaaactttgtagaagagacag

SEQ ID NO: 467154 - DNA, 90 bp, Homo sapiens
ctgacagcgggaggcagagggaggaacctggacgccggaagccgggaaatgaccgagacatgggtgcccggcaccgcgcccgagcccact

SEQ ID NO: 467155 - DNA, 82 bp, Homo sapiens
cccgggacgacgagtacgactacctattcaaagggacccagacatggagctgcgggaagaagcctggtctccggggccgctg

SEQ ID NO: 467156 - DNA, 100 bp, Homo sapiens
gtaccttggccagaatgaggccaccctgacctgcgatgctcgcagcaacccagagcccacaggctataattggagcaccacaaacgtgcagatatctgat

SEQ ID NO: 467157 - DNA, 86 bp, Homo sapiens
ggcgagcagggagcggagtaccagcacttcatccagcagtgcacagaacttacgatttccaacggccccaaaaaccactcggtcaa

SEQ ID NO: 467158 - DNA, 78 bp, Homo sapiens
caactgcctgccgcgccgagggaccgccgggcggcggaaagcagtccatgatggcagtgaagaagaagacgatgacta

SEQ ID NO: 467159 - DNA, 98 bp, Homo sapiens
ggacaccgattatggattggcaacctggaccccaaaattaccgattggatgttgatggacagatagactctattcatctactcctgtcaccaagacag

SEQ ID NO: 467160 - DNA, 95 bp, Homo sapiens
gacatgagcaagaaaagcctctgggagcagaagggaggctccaagacctcatcaacaattaaggcatgtgggcacattccatgacagtacaggat

SEQ ID NO: 467161 - DNA, 100 bp, Homo sapiens
gatgacatggtgtcagctgacattggaattctcaggaaccggattgatcaggccagcttagactattcatacgctcgtgacagctggagtatcagccttg

SEQ ID NO: 467162 - DNA, 100 bp, Homo sapiens
acagcagcagcacctgcttccagactcagagtgtgagaaaaaaataaactcctatttgtttatggcaaggccagaaatgtacacacaggagagctggctg

SEQ ID NO: 467163 - DNA, 101 bp, Homo sapiens
ggtgatcttcagcaagagctactgtccccatagtactcgggctccagacccagttcctggacctgccctggaaaagaagtatcccgtagagatgagctcac

SEQ ID NO: 467164 - DNA, 73 bp, Homo sapiens
aatatgctaaacttttggccaagagaatgaaggctgctgagtgtgcagggaagctctttctattccatacatc

SEQ ID NO: 467165 - DNA, 99 bp, Homo sapiens
cttcaaaacaactggaatatttagcaaggattcaaggctttcagatttgagttctgtgaacctgcatttgttgttggtaattgcctccagatagcttct

SEQ ID NO: 467166 - DNA, 100 bp, Homo sapiens
aaagaatgcatggtgaccactccaacagtgcagctgctcctggaccatggtgctgatcctaaccagcgagatgggctggggaacacgccactgcacctgg

SEQ ID NO: 467167 - DNA, 75 bp, Homo sapiens
cgattttctttgaaccttcagcaaaggtatcatgatattagctggtttgacatcaagtcatttgtgagtcatcag

SEQ ID NO: 467168 - DNA, 77 bp, Homo sapiens
cccggccccacccgatgcggcctccaagtgatgaacggcagcagccactcaccaacagccatcaatggtgcaccgtg

SEQ ID NO: 467169 - DNA, 83 bp, Homo sapiens
gaggatccggtggcagtttaacaccagagcaggttgtaacctccatttctgacatccccactggtattccagttcacctagag

SEQ ID NO: 467170 - DNA, 82 bp, Homo sapiens
taagaagagcaaagtaaatgctgtcttttcccaaaagacaggctcttcacctgaagacacctagctgttgggcagaagaggg

SEQ ID NO: 467171 - DNA, 95 bp, Homo sapiens
actttcttccagcttctgctgtccttctttgtggagagcaaggcatctatcgagctgtgcctattcgagtcaatccaagagtgagtaatgtgaag

SEQ ID NO: 467172 - DNA, 75 bp, Homo sapiens
ccagcgctccttgctcgcaaggcgggggaggcggcggcccagccacgatggtcccttcaataatcaggagatggc

SEQ ID NO: 467173 - DNA, 100 bp, Homo sapiens
gcggacttctacaaggaatttttaagtaaaaattttcagaagcacatgtattataacaggtgggaatggaagtggccccacatctcaaagaaaccctaaa

SEQ ID NO: 467174 - DNA, 75 bp, Homo sapiens
attttactgtcaagacatttcttcggcattctgcaacaggtccttatgtcgtcagaagatcgagaagctcaggag

SEQ ID NO: 467175 - DNA, 156 bp, Homo sapiens
ttttagaaaagcattcctctcagagtgtggacatgttggcaaagactcatccatataacccactttgggcacaactggaaaatggtgtgaatggaacattaacttcaaatgtagcagactctccccggaataaaaaagagaaatcttcataatgaa

SEQ ID NO: 467176 - DNA, 82 bp, Homo sapiens
aacctggctgagaatgtgtccagcaaagttcgtcagcttgacctggccaaggtgtttgcgagtaaaccccaaagggttagat

SEQ ID NO: 467177 - DNA, 89 bp, Homo sapiens
cccaaggaaaccatggaggagcactgcaagcttgagcaccagcagatccatagccgggtggatgtcatcagacacgtggtgaagaatgg

SEQ ID NO: 467178 - DNA, 82 bp, Homo sapiens
gagaattccgcagcccacacgggaaatcctcattgacgattcaatttgttgaaggccaatttgtggactcctacgatccaac

SEQ ID NO: 467179 - DNA, 74 bp, Homo sapiens
gtcaggaactgtgtgtctagatgtaattaatcaaacttggacagctctctatgaccgatttgggatgttgcccc

SEQ ID NO: 467180 - DNA, 80 bp, Homo sapiens
cggctcacctggcggtgcccgaggagtagtcgctggagtccgcgcctccctggaactcgcacacaaagcagcatgagaca

SEQ ID NO: 467181 - DNA, 50 bp, Homo sapiens
tttttgtggagaagttttagatcgcattttgaagcattggctaatcgagc

SEQ ID NO: 467182 - DNA, 90 bp, Homo sapiens
cggcttcaggaggcccaagacaccacagaagccctccgagcccaggtatatgagtagaccagtgatgagtggcccaggactctatgaccc

SEQ ID NO: 467183 - DNA, 80 bp, Homo sapiens
ccttgcaaatttacatacgagaatggcttgtgaaatcatgcctctgcaaagatttggattcaagatgtgaaataatcagc

SEQ ID NO: 467184 - DNA, 100 bp, Homo sapiens
ccagacagtgttaccagggaggagcagtgaaagagaagggaatgctaagaactgctgggaggatgacagatcaagagaaatatggattattaaatgtaac

SEQ ID NO: 467185 - DNA, 90 bp, Homo sapiens
agcgaagaaccttttccctaatacgtacctcattgtgggagacccatgcctgaacggtggctcgtgccaagacggcgtgggctccttttc

SEQ ID NO: 467186 - DNA, 123 bp, Homo sapiens
ggcccccgtggcctgcctggtgagagaggtcgccctggagcccctggccctgctggtgctgctggtcaacctggtgctaaaggagaaagaggagccaaagggcctaagggtgaaaacggtgtt

SEQ ID NO: 467187 - DNA, 100 bp, Homo sapiens
aaggaggtggaaaatgagaagaatgacaaagataagaagatagctgagttggaaagctcttcacagatggaatcacaaataaacttattggctgttacgt

SEQ ID NO: 467188 - DNA, 100 bp, Homo sapiens
tctccggcttatactcccagcggggaggcgggcagctctgcccggcagaaacctgtcttaggaaggcattactgggtaccggccaagaggctgtttggtg

SEQ ID NO: 467189 - DNA, 100 bp, Homo sapiens
gaaactgaagcaaaagatcagcgaggagcagcagcagctccagcaggcgctggctcctgctcaggaatcattgacatagagtaactccacagcatgtgtc

SEQ ID NO: 467190 - DNA, 100 bp, Homo sapiens
cggcgacagcggctgcggccgtggccgtggcgggaggagccggaagccccgcccccggggaggggccgtcctgcaggctgaagtgcaatggcatgatctc

SEQ ID NO: 467191 - DNA, 74 bp, Homo sapiens
ctactctctctttctggcctggaggctatccagcattgatgcactgagtaaaagaagcaaggaagctgaagcag

SEQ ID NO: 467192 - DNA, 80 bp, Homo sapiens
tccagcaccatggggaagcgggacaatcgggtgagtcattcaggagagcaggaaagaaaaggccatccctgtggatgtcg

SEQ ID NO: 467193 - DNA, 90 bp, Homo sapiens
tgaaaatggacgagtaatcgcctgctttgattcattgaaagaattgaatgatctggcacgggaccctccagcacagtgttcagcaggtcc

SEQ ID NO: 467194 - DNA, 97 bp, Homo sapiens
cacttcattggccacctacagaaacaaaatgtcaacaaattgatggatcttggagaaattcattcaaggcttttggatcacagaccagttattcaag

SEQ ID NO: 467195 - DNA, 100 bp, Homo sapiens
aagctttgcgcaacgccaacctcaggcgagatggaagtgcattttcagctgagcacctcaaacttcaactccagaaggaatccctaaatgagctgaggaa

SEQ ID NO: 467196 - DNA, 82 bp, Homo sapiens
cgagtttccgatttaaagctgagctgcgaggaaaatggcggcgggaggacattcactgaacaatgccagggatacaagtgcc

SEQ ID NO: 467197 - DNA, 100 bp, Homo sapiens
cccttcccagaccatgagctggaggacatgaagatgaagatctctgccctcaagagtgaaatccagaaggaggtacctttgacaggagcgtgaccctgct

SEQ ID NO: 467198 - DNA, 137 bp, Homo sapiens
tatggatgatcgagaggatctggtgtaccaggcgaagctggccgagcaggctgagcgatacgacggtgtcatggagaaactccagctgggcccagagattctgcagcgggaaaatccaaggcttatttatgccaggc

SEQ ID NO: 467199 - DNA, 87 bp, Homo sapiens
cagaccctggagcctcagttggaagcagccgatccagcctgcggagcctgtggggcagatacttgccagaactaatacagctgatga

SEQ ID NO: 467200 - DNA, 82 bp, Homo sapiens
aaccgcagtatcatgctggccaagaagatcatcattaaggacggaggcacgatctgaagaagacacttgaatcatgggtgac

SEQ ID NO: 467201 - DNA, 74 bp, Homo sapiens
ggagcggacaaggctccggcctgcgaggaggtactccaaagattcaggtttactcacgtcatccagcagagaat

SEQ ID NO: 467202 - DNA, 100 bp, Homo sapiens
gtcggagaggtcagcaacagggacatcgtggagacggtgctcaacctgcaataagagctaactgccatcaagagccatcagtatgtcttcaagctgcatg

SEQ ID NO: 467203 - DNA, 77 bp, Homo sapiens
caccacgcggctgcacaactgcaggaacaccgtcacgctgctggaggagatatggtccggaaaaagaacccccctct

SEQ ID NO: 467204 - DNA, 75 bp, Homo sapiens
ggaaaagagtttcttttgggaggtcaagagcaatctgaatccaaatgcaaaggagtttgttcctggggtgaagta

SEQ ID NO: 467205 - DNA, 82 bp, Homo sapiens
gctttgttgaccgggagaaacgagatgggggtgaagctggagatatttcggtgtgtcccggcatggatatccggaacaacct

SEQ ID NO: 467206 - DNA, 99 bp, Homo sapiens
agaaatactgcctttgaaaggctatttcccttctaattggcccactaacaaatgacagcccatatcaaggcggtgtattctttttgacaattcattttc

SEQ ID NO: 467207 - DNA, 98 bp, Homo sapiens
aacctgggtgctgcaggtgttcaagtgcagggagttcccgttacaatcactagtgttgcagttaatgaaggagttcccccttctgagtatgttcaata

SEQ ID NO: 467208 - DNA, 83 bp, Homo sapiens
ggctgataaccatatcctgctgtgggatttacaggaaagctcgagccaggctgtgccttatgccagcctggaccatcttggag

SEQ ID NO: 467209 - DNA, 100 bp, Homo sapiens
aagtgccaatgctggcccagctctccgtgttccggtgtgcttcttggacacttaatgattgttggcaagaaatgtgctgctgatctgggcctgaataagg

SEQ ID NO: 467210 - DNA, 75 bp, Homo sapiens
gcgagaggatggtcatccgcgtgttcatcgcctcttcctcgggcttcgtggcgatcagtgtactgttacccggac

SEQ ID NO: 467211 - DNA, 74 bp, Homo sapiens
cctggctgcacatttccagaggacaacagaggagacagaggggctgagttcaagctgaagaagatgtggaaaag

SEQ ID NO: 467212 - DNA, 83 bp, Homo sapiens
gatcatgaggtcaggagatcgagaccatcctggctaacaaggttgctacaagcctcaggaaaaatcagattacttgatgttgg

SEQ ID NO: 467213 - DNA, 100 bp, Homo sapiens
cgttggtccgcgcgttgctgcgttgtgaggggtgtcagctcaggcttgtccagccggaagccctgagggcagctgttcccactggctctgctgaccttgt

SEQ ID NO: 467214 - DNA, 101 bp, Homo sapiens
aagatggcggccaatgtgggatcgatgtttcaatattggaagcgctttgatttacagcagctgcagctccagtaataaaccgattcacaaggcgtgcctca

SEQ ID NO: 467215 - DNA, 50 bp, Homo sapiens
gctgctgccgccccttgggctaaaagtgaaaatgcctcgtgtaaaagcag

SEQ ID NO: 467216 - DNA, 100 bp, Homo sapiens
caggcgcctttgcaggctgcggtgggatttcgttttgcctccggttggggctgctgtttctcttcgccgacggaatcaagagagacccggccaaggcttt

SEQ ID NO: 467217 - DNA, 100 bp, Homo sapiens
ggaacaccaaatgaggacacatggcctggagttcattctttaccacattttaagccagttgccaaaacaaaggggatttggtgatggaggctttgttaga

SEQ ID NO: 467218 - DNA, 100 bp, Homo sapiens
cggagagcaatcgccgggacagctgcaagtgcaccgtccaggtgaggttagagctggggcatcgcgcccaactgcgcaagaagcccaccacggaggggtt

SEQ ID NO: 467219 - DNA, 99 bp, Homo sapiens
tctaatttgaaccatgtttggattgaagccgcctctgtattacttaccagctacgagttccagggagctctgtcctggtgaccgtgcccgggttatgac

SEQ ID NO: 467220 - DNA, 100 bp, Homo sapiens
atgtcttcaaagaatattaaaaaatctggagggactccaacttcaatgacctctgctccttttaaggaaagaccaacaccttctctgaataataattgta

SEQ ID NO: 467221 - DNA, 74 bp, Homo sapiens
gtctcgacctgggtcgctttccagagcgatgtacaactccaaaaggagacattggagaagaaccaagctgggtc

SEQ ID NO: 467222 - DNA, 82 bp, Homo sapiens
ctggacttacgaggagcagtttaagcagggagcatcgagtacagctgtccggcctccaacgagtgtgagatcaccaagcgga

SEQ ID NO: 467223 - DNA, 100 bp, Homo sapiens
ggaggaatccgagaagagcagagcggagggagccccagacacgaatcaggaaacccaggcccaacggcaggtggatgcaagaagaaatgttccccaaaac

SEQ ID NO: 467224 - DNA, 75 bp, Homo sapiens
ggcagcagcccagacgcggcacagagagggcctgggagcttgctgcagcttcagagaggtggagaagagcgagta

SEQ ID NO: 467225 - DNA, 100 bp, Homo sapiens
cgggacaagaaaattcatgcggtaagaagagttcctgggtcaagtggtcaccttcataaaaccgaagacggggactgggagtggagtgacgacgagatgg

SEQ ID NO: 467226 - DNA, 100 bp, Homo sapiens
gtctaatgatggagaaacaatggtaaatgtgccacatattcatgcaagagtacagtccctgacatcacacactgcagagatggataaccaaggagtaatc

SEQ ID NO: 467227 - DNA, 88 bp, Homo sapiens
ctccatcacccaccaacaacaccacaataatccacagccaaggcaaaaactgattattccaagtggaagttgccctgttattctgaat

SEQ ID NO: 467228 - DNA, 50 bp, Homo sapiens
ccgaaactgtcaagattggcaagggcatcatggtgggaggcttgaagagg

SEQ ID NO: 467229 - DNA, 88 bp, Homo sapiens
agcgtgtcctgaaggagttccaccaggccgggaagcccatcggtaagactttgaccccgacgcaggcttcagtgattgccgcggatca

SEQ ID NO: 467230 - DNA, 75 bp, Homo sapiens
cctcatcctggtcactagcggactcttcttcgccttcgaggtgagcttgtcggccacagactgctacattgtgca

SEQ ID NO: 467231 - DNA, 100 bp, Homo sapiens
gagtggccttcaacccatcagcgccccaggagttcgtgatgattgtcgtctttggtttggagttcatcattcgaatctggtctgcgggttgctgttgtcg

SEQ ID NO: 467232 - DNA, 75 bp, Homo sapiens
gatgaagatgatgacgatgatgatgaagaggatgatgatgaagattggctgattgcaattctggcccaactcaac

SEQ ID NO: 467233 - DNA, 75 bp, Homo sapiens
aagagagaagatggcgcttgacggaccagagcagctcacaagctcaggagcgccgttctggtctgggcccaaacg

SEQ ID NO: 467234 - DNA, 50 bp, Homo sapiens
gtttgatgttcgtgactttggaaagtacaagaagttacttactgaagaag

SEQ ID NO: 467235 - DNA, 78 bp, Homo sapiens
acagaccaaggccacttcttgcaaaccacatacacagcacaaagaatgtcagacagccttccttgaatccagaagctg

SEQ ID NO: 467236 - DNA, 80 bp, Homo sapiens
accaagagcagccccggtctctcggacaccattttctgccgctggacgcaagacctgcctagagctggaacgttacctcc

SEQ ID NO: 467237 - DNA, 75 bp, Homo sapiens
tctagagtgggaagatgaagaaggtacttcggccttcaaggggctcctttattgagaatcaatgtcttctcctag

SEQ ID NO: 467238 - DNA, 75 bp, Homo sapiens
ctttgttcaggacctggctacaagagttaaaaaggcctgtttaaagaagaaaacccgtatgctagatttgaaaac

SEQ ID NO: 467239 - DNA, 80 bp, Homo sapiens
agcccggcccggcagcgacatggaaggattttttatcaagcagaaatgcatcgaacaacgagaatcaagatcactgagct

SEQ ID NO: 467240 - DNA, 90 bp, Homo sapiens
gcggtggcggcctggggcggcgcgacggctggtgcgcagtcatctcaactcgaactccacctccaccttcaccgttgccatttccaacac

SEQ ID NO: 467241 - DNA, 113 bp, Homo sapiens
ggcgccggcgccgcggcctcttcggctgcggaccctgccattccggaggaggggaaggtgtggctcattgactttaatccatttggtgaagtcacagattcactgctgttcac

SEQ ID NO: 467242 - DNA, 88 bp, Homo sapiens
ccggtggccccagcgccctcagccgacggagacccctttgctgatgcaagtaagggtgatgacctgcttcctgctggcactgaggatt

SEQ ID NO: 467243 - DNA, 100 bp, Homo sapiens
cagcgtgaagacgcagagggagacagacatcccagttaccagtgtccttgaattgatagtggcttctgtttgtcagtctcatataagaactacagctcat

SEQ ID NO: 467244 - DNA, 100 bp, Homo sapiens
agtcgagcttccaggactacaatgcctaccaaaaagataaatatcataaggacaagaacaccttgctgaagctgaagaagatggggacctgcagtgcctg

SEQ ID NO: 467245 - DNA, 100 bp, Homo sapiens
accttcgctgtctgggatgttggcagccacttcaaaatcagacctctgtggcagcattttttccagaacacaaaagaccgaagccaggacagcacagccg

SEQ ID NO: 467246 - DNA, 78 bp, Homo sapiens
gcagcaaaaatacttcccccacaacacaacctacagcctcagggggcaaactctttgattctacaatagctgatgagg

SEQ ID NO: 467247 - DNA, 100 bp, Homo sapiens
gccgactgctgcctggtctgcaaagaagtcctttcaagtctctaggactggactcttcctaagcaagtccggacttggatgttgtgggtgatggtatgca

SEQ ID NO: 467248 - DNA, 100 bp, Homo sapiens
cttcttcggctgtttcacaaagaagcatattcacgagcatgcgaaggcgaagcggcacaacctggggtgagcttgtcggccacagactgctacattgtgc

SEQ ID NO: 467249 - DNA, 100 bp, Homo sapiens
ccataaacgctgtgcatcaaaagtaccaagagactgccttggagaggttactttcaatggagcaagattaccttatgctggctactttggatgagaatga

SEQ ID NO: 467250 - DNA, 75 bp, Homo sapiens
cgtggtggagaagctcagcgtcctcaagaggaagaagttccacctggtgccaagcatcaacaccatgagtggcag

SEQ ID NO: 467251 - DNA, 100 bp, Homo sapiens
gggtcaaccaagaacgtcaaacactccaacgattgagagcatttaaagatgtgtgcaactgaggaacatggctcaagaaactaatcacagccaagtgcct

SEQ ID NO: 467252 - DNA, 75 bp, Homo sapiens
gaaggaacgaggcaaggagctaaagcagcgtgcgttcagccctgggtaagaagacatgttggataacaagaagag

SEQ ID NO: 467253 - DNA, 50 bp, Homo sapiens
ccagggccgcaggaagacgcaatgaaggatttgggggcagagcacttggc

SEQ ID NO: 467254 - DNA, 100 bp, Homo sapiens
accgttcccccagccgggctggtaccggccctatttgatgaggtggccatatatttttccgatgaggaatgggaagttttgacggagcaacaaaaggccc

SEQ ID NO: 467255 - DNA, 100 bp, Homo sapiens
ggagccctctgtgccgtaccgcgggacggtgtttgccatggaccccaggaatggttacatggagccccactaccgcggctatgagaggttttcctccgag

SEQ ID NO: 467256 - DNA, 99 bp, Homo sapiens
caagaaccttgacaagctcatccggctggtaaatgcgcaggctccgtatgtggatgtgatctgtttgaacagctactactcttggtatcacgactacgg

SEQ ID NO: 467257 - DNA, 97 bp, Homo sapiens
ccatttcaaagaacagaatgctaaggaagctgtggcaagtgttacacataatattgcattacttcgagaggtgataatcaactcacgctttgtaaaa

SEQ ID NO: 467258 - DNA, 100 bp, Homo sapiens
tcaaaaggggggacatcctcaagacgttatgaagaggacatgtactggaggagaatggaggaagaacaacatcattgggatgatcgccgccgaatgccag

SEQ ID NO: 467259 - DNA, 75 bp, Homo sapiens
ctgccatggcccctgtgctcagtaaggactcggcggacatcgaggtaatctatttaaagaagacaccagaagaag

SEQ ID NO: 467260 - DNA, 82 bp, Homo sapiens
aagaactggctaggcaaataagctttaaggttgatggaagtagttccacattaagcatgagcactcattttaaaatgcttaa

SEQ ID NO: 467261 - DNA, 89 bp, Homo sapiens
tctaaacctggtaaaatttcacggcaggatcctgttacatacatttcagaaacaggttcttcccactagtaaaagcagccaaatgatca

SEQ ID NO: 467262 - DNA, 82 bp, Homo sapiens
cagaagacagagggttttcttttgagagctccaaacgagaatggaagccgctggaggaccgtagctgcacagacataccatg

SEQ ID NO: 467263 - DNA, 90 bp, Homo sapiens
ccagtatgaagtggtgaaggagtgtgtgcagcgtggtttttagatcgtatggctgatgacgactggtggccaatgcagatactaattaag

SEQ ID NO: 467264 - DNA, 82 bp, Homo sapiens
caacgacgttccatctgtggaaggacctaccaaccagatggcctctccagaggagaagtgtcaacaagtcttggaaccccct

SEQ ID NO: 467265 - DNA, 87 bp, Homo sapiens
aagaaaacctttaccaaatggataaatgctcgattttcaaaggctgctttgtaccgcctcagtggagactggaatcccttacacatt

SEQ ID NO: 467266 - DNA, 50 bp, Homo sapiens
ttcaaaagctgaagttgacaagtttaagaaaactgtaaccatttcagacc

SEQ ID NO: 467267 - DNA, 121 bp, Homo sapiens
ccaaggcgggcggggcggagccaggagccccacggagcgctgcggagcgaacctcacctttccagggcgcaagggagtgcatccgccccaacccttttccccctcgtctcctgtgagaatt

SEQ ID NO: 467268 - DNA, 100 bp, Homo sapiens
acaagcagtatacagaatcccagcttcgagcaggagctggctatatccttgaagatttcaatgaagcccaggtgaagagtcttttgaagacctgaccgaa

SEQ ID NO: 467269 - DNA, 75 bp, Homo sapiens
tcatagccgagtatgaaagtcaagtcaaagcataccataaagtctccaaaggatggcacagtaaagaaagtgttc

SEQ ID NO: 467270 - DNA, 75 bp, Homo sapiens
gggtcttgcgagatatctggccgcctctgccgcagctggagcatccttcggaaagctctggacaagatcgcggaa

SEQ ID NO: 467271 - DNA, 51 bp, Homo sapiens
gattcgcagtggtcgcttcttctccttgatgaggatcgtttatccaagagg

SEQ ID NO: 467272 - DNA, 80 bp, Homo sapiens
gctgcccgctgtgagggaaaagaataatccagaatggctactctgatctatgttgataaggaaaatggagaaccaggcac

SEQ ID NO: 467273 - DNA, 100 bp, Homo sapiens
ctgatccaaaccttggagatgatttcagcagtgtttacaagactgccaaggaacagggaatccattctttggaagttgccaccttccagagaagaggtac

SEQ ID NO: 467274 - DNA, 100 bp, Homo sapiens
ctctgctgcggcgcggggaccgctgtgctctcgactcccaagacagctgggctgcgaccaatggaaacaaaggacattccagtagtgcaccagctcctca

SEQ ID NO: 467275 - DNA, 82 bp, Homo sapiens
gcgcctgaaggagttgttgtctcggcagcgcccgcggagacgtgaagaggtcaccgacgatgagggcgcacctgctgtcctg

SEQ ID NO: 467276 - DNA, 71 bp, Homo sapiens
ggaccattgcaataaaatagaacttccaactactgaatttatccagttggcgaaggactttgaggatttcc

SEQ ID NO: 467277 - DNA, 101 bp, Homo sapiens
ggtcatcgaggtgttcacccccgtggtgcagcgaatcctcaagcataacatgttctgtggctcctgatggatctgagaagatggacgtggaggatgaaaat

SEQ ID NO: 467278 - DNA, 100 bp, Homo sapiens
ggaagagattcagccagcacactcctcgcgagcaagcagttccaagagcctctgagttcctgccttttttcatctctgaatccccaccattggcctacat

SEQ ID NO: 467279 - DNA, 98 bp, Homo sapiens
ggaagatccaggtcccaactggaagctgaagcctgtgccatatttcgggaggctgcaaggagggctcacagctcgaagaaccatcatcatcaagggct

SEQ ID NO: 467280 - DNA, 75 bp, Homo sapiens
tcgccgcgccccacttgctcgtgcactttacacacatgagaaacattgctgaggctcttgtcagcaaaggtctag

SEQ ID NO: 467281 - DNA, 100 bp, Homo sapiens
aggggagcggctgctcaccatgtcctgcagtgacaagattgcacgagctccttaataagcatttatagtcagtttttggcagcaatagaatcactaaagg

SEQ ID NO: 467282 - DNA, 50 bp, Homo sapiens
gaacattgcacgatgcctcctggtcttcaaagcttcacctttctccaaag

SEQ ID NO: 467283 - DNA, 86 bp, Homo sapiens
cggatgacagcagtgcttccgacgaaatcaggtaactaaatgaccatggaatctggagccgagaaccagcagagtggagatgcagc

SEQ ID NO: 467284 - DNA, 100 bp, Homo sapiens
ggccgaggtagaggcagtggcgcttgagttggtcgggggcagcggcaggttcggctttccagtttggcagcagcactacaaatttcaacttcacaaacaa

SEQ ID NO: 467285 - DNA, 73 bp, Homo sapiens
aaaatcccaaatcctcgatttcagagattatttcagctgccactgcagagccccgccatggaagacacgccgt

SEQ ID NO: 467286 - DNA, 98 bp, Homo sapiens
gttcaaggaggccttccagctgtttgaccgaacagggtttccaggcctgaggtgcccgccctggccccaggagaatgaaccagccgcagaggatggcg

SEQ ID NO: 467287 - DNA, 83 bp, Homo sapiens
ccctctgggatccccgccgctctgtctacaacccgaggagaacatattgtgatgttcgtgcctcagagctaaaactatgagtg

SEQ ID NO: 467288 - DNA, 90 bp, Homo sapiens
gccgcggttcccgagttgctgcagcagcaggaggaggaccgcagcaagattgtccgtgtggagcccttggtgaccatgggccaggtgact

SEQ ID NO: 467289 - DNA, 90 bp, Homo sapiens
ggctctgcaaattgttctgcttgactctgcatcgatatagacgccctgctggcggacttggagtctaccacctcccacatctccaaacgg

SEQ ID NO: 467290 - DNA, 100 bp, Homo sapiens
cggatttgcattgccgaggacgggaccccagggcagcgaagcaggctcgcttctcatatgtgcggatgaaatatcttttcttttcctggttagtggtttt

SEQ ID NO: 467291 - DNA, 51 bp, Homo sapiens
tgactaccagtggctctgcagagaatgcccaggaaaaccatgggctggctg

SEQ ID NO: 467292 - DNA, 75 bp, Homo sapiens
gtattggcatttcatggctagagttctaaggttaggaattttagacccagttctgctactgactttctgtgtgga

SEQ ID NO: 467293 - DNA, 82 bp, Homo sapiens
ccatgatctccttaacggacacgcagaggcccccagatgccgacggccctctctacctcccctacaagacgctggtctccac

SEQ ID NO: 467294 - DNA, 140 bp, Homo sapiens
gagggtcctgacgcaggcttccaaccccgtcgtctgcacgcagcccaaatccccatccgggacagtgtgcacctcaaatctcttccaggatctaagtcacttccaggagacgtggctcgctgaaggtgagtagttttgtg

SEQ ID NO: 467295 - DNA, 96 bp, Homo sapiens
tcacacccctctgagatgagacttgacattctgaaagttcccaaacctgaacctataccagagcctaaagaaccttctccggaaaaaaattccaaa

SEQ ID NO: 467296 - DNA, 100 bp, Homo sapiens
ttccccgttcgacgtgcccgtggacatcaccccggacaggctgcagctcgtgtgcaacgcgctactggcccaggtatctgtgcctaggtttgctgtgggg

SEQ ID NO: 467297 - DNA, 100 bp, Homo sapiens
tatgcggaggacagctctgatgaggagtctgaggaccaggaggagatccaggaagcagtccgcacgtgcagccgtcttttcggggccttgctggagcggg

SEQ ID NO: 467298 - DNA, 76 bp, Homo sapiens
tctcctggaggaatacaacaagactatgtgtcgtggaggccgaatgtttgcaccaaccaaaacctggcgccgttgg

SEQ ID NO: 467299 - DNA, 73 bp, Homo sapiens
cgacagcggccggggcgcaggcgcccgtgcggaatggcagatgattcaagagagccggtttctcatagaaatg

SEQ ID NO: 467300 - DNA, 80 bp, Homo sapiens
tttttactagagccaatcacctgtcatgcctggaacagggatcgtactcctatcagttgagggatttgcagttgataaaa

SEQ ID NO: 467301 - DNA, 83 bp, Homo sapiens
gtcagagcccgccagaccttcctctgaaggcaaagtgacctgtgctattactataacaagcgcattctgcacaagaccaaggg

SEQ ID NO: 467302 - DNA, 73 bp, Homo sapiens
gaaaattctatctgtgtgggtttcaagagagactactacctaataagggacttacacatattattgaaactcg

SEQ ID NO: 467303 - DNA, 100 bp, Homo sapiens
ggcgcctctgccctgcacgtggctgctgccaagggctacattgaggtgatgagagccctgaggatgatgacaggaaggtccgaaggagagaaaaaaaccg

SEQ ID NO: 467304 - DNA, 50 bp, Homo sapiens
ggaatggaggaagcaacccacaggaaacgtaaatattttcaccacgatcg

SEQ ID NO: 467305 - DNA, 90 bp, Homo sapiens
caaagcctgaacaggcagggccagacccagccacacccactcgcccgggtctatggccacggtcggagagtggtcctgtgtgcgctgcac

SEQ ID NO: 467306 - DNA, 75 bp, Homo sapiens
tgagaaccatgctcaccgaccctatgagaagaataatgtctggggtgaaggtgaagcacccagcccaagactcag

SEQ ID NO: 467307 - DNA, 100 bp, Homo sapiens
acaaaccttacctttattggagacaaaaccgtgacagagctgaatgaacctctctccaatgaagatcgaaatctcctctctgtggcctacaagaatgtgg

SEQ ID NO: 467308 - DNA, 74 bp, Homo sapiens
gttaatcctcaatttaagcctgatctaacccctagaaacaggttggtcaaagaaaaagtgatgtatgaaaaaga

SEQ ID NO: 467309 - DNA, 99 bp, Homo sapiens
gcccttaatgctacaggacaagcaaacctcagcctggaggcacttttccagatcccaaatttgaagtcatcgaaaaaccccaggcctgaagaaataaag

SEQ ID NO: 467310 - DNA, 98 bp, Homo sapiens
gcggatcgccgcgctcagcgacaaacaagtcgccttttaaaaaaatccctgcggtgggtgggaaggagctggatcttcacggtctctacaccagagtc

SEQ ID NO: 467311 - DNA, 50 bp, Homo sapiens
tatggataaagctctgaaagaagtgtgccatgcggagctgaatgccatca

SEQ ID NO: 467312 - DNA, 82 bp, Homo sapiens
tctttccggatcaatccagatggcagccagtcagtggtggaggtgggtgtgcctgctgctttggacatgatgctgactggta

SEQ ID NO: 467313 - DNA, 100 bp, Homo sapiens
ccaagatggtgaagcagatcgagagcaaggtgattttacaacgagatgctgctctccatagggatgctcatgctgtcagccacacaagtctacaccatct

SEQ ID NO: 467314 - DNA, 83 bp, Homo sapiens
caagtgcgaatgttaaatcagctggagaaggagaagtggagaagaaatcagtcagccgcagcaacgcacctcttgctttttcc

SEQ ID NO: 467315 - DNA, 100 bp, Homo sapiens
ttgatgatattttgcttatggatgaaactcacagtcacatttataactgggaaaggcataaacttggaggaggcagtggagagagcatcctggtatcaca

SEQ ID NO: 467316 - DNA, 100 bp, Homo sapiens
ggccgctgtgtggttgcaacggagataaattcccggaaccgcgattcggcgtgtcagatgttggggatcagccaggtgaggtaggttattcaggctctcc

SEQ ID NO: 467317 - DNA, 83 bp, Homo sapiens
gtccgctcgagcctgaaggaccctgagaaaggaaccagcacctatgacagaagatctgctagaagagcagtctgaagttttag

SEQ ID NO: 467318 - DNA, 98 bp, Homo sapiens
tggagctcataacccctactccacagctgtgagtacctcagatatgaggccccaggattcctggcgaggtcctcctccccttttccagcagcaaaggt

SEQ ID NO: 467319 - DNA, 83 bp, Homo sapiens
gactggcaagataatcaactttatcaaatttgatacagggcagccccgagaaccacaggtgtacaccctgcccccatcccggg

SEQ ID NO: 467320 - DNA, 88 bp, Homo sapiens
ttcaatatgaacttcagtcattgggggaatccaatgcacaaatgtcagcagataagcagagagccctagaagaaaccaaagcctacac

SEQ ID NO: 467321 - DNA, 75 bp, Homo sapiens
ctgtcatcaagccctttgccaccattccttcaaatgagtgtttaactgctgaagagatcttttcccttcatggct

SEQ ID NO: 467322 - DNA, 75 bp, Homo sapiens
cagatttcagcagcacaatcaacgcaaccacagaaacaagtggtacagtatgacttctctttggaaaagaaaacc

SEQ ID NO: 467323 - DNA, 74 bp, Homo sapiens
ggccagtctggagacagtcaagacttcagctacgggacggacgagtacgacggagaggggaatgaggagcagaa

SEQ ID NO: 467324 - DNA, 80 bp, Homo sapiens
ctgcagccacgcgggcgagcggctgtgtggatgtcggcgaagccgcgggcgaggtgtccctggccagtgtccttccacct

SEQ ID NO: 467325 - DNA, 101 bp, Homo sapiens
gtgaggtgctggctcacataggcacctgcctgaggaagatatttcctggcctctctccagtattggagaaatgaaggcagaggtcaccaaactacataaaa

SEQ ID NO: 467326 - DNA, 95 bp, Homo sapiens
ccatttagtaacttctttgcaagattgacgagatgcctgaggctgccgtgaaatcaacagccaacaaataccaagtcttttttttcgggacccac

SEQ ID NO: 467327 - DNA, 75 bp, Homo sapiens
cagtggacgaggtgttggcggaagctgaccacagtggccgagaagtcgcgcgtgctgcagctggaggaggagctc

SEQ ID NO: 467328 - DNA, 83 bp, Homo sapiens
taggcgtggagagggagtgatgtcttccagactcggtgctgtacccgccaaccttccagtctgggaacagatacagatatacc

SEQ ID NO: 467329 - DNA, 82 bp, Homo sapiens
aaacaatggcatttacagaaagagtcaacagcagtggcaacaggtctgtggctcaggacatccccaagctgcagaaactagg

SEQ ID NO: 467330 - DNA, 75 bp, Homo sapiens
tgcttctccttttcatgagtgttcctgtggtctctgcacctcctttctaatatgccttccgcatgtctcgtctca

SEQ ID NO: 467331 - DNA, 75 bp, Homo sapiens
gccctgagagaacagggtggccgcttggtccagatggagtttcgttcttgctgcccaagctggagtgcaatggcg

SEQ ID NO: 467332 - DNA, 82 bp, Homo sapiens
gaaggattcaaatgctagcagacacggtggctactctgcctcggggacgaaagcagggacccgagtgtatagccctccagag

SEQ ID NO: 467333 - DNA, 100 bp, Homo sapiens
aggttcgtgaaactcaagctttgatcttggctcccacaagagagttggctgtgcagatccagaaggacatgaacaagctgagtggaggcggcgggcgcag

SEQ ID NO: 467334 - DNA, 76 bp, Homo sapiens
tgaacattcaagtgaagcaaaagcctttcatgattatttcgatcctttggtacagaagacagaccgacagatcgtc

SEQ ID NO: 467335 - DNA, 100 bp, Homo sapiens
ctgaactcaacttctgaaatttacagaaacaaactacatctcaggtctctgctggatgaaccgaatcctaacagtccagccaatagccaggcagcacagc

SEQ ID NO: 467336 - DNA, 73 bp, Homo sapiens
ccttttcaaatgggtagggaccatccatggagcagctggaacagtatttacatgaggaatttccagagtcctg

SEQ ID NO: 467337 - DNA, 100 bp, Homo sapiens
caatgctccgttgagagacgcggctttcggcaagaactggattcgtggcgccacaagctcattcactgtgtaggcctccgaccagggagaccttccatcc

SEQ ID NO: 467338 - DNA, 76 bp, Homo sapiens
tcaagtatgtggagtgttctgcacttacacaggtaaagagaaatgtgtatgaccttacaagtatccccgttcgcca

SEQ ID NO: 467339 - DNA, 98 bp, Homo sapiens
actcacataagaggaaaggatcgccatgtgacacactggcatcaaggtgcaaagttccccatcaagtggacggcccccgaggcagccctgtacgggag

SEQ ID NO: 467340 - DNA, 100 bp, Homo sapiens
gcgaagatgcgaaaggtggttttgatcaccggggctagcaggaattgaatgatctggcacgggaccctccagcacagtgttcagcaggtcctgttggaga

SEQ ID NO: 467341 - DNA, 82 bp, Homo sapiens
ctgccccgcatcaccggagcgtcccagctgcgaggagtaagagatgctaaaaaccttgtacctatggaccccaatggcctgt

SEQ ID NO: 467342 - DNA, 87 bp, Homo sapiens
agacaaaggcgcggcaggagcagggctggacgggcctgaaggagaccaggggccccaagcaattgtctggtttgtggtaccacaatc

SEQ ID NO: 467343 - DNA, 90 bp, Homo sapiens
atttaatggaaaatcgcttggttaaaacctgacacttttaacaggaagctattttgccagccacttcattatgggaggagagaagtttga

SEQ ID NO: 467344 - DNA, 75 bp, Homo sapiens
caggagattgcgagggagcgatgcggtgcagcgcgttcacacaaaagatgttggacaatttctacaattttgctt

SEQ ID NO: 467345 - DNA, 51 bp, Homo sapiens
tccgaactgtgggcaaaaatggcggagctctttgttcaatgcctagccacc

SEQ ID NO: 467346 - DNA, 74 bp, Homo sapiens
cggcgagtttccgatttaaagctgagctgcgaggaaaatggcggcgggagtcactcagcctctgaagaagcttc

SEQ ID NO: 467347 - DNA, 100 bp, Homo sapiens
ggtgttttatgtgccttcagtttctcagctgcagcaggagattaccaggccctgatccttcaccagctaggccgctacagtctggcggagaagatcctcc

SEQ ID NO: 467348 - DNA, 80 bp, Homo sapiens
ggttccagctgcagcacgtggacgctgactcggaagtgcagacacgcagcccaagaaggtccggaaggtcccgccgggtc

SEQ ID NO: 467349 - DNA, 129 bp, Homo sapiens
aacgggacatctatgacaaatatggcaaagaaggattaaatggtggaggaggagcgtgattggactcccaggagaagaagactggcctagagatgttgcccttcccaggcaggcttttcattcaaaatc

SEQ ID NO: 467350 - DNA, 112 bp, Homo sapiens
gaagaaaaaagaagtaaaagaagctattattacaagaataaaggcaggaatcaatccattcaatgctctgggttcccttcattatcctgtggaagtagcggtagcagttcat

SEQ ID NO: 467351 - DNA, 75 bp, Homo sapiens
cgctgccgtctctggaggagtactggcaacagccaagtatcttcaagaccttctcatggagagtgtgaatttttc

SEQ ID NO: 467352 - DNA, 90 bp, Homo sapiens
ccgccgccgcagcgcgaacatggacgccgtcaacgccttcaaccaggagtatggtttgaagtggtgaacatggatttttctcggcttcac

SEQ ID NO: 467353 - DNA, 99 bp, Homo sapiens
tcgcagcgccagacccaaggcccccgagtgagcgcgggcgccgagatctctggaaacatggctacagaacatgttaatggaaatggtactgaagagccc

SEQ ID NO: 467354 - DNA, 74 bp, Homo sapiens
tcggtgttgagcacggcgagcagtctcaggcctttagtgatgatggtgtaatggataggtaacagagaagacct

SEQ ID NO: 467355 - DNA, 83 bp, Homo sapiens
ccgagaattggcgcaaaagggacatgacacttctagactgattaaaaatcttggtgaccctatcactccacagggaactggtt

SEQ ID NO: 467356 - DNA, 111 bp, Homo sapiens
cgcctgccgcggctgtcaactcgctccggagcgcggcgccgagcgcagggatacggcgcccagcgggtgtcggagatgtatgcagtgtgacgccaagtttgactttctcac

SEQ ID NO: 467357 - DNA, 75 bp, Homo sapiens
aaggacttaatcaggtttatgtgtcctaaaggccccttcacagatgtagtcactacaaatcttaaattgcgaaat

SEQ ID NO: 467358 - DNA, 90 bp, Homo sapiens
atggaagctacatataacaccagcggcagtcagacgagctgctgcacaggttctggaacctctggcggtctcagattgagcagaaaaagg

SEQ ID NO: 467359 - DNA, 82 bp, Homo sapiens
atgttcatagtggctttccagttgtttgacaagagtggaaatggagaggtgacatttggtatttaaaccatgtcagagctgc

SEQ ID NO: 467360 - DNA, 73 bp, Homo sapiens
aacatgctcccttggtctctgcaaccatcgattcctaacagcctagaggagaactgtgtttatgaaactgtag

SEQ ID NO: 467361 - DNA, 100 bp, Homo sapiens
gatggaagcagcgagacgttccctgtgctttagactggagcaagattgccacactgaaggtcaaaatattttattcactgatggagaatatattaatcag

SEQ ID NO: 467362 - DNA, 99 bp, Homo sapiens
cgggtgtgagagtccgtaaggagcagcttccaggatcctgagatccggagcagccggggtcggagcgggtgttacagcacatgaaggccgtgcaggcag

SEQ ID NO: 467363 - DNA, 100 bp, Homo sapiens
agataaaggagagattcgagtaggaaaccggtaccaggcagacatcaccgacttgttaaaagaaggctgttttggagtcagcggaagatcaccaaggcca

SEQ ID NO: 467364 - DNA, 124 bp, Homo sapiens
ttttcaaaacttaggatctattttaacgtatgccttcttgggaactgccatctcctgcatcgtcataggagttttccgtctgatgaaggttggccatttgcaaagtatcttggagcttgtggaa

SEQ ID NO: 467365 - DNA, 75 bp, Homo sapiens
gaaaggccaatttcatgaatttcaagagagtaccattggggtgcctacaatgggaaaacttcactccaaagagaa

SEQ ID NO: 467366 - DNA, 86 bp, Homo sapiens
agagaccagcactaagaaaagaagggctaaaagatgaggaagatttctttggtctttttggagttcctgagctgagtgccccagaa

SEQ ID NO: 467367 - DNA, 95 bp, Homo sapiens
gctcctcaccaagtacgctgaggccgagaacaccattgaccagctacgcctcggggccaaggtgtgagatcaaccatgagttccgttgcagtttt

SEQ ID NO: 467368 - DNA, 100 bp, Homo sapiens
ggattgagacccggaaggcttcaaaggctgtcgcaaggaggaagaccagggaatttatcagagcaaagttcgggagctgatcagtgacaaccaataccgg

SEQ ID NO: 467369 - DNA, 75 bp, Homo sapiens
agacagtgaagagcattccagatcagattctgtgacaggcaaactgatccactcgatggtagcccacctagaagc

SEQ ID NO: 467370 - DNA, 90 bp, Homo sapiens
gacacgacgaggtgaggacttactttcatgagtttggtcacgtgatgcatcagatttgtgcacaggtgttcactgttggcagaatttgtg

SEQ ID NO: 467371 - DNA, 75 bp, Homo sapiens
gtatctggtgaagtggaaaggatggcccccaaagtggaagcagggaaaggcctggagatgaggaagctggttctc

SEQ ID NO: 467372 - DNA, 75 bp, Homo sapiens
ctttggcagccttatcattggttatgccagggttggttctggacattacacagcatacgcaactcacgaaggccg

SEQ ID NO: 467373 - DNA, 98 bp, Homo sapiens
cgccgagggacctcacatcaacttctaccagctggtgtctttcctgaagactatcttcccgtctcaaaatggacatgatggatccacggatgtacagc

SEQ ID NO: 467374 - DNA, 80 bp, Homo sapiens
cactcggagtatggccttggccgaccctgagaacaggaggtagaagaggatgatccagtgcctgagatccgtcgagatca

SEQ ID NO: 467375 - DNA, 98 bp, Homo sapiens
ccatctggagctccacgtccccggacttcggtgtgaatgaagctgccctctgtcgacagctccccatggaagctgagactcttgccccagttcaggct

SEQ ID NO: 467376 - DNA, 75 bp, Homo sapiens
acgcctgatggctccacgcatttcccttcgtggtggagggagcaaagtcctgcacactggagtggtgtactagcg

SEQ ID NO: 467377 - DNA, 82 bp, Homo sapiens
gactttcttccagcttctgctgtccttctttgtggagagcaagcaccggaagccccgcggctggagtttcgggatccggcac

SEQ ID NO: 467378 - DNA, 96 bp, Homo sapiens
gaacggaaaactcccaacttcctgggaccccagagctaagcacagctgagcggaaggagttggagaacaagttgaaggagcgggaggaattcctaa

SEQ ID NO: 467379 - DNA, 83 bp, Homo sapiens
aattgacttccttctctgcagagccggctctggtctcttctcttgaagcagatgcgaagataacaattatggctgtgttcctc

SEQ ID NO: 467380 - DNA, 90 bp, Homo sapiens
cggccctggcggccgttgaaaaatggcgactgtggcagagttgaaggctgaaactcccacgttaacccacgaaaccttcaaagcactgaa

SEQ ID NO: 467381 - DNA, 97 bp, Homo sapiens
tgctggttagtgtgctctgagggagggtccgagccagccgctgttttgccggaggagcccctcaggccagtgctccaagctcccgaagccgaagtct

SEQ ID NO: 467382 - DNA, 50 bp, Homo sapiens
gcggatctcaccgccgctcaggcctcgtcacgtgttcaatatgctaaaga

SEQ ID NO: 467383 - DNA, 100 bp, Homo sapiens
agctcgtgcttcgggatggaaacctatggttatctgcagagggagtcatgctttcaaggacctcatgtggagccgccaccaaaatgcagattttcgtgaa

SEQ ID NO: 467384 - DNA, 90 bp, Homo sapiens
cggccctgggagctggaggaaccgcgtttcatcgcaaaccagaaaaggttagaaatcatcaacgaagatgatgttgaagcttatgtggga

SEQ ID NO: 467385 - DNA, 74 bp, Homo sapiens
gtatacaggacctggcttagctattcattgcatgcagggtcgacaagaagatgctgaggaatacttaggcttca

SEQ ID NO: 467386 - DNA, 100 bp, Homo sapiens
ctcagaatgtgaaggattatttactcgatgatggaactctggtggtttcaggaaggtacggaaaaaggaccagatcaatattgaaacaaagaataaaact

SEQ ID NO: 467387 - DNA, 88 bp, Homo sapiens
tcgtcagcactgactttcagctatggaatcggaattctcacactcaagaaagcaaatgaacttcttctgagcacaggcatgcccggca

SEQ ID NO: 467388 - DNA, 83 bp, Homo sapiens
ggacaatggtcaccgtctcttcaggacctgatcccaaccttgaagaaagtcctaaaagaaaaaatattacatatgaggaatta

SEQ ID NO: 467389 - DNA, 85 bp, Homo sapiens
tgtgcctgatgatcacgcagctggctggcttcagtggaccagatctcgaggacctggaagaagcagaggagccagacatggagga

SEQ ID NO: 467390 - DNA, 100 bp, Homo sapiens
ccacccgccgcacatccccagccattttcctgagttccctgatccccacacctacatcaaaactccgtgggctcgggatgagtttgaaggcctcttcaag

SEQ ID NO: 467391 - DNA, 88 bp, Homo sapiens
tttgactacggtgaaatccccaactttccccgaagtacaggcagtgttctgacttactgagccaggcccagtaccatgtggcccgggc

SEQ ID NO: 467392 - DNA, 82 bp, Homo sapiens
aggtcttattacagtactgtgctgctttttcaaccatggagagacaatgcagatcttcgtgaagactctgactggtaagacc

SEQ ID NO: 467393 - DNA, 83 bp, Homo sapiens
agaccgacttctgcagtacgagaacgtggatgaagactcttcgggttctgatggtcctttggctaccagcaaaccagtccctg

SEQ ID NO: 467394 - DNA, 100 bp, Homo sapiens
ggcactacatcagcttcggcctgagtgatctctatggtgacaacagagtccatgacgtccagaccaaagcatttactggtatttatcaacccgtttggag

SEQ ID NO: 467395 - DNA, 75 bp, Homo sapiens
gctgagctgcggtgcttgtaaggcccggtacaagcagagccttgacccaactgtggatgaagtcaagaagctctg

SEQ ID NO: 467396 - DNA, 100 bp, Homo sapiens
cggggatggcgtcccccgggggcccgtactgcacatcgtggtggtcggatttcaccacaagaagggctgccagtcatccgtccttggctcaggatttgga

SEQ ID NO: 467397 - DNA, 98 bp, Homo sapiens
gcaggagcctggagcgcgagtacagctgcaccgtgcggctgctggacgacagcgagtacacctgcaccatccaggaaagaccacagcaagattctttc

SEQ ID NO: 467398 - DNA, 75 bp, Homo sapiens
cacatagacatttacgcggatgtcggcgaagagttcaaccaggctgaaggggatgctaagggagataaagcaaag

SEQ ID NO: 467399 - DNA, 90 bp, Homo sapiens
atagaaaggcaggagcagcttctggatgaaatacatcgtgagaagagagtgaaaatgcctcgtgtaaaagcagctcaagctggaagacag

SEQ ID NO: 467400 - DNA, 83 bp, Homo sapiens
cagagtcggcgtaactatcgcctgacagggtgaaatgacaatggatgctctgttggctcgattgaaacttctgaatccagatg

SEQ ID NO: 467401 - DNA, 82 bp, Homo sapiens
aattagctatcaaatccggccaggctaccggctctctgaccagttccacgacatcctcattcgaaagtttgacaggcaggga

SEQ ID NO: 467402 - DNA, 109 bp, Homo sapiens
ctgtctttttagcctggaggaacttcaaagcgtcttagcaggaaaatttgtgtagccagagaggtttggtacccaacacagatggtcagacttttgagattgcaatttc

SEQ ID NO: 467403 - DNA, 101 bp, Homo sapiens
atccgagtgatggtggacctgtgcaacagcaccaagggcatctgcctcacaggaccttgaagaggaaatccagcaacatgaagcgcctgtccccagcgcca

SEQ ID NO: 467404 - DNA, 100 bp, Homo sapiens
tatccagaatgaaatccatgctcagagatgccaagaagaatctagacagacaggcctttctagattctggggagcaggtcctggtggatgtggagaccaa

SEQ ID NO: 467405 - DNA, 75 bp, Homo sapiens
ctcacatccgatgcaccctttttgtcagattatcaggatgaggattgtcctaaagcagttggatgggaaaagaac

SEQ ID NO: 467406 - DNA, 82 bp, Homo sapiens
gctaaagggaagaaggaggaaaagcaggaagctggaaaggaagtgcgaagtgccagagggtggactggtccccaaatctctg

SEQ ID NO: 467407 - DNA, 50 bp, Homo sapiens
gagaggagaagagcccagcacaacgaagcggcctgcagtgggaagctgga

SEQ ID NO: 467408 - DNA, 50 bp, Homo sapiens
cgccaacatgtacagggtcggagggtgaggtggctttgaccccgggttgc

SEQ ID NO: 467409 - DNA, 50 bp, Homo sapiens
gacatttcttcggcattctgcaacaggtcttcgccttgatcgtgttctcc

SEQ ID NO: 467410 - DNA, 90 bp, Homo sapiens
tcgaccacactcacctctctctgctcatgcagaattaaacaaccaccatgtcgagcaaaaaggcaaagaccaagaccaccaagaagcgcc

SEQ ID NO: 467411 - DNA, 90 bp, Homo sapiens
agaaaagattttctattacttcagcaacagtccttcaaagttgcctgtgtccctggagtgttacacagtgcctcctgaagacaacctggc

SEQ ID NO: 467412 - DNA, 100 bp, Homo sapiens
agaagctaccgagttaccctaagaaagatactgaaacaagaatggcccaaacattggccaacttttatcagtgatattgttggagcaagtaggaccagcg

SEQ ID NO: 467413 - DNA, 80 bp, Homo sapiens
acatcaacttccggccgcagatgtcccagcccgcggcgccatggctcacgtcggctcccgcaagcgctcgaggagtcgca

SEQ ID NO: 467414 - DNA, 75 bp, Homo sapiens
tgtttgtggatcgctgtgatcgtcacttgagttaacgaattacatgatccaatgtaccagtatcgagttgatacc

SEQ ID NO: 467415 - DNA, 90 bp, Homo sapiens
aaccaggagcctcttccatacatgagtgtggcaaaggagcagagaactttgacaagttcttcacacgaggacagcccgtcttaacaccac

SEQ ID NO: 467416 - DNA, 100 bp, Homo sapiens
gtagcctgtcaacaatgttccgtgttgaatatgcatctaaagttgatgagaactttgactgtgtagaggtctctaattaacagaagatggcaaagcccag

SEQ ID NO: 467417 - DNA, 82 bp, Homo sapiens
ccccgagctgctggagaactgaaggcggacagtctcctgcgaaaccaggcaatgggtgtcgtgaaaactacccctaaaagcc

SEQ ID NO: 467418 - DNA, 75 bp, Homo sapiens
gattgttcctaaaccagaagaggaggttgcccagaagaaaaaggatgctgatatgctaactggtgatgagcaagt

SEQ ID NO: 467419 - DNA, 101 bp, Homo sapiens
agctgctacactgaagatgaagcaaggcccaatgacccaggcgatctgaacataaagtctggtctcctctggtgacggaggaagggaagcgtcatccatac

SEQ ID NO: 467420 - DNA, 83 bp, Homo sapiens
tgaacagcatcgtaggggtcagtgtcctcaccatgcccttctgcttcaaacaggaatgccatatggcagccgagagaactccc

SEQ ID NO: 467421 - DNA, 82 bp, Homo sapiens
ccacccagggcttcacggagattgtcttctgtgctgtcacctcgaatgagcaggtcaaggcagcggaggaggagaaagagat

SEQ ID NO: 467422 - DNA, 74 bp, Homo sapiens
ttttagggtcctttatatagaagggagagtagctctcccggggctgaagctgagtgcagatcaggtggccctgg

SEQ ID NO: 467423 - DNA, 98 bp, Homo sapiens
cgaggtcgagtaccttccctgtcccatcgcaaacccaaagatccccgttcctggagattctgattgagtgccggtggtggtgtgcacattgagccccg

SEQ ID NO: 467424 - DNA, 75 bp, Homo sapiens
aagaactcggagatgcctggaatacagtaagtgtctttttctgaagaagagaagtatcagctacgaaaatttgtc

SEQ ID NO: 467425 - DNA, 100 bp, Homo sapiens
gggcggggaccggcggcgctggaggagcgaggcagctgtactaggactgggaacggaggcctaacatcgtgtcccagctcagccaagcctgcgatggagc

SEQ ID NO: 467426 - DNA, 75 bp, Homo sapiens
aaaacctatcgttagagtcttcctgcccaacaaacagaggacagtgtttggtgatttaaatgccgtgtctcctgg

SEQ ID NO: 467427 - DNA, 100 bp, Homo sapiens
ccaaacgagtggctgaaactgcctacaagatacatagaaagtgaattttgtagaaggagaaggtaacccaggtttttctgccttttatgtgccatttgca

SEQ ID NO: 467428 - DNA, 100 bp, Homo sapiens
tggagataaaggaactcaaagaatttgggatggctacaatagactagttaatattgtgccaaagaaaccaccactgctagacagacctggtgaaggaagc

SEQ ID NO: 467429 - DNA, 125 bp, Homo sapiens
cccgtgtcctgcaggtattgggagatccacagctaagacaccgggacctcctggaagccaaaaatgtacgtagagaaatcgacactcttaatgaacgtttagctgctgaaggacaagcgattgat

SEQ ID NO: 467430 - DNA, 134 bp, Homo sapiens
gtactatcctcggtgctgtggtgcagagctagttcctctccagctcagccgcgtaggcttcctgcttttccgaagccttccccgacataccttcggactagtgcagagcaaactcttccccttctacttccaca

SEQ ID NO: 467431 - DNA, 50 bp, Homo sapiens
ggcgttcatctaccacgctttcgtattgaagaattggaggagaaacttaa

SEQ ID NO: 467432 - DNA, 87 bp, Homo sapiens
tggagtggtttgaatatcgtaagcgcacgtttaaacatctcaagggtgtattatctcatatactttcagcactcagatttgataaag

SEQ ID NO: 467433 - DNA, 75 bp, Homo sapiens
atcagaatcaaaacacaaatcgcctaagaaaaagactggaaaggattctatctgaagaagacacttgaatcatgg

SEQ ID NO: 467434 - DNA, 51 bp, Homo sapiens
gcctcccgggtagctgggactacagagacaggctcttgccatgttgcccgg

SEQ ID NO: 467435 - DNA, 100 bp, Homo sapiens
caaagaaaacaattggaagccttcaggcaaggtgcagctattgctggagtttaccgagcagcagggaaggaaatgataccatttgaagccctcacactgg

SEQ ID NO: 467436 - DNA, 50 bp, Homo sapiens
tgtcatggaaggtgctcttccagagctgggacacctgccttctgccctta

SEQ ID NO: 467437 - DNA, 75 bp, Homo sapiens
ggggcctgggaccccgccgcccaccagggtccccagtcctgacttcagttttcatgctgatgagtacctagaagt

SEQ ID NO: 467438 - DNA, 90 bp, Homo sapiens
agtccctgcagatggcccatttggagatcttgacaaagcctcttctgtttccaatggggttggctcgcgcctgcctgagcctgatgaccg

SEQ ID NO: 467439 - DNA, 83 bp, Homo sapiens
gccgctgccgctgccgctgccgcacctccgtagctgactcgcgctgcaaactcctgcccctccagcccccggggagcggggtc

SEQ ID NO: 467440 - DNA, 100 bp, Homo sapiens
agtgccatggcggccgccctgggagcgagcggaggagcaggcgccggaggttacgttacagtggatattttgggggtgttactgccctaagcagagagca

SEQ ID NO: 467441 - DNA, 90 bp, Homo sapiens
gcgagttggtcggtcccggggtcacccgctacgggaagcaggcctcgccacaggtattatcaaaaccagtaccactgccgagaaaacaga

SEQ ID NO: 467442 - DNA, 83 bp, Homo sapiens
ccagaggagcgcgtccaggagcggacccggcaagtgaaccggagcaaacgacttccgatccagtctgcgctgttgcggctccc

SEQ ID NO: 467443 - DNA, 73 bp, Homo sapiens
cgacttcgatgatcgtgtgtcggatgaggagaagtatgagatgtacaccatcgagcggaatgcagagcggacc

SEQ ID NO: 467444 - DNA, 83 bp, Homo sapiens
gtctctgatccgcaagcatgctcagaccttcattgctctgtgtgccaccgcagttggaattgatcacaccttttcagttgtac

SEQ ID NO: 467445 - DNA, 101 bp, Homo sapiens
gctggacccactaatgccatcttcaaagcctttgctatgatcattgacaaactggaagagatgttcaactgcatcacggagctggtcctccgagcaaagaa

SEQ ID NO: 467446 - DNA, 101 bp, Homo sapiens
agcgaaaccatcttcaagttagcagcgtttattttacaggatgtacagttacccagcacgtgtacctcctcctcctcctattgctcgggctgtagtgccct

SEQ ID NO: 467447 - DNA, 100 bp, Homo sapiens
tcctactgcgccaagctctgcgagccgcagaattaaggtgaaaagcactgaagttgagatcctagagaagtctcaaattgaagccattgcttcctcgtta

SEQ ID NO: 467448 - DNA, 144 bp, Homo sapiens
gcgttgccaacctgggtgctgcaggtgttcaagtgcagggagttcccgttacaatcactagtgttgcagcggacaaggcaaaatctcagcaagttcggacctctagtacaataaggcgaacctcctctttggatacaataacag

SEQ ID NO: 467449 - DNA, 98 bp, Homo sapiens
gtttgatatcaccaaactggaggatgcctatgtattccctggggatggcgcatcacacaccaaaggagcgtcttatggatgatgggcttgaagatgag

SEQ ID NO: 467450 - DNA, 82 bp, Homo sapiens
aggcctacttgcagcatattacctatcaggagaggagctaaagtctccagtgaatattgaattgctgaggattttgggaaaa

SEQ ID NO: 467451 - DNA, 74 bp, Homo sapiens
ctggagcggcagctcagcttggagcaggaggtccagatttggcagctgatcggaagctctttcgtcttgtctcc

SEQ ID NO: 467452 - DNA, 90 bp, Homo sapiens
agctgcagcacgtggacgctgactcggaagtgcagcttgtactcccagagtacctcatccacgctttcttctgtgtcatgtttctttgtg

SEQ ID NO: 467453 - DNA, 100 bp, Homo sapiens
cggagacagaccccggcccggcgaccgagctgggcccgtgagccactcggcctcagttatcaggaactgttgccgttattacatcagatgggagaatgat

SEQ ID NO: 467454 - DNA, 98 bp, Homo sapiens
tgaagtatccagcgctcattgggaatttagttaagggtgtgcccttactacctgtcccggaacctgaagcagcaagccgacatcatattcatgccgta

SEQ ID NO: 467455 - DNA, 97 bp, Homo sapiens
gaaggggcaagacgggttcagttcgtcatggggctgtttggaaagacccaggagaagccgcccaaagaactggtcttaaagaaagtgcagaagagat

SEQ ID NO: 467456 - DNA, 101 bp, Homo sapiens
tctgctgctacctgcgtctggtcagcgccgaggtcgcaatggaagaagagatcgccgcgctggtcattgacaatggctccggcatgtgcaaagctggtttt

SEQ ID NO: 467457 - DNA, 98 bp, Homo sapiens
ccatctcttggaaatattgaaggtggagtagcaaccgggcattatattatctcttggaaaagagcccacaggcggttttgtgagctgcttccccagga

SEQ ID NO: 467458 - DNA, 97 bp, Homo sapiens
gatgccccctgccccgcccggaggtgaaagcgggtgtgaggagcgcggcgcggcaggtgtcatggagaaactccagctgggcccagagattctgcag

SEQ ID NO: 467459 - DNA, 119 bp, Homo sapiens
gcgctcgcgctcgcgctggtggcggtcgcctgggtccgcgccgagtatctcggaagatggtacgaaattgagaagatcccaacaacctttgagaatggacgctgcatccaggccaacta

SEQ ID NO: 467460 - DNA, 75 bp, Homo sapiens
cactatggatttggaaacttacgatcaggagtgttgcaacggttacagtttgtcccatgaggagcacccccatag

SEQ ID NO: 467461 - DNA, 51 bp, Homo sapiens
ggagaactacagcaacttggtctcactggatgtgccgtttgggggtgctaa

SEQ ID NO: 467462 - DNA, 100 bp, Homo sapiens
gccccagccgcgtctgggccaggagaaaaggtgacttaagagattaaaattaatttggttgctgttggttctgaacaaataatgagttcttttatttgag

SEQ ID NO: 467463 - DNA, 82 bp, Homo sapiens
ctatcatcaccatggaaaaagtgacttgagcaggtggtcttcgagggatagcacgaggtggtctgacaggactaacacttac

SEQ ID NO: 467464 - DNA, 75 bp, Homo sapiens
cgctgctacctgcagcgccgtgtggcacgacacaaaaatcaggtattacctgtacaacctgatgttccagacgtg

SEQ ID NO: 467465 - DNA, 73 bp, Homo sapiens
cggctgcgggaaatcgggctgaagcgactgagtccgcgatggaggtcagccctgacaaaggtcagctagcccc

SEQ ID NO: 467466 - DNA, 100 bp, Homo sapiens
tcgagcaggcggcgcagtacaccaacgcggtgcgcgaccgggagctggacctccgggcattgcagtgtcgagatggctatgaaccctgtgtaaatgaagg

SEQ ID NO: 467467 - DNA, 80 bp, Homo sapiens
agttcgcccgtccccctgccccgttcacaatatgagcagcaccagcagtaagagggctccgaccacggcaacccagaggc

SEQ ID NO: 467468 - DNA, 99 bp, Homo sapiens
cgctgagtaagccgggcacggcggccgagctgcggcagagcgtgtctgaggtggtgcgcggctccgtgctcctggtgcagagatggcagcggttctgag

SEQ ID NO: 467469 - DNA, 100 bp, Homo sapiens
cagcctcctacctgtgaagtgaagccaaagcccagtgttaaaagaatggacaaacagacggaagagttctctcctgcgctatggtggaaacctgtccctc

SEQ ID NO: 467470 - DNA, 98 bp, Homo sapiens
tttaggagagtggaaaatgcttatcacatggaagcagaggctggattctagtgacatttataacgaattgaaagaaacatatcctaattatcttcctc

SEQ ID NO: 467471 - DNA, 75 bp, Homo sapiens
cagcgattggacagaatttgtgaaggacagaactgtaccgctctctttttggccagctccaccctcccgacgaag

SEQ ID NO: 467472 - DNA, 98 bp, Homo sapiens
cgagagggactacgtgggcaccttgcgcttcttgcagtcgggctcaaaatttgggcggggaactggactcactcagccttctcaacgcacgtctgctc

SEQ ID NO: 467473 - DNA, 100 bp, Homo sapiens
gcaagtattttcagcgagggtactgtatttatggagaccgctgcagggctgttttgctgcagcttctgaagtgttaaagcacttgaaggaacgatttccg

SEQ ID NO: 467474 - DNA, 90 bp, Homo sapiens
aggctcgcgagcctccttcgccgcgccccacttgctcgtgcactttacacacatgagtgtttgtggagaaggtgctgcagagactttttc

SEQ ID NO: 467475 - DNA, 99 bp, Homo sapiens
ccgcctcaccacgagctacctgaagatgcgcgccgtcttccccgaaggcaggtcttgacgagccctgcccgggccgacgcatgcggaggatggaaacac

SEQ ID NO: 467476 - DNA, 90 bp, Homo sapiens
gtgtgattctttactcagctgagtgtgccacacaggtagccctggacggcattcagtgttttggccatctggctgctgtgcacaggcgct

SEQ ID NO: 467477 - DNA, 101 bp, Homo sapiens
tggctccctgcactgtgtgtgctgcacagaggatggtgaaaggtgtagcagtcactcggcctacacccacagcatcgaccttgtgaacccagcgacctgac

SEQ ID NO: 467478 - DNA, 82 bp, Homo sapiens
atcttcacctactacaccgcctgggtgattctcttgacattcactactttcactgcctaagaatcctggaccttctcaaagg

SEQ ID NO: 467479 - DNA, 98 bp, Homo sapiens
cactttcgccagcccgtgccgcgagcgcggcctgcaggaggccagcggagcctgcaccaccgtggagacaacctggagaccctggtcctcctgaaccc

SEQ ID NO: 467480 - DNA, 83 bp, Homo sapiens
ggattacctccaattagatctaaaacactaagtggctctggattactgccacagcaagggaatcatgcacagggatgtgaaac

SEQ ID NO: 467481 - DNA, 90 bp, Homo sapiens
atgaaaggagacgtcagaacgtggcttatgagtacctttgtcatttggaagaagcgaagagaattcacagatggattcagtggaaaagac

SEQ ID NO: 467482 - DNA, 100 bp, Homo sapiens
ttcagagtctctatgtgaacggatcttggattccagctgcagtcttctcatcactacaggagatgactgatgacatggattcatacacaaacgtatatcg

SEQ ID NO: 467483 - DNA, 96 bp, Homo sapiens
tggagttggtttgaatctgtctgcagcttctcgagtgtttttaatggatccagcaacagagatgcttatttttggaaagaagttaacagcgggaga

SEQ ID NO: 467484 - DNA, 97 bp, Homo sapiens
ttaatcttcggacagagatcaaacctgtcgccacagagcagctgttgagcaccttcctaactgtaggccataggaaaaggatacagagtagagtttc

SEQ ID NO: 467485 - DNA, 100 bp, Homo sapiens
acggagcgctgccctgcagcccgagcccatcaaggtgtacggacagcttgcccagtttcgacaaagaaaagctcagtcggatgggcagagtccttccaag

SEQ ID NO: 467486 - DNA, 50 bp, Homo sapiens
ccggagcagccggggtcggagcgggtttgtcctggttgtggtcaagactg

SEQ ID NO: 467487 - DNA, 106 bp, Homo sapiens
ggccagtgcggcatcacctcctccaagaccgtgctggtctttctcaacctcatcttctggggtcggcactcttcaccctcccgagccctgcccgtctcggccccat

SEQ ID NO: 467488 - DNA, 100 bp, Homo sapiens
cagaagaacttgtacagagatgtgatgttggagaactatagcaatctggttttcttggaatatcctccgaatcctaaatctagagctccaaggatgctgg

SEQ ID NO: 467489 - DNA, 100 bp, Homo sapiens
acagggatcctgagacgtctggatacctcgttaggatcagctcgcacagaggttgtctgcaagcaggctctgtatgtggatgtgatccgtgtgaacagct

SEQ ID NO: 467490 - DNA, 96 bp, Homo sapiens
gggcccggagcagccgccgccgcagcgcgaacatggacgccgtcaacgccttcaaccaggagcattgggaatggtaccacctcccgaaaatgtcag

SEQ ID NO: 467491 - DNA, 75 bp, Homo sapiens
gatcttcattcattaagcagtgcagaaacacaggctctgaacaagaaggaacacagagggtgcgacagcccagac

SEQ ID NO: 467492 - DNA, 105 bp, Homo sapiens
tggggccatgccaaggactatgtggagctcctgcccctcctaaagctgaagccaaagcgaaggctttaaaggccaagaaggcagtgttgaaaggtgtccacagcc

SEQ ID NO: 467493 - DNA, 83 bp, Homo sapiens
tgcgcggcggggctgaggcggccgcggggcccgagcgcaggtaagaacaagagagttggaaagcagttagcctcacagaagat

SEQ ID NO: 467494 - DNA, 100 bp, Homo sapiens
atggcccatggaaaagattttgcatctagaggaattgaaaattatctttctcaaggaatagatctttctggaatagaagtgatagaaaatgatctacttt

SEQ ID NO: 467495 - DNA, 90 bp, Homo sapiens
cttggaactcaaggatgcccaggctgggaaggagccaggggggagcagggctcactccagggtaagagtaaagtctccaccagaagctgg

SEQ ID NO: 467496 - DNA, 100 bp, Homo sapiens
ccgacatccttctgggcctacagctcaacgggacccaggtggagtctgtacagctcaaagtcaacatagcccgaaaacagcccatgctggatgccgctac

SEQ ID NO: 467497 - DNA, 131 bp, Homo sapiens
ggacgcgccgcggccgggcagggaggagaccggcacccagacaggtggcgacggcagaggagaccacagccgctttgtcaactgtgtgcgattctctcctgatgggaacagatttgccacagccagtgctg

SEQ ID NO: 467498 - DNA, 97 bp, Homo sapiens
tgaaaaacagacagctgtgtcagtagaaaacttcattgcagaattgctgcctgacaagattcatgcttaacaagtctagcatcatcatcacttaaac

SEQ ID NO: 467499 - DNA, 88 bp, Homo sapiens
ttgtctagcctggttagctgcctctgtattagcctgaggcctgctcagtcgttcctaatgaataaaaatcaagtgccaaagcttcagc

SEQ ID NO: 467500 - DNA, 100 bp, Homo sapiens
ggcctgcgcgcgcctcccgggcggattccagccccgagcgggacagcgcggcggggagcgacgagtatctggtgacccatctcatgggggcagatctgaa

SEQ ID NO: 467501 - DNA, 100 bp, Homo sapiens
atcattccttggggcaaaatgtggacaagggttgaaaggattgtagacaagaggaagaacaagaaaggaaaatgggagtatcttatccgatggaaaggct

SEQ ID NO: 467502 - DNA, 74 bp, Homo sapiens
cagtctgttctggttcacagtcatcaccctcagctttggctactacacagatccacctgatggctggccgagta

SEQ ID NO: 467503 - DNA, 75 bp, Homo sapiens
caacttacccgagaacgtgcgggaagagaagatcatcgagcatttcaaacgacggtctggaaaatcccgaagcag

SEQ ID NO: 467504 - DNA, 90 bp, Homo sapiens
ctacaatgatatatactgtgtccagttttagcataaagcaggtattcagaaacgtgaagccagcaattgtttcgcaattcggcattttga

SEQ ID NO: 467505 - DNA, 98 bp, Homo sapiens
gttcaatgatgccctcacagtcgtggaaagatctgactgcagccatgagcagcaatgagtgcttcaagtgtggacgatctggccactgggcccgggaa

SEQ ID NO: 467506 - DNA, 100 bp, Homo sapiens
caaacctgatgtgatcctcaagttggaacgaggagaagagccatggacatcatttgcaggtcatacctgcttggatggagtcttgctctgtcgcccaggc

SEQ ID NO: 467507 - DNA, 108 bp, Homo sapiens
ccgggacagagactatagtcggcgacgtggtgggccaccaagacgggggagaggtgccagctgctgcccgtgctggtgccattgccccatgtgaagtcactgtgccag

SEQ ID NO: 467508 - DNA, 90 bp, Homo sapiens
gctagatgctttactaggccatgctttacaaggattgaatatgatgcatatcgcactgatttggaagaactgaatcttggaccacgtgac

SEQ ID NO: 467509 - DNA, 74 bp, Homo sapiens
ttagcagtagacttcattttttgtttagttttagttgaagttctaaagcaggctgtattcatcaccaaagaaaa

SEQ ID NO: 467510 - DNA, 126 bp, Homo sapiens
tgcccttcgccaaggagatcgtctctctcatcgaggcccaaaccgccaaggccaagtttcttcctaacagtggtgattctactctggccatgtgtgcccgtgacgggcaggttcgagtagcagaac

SEQ ID NO: 467511 - DNA, 99 bp, Homo sapiens
gggcccggacggcacaccctacgttaccgtgctcaagggcttcttccgtcgtacgatccgcatgaagctggagtacgagaagtgtgagcgcagctgcaa

SEQ ID NO: 467512 - DNA, 100 bp, Homo sapiens
gtggccctagctgtgatatttgatgttgcaagtatcatcctgggctccaaggagagggcaaagaacagagcagttcaccatttgcattatatagaacgat

SEQ ID NO: 467513 - DNA, 90 bp, Homo sapiens
tttgatgaatacatgaaggagctaggcgcatattaaatttcctattgactacccctattcaccacctaccttcagattcttgaccaaaat

SEQ ID NO: 467514 - DNA, 97 bp, Homo sapiens
ttacagaaagcacagtgtttccaagctgctcgactgatccaaaacatggatgccaccactgagccttgtacagactttttcaaatatgcttgcggag

SEQ ID NO: 467515 - DNA, 83 bp, Homo sapiens
ccggcctgggagaagcagcagcgcaaggtctcctccgggctggggctgagcaagccctcggagtgaccgtgggtgacagcggc

SEQ ID NO: 467516 - DNA, 100 bp, Homo sapiens
gtgtctgcctcctccccaggaacccctcaccatccccaaggctttttctcctccgtgacagccagagtaatccaaaggcatttgtactcacactgtgtca

SEQ ID NO: 467517 - DNA, 78 bp, Homo sapiens
ggacagtgcagggaagcaactgcagagtggtggtatctccatcaaggcttctgcaaatatggacctcatgagggctga

SEQ ID NO: 467518 - DNA, 146 bp, Homo sapiens
tctctcttggctcctgtcccgctggccctctgtctgcctgtgtccctgaccatggctccctgcagtaccctttaacggaaatctactttcttcaatgtgttaaccaatagtcaggcttcagcagaaaacttcccgttctgcactat

SEQ ID NO: 467519 - DNA, 100 bp, Homo sapiens
cgcgctgacaggggggcctggccgcgcagccggaatttgagagcgtattttgcggtaaaactggccgaaggctaaagctgaccagaccggactccttggt

SEQ ID NO: 467520 - DNA, 100 bp, Homo sapiens
gccggcccagcagctgcagccgcagcctgtggctgtgcagggccccgagccggcccgggtcgagaataacaagcctttgtattcatttgaagataatgca

SEQ ID NO: 467521 - DNA, 90 bp, Homo sapiens
tgggcagggcctggggaatgcttttttatctcatattagtgcctgtgatggcatctttcatctaacacgccaagatgctgaattatcagg

SEQ ID NO: 467522 - DNA, 83 bp, Homo sapiens
aagcctctacaggggcctcccgcgccccccgggacccccacgccgccgccagctgtttgcagacaaggtcccaaagacagcag

SEQ ID NO: 467523 - DNA, 80 bp, Homo sapiens
atttccttcgtacccacagtgcttcatgagagcccaagaagatgaaaggattgttcttgttgacaacaaatgtaagtgtg

SEQ ID NO: 467524 - DNA, 75 bp, Homo sapiens
gactcttggtttggacatactacatggatcagattttcgacaatgaagccaaagacgtggagagagaagtttgct

SEQ ID NO: 467525 - DNA, 90 bp, Homo sapiens
ggatacctctgcgatcccgggtcatctccagatgctagggttatggtgttctaagaacggaagcatctgggctggatggaatttagcatc

SEQ ID NO: 467526 - DNA, 100 bp, Homo sapiens
tgtcaagacaacagtgatgaggaaagctgtgaaagttctcaaggtatctcattcagttgctaaacttatattagttaatttccactggcaagtttcagag

SEQ ID NO: 467527 - DNA, 124 bp, Homo sapiens
cgcgtggtgggggaactgctggggaaggcgattggcatcgatctctccatcccttccgaggcccgacttcgatgccttcaattaagttgcagagttctgatggagagatatttgaagttgatgt

SEQ ID NO: 467528 - DNA, 100 bp, Homo sapiens
agtctctgcacctcgcgccccagcagacggcactgagccctcccacatgcattatgcactagatgagaattatttccgaggatacgagtggtggttgatg

SEQ ID NO: 467529 - DNA, 98 bp, Homo sapiens
cccgctcgccgcagggcctgggcgccttcacccccgtggtgcggcagcgcacgctgcagtccagtaactccagacacctgcacgttctgattgggacc

SEQ ID NO: 467530 - DNA, 98 bp, Homo sapiens
ggggaccccggtacggacctgtgcagtaggtgatttcaaatcggagaagtccaacggggagctaagtgaatctcctggagctggaaaaggagcatctg

SEQ ID NO: 467531 - DNA, 102 bp, Homo sapiens
gactggaattacagacacatcatgggttttgtcgactactcagcccttctccagcaccactgaagagaaatgtgtgctatactggccggaaaagagagggat

SEQ ID NO: 467532 - DNA, 75 bp, Homo sapiens
aaagtctgcgaggaggaagtcgcctctgtgctcgtgagtccagggatctaaggaaaaatatctccctggacgggg

SEQ ID NO: 467533 - DNA, 75 bp, Homo sapiens
cgtgacttgactggttcgaggacagcacccgccaacctcctggaaggtgcctctgagcccaagtctgcacgtatt

SEQ ID NO: 467534 - DNA, 51 bp, Homo sapiens
cggaagccttcgtctcccagattgcagtgggcaagttacggaagcaatggc

SEQ ID NO: 467535 - DNA, 98 bp, Homo sapiens
ccttcctcaatggggaaacccaaattgtagctgacgaagcattttgcaacgcagttcggagttattatgagaaactccccaacttttaaatcatttga

SEQ ID NO: 467536 - DNA, 100 bp, Homo sapiens
ggcgggggcaccgagggctaccacgttctgcgggatccaaggattctgtagctacaatgttgtcaagactttttcgaatgcatggcctctttgtggcctc

SEQ ID NO: 467537 - DNA, 100 bp, Homo sapiens
ctaaaactcactttcttccggactctttcaagagaacgccagatcaagtgtcccaagtgtgataagctgttcttgagaacaaatcacttaaagaagcatc

SEQ ID NO: 467538 - DNA, 98 bp, Homo sapiens
gcccacggcctccagcttcaccacccgcacggcgcagtgccggaacactgtggcggccatcgaggaggggcatggtctagtggcccagtcaggacgcg

SEQ ID NO: 467539 - DNA, 83 bp, Homo sapiens
ggctttggtccccagcgcagtgaagtggtgagcctttttgtcactgaccctgtggtgaaggagcagtcccagccttgtgcaga

SEQ ID NO: 467540 - DNA, 50 bp, Homo sapiens
ccaggattcatcgctccacatgccactgtgggctcgagtaggggatgacc

SEQ ID NO: 467541 - DNA, 83 bp, Homo sapiens
ggccatctccacattcagaaccaagcttctcttttaaaaggactaaaacatgctaacatagtgctacttcatgacatcatcca

SEQ ID NO: 467542 - DNA, 100 bp, Homo sapiens
gaaggaatcctggatcaaagccctcaatgaagggattaaccgaggcaaaaacaaggctttcgatgaggacaagaatgccctgcccggaacaacccagcag

SEQ ID NO: 467543 - DNA, 75 bp, Homo sapiens
gcgacagcagcagcagcagccagtattcgggaaaggcagacaggctgaagctatgtgcatagttgggatgagggc

SEQ ID NO: 467544 - DNA, 100 bp, Homo sapiens
ttattcctactaacgtcctgtgtcactgagcttcagaggatgattccgaagaagacggagaccataacaggacatttgatattgcctaacttcatataag

SEQ ID NO: 467545 - DNA, 50 bp, Homo sapiens
gccaaagagacacagcccatttttttaggagggttctgataatgatgatg

SEQ ID NO: 467546 - DNA, 48 bp, Homo sapiens
cggcagcacgaaagtaccatgttgttcagaatgaagaaaatgaaaact

SEQ ID NO: 467547 - DNA, 100 bp, Homo sapiens
gcctgggttacaagcagcaagtgcgcggttggggccactgcgaggccgttttaggtgtcgtgaaaactacccctaaaagccaaaatgggaaaggaaaaga

SEQ ID NO: 467548 - DNA, 90 bp, Homo sapiens
gaatggtgggccgcagcattggcatgatgggccaggggtcccacaggtgaatgaaaactttgccattgatttgatagcagagcagcccgt

SEQ ID NO: 467549 - DNA, 75 bp, Homo sapiens
gtggagagctcaaccagtatagtgccaagtctgctcgtctgatggttcacaccgtggccacctttaattccatca

SEQ ID NO: 467550 - DNA, 105 bp, Homo sapiens
acaagaaacagcagcaagaaatcctggcggcgaagccctggactaaggaaaatggcccatgcgatcaagattgtacatcggtgctactggtcagtttctgaagca

SEQ ID NO: 467551 - DNA, 82 bp, Homo sapiens
ctacgacaaggacaagcccgtttctttccacaaatgaggctgctgtcatttgtggtgttggctctatttgctgtcactcaag

SEQ ID NO: 467552 - DNA, 75 bp, Homo sapiens
gaaaaatctgaggttatcaatgacgaggtcatcatggtcacaggagaccatccaatcacagctaaagctattgcc

SEQ ID NO: 467553 - DNA, 100 bp, Homo sapiens
ccgagacgcagatgcccgggccgtggctctagcaggctccactaactggggctacgactctgatgggcagcgtgttgtgctcctacagactgcaaccctg

SEQ ID NO: 467554 - DNA, 100 bp, Homo sapiens
aagcaagcagttcagaagagccaaggaataaacatgcaatgaacccaaaaggtgcttcgtttgattctacggtgcgactgtgggacatagaacgaggcgt

SEQ ID NO: 467555 - DNA, 75 bp, Homo sapiens
agacctcacagtgccaaatggagctggaagcagtccagtgggacagcaaggctgaggagaatggctcccacagct

SEQ ID NO: 467556 - DNA, 100 bp, Homo sapiens
cgagggaatgcagaaagagttaaggaaggcaggtcaaggtgaagatgttcttaaagggtcccagattacgtatgttacaggtgtagaaggggacgacgtt

SEQ ID NO: 467557 - DNA, 90 bp, Homo sapiens
ctgcagctggcgcctctgcagtggggtgaagagcgattatatgttagagatagctgatcaagtggaccaggaaattgctttgaagttggg

SEQ ID NO: 467558 - DNA, 74 bp, Homo sapiens
ggttacctatgtacctgttaccactttcaaaagtggatccataaagaacccagccaacccgcagagggagggga

SEQ ID NO: 467559 - DNA, 83 bp, Homo sapiens
gttccatcatggcgtcaatgcagttagagatgtttatgattacttccgagctgtcctgcagcgtgatgaaagaagtgaacgag

SEQ ID NO: 467560 - DNA, 75 bp, Homo sapiens
gggcgccgcggggcagccgccgctcctccggggtgagaattatgaagatgatgacctagtaaattctgatgaggt

SEQ ID NO: 467561 - DNA, 100 bp, Homo sapiens
gtaagcacaaagaataagattcctcaatcctgagagagagaattaaagtctaactctccaaatagctggagataagatgggtagactgctacttcccttt

SEQ ID NO: 467562 - DNA, 75 bp, Homo sapiens
gcggatgaagcagctggtggggctctactgcgacaagcatatgctactttgattgaaaatgattcaaatccagaa

SEQ ID NO: 467563 - DNA, 90 bp, Homo sapiens
atccctccacgttgccctcaaagccctgcattccagaggcacagaagatctctgatgatctgatgcagaagatcagtactcagaaccgcc

SEQ ID NO: 467564 - DNA, 95 bp, Homo sapiens
catgtgtcttccccagctctgcagccacatactatccgtttgttcaggaaccaccagtgacagagtttgcccaaaggaccagccaaaacctcacc

SEQ ID NO: 467565 - DNA, 83 bp, Homo sapiens
atcagcaggaagcttggagacatgagattgcaggaggagatgcttcagagagaggaagccgaaaacaccctgcaatctttcag

SEQ ID NO: 467566 - DNA, 49 bp, Homo sapiens
gcgtccggagtccccgtggccaggagccgggtgtgggctgagccctgcc

SEQ ID NO: 467567 - DNA, 82 bp, Homo sapiens
cgaggggccgcgatggagctgggggagccgggcggagcatcagatccatgctgctgctgactcggagccccacagcttggca

SEQ ID NO: 467568 - DNA, 50 bp, Homo sapiens
tcttccagaatctcagcagctgggaggcaagaaacctattggaattcgag

SEQ ID NO: 467569 - DNA, 100 bp, Homo sapiens
ccgactcggtcacaaggaaaatggattcagtttgcatctctccctcctttaaacagcttctccgggtctcagcatggtgtagagaggagagagagtgaac

SEQ ID NO: 467570 - DNA, 74 bp, Homo sapiens
ttatgtcagaaacacaaagcagcccaaccaaagggtataagcagtttagccaaattttgaagaacattggagaa

SEQ ID NO: 467571 - DNA, 100 bp, Homo sapiens
gttgtgcgttcgacgacgcggcaccggcttcgacgccctctgcccgctccagaagcaggtaaaaatgcatttgcaaagggagaaaatgaaggccaaacag

SEQ ID NO: 467572 - DNA, 75 bp, Homo sapiens
aaactacacaaaagtggaacagctttgttcagctccaaaaggaattcttcatttgtctcctgatgtttatcaaga

SEQ ID NO: 467573 - DNA, 90 bp, Homo sapiens
ctttgtctttgaggactttgtctctgatgagctgagaaacaaagccacccagccaatgaaggagagaagtttgctgaggaatgccttcaa

SEQ ID NO: 467574 - DNA, 90 bp, Homo sapiens
ggtcttgctcggccgatgaagtgcagaggtttttttctggttcctaaaagtaaagctctagaggccgtcaaattggcaatagaagccggg

SEQ ID NO: 467575 - DNA, 90 bp, Homo sapiens
gaaagactctattttaaagataatggaaagcaagcagtcttgtgagctattgacctgaaaagtggttctggaaaagtgtaccaaggccct

SEQ ID NO: 467576 - DNA, 48 bp, Homo sapiens
atttgaaaatgtccgtgcaaagggtgaccaaggcgagaggggtccagt

SEQ ID NO: 467577 - DNA, 74 bp, Homo sapiens
caacacataaaaattatttatccaacagctcctcccagacccaacatgagtgaagtttcctgcaagaaacggga

SEQ ID NO: 467578 - DNA, 100 bp, Homo sapiens
ggattgcaaagtcatcagccggtgccaaagaatgtccctcttccagtggaaagcccaaccatgcagacatcttgctcataaacttacagtatgtttcaga

SEQ ID NO: 467579 - DNA, 75 bp, Homo sapiens
gaagtttctaggaaaggccggacaccaggacatgtattcctctgagaaaccttggacagcagattttggtttaat

SEQ ID NO: 467580 - DNA, 73 bp, Homo sapiens
tgatagagtgtttactagacttggtgcctcagacagaataatgtcaggtggtggaggtggatacagcagtcgg

SEQ ID NO: 467581 - DNA, 100 bp, Homo sapiens
ccctcccttcctcccccaagccctgtctttccttctcctcctgccactgggctcttaaaaacatgggtgaaattctgaaagctgcaggctgtgacttcac

SEQ ID NO: 467582 - DNA, 100 bp, Homo sapiens
cactgggaaacatcattaaatccttgcaggcctctgggaagcaagccatcgtgtggcagaggcccaggtggcaaggaaccaagggcggcttctggccaac

SEQ ID NO: 467583 - DNA, 115 bp, Homo sapiens
ccacagacgtatatggatggtttactgcattatgtatctgtaataagcgacaactctgggtttggcccttactacactgagccagtcattgccgggttggacccgaagaccttta

SEQ ID NO: 467584 - DNA, 100 bp, Homo sapiens
ttggtgtcgtttttccttgagctgaacgtcttgcaacagtggccgcacgcatagttactccacaggatccgctgaacataggatgttgccacaaaatcta

SEQ ID NO: 467585 - DNA, 98 bp, Homo sapiens
taggtcgtgtttccaaagagaaaaacctactcttgatacacaatctaaaaagaattaggaaggtccttcagtacaaaattggacagctgtacatgatc

SEQ ID NO: 467586 - DNA, 83 bp, Homo sapiens
ccagcctgcggagcctgtggggcagtttttcagaagaagtgaagtcaagatgaagaaccatttgcttttctggggagtcctgg

SEQ ID NO: 467587 - DNA, 100 bp, Homo sapiens
tttggatatccctagaacgttgagggcacgagtcgggtcctgagaccagacggagccggtgggagaggagagcatctccgacgcagagaaggtggccatg

SEQ ID NO: 467588 - DNA, 123 bp, Homo sapiens
tatacatctctcatcatttcagcaacaaggaaataaattagtggcagagtaagggtgacttgtgttcctttctgccgaaattctccattcatatagaaaccaagtatgaggacaacaaaggaa

SEQ ID NO: 467589 - DNA, 100 bp, Homo sapiens
tcctgcaacccagaaccctggctgaccactttgaaggaggatgctccagcagaaactaatctggattcactccctctggttgatacccactcaaaaagga

SEQ ID NO: 467590 - DNA, 82 bp, Homo sapiens
tgcgtcaccgccgcccccccagacaagatggacaccgcggaggaagaagaccagtatggtgctgtgaaatgttgcaaaacat

SEQ ID NO: 467591 - DNA, 126 bp, Homo sapiens
cgccacctcgagctgcggtagcagcgactcatgagagcgcggccggaggacaggacactggggttgggaaatcaagcatcgtgtgtcgatttgtccaggatcactttgaccacaacatcagcccta

SEQ ID NO: 467592 - DNA, 100 bp, Homo sapiens
acggaggagaaaatattgaactgggaatcaaggccttgaaccggggcattgctgctgtcaaggaggatgcagtcgagatgctggccagctacgggctggc

SEQ ID NO: 467593 - DNA, 80 bp, Homo sapiens
cccggcggcctctcattctgcagctcatcttctcaaaaacagcaggagtcctggcaaaataagcatgcaggtagtaatgg

SEQ ID NO: 467594 - DNA, 75 bp, Homo sapiens
cattcagtcagaagaaggctgctattgaaagagagtatgcacagtgtttacgaaaatggggttacagaagatgtg

SEQ ID NO: 467595 - DNA, 82 bp, Homo sapiens
gattattgaccagtggatctgcgcacacgccagtaagactttgaccccgacgcaggcttcagtgattgccgcggatcagaag

SEQ ID NO: 467596 - DNA, 97 bp, Homo sapiens
ccccaccgccatcaccacctcggaacccagggtaacgctgtcagtctttgggtcagttaaatgaaagcatggaccatgggggagttggaccatatga

SEQ ID NO: 467597 - DNA, 90 bp, Homo sapiens
ttctgcaggaagcctttttggtggcatggtcctcaagaagttcctaaaagcaatcccacagagtattgatgaggaaactgaagtttggag

SEQ ID NO: 467598 - DNA, 82 bp, Homo sapiens
gtcctcctccccaggcccgccgcctccctgccaagaacatgaaaggctcccggagcagcgctgactcctccaggaaacactg

SEQ ID NO: 467599 - DNA, 97 bp, Homo sapiens
cagaagtttatcaaggctgtcacacatcaagttaaatttggtcaacaaaatccacgtcaggtggaatacatgttggtatcttttgatcatgaaaata

SEQ ID NO: 467600 - DNA, 83 bp, Homo sapiens
tgccggtgtggagcctccaattgcagtggattcctcggggatagaccaaagcccatgtgtcagtctcatatgattggcttttg

SEQ ID NO: 467601 - DNA, 100 bp, Homo sapiens
caggaaggcttgtgtctcatatatgagggaaaatcaacaaacttttgagtctactctggctgccctaacaagaaattcaataaatctgcttccaaaccat

SEQ ID NO: 467602 - DNA, 98 bp, Homo sapiens
tcacgctggcgcgagccccgtcctccttcgccgccgcgcacaaccgcacgtgcaggacctgaaggagaagaaggagaaggtggaggagaaggcaagcc

SEQ ID NO: 467603 - DNA, 75 bp, Homo sapiens
ggattccaagtaactcttatttgatcctgctcacactaaaatatgaaccacaaacacacagagaaacaacctgtt

SEQ ID NO: 467604 - DNA, 88 bp, Homo sapiens
gtgatttcttccaaagcacaggaatctcactctgttaaagctggtctgttctaactgaggcaaagatgcaatctacacaatcccagta

SEQ ID NO: 467605 - DNA, 75 bp, Homo sapiens
cccgaggcagcctccgcggaggagcagaaggatgagacctgcacgcagtggctcacagcagcacgatttgtgaca

SEQ ID NO: 467606 - DNA, 75 bp, Homo sapiens
gtgttgttactgatgcagagatacagcaaaagagtctacatagatgatccagatcctgatgatggatttaactat

SEQ ID NO: 467607 - DNA, 74 bp, Homo sapiens
cggcattgacaagctgggcgaggtccagggagtcggtagtaagggatggcgggacgtcaccacctttttttcgg

SEQ ID NO: 467608 - DNA, 100 bp, Homo sapiens
catacagcgctttgacaagtgcctggaagagttctatgcactctgtgaccagctggagctgtgcctggtcttcaaagcttcacctttctccaaaggcaga

SEQ ID NO: 467609 - DNA, 90 bp, Homo sapiens
ggtccggggcttgccctggtcttgctcggccgatgaagtgcagaggtttttttctggccgactgcagctcccgcccactccttctggccg

SEQ ID NO: 467610 - DNA, 98 bp, Homo sapiens
gatggaatcatggatgctgccaatttttacgcctgcctcacaccttgcgatgcgccaacatcaccatcattgagcaccagaagtgtgagaacgcctac

SEQ ID NO: 467611 - DNA, 82 bp, Homo sapiens
atctggacttgaaattgacaccttataaggtgttagccaccagtacaaaacatgatttacagccagttacttactcagaacc

SEQ ID NO: 467612 - DNA, 96 bp, Homo sapiens
gccgacagaggcagacacagaaggccgacaccctgcacctgaatttaacacgtgaactggagaatggggaaaaacagcaactgcagatgttggatc

SEQ ID NO: 467613 - DNA, 82 bp, Homo sapiens
aggactgtggcccacctcaacagaagaggaactgtgtgctccgtgaggatgaattacagaggatcatgtgattcagcatggg

SEQ ID NO: 467614 - DNA, 74 bp, Homo sapiens
acttacggcagtgggggctgacagcattgcagtgtcgagatggctatgaaccctgtgtaaatgaaggaatgtgt

SEQ ID NO: 467615 - DNA, 50 bp, Homo sapiens
gcacggacggtgttggttgggatttcttcgccaagcgcaagagatcagcg

SEQ ID NO: 467616 - DNA, 82 bp, Homo sapiens
actttttattatcatcatggacatgctccaggattcctctttgttggccaaaaggcagcttgaaggatgccaatgatgtacc

SEQ ID NO: 467617 - DNA, 75 bp, Homo sapiens
gcagtgcctggtggccgaccttgtccacacagtccatgctttcaaggatatgctgtattcagctcaggaccaggc

SEQ ID NO: 467618 - DNA, 75 bp, Homo sapiens
cggcgccgggcactgagcaccgccaccatggggaaggggttaacaagcacaagccctggctggagcccacctacc

SEQ ID NO: 467619 - DNA, 83 bp, Homo sapiens
ccaggatctcgggctcggaacgagactgcacgggggatatgagactttctactcggaatatcctgagtgttgcgtggatgtaa

SEQ ID NO: 467620 - DNA, 74 bp, Homo sapiens
aatcggtgaagagaggttttgaattcacgcttatggtagtgggcaagggcaaatggattaaaatcatgtgtaat

SEQ ID NO: 467621 - DNA, 100 bp, Homo sapiens
tacagagtgttgagaagtttattcagaaagtggatattccatctattataaccaagaaactattaaaagcagcaatgaagcatatagaagtgatagttaa

SEQ ID NO: 467622 - DNA, 134 bp, Homo sapiens
taacccagtgaagatgataaagcatgtcagggaacttgctgagcaactattcaaaaataatttcatgtcatccatttgtaacagtctttttgaagcattgtttcctggatcttcctactcgactagattttcag

SEQ ID NO: 467623 - DNA, 82 bp, Homo sapiens
tgcagtacaggatatgaagaaattgagggttcttgccatgttggttaccacagagaagcgcttcctcaaagacagtttgtac

SEQ ID NO: 467624 - DNA, 107 bp, Homo sapiens
ggaaccgccgggccgaacagcatgacgtccgctttggagaactacatcaaccccctgaaaagcaaaggcctcatctccatggcacaggtgatgaaacaggaagactg

SEQ ID NO: 467625 - DNA, 75 bp, Homo sapiens
tcttggagctggaccagtacttgagatcaatgagctgagcaatgttcctgttcctgtcatgctaatgccagatga

SEQ ID NO: 467626 - DNA, 101 bp, Homo sapiens
acagccaagcacgcggccaaggggaagcattttccctgaagatgagatcccagagaaggcctgcaggcgcctgcttgaagggaggcggcagaagaagacga

SEQ ID NO: 467627 - DNA, 100 bp, Homo sapiens
aggagctgactacagaggagcaggatttgcacccctcgctgggcttgctttggcaacagagtgcctgacccaggtcaggactccattattacagtctttg

SEQ ID NO: 467628 - DNA, 83 bp, Homo sapiens
aacaccacagactgcctcagcacaatgacaagtgtctgtaaagtcatgctggaaactccgtgacctctggatataaagcgaag

SEQ ID NO: 467629 - DNA, 101 bp, Homo sapiens
ttgaagttattaaagtctgttggtgcacaaaaagacacttatactatgaaagaggacagaatgacttggaagataacggagcttcgaagcttctagcagaa

SEQ ID NO: 467630 - DNA, 96 bp, Homo sapiens
cgggtctggagtgcgtgggggaccggctgttggcgggtcctgatgaagttgtagggccagaaggaatggaaaaattttgtgaagacattggtgttg

SEQ ID NO: 467631 - DNA, 75 bp, Homo sapiens
cccgagcgctggccttctggacatatcagttccatgccattgcagtgtcaactaggcctcagttacttttcagtt

SEQ ID NO: 467632 - DNA, 73 bp, Homo sapiens
ttctggcatcagggaggctttcagccggagaagcgagtttcagctgatccctaaagaagtggctgacatcttt

SEQ ID NO: 467633 - DNA, 75 bp, Homo sapiens
gagcatttgtgttgatgaagatgaaagagactgcagctcaccagaacaagctagaagaaatgatcaatgagctag

SEQ ID NO: 467634 - DNA, 83 bp, Homo sapiens
cggcgcgcggcgtcctcctcccgctcggaaggtccctgtgcgttttattgcgacctgccggtgggaactttgtctccgagtcg

SEQ ID NO: 467635 - DNA, 83 bp, Homo sapiens
agttttgaaatcgacacacaaagaatagagttgagcctgtgggacacttcgggttctgggccggagaaggggcgacgttcggg

SEQ ID NO: 467636 - DNA, 100 bp, Homo sapiens
gcaacagcaagaagaagagcccagctagcaccttcgccctctccagccaggtacctgctggcagtgatggtgaaagcataggaaactgccccttttccca

SEQ ID NO: 467637 - DNA, 90 bp, Homo sapiens
cttgggtcttccggtaggagctgtaatcaattgtgctgacaacacaggctggttacatgtctgggatgctggtgcctgtaggggttggga

SEQ ID NO: 467638 - DNA, 102 bp, Homo sapiens
tgggatcctacgtgcatgaagatggacgaggtcctgtacagcatcgccgagaaggtatttgtaggcaaaataccaagggatttatatgaggatgagttggtg

SEQ ID NO: 467639 - DNA, 83 bp, Homo sapiens
ccgttgcatcggtgcagggcaaggctgcagctatgactccaccagaggaggaattgaagagaatgggctccccagaggaaaga

SEQ ID NO: 467640 - DNA, 76 bp, Homo sapiens
cgcggggtccgccgggggaggcggacctgtggatgaagagccagagtcctctgaggtcgatgctgctggtcggtgg

SEQ ID NO: 467641 - DNA, 96 bp, Homo sapiens
ttgtgagtgccctctagaggtcaatgagtgcactggcaacctcaccaatgcagagaaccgattgctgctctctgaacactatagtcgtcgaatctc

SEQ ID NO: 467642 - DNA, 54 bp, Homo sapiens
gtcaacttcctcaagtcgcccaaaggctatttgctttctagaagagaaggccaa

SEQ ID NO: 467643 - DNA, 101 bp, Homo sapiens
ctgggcagttggctgcgtcatttttgaactgcttaccttaaagaggacgtttgatgctacactgaacaggaagacacccagaagaaagccttcacgtgctg

SEQ ID NO: 467644 - DNA, 80 bp, Homo sapiens
ggcctccctcaccttggacacctcgcttggagcccaggaaactctgcccgcagcttatgacggtcattaaccagtttctg

SEQ ID NO: 467645 - DNA, 88 bp, Homo sapiens
ggcccggagcccccagcgcagcggccgcggtgctggagaatctggtaaaagcaccattgtgaagcagatgaggatcctgcatgttaat

SEQ ID NO: 467646 - DNA, 82 bp, Homo sapiens
ggcgagtacgagcgctccttcctgcgtgagttccacaaggagctgtggcgcggggccttccaggagtctgagctatgagtgg

SEQ ID NO: 467647 - DNA, 83 bp, Homo sapiens
caaccatctcacacctttccaaaggacgcgaccataactctaaaaggttgtggcagcactgcctgaaggtatgagaccagatt

SEQ ID NO: 467648 - DNA, 75 bp, Homo sapiens
tcaaaacctggctgctatcagagaagaagggtgtttggggtgtgttttacaaagcatcagaagagctaacaattg

SEQ ID NO: 467649 - DNA, 98 bp, Homo sapiens
atccaaggatgagattttgccagagaaaggacgagcagcaagtcagggagcttaagaatgtcatacccaggctatcccccaacaggctacccaccttt

SEQ ID NO: 467650 - DNA, 90 bp, Homo sapiens
gccgggcctccaggctgaatctgttcttccagatgttcaactgcatcacggagctggtcctccgagcaaagaaagacaacctggcaaaac

SEQ ID NO: 467651 - DNA, 98 bp, Homo sapiens
gcaggatttggtttcagcatgtccttctctgaatgatgaatacttttactactgtgacaacattaacgaagagtcaagtaccattggccaggatcaaa

SEQ ID NO: 467652 - DNA, 97 bp, Homo sapiens
gaaagaaagagccctggactgtgaagagtgaggagaccatagctgcacagccaggtgtcagttgtacccgaggcgttctcagcagcagcaagtacct

SEQ ID NO: 467653 - DNA, 51 bp, Homo sapiens
ctaacagaactggaccttttcgccagtaaatgacctgcgacataactattt

SEQ ID NO: 467654 - DNA, 100 bp, Homo sapiens
ggcgagaggcggcgccgctcccaagatgtcgcagacggccatgtccgaaacctacgaccaaccctggaatggtccccagccatggattcagtcccagatc

SEQ ID NO: 467655 - DNA, 82 bp, Homo sapiens
tttttcgcaacgggtttgccgccagaacacaggtgattccctgaatgtggtggaagtgttcgaccccattgccaattgctgg

SEQ ID NO: 467656 - DNA, 100 bp, Homo sapiens
cctcaagactggtccacggagtgtatgaccacaaacagccatcaaggacttgacacagcaagcaaaagacatacagaacataacagtccaggaaaccaac

SEQ ID NO: 467657 - DNA, 100 bp, Homo sapiens
caagagtccacaaagggacctgatgaagcgaagatcaagtctcttcaagaaaatgaggaggaggagattgggaacctagagcttgcctgggatatgctgg

SEQ ID NO: 467658 - DNA, 95 bp, Homo sapiens
gagctgaggaaccagatatcttgaaaagctgccagaaaggttctagcaagaggagaagaaaggaggaaaccacagggaaaaatgttaagaagaca

SEQ ID NO: 467659 - DNA, 88 bp, Homo sapiens
ctaggccgggccctgccagggagcaagtctgcatcgcagaggccaggcaatactacatcctgctgatcctgacggacggcgtggtgac

SEQ ID NO: 467660 - DNA, 51 bp, Homo sapiens
tggacggaccctcgccagtgctctgcgcagcggaagatccatccaaaagct

SEQ ID NO: 467661 - DNA, 82 bp, Homo sapiens
ccatgtccgcagacctggaggagcctctggatcgggtattcattcctgatgcattttgaaagcgaagcagaagccgtagaat

SEQ ID NO: 467662 - DNA, 90 bp, Homo sapiens
ttcatcattctgttgaagaaacgcttaacccaaacaactctgctcatggtgattacatgcaaaataacgagagcagcttaatagagcaag

SEQ ID NO: 467663 - DNA, 74 bp, Homo sapiens
agagcattcagctgtctcaaatgcagggccggtgcataaacttctcccgagttccatctcagtaaaagggaagc

SEQ ID NO: 467664 - DNA, 98 bp, Homo sapiens
aaaacctttgggcttcatggagtcgtcttagatgttgattcagacttcctcgttctgcccatcttcctaacaaggctatggctgataacagcagtgat

SEQ ID NO: 467665 - DNA, 82 bp, Homo sapiens
cagaccctggagcctcagttggaagcagccgatccagcctgcggagcctgtggggcaggtgaactgcgccaggccactgtgg

SEQ ID NO: 467666 - DNA, 100 bp, Homo sapiens
cccttccggagtccgccccgtgaggagaatgttggaatcgaagcctcttaaaatggcagatgacttggacttcgagacaggagatgcaggggcctcagcc

SEQ ID NO: 467667 - DNA, 75 bp, Homo sapiens
ctgggcatctggaggattgtgatcaggatccaaagagatctctcaaaggccttggttctgacagaaattggcccc

SEQ ID NO: 467668 - DNA, 97 bp, Homo sapiens
tggtcagaatggatccacgcctgatggctccacgcatttcccttcgtgagtctagtcctcaactctaaccaaagtaaaggaaactggaaagacacac

SEQ ID NO: 467669 - DNA, 75 bp, Homo sapiens
aacctgagctcgacctccgctcaattaaggaagtcgatgagaaagaagatgctgatatgctacaacacggatgaa

SEQ ID NO: 467670 - DNA, 100 bp, Homo sapiens
caactaatgtgagtgaggaagtgactgtatgtggactgtggagaaagtgaccattgtgaggtagatattttgttctaattttccagatgaggaagctgag

SEQ ID NO: 467671 - DNA, 78 bp, Homo sapiens
gaacaggcttccaggaggaaatgaggaaactaaatatattttgccaactttggaaaaagaattattcttggcagagca

SEQ ID NO: 467672 - DNA, 76 bp, Homo sapiens
gggagaccgtaatgagcgtcaaaattatccgaaaccgcctcactggtcccatgaagctgaggtcttgaagcagctg

SEQ ID NO: 467673 - DNA, 100 bp, Homo sapiens
agcgcgtggtgggggaactgctggggaaggcgattggcatcgatctctccatcccttccgaggcccgacttcgaccaatttatatctgacttggaacacc

SEQ ID NO: 467674 - DNA, 83 bp, Homo sapiens
cggaagctggtggaacagctacgcatagaagccgggattgagcgcatcaagatttatgtgatcagtttggctgaaccccgtct

SEQ ID NO: 467675 - DNA, 75 bp, Homo sapiens
cggctgctggggccggggaggagagccaggaatgagtagcgacagtgacattgaatgtgacactgagaatgagga

SEQ ID NO: 467676 - DNA, 83 bp, Homo sapiens
cagctggacgccgagatcaaggcggacaaggagaaggggttccgggcatgcttctgacggccaatgaaacccccaagatgggc

SEQ ID NO: 467677 - DNA, 81 bp, Homo sapiens
gagaagctcaacctggactcgatcatcgggcgcctgctggaagtgcttaaacagccttcccagcccacagcagcaggggta

SEQ ID NO: 467678 - DNA, 75 bp, Homo sapiens
caaaaatagtgatagctttgataagaactgcaagcacatgttgaccagataactgaaatggcagcagtaatgagg

SEQ ID NO: 467679 - DNA, 83 bp, Homo sapiens
ggtgtctccgctcatcagccccaagcccctcgccctgcccggggcgcatgtggtggcctggttgcagtatgcctgaaatttgg

SEQ ID NO: 467680 - DNA, 100 bp, Homo sapiens
cgatacggtggacacgtggctggatgacacggccaagggcatgaacccaagctacgatgaatatgctgactctgatgaggaccagcatgatgcctacttg

SEQ ID NO: 467681 - DNA, 100 bp, Homo sapiens
ctgccacggtctgcgtagctccagaggtttaaccataggatagagaaaccagttatttacctcatactctaccatgccatctttgtgttctttacctgga

SEQ ID NO: 467682 - DNA, 75 bp, Homo sapiens
caacaccccagatgcaagcgtggattgggacgctacgtgaccaaacccaactcagatgatgaggacgatggggat

SEQ ID NO: 467683 - DNA, 75 bp, Homo sapiens
ggactgtgtcaaggagatcggcctcttgaagtacgtttcaggagacggcagcgaggctaccttgcatggtgtggt

SEQ ID NO: 467684 - DNA, 100 bp, Homo sapiens
gcaagcaaaatgcgttaggaaaatgtgatgcatgtctcagtggctgtgcatttggatcagctgctatttggcaatacgaatcactgaaatccaggggtcc

SEQ ID NO: 467685 - DNA, 90 bp, Homo sapiens
ggagccgcgggccggcgagcgcgtcgccaccatggcgacgttgtggacgtttaccagcgggagttcctggcgctgcgcgatcggttgcac

SEQ ID NO: 467686 - DNA, 75 bp, Homo sapiens
cagagctgaggactgcctgtttgcagcccgtggaccgggagcccgtggaccgggagccggtggtgtgccaccccg

SEQ ID NO: 467687 - DNA, 90 bp, Homo sapiens
ggcgatagcaatgcacagccaatttcatgctccactataggtactggtccaatatggctgaatgaagtgttttgttttgggagagaatca

SEQ ID NO: 467688 - DNA, 97 bp, Homo sapiens
caataagaagagaagatggacagtttcagtgcattacagtcgaaatcagctgtccgccctgcctgcctgcctgtgtggtctgcctctcaaagtctta

SEQ ID NO: 467689 - DNA, 89 bp, Homo sapiens
ttggaacgaggagaagagccatggacatcatttgcaggtcatacctgcttggagaatgccacgggtgacctggccaccagcaggaatgc

SEQ ID NO: 467690 - DNA, 50 bp, Homo sapiens
gaaaatggttcccactgccgggcgaggtaaaatagaactgcacgggaaac

SEQ ID NO: 467691 - DNA, 60 bp, Homo sapiens
cggaggggctggacgttccacgccaaagtgatcagggccaaagcggtcagtgagaaggaa

SEQ ID NO: 467692 - DNA, 105 bp, Homo sapiens
cagaccctggagcctcagttggaagcagccgatccagcctgcggagcctgtggggcagttttacagctcccagcacagtaggaaagagaaatttgagtcctagtc

SEQ ID NO: 467693 - DNA, 101 bp, Homo sapiens
ggagaccaagctcaaactaatggcacgctatgggcggctggcggaccctgctgtcactgactttccagatatttggagttcttacaacatggcagacattg

SEQ ID NO: 467694 - DNA, 74 bp, Homo sapiens
gggcggcagagcagggcggcggcgactcggtatatgaatgacctaaaggtacaaataaagacggagagagaaca

SEQ ID NO: 467695 - DNA, 97 bp, Homo sapiens
ggcatctgggttcaggtcagacgatgaccaggaaaggaggggcggtcttgcgagtggctggttccctgcagaagagcacagaagtgatgaaggccat

SEQ ID NO: 467696 - DNA, 100 bp, Homo sapiens
ctgcttctgcctgtgctgtgggggagagaggccgcagccaggcctctgctgccctttctgtgccccccagtacatcgcggtgcacgtggtcccggaccag

SEQ ID NO: 467697 - DNA, 90 bp, Homo sapiens
tataactacacgctgtgtcggaacggggtgaaagagaagcacggctccgactactccaaggaagaaggagagacgaccatcttgcaacta

SEQ ID NO: 467698 - DNA, 89 bp, Homo sapiens
tgggagcagaagggaggctccaagacctcatcaacaattaagacgccctgctggcggacttggagtctaccacctcccacatctccaaa

SEQ ID NO: 467699 - DNA, 98 bp, Homo sapiens
ggatcctcttccaaaaccacaaacttgcctacgtcagtaacagccaccaagattgccacactgaaggtcaaaatattttattcactgatggagaatat

SEQ ID NO: 467700 - DNA, 100 bp, Homo sapiens
ctcggatatagaatagacattcccaagaatggcaagttaaacatacagtcgcctctgacaagccagagaggcgtttccatcaaccagttttgcaaggagt

SEQ ID NO: 467701 - DNA, 74 bp, Homo sapiens
cgcagtccaagtcccggaagatcgcgatcctgggctaccggtctgtgggtctgttgccacagttattgggagtt

SEQ ID NO: 467702 - DNA, 82 bp, Homo sapiens
gaattcagaaggagctagctgaaataacccttgatcctcctcctaattgcagcagaaaaatatggctcaggagactaaccag

SEQ ID NO: 467703 - DNA, 96 bp, Homo sapiens
ccaggctcgcctcgactccaaatggttgaaaacagatatacaggtagcaaaccatgtgatttcttctgactctatttcctcttctgccagtagttt

SEQ ID NO: 467704 - DNA, 75 bp, Homo sapiens
gatgataaaatcatcaaaagagccaatgagagagcagcacttgaggcatgtcacaagggctggggcgtcagcgtc

SEQ ID NO: 467705 - DNA, 100 bp, Homo sapiens
tcctgagtagctgggactgcaggtaagaagaaagcagcggcattgttcgacagccaggccccaatttgccccatctgccaggtcctgctgaggcccagtg

SEQ ID NO: 467706 - DNA, 82 bp, Homo sapiens
accccgtcccgaccctggccgccccgagcggagcctggagctggcccgagataacttcttccgctgtggtgtgctgtatgag

SEQ ID NO: 467707 - DNA, 51 bp, Homo sapiens
gcggctctttgtatgatgacgaccgtataatagacgctggccccaaaggaa

SEQ ID NO: 467708 - DNA, 50 bp, Homo sapiens
ccagcggagggggctttggaccggtggtgatctttgtgaagtctgtgcag

SEQ ID NO: 467709 - DNA, 98 bp, Homo sapiens
cccagtaggagaatgactccgattcgtgaccctcagcgccggtgcatgtcgatgtttctactttccaggtccactggtgtttggtgtacccatgtgac

SEQ ID NO: 467710 - DNA, 50 bp, Homo sapiens
ggaatgcacagaacctgctgtggaaggcaactttttgctccttcctacac

SEQ ID NO: 467711 - DNA, 100 bp, Homo sapiens
tcggggacacccctatggtcagaatcaacaagattgggaagaagttcggcctgaagtgtgagctctcccgcgggaggactcagactccagcacttccagc

SEQ ID NO: 467712 - DNA, 90 bp, Homo sapiens
atccaggatggacaagcttggccgcaccattgcagaccatgattccccagctttccgttgcacaaacagtgaagtgacagtccagcccag

SEQ ID NO: 467713 - DNA, 83 bp, Homo sapiens
gcgcgcagatacccgcggtgcaccgcctgctgggagcgccgctcaaggagcaggccgggctctcgccatgggtcactgtcgcc

SEQ ID NO: 467714 - DNA, 100 bp, Homo sapiens
tgcccggacgagttcgatgacttcgtcacctatgaggttccagcagcactgatgtgaaggaaaaccgcaatctggacaacgtgtcccccaaggatggcag

SEQ ID NO: 467715 - DNA, 100 bp, Homo sapiens
tcatgaattccggagttgccatgaaatatggaaacgactcctcggccgagctgagtgagcctgttcgacatgggcggtgagtattactgcttcgcttccg

SEQ ID NO: 467716 - DNA, 50 bp, Homo sapiens
cctggaacaaacctggcgcctagtgggtcttcccagagtttgctgctgcc

SEQ ID NO: 467717 - DNA, 100 bp, Homo sapiens
gccagcaagaaatgatcagtagcaccagtgtttatgggagcatgacttcggcaacttcacctatcattctgaaatgggaccccaaaagtttggaaatccg

SEQ ID NO: 467718 - DNA, 82 bp, Homo sapiens
cttggaaatggctgcaggttcagagttgaatttttaggagaagaaggaactggcttgggacccacattagagttttatgctc

SEQ ID NO: 467719 - DNA, 75 bp, Homo sapiens
aaggataagcctcgacttagaagctaccgagttaccctaagaaaggagcccagtttcctccaattgcagcacaag

SEQ ID NO: 467720 - DNA, 75 bp, Homo sapiens
taaggaccagtacctgcccaggaaactgagtaagttgtttaagaaaggcctgaatatatcagaacatctgagcac

SEQ ID NO: 467721 - DNA, 100 bp, Homo sapiens
cagtcagaagaaggctgctattgaaagagagtatgcacaggctcttgtcaggatggtgaagctgttcatcggaaacctgccccgggaggctacagagcag

SEQ ID NO: 467722 - DNA, 122 bp, Homo sapiens
gccaagcatgccagcacctaccgagaagctgccacaaaccaggccaagatccacgctgacgcagagcggaaggaggcaatagccctctggaacaagacaattcatgtgagataagaaagaag

SEQ ID NO: 467723 - DNA, 96 bp, Homo sapiens
cgccgtcagtcctttcagcttcagcctgctcaagaactgcagcattgcagccgccaagacgcccggcatgccagtgcttcctccacggtaaggttt

SEQ ID NO: 467724 - DNA, 100 bp, Homo sapiens
gtggaggggtggtgaccatcgaaaggagcaagagcaagatcaccgtgacatccgaggtgcctttctccaaaagaaatgcttcggttacccacagtctttc

SEQ ID NO: 467725 - DNA, 98 bp, Homo sapiens
aggaccagtacagcttcagcactgacacggtggagtgccgcttctacagtgatgagttggaacaattcatggaaaatcaaggtgcatcgagcccaggt

SEQ ID NO: 467726 - DNA, 101 bp, Homo sapiens
gccccaccccgccagctccagagccacgtacgcactattcctgatcagagaactccagttgcttcaacacacagtatcagtagtgcagccaccccagatcg

SEQ ID NO: 467727 - DNA, 100 bp, Homo sapiens
agagctgcctggatggctgggagttcagccaggacgtctacctgtccaccgtcgtgaccgagatgccttcaattaagttgcagagttctgatggagagat

SEQ ID NO: 467728 - DNA, 100 bp, Homo sapiens
agtgaaagtatccagtatgtctttccaccgtaccctagagttggcatcttgtttaccagaggggagcgaggcgttggggctgaacctctgctcccatgga

SEQ ID NO: 467729 - DNA, 100 bp, Homo sapiens
ggagacgagaccagaggccgaactcgggttctgacaagatggccgggctgccccgcaggatcatcaagaatataacaccagcaatcctgacttgttgcta

SEQ ID NO: 467730 - DNA, 101 bp, Homo sapiens
gcggagggctccgacggcgcggacggagcgaagcgccgagccatggcgcaccaaacgggcatccacgaaaagttgccagacggccagcattgccactgcca

SEQ ID NO: 467731 - DNA, 78 bp, Homo sapiens
ttgcagcagaacatcgagtgttggataacttctctgacatagtagaagggagatttgtgccacaccccggctgtttcc

SEQ ID NO: 467732 - DNA, 100 bp, Homo sapiens
ccccaggtccagtctcctgtacacgcccccgagctgggaagcaggctgcagcttcacaggagcatctttccttgaagaagtacattattgacattgtggt

SEQ ID NO: 467733 - DNA, 82 bp, Homo sapiens
ggatcactgaggaaggggaagtgggcaaagcaggtgactgctacattgagaaacttggttgattcatcattagtaagaagta

SEQ ID NO: 467734 - DNA, 100 bp, Homo sapiens
actgagaggctctgggaaactcagcctgtgaccccagcgtgggtgaagataggatcaagatggccatgtggcaggggaatgggtactgttcaaaaaggaa

SEQ ID NO: 467735 - DNA, 96 bp, Homo sapiens
gacgaccgtcggttctgtccgggaggaatgacggggtcaagaacatacatatgatagttgagaaagacacatattctgatcatgaagaaataaaca

SEQ ID NO: 467736 - DNA, 58 bp, Homo sapiens
cgggaggtgaatttccatgtcaacatagtcctggtgtggccgacgacgatgccctcgc

SEQ ID NO: 467737 - DNA, 100 bp, Homo sapiens
ggaagcgcgggtggtcggctggggtccggctcctggagaacatggcccggcctcccgggggctctggtcccctcctcgtttgatgaaggccggaacaact

SEQ ID NO: 467738 - DNA, 75 bp, Homo sapiens
tcccagaatctacgtctaaactgcagaagtttacaagggttgtgagtcccggcccagcccctccacccccctgcc

SEQ ID NO: 467739 - DNA, 101 bp, Homo sapiens
gctggggcccctgtctattgaccccaacatgttgaatgcacaaaagcaacaggtccagtgtaattgcttactcggtcatcgtgggagcactgatggcaagt

SEQ ID NO: 467740 - DNA, 97 bp, Homo sapiens
tttctcaaacgagagtcagcctttaacgagttcacatgagactctgaatatagtggaggagaagaagcgggcagaggttgggaaagacgaaagagta

SEQ ID NO: 467741 - DNA, 99 bp, Homo sapiens
ctgtcagcagaggaaggaggcgacagcgccggagcagattttatttggagagaagcaagcatctttgcctctttggagtaggaaattcagacttgaaaa

SEQ ID NO: 467742 - DNA, 82 bp, Homo sapiens
caggcagagtgctgatgtgaaaaataccacgacaaaaccaccctaaactcccccactggaaaggattctgaaagaaatgaag

SEQ ID NO: 467743 - DNA, 100 bp, Homo sapiens
cggtgctgcagacggcgagacctcctgcacagggcagctgtgcggagggtagtggcagccatgaaccggatggaccagaagaagcacgagaagttttcaa

SEQ ID NO: 467744 - DNA, 100 bp, Homo sapiens
gaggcactcaagatgaaaactacttcaactaaaagccaaccacttgaacaagctcaaagcttggattctgccgtgccactcacgaatggcgacacagaag

SEQ ID NO: 467745 - DNA, 100 bp, Homo sapiens
gaagacccccatcaaggtggagctggtggcagggaaaacctacaggtggtgtgtgtgtggccgcagcaagaagcagatctacgaactgcgtgtgatggag

SEQ ID NO: 467746 - DNA, 74 bp, Homo sapiens
gtggtcgcgtctcggaaaccggtagcgcttgcagcatgttggaattgatcacaccttttcagttgtacttcaat

SEQ ID NO: 467747 - DNA, 100 bp, Homo sapiens
tacttagtatctttggacaaataggaattcaatgaaaacgtattcttaaaggcgaaaaaggtggatttgctagactacatttggtcaattttgtggaacc

SEQ ID NO: 467748 - DNA, 75 bp, Homo sapiens
cttttcctccacctaccttcccgaaatagctgaaacctttggacttcaagaaaattatatcaaaattgtcataaa

SEQ ID NO: 467749 - DNA, 51 bp, Homo sapiens
tacttggaaatggctgcaggttcagacaggaagaagatgagccttaggtct

SEQ ID NO: 467750 - DNA, 73 bp, Homo sapiens
tgaggcctccccagccatgtggaactgtgggcatccaggtggcctcggaggacctgtgctctgagaagcagtg

SEQ ID NO: 467751 - DNA, 75 bp, Homo sapiens
aaggaagtattagaaatgagctgaagaccattcacagtgtttcagaattgttggaactttatgaggaagatcctg

SEQ ID NO: 467752 - DNA, 100 bp, Homo sapiens
tggagttcacagaagagtcgaggagtaatctatgccagcaattatgacaatgttagcagaccatgcagctcgtcagctgcttgatttcagccaaaaactg

SEQ ID NO: 467753 - DNA, 83 bp, Homo sapiens
cgcgggctgcgcggccgaccaggcgaagcagttgctgcaggcggcccactggcagttcgagacaatgcagatcttcgtgaaga

SEQ ID NO: 467754 - DNA, 83 bp, Homo sapiens
tcacaataagagcagaggatggaacacttcagtgcattcaaggtgttttggggaacgagtttagtatattaaaatcaccaggg

SEQ ID NO: 467755 - DNA, 75 bp, Homo sapiens
caagagcacgctatgagagatacagtggcaatcaggttctcttttgacttatacaagcactagcaacaactctat

SEQ ID NO: 467756 - DNA, 50 bp, Homo sapiens
tgggggaccacaagatcctcatcgacaggcagcgtctatcccagactacc

SEQ ID NO: 467757 - DNA, 100 bp, Homo sapiens
tattctggaaaccagtgcaatgatcactttcaaaattgtggactatgaagatgagttagatttgctttctgtggtagctgttactcaaatagatgctgaa

SEQ ID NO: 467758 - DNA, 100 bp, Homo sapiens
ctctgtccagttttcaaaccacacaggaggagaacatttgcctgcactgggcggcgttctccggctgcgtggacatagccgagatcctgctggctgccaa

SEQ ID NO: 467759 - DNA, 96 bp, Homo sapiens
gaaaaatatggcaaagacttcaatgacatacggcaagattttttttaacggtgactccctgatgatcattccttggcatgaacataaacaccgagc

SEQ ID NO: 467760 - DNA, 102 bp, Homo sapiens
catacacttgtcaccgagccaccattgtggctttcctgggggaatgcctggtaattttcccggaggaatgcctggaatgggagggggcatgcctggaatggc

SEQ ID NO: 467761 - DNA, 50 bp, Homo sapiens
tcccaagtagctgggtttacagtccacattcttgagtctgatgacctcca

SEQ ID NO: 467762 - DNA, 100 bp, Homo sapiens
gccagacttggtattcacaccattaaggaagatgtggacaaggcagtgaaggccgcccgggccgccttccagctgggctcaccttggcgccgcatggacg

SEQ ID NO: 467763 - DNA, 103 bp, Homo sapiens
gcggcagagtccccgtacgcctacagtaacggtgctggagaatctggtaaaagcaccattgtgaagcagatgaggatcctgcatgttaatgggtttaatggag

SEQ ID NO: 467764 - DNA, 90 bp, Homo sapiens
caaccctcaggaagctcagcggtgggcagtcctagtccgaggtgccaccgtggaaggacagaatgatgaagactcttaagatgacagaag

SEQ ID NO: 467765 - DNA, 98 bp, Homo sapiens
cgagctgggtggtctggagaccatggagaccctcacggagctgggcgacgagctgaccctgggagacatcgacggtagcttcctattgaagtttattc

SEQ ID NO: 467766 - DNA, 100 bp, Homo sapiens
tgtgggggtgtcctggtgcacccccagtgggtgctcacagctgcccattgcctaaagaaggaccgcgcaaactgtgtgttaaggagatgaacagtggcat

SEQ ID NO: 467767 - DNA, 95 bp, Homo sapiens
aactctccgggcggccgcacctgccaggtgaatctggattgggaaagtcgacattaatcaactcattattcctcacagatttgtattctccagag

SEQ ID NO: 467768 - DNA, 90 bp, Homo sapiens
acaaaactggcactgattcaaattcaacagaatcctctgaaacttccacagtggtaagcatccgtggcattcaagacgaagatccccctg

SEQ ID NO: 467769 - DNA, 96 bp, Homo sapiens
tgatgggcagcttcatgtcaggcaaatcctgcatcctgaggcttccaagaagggttatgtgcttcacatgatcactactgcagcagaatggtctat

SEQ ID NO: 467770 - DNA, 97 bp, Homo sapiens
ctgaaatacagcaaaaatatcctggaccggcaaggatgtgtggcaggttcctgaggtggtggctgctggcggaggagagctggcactccacccccgt

SEQ ID NO: 467771 - DNA, 100 bp, Homo sapiens
gctatggcgggagtggcagctatgacagctataacaacggaggcggaggcggctttggcggtggtagtggtggtcaaggtggtgggcagcaacatctccc

SEQ ID NO: 467772 - DNA, 88 bp, Homo sapiens
ttggcttctccttgcctgattgtttgcaggttgtcagagaagtacagggcaacacacaagtttgctgattgcaaagcaaaacgtgaca

SEQ ID NO: 467773 - DNA, 75 bp, Homo sapiens
tgtctacagagctgagtccattcacactggtttggaagttgcaatcaaaatggactagcccgagccaagtcagtt

SEQ ID NO: 467774 - DNA, 50 bp, Homo sapiens
gcagcaggcgcagggccagtgggtgcagagaagcagggccctgagcggaa

SEQ ID NO: 467775 - DNA, 98 bp, Homo sapiens
caaaattgaaaaaatggttgacctcacccagtgagaaagatcagtctaaagaaaaggagaagaaagtgaaaaaaacaattccttcctgggctaccctt

SEQ ID NO: 467776 - DNA, 131 bp, Homo sapiens
atcttgatctatatccatagattggaatattggtgggccagcaatcctcagacgcctcacttaggacaaacctaatctgggagcctgcaagtgacaacagcctttgcggtccttagacagcttggcctgga

SEQ ID NO: 467777 - DNA, 100 bp, Homo sapiens
ccctcctctcacggcacctcccaccatgaaggagtgcgccggtctcggggaaatgcccggttccttcgtgcccacggtcaccgcgatcacaaccagccag

SEQ ID NO: 467778 - DNA, 80 bp, Homo sapiens
ctttgatgtggaaagtatgaagaaagccatggtggagtatgagcttttcaggatgtccagcaaagaatcctgtgggaaaa

SEQ ID NO: 467779 - DNA, 103 bp, Homo sapiens
cagactgagcgcgtccaggcctgacagctctgcggctcgggccctgaggtcaaaatgcagatcttcgtgaaaacccttaccggcaagaccatcacccttgagg

SEQ ID NO: 467780 - DNA, 100 bp, Homo sapiens
cgctgtagtgggcggccagagcgccggcaagagctcggtgctggagaacttcgtgggccgagtgtgaacatggctacgcctcttcattcccgtccatgcc

SEQ ID NO: 467781 - DNA, 75 bp, Homo sapiens
ctacaggggctctggccatcttcgtgtgctctacggaaacgtattcgagaggacagaaaggccaccacagctcag

SEQ ID NO: 467782 - DNA, 100 bp, Homo sapiens
ttccccatggggctggcctgcggcgcctgggcgctctgaggaatcccgttctgcttccagaagtggaagtgctcacggatcggggaaatctgcaaggcat

SEQ ID NO: 467783 - DNA, 75 bp, Homo sapiens
atgcaatggtctcaatctctggaaaaacttcttgccaaccaaagtgaggaaaatagcagctgaatactatgacaa

SEQ ID NO: 467784 - DNA, 114 bp, Homo sapiens
actgacgtgtttggagggaaatgggaatgtacacgataattaaagagtaaagttgtgctcaacgggcaattgaaggaacagactaaaaatcgtgtcctggaaggaaactacagg

SEQ ID NO: 467785 - DNA, 75 bp, Homo sapiens
ctattttactgataagaaaacacatctttacacactaaatggcagtcttgggcacgtccatctgtaaacctgctg

SEQ ID NO: 467786 - DNA, 107 bp, Homo sapiens
catggaggaggctagcaagcgaagctaccagttctgggatacgcagcccgtccccaagctgggttcttgaattagtgttggaaaactttgtttatccgtggtacagg

SEQ ID NO: 467787 - DNA, 75 bp, Homo sapiens
ctcccagtacgttgtgtgaagagtatcattcgacaggtacttacaatttcatcagaaattcctaaaagaattcga

SEQ ID NO: 467788 - DNA, 83 bp, Homo sapiens
tggaatgtgaagagcaaaaagtctcagatgagctcatgagtgaaaggtgtgagttcttgatacgaatgaaaggccaagagttt

SEQ ID NO: 467789 - DNA, 97 bp, Homo sapiens
ggcgctgctggcgctctggctgtgctgcgcggcccccgcgcatgatctccagtgccatggagcagctgcaggaggccctgaaggtacgcaaggatga

SEQ ID NO: 467790 - DNA, 75 bp, Homo sapiens
agagagcgcgggcctctaggaaggaatcccttggcaccatgtcctgtgtgcattataaattttcctctaaactca

SEQ ID NO: 467791 - DNA, 75 bp, Homo sapiens
tggtcctgatggcaaaactggccccccttggaggacctggagaggaatgacggctcggccgagaggccttacttc

SEQ ID NO: 467792 - DNA, 103 bp, Homo sapiens
gcacagagcctcgcctttgccgatccgccgcccgtccacacccgccgccaggattttttatcaagcagaaatgcatcgaacaacgagaatcaagatcactgag

SEQ ID NO: 467793 - DNA, 97 bp, Homo sapiens
acagcatcagcctcgagctgcgcaagcccgacggcaccctcgtctccttcaccgccgacttcaagaagggatctccatccaccaagcgaaggggtca

SEQ ID NO: 467794 - DNA, 90 bp, Homo sapiens
ctgatgacatccttctttttagagatcgttttgatggatatatcttccttgacagcaaaggattggccatttgatgatggagctccaccc

SEQ ID NO: 467795 - DNA, 100 bp, Homo sapiens
tacgcctagtggtaggagacagcttgaaagcagagaaggagctaacagcatcagtcactgaggaaagatgggctctgtgtgccccggaaatggatctacc

SEQ ID NO: 467796 - DNA, 83 bp, Homo sapiens
gtgcccagccaccctctatcctaaagaaaacctcagcctatggattgtggtatctgaacgggaactatttggttctgttggtg

SEQ ID NO: 467797 - DNA, 100 bp, Homo sapiens
ccgagaccgtgaccgagagcgtgaccgagagcgcgaatatcgtcatcgttagaaggaattagatacacttcaacaacaattggattcacagaacatgaaa

SEQ ID NO: 467798 - DNA, 99 bp, Homo sapiens
agatgacaaccatagcccagtgccaatgcatcttctgtactctggatgattgaggaaagtgggaacaagcggaagaccatggcagagaagaggcagctg

SEQ ID NO: 467799 - DNA, 100 bp, Homo sapiens
gtcttcctcttcagccatccaggccaaggtgatccgtgacaagcgcacaggcaagaccaagggctacggcttcgtcagcttcaaggaccccagcgactac

SEQ ID NO: 467800 - DNA, 101 bp, Homo sapiens
ggagagtgtgcggctccaggtgggctcacgcgtgccggtggtggtgtgcacattgagccccggtatagacagttcccccagctgaccagatcccaggtgtt

SEQ ID NO: 467801 - DNA, 122 bp, Homo sapiens
acgctgtgtcggaacggggtgaaagagaagcacggctccgactactccaaggttggtgttcgaggaagagacattgttgttcttggtgtggagaagaagtcagtggccaaactgcaggatga

SEQ ID NO: 467802 - DNA, 83 bp, Homo sapiens
ggaaacctgggggctccctggacaactccgagcaggagcaggccgggctctcgccatgggtcactgtcgcctctgccacggga

SEQ ID NO: 467803 - DNA, 100 bp, Homo sapiens
tcggagggcctggaaccagcctcagtgtacctggcaaagaattctgcaactttgttcagtgccagcgattatgaagtggctcctcctgagtaccatcgga

SEQ ID NO: 467804 - DNA, 75 bp, Homo sapiens
gagaccccaagagtgttgagcagcccatcgtgcttaaagaaggacctgcctgaccagtgcacgcccaacccctgc

SEQ ID NO: 467805 - DNA, 100 bp, Homo sapiens
cgaacggggagccgagctggagctgccgcggcgcagccaggttaccccacagcctatccagcagctgcccctgcctacaatcccagcctgtaccccacca

SEQ ID NO: 467806 - DNA, 50 bp, Homo sapiens
agatgggagagctcacacagacaggaagcccagaacctcatggccctcac

SEQ ID NO: 467807 - DNA, 83 bp, Homo sapiens
gctatcgtggacgtcactggccctggtggggattgacagccacgggaaggtggtgatgatgtccagcaactctgtgaagcagg

SEQ ID NO: 467808 - DNA, 90 bp, Homo sapiens
agacacaaagcctgcgaaagtgctcgggaagagggagagcaaacttggctcagcccactatgctaagaaggaatctgatcttaatggcgc

SEQ ID NO: 467809 - DNA, 83 bp, Homo sapiens
agtttgagcatcagagggcccctagggtctcaccattcccggagtaataaatccagttggagcagcagtgatgagaagagggg

SEQ ID NO: 467810 - DNA, 74 bp, Homo sapiens
cacagcgaggcgccggcccagactccactccccagctgtgaaaggatgtccaacatcacagtcacatacagaga

SEQ ID NO: 467811 - DNA, 50 bp, Homo sapiens
actcaaaagtggggggcaggaaagacgctatgtccagcaaaggctccgtg

SEQ ID NO: 467812 - DNA, 50 bp, Homo sapiens
agcgcctcgacctcggtctgaggtccttggatgtggctgtgttgcccaag

SEQ ID NO: 467813 - DNA, 50 bp, Homo sapiens
atagacccggctttaccttatatcagacgctgaccggaaaggagattgag

SEQ ID NO: 467814 - DNA, 100 bp, Homo sapiens
aaaagaagaaaatgattgaaaatgaaaagctgacaatggaactgactggagcaattgcatctgcaaaggaatgccctgtgtgtgattcctcaagatttct

SEQ ID NO: 467815 - DNA, 92 bp, Homo sapiens
ctggaaaggaatgaggagttacagagggccgagaaggacaggatcaggtgaacctgagcaaggtgggcgagtattggtggaacgccatcctg

SEQ ID NO: 467816 - DNA, 83 bp, Homo sapiens
ggcagtgcccttcccggagcgtgccctcgccgctgcttccccgggcgctgcctggacaggcctgcctgcgtgctgggacatgt

SEQ ID NO: 467817 - DNA, 100 bp, Homo sapiens
gcggtctgacatcgcgacgctgctcaaaacctcgctccggaaaggggacacctggttggtcaaagaaaaagtgatgtatgaaaaagaggcaaaacaacaa

SEQ ID NO: 467818 - DNA, 100 bp, Homo sapiens
agtcccggatatcccataaaagtccacaaatttaaggaggctctgcaacgacatttgtttccaggtactagcaaaggccagacgtcttactcaacaactt

SEQ ID NO: 467819 - DNA, 82 bp, Homo sapiens
gggacgcgccggaggaaagatggaagactaccaggctgcggaggaggctctcaataaacaagactgggtagatggtgagccc

SEQ ID NO: 467820 - DNA, 90 bp, Homo sapiens
cttacgtggtgacacggtactaccgggcgcccgaagtcatcctgggtatgggctacaaagagaacggcactggagatattattgctgtca

SEQ ID NO: 467821 - DNA, 50 bp, Homo sapiens
ccaagtcctccatgggggccacagaacacctggagagtgcaagttctaac

SEQ ID NO: 467822 - DNA, 74 bp, Homo sapiens
agcttcatcaaaaatagtgatagctttgataagagcgagaacccgagcagcgccatgagcaacactaccgtcgt

SEQ ID NO: 467823 - DNA, 97 bp, Homo sapiens
ggcccctgatccggttcttggtgcccctgggcatcaccaacatagccatcgacttcggggagcagattctgtttctggcgtctgcatacgcaagtcc

SEQ ID NO: 467824 - DNA, 75 bp, Homo sapiens
ccatgagcgagcgcctccgtcccaggtttggacttctcccactgagcatgacaagcactcgaaaggctaaatcaa

SEQ ID NO: 467825 - DNA, 85 bp, Homo sapiens
ggaaccggcctgtctgcctgctgcagtcttgccggtggtggtgtgcacattgagccccggtatagacagttcccccagctgacca

SEQ ID NO: 467826 - DNA, 82 bp, Homo sapiens
ctgggctgcagctgcctaatgaggtcagcccaaggccaaccccactgtcactctgttcccgccctcctctgaggagctccaa

SEQ ID NO: 467827 - DNA, 100 bp, Homo sapiens
tgaagaaccaagaagccctaatggcccatcaccaattgcaactgcttcaggacaaagatgagagtccctacactaaatccgccagccagacaaagccgcc

SEQ ID NO: 467828 - DNA, 80 bp, Homo sapiens
gaagacgtctgcgtgagaatagagaccaccgaggaaagggataaagtgatgcctctgattatccaaggttttaaagacgc

SEQ ID NO: 467829 - DNA, 50 bp, Homo sapiens
atagcagattgtttgcctactccagaattggcagagggggtcgatttggg

SEQ ID NO: 467830 - DNA, 101 bp, Homo sapiens
acgacctggcggtggggctgcggcgcctgggactgcaccgcaccgagggcgagctccaggagaagagcttgaagttgttcagaaggaagtggcagagatgc

SEQ ID NO: 467831 - DNA, 90 bp, Homo sapiens
cccagctctgcagccacatactatccgtttgttcaggaaccaccagtgacagaatgatcatgacgcagtcctgaggtttaatggggcacc

SEQ ID NO: 467832 - DNA, 50 bp, Homo sapiens
ctcagcaggcggggaagatgaaagggatgaagatgatactatcaaattcc

SEQ ID NO: 467833 - DNA, 100 bp, Homo sapiens
ctggagtggaagaccacgtgaaaaactttagaattaaagctatagagagtcccaacaaagaagatgatacccagtggctgacctactgggtagtgtatgg

SEQ ID NO: 467834 - DNA, 73 bp, Homo sapiens
aagaagcacacaggaaaaggagcttagctgctggcccagattattcatcagcatggctacctgctaatgaatc

SEQ ID NO: 467835 - DNA, 75 bp, Homo sapiens
tatggaagcagaagaagctgaggatgaagaagatgcaagtgaagtcttctgttggggacagaataaatatggcca

SEQ ID NO: 467836 - DNA, 101 bp, Homo sapiens
cgcagctatcggtgctttgcagcatttggccatccagtgtcattggtctcagaggccagcagttattggagatgtccttcaagtctacagtgggtctgaag

SEQ ID NO: 467837 - DNA, 82 bp, Homo sapiens
caatatctgtcttcggtggactccttcggcagtccacccaccgccgccgcctcccaggttagcatggcctcattgaaagaac

SEQ ID NO: 467838 - DNA, 75 bp, Homo sapiens
atgagaaggtcatgtgtggctacatcagtgaagataccagggtgtcagcggtgcccactgtgctggccatgaaga

SEQ ID NO: 467839 - DNA, 118 bp, Homo sapiens
agagactccttgggggtcgagcacataacggggttcgggtgtctcgtgtgtgaacatcacaggtcagcccaaggccaaccccactgtcactctgttcccgccctcctctgaggagctc

SEQ ID NO: 467840 - DNA, 74 bp, Homo sapiens
gagataaattcccggaaccgcgattcggcgtgtcaggccgaatacatcaagcaatggtaacatctttaaatgaa

SEQ ID NO: 467841 - DNA, 75 bp, Homo sapiens
cggacacataacaagcagcagtgaggacaccaaagggcttcataaacttcacttaccaaatacttcaagggattc

SEQ ID NO: 467842 - DNA, 83 bp, Homo sapiens
cttcgaacttagacttccggaaggactttggcgagggtggttctaactttgatggtttgagaccaaatgggaagggagtgcct

SEQ ID NO: 467843 - DNA, 82 bp, Homo sapiens
gggggacccgcccgccatggccaccaagttctggagagtcttggcttctgggaggaagtcagagggattatctcaggatcag

SEQ ID NO: 467844 - DNA, 100 bp, Homo sapiens
gctgctcctccgcgcccgcggctcgcgcgctcccgaggaagagtgagggcgcgacgcgcaccaacggtggaggtgaacaacaacgggatcatctccttcc

SEQ ID NO: 467845 - DNA, 76 bp, Homo sapiens
cttttgtgcacactggtgacaactcaagagcaatcagtaccatctgcaatggcaccagcatgatatcattgatcat

SEQ ID NO: 467846 - DNA, 110 bp, Homo sapiens
cagagctgcacaaagggaaaggggaatccgagcccgcattttagagactttggtcatgcttcttcttcttgcgttactcattcttgggatagtgtgggtagcttcagcac

SEQ ID NO: 467847 - DNA, 75 bp, Homo sapiens
agctcaccagggtggacaaatcgccagagatgtgaggcggggtttcaccatgttgcccagactggtcttgaactc

SEQ ID NO: 467848 - DNA, 83 bp, Homo sapiens
caagaagccaaagaactggctaggcaaataagctttaagactctgtttgctggctacacggacaacctggtgcgagtgtggca

SEQ ID NO: 467849 - DNA, 90 bp, Homo sapiens
aaagattgaaaccagcaggaaggaagatgtctctcagaaacaaaggtattatgactctgtccccctttgatcaaatgaagactgcctcca

SEQ ID NO: 467850 - DNA, 83 bp, Homo sapiens
ctataagcagcttcggaaaggagccaatgagggcagaggtggaggagacactgaagcgactgcagagccagaagggagtgcag

SEQ ID NO: 467851 - DNA, 74 bp, Homo sapiens
aggagatcacgaacttttacacatgtatcctggcaatgtgtctaaattacatgatctcgctctgtcactcaggc

SEQ ID NO: 467852 - DNA, 82 bp, Homo sapiens
cagtaacagtacttgggatcccccagttccaaagtgtcttaaaggttgtgtggaggaaacttggagatgctgcaggttcgtg

SEQ ID NO: 467853 - DNA, 73 bp, Homo sapiens
aattctggatgaagttattatgggctataattgcactatctttgcgtgaatcagtggctaacctggttagaaa

SEQ ID NO: 467854 - DNA, 75 bp, Homo sapiens
tcgcagtggtcgcttcttctccttgctttggtgcaattcccatcgaccagagttggtccgaccagccttggaaag

SEQ ID NO: 467855 - DNA, 100 bp, Homo sapiens
caaatacccctttgaattaattatggctaaggaagaggcccagcagaagggactcgctgagccaccccccgccccactccatgttggctgtgctctcagg

SEQ ID NO: 467856 - DNA, 83 bp, Homo sapiens
gctgcgggaaatcgggctgaagcgactgagtccgcgatggagggttctgagcaaggttcaaccagtcaagaacaggccttatc

SEQ ID NO: 467857 - DNA, 103 bp, Homo sapiens
atgatgatcatcttgggagtgatttgcgccatcatcctcatcatcatcataggctttcatctgagtggcacagtaactgagctggccactgcctctgaaccag

SEQ ID NO: 467858 - DNA, 89 bp, Homo sapiens
ctaaatgctgctcagaacaccatggagccacccctgaccccgcccagcccagcagggggtgagtcagggttccccaccaagatgccccc

SEQ ID NO: 467859 - DNA, 75 bp, Homo sapiens
ccccccggaggaaagaactggaaccagacatatctgaagagatggattaagaatgctttggattaaggattgtgg

SEQ ID NO: 467860 - DNA, 80 bp, Homo sapiens
ctctgaaagctcttcttgaaaaatgcaaagatgtagatgagagaaatgaggtgagccagccatgagagggtatcttgtgg

SEQ ID NO: 467861 - DNA, 75 bp, Homo sapiens
ccccaggagactcgcaggagcaacacgtgatgtgtctacttatcagggtgtggtcattgtaagactctggctcct

SEQ ID NO: 467862 - DNA, 129 bp, Homo sapiens
cgtttcctccaggacagcacctagtcgtggccggaggagtctcagagctgtcagaaagggaagtcgagacaacatgagtgtgattttgatctgttttccaaatgcacccaaagtatcgccagaagcagt

SEQ ID NO: 467863 - DNA, 100 bp, Homo sapiens
cgtactcatggaaatgaaaagagaatactgtgtggctgacttcaaaagagtagtggattttctgaaagagaaccgggggccatcaagtataagaccacag

SEQ ID NO: 467864 - DNA, 100 bp, Homo sapiens
cggcagccacgacgcgcccgagaacacgctggcggccattcggcagatgcctgaaaacttcatgcctcctgttcccatcacatcaccaatcatgaacccg

SEQ ID NO: 467865 - DNA, 74 bp, Homo sapiens
atttttcagggacgtagccatccagaggccagaagcggactcctagaagaggggagcagcaaggatggaatgac

SEQ ID NO: 467866 - DNA, 139 bp, Homo sapiens
tgagttaatgggccgggaccgaaacctagccccggacgagaagcgcagcaacgtgcggtgggaccacgagagcgctccggtagattgcaaatgacctgctttctttctgttcccgggcgtttggacccctgtcttggac

SEQ ID NO: 467867 - DNA, 100 bp, Homo sapiens
ctacctgccgcggggcacgggcggcggctggtggagcggctggagaccatgaggcggaatgtgatggggaacggcctgtcccagtgtctgctctgcgggg

SEQ ID NO: 467868 - DNA, 75 bp, Homo sapiens
ccgcgccgcgagggctccttccctcaggctgcatggtgtatgaaaagctgggggaacaagtctttggcaccacag

SEQ ID NO: 467869 - DNA, 100 bp, Homo sapiens
ggatcaagcaggttttaaatcaagatttaacattccaacacataaaaattatttatccaacagctcctcccagttgatactccagatccctatgtggaac

SEQ ID NO: 467870 - DNA, 100 bp, Homo sapiens
tatcactacgtggccgtcaacaatcccaagaagcaggaatgaaagtggcgctttctccgccccagtgcacttggaggctcctcagctcttcatatcccag

SEQ ID NO: 467871 - DNA, 83 bp, Homo sapiens
cgtggatgagcctcggggacactgtgccgaatgaagtgaaagaaaatggcccgaaccaagcagactgctcgtaagtccaccgg

SEQ ID NO: 467872 - DNA, 90 bp, Homo sapiens
ctgaaccgcgcggccgaaccctccggtcgcagccagggcggcggggcgcgcccagccccggcccctggagcgcccgccgcggtccccacc

SEQ ID NO: 467873 - DNA, 100 bp, Homo sapiens
agaagatcggcttgaaattaccaactgctttcctttccctcagcacacagaggatgatgctgactttgatgaagctagtgagacctgcaacgacttccac

SEQ ID NO: 467874 - DNA, 90 bp, Homo sapiens
ttcgatgccatcgtgatggcggatgagagactgacaaagtgaagctgacatggagagatcggttcccagcctacctcactaacttggtct

SEQ ID NO: 467875 - DNA, 101 bp, Homo sapiens
ctccaagaacatgccctggcggcggctgcagggcatttccttcgggatgtattcggctgaagagctcaaatctgaattctacaaacacattgtgctttctg

SEQ ID NO: 467876 - DNA, 101 bp, Homo sapiens
ctctgaggaatcctatccatatgaggcaacaggcttccgagtggacctgccaatcaagtcggcccgctaccgtggccagtacaacacctatcccatcaagc

SEQ ID NO: 467877 - DNA, 82 bp, Homo sapiens
gacctcttcagcatgaagccataagaccatcatcatgtggaaactgaccagggatgagaccaactatggaattccacagcgt

SEQ ID NO: 467878 - DNA, 75 bp, Homo sapiens
cagagggctctgatctgtgcgacagacccgcctgaccggaggccagatgtgccgcccacacttgttgcacagccc

SEQ ID NO: 467879 - DNA, 83 bp, Homo sapiens
gtttatggcttccagtggaggcattttggggcagaatacagagatatggaatcaggtgaaaacttttggcccgtttggaagcg

SEQ ID NO: 467880 - DNA, 83 bp, Homo sapiens
caggccctcgttgcccagatgaagccagcagacctgcagaacttggctcccgggacccacccaccatttataactttcaacag

SEQ ID NO: 467881 - DNA, 100 bp, Homo sapiens
ctcaacctcaactccaggtctcctgaatacctctcattatttattgatgataagctgaaaaagggagtcaaagggctcaagaacttgacaggtctaaacc

SEQ ID NO: 467882 - DNA, 76 bp, Homo sapiens
ctgctccctcgccgtcactgttgtataaatgctttccttaaagtttcccatgtctcaatggactcctgaatataac

SEQ ID NO: 467883 - DNA, 83 bp, Homo sapiens
cgggttaagattcggagagagaggtgctagtggctggacttgacctggaaaggatcgacgagaacgtgctaggagcccagctg

SEQ ID NO: 467884 - DNA, 50 bp, Homo sapiens
aaatacccctttgaattaattatggctatttacaaccctgaagaatctcc

SEQ ID NO: 467885 - DNA, 74 bp, Homo sapiens
gggctgtccaggcacgcgaggcccctcaggaggccactgtctgcagctcccgtgaagatgtccactccagaccc

SEQ ID NO: 467886 - DNA, 51 bp, Homo sapiens
ccgacatcaagagctgcgagatccaacaggagtccaatgtgctgattgctg

SEQ ID NO: 467887 - DNA, 100 bp, Homo sapiens
cacgactcccgatagtgagagacctgctcaagctctcttaagagattatggtacaggtttgcagattccgccagcagcacagcaagctctacagatgagt

SEQ ID NO: 467888 - DNA, 80 bp, Homo sapiens
aggctggtgtccagggtctcagcgcgggggacgactcagaaattcatctgttgccatgggagcctcactttcttgctcag

SEQ ID NO: 467889 - DNA, 75 bp, Homo sapiens
agcttggaattacatagctggaaaggatcttacaggatcacagaagaactgcagcttcctggggagcagtttcac

SEQ ID NO: 467890 - DNA, 82 bp, Homo sapiens
ccagttagtggatatagcacaccatccccagccaggacgcggagcttgcagtggtgagagagcagcgcaaccgtctgtgtga

SEQ ID NO: 467891 - DNA, 76 bp, Homo sapiens
tctccgccctggggtcattgtcagttgctgatcccacaccctttcatattcaagctgaagtgacgatgaaaacaaa

SEQ ID NO: 467892 - DNA, 75 bp, Homo sapiens
gactatggagctgactccaactctgaggatgaggaggaaggtgaagcgggtgtccgcaatgttgccagtgtctgt

SEQ ID NO: 467893 - DNA, 75 bp, Homo sapiens
gacctaaagccacagtcttcaagagcccacggacaccacctcaacggtggttattaacttggtgatgcttttggc

SEQ ID NO: 467894 - DNA, 100 bp, Homo sapiens
tgctgggcataggggtggggaacgcaaaagccactgtttcagctgccacggccacctggctcgtgaaaggtggtgacggctctgggccgcgcctggcacc

SEQ ID NO: 467895 - DNA, 120 bp, Homo sapiens
ctgagatcaaatggcacttcattggccacctacagaaacaaaatgtcaacaaattgatgggtgccaatgttaacagggctacagccaataatgatcatacagtagtgtcgctggcatgtg

SEQ ID NO: 467896 - DNA, 73 bp, Homo sapiens
catgtcagacgcagccgtagacaccagctccgaaatcaccaccaagaacactctgctccagccaaggtggtga

SEQ ID NO: 467897 - DNA, 74 bp, Homo sapiens
gaaaatttgcctcaaagcgagtctcaaaggtgttcctggatttggccctcgggaccaaggatcacgtcatgact

SEQ ID NO: 467898 - DNA, 88 bp, Homo sapiens
gtgccaggctgaaggatcactgaggaaggggaagtgggcaaagcaggtgacttcatggtcatgacgattttcttcaatgtgagcaggc

SEQ ID NO: 467899 - DNA, 74 bp, Homo sapiens
gctgggtgaaggctgcgggttccggcgaggcctgagctgtaagagctcattttggaggaataatggatgaacca

SEQ ID NO: 467900 - DNA, 90 bp, Homo sapiens
ggcagatttgaaaattcacccttgtagagtcattcctgcctttgagcggactcccttttaaggtggctgaagccatactattttatagaa

SEQ ID NO: 467901 - DNA, 82 bp, Homo sapiens
caaccattgacgccatgtcgggttattcgagtgaccgagaccgcggccgggaccgaggatatcagttttagagaatgtggcg

SEQ ID NO: 467902 - DNA, 100 bp, Homo sapiens
ctcagcgccgcggggatgggggcctcgggcgccccgcagccccccaacatcctgctcctgctcatggacgacaaaattggcaacttctccatcgtgcggc

SEQ ID NO: 467903 - DNA, 75 bp, Homo sapiens
ctgctggctgcccttgtctcctttctcatgggcctcctgagtgacccagaattaggtccagcagcagctgatggc

SEQ ID NO: 467904 - DNA, 75 bp, Homo sapiens
ccccgcaccacctcctgctgccttcccgtcgccgctcccgaagcttttccaggtttagatcctgataagcatctt

SEQ ID NO: 467905 - DNA, 87 bp, Homo sapiens
aggaaattctgttctactcgtcacaaatctcaatcctgatgatgttgcttcagagtgtgaagtcaaatgcatgccaacattccagtt

SEQ ID NO: 467906 - DNA, 100 bp, Homo sapiens
cgcggacagcgggctggagcctgacgagctggcggtcctcaggttctgaatcttgtgcctggagaaccagagaggaccctggagcaggaggagaaagaga

SEQ ID NO: 467907 - DNA, 100 bp, Homo sapiens
ctgctcatgaactcggaacagcgcatcaaccggatcatgggctttcacaggcccgggagcggcgcggattctggctgtgactcagtcactgacactgagc

SEQ ID NO: 467908 - DNA, 101 bp, Homo sapiens
agagaagaaatggacatgattgcctaaatcagccaaacacaggttgttgacctcctgtactggagagacattaagaagactggagtggtgtttggtgccag

SEQ ID NO: 467909 - DNA, 80 bp, Homo sapiens
ctggacggcgagcgcgagcggcgcgagaaagaagatgttaccgagtacttcagtgaattccttagtgcaggggaacggag

SEQ ID NO: 467910 - DNA, 97 bp, Homo sapiens
cgaggggaaacaccctggtgctcggttcctcggggagctctggatggagaggccccaaggggcatctcctcagtgcaaggatgatgctgaaaggaat

SEQ ID NO: 467911 - DNA, 50 bp, Homo sapiens
atagaagtgacctgctttttcgcaaaaatgacctccaccttcaacccccg

SEQ ID NO: 467912 - DNA, 90 bp, Homo sapiens
gcgggaagatggcggcgccgctcatccccctctcccagcaggaatgctgaaatacttttaaagctgataaacctagggaaactgcctcct

SEQ ID NO: 467913 - DNA, 75 bp, Homo sapiens
cagagattgaactcagctatgcaaagcaactcagagactgatggagaggcagaaacggaaggcggacatcgagaa

SEQ ID NO: 467914 - DNA, 100 bp, Homo sapiens
attgacatccttactcattatgatgcaaaaaagaaagctgcccatgctgcaaaaactgttaaacatggcgtcagcccaaggccaaccccactgtcactct

SEQ ID NO: 467915 - DNA, 82 bp, Homo sapiens
ctaactcagcagcaacttaatggaaactagaaactaatctggattcactccctctggttgatacccactcaaaaaggacact

SEQ ID NO: 467916 - DNA, 95 bp, Homo sapiens
ctgctctgcttcccttcggaggaaaatttcaggctgaaggtttagcgggtgccggaggaagttaagtcttcagagcctactgaggatgtggagcc

SEQ ID NO: 467917 - DNA, 74 bp, Homo sapiens
tcagatgggatctttccggatcaatccagatggcagccagtcagtggtggagatgattaccacatgctgagggc

SEQ ID NO: 467918 - DNA, 100 bp, Homo sapiens
cctggagtaaccctcactggagaatccagaggcaatctgaaagcaaatcctgtttagatgcaggcgaaggttcctggtgacccaggctctcaccttaccg

SEQ ID NO: 467919 - DNA, 91 bp, Homo sapiens
gctggccgcgccgggagcggcgctggccccaaggcgctgccctgcgcaggacaatgcagatcttcgtgaagactctgactggtaagaccat

SEQ ID NO: 467920 - DNA, 100 bp, Homo sapiens
cccctctccttcctcctgaatctaggccgaaaacagaagatcccctggaactttcagcacatgatgatgttttcaggaaagaccacagcaagattctttc

SEQ ID NO: 467921 - DNA, 89 bp, Homo sapiens
ccagtgacgggtctggagtgcgtgggggaccggctgttggcggatatggctcgtggacagcagaaaattcagtctcagcagaaaaatgc

SEQ ID NO: 467922 - DNA, 100 bp, Homo sapiens
tcaatgtgaaatccctgaacttgcgatcaagctcattacagctgtgggcataaaaaccactcaagaaggttattattgaagaaactggtaatttgataca

SEQ ID NO: 467923 - DNA, 100 bp, Homo sapiens
caagaatgaggagcaggacatcttcatttacagagcaacttgatgaaggtacacccaatagagagacagagtgggaagctttggagctgacggatcacca

SEQ ID NO: 467924 - DNA, 75 bp, Homo sapiens
tgaacggaatgctggagtcagtggaagacggagctggtcggcccgaagaacccagtgacttgattgtaaaaattt

SEQ ID NO: 467925 - DNA, 100 bp, Homo sapiens
ttttggcaaatcaaagccagggaccgttgctgggcctcatttccgcaacttttcggctccgaactgctgtctaaagaccctcattccagagagcatcctg

SEQ ID NO: 467926 - DNA, 98 bp, Homo sapiens
ccggagagccccggagtgagcggagtagcgagtcggcaacccggagggcatttttggtcgaagagagctgaagtaatgagaagacatcatggaggccc

SEQ ID NO: 467927 - DNA, 100 bp, Homo sapiens
cgggagcaatgctgacctcggtttcctggacccattccgactcagtgccggtggcagatatcaaagccgtggtgacgggaaaggactgccctcatatgaa

SEQ ID NO: 467928 - DNA, 90 bp, Homo sapiens
gacaaaaagcttgagatggttgtgaaatcaacaggaattttaggtggacaaggctctccccggaggctcagccccctctgctccccatgg

SEQ ID NO: 467929 - DNA, 100 bp, Homo sapiens
tgaatgaagaaatgaagtctgtgatagaagctctcaaggataatttcaataagactctcaatataaggacctcaccagccattcatcggaacagcccccg

SEQ ID NO: 467930 - DNA, 99 bp, Homo sapiens
ccgctgcctcgccgccacactttcctgggagcggcggccacggaggcaccatgaagaagtcttactcagcccccaaatacatcaagatgtttgtactgg

SEQ ID NO: 467931 - DNA, 75 bp, Homo sapiens
agtgttgctttggatcttgtggaaagtcagagcagcataattcgttgtatgaggcgcctggaagaattgcttcga

SEQ ID NO: 467932 - DNA, 101 bp, Homo sapiens
tctctgcagcgggatcaagctgtgtgcattagtacaaatggtcagaagacatctctaacccaagaaacagagcttttggaatccttacttcaggaggtgga

SEQ ID NO: 467933 - DNA, 51 bp, Homo sapiens
attcgcagtggtcgcttcttctccttggcctaaagatattggaagacctaa

SEQ ID NO: 467934 - DNA, 100 bp, Homo sapiens
aactttgtgattcaggagaactggtcgccatcaagaaagtattgcaggacaagagatttaagagctccactggttcaacagcctctcctccagtttcgac

SEQ ID NO: 467935 - DNA, 75 bp, Homo sapiens
cagctgcctgccagaatggaagcatacagatctgggaccgaaatttgactgtttccacttgagcggcacagtgac

SEQ ID NO: 467936 - DNA, 100 bp, Homo sapiens
tcattgctctttggcgactcttattgcaaaccagtccagctacgggggcccagccagccagcagctgagtgggggttacggaggcggctacggtggccag

SEQ ID NO: 467937 - DNA, 75 bp, Homo sapiens
gacgtcgaggggacgattggaatgacagaggagaaggcagagcccccccaggctatgaatgccctgatgcggttg

SEQ ID NO: 467938 - DNA, 75 bp, Homo sapiens
accaagaaaaacaaacgtcacacatgaagaacacacagcggtggaaaagaaaacgttgtgtgacgtgatcctcat

SEQ ID NO: 467939 - DNA, 100 bp, Homo sapiens
agggtgaaggctgtgctgctgggagccacattcctcattcccagagcatgttccagatcccagagtttgagccgagtgagcaggaagactccagctctgc

SEQ ID NO: 467940 - DNA, 98 bp, Homo sapiens
agaaggtggaggatgtggtgctgcccgagaaggtggacgtgctggtgtctgagtggatggggacctgcctgctgaacaactctgctcatggtgattac

SEQ ID NO: 467941 - DNA, 50 bp, Homo sapiens
tacttttgtggtagaccgtctaagagaagatggagtgaaggtacctgagc

SEQ ID NO: 467942 - DNA, 99 bp, Homo sapiens
gtaacgcaggaacagaaaaccaaacaccacatgttgtctcttagaagtgggagctgaacggtgtggaaccactttgacagcggttcgtgcccaggccag

SEQ ID NO: 467943 - DNA, 90 bp, Homo sapiens
cggcagacggcgacagtggcggcggcgccatggcagggcttgcagagcctcagctcaaaggcatcgtcaccaaactgttctgccgccagg

SEQ ID NO: 467944 - DNA, 83 bp, Homo sapiens
ctcttgccctcatcctggttctggaatcctcagttcaaggtcttgccccagaagctgcgggcacatccacgcctgaaatgcgg

SEQ ID NO: 467945 - DNA, 100 bp, Homo sapiens
cggacatcccctaccaggagatcgcagcagggaggagagagcgatggcttttttcacccagaaggccagccccagcggcttccccagcctccggaagtgg

SEQ ID NO: 467946 - DNA, 100 bp, Homo sapiens
gtcctgtcctcgtccgtctcatcaaagatgctcagtgacctccaggagtctgtggccagctctcgcccccaggaggtgtcagcatacctcacccgcttct

SEQ ID NO: 467947 - DNA, 100 bp, Homo sapiens
ccaggagttcgtctcttacgtctgcggaagtgcagctgcctcagttcttagcgcagctctgcttatgataatgtcaacaaagttcgagtagctatcaaga

SEQ ID NO: 467948 - DNA, 82 bp, Homo sapiens
aatagctggggctacaggcgtgtgtcactgcgcccagattatttatgtaaacccgaagacaacatctacagtattgatttca

SEQ ID NO: 467949 - DNA, 74 bp, Homo sapiens
gccgggatggctaccacggccgagctcttcgaggaatgtgttccagaagatctagaactgaagaagaagatttt

SEQ ID NO: 467950 - DNA, 75 bp, Homo sapiens
ttgagtatgctccatgtagatcacgtaccttgttatcccataactttggtatcctgaaatctgaggattccacca

SEQ ID NO: 467951 - DNA, 90 bp, Homo sapiens
ccgagttccggtgagcggacggcggcgcgcgcagaattaaacaaccaccatgtcgagcaaaaaggcaaagaccaagaccaccaagaagcg

SEQ ID NO: 467952 - DNA, 95 bp, Homo sapiens
cgcggccgctcaaagccgggagatcgactgtttgagcccggaagcgcagaagctgatcctgataacttaagtgactctctcttttccggtgatga

SEQ ID NO: 467953 - DNA, 90 bp, Homo sapiens
gcagttgttgctgatgtcctagataaaggatccggtgtagtgattattatggatggttgtgagaactgctttattggatgctgctggtgt

SEQ ID NO: 467954 - DNA, 75 bp, Homo sapiens
ctcccaaagtgctggaattacagtttgtttgacagttgccagactatgtttacgcttctggttctactcagccaa

SEQ ID NO: 467955 - DNA, 90 bp, Homo sapiens
cggaacagaaccaaaggctattggatcagctcagcagggctgaactcacgggaatcaaatggcgtaggtacaattttggagggcatgggg

SEQ ID NO: 467956 - DNA, 51 bp, Homo sapiens
cacgaccattatatgctggaatggttccttcccctggcaaccactaatctg

SEQ ID NO: 467957 - DNA, 121 bp, Homo sapiens
ggccaacttcggcaagatccagatcgggatttacgtggagatcaagcgcagcgatggtggtatcacggaaaacttgacagaacgatagcagaagaacgcctcaggcaggcagggaagtctg

SEQ ID NO: 467958 - DNA, 100 bp, Homo sapiens
acgaaatccaggactatgacttcaagactcggatatgcaaaaaagtctgtggccactacactcagatttcagctgggcagcaggacagggttactgccaa

SEQ ID NO: 467959 - DNA, 82 bp, Homo sapiens
catacagctaatgctatacttactgtaatgttaagacatgtacctgaacatgaaataaactatcaatcttgcccagactgga

SEQ ID NO: 467960 - DNA, 82 bp, Homo sapiens
gtttagcacgatgagctcaatcggcactgggagtattgggaaagggtcgttgtggtgcatagacccagagtatagacaaaat

SEQ ID NO: 467961 - DNA, 50 bp, Homo sapiens
gtcgctggagtccgcgcctccctggaatttcagaaactgtggaggagtgt

SEQ ID NO: 467962 - DNA, 100 bp, Homo sapiens
tcttgatccacttgctgataaaatacttatcagtatcttatatgttagcttgacctatgcagatcttattccaggagctcgaggccatgagcagatatac

SEQ ID NO: 467963 - DNA, 73 bp, Homo sapiens
agcactgcgctgtcagcgatagcccagtggatggccattccagacataattcaagacatttcctgagtgcctt

SEQ ID NO: 467964 - DNA, 100 bp, Homo sapiens
ttcaggaggccctggctatctatccaccatgtgggaggaggaaaatcatcttatcagacgaaggcaaaatgtatgggttttggccaaattgggcgagggc

SEQ ID NO: 467965 - DNA, 82 bp, Homo sapiens
agacctattatcagatcaaccaccaaagtgggaaacattgaaatcaagaaatggtggagtcaatgaagaaagtagcagggat

SEQ ID NO: 467966 - DNA, 99 bp, Homo sapiens
cgctgtgctcgctggcaccccgaacgggttgcttcccccgctgcgagtcaccttcaggccattcagaggaggaaagagaggggaatatgaagtcagcca

SEQ ID NO: 467967 - DNA, 48 bp, Homo sapiens
ccatggaatcagagggtgcattcaaactggaagaagaaagatctgtgc

SEQ ID NO: 467968 - DNA, 98 bp, Homo sapiens
cgacgtcgtgatccagaagtccagagctgaggactgcctgtttgcaggtagagtggaacccccagctattagaggtcccaccccaaactcagtttgat

SEQ ID NO: 467969 - DNA, 76 bp, Homo sapiens
ccagaaccggtcgaaaaccgtgtatgagggattcatctcggctcagttgtaatcgtaaaatgaaaccaccttacct

SEQ ID NO: 467970 - DNA, 100 bp, Homo sapiens
ccaggagctgcagaccctggcggccctcaagctgcgagtggctgtgctggaccagcagatccacttggaaaagaccatgctcgacagctgaccaaggcca

SEQ ID NO: 467971 - DNA, 100 bp, Homo sapiens
aaggaaaagatccctggaatatgaagagacacagtatggtagccacacccccagattagtgacaagagctggggttaggatccggttggactctgacatc

SEQ ID NO: 467972 - DNA, 83 bp, Homo sapiens
ctgtcttcggtggactccttcggcagtccacccaccgccgccgcctcccaggaattcctcctatgagtggaacaggaacgctg

SEQ ID NO: 467973 - DNA, 75 bp, Homo sapiens
cgcacgagcaccagcctagagccagaactggttccgaacatcagcagacccacctcccaaacacaggagccagga

SEQ ID NO: 467974 - DNA, 75 bp, Homo sapiens
tcgtcctacacttgcgcaaatgtctccggttcagaatttaacattacgcagccagaagttgggtgtattatctag

SEQ ID NO: 467975 - DNA, 100 bp, Homo sapiens
ggcccgggcatggtggtctggggcaacgcggaagagactcagagccttggggcactgagggatgccagttctgcctgttcatctggaacctggatctaag

SEQ ID NO: 467976 - DNA, 100 bp, Homo sapiens
aagcgcgacgccaggctgagaccgtccagttcgagaaatttggcaaagctgtgaattatgctgatgccgccctctccttcactgaatgtggcaatgccat

SEQ ID NO: 467977 - DNA, 98 bp, Homo sapiens
gcggcaaccaagtctgggcaccacaagcaggcacccagattggctgaaaacttctgtgtctgccatttagctactggggacatgctgagggccatggt

SEQ ID NO: 467978 - DNA, 74 bp, Homo sapiens
aagaagcaaaaaaccttatttgtgccttccttactgacagtgcaatgcgtgttttactatctaaattaccaaga

SEQ ID NO: 467979 - DNA, 80 bp, Homo sapiens
tattctactccatctcattcattgtacaggaagtgcgagcgcaccacgtgccatgacttcctggagtgccagaactcgcc

SEQ ID NO: 467980 - DNA, 50 bp, Homo sapiens
tgggcactatggaggtgaagagcaagaaggacagaataacgggctcccag

SEQ ID NO: 467981 - DNA, 100 bp, Homo sapiens
ccgtctgcgaccccatggattccaccctgggcgctgcctatggcacagccaagagcggtaccggcattgcggccatgtctgtcatgcggccggagcagat

SEQ ID NO: 467982 - DNA, 82 bp, Homo sapiens
ccaggatctcgggctcggaacgagactgcacgaccctgagagatggttggtgccatgtggaaggtgattgtttcgctggtcc

SEQ ID NO: 467983 - DNA, 100 bp, Homo sapiens
tttgattgtgtattatggataccaaggaagagaagaaggaacggaaacaaagttattttgctcggtttgttggagactgaaccgttgcaaggaacagacg

SEQ ID NO: 467984 - DNA, 88 bp, Homo sapiens
gccgctgctacctgcagcgccgtgtggcacgacacaaaaatcagatctctgaccgcctgcgccggaactggcccccctccttcttgtc

SEQ ID NO: 467985 - DNA, 73 bp, Homo sapiens
gagcaacaggagtagcttttcccggctcacctgactttgaaatactcgtgggatatgaagtggaggtgcctag

SEQ ID NO: 467986 - DNA, 74 bp, Homo sapiens
aaggattccaagtaactcttatttgatattagttgccgctttgacattctttcttgggaaagatgaagatgaaa

SEQ ID NO: 467987 - DNA, 90 bp, Homo sapiens
taacttaattcaaaatcaacctgaaactccagaacacccagaagtaacttcacttaaatggccctcagattctcagcttgattctaagga

SEQ ID NO: 467988 - DNA, 75 bp, Homo sapiens
gcggcgcggcgctcgctcctacggtttaagaaaatctacgaagaaacgcagtgagtctccacctgctgagctccc

SEQ ID NO: 467989 - DNA, 98 bp, Homo sapiens
cggcgacagcagagcgcccactgcctccagcagtaggtgatttcaaatcggagaagtccaacggggagctaagtgaatctcctggagctggaaaagga

SEQ ID NO: 467990 - DNA, 90 bp, Homo sapiens
agcttgaagatttgactagatacgatgttggtacccgaggattaataaagaatctttacttcctgtagcaaaggacgtgtcttactcagg

SEQ ID NO: 467991 - DNA, 99 bp, Homo sapiens
actgtgtgtctagatgtaattaatcaaacttggacagctctctatgcttcatattctccaattcagcctcattctctaataaaacatcagcagattcct

SEQ ID NO: 467992 - DNA, 82 bp, Homo sapiens
agatgccaaccttcccgccagactacggcttccccgaacgcaaggagcgcgacgagagattaaacagttattgtctgagttg

SEQ ID NO: 467993 - DNA, 98 bp, Homo sapiens
gctgagagctaaattaattgaatgtggctggaaggatcagttgaaggcacactgtaaagggcgaactttctgaccaagtatacaactacccagagggc

SEQ ID NO: 467994 - DNA, 75 bp, Homo sapiens
ccgcatccccttcttcatgtctcaagataatcttgtgccgtggaaatcagaagggcaaaacgaagcagtcatgat

SEQ ID NO: 467995 - DNA, 90 bp, Homo sapiens
cgattgggctgagcagaggacgacatgttgcttttcgtggaggtccttcacagggtggtccaggtcctcagtatcctaactacccacagg

SEQ ID NO: 467996 - DNA, 100 bp, Homo sapiens
atggcaaacctgcacctccacctcagttacagaatgtctgaaggggacagtgtgggagaatccgtccatgggaaaccttcggtggtgtacagatttttca

SEQ ID NO: 467997 - DNA, 75 bp, Homo sapiens
ctgacacttccccttccccaccgaaccgcgaatgaagcgagtggcacaccgaggatccccagttcttggctgagg

SEQ ID NO: 467998 - DNA, 100 bp, Homo sapiens
ccaacgcgaagacggtaacccgtgtgactttgactggaatctggtgggccctttattgaccaggtttacgtcctgcaaagttacgcagaggggtggaaag

SEQ ID NO: 467999 - DNA, 82 bp, Homo sapiens
ggaattattggaggccaggtttactggagtaggtgttagtaagttggaatcgaagcctcttaaaatggcagatgacttggac

SEQ ID NO: 468000 - DNA, 80 bp, Homo sapiens
catcatggcggctggccgggcccaggtcccttcctcccacagacgcagtcttcagcaaggaagtgctgggaacgccctgg

SEQ ID NO: 468001 - DNA, 100 bp, Homo sapiens
cttacatgtttgaggcccgggaatttcttcgaaaaaagcttattgggaagaagcagcaagatgaagagcgacgtcggcagctgagagagagagctcgtca

SEQ ID NO: 468002 - DNA, 100 bp, Homo sapiens
tgacaataccatccataagaaatataatgacacagcagaaggactccttcgaaatggaagaggaaatttggtgagcggcctccacctaaacgacttacta

SEQ ID NO: 468003 - DNA, 75 bp, Homo sapiens
tggtggtcctggtctacgtcatcgggtactccaaagattcaggtttactcacgtcatccagcagagaatggaaag

SEQ ID NO: 468004 - DNA, 75 bp, Homo sapiens
tcgtcagccagacaaccttcgtgggcatcgtccctcttgccatgtggtctggaactgaaagtgatgcgtatttct

SEQ ID NO: 468005 - DNA, 74 bp, Homo sapiens
ctctttcctgtttacctccagtgtcccttcttccacatgaaaaggataagaggaagtatcattctgcaaaggag

SEQ ID NO: 468006 - DNA, 101 bp, Homo sapiens
ccggccgccgcccgagcgctcgagaaagtcctctcgggagaagcagcgcctgttcccggggcagatccaggttcagctatcagttgagggatttgcagttg

SEQ ID NO: 468007 - DNA, 90 bp, Homo sapiens
tttctctgcagcaagaggaaaggaaagatgtgttcgggtttttctagaacacggagggaagacactgatcaaggtggcagaagctgaaaa

SEQ ID NO: 468008 - DNA, 96 bp, Homo sapiens
ccacagcccgcatctaccggaagcactttctcggcaagggctccttcagtggtagatgtcccctgtatggtgtggccaccctgaatggctcctccc

SEQ ID NO: 468009 - DNA, 82 bp, Homo sapiens
agcggcggcagcagcaccaggctctgcagcggcaacccccagcggcttaagccatggcttccggtgtctcgcccggtcctca

SEQ ID NO: 468010 - DNA, 82 bp, Homo sapiens
aagccttccgctattcagcagagagctattattccctgtattaaagccgcttacaaacacgcagatggcaagaagattgatg

SEQ ID NO: 468011 - DNA, 100 bp, Homo sapiens
ccaagatgcccgagtgctacttctactccaagttcggcatgggctgcaacgagtgtacgcacccctcctgccagcactcgctgagcatgctgggcatcgg

SEQ ID NO: 468012 - DNA, 153 bp, Homo sapiens
cccattcacaaggcagctcgctctgggagcctagaatgcatcagtgcccttgtggcgaatggggctcacgtcgagaaagaccacagcaagattctttcattcgtctcctcctagcctgggggaccaggctcgaactgaccctggacatcaaag

SEQ ID NO: 468013 - DNA, 100 bp, Homo sapiens
ctggattctgaggaccagcagatggccagtcacgagaacccagaacaatgctaaagtagctgtgctaggggcctctggaggcatcgggcagccactttca

SEQ ID NO: 468014 - DNA, 75 bp, Homo sapiens
gtgagctgcctgaaaatgcactcggatgccgccgctgtcaggcagcgggtggcatgagacgtgggaacatgggcc

SEQ ID NO: 468015 - DNA, 89 bp, Homo sapiens
ctccatggtgaagtataggctgaggctacctgtgaacagtacgcagtgaatgtttcctgaggctttctaccaatgcaggccagtggaag

SEQ ID NO: 468016 - DNA, 75 bp, Homo sapiens
gtatttggaacaaaaaaaggagatgcctggcagccccgctctctgcaaagtttgcctgcaatggtactgtaattg

SEQ ID NO: 468017 - DNA, 83 bp, Homo sapiens
cagatgttggatatttgcttggaaaaacgtgtgggtacgaccttgggtgagcccatcactttctgtgaggagagttttgtaaa

SEQ ID NO: 468018 - DNA, 80 bp, Homo sapiens
ctgtcccagagacaacgagatgaactgtgtaatcgaatcctggaccggaaaggggaagcagtgccattcaagaataaaga

SEQ ID NO: 468019 - DNA, 95 bp, Homo sapiens
ggggtgcaggtgcctcccagcaacgccatggaggccaggagccggagtgccgagctttcctgctctgggaccctaccaaggtgcccccacgactg

SEQ ID NO: 468020 - DNA, 100 bp, Homo sapiens
agcccggccacctcagggcccacatgcgggcacactcaggtggacccccaaaagtacaagggcatatttaacggattctcagttacacttaaagaggatg

SEQ ID NO: 468021 - DNA, 90 bp, Homo sapiens
gacctacactagtcgcgggagccacgcagaggacgccggaacaccctggaagccgagaaatgatgatgaacaacatgggtggtgatgagg

SEQ ID NO: 468022 - DNA, 134 bp, Homo sapiens
ggcatggccggcccgctgcccgacgagcaggacttcatccaggcctacgaggaggtgcgcgagaagtacaaaggtactccaaagattcaggtttactcacgtcatccagcagagaatggaaagtcaaatttcct

SEQ ID NO: 468023 - DNA, 50 bp, Homo sapiens
gttttgtgcagattgccagtctaaaggagctggccaagaggactcccggc

SEQ ID NO: 468024 - DNA, 145 bp, Homo sapiens
aataacacaaggcatattggattacgtagtagaaaccaccaaaccaatttctcctgcaaaccagggtatcagaggaattttgtgacaggctctgttagtctgttcctcccttatttgaaggacaggccaaagatccagtttggaa

SEQ ID NO: 468025 - DNA, 74 bp, Homo sapiens
aactcccacctgcgacacatcgagcacatggagctcctagagtggcctcagctaggtaaccaacgggagtcgac

SEQ ID NO: 468026 - DNA, 98 bp, Homo sapiens
tatgatcttcccaagaaagaggacgctttactctaccagagcaaggcatctttccatctcctgaccagcctgccaatgtgcctgtcctcccacctgcc

SEQ ID NO: 468027 - DNA, 83 bp, Homo sapiens
tcgttggctgccgtccccgctgctgtgcattgggattttttatcaagcagaaatgcatcgaacaacgagaatcaagatcactg

SEQ ID NO: 468028 - DNA, 76 bp, Homo sapiens
caacgaatcatccacgcacctgcagctctgctgagagagtgcaagccgtgggtggacacgtcgatctgacaatgct

SEQ ID NO: 468029 - DNA, 101 bp, Homo sapiens
ataccatctgttgcagactggggtgcatgacattttaggtcacacttcacctgaatcccatctcctcagtccacatccaccacaagtctgttgtgttcctg

SEQ ID NO: 468030 - DNA, 100 bp, Homo sapiens
ctaatttgaaccatgtttggattgaagccgcctctgtattacttaccaggacgtgaccacgcagtctgtgatggggtttgatcctctgcctccttcggac

SEQ ID NO: 468031 - DNA, 75 bp, Homo sapiens
aaggtgcctaccaaggtcaaaggctatgacaacctctttgctatgatgtctttggtggacttgggaaagaggttg

SEQ ID NO: 468032 - DNA, 78 bp, Homo sapiens
ggctgaggagcgccgctgcctcgcctcggatgcagcagtctcggccctggctgctctatgcagtgaatattacatgaa

SEQ ID NO: 468033 - DNA, 80 bp, Homo sapiens
gtgattctgaggcctccccaaccatgtgcaattggcagttgggtgagaagcagcttccatcttcaacctcggatgatcgg

SEQ ID NO: 468034 - DNA, 100 bp, Homo sapiens
gaacggcatgtcatctttgccaggactgatgcagatgcccctcctccaccagaggactgggaggagcatgtcaacaggaaattaagtgttaaatccatta

SEQ ID NO: 468035 - DNA, 100 bp, Homo sapiens
aaggatcatgaactagtgacctggaaagattgtcactgctgttccaagggcacacgcagagggatttggaattcctggagagttgcctttgtgagaagct

SEQ ID NO: 468036 - DNA, 74 bp, Homo sapiens
aagagctatggtgaaacaccactgaagcattgccaagggcgatgccagtccctccactccagaggagaacgaaa

SEQ ID NO: 468037 - DNA, 100 bp, Homo sapiens
cgtctcagcgaaccccttttgaagttgaggccaagaaaggatcttgtagaggttggcttatttggacgtctaggcagttttccagttagagggacaccga

SEQ ID NO: 468038 - DNA, 100 bp, Homo sapiens
cagcagagagtggcagggctgaggacccaaagtcatttcccaggctggcggagagttggatcgtcaaacgcaggctactaccttggtccatcaaattttt

SEQ ID NO: 468039 - DNA, 75 bp, Homo sapiens
tgattttctcatgaagctgtcaggtgctgactgggttacttttttaaacactaggaatggtaatttctactcttc

SEQ ID NO: 468040 - DNA, 89 bp, Homo sapiens
cggggcggaggcactcgcgcggggggtaattcggggtctgggttctggtgccgcgcagctttccccgaatctggccaacctatttgtgg

SEQ ID NO: 468041 - DNA, 90 bp, Homo sapiens
ctcgcaggcgccgcacggagttgcgtcccggggacttggggccgcagggagggttggtacattgtgacctatgccttggggatctaccat

SEQ ID NO: 468042 - DNA, 90 bp, Homo sapiens
gtggaagctgggaaacccacaggaggcaaccacactagtttaggacaaattgatggccaggagatcactgccaccgccgtgctggccccc

SEQ ID NO: 468043 - DNA, 76 bp, Homo sapiens
ggctcttgctagatcagcaccggaggtggaagactgatgaagagcatgatctagaagaggatgagagtggcactcg

SEQ ID NO: 468044 - DNA, 100 bp, Homo sapiens
ttaatcagaggtggcttatcaaacttgggaataaaaagtattgtaacagctgaagtgtcttcaatgcctgcttatctcccttgagtttagaaatctggct

SEQ ID NO: 468045 - DNA, 100 bp, Homo sapiens
gctcattcctaacagtggatttacttccttgcattgcatcctgaacgagtgttggtagcaacaggacaagttgggaaagagccttatatttgtatttggg

SEQ ID NO: 468046 - DNA, 83 bp, Homo sapiens
ctgggatcccggccaccagcaattgtccgacgaagttatacggaagcgtctcctcattgatggagatggtgctggagatgatc

SEQ ID NO: 468047 - DNA, 83 bp, Homo sapiens
cagatctactactcggacaagtacttcgacgaacactacgagtaccgttaataaaggtatccatggagaacactgaaaactca

SEQ ID NO: 468048 - DNA, 100 bp, Homo sapiens
cgggaggggggagcggcgttggaggccaccgtttccagttttctgagtttaaccagtaatgccattcagttgccaatctcaagcaaagcaaacataagcc

SEQ ID NO: 468049 - DNA, 73 bp, Homo sapiens
aaatatgtccgcattgtcttgcatccagacacagagcattctaaaggtcgtgcgtctgaagcctacaagaaag

SEQ ID NO: 468050 - DNA, 100 bp, Homo sapiens
ccggttccccggcccacagtgggggtgtgcaaacccgagagaactgggccccttcacagatgtagtcactacaaatcttaaattgcgaaatccatcggat

SEQ ID NO: 468051 - DNA, 90 bp, Homo sapiens
attcatagaatagactcccctggatttaagccagcctctcaacaggtcatttatagcaaatacactgacctggttccaaaggaggttatg

SEQ ID NO: 468052 - DNA, 83 bp, Homo sapiens
tgaccaacttgctgcggtttttgttcctggggctgagtgccctcgggtttccaggcctgaggtgcccgccctggccccaggag

SEQ ID NO: 468053 - DNA, 100 bp, Homo sapiens
ctgttcacggtgaccttcgcttggtgtcctcctggcctcagcaacctgacaattctgtcgtgtcccggtacatgtcccagagcaagcacacggaggcccg

SEQ ID NO: 468054 - DNA, 96 bp, Homo sapiens
aattagcccaagaaacattatattcatggtggttctcttcccaaagtggaagccaaattcatcaattatgtgaagaattgcttccggatgactgac

SEQ ID NO: 468055 - DNA, 90 bp, Homo sapiens
gaaaatctgttgaagaactacagcttgctaaaggaacggaagttcctgtctctggcaagtaatccagagttttatggacgaggagccccc

SEQ ID NO: 468056 - DNA, 74 bp, Homo sapiens
taaaagagcgaataaagtttatcacgccgggattgcaaatagaagagtcttccaaaccagtgaggctatcacaa

SEQ ID NO: 468057 - DNA, 100 bp, Homo sapiens
aagaaaaaggaaaaaatagaaaaacaaattgctacatccgggcccccaccagaaggtggacttaggaggacagtgctgctgtgagtttgacgaagtggac

SEQ ID NO: 468058 - DNA, 100 bp, Homo sapiens
ctttgaccgcgctaagatggcgactcccatgcatcggctaatagcccggagacaagcgtaaagtgaagacatagtccagagagggaagtgtaaagctaca

SEQ ID NO: 468059 - DNA, 84 bp, Homo sapiens
cacagccaggagcctcaacaaatctttgcagaacctgagtttgacagaggaatgctcctgctccagcccagcccccagagagca

SEQ ID NO: 468060 - DNA, 75 bp, Homo sapiens
caaacccttcacagactgctctggccgacgcccccaacccatccctcatcccagagactgatgccgtgggtgtga

SEQ ID NO: 468061 - DNA, 100 bp, Homo sapiens
ggaaaatgatgcttaatatcgatgggagctgacacgtttctcccagcacaaagttgggagtgacaccagagcctcctgcaagatgcttctgattctgctg

SEQ ID NO: 468062 - DNA, 101 bp, Homo sapiens
ggctaggacgccgagcggtgactccccgccgctcccgggggccgtgacggtttctgaaggattgtcattcttgcatagcagtgtgaaaatggtgcatggaa

SEQ ID NO: 468063 - DNA, 97 bp, Homo sapiens
ggaaggtgatgtgaaatgatgctggagaagtaagcaggcagcacgctggctcttctcctgaacttcctcgcctgcctggccagcttctgtgtggaaa

SEQ ID NO: 468064 - DNA, 100 bp, Homo sapiens
ggggagatcatgaaacgaggtcgccttcccagcagcagtgaggattctgacgacaatggcagttgctccttgagggcaggacagttcttatggctttatc

SEQ ID NO: 468065 - DNA, 100 bp, Homo sapiens
cggaggtcttatacagccaggggatattattcggttgaccagaggagctaaagttgcagacaagatccagctcatcaataatatgctggacaaagtcaat

SEQ ID NO: 468066 - DNA, 46 bp, Homo sapiens
tttgcctggacaggaggaacccttgccggtggtggtgtgcacattg

SEQ ID NO: 468067 - DNA, 75 bp, Homo sapiens
gcacagccaggggcggaggagagaagatgccctgtcctcaagccccacagtcttcgttataacctcacggtgctg

SEQ ID NO: 468068 - DNA, 85 bp, Homo sapiens
ccttccttggggatacaaacacaccttgaaccagattgatgaagtaaaggtgtggcctcagttggttaccacagagaagcgcttc

SEQ ID NO: 468069 - DNA, 98 bp, Homo sapiens
tggcgagagggggcaccggaggtgacaacaataacaagactgtccttcggacaagttttaggaatagccaggccagaagaaggaaggcctgtggtgag

SEQ ID NO: 468070 - DNA, 90 bp, Homo sapiens
ggaacatcgtgatcaattagccactgccaaagatccctgctggccaaaacattctgattaccggtaagaatgattgatgttggctgatat

SEQ ID NO: 468071 - DNA, 100 bp, Homo sapiens
tgctgctctgcgccggcggcgggggcgggggcgggggcgccgcgcctacgggttcttccaggttggaaagagaatatgctggagagctgtctcccacgtg

SEQ ID NO: 468072 - DNA, 76 bp, Homo sapiens
gcagcaagtgcaattttacgaaacgagcctggagacacaggccccatccttcccaatggggacacttcagggagcg

SEQ ID NO: 468073 - DNA, 149 bp, Homo sapiens
acgagaggaaactggtgaccaagctgcagaattcagagaggaagaagcgaggggcacggcgctgagacagagctggagggctcagcctgttgctgcttcccttgctcctggttcaagctggtgtctggggattcccaaggcccccaggg

SEQ ID NO: 468074 - DNA, 103 bp, Homo sapiens
agttcctgcgcggctgcggggcttccctgcggctggaggcagacatctggtccctgggcataacagctattgaacttgcaagaggggaaccacctcattccga

SEQ ID NO: 468075 - DNA, 82 bp, Homo sapiens
cggagtgcgggcgcgccccaccaccgccctcaccatgcacacttccaccctgggcagcgtgtttggggacgcgtactatgag

SEQ ID NO: 468076 - DNA, 117 bp, Homo sapiens
tctgatctccgaataactgaggcgtttctgtacatggattatctgatgccttcaattaagttgcagagttctgatggagagatatttgaagttgatgtggaaattgccaaacaatct

SEQ ID NO: 468077 - DNA, 97 bp, Homo sapiens
tttcagctcgtttccttttgaagctgcccgtagatttcagcaatatccccacataccttctcaaggctggaggctcccaggtgattttcacaaatcc

SEQ ID NO: 468078 - DNA, 83 bp, Homo sapiens
gaatcacttgggttcattctattcagagtcaagaaacccccccttcttgagctatttacagcttttaacaattgagtaaagta

SEQ ID NO: 468079 - DNA, 75 bp, Homo sapiens
attccaagtaactcttatttggcagaggtggaggagacactgaagcgactgcagagccagaagggagtgcaggga

SEQ ID NO: 468080 - DNA, 100 bp, Homo sapiens
atcctaatgctgcctatgacaagttcaaggacaagagagtggggacaaagggacttgattatgcttggattaacaagtcatgaggcacatttttctctct

SEQ ID NO: 468081 - DNA, 87 bp, Homo sapiens
ctggccttgagaggacactcgccatcttggcagacaagcaatcatctggggggctaaatgtgacaaaccgagaagatggccaagatc

SEQ ID NO: 468082 - DNA, 85 bp, Homo sapiens
aagaagtggagcgtgtcctgaaggagttccaccaggccgggaagcccatcggggtttgccttcccggattgggcctacaagccag

SEQ ID NO: 468083 - DNA, 75 bp, Homo sapiens
gccagcgttacagtaatgttccaggactcagcccaggagagtgttattactcgagatattcatcgtacatttccc

SEQ ID NO: 468084 - DNA, 82 bp, Homo sapiens
gaggaaggaacgaggcaaggagctaaagcagcgtgcgttcagccctggggttgccgaggagcccaagtagaagaaatatgga

SEQ ID NO: 468085 - DNA, 75 bp, Homo sapiens
tcatttccttcgtacccacagtgcttcatgagagacagatgcttccagaatcaatcaccgaatggtggatctaca

SEQ ID NO: 468086 - DNA, 101 bp, Homo sapiens
acaaggaatgcaagggccacctgttcctcagttccaaccacagggcaaatccagacagaacctttgacttggtgttgaaagtgaaatgtcatgcctctgaa

SEQ ID NO: 468087 - DNA, 110 bp, Homo sapiens
catggagccatgctccctgggctcttccgcgggcgcccgcgcgctgcccttcgcttgaggtgagctgatcaaccttgccatgtactgtgagaggataaggaggaaatttt

SEQ ID NO: 468088 - DNA, 100 bp, Homo sapiens
tatatcatcagttcgaagagcagcattggaaactctgtttacgttattatcaacacaggaccaggaccggagtaggccctatgatacttttaacttgcac

SEQ ID NO: 468089 - DNA, 75 bp, Homo sapiens
gcagctctacagaggcttcaccttgggagggaaaacccctgatcctaaaatgaatgctaggacttacatggatgt

SEQ ID NO: 468090 - DNA, 75 bp, Homo sapiens
taaacctgataacactgcatgaaatgttagaggagatgtatctgcaaagtctttttacaccaggacaattcacaa

SEQ ID NO: 468091 - DNA, 100 bp, Homo sapiens
agaagcagtagcagtgaatctacagggacgccatcgaatccgattgtctacaaagcctggctctgttcccagtattttgaagtcacacagtttaactgca

SEQ ID NO: 468092 - DNA, 142 bp, Homo sapiens
ctggccgagctgagcgccgagctggacaaggacctgcgggcaattgagacccgactgccgtcccccaaggtatggcgttgacggtggatgtggccgggccagcgccctggggcttccgtatcacagggggcagggatttcca

SEQ ID NO: 468093 - DNA, 98 bp, Homo sapiens
aaagaaaactctagaagtctggatgtcggtgggcctctgagatatgccgtttacgggtgtttaaaagctcccaggagatccaggagcggcttgtccgg

SEQ ID NO: 468094 - DNA, 101 bp, Homo sapiens
gacttccagctccatgcctccacggtgaagcgctatggcctgggggcacatcgagggagactcaacatccagtggtgccagtgaagaagaggacacatgaa

SEQ ID NO: 468095 - DNA, 74 bp, Homo sapiens
cgcagccgggcccggcttcccagcctgacgccaatgttttcagttgcaccaagcttagccaccaatgcatcagc

SEQ ID NO: 468096 - DNA, 97 bp, Homo sapiens
ccggccgcctggctccccatactagtcgccgtgcctccacttctcattcagagaattcagtgcatacaaaatcagcttctgttgtatcatcagattc

SEQ ID NO: 468097 - DNA, 90 bp, Homo sapiens
gctgtggctccccttcaggaaataaagcagtgtccagcaccagggacgcctgagcctggacctgagccacaggacctgcagcgactactc

SEQ ID NO: 468098 - DNA, 100 bp, Homo sapiens
agagggcttttactcctacctgtgtaccgagccagatcccgggggcataactgctggcagcaccgacgaacccccaatgctgaccaaggaggagcctgtt

SEQ ID NO: 468099 - DNA, 75 bp, Homo sapiens
accagatccgggagcacgtcatcgccatcgaaggcacgtggactccctttaatccagtgactgtcaggtcgatca

SEQ ID NO: 468100 - DNA, 75 bp, Homo sapiens
gacatgggtgtggaggcaaagaaccatgaagtacacaacagccacaggttcttctgtgtggcagttcagaatgat

SEQ ID NO: 468101 - DNA, 78 bp, Homo sapiens
gagttgtaactatccataagcaagatggtaaaaatctgaagtccaaggcttgcgagaaggtcatttccgtgggtcaaa

SEQ ID NO: 468102 - DNA, 80 bp, Homo sapiens
tatccaaagccaagaaagacgataccgatgatgaaattgccaaatatgatgctttcaagatgttagaaagttcaagccag

SEQ ID NO: 468103 - DNA, 100 bp, Homo sapiens
tggctcagagctaggaaaaaagctgaaggcaactatggatgctgggaaactgacattgggtttgcctatcacagatgaacaaatccaggagatgaaatca

SEQ ID NO: 468104 - DNA, 50 bp, Homo sapiens
ggcatcatccgctatgcaattgggggagatgcgctggaacaagggcacca

SEQ ID NO: 468105 - DNA, 88 bp, Homo sapiens
aaccatgtggtgaggaattcaagagctgaaggacaaacactggttcaggattccggagtttgaatccacctttgacaattgtccgaaa

SEQ ID NO: 468106 - DNA, 75 bp, Homo sapiens
ctaacttgtcatgttccaacactacttagctttccaagtccactgcttttaaggccctgcactgaaaatgcaagc

SEQ ID NO: 468107 - DNA, 83 bp, Homo sapiens
cagcagaagctggtggaccagaacatcttctccttctacctgagcagctcggagcccaagatcctcttctcctacaaatgcca

SEQ ID NO: 468108 - DNA, 95 bp, Homo sapiens
cccggaggctgcacggagagcggtgcccgcgtcagtgggtttggagtccccgccgctgtctgtgtctgaggaaagacagcttgctgtcctgacag

SEQ ID NO: 468109 - DNA, 80 bp, Homo sapiens
tcttaatcccatatctggacatctggaacatccatggcctggaagaatgcaactctggccgagcaggctaagctgcccgc

SEQ ID NO: 468110 - DNA, 83 bp, Homo sapiens
ggctgcgtgaccccgacggctgcttctggaagtctggaacgttttttcttagagttccagaattgagactgaagtgtacccag

SEQ ID NO: 468111 - DNA, 75 bp, Homo sapiens
gtcgactacaagaagagggcggagcggagacgggagtattatgaaaagatcgttgatgaaaaaaccgtaggagaa

SEQ ID NO: 468112 - DNA, 100 bp, Homo sapiens
atcactaggagttcttggaagggaaagaaggaagattgtgggcgagaggtcaatgatcttaaaagaaaatctccttcagatctttggaaagaggatttag

SEQ ID NO: 468113 - DNA, 82 bp, Homo sapiens
gactgccagggagtggaggggagccaggcggccgcctcagaactcccccactggaaaggattctgaaagaaatgaagtcagc

SEQ ID NO: 468114 - DNA, 82 bp, Homo sapiens
atgaagccactgattagcaatttaaagatcctctccaaggatcagtgaatgcttgtgaaaagacctcatttatgtttctgcg

SEQ ID NO: 468115 - DNA, 96 bp, Homo sapiens
aggcaaattgttcagccaccagtgatgccatctgcggggactgcttgccagggtatgcttcagaagtgtccttctgttgatgacttcgtaagtgcc

SEQ ID NO: 468116 - DNA, 90 bp, Homo sapiens
gagtaacttggccaggctggccccgagcggaactggagaaagctgaggacaggggcaagtgtccgagtggtgaatcagctacttacagag

SEQ ID NO: 468117 - DNA, 90 bp, Homo sapiens
ggcaacttcgctgtggtgaagctggggcggcaccggatcaccaagacggagattatagatgcccagttcatttttactgggtgcgtggtg

SEQ ID NO: 468118 - DNA, 95 bp, Homo sapiens
agaagcacctggatgagacatttgctacagcatcccacattaagtcaacgtgctcatcttcaaactctatcagcgggcaaagcatgtgtacagcg

SEQ ID NO: 468119 - DNA, 100 bp, Homo sapiens
aatccgtcagaaaccagtaaaccatctatggagagtggagatggcaacacagaaaacctgttagaaatgtggtggtttcagcaaggcctcagtttccttc

SEQ ID NO: 468120 - DNA, 143 bp, Homo sapiens
ctttctcctcattgaagctatgcagtatttctttggcatcactgcagctagtaatttgccttctggattgtggatgagcttttagaaaagtacatggactcttatgatattgttttagtacaagatgaatcattagaagtagc

SEQ ID NO: 468121 - DNA, 100 bp, Homo sapiens
gagccccagagctcaatgggggaccacagcatgcacttccttccagcagctacacagtactgccaaatctgtcgaaagggagataatgaagaactgcttc

SEQ ID NO: 468122 - DNA, 51 bp, Homo sapiens
aaacctgagccactatctgaaggtccgagtggacagatgaattaaacacgt

SEQ ID NO: 468123 - DNA, 98 bp, Homo sapiens
acagatgaaaaactccaggctcagagaggttaaggaactcgtcctacgtaacacagccagttaggagtacgagagggcctccaaagtggaccagtttg

SEQ ID NO: 468124 - DNA, 90 bp, Homo sapiens
gctgcctgcctgcctggcatctctctctcccggtctccaatggtgcagggaccatgtccgtctccctcgtggctgatgagaaccccttcg

SEQ ID NO: 468125 - DNA, 50 bp, Homo sapiens
ggagacggattcagaagggctacagggtcttgcctcacccaagctagagt

SEQ ID NO: 468126 - DNA, 58 bp, Homo sapiens
gggtttgggaaacaaggcttccagtgccaaggcaatgctggacgtggctgcaaaccag

SEQ ID NO: 468127 - DNA, 51 bp, Homo sapiens
cgtggagagcgactcagggacaaaatgattacatgcagcaaactggaggtc

SEQ ID NO: 468128 - DNA, 80 bp, Homo sapiens
gcaagccccgctccggccaacaaatctcacattcttgaaggtggcattgaagagcactaagatcggaagatgagtgagct

SEQ ID NO: 468129 - DNA, 98 bp, Homo sapiens
ccaaccacactaacgagattcaagattatttgcaacagctcacgggagcaagaacgctgctgcctattcacactctgaggcttggtgtggaagtggat

SEQ ID NO: 468130 - DNA, 101 bp, Homo sapiens
aagagcaccggcaaattgagaaagccattcaagaattcgtgcccgccctggaaactctttccaagaacttggacatgaagatggagtcttgccctgtcacc

SEQ ID NO: 468131 - DNA, 83 bp, Homo sapiens
ctcgcgccggctgctctttccgggcttcaacgtggaaaccgtggagtacaagaacatcagcttcactgtgtgggacgtgggtg

SEQ ID NO: 468132 - DNA, 51 bp, Homo sapiens
tgaacatccacaaggcacctgcaagttaatatgatcctctgttgaagcaag

SEQ ID NO: 468133 - DNA, 100 bp, Homo sapiens
catctcgctgcccgacgatgtccgcaggcgaggcaaggtctcactcggtcatccaggttggaatgcagtggtgtgatcacagttcactgtaaactcaaac

SEQ ID NO: 468134 - DNA, 96 bp, Homo sapiens
gaagtttggtgctttgctccctgtgtttgcgaaacagatttgtttgtgagggaacagtagaagaaaagatcttacagctccaagaaaaaaagaaag

SEQ ID NO: 468135 - DNA, 100 bp, Homo sapiens
gaaagttctacaaggtgtcatggtaccggtggcctctgccgagcaagctttgtgcagtctggatttacctggacgtgctcttctccacggcctccatcat

SEQ ID NO: 468136 - DNA, 100 bp, Homo sapiens
gcgcgggtggggaacatgtctgagtcggagctcggcaggaagtgggaccggtgtctggcggatgcggtcgtgaagatagacggtcctaaaatctctacac

SEQ ID NO: 468137 - DNA, 105 bp, Homo sapiens
cctcacctgcgggaggagatcctcagcggcgccttgcggagggaccccacatacatctgtggatggatatactgaaccacacatccagcctaccaagtcgagtag

SEQ ID NO: 468138 - DNA, 100 bp, Homo sapiens
ccaaagtcgagggatgtacagcaacagaatgagaagctacaaacaagaaatgggaaaactcgaaacagattttggaattatgcaggtcgagggactactg

SEQ ID NO: 468139 - DNA, 100 bp, Homo sapiens
gcgttggctatgtgcccatcacagactgcttcacggactctttgctgttgacgttgatctcctggtagcatgaccttttggcctttgtaagacacacagc

SEQ ID NO: 468140 - DNA, 90 bp, Homo sapiens
gttgcatttcctcgtcgagcgcaacccaagcgctaagggctatgacctggagttaagtatggcgctggggacatactacccacctccccg

SEQ ID NO: 468141 - DNA, 100 bp, Homo sapiens
atccatttcagtcaccatcttctgctttcagaccaaggatgaactgctggaggagctagaggagctggagcaggaggaattggcccaggagttgttaaat

SEQ ID NO: 468142 - DNA, 76 bp, Homo sapiens
ggaagggacacatgtgcaatgcaaagctcctgagaaacatgccagaaactatgttccaacttcctgtcaacaatct

SEQ ID NO: 468143 - DNA, 90 bp, Homo sapiens
gtcagtgcacaaaatggcgccctacagcctactggtgactcggctgcagggttaccttcccgccaatgtagaccggagaccagccactct

SEQ ID NO: 468144 - DNA, 100 bp, Homo sapiens
gccagtcctcatgaactcaaagctgcctcttgatgtcctgggcaggagtgcctggtgaagaatgtgatgggatcactagcatgtctgcggagagcggccc

SEQ ID NO: 468145 - DNA, 100 bp, Homo sapiens
ccgctgcctgcagtggaccactgtcatcgaacgcaccttccatgtggagactcctgaggagcgtttaattggttggggtcagataagaagaggagtgaca

SEQ ID NO: 468146 - DNA, 100 bp, Homo sapiens
ccgccggcaccatgatggaggagatcgaccggttccaggtgcccaccgcgcactcggagatgcagccgctggtttttcgttggaatatacgttgcacatt

SEQ ID NO: 468147 - DNA, 82 bp, Homo sapiens
cgaggagcgggaagagttgctggggtttggtgcacctcgatttggaggaagtagggcagggcccttatctggaaagaagttt

SEQ ID NO: 468148 - DNA, 75 bp, Homo sapiens
tgcatccccgagacgatggcggagggagataatcgcagcaccaacctgctgtttacaggagagccgaccattttc

SEQ ID NO: 468149 - DNA, 101 bp, Homo sapiens
ctgatagccagtcttgcccttggagaccttatctatgtggtcattgatctccctatcaatgtatttaaggttcatatccagctttcagagtggcaccgtgc

SEQ ID NO: 468150 - DNA, 82 bp, Homo sapiens
acatatctgagggagaagcacaagatcatgcacagagttcttcagattattaaggaatcccagcagcagcatggtttacggc

SEQ ID NO: 468151 - DNA, 82 bp, Homo sapiens
cgaggcctgggttacaagcagcaagtgcgcggttggggccactgcgaggccgttttagatccccgtcgaggtcaagatcaag

SEQ ID NO: 468152 - DNA, 96 bp, Homo sapiens
gcgaacagtctcgttgctgcctctgtgtacgctgaggggggagggaagacatgtaaggaatttgcataagacagttatgcaaaatggagctggagg

SEQ ID NO: 468153 - DNA, 82 bp, Homo sapiens
acaagctttgtctccttcgacttggagtctttgtccaggacgggtctggaacagaatctgacagtgatgaatcagtaccaga

SEQ ID NO: 468154 - DNA, 80 bp, Homo sapiens
aaaatctccccggtgactttcaggtttgagtacaagctcagcttcaaaggcccaaggctggcattgcctggggctggaat

SEQ ID NO: 468155 - DNA, 75 bp, Homo sapiens
atagactctcccatcccaacatccttaggcggacaccaatagactccacagcagctccaggagcccagacaccgg

SEQ ID NO: 468156 - DNA, 82 bp, Homo sapiens
aaacccaagcggcttctgctgcaggctggtgtgtgacagctctgtgctgctgtgcctcaagaagagatttcacctgggccgt

SEQ ID NO: 468157 - DNA, 76 bp, Homo sapiens
tgttcttcttcgagtatttgtagaaggataccccagaatcttccatgctccgtcacactgcagccaggcccagagg

SEQ ID NO: 468158 - DNA, 98 bp, Homo sapiens
cgggactctgacggtgaccaacttattagaaaagggtgggatagtaacatctttttgagggaagaattggcttcctttcttgaaagtggtgaaggtac

SEQ ID NO: 468159 - DNA, 97 bp, Homo sapiens
tgggctaataatgctggcaaagtggaaaaatgtgcggttgaactcccaccacctgatcttggaccaagttctgcactaaatcagacactcatgttgc

SEQ ID NO: 468160 - DNA, 73 bp, Homo sapiens
ggccgctgcgaccccctgtccttccgttgtctacactgcggtctcgttccactggggatcaggcattagaagt

SEQ ID NO: 468161 - DNA, 82 bp, Homo sapiens
attcaccatcaacaaagaagaccacacactgggaaacatcattaaatcgacacagcattgttggttttgccatgtactattt

SEQ ID NO: 468162 - DNA, 100 bp, Homo sapiens
gaagcccaaaaagctgaaggtggaggcgccgcaagcgctgaggaattgcattttgtgaaaaaagaacaagaattttctgcaaggatcatatctaagtgca

SEQ ID NO: 468163 - DNA, 82 bp, Homo sapiens
ggccaggacgtcgggaggacctgctaccgagtctattgcttgctgggagacggggagctgtcagagggctctgtatgggagg

SEQ ID NO: 468164 - DNA, 98 bp, Homo sapiens
ggatcgtgaccgagaccgtgaccgagagcgtgaccgagagcgcgaatatcgtcatcgttagaaggagttgtaagacgttcatcgccgtgttatccttg

SEQ ID NO: 468165 - DNA, 83 bp, Homo sapiens
ggttgcaaaactggaaaagacaattgatgacctggaagttatctccagaagaagaagagaaaaggagaatccgaagggaaagg

SEQ ID NO: 468166 - DNA, 134 bp, Homo sapiens
cttgagtctggccagcgggtcaggctcttgctagatcagcaccggaggtggaagactggtgtcatggagaaactccagctgggcccagagattctgcagcgggaaaatccaaggcttatttatgccaggctgag

SEQ ID NO: 468167 - DNA, 52 bp, Homo sapiens
ccccaaagtcctgcaaattgacacaaccacaggagaagttgtgtcaggtgtt

SEQ ID NO: 468168 - DNA, 75 bp, Homo sapiens
ccgtgatccacaaggcattagagcatggcgccaagcccatctttgtgtgcttgcatccaactgtgatgagcctat

SEQ ID NO: 468169 - DNA, 100 bp, Homo sapiens
tgttcagaggctgccgaatcagacaacaatatgcacaggttttggcccaacagcagaaagcagcactgtcttcccagcagcagcagcagttggcacttct

SEQ ID NO: 468170 - DNA, 90 bp, Homo sapiens
gatcgctcacaactgcagacagagcgtcatgcaggaggcaacctccaagtcccagatcatgtctctgtggggtctggtctccaagatgcc

SEQ ID NO: 468171 - DNA, 50 bp, Homo sapiens
gcctcagagcccgagtacatggaggagctccctcccatgccccagagctg

SEQ ID NO: 468172 - DNA, 75 bp, Homo sapiens
ttagaaacggttgcctctgctgttcagtgaattccggtgtctcgcccggtcctcaccctcagggctcccgggacc

SEQ ID NO: 468173 - DNA, 75 bp, Homo sapiens
gaatgaagaagactatggcatcacaagtgtcagagaagaagaaggaggttcctgctgtgccagaaacccttaaga

SEQ ID NO: 468174 - DNA, 100 bp, Homo sapiens
gcagaacaaggcccggacaatcctgcagcacctcagtgaagcctggcgctgctggaaagccaacattccctggaaggtgcccagcctggagaaggttctg

SEQ ID NO: 468175 - DNA, 100 bp, Homo sapiens
aggaagatagtcttgggacccttgcatggtgtttcaaagggtggtgaagaactaagacattgctacaagtggttggtgtggtctctgtggctgtggccgt

SEQ ID NO: 468176 - DNA, 50 bp, Homo sapiens
gtccaggcagcattaaaacttaagcaggtatttgccttatccacacatcc

SEQ ID NO: 468177 - DNA, 50 bp, Homo sapiens
cccgcctccctgggagctccgcacgggacatgaccgataatagcaacaat

SEQ ID NO: 468178 - DNA, 83 bp, Homo sapiens
tgctgatgtgaaaaataccacgacaaaaccaccctagccaagattgacagacacctaatattcatgacttgagaatattctgc

SEQ ID NO: 468179 - DNA, 75 bp, Homo sapiens
gaaggatcaacgtatcataaaagctgtgatgcagatccatccgccctagcaaaatatgttctggctttggtaaag

SEQ ID NO: 468180 - DNA, 98 bp, Homo sapiens
gtcctgttctatctggtacccaaacaagcaggtccagcggcgactctggctggagtatgaagacatcagtaaagcttggatttacactgggcaacgtg

SEQ ID NO: 468181 - DNA, 74 bp, Homo sapiens
gtacctttatgaaccagtgtatcccaagtccagaggtgtccttctaaagctggtagaggtttcacgagtcatca

SEQ ID NO: 468182 - DNA, 82 bp, Homo sapiens
gaagcgggacctcactcagatggccgacgaggtgaaatgacaatggatgctctgttggctcgattgaaacttctgaatccag

SEQ ID NO: 468183 - DNA, 75 bp, Homo sapiens
cgcgacttcctggccatcgttttcttcgcctccataggtatagctgtggaccaactgtatatgatcatgcgcacc

SEQ ID NO: 468184 - DNA, 75 bp, Homo sapiens
acccataatcggaatgtgatcacagagcctatttacccagaagtagtccatatgtgttgttacagatcttataac

SEQ ID NO: 468185 - DNA, 100 bp, Homo sapiens
gctcctggaaaaggattgtaatttgaaaaaagtatctattccaaaattgccccaatgatggccaagacaattaaagctttcaagaacagattctcccgac

SEQ ID NO: 468186 - DNA, 75 bp, Homo sapiens
gtcggggtacgctggcttcatcatgcccatcgaggtgcacttcaaaaacaaggtccctgagtgccagaggtggtg

SEQ ID NO: 468187 - DNA, 83 bp, Homo sapiens
cacagagcctcgcctttgccgatccgccgcccgtccacacccgccgccagatttggtcgtattgggcgcctggtcaccagggc

SEQ ID NO: 468188 - DNA, 75 bp, Homo sapiens
ctctcctgaccctgaagaactgtgctcttcacccagatcttcggggtcggtgtgaagactgctgaccggtggtac

SEQ ID NO: 468189 - DNA, 71 bp, Homo sapiens
gtatgaaggcccccagctggacatctggggagcgcatggagcttttggaagaagccaagaagatggagatg

SEQ ID NO: 468190 - DNA, 139 bp, Homo sapiens
ccccgatccgccagcaccacctgaggatccagaaaccgccccagcgatggaagaggatcaggagctggagaggatgtaatccctgttcattactacttaatacctccaccaacaaagactaagaatggcagcaaagata

SEQ ID NO: 468191 - DNA, 100 bp, Homo sapiens
agacaacgccttaacccaaggaagtgactcaaactgtgagaacttcaggctgaagtggagagatcgcctgagcccaggaggtcaaggctacagtgagccg

SEQ ID NO: 468192 - DNA, 82 bp, Homo sapiens
ggggcgggcagcatggttcactccagcatgggggctccagtggctggatctctgctctggtggtgccgaagggcaacacagc

SEQ ID NO: 468193 - DNA, 75 bp, Homo sapiens
ctgctgctgctcttcccgctgctgctcttctccaggctctgtgccggatcgagctgggagatgtgacaccacaca

SEQ ID NO: 468194 - DNA, 82 bp, Homo sapiens
ggccgcccgggaactgctgacgcttgatgagaaggacccacggcgtctgttcgaagtggacatcctcatcatggatgatgac

SEQ ID NO: 468195 - DNA, 74 bp, Homo sapiens
gccttcgtctcccagattgcagggtggtagatctctgtagaaatgtaaaagaaagaataacaagggaatgcaaa

SEQ ID NO: 468196 - DNA, 75 bp, Homo sapiens
agcttttcaaaaaagaagaaaacattaaggatttaccaagaatgaatcaggctggagtgcaatggcgcgatctcg

SEQ ID NO: 468197 - DNA, 75 bp, Homo sapiens
cttaacatcctacctccagtcccagttaaaaagaggcagtacggcccaaaacgccacccgttgtaatcaaatctc

SEQ ID NO: 468198 - DNA, 98 bp, Homo sapiens
aagagaagacctcagatgtgaagtccattaaagacatatctgaagagatggattaagaatgctttggattaaggattgtggagcacatttcaatcatt

SEQ ID NO: 468199 - DNA, 100 bp, Homo sapiens
ttccttattggagcaagggaaagaaccctggctggggaaaagggaagtgaaaagagatctgttttcagggacggaagaagtctatagtggctgtggagcc

SEQ ID NO: 468200 - DNA, 75 bp, Homo sapiens
cacctggtcctcctccacctcccacatttcatcagcaaaagtactttgactcaggagactacaacatggccaaag

SEQ ID NO: 468201 - DNA, 100 bp, Homo sapiens
ggtcggtacagtctctgcacctcgcgccccagcaggcttgaacatgacaagcagatttgggagtccaaggcccagacagaggtccagcttcagcagaagg

SEQ ID NO: 468202 - DNA, 100 bp, Homo sapiens
aaagcattggaaatgtgcaggttcttctagagtatcatattgcctatctaaaggtaatccacccatttatcgtttttggaaagacaatcttcagcataaa

SEQ ID NO: 468203 - DNA, 100 bp, Homo sapiens
tgaaaatgtgcatatttcaggagtgtcaactggctgctctctcaggaggcaccaccatgattattgatttcgccattcctcagaaaggtggctccctcat

SEQ ID NO: 468204 - DNA, 78 bp, Homo sapiens
gcggagagaactcagcgaggattctgagaaaagcagcatctgttatagcaaaatacccacacaaaataaagagtggag

SEQ ID NO: 468205 - DNA, 100 bp, Homo sapiens
tgacacactgtgtgagggtccatcttcttctgatcacagatggagtggaatggcttgaagatggagctgggaatcccaagtgcaaaattgcaattgtttt

SEQ ID NO: 468206 - DNA, 101 bp, Homo sapiens
caaaggtagaacatggaggatcgtcaggctctaaacaaaattctgggtttctatcttactaaaggatatttcagaaaatctatattcactgaggaggatga

SEQ ID NO: 468207 - DNA, 98 bp, Homo sapiens
gagcatcggggtataggaagagaggtccgaaacccaagcggcttctgctgcaggcctccccatggccacccatggaccagtcggcattcacttcctcc

SEQ ID NO: 468208 - DNA, 98 bp, Homo sapiens
agagagaacagaaagtgaaatgagaacatcacatgaagccagagagtcaaggaaacttttcttttgagctactgacagcttaactcctgtgaacaaaa

SEQ ID NO: 468209 - DNA, 50 bp, Homo sapiens
ccgagaccgcggccgggaccgaggtggagcccacagtgaccatctcccca

SEQ ID NO: 468210 - DNA, 97 bp, Homo sapiens
gagaagacgaacctggcggcctatgtgcccctgctgacccagggctgggcggagatcctggtccggaggcccacagagatggggtttcaccgtgtta

SEQ ID NO: 468211 - DNA, 74 bp, Homo sapiens
ggctttccacgcttttgcccagccgtttgccgtgccaccttcctgtccacttccaacgaagcggtctataagat

SEQ ID NO: 468212 - DNA, 125 bp, Homo sapiens
aggaaatcggggagcttacccagcttaaagagctccacattcaggggaaccgcctcaccgttctgcccccagaactagggtttgtgtttagtgaatcagagggatctgcattagaacagtttgaa

SEQ ID NO: 468213 - DNA, 83 bp, Homo sapiens
cctggagaggcactcggacctggggaaggtgtggctcattgactttaatccatttggtgaagtcacagattcactgctgttca

SEQ ID NO: 468214 - DNA, 74 bp, Homo sapiens
gccccgcgtcatgcggctcctcggctggtgtacctggagtagaacagaaaaattattatgtctgtgttcccttg

SEQ ID NO: 468215 - DNA, 89 bp, Homo sapiens
ggagaaaccttatcaaaacaagaatgctatcaataatggtgttcgaatatctggaagagtactctttccattccttaccccagtttttg

SEQ ID NO: 468216 - DNA, 120 bp, Homo sapiens
cgcctcctgctcagatacctgttcccggccctcctgcttcacggccccttcacagatgtagtcactacaaatcttaaattgcgaaatccatcggatagaaaagtgtgtttcaaagtgaag

SEQ ID NO: 468217 - DNA, 82 bp, Homo sapiens
gttaagcagtagtgtttgggaagaaaaacagaggagttctattaagacgctacaagtgtattcatcagagtttggaggacaa

SEQ ID NO: 468218 - DNA, 83 bp, Homo sapiens
caggaagagtccggttctgggacagctggagacagtggtggtgactggggttctccaggacaaggacctcttctctgtcttcg

SEQ ID NO: 468219 - DNA, 100 bp, Homo sapiens
ccacatcccacatgcggctcgcatgtgtcaatggcctgtgtccacctggcttccaagatagaagaggccccaagacgcatacgggacgtcatcaatgtgt

SEQ ID NO: 468220 - DNA, 83 bp, Homo sapiens
ctcatctgtcattcaaaggaaaaaagtagctgtcattggtggtggcttgacaatgcagatcttcgtgaagactctgactggta

SEQ ID NO: 468221 - DNA, 82 bp, Homo sapiens
tgatcaacaaaagaagaagtatttggggagaatgactgaggagccattgatgtgtgactcagaattcatgattgaagaaatg

SEQ ID NO: 468222 - DNA, 83 bp, Homo sapiens
tgctggcatctgacctcctggacaacaaccgcatcatcgaacggccgccatggcatcagatgaaggcaaactttttgttggag

SEQ ID NO: 468223 - DNA, 74 bp, Homo sapiens
ggggactcgatggaccgcggctggcaagttgaactcccaccacctgatcttggaccaagttctgcactaaatca

SEQ ID NO: 468224 - DNA, 100 bp, Homo sapiens
ccgaaatacagatggaaggacagcattggatttagcagatccatctgccaaagcagtgcttactgaatacagattctgttcatcttgctctgaaattaaa

SEQ ID NO: 468225 - DNA, 100 bp, Homo sapiens
cgcagtcatgagtcgcttcaagtttatcggctaaagcgagcagtcctcagggttttgatgtggatcgagatgccaaaaagctgaacaaagcctgcaaagg

SEQ ID NO: 468226 - DNA, 100 bp, Homo sapiens
agaagaggaaaggaaaggagccaggcatggctcttcctcagtactatactggcaattgctggagaagattttgcaattgttgcttctgatactcgattga

SEQ ID NO: 468227 - DNA, 100 bp, Homo sapiens
gtgtcctgagatcaaatggcacttcattggccacctacagaaacaaaatgtcaacaaattgatgggaaaatgtttcaacgtgcgcaagagttgcggtggc

SEQ ID NO: 468228 - DNA, 98 bp, Homo sapiens
accggcccaccctacatttagcgcatcatgtgatccggctataaggaagaccagatggatgagaaactaatggaacctctgaaatatgctgaacaact

SEQ ID NO: 468229 - DNA, 104 bp, Homo sapiens
cagcacctacgtcccgctgccgtcgccgccgccaccatgcccaagagaaagacggccgaagccctgcagcccacgctacagccggagatgcagctcgagcacgg

SEQ ID NO: 468230 - DNA, 51 bp, Homo sapiens
gtggatcgctgtgatcgtcacttgagcactacaaacaccactggtttcccg

SEQ ID NO: 468231 - DNA, 82 bp, Homo sapiens
tattgaatgtgggtgtgacattaacatgatgattgatctggctgaagtagcagatctggttacagagttgtttatggataat

SEQ ID NO: 468232 - DNA, 50 bp, Homo sapiens
gtctggagtttgatgaggagcgagcccagagacggggtttcatcatgttg

SEQ ID NO: 468233 - DNA, 100 bp, Homo sapiens
aacccggactggatcaacaccggggagtctgcggatcttcaacttgctgctgagcttgggaagacattactggatcggaacacagagttggaggactctg

SEQ ID NO: 468234 - DNA, 75 bp, Homo sapiens
cgtactttgtctgactacaatattcaaaagatgcagtagaaagtcttatgataaatgattccttttgctccatag

SEQ ID NO: 468235 - DNA, 83 bp, Homo sapiens
cgggggtgctgcagaggacacgaggcggcgggctggagacatggaccgcggcgagcaaggctcctgctccagcccagccccca

SEQ ID NO: 468236 - DNA, 102 bp, Homo sapiens
gacggagtcctgttccaccttcagagcgtcacggcgtacgccctcatggggaaaatctccccggtgactttcaggctgtgggtgagcgtggaggatgctcag

SEQ ID NO: 468237 - DNA, 75 bp, Homo sapiens
gtggaggaggaggaggaggaggcttgggcttgcgccgttgaaggctatgactttgcagccgtcctggagtggttc

SEQ ID NO: 468238 - DNA, 100 bp, Homo sapiens
tcgagatgtctacttcgaagactggcaagcacggccacgccaaggtcttggatgtgctggatctgtgtgtggttgttcttcagtcccacaaaaaccagct

SEQ ID NO: 468239 - DNA, 100 bp, Homo sapiens
caatgatggggcagcaagtggccaacctcatctagttgaatctgaagatgtggacctgctgatgaagagggctgattgtatctaacttagggtcttgcat

SEQ ID NO: 468240 - DNA, 100 bp, Homo sapiens
ctggccgcggctctgggaagtgcgcagtccggtgtgcaactgaggaacatggctcaagaaactaatcacagccaagtgcctatgctttgttccactggct

SEQ ID NO: 468241 - DNA, 83 bp, Homo sapiens
gagggactgggagtcgttagtgagtactatactggcaattgctggagaagattttgcaattgttgcttctgatactcgattga

SEQ ID NO: 468242 - DNA, 88 bp, Homo sapiens
ccggtctcctttcccggccgcacaggtgacttttttgaacgaaccattctgtgcaacagccttgtgtggagttgtgctgtgacgggta

SEQ ID NO: 468243 - DNA, 100 bp, Homo sapiens
agcgactccatctacacgaaaggcaccccggagattgctttctggggaagctgccttcctatttcaaggaaagacgccaaggtaattttgacccagagga

SEQ ID NO: 468244 - DNA, 75 bp, Homo sapiens
caggccgagaagaaggccactgatataagaccatcatcatgtggaaactgaccagggatgagaccaactatggaa

SEQ ID NO: 468245 - DNA, 82 bp, Homo sapiens
gcggcggcgcgcgggggcgacgcgcgggaacaacgcgagtcggcgcgcgggacgaagctcaccatggatgatgatatcgccg

SEQ ID NO: 468246 - DNA, 82 bp, Homo sapiens
cgagcatctgggccgagaccattccgtatggagagccggtatttgattttcatcaagcagctgatggtatccaggaacaaca

SEQ ID NO: 468247 - DNA, 90 bp, Homo sapiens
caagaaggccctggacacagcaatatctctgggctttcacagatgtgtatatctcatgattgatatggagaaactagtcatgggccaaag

SEQ ID NO: 468248 - DNA, 100 bp, Homo sapiens
tgatgatgaacagcagcaacattcaagttaagcaaagaggtccttatacgtacaggtggatcatccatgccatggagtatgaacttcagatccgtggcgg

SEQ ID NO: 468249 - DNA, 50 bp, Homo sapiens
ctccaggtggcctccatgaaccagaagagtgtatgcagagaatatttcca

SEQ ID NO: 468250 - DNA, 90 bp, Homo sapiens
tcaacctcctgagtggctgggactacagttcggatggagatggcgagttctgctggctcctggctctctggctgcctcatccctctcgtc

SEQ ID NO: 468251 - DNA, 75 bp, Homo sapiens
ttctttttattggagctctacaaaagagaattttagacattggacgctattgataacggaatggttgcaattaag

SEQ ID NO: 468252 - DNA, 74 bp, Homo sapiens
taacaggcacttcctcactaatatcagggcttattttggatctccctaatactatgaacgcggcagagataacg

SEQ ID NO: 468253 - DNA, 75 bp, Homo sapiens
cccccggccgcggcgggacccgagtttagaagaagaatgtgaatcctctctttgcacatctgcgttaagagccag

SEQ ID NO: 468254 - DNA, 98 bp, Homo sapiens
cccctcgcctggctcggacccacggagccggcagcccagcactccgtttggcaccaactggcccgtgtacatgaccaagccggatggtacgtatattg

SEQ ID NO: 468255 - DNA, 102 bp, Homo sapiens
gtgcgcactgcgggcgcatccctgccccggcgccgtccgtgcccgcgggacctgacagccgggtcagaggaagccgagatcccccgcgaggtgatcgagagg

SEQ ID NO: 468256 - DNA, 82 bp, Homo sapiens
cgggagtgttcgttgtgccagcgactaaaaagaggacgagattgaggagctgcgggccgagatgctggagatgcgggacgtc

SEQ ID NO: 468257 - DNA, 100 bp, Homo sapiens
ggtggatgtcatcgagaagaacgagagcggctctgtgtgctccgggatggagcaggtgtgcagagggtgagaacccagctctgggaccaagtcacttgct

SEQ ID NO: 468258 - DNA, 80 bp, Homo sapiens
tattatcggaccccgaggatcaggaaaaactatgtactgccaaatctgtcgaaagggagataatgaagaactgcttcttc

SEQ ID NO: 468259 - DNA, 83 bp, Homo sapiens
ggactgtccctgctcatccattctcctgccacccccagacctcctcagctccagagctagagccggtgcaggccacgcagaac

SEQ ID NO: 468260 - DNA, 100 bp, Homo sapiens
gtcgacatgagtgatgtggaggaaaacaacttcgagggcagagttgtggcagcactgcctgaaggtatgagaccagattctaatctttatggttttccat

SEQ ID NO: 468261 - DNA, 100 bp, Homo sapiens
tgaggggtaacaagatggcgaccgagacggtggagctccataagctaaagagtacaggggctcaggtccaggtggcaggggatatgctacccaactcaac

SEQ ID NO: 468262 - DNA, 74 bp, Homo sapiens
cggcggccaatcacagtccactttggacagggcggcgactggcggcgcgatggacctgaccgggctcctgctgg

SEQ ID NO: 468263 - DNA, 50 bp, Homo sapiens
cctggctccccatactagtcgccggtggaagatggtatcttgaagttgag

SEQ ID NO: 468264 - DNA, 82 bp, Homo sapiens
gcgcccagaagaattgggttttcttcgctacttgaaacaatccaaggtccatctggttggtattgacatctttactgggaag

SEQ ID NO: 468265 - DNA, 98 bp, Homo sapiens
tgactgatgacagtgatgaaaatgaagaagaagatgcctttaccgaccgttcacgcaaagaatctgctccacaagttttgcttccagaagaagagaaa

SEQ ID NO: 468266 - DNA, 93 bp, Homo sapiens
acttaggcaaactcaagcactgcatcaaaggcttctattagaggtaaaaagaacgtattctcatggtacttacagagctggcccaatgagaca

SEQ ID NO: 468267 - DNA, 82 bp, Homo sapiens
gagcccgtccgtccgccgccaccacccactccggacacagatcgcaccccctccctccctggcggagcccctgaaggagctg

SEQ ID NO: 468268 - DNA, 98 bp, Homo sapiens
gattagcgacatccgagtgcagaacctgcaaggattctaacattttcagagaaccttttggaaagaacaagcctacttcaataaatgaaggagaataa

SEQ ID NO: 468269 - DNA, 90 bp, Homo sapiens
tcctcatcttttatacactcttagtgctgtccagatccatccttttacaatccctgctattattcgtccattcagcgtattgaactatga

SEQ ID NO: 468270 - DNA, 83 bp, Homo sapiens
tgctaaagaaaccatgaggattgctgagaagctctacactcaaggacaatgcagatcttcgtgaagactctgactggtaagac

SEQ ID NO: 468271 - DNA, 74 bp, Homo sapiens
tcagaggctccgttccgctgttctgggaacagccagggcttcaggtgctggcattgacggagtggaggaaatta

SEQ ID NO: 468272 - DNA, 99 bp, Homo sapiens
ccggaagacgcttcctgggtttgaggagttcagtgactgctattgaaccaccaaaagtccattatgaaactggttcagggagcaagtttccgaggttgg

SEQ ID NO: 468273 - DNA, 50 bp, Homo sapiens
acttctactacaacatctctgaaggaaggcattactgggtaccggccaag

SEQ ID NO: 468274 - DNA, 98 bp, Homo sapiens
gccaagcagtgagactattgccaagtggtgagaccatcaccaagcggtgagactatcacctatcgccaagtggaaaattgcctaagaattatgaccca

SEQ ID NO: 468275 - DNA, 99 bp, Homo sapiens
cactgccaccctcaaggagttcacgttcatgggcgagggaacagatgagaaacccggcaatgaaaaaaattgtacaagctggagataaggaccttgatg

SEQ ID NO: 468276 - DNA, 101 bp, Homo sapiens
agaacaacagacactacacatctgtcctccacagaggctttttgtgtgttttatcatctaaaatccaatccctcgaattgcagaatatgtatagagtgtgg

SEQ ID NO: 468277 - DNA, 100 bp, Homo sapiens
tagacttccatcttcatgagtactccaagaagatggttcagttgactattgcaaagttgccattacccagggaggagcaatacagctggctaacaatggt

SEQ ID NO: 468278 - DNA, 75 bp, Homo sapiens
tctccgccgtcaagccagccgtcaccacgttggttgtgaaaggcaccacagccgagagggtgacctctctgggca

SEQ ID NO: 468279 - DNA, 89 bp, Homo sapiens
tttcgaattctgcttcaagttcccggctcccaggtttattctcccatagcatgtggacacaactcagatgggaagttcatcgcccgggc

SEQ ID NO: 468280 - DNA, 100 bp, Homo sapiens
cctttctcatatccactgccaaagggaccagttcaggcctcatctccagtggcactgggtgtaaggattcccactgtggctcttcacatgatggaactgt

SEQ ID NO: 468281 - DNA, 90 bp, Homo sapiens
ccgctgtgcctgctgctgagcagcgccgcggtattggtaaaggttttcaaggtgtcatgaaaagatggggatttaaaggccagcctgcta

SEQ ID NO: 468282 - DNA, 100 bp, Homo sapiens
aacgccagggaccctgtgcaggcctgctcctccgtttgcaagatttgcctgaagacctggataatctccatttttgtcatggactgttaaaacgtttgaa

SEQ ID NO: 468283 - DNA, 101 bp, Homo sapiens
agccaggattcggtgctggaccctgcagagcgtgctgtggtcagagtcgctggtactaggttttgacaagcttgcatcatgcgtgagtataagctagtcgt

SEQ ID NO: 468284 - DNA, 51 bp, Homo sapiens
ggggctagtggccacgctgcagagcctcgttagtgtgactctggatccaga

SEQ ID NO: 468285 - DNA, 100 bp, Homo sapiens
ggcgcgtcctgctgaccccagccggcgccgagggcttggaatctcgagcgggaaaagatccaggtccagagagcatcgcagacatcgatctcgctccatg

SEQ ID NO: 468286 - DNA, 96 bp, Homo sapiens
cgattagcaaggtaaaagtaacagaaccatggctcagtttccaacaccttttggtggctccatctactctttgaagcttctgcccagcttgcattg

SEQ ID NO: 468287 - DNA, 89 bp, Homo sapiens
agaaactcagccactggttgccttggtaggcaataaaagaaaatgtttataggaggccttagctgggacactacaaagaaagatctgaa

SEQ ID NO: 468288 - DNA, 100 bp, Homo sapiens
agcgcagaaagcaggcgaacccgcggcgcaataacgatatgaggccccaggattcctggcgaggtcctcctccccttttccagcagcaaaggtttgacag

SEQ ID NO: 468289 - DNA, 98 bp, Homo sapiens
agagacgccggccgtggacatcggggcagctgacctcgcccacgcccagcagcagcagcaacaggtttctgagtcccttcaacatgatcctgggagga

SEQ ID NO: 468290 - DNA, 50 bp, Homo sapiens
ccggtctctgttccgcaggatgcccctagtccaattcctgacccttcagt

SEQ ID NO: 468291 - DNA, 82 bp, Homo sapiens
tcgtcatcctgctgctgaagatctggaagacgcgctcctgcgccgtgcctgatcaactttctagcgggagaacgatcatgga

SEQ ID NO: 468292 - DNA, 99 bp, Homo sapiens
gccgcactcgccgatcctccaggcatgccccgctacgagctggctttaatcctgaaagccatgcagcgggctgatgtttcagacaccgcaggaaatggg

SEQ ID NO: 468293 - DNA, 74 bp, Homo sapiens
ctcaatctctggcttaaattaatggagtctcactctcactcaggtgggagtgcagtggggcaatcacggctcac

SEQ ID NO: 468294 - DNA, 90 bp, Homo sapiens
attgctctcgccatggctctcagcgatgctgacgtgcaaaagcagatggagcagatggtgctttttacccagatgaaatacaaaggccac

SEQ ID NO: 468295 - DNA, 100 bp, Homo sapiens
ctgaagatggctactctggagttgaggacctgaaggagaagaaggagaaggtggaggagaaggcaagccggaaagagcgaaagaaagaagtggtggaggt

SEQ ID NO: 468296 - DNA, 98 bp, Homo sapiens
tatttgccctatctccaaaactggagccatgtattgaagcccctgggtgataatttgatggaggaaaacataaggcagtctgtaacaaactctatcaa

SEQ ID NO: 468297 - DNA, 100 bp, Homo sapiens
acctcctgtgagcagtgggaaaaatggaccaacttctttggcaagtggacattttactggctcaactttctacaagttctgattaaagtcagaaatagac

SEQ ID NO: 468298 - DNA, 100 bp, Homo sapiens
gacgctgacctacctcaaccaagatgaggaaatatctgatgaggaagggtctggagatgaagattcagagggactgggtctggaggaatatgatgaggac

SEQ ID NO: 468299 - DNA, 85 bp, Homo sapiens
ttcacccagcatttcatccctcgtcgaaaggattggattggcatctttagagagatctattgggaaactgattataaccactcgg

SEQ ID NO: 468300 - DNA, 100 bp, Homo sapiens
cttcgctcggccaaatcctccttcagcctcctggcgcccatccgcagcaaggacgtccgcagcagtgtgctcatgggagcttagaagatcccaaaagtat

SEQ ID NO: 468301 - DNA, 90 bp, Homo sapiens
gctggtacatcttccgcgtgctgctgcaggtaaaataccatgaagattttgaaaaaacaaaggggagaggctttactcccgtcgtggacg

SEQ ID NO: 468302 - DNA, 100 bp, Homo sapiens
tttcgccaaagagcttttcctaggcaaaatcaagaagcctaactctggtgaactggatcctttgtatgtagtagaagtacttctgcgctgtagcaaagag

SEQ ID NO: 468303 - DNA, 100 bp, Homo sapiens
gcggcgccccggccgaggtggcggcggctcctcagcacctgctgctggccccctctgatgtggccggatggggcaccttcataaaggagtctgtgcagaa

SEQ ID NO: 468304 - DNA, 100 bp, Homo sapiens
cctgtccaaaggcctggcccggcggctcagccccatcatgctggactgaggctgatgtgaatccaaaggcctatccccttgccgatgcccacctcaccaa

SEQ ID NO: 468305 - DNA, 49 bp, Homo sapiens
tttataccacctgcgattactattgggactttaaccaggacatctgaca

SEQ ID NO: 468306 - DNA, 90 bp, Homo sapiens
cgggcggcaaaggagcagccatgagggccgggcccagtcaccgaccgaagagagaagggcacagttacctaagtatcaacgtaatcttcc

SEQ ID NO: 468307 - DNA, 99 bp, Homo sapiens
tcgccgtcgcccaagaagcccctcagccggtcaaaatgcagatcttcgtgaaaacccttaccggcaagaccatcacccttgaggtggagcccagtgaca

SEQ ID NO: 468308 - DNA, 83 bp, Homo sapiens
tggggaatctatagttaatcttggcgacattgacaatgatggctttgaagcacttttccagccattaactccaggctctcgag

SEQ ID NO: 468309 - DNA, 100 bp, Homo sapiens
atgaagttgattgactatggtctctccggctaccaggtgataagaagtacatcatggggcccaagctttccactcttgacgccactgtctttggacactt

SEQ ID NO: 468310 - DNA, 100 bp, Homo sapiens
tgtgttttctgagcgagccttgaaagagataaaagcggaagtttgccacacggtttcccttgggggctttgaaataacaccaccagtggtcttaaggttg

SEQ ID NO: 468311 - DNA, 100 bp, Homo sapiens
aggacagggtcggttccgccgcgcagcgcccaggcccagctcgtccagagtctgcggacagcgcacgtccagggggccgtggagcccatgcagatcgacg

SEQ ID NO: 468312 - DNA, 75 bp, Homo sapiens
cttggcagatgttgttgaagataaagacaagggccgttgttcgagagagaactgcaagtatcttcaccctccgac

SEQ ID NO: 468313 - DNA, 100 bp, Homo sapiens
aaagttctggtagtgggtctggactacctttattgactgggcatttagctatggagacattattatcccttacttctaaacgagcaggagactggtttaa

SEQ ID NO: 468314 - DNA, 100 bp, Homo sapiens
tggatattctggtggggagatgaacccaacctagtgggtgtaatacatcatgaactgcagggtaaaaatctctacaccaatgaatatgtagcaatcaaac

SEQ ID NO: 468315 - DNA, 82 bp, Homo sapiens
cggaggaagagtgggagtttgccgcccgagggggcttgaaggattcccaggactccggctctctctgcttctgtttccggtg

SEQ ID NO: 468316 - DNA, 100 bp, Homo sapiens
atcccatctatgaggagaccaaaataaaactaacagtctatgatgtcaaggataagtctcatgacacctgtgaaaaaacaactgatgtgaagaaaagtaa

SEQ ID NO: 468317 - DNA, 83 bp, Homo sapiens
ttccaggctcacaaggctatcttagcaggtggacccccaaaagtacaagggcatatttaacggattctcagttacacttaaag

SEQ ID NO: 468318 - DNA, 75 bp, Homo sapiens
ccagaatcagttgttggagaaaattaaaggttttacagaaggcgacacatgttgttcagagtgaagtggacaaat

SEQ ID NO: 468319 - DNA, 100 bp, Homo sapiens
gaaatttgtgtggagcgaggaaaggtgtgctgtgcctgaggccagaaaccccaatgatgggaatctgccctgctggccacgctacaacaaggatgaaaag

SEQ ID NO: 468320 - DNA, 100 bp, Homo sapiens
atcagttcagtatcgctacttcaaagggtactttttagaaccaaaggtgtgtggagaaatgcgctatcagctgaataaaaccaacatggagaaggatgag

SEQ ID NO: 468321 - DNA, 90 bp, Homo sapiens
tagagaattctgggcttccacacaactccagtgctaactcaacagaataatccagaatggctactctgatctatgttgataaggaaaatg

SEQ ID NO: 468322 - DNA, 74 bp, Homo sapiens
ggagcgaagcgccgagccatggcgcaccaaacgggcatccacgttcaaatctgaacatcaatgatgtactaggg

SEQ ID NO: 468323 - DNA, 100 bp, Homo sapiens
ctcccaaagtgctgggattgcaggctcacgaggcccagggaatcctctggaccatcagattaccaatgaaagaggagaatcaagctgtgataggttaacc

SEQ ID NO: 468324 - DNA, 88 bp, Homo sapiens
gcgggcgagggcgactacgaccagtgaggcggccgccgcagcccaggcgcgggggcgacgacagtactatactggcaattgctggaga

SEQ ID NO: 468325 - DNA, 75 bp, Homo sapiens
ttctggtgatgtgagctgtgtggatgaaatcctaaaaaacatacatatgatagttgagaaagacacatattctga

SEQ ID NO: 468326 - DNA, 100 bp, Homo sapiens
cacagctaagatgccaggacatcctggaagctgggaaaagggagtggacatccgccataacaaggaccgaaaggttcggcgcaaggagcccaagagccag

SEQ ID NO: 468327 - DNA, 82 bp, Homo sapiens
gcctggcacatcctggtcgccaagaccattactgggacttccacccccaccacgtgcacagcgagttcgagagcttcgccga

SEQ ID NO: 468328 - DNA, 82 bp, Homo sapiens
ccgaagcagcgtgtcctccgtgggagcccgaggtgccacacctccctggatgatccaagatgaagaatacattgctgggaac

SEQ ID NO: 468329 - DNA, 75 bp, Homo sapiens
cggaccgtgtgcgtccgaagcccgaggcagaggaaccggctcccaggcctggaagcgctggtgcacgcagatcct

SEQ ID NO: 468330 - DNA, 74 bp, Homo sapiens
cagtaggagaatgactccgattcgtgaccctcagcgccggtgcatgtcgataagcggagggtgctgctcaacca

SEQ ID NO: 468331 - DNA, 100 bp, Homo sapiens
ctgaagtaagcacagtagaactgctgcatctgcaacaacagcagaaaaagcttgtggtgaaggggggcaaaaaaaagaagcaagttctgaagttcactct

SEQ ID NO: 468332 - DNA, 51 bp, Homo sapiens
gtttggatcttcttcagatcttaatggaggacagtcattttgtttactcat

SEQ ID NO: 468333 - DNA, 90 bp, Homo sapiens
acgcggatttggctggcgtcccgcgactacaaagctgatgaagacccagcattattccagtcagtcaagaccaagagaggccctttggga

SEQ ID NO: 468334 - DNA, 101 bp, Homo sapiens
gtcttagactgcaatatccttccccctcttttgcagttggagatgcttgatgctgcaaagaacaagatgcgagtgaagatcagctatctaatgattgccct

SEQ ID NO: 468335 - DNA, 100 bp, Homo sapiens
tcgtcttggactcctatatgagagtcgcgagtgtgcagcagattttacatcctgaagtccaaactctagatctacggagctgcgatatatcagatgctgc

SEQ ID NO: 468336 - DNA, 74 bp, Homo sapiens
cgcgagacttggcgaaggccttcctttttcgtctgggctgccaacatggtgaaaagagatttgaatgcccggaa

SEQ ID NO: 468337 - DNA, 100 bp, Homo sapiens
ctcagcgccgcggggatgggggcctcgggcgccccgcagccccccaacatcctgctcctgctcatggacgacacaatgcagatcttcgtgaagactctga

SEQ ID NO: 468338 - DNA, 75 bp, Homo sapiens
cttctccattgcagccatccctggccggcctactgaacttgacgcactggtatttggccatctatacaccattct

SEQ ID NO: 468339 - DNA, 50 bp, Homo sapiens
caataattacttttccattggcgtggaaatgatctgctggaggattcccc

SEQ ID NO: 468340 - DNA, 83 bp, Homo sapiens
gttggcctctgcccaggaagttgctggttccacgtctgccaagacagcatgtctgaggccacaagaggaagctgaatgaagag

SEQ ID NO: 468341 - DNA, 75 bp, Homo sapiens
cctgaccacaatggggaggacaacttcgcccgggacttcatgggatcgtgggactttaccagatcggtttgtaat

SEQ ID NO: 468342 - DNA, 80 bp, Homo sapiens
ccagtgccagtactgccgtctcaagaagtgcttccgggtgggcatgaggaaggaggatctttctcctggcctgccctcca

SEQ ID NO: 468343 - DNA, 100 bp, Homo sapiens
gagaagcgccttcgctatctcatggacacaggcaggctaacaagaagggagatacaagatgattttagtaaagagtcctttactaaggactttactggaa

SEQ ID NO: 468344 - DNA, 100 bp, Homo sapiens
ccgcctgccccggtgcgcagacagagctattccagcaccagcagagtaagactttgaccccgacgcaggcttcagtgattgccgcggatcagaagcctga

SEQ ID NO: 468345 - DNA, 90 bp, Homo sapiens
cggcggcccagctctctctgacacaggttcctacaaacttgatgacttttgagtagaagcctgagaaaaaaagagaggtgaactgttgct

SEQ ID NO: 468346 - DNA, 90 bp, Homo sapiens
caggaccctaacgacaggcgcctccggcccatttacggaagagctaaagatggctgaatttctagatgaccaggaaactcgactgtgtga

SEQ ID NO: 468347 - DNA, 50 bp, Homo sapiens
gcagaacccccagaccatcatgtattagaaaactactcggatgctccaat

SEQ ID NO: 468348 - DNA, 82 bp, Homo sapiens
gcttattgctacagtttacagacaagaggtttcagccagtgcatgaccttactattgctattgacctgaaaagtggttctgg

SEQ ID NO: 468349 - DNA, 75 bp, Homo sapiens
gtcagacatctggatggtcacttactgagcaggatcactactcttggaatcaaagataaatccaaatactgcata

SEQ ID NO: 468350 - DNA, 102 bp, Homo sapiens
gtcacctggcccctcaccatcaccatcctcatctctcttggaaaaatggctacaaacttcctagcacatgagaagatctggttcgacaagttcaaatatgac

SEQ ID NO: 468351 - DNA, 98 bp, Homo sapiens
ctattatccaatgaagaggaaaagaacagagccatcattcaagaagtttgcttcatgtaatagctcttcaagtctgcaataaaaaatggcctccaaca

SEQ ID NO: 468352 - DNA, 76 bp, Homo sapiens
ttttaatgcagaagttacctgatatttttagtgtttacttcagaagagaagggacaaaagtggctctcaatccagc

SEQ ID NO: 468353 - DNA, 100 bp, Homo sapiens
gcctcagctgcggcaagtcccttcctgagaccaagatcactccatggatgaaatgacagctgtggtgaaaattgaaaaaggagttggtggcaataatggg

SEQ ID NO: 468354 - DNA, 83 bp, Homo sapiens
caggggagcaaggtgcaagagtccacaaagggacctgatgaagcgaagatcaagaataaaggttctcttcagtttgaagacaa

SEQ ID NO: 468355 - DNA, 100 bp, Homo sapiens
atgccaagaagtatcttcgaacagatgacagagtagaacgtgtacgcagatgggatggaggtggataccacaccaacagttgctggacagtttgaggatg

SEQ ID NO: 468356 - DNA, 100 bp, Homo sapiens
caaagctgaactgaatgagtttcttactcgggagctggctgaagatggctactctggagttgagtgagacggtttaagcggaagcatcttactgccattg

SEQ ID NO: 468357 - DNA, 82 bp, Homo sapiens
gaacgaggcaaggagctaaagcagcgtgcgttcagccctggggttcttgatagtccacaatgggtgaaccacagcaagtgag

SEQ ID NO: 468358 - DNA, 83 bp, Homo sapiens
cgaggacgcggactgcgaaggcagaaaaatggctacaaacttcctagcacatgagaagatctggttcgacaagttcaaatatg

SEQ ID NO: 468359 - DNA, 83 bp, Homo sapiens
agtcgccttctgcctggtcgggatcccgccccgcccggagccccggcccccacagacaatgcagatcttcgtgaagactctga

SEQ ID NO: 468360 - DNA, 100 bp, Homo sapiens
gagtcaaggaaaactcttgggacaacgaagtctttgcttccatctcaggacctcagcagaagggaagcagctgtgcccccatgggttgacactaacgatg

SEQ ID NO: 468361 - DNA, 75 bp, Homo sapiens
ctctgtttctccccaaaataaccattctccagatccagatagtgaattcctaagaagaaaataatggattgcata

SEQ ID NO: 468362 - DNA, 100 bp, Homo sapiens
gtccaagtgtttataaaggtttagtccctaaacctgctgctccacctacaaaagcattggttataaattcaaagagcttgaaaagattgaagagggccaa

SEQ ID NO: 468363 - DNA, 49 bp, Homo sapiens
atgcaagtcggaggaaacgctagtgcatgatacctgcaatatatcagac

SEQ ID NO: 468364 - DNA, 75 bp, Homo sapiens
gtcctgcattacggtctctataagaagatgatcgatgccaggccaaggtggagcaagcggtggagacagagccgg

SEQ ID NO: 468365 - DNA, 98 bp, Homo sapiens
ctcctccagctaccggcccaaggccatctacctggacatcgatggacgcattcagaagagacacctatggctgccgatgaaggctcagcagagaaaca

SEQ ID NO: 468366 - DNA, 75 bp, Homo sapiens
agccaaagaaaaagataaaactgagaaagaattgcccaaaatgagccaggaatgatgagaagacagcagctgatt

SEQ ID NO: 468367 - DNA, 96 bp, Homo sapiens
ttcgatgatcgtgtgtcggatgaggagaagggtgacttttaaatatgacggctccaccatcgtccccggcgagcagggagcggagtaccagcactt

SEQ ID NO: 468368 - DNA, 100 bp, Homo sapiens
ggtccacctctccagtcccctgcccctcacaggcctgacctctcgggacacacccagccctgtggacccagacaccgtggaggtgttgatgacctttgaa

SEQ ID NO: 468369 - DNA, 75 bp, Homo sapiens
gacttctcggaatggaaggatgacgaggaaattatggaagtggaaattacaatgattttggaaattataaccagc

SEQ ID NO: 468370 - DNA, 85 bp, Homo sapiens
cagcctccgcggctccggggagaagcatgccaatgaagatgtggaaagaatgttactaggaaacaagtgtgatatggacgacaaa

SEQ ID NO: 468371 - DNA, 100 bp, Homo sapiens
ctagaagatgccattcatcaccaccagggaatatatgaacatatcactcttgcttattctgaggtccaagcatctcattttgaaggcctaatcacaacca

SEQ ID NO: 468372 - DNA, 100 bp, Homo sapiens
tcatgaaaaaatttctggccttagtcaggcaaagcaggggcatgggggagaaggagaaccgaacaatattttgggagtccaagtgacatggcttctactg

SEQ ID NO: 468373 - DNA, 75 bp, Homo sapiens
ggaacttactggacgtcctgcaggagggcttcaatgaggctgcctgataggggctgtaaatctcaaatccagcaa

SEQ ID NO: 468374 - DNA, 98 bp, Homo sapiens
tgaagacacctgctcagtatgacgcttctgagctaaaagcttccatgaaggcagaagtcaattcatctggaaagactatctctgagtcagacttaaac

SEQ ID NO: 468375 - DNA, 90 bp, Homo sapiens
ttcccattttgctcagcgactgtttgatgacgtcccgcaggaagaaaacaggcagattttggcgcggcaaaagtcaaactcacagtcgga

SEQ ID NO: 468376 - DNA, 100 bp, Homo sapiens
gttcgggcctagcggagccgggactggagagcaaattctcagatccaacctcagacctactaactcagaagctctgtagatggggcctagcagtctgtgt

SEQ ID NO: 468377 - DNA, 82 bp, Homo sapiens
cgcaaagcgtcgagatcccgggcgggggcaccgagggctaccacgttctgcgggtaaactaacattatggatttttccaagc

SEQ ID NO: 468378 - DNA, 100 bp, Homo sapiens
cgcggcttcctgtacttcaacagacaggccctggaggaagcactgagcatccaaaccccgccatcatctccaccaacagcatttgggagcccagaaggag

SEQ ID NO: 468379 - DNA, 75 bp, Homo sapiens
ctttggttacctatgtacctgttaccactttcaaaagaagaatccccagcacaagatagaatatagacataatac

SEQ ID NO: 468380 - DNA, 100 bp, Homo sapiens
atcgctctcggcctccgacacgaacaccttccaccatgaccacctcagcaagttcccacttaaataaaggcatcaagcaggtgtacatgtccctgcctca

SEQ ID NO: 468381 - DNA, 75 bp, Homo sapiens
caaagctagagatgactacaaaacattgggaaatatattcttccctctctcctgcctttatgaggaaactgatca

SEQ ID NO: 468382 - DNA, 50 bp, Homo sapiens
atctctatgagcttttgaaacttgttaagataacatttggtcagccaggc

SEQ ID NO: 468383 - DNA, 88 bp, Homo sapiens
ggggacgggggcgagagtgaacgattcaacccgggggagctcaggattctgaaaccttccttgtatccctcctgagacatctttgctg

SEQ ID NO: 468384 - DNA, 103 bp, Homo sapiens
ggtctctcggacaccattttctgccgctggacgcaagattacatgaagcagatgacatttgaagcccaagcctttttagaagctgtgcaattcttccgacagg

SEQ ID NO: 468385 - DNA, 83 bp, Homo sapiens
ctggaggagaggttcaaccgcgccctgggcgtgatggtgggcatgggtcagaaggattcctatgtgggcgacgaggcccagag

SEQ ID NO: 468386 - DNA, 75 bp, Homo sapiens
gattataatcaggaagtggatgcctccatttttaaggcaagatcgtggacgccgtgattcaggagcaccagccct

SEQ ID NO: 468387 - DNA, 100 bp, Homo sapiens
gccccaaatcgatgtgcatgcacttacggatttactggaccccagtgtgaaagaggtgcaggtggtaccattataacgaattttgagaggttggtaaaag

SEQ ID NO: 468388 - DNA, 75 bp, Homo sapiens
ccggcttatggagcatggcatcatccagcatgaatgatatggaacctagcaaagctgttccactgaatgcatcta

SEQ ID NO: 468389 - DNA, 100 bp, Homo sapiens
cgggcattctccatctccttgcagatttccacatggaagaggcactggattggcctggagtatacttgttaccaggccaggtttctggggtggctctaga

SEQ ID NO: 468390 - DNA, 100 bp, Homo sapiens
caaagaccagaaagagtgtctcatcttcttcaagataacttgccaaaatgtggacacaaatatatctgttattttacctactgttcatgaggtggatatt

SEQ ID NO: 468391 - DNA, 100 bp, Homo sapiens
ctgaacatcgtccaccgtgatatcaagccagagaacctgctgaacactcgtgaaactgctcaggccatcaagggtatgcatatacgaaaagccacgaagt

SEQ ID NO: 468392 - DNA, 80 bp, Homo sapiens
gatgcggagcgcggtgctgccggtggagcttcagctgcagaaccttggcctgaaaatgctacattatatcagcaattgaa

SEQ ID NO: 468393 - DNA, 98 bp, Homo sapiens
cggccgcaccttcccgccttctcaggttggtgttcgaggaagagacattgttgttcttggtgtggagaagaagtcagtggccaaactgcaggatgaaa

SEQ ID NO: 468394 - DNA, 50 bp, Homo sapiens
cagaaaacaaagaatttgccagatgtttgaaggggaaactgaggcccaag

SEQ ID NO: 468395 - DNA, 85 bp, Homo sapiens
tgaagccagtgggctggggactcacggccgggacactcagggcaggtcctgaacgaggctgtgggggccctgatgtaccacacca

SEQ ID NO: 468396 - DNA, 99 bp, Homo sapiens
cccttccacgtcatccgcatcaacaagatgttgtcctgtgctggggctgacagataaacccactgccctacagccgcgtggtgcacacctaccgcctcc

SEQ ID NO: 468397 - DNA, 75 bp, Homo sapiens
gtcagcttcgaccagccccctgaaggcagtcatctgccctgttacaacaagaggcacagagctttggcctgctgg

SEQ ID NO: 468398 - DNA, 101 bp, Homo sapiens
gctgatcgaggagccagccttcaatgtgtcctacaccaggcagcccccaaatcccggcccaggtcaaaatgcagatcttcgtgaaaacccttaccggcaag

SEQ ID NO: 468399 - DNA, 100 bp, Homo sapiens
gaacatctgaaaactgccactgtaaacttcataaccagctatccgggttcatcctacatttttgtgcaagaggtgcatagcgggctgctgcttcatcccc

SEQ ID NO: 468400 - DNA, 75 bp, Homo sapiens
ggaaccagctcgggggccaactctgaggagtccactgcagcagagacggtctcgccacattgcccagactggtct

SEQ ID NO: 468401 - DNA, 75 bp, Homo sapiens
gcgagcgcgagcggcgcgagaaaatattaataaggcagcggaaagaagaaatatgaatacggctccatcaagacc

SEQ ID NO: 468402 - DNA, 83 bp, Homo sapiens
ctcggtgctggagaacttcgtgggccggtcaaaatgcagatcttcgtgaaaacccttaccggcaagaccatcacccttgaggt

SEQ ID NO: 468403 - DNA, 96 bp, Homo sapiens
ctgcacaagctgctggacaaggaccctgacctgcctgtcgtcgtggtggccaacaagcaggttaaaggactggatgcatttgttctgagcctgctc

SEQ ID NO: 468404 - DNA, 114 bp, Homo sapiens
agatcgtggacaagatcatgggcaaaggacagatccaggtcaaaatgcagatcttcgtgaaaacccttaccggcaagaccatcacccttgaggtggagcccagtgacaccatcg

SEQ ID NO: 468405 - DNA, 100 bp, Homo sapiens
cgatatcagtaagaagagcaaagtaaatgctgtcttttcccaaaagacaggctcttcacctgaaggtgtgtcaaggatgccacaatgccatcgacccaga

SEQ ID NO: 468406 - DNA, 80 bp, Homo sapiens
ggagggaaggagcgcggagcccggcccggaagctaggtgagaagccctaccactgcaactgggacggctgcggctggaag

SEQ ID NO: 468407 - DNA, 98 bp, Homo sapiens
acttgtgctgcaggagtgtgtcagtgatgatgtgagattacgtactataggtgaacttttagctcctgcagctccttttgacaagaaatgtggtcgtg

SEQ ID NO: 468408 - DNA, 50 bp, Homo sapiens
acgcctcacaaacctccacattggaagcaagatttccagatgtagcaaat

SEQ ID NO: 468409 - DNA, 100 bp, Homo sapiens
caggaagacgcactgcgtgtggagtatgcttcgtggtgtctcagtgcagcgccagggataaaggcctcaggcccaggcccaaggccaagtgagagagccc

SEQ ID NO: 468410 - DNA, 100 bp, Homo sapiens
ccatttgatgtgactcgtcggcgaatgcaattaggaactgttctgccggaatttgaaaagtgcctgccactactacgtgcccctcctgagagcggaagag

SEQ ID NO: 468411 - DNA, 51 bp, Homo sapiens
tgagcactattttggattagtcaataactccagcatgtcggaagaagagct

SEQ ID NO: 468412 - DNA, 100 bp, Homo sapiens
ctttagtgaaatgggctaataatgctggcaaagtggaaaaatgtgcgacggtcctaaaatctctacacttgccaaaaaacaacagtctttatgtccttac

SEQ ID NO: 468413 - DNA, 100 bp, Homo sapiens
cagactcatggaggccagattttctccaattaaccagatcttgccctggtgcagacaagacttagcctcagcattcggagctcccaggaggaggagccgg

SEQ ID NO: 468414 - DNA, 100 bp, Homo sapiens
gctttcgggtctgaccactctgttccccgggcagaagaggaggatctcccacctttccaagcaaggccaggagcccacagatgacatagtgctaatggcc

SEQ ID NO: 468415 - DNA, 101 bp, Homo sapiens
ggccggcagcgtcccggacgaggagagcccccctccatgcgcctgaaggcccgacccagcagccctggcttttccgtgcttacctgcagcgccttctcctt

SEQ ID NO: 468416 - DNA, 100 bp, Homo sapiens
ccaagagcaagtggcggcctcaagccttggacactgtggccagaacacaaagcgtgaatccggaagaaaagttcaatctggaaacatcaatgctgccaag

SEQ ID NO: 468417 - DNA, 120 bp, Homo sapiens
cacacctgccgacggcttcacagtcctctccaccaagagcctcttccttggccagaaggtgagatcggactggaactgttcggctgcgaccagaaatttattttcctgagtaaattgccg

SEQ ID NO: 468418 - DNA, 100 bp, Homo sapiens
ttgtcctttggaaacccaagaggtacctttcttatccgcgagagtgaaaccaccaaagaaaccgaaacttcattgccccttcaatgtgggaatccagcca

SEQ ID NO: 468419 - DNA, 82 bp, Homo sapiens
ctactacaagtcctcgcacctaaagtcgcacctgcggacgcacacagctgcgtgcccagatgcgcgacctggcacggggcat

SEQ ID NO: 468420 - DNA, 80 bp, Homo sapiens
gagggaggaagctgggacacccgggagtcaggaaatgatgtggcaaaatctggcaaaggcagagaccaaacttcatacct

SEQ ID NO: 468421 - DNA, 100 bp, Homo sapiens
gctggcgctcaccatcatcgtgtctatcgttcacagtgtcttcgagttcctggccttcaagaatgtcaccaggagactaaagtccatcaaaaacatccag

SEQ ID NO: 468422 - DNA, 75 bp, Homo sapiens
tgactgtggatttcgaggagtgtctgaaggactcgccccgcttcagttctccgggagatgttgcataaccactcc

SEQ ID NO: 468423 - DNA, 100 bp, Homo sapiens
ataaagtacactgacacacattctgctctgccagtccagctgagggtccgagccgcttacaggctccaaggactcagtctcctttgaggatgtggccgtg

SEQ ID NO: 468424 - DNA, 100 bp, Homo sapiens
cggcgtgctactgtgcgctcgatccagcaccatggggaagcgggacaatcgggtgacagtaaggattgtatcctggagccgctttccctgccagaaagtc

SEQ ID NO: 468425 - DNA, 100 bp, Homo sapiens
ggacttggtccgcggcatccgtaaccacaaggaggacgaggggaaggagaagttcctgggcatcctgaacaaatacatggagatccatggcaccgtgtac

SEQ ID NO: 468426 - DNA, 78 bp, Homo sapiens
tgtcagtcaccatgtgtctttcaggtgacgcatccaaagaagacattgacactgctatgaaattaggagccggttacc

SEQ ID NO: 468427 - DNA, 83 bp, Homo sapiens
aaaggaatacattctttcatcattaagaaatcagggccatcgatgcacccctcggagctaatagcggagatgagaaacagtgg

SEQ ID NO: 468428 - DNA, 111 bp, Homo sapiens
atgaggatgaagattcaccaaataagctatatactttggttacctatgtacctgttaccactttcaaaaatattgatgatgttaagaagttcaaaccgggttacctggaag

SEQ ID NO: 468429 - DNA, 127 bp, Homo sapiens
gtgggaacccttcggccgctgagattctgtcgtgtcgtcgctgctggcacttcaggctctggggggtacatggtatggagtagacatcaacaacgaggacattgctgacaactttgaagctttcgtg

SEQ ID NO: 468430 - DNA, 82 bp, Homo sapiens
cggggagggcccagcgcatccgacagatgccagcctggcggtctcattcagccagccaatcatgtattgccagcctcattcg

SEQ ID NO: 468431 - DNA, 83 bp, Homo sapiens
cattaccggacaggccttgtccggcaataccaaggatgagttccacccgttcatcgaggccctgctgcctcacgtccgcgcct

SEQ ID NO: 468432 - DNA, 100 bp, Homo sapiens
ggcctcttcctgaagcatgtggagtatgaggtttccagccaggccaagtacctggcccagatcattgtgatgggcgtgcaggtggtgggcagggcctttg

SEQ ID NO: 468433 - DNA, 88 bp, Homo sapiens
taaatgaaagtctgagccagctgaaaacactgattttggatgctctgaagaaagatgagacatgggggacaaaggacagaaaggcagt

SEQ ID NO: 468434 - DNA, 75 bp, Homo sapiens
gcccgccgccgcagcgcttggcgtccgtcggtctccgtccgtcggtccgggggaagctcttcgtgggcggtcttg

SEQ ID NO: 468435 - DNA, 74 bp, Homo sapiens
cggccatctcgctgcccgacgatgtccgcaggcgtgcccatgacgcttccggagacaaccctggaaacactgaa

SEQ ID NO: 468436 - DNA, 99 bp, Homo sapiens
cttcaaaggctgtcgcaaggaggaagaatccacctcattgcctggagatcacgccaccatcttcagaaaagctggtctcagtgatgcggttaagtgacc

SEQ ID NO: 468437 - DNA, 98 bp, Homo sapiens
tccggaggcggcgaggagcggcggacctcgcgacctgtgtcagcagagccgccctgcaccaccatgtgcatcatcttctttaagtttgatcctcgccc

SEQ ID NO: 468438 - DNA, 96 bp, Homo sapiens
agaacagttaatcctcaatttaagcctgatctaacccctagaaacaggttttcctttggaatatggataaatacaccatgatacggaaactagaag

SEQ ID NO: 468439 - DNA, 82 bp, Homo sapiens
caagaagaagaagttgcgaaggatccccaacggggaggccaacgtgaagaagctctgacgcccgctctgcggcttcggtgtt

SEQ ID NO: 468440 - DNA, 74 bp, Homo sapiens
ttcacgacctcgagggaaattgcatcaagaaagccttcaacaattggatccatggctttgacagaaggggcatt

SEQ ID NO: 468441 - DNA, 100 bp, Homo sapiens
ctcgaaggcccgcggcgccccgtgctgcagtgcttggtcctggataagtttgaaagctacaatgatgaaactcagctcacccaacgtgccctctctctac

SEQ ID NO: 468442 - DNA, 100 bp, Homo sapiens
ggccggctagaggaagaggcgttgcggcgaaaggaacggctgaaggccctacgggagaaaaccgggcgcaaggatgataatgaagataattcaaatgatg

SEQ ID NO: 468443 - DNA, 75 bp, Homo sapiens
acttttactgaaaattccttatggatctctgagaaggcgcagcgttgaaagggtgaaaggtgtagcagtcactcg

SEQ ID NO: 468444 - DNA, 83 bp, Homo sapiens
aggacattcagtcagaagaaggctgctattgaaagagagtatgcacagttcaggacctcaaggggctcggctatgagaagggg

SEQ ID NO: 468445 - DNA, 75 bp, Homo sapiens
cttacgtgtactttaccaacgagctgaagcaggtgcagctgctagcaaggaaaattatcttttcatatttaaatc

SEQ ID NO: 468446 - DNA, 100 bp, Homo sapiens
ctgaagcattgcttcaaagcatggggctaactccagaatcccccattgagaataatgtttcttcagtctctaaggactcagctccttacatgagctttgg

SEQ ID NO: 468447 - DNA, 82 bp, Homo sapiens
ggtcacccgctacgggaagcaggcctcgccacagctaccactgccacgtgtacccctatccaaacacagccgaggagcggag

SEQ ID NO: 468448 - DNA, 90 bp, Homo sapiens
aaagaaaagaaaacttgaaactaatcctgatattaagccatcaaatgtggaacctatggaaaaggttaggaaagattacgacaccctttc

SEQ ID NO: 468449 - DNA, 95 bp, Homo sapiens
tccctcactatcgacaagctctagacatgatcttggacctggagcctggaactgtggctgcaccatctgtcttcatcttcccgccatctgatgag

SEQ ID NO: 468450 - DNA, 100 bp, Homo sapiens
gcgatgggcaacgccgccgccgccaagaagggcagcgagcaggagagcgcattcgcaacgacaggcgcctcctctgccaaccggtttgtcagcatcggac

SEQ ID NO: 468451 - DNA, 75 bp, Homo sapiens
tggacatcaccccggacaggctgcagctcgtgtgcaacgcgctactggcccagcttcttggacacttaatgattg

SEQ ID NO: 468452 - DNA, 87 bp, Homo sapiens
ctggcctctctcagtgaagactgctcacttgctgtgctggactcaagcctttctgagttgaatcatgaccagcacctaatgaaatgt

SEQ ID NO: 468453 - DNA, 95 bp, Homo sapiens
gaacagactagccactttgcattgactggaaacaatggcatttacagaaagagtcaacagcagtggcaacagcatcagaggctccttgaaatgct

SEQ ID NO: 468454 - DNA, 90 bp, Homo sapiens
taggtgcgcggatggaaatccagagagtattacacggagaaatgtgtcatgaacaactattttggcattggcctggatgcgaagatatcc

SEQ ID NO: 468455 - DNA, 100 bp, Homo sapiens
gaagaacaagaagttgagaccgagaatgtggaaacagataatcatgatgtcatttccttgaagttgtttgaactgacagtggagagaaccccagaagagg

SEQ ID NO: 468456 - DNA, 88 bp, Homo sapiens
gtcatatggcatggacaatcacagtggtggtggtgggggtagcagggacagtggccttagagctattgagaatttgatgcaaaagaag

SEQ ID NO: 468457 - DNA, 114 bp, Homo sapiens
atgtgggccctgcacgagctcaaaggacactatgcaatcacccgaaaggccgccatggcatcagatgaaggcaaactttttgttggagggctgagttttgacaccaatgagcag

SEQ ID NO: 468458 - DNA, 98 bp, Homo sapiens
ctgtgatgtgcctgcaacaacaggaaaggcaatgttatattaaggcatgcgaggctgccaagaaaacaaaagcagatgaccgaggaacagatgaaaag

SEQ ID NO: 468459 - DNA, 75 bp, Homo sapiens
cctctttgctgcaccaggtgtcctggagacagacactgccctaaccatcatggaggtggccgaggtggaaagtcc

SEQ ID NO: 468460 - DNA, 75 bp, Homo sapiens
tcattcaagaagtttgcttcatgctatacacagaatgggattttacatatgctggacagaaataagagaatcaag

SEQ ID NO: 468461 - DNA, 95 bp, Homo sapiens
ccaggttctggtccgggtagattgggagcggaggtttgaccacatgcagcagcattcaggtggttgccaggggcctggcccgggtcctggtgttt

SEQ ID NO: 468462 - DNA, 88 bp, Homo sapiens
gtcaccttttagcccgggactctttcacaggctggatgaagattggggtggtgttcccactgatgaagagcaggcgactgggttggag

SEQ ID NO: 468463 - DNA, 74 bp, Homo sapiens
tgcaaagccagcgttacagtaatgttccagtcatccgtccttggctcaggatttggagagcttgcaccaccaaa

SEQ ID NO: 468464 - DNA, 98 bp, Homo sapiens
aagcccagccaagccccgccgatcgcgggcaccggagccagccccgcagcggagctcccagctcctccagcagccgacaggaggcccgtcaagatgca

SEQ ID NO: 468465 - DNA, 129 bp, Homo sapiens
atgcctgctaacatggataagcatgccctgaaaaagtatcgtcgagaagcctatcatcggtactaggttttgacaagcttgcatcatgcgtgagtataagctagtcgttcttggctcaggaggcgttgg

SEQ ID NO: 468466 - DNA, 100 bp, Homo sapiens
tgaatgttcaaaaggcatctactgaaaggattttcagctgaactctcatctctcaacactggcaaatattcataagatctaccacacccttaataagctg

SEQ ID NO: 468467 - DNA, 99 bp, Homo sapiens
ttcgcatttgtgcagctgtcctctgcaatggtcactatctctgcagagatgggactgcagcaacttcaccaatcaacacctgggcacacacacatggaa

SEQ ID NO: 468468 - DNA, 100 bp, Homo sapiens
aaagatgcagaggaagaggaaagcgaactggtccaagacaactttgacaagattgaattcaataggatgtgttggaccctctgtgtcaaaaaaaacctca

SEQ ID NO: 468469 - DNA, 75 bp, Homo sapiens
gcggcagcccgtggagtcggctgagggaaaagcgaggcaaggcaggcgggaagggaaaaggccgaggcatcagcg

SEQ ID NO: 468470 - DNA, 75 bp, Homo sapiens
ctcacggagcccgcacccaggaacccgctcgtaaatgaactctggaagcccagccagggacaatgcaccttcaca

SEQ ID NO: 468471 - DNA, 97 bp, Homo sapiens
ggccaaatatcgagagggacgacggcctcgtgctgtgaaggacaggacatccagcccaaaagagacctcacccgctttgtgaaatggccccgctata

SEQ ID NO: 468472 - DNA, 98 bp, Homo sapiens
accccgaccttggcaccgcgtttgtcaagttttctactcttacaaaggaactgtccacactgctgaaaaatctggcttctccagggaaagtgaccgag

SEQ ID NO: 468473 - DNA, 101 bp, Homo sapiens
ttgagaaagtgcgagttcttagaaatgatcgacgagaaggtgcgcgtctacagcccgtaccaagactactacgaggtggtgccccccaatgcacacgaggc

SEQ ID NO: 468474 - DNA, 90 bp, Homo sapiens
ctgggctcaagcagtcctcgcatctcagcctcccaaggagctgggacctcaggtatggaaaaattgtatctacaaaggcaattcttgaca

SEQ ID NO: 468475 - DNA, 98 bp, Homo sapiens
accgcgccccgagaaccaatcagcagccgcgttagttcaaacaagctgtatataaacagacaatgaaactctttgcagagctggaaattaaaaggaaa

SEQ ID NO: 468476 - DNA, 101 bp, Homo sapiens
ggcgtttgggctacggttgttgttggcgactgtgcttcaagcgggcccagtaaatcctttagggccacctgtaccccatgggccccatggtgtcccaggcc

SEQ ID NO: 468477 - DNA, 100 bp, Homo sapiens
aggaggagccggactctgctgccaagagtgggtgccgacgccaccgccgagcccatgatcctggaacagtacgtggtggtgtccaactataagaagcagg

SEQ ID NO: 468478 - DNA, 83 bp, Homo sapiens
ggaaggagggcgacccacgagctaggtgtaatgtctttgctgagaactcttcttctggacgtggtcccaacaattcaacagac

SEQ ID NO: 468479 - DNA, 100 bp, Homo sapiens
cagccacgaagtacagccggaggaagttctactacatcaccctgctacgagaccccgtgtcccgctacctgagcgagtggcggcatgtgcagaggggtgc

SEQ ID NO: 468480 - DNA, 80 bp, Homo sapiens
cttctcatctttgtggtcgtgtttttaaagtaggagagcctacatattcttgcagatccaaacgatcaaagatgttgctg

SEQ ID NO: 468481 - DNA, 75 bp, Homo sapiens
aacgagcctagtaatgactgggatatttactactgggccacagtaccctcttatatatggactgattcttattcc

SEQ ID NO: 468482 - DNA, 50 bp, Homo sapiens
tttcagttcaaccaaaatctcttgtacggaagagcagatattctggggat

SEQ ID NO: 468483 - DNA, 75 bp, Homo sapiens
gctaagtgctggcaagagcgatgtctactacttcaggaactgtggctgcaccatctgtcttcatcttcccgccat

SEQ ID NO: 468484 - DNA, 100 bp, Homo sapiens
ctgcgttccagccccagttccccggcagcgggacccggcgaagacgcgaccgcggcgcgagtcaccatgcccattagcacctgagccagtgctttctgga

SEQ ID NO: 468485 - DNA, 101 bp, Homo sapiens
catccaagttccagtttgtggcctcctaccaggagctcatggttgagtgtacgaagaaatgatcttagcaaagcaatgtctcaagatggtgcttctcagtt

SEQ ID NO: 468486 - DNA, 75 bp, Homo sapiens
tggcacccagtggcctgtactactgaccaactgccagagttttctctgggtgttaacagcggttggactacagac

SEQ ID NO: 468487 - DNA, 83 bp, Homo sapiens
gtgtagcgccgctcagtccttccaccggaagtgtccgatcggaatcagccctgtccgagagcaaaagctggcaggctgacaga

SEQ ID NO: 468488 - DNA, 75 bp, Homo sapiens
accttgaggaacttggcctctataggttgggggccgtcccgctcctaaggcaggaagatggtggccgcaaagaag

SEQ ID NO: 468489 - DNA, 76 bp, Homo sapiens
acaacagcctggcgtccgccacggctggcggtaaggctggaaaggactccggaaaggccaagacaaaggcggtttc

SEQ ID NO: 468490 - DNA, 100 bp, Homo sapiens
gccggcccagctctgtcgctgacgggaggatctgaagccggccgcagatgaagactcttaagatgacagaaggtgatttttctggtgatcgaggacttcc

SEQ ID NO: 468491 - DNA, 98 bp, Homo sapiens
ccagccaatgccaagacagtggagtgggactggaaactgctcacctatgtcatggaggaagagtatgcgttccattttgaggaatcacagatatcgaa

SEQ ID NO: 468492 - DNA, 98 bp, Homo sapiens
ggagaccccgaaaacggaagcgcagggagaaggaagaggtgtttgaaaaggagtctcaggagcaggggctgcggcagaggctgctggacgagcagttc

SEQ ID NO: 468493 - DNA, 90 bp, Homo sapiens
gaaggaactttgggtcctgaatcttctgggagctgaggaaccagatatcttgaaaagctgccagaaagagacggtctcgccacattgccc

SEQ ID NO: 468494 - DNA, 99 bp, Homo sapiens
ccctcccggcccggattatagtctctcgccacagcggcctcggcctccccttggattcagacgccgattcgcccaggcaattcgaagttttcaagtagc

SEQ ID NO: 468495 - DNA, 82 bp, Homo sapiens
ttcggcacacccagtcctgtgatttgaggctcaaaaagggaaccctggagctgtgtactaatggtcacttgatgtgcgctgg

SEQ ID NO: 468496 - DNA, 50 bp, Homo sapiens
gcgggagctgtgcagctccttatcatgaacgccaatctgaattgccaacg

SEQ ID NO: 468497 - DNA, 75 bp, Homo sapiens
gacgcgcgggaacaacgcgagtcggcgcgcgggacgaaggcagacactctggaggagggctctgcctccccgaca

SEQ ID NO: 468498 - DNA, 100 bp, Homo sapiens
gctggagtccgcgcctccctggattccaacaatgtctcacccatcttggctgccacccaaaagcactggtgagcccctcggccatgtgcctgcacggatg

SEQ ID NO: 468499 - DNA, 83 bp, Homo sapiens
tcctgtacagcctgcagaactggactttgaacatgtcggggatcgccctcagcagactcgcccaggagaggaaagcatggagg

SEQ ID NO: 468500 - DNA, 98 bp, Homo sapiens
tcagaatggatccacgcctgatggctccacgcatttcccttcgtgatgccaattctcggaagcaagaagcagagtggaaagaaaaggcaataaaggag

SEQ ID NO: 468501 - DNA, 104 bp, Homo sapiens
ctcagtgccaggagggtccctggtgggtgctgcatgaggcaggcgtcactgcagaagagtgacagagctgggcctggcagtgaagcgtcttcagaagcagaatc

SEQ ID NO: 468502 - DNA, 75 bp, Homo sapiens
ctctggttctgacaccctcagacacggccagctgaccccagaagaaaggctaaatttggccgaagatggaccaaa

SEQ ID NO: 468503 - DNA, 80 bp, Homo sapiens
ggcctatggaagtttggtgctttgctccctgtgtttgcgaaacaggtcgtggagggcccccaagacccaacagagggatg

SEQ ID NO: 468504 - DNA, 75 bp, Homo sapiens
gcggagcaatgcgcaggaataaggaagcgacctgcaaccgacgatccagaagcagcaaggtctagcaattccaaa

SEQ ID NO: 468505 - DNA, 83 bp, Homo sapiens
tcttagagttattcaaggggatggagtagatattaataccttacaagagggtcaaagtcagagtggtggtcatggtcctggag

SEQ ID NO: 468506 - DNA, 100 bp, Homo sapiens
aaatgcgccacctgctgcatgtcctgaaagtagacttaggctgcacatcggaggaaaactcgggaaatgaggcaagttatcctttggaaatgtgctcaca

SEQ ID NO: 468507 - DNA, 83 bp, Homo sapiens
cctcgccatgccggcccggcggctgctgctgctgctgacgctgctgctgcccggcctcgggcatcaagatggtgctcatgtgg

SEQ ID NO: 468508 - DNA, 74 bp, Homo sapiens
ggattgctggctacagcttcagaagaccgaagcgttcgtatctggaagttacggcagtcccagtcctactgcac

SEQ ID NO: 468509 - DNA, 75 bp, Homo sapiens
ttttgaagaaatctggaagttttccacctaccatgctctcgattccttcacttgtccctcaccaaggacgggaca

SEQ ID NO: 468510 - DNA, 80 bp, Homo sapiens
atggctccacgcatttcccttcgtgcccagcccctgtggaggtgaatctgaagctccgccggccatccttccgtgatgat

SEQ ID NO: 468511 - DNA, 150 bp, Homo sapiens
tgctgggggtgctgggcgacctgcaggcagcaccggaggcccaggtctccgtgcagcccaacttccagcaggacaaggtagctgtgaagctcagtggctggcgctggcgggggcggcaggcatggcgtctgcacccgcgggcagagctgg

SEQ ID NO: 468512 - DNA, 100 bp, Homo sapiens
gtcaagaccgtgctcatctcccgactcaagcagatgcctctttgacaaggccacttcatcatcaagcttctgcctgcccgcattctcatggaaacccccc

SEQ ID NO: 468513 - DNA, 90 bp, Homo sapiens
cgcgattctcagggattgatcgcctcttcagatttaacccttagtggcttctgaagaaaatggcagaaacatcgccagagccttctgggc

SEQ ID NO: 468514 - DNA, 90 bp, Homo sapiens
tttagattggattctgaatatcagatgttggggatcagccaggtgaggtaggttattcaggctctcctgctgaagctcctccaagcaagt

SEQ ID NO: 468515 - DNA, 99 bp, Homo sapiens
tggcctctcctgggatcggcccaaggccagttctccgcagggtgctggtcaagataaactaggaatctatgtgaagtcggttgtgaaaggaggtgctgc

SEQ ID NO: 468516 - DNA, 80 bp, Homo sapiens
aggaaatgagagccgggttttctgacttccaactcattagggaccaggcaccaccttccatggtcaataatgaacaacgc

SEQ ID NO: 468517 - DNA, 100 bp, Homo sapiens
cgcggacgcaggggcgttcaatggtgtcatggagaaactccagctgggcccagagattctgcagcgggaaaatccaaggcttatttatgccaggctgagt

SEQ ID NO: 468518 - DNA, 101 bp, Homo sapiens
cgggagacgagaagcctgaaaagtcgcagcgagctggagccgccggagaaaatatttacaccagcagctccagttcataccaataaagaagatcctgctac

SEQ ID NO: 468519 - DNA, 76 bp, Homo sapiens
ctatgtttccacatcggtcagaaaaagatactggtcgaattgacaaatcttaccctacagtatgtggccacacagg

SEQ ID NO: 468520 - DNA, 74 bp, Homo sapiens
gtctcctgtccccactgccggcccattaggacccaggatgcgggtggtgctggacaacacagccctgaaccgga

SEQ ID NO: 468521 - DNA, 74 bp, Homo sapiens
cgctctttgccgtgacaacaccgttcccccagccgggctgatgaaggatttgggggcagagcacttggcaggtc

SEQ ID NO: 468522 - DNA, 71 bp, Homo sapiens
agatccagggcaagcgggtcaaggttgcacgttttcaaaaaatacctaatggtgaaaatgagacaatgatt

SEQ ID NO: 468523 - DNA, 80 bp, Homo sapiens
tctgcgtgagaatagagaccaccgagtgtggacgaatgtggaacctcgctctgtggctgtgttcccttggcactccttag

SEQ ID NO: 468524 - DNA, 51 bp, Homo sapiens
aacaacaaggtgttgatgccgccggacgggcaagttaaagtcttcagagcc

SEQ ID NO: 468525 - DNA, 75 bp, Homo sapiens
acggggcgccggcgccgccgcccccgggctcgcggcctgcagaactgccattggatgtccagaatcccctgtagt

SEQ ID NO: 468526 - DNA, 97 bp, Homo sapiens
cgtcgtttccagaaagggtttgactggaggaacctctggagcagctcattcttttatacagcaaaatgcaagagcctggagctgtgctggatgtggt

SEQ ID NO: 468527 - DNA, 50 bp, Homo sapiens
gactgaaggtcacaccacagcgcaactgccattggatgtccagaatcccc

SEQ ID NO: 468528 - DNA, 103 bp, Homo sapiens
caatgaagttccaattcaaaagatgtttgaaaagctgggagatgagtatgatgtatgtgccatttgtttggatgagtatgaagatggagacaaactcagaatc

SEQ ID NO: 468529 - DNA, 99 bp, Homo sapiens
tctgataccgcttgcagaagggaattgaatagatgtctccctattggttgaagatgacagcgatgcagagacctatggagaagagaatgatgaacaggg

SEQ ID NO: 468530 - DNA, 75 bp, Homo sapiens
gtgaggaagaaccgctacaaagacgtgctgccttatggtgccaactggctgacttttttctgccagccagtgaag

SEQ ID NO: 468531 - DNA, 74 bp, Homo sapiens
ctggagggctgggatatgataggtatgaggatgagatcaataagcgtacagagatggagaacgaatttgtcctc

SEQ ID NO: 468532 - DNA, 100 bp, Homo sapiens
ccgacatgtctctagtggcggaagccttcgtctcccagattgcaggtacccgaggattaataaagaatctttacttcctgtagcaaaggacgtgtcttac

SEQ ID NO: 468533 - DNA, 82 bp, Homo sapiens
tgcggggcctggcggtcttcatctcggatatccgcaactgcaacatgagtgagaatgaggaagaggaaatttctcagcaaga

SEQ ID NO: 468534 - DNA, 75 bp, Homo sapiens
cggcctcggagcaacgagcgcagcgccggtttctgcccacttggctatagggaatgtcataatggaaaatgctat

SEQ ID NO: 468535 - DNA, 74 bp, Homo sapiens
ggcagtggggatggctataatggatttggtaatgatggtacaggtttgcagattccgccagcagcacagcaagc

SEQ ID NO: 468536 - DNA, 74 bp, Homo sapiens
taaaatgttggcaaaagtgaagcaagttcacaaagaagtattaaactgtggatatgttcaaggaatgagtgatt

SEQ ID NO: 468537 - DNA, 101 bp, Homo sapiens
ccgagctggacccggaccggttttgggtgccattgagaaacagaaattggtgtatattttgaacagagatgctgcagcccgacttaccatttcatctcccc

SEQ ID NO: 468538 - DNA, 88 bp, Homo sapiens
gcgcacaccggcgagccaagttccgcagcctggcatggcttctggggacctttacgagtcacaccgaggagaagactcagtgggaaca

SEQ ID NO: 468539 - DNA, 83 bp, Homo sapiens
caaaaactaccattcgcctgatgaactctcagtcgagcaaaagatgtgataataccagcaaagccacctgtcagctttttctc

SEQ ID NO: 468540 - DNA, 110 bp, Homo sapiens
ccgggtttggtagagtgacttctattcactaaaaccatgtgtctgaactgaagaagcttgggctcacttccacaaatgctacccacctttctgttctgagacccctcaag

SEQ ID NO: 468541 - DNA, 100 bp, Homo sapiens
aattgatgtgtgtgaaattggaagcaagattcgggaactggagcctctcctctgtcacagtgacaatccatctcagctcatctggacatcatctcgcagt

SEQ ID NO: 468542 - DNA, 83 bp, Homo sapiens
cgcgtttccacttcagagatctggaactttatattgctgttggaatatctggagccatccaacatttagctgggatgaaagac

SEQ ID NO: 468543 - DNA, 50 bp, Homo sapiens
caccaccttcatctccaccatcggtggtatggtcaggaaaaagactacaa

SEQ ID NO: 468544 - DNA, 75 bp, Homo sapiens
gccccgatggccccgaccgcgtgctggagctcttcgacccacccaaggtgctggagaatctggtaaaagcaccat

SEQ ID NO: 468545 - DNA, 87 bp, Homo sapiens
gaagcaagagaaaaagaacattactgtcttggttcaagttctttcttcaaagagtcatcagaataacatggattgaagagacttccg

SEQ ID NO: 468546 - DNA, 100 bp, Homo sapiens
aaaacaatggtgtgttgtttgaaaaccagctgcttcaaattggacttaagtctgaatttcggcagaatttagccatgtgacatgcctgctcctactctgc

SEQ ID NO: 468547 - DNA, 97 bp, Homo sapiens
atcaagaagccggactacaaggtcgcctacgtgcagctgacaatgcagatcttcgtgaagactctgactggtaagaccatcaccctcgaggttgagc

SEQ ID NO: 468548 - DNA, 100 bp, Homo sapiens
acatgagaggattacctttccaagccaatgcccaagacattataaacctctgctatgttatgccatcatccagtgcaagatgtgctcagtttcctcgagc

SEQ ID NO: 468549 - DNA, 74 bp, Homo sapiens
cactgtctgaggagactacagcaggtgctggacgtcattgctcctccttatacctctgacttcgtgcaactttt

SEQ ID NO: 468550 - DNA, 90 bp, Homo sapiens
gccgagttgtcgccccgctgggagaagtgaccctcctgcgcctggtgaggctattgggaaaatgcagcaacagggaattcctggaggaat

SEQ ID NO: 468551 - DNA, 87 bp, Homo sapiens
gtcatcatgggccggcctggaacagcttcggaaccaaaaagaagcttcccagagccggggccaggagccccaagcgccctctagcag

SEQ ID NO: 468552 - DNA, 100 bp, Homo sapiens
cctgtgggggctggacatcgtatcaggcctttgtgacactaaccacaaacgatgcctacgccaaaggtgccctggtcctgggatcatctctgaaacagca

SEQ ID NO: 468553 - DNA, 100 bp, Homo sapiens
ggccctttacttcaacgaccccatttggtccaacatgtggtacctgggaaaggggcgcagggagtctgaaagctccaggagcagcagaaggcccagtggc

SEQ ID NO: 468554 - DNA, 50 bp, Homo sapiens
ggagcatatattatggaacacagtactgtcctagatgttaaggacacaac

SEQ ID NO: 468555 - DNA, 100 bp, Homo sapiens
agcatagtgatcccattgggggttgatacagcagagacgtcatacttggaaatggctgcaggttcagagtgccaatgggtcatgtttggttagaaggtga

SEQ ID NO: 468556 - DNA, 100 bp, Homo sapiens
ccggagccaggctggtttcggaaatgcccttacagcagcaggcacattgcaagcaacccgtgccttgatggtggttggcatcctcctgggagtgatagca

SEQ ID NO: 468557 - DNA, 83 bp, Homo sapiens
gaggcaaggagctaaagcagcgtgcgttcagccctgggagaggaggttcagatgagcccctgctgacttgagagagacagaga

SEQ ID NO: 468558 - DNA, 100 bp, Homo sapiens
gttacatctactcctggaacaggttgacctttgcagcaaaaaactagaacgagctgaacagttgattggaggccttggaggtgagaaaactcgatggagc

SEQ ID NO: 468559 - DNA, 75 bp, Homo sapiens
cggagtgtcctggagcttgacgcgctggagcttgagaggaaaagaattccatggcaacatcattaaagtgtcctt

SEQ ID NO: 468560 - DNA, 82 bp, Homo sapiens
tgaaggcacagctgggtcctgatgaaagcaaacagaaatttgtgctcaaaacccccaagtattgaagctgcttctggtggta

SEQ ID NO: 468561 - DNA, 110 bp, Homo sapiens
ctgtgtggggcgcggatgggatccagctgttagtcgggtaggcataggtttcatatacactggagaagtcgtacatcgaatgctaacagccacacagtacatagcacctt

SEQ ID NO: 468562 - DNA, 106 bp, Homo sapiens
cgcccagagactgctgagcccgtccgtccgccgccaccacccactccggacacagactcagaaccgtgctgcatactatcctcctagccaaattgctcaactaaga

SEQ ID NO: 468563 - DNA, 100 bp, Homo sapiens
aatggggtgaggaagattttgaagacaatcgtcacttatacagagttttgggactggaattaaataaagacagagatgttgaaagaatccacggcggtgg

SEQ ID NO: 468564 - DNA, 83 bp, Homo sapiens
gaaaatgaggctcagaggaaatgagatctctaccccagacccctctgccatgaaccagtccatcccagtggctcccaccccac

SEQ ID NO: 468565 - DNA, 75 bp, Homo sapiens
cttccagtgggaatccacattaagaagtacaatagcattcgcgtttcttaaacaattaggtctacatcctaactg

SEQ ID NO: 468566 - DNA, 126 bp, Homo sapiens
tggcccgggacctggaggaaacagcatcatcctcagaggatgaggaggtcataagtcaagattatgacccagagctaacagaaagcagtggctctgcatcacacatagactgcagaatgagcccct

SEQ ID NO: 468567 - DNA, 98 bp, Homo sapiens
gttcgatgacttcgtcacctatgaggggatcctcttggtgtatgacatcaccaaccgctggtcctttgacggcatcgaccgctggatcaaggagatcg

SEQ ID NO: 468568 - DNA, 100 bp, Homo sapiens
cgcggcggccccgggaccaaggagaataagaccacagcttgccaaagagaagattgaaggatgccatatttgtacatctgtcacaccaggagagcctcag

SEQ ID NO: 468569 - DNA, 100 bp, Homo sapiens
cttcggagcggccggtactgttgaaagcgacaagtggaggcgccgctctagcggccgggactctgaactatggcgatcctccccggcgtgaaggtcatca

SEQ ID NO: 468570 - DNA, 75 bp, Homo sapiens
ccggacgacccccattgctgagccagcggagctgcttgcacacaggtgaactccagaaagaagaagctatggccg

SEQ ID NO: 468571 - DNA, 91 bp, Homo sapiens
ccgccaagctgtcatcacaaaagagttgattgaaattatctctggtgctgcagctctttcctctgtgacgagggtgcaggtatctctgggg

SEQ ID NO: 468572 - DNA, 96 bp, Homo sapiens
ggccagcaagaaagtaattacagtgtttggagcaacaggtgtggatgaggtcaccattgtcaacattttgaccaaccgcagcaatgcacagagaca

SEQ ID NO: 468573 - DNA, 100 bp, Homo sapiens
taaattcctgtgcagaaggcatcgtcgtcttccggacagactatggtcaggtattcctggagtggagagccactctttttgacctgccctacatcagaag

SEQ ID NO: 468574 - DNA, 88 bp, Homo sapiens
ttagaaggaggttcaggctacggtgagccgaagccctactgccaataaagggaaaataagagatgctcatcgacgaattatgctttta

SEQ ID NO: 468575 - DNA, 51 bp, Homo sapiens
ttgaaaggttccagtgcccaagatgggccaacattgcctagacaaaactca

SEQ ID NO: 468576 - DNA, 82 bp, Homo sapiens
ggagttactcaggatcacatcaagagccttcattgcatgataccagattgtaaatcctcacttattgaaagatcttaccgag

SEQ ID NO: 468577 - DNA, 75 bp, Homo sapiens
gggaagagatgcagcgctatgcggaggatgttggggccgtcaaggcattctctccagcaggtgactgggcatgac

SEQ ID NO: 468578 - DNA, 75 bp, Homo sapiens
gttttcgaagatgccttggaaaccatctcaatatctttaatctcatgaagtacgacagctacagccgcttcttaa

SEQ ID NO: 468579 - DNA, 100 bp, Homo sapiens
agccagtagcttggatccttgtgggcatgatccataatcggtttcaagattgtaaaccatggctgtgtggatacaagctcagcagctccaaggagaagcc

SEQ ID NO: 468580 - DNA, 98 bp, Homo sapiens
atccataccatgggatacgactcaacaatcaaaaggaactgcccagacttcaccacgatgcaatatatgcatgcgcctgtgtctggcagagctggtgt

SEQ ID NO: 468581 - DNA, 114 bp, Homo sapiens
aaaagcctctgggagcagaagggaggctccaagacctcatcaacaattaaggtcagaagagatcaattctacagaaatttccagtggttctgttgaggctttatggaattcagc

SEQ ID NO: 468582 - DNA, 95 bp, Homo sapiens
gacatgaagacagttcctgtcataccttttaaagaatctgaattatccagaacagaaagttgtgactgttggacagttcaaaattggtctgatcc

SEQ ID NO: 468583 - DNA, 83 bp, Homo sapiens
caagaaatgactaatcaagagtctgccgtacatgtgaaaatgcttcctgcctgacacagctcacttcaagaagtgcacaatgt

SEQ ID NO: 468584 - DNA, 82 bp, Homo sapiens
ttgaagactccgaagaaagcagtgatgaaattcttgtgcgtctaacatctgcggccctgttaaacctggcagagcgactggg

SEQ ID NO: 468585 - DNA, 74 bp, Homo sapiens
ataacaagggcatcgactcagacgcttcctatccctacaaagccatggtgtggcagtagctctgtggacccagt

SEQ ID NO: 468586 - DNA, 75 bp, Homo sapiens
ctgggcagccagagccgcaaaggtgagaagccctaccactgcaactgggacggctgcggctggaagtttgcgcgc

SEQ ID NO: 468587 - DNA, 50 bp, Homo sapiens
ctcagatccaagtcaacagtgtgctttgtaacagagccagactggtttcc

SEQ ID NO: 468588 - DNA, 96 bp, Homo sapiens
aacagaagcctggatacaggactcagactcttactgacttcctgctatatcctgatcatcactattgcaaatattgcaaatttggccagtactgct

SEQ ID NO: 468589 - DNA, 101 bp, Homo sapiens
cagaaagcagaggctcagagcttggagacagacggctggtggggtagcaggtgtttctgttgacttgatattatttcctctggataccattaaaaccaggc

SEQ ID NO: 468590 - DNA, 100 bp, Homo sapiens
agacaggctgtgttcgtcccccggcgaccacggatgagcccggcctcccttttcatcaggacgggaaggaactgtggctgcaccatctgtcttcatcttc

SEQ ID NO: 468591 - DNA, 100 bp, Homo sapiens
aggaccatgtcaagtagagatttgctcaatgcattgaagtcagtcattaatgaccctgttgcctggatcaaagtggaacagctgaagccatatcatgctc

SEQ ID NO: 468592 - DNA, 50 bp, Homo sapiens
tgctgctcatgcacctgcccccagaggattgtcagtggcttcgccccgag

SEQ ID NO: 468593 - DNA, 75 bp, Homo sapiens
tgccggatcagatgagcagattggttagtgaagggtgaggatccacgacctccgcagtggtaacatcgccctgtc

SEQ ID NO: 468594 - DNA, 75 bp, Homo sapiens
cactttcccctgagcctcagcacctgcttgtttggaagatcaggatcctcatgaccagccaaagagaagaagaat

SEQ ID NO: 468595 - DNA, 101 bp, Homo sapiens
gtaccatcatgggtagcctttgataaacaggtgaattcatcattggccgagttatcaaagccatgaataacagctggcatccggagtgcttccgctgtgac

SEQ ID NO: 468596 - DNA, 100 bp, Homo sapiens
acttggtggccagcgccgcgcccggggccgtgcgctctcgggccactcggccgcagatttgggccaggcttagtcatctattggtatggatttatccagg

SEQ ID NO: 468597 - DNA, 75 bp, Homo sapiens
ctgtgtacccggagctatccgcacctccggagaggggagcttttggaagagtcccagatggaagcgaccaggctc

SEQ ID NO: 468598 - DNA, 90 bp, Homo sapiens
caagtacatcataatcggcgacacagggcactgaccatccgtgcactgccaataacccagagagctgctccgtttcactttcaccccagg

SEQ ID NO: 468599 - DNA, 75 bp, Homo sapiens
gggaccgggaccgccgccgccgccgccaccatgacaaatttacatgtattggagaccagaccagaagcccttctg

SEQ ID NO: 468600 - DNA, 75 bp, Homo sapiens
taatgctaaatttgtgaatgctgtgtatgataccttacttaatactgtggacccccaaaagtacaagggcatatt

SEQ ID NO: 468601 - DNA, 97 bp, Homo sapiens
agccatgccggagaagcgcgcgggcgcgcaggccgcggggagcacctgggtccgggcccaccagctggtcttgccaccttgcgacgtagtgatcaaa

SEQ ID NO: 468602 - DNA, 109 bp, Homo sapiens
ctcagtggtcctacctggggatattatcaaatctactactgttcatggcagatcagctgtttcatgtattagccttgcacatgcggctttatagcattgactctgagta

SEQ ID NO: 468603 - DNA, 89 bp, Homo sapiens
gataaaaagagatgtggggggattctcgacctgctaacagaactggaccttttcgtgctactatatcggggccacagatgatgcagcca

SEQ ID NO: 468604 - DNA, 82 bp, Homo sapiens
cgcgggtctgctctgtgtgccatggacgggggcagaaccccttcgagctggccttctccctagaccagcccgaccacggaga

SEQ ID NO: 468605 - DNA, 82 bp, Homo sapiens
gaaccacaaatacctggctatattgtcgatgattcagtcagagcttccccctataaccgctgcaagggtagtatatacctgg

SEQ ID NO: 468606 - DNA, 75 bp, Homo sapiens
tatcctaactcaagatttctctttataagataacccggaccctggtggctgcccgagcctttgtgcagggcctgg

SEQ ID NO: 468607 - DNA, 100 bp, Homo sapiens
cctggccaagatccgcaaggccgcccgggaactgctgacgcttgatgagaaggacccacggcgtctgttcgaaggtatccagtcggaattctttattaac

SEQ ID NO: 468608 - DNA, 98 bp, Homo sapiens
tgtacagcatcaactacctgcactttggggagcctaagtcctgtgctgactggtcacttgaagctttactctacaaatgggatatgaaatgtgtccac

SEQ ID NO: 468609 - DNA, 74 bp, Homo sapiens
cagctgtgtactttgccctcagcatctcccttcatgtctgggtcatggatcgctacggttcctactgatccgag

SEQ ID NO: 468610 - DNA, 82 bp, Homo sapiens
tcctgtacagcctgcagaactgttttgtagtgcatccctgagcatgagcacagaatgaagcggcgtttggatgaccaggagt

SEQ ID NO: 468611 - DNA, 100 bp, Homo sapiens
attggactgacttttcttatgctgggatgtgccttagaggattatgggctgcctctaagaatcaaacttcactcttgggagaaccaccaaaagaaattcg

SEQ ID NO: 468612 - DNA, 75 bp, Homo sapiens
tcatctttggattcttccccagaagcttcaaggggccctcctcgccaaagacagcctagagaggacggcaatgaa

SEQ ID NO: 468613 - DNA, 100 bp, Homo sapiens
tggaggtgtctgacggcgaggcggatggcctggagcccgggcctgggctcctgcctggggagacaggggcgcagcccagtggtttggagtcagcggcgac

SEQ ID NO: 468614 - DNA, 76 bp, Homo sapiens
cagctcgtctctaaacccttctaaaagagcaccaaaacagactgaggagttacagtgtacagcatgtatgtttcta

SEQ ID NO: 468615 - DNA, 50 bp, Homo sapiens
cagtgcgtcaatcagagcgtcctgtgcgagctgcagcagttctataacag

SEQ ID NO: 468616 - DNA, 83 bp, Homo sapiens
cgcagtggtcgcttcttctccttggaaacccctcctggagtttccccaaagccatggacagccctagtcttcgtgagcttcaa

SEQ ID NO: 468617 - DNA, 80 bp, Homo sapiens
gggaaatcgggctgaagcgactgagtccgcgatggagttcgtgccctcgtgaggctggcatgcaggatggcaggacagcc

SEQ ID NO: 468618 - DNA, 90 bp, Homo sapiens
ttatgatgaagcaagacagaggaattggcagtcttcctgaggacaaagttctgggagatcggcattgactatgtaagtaacaacaacggc

SEQ ID NO: 468619 - DNA, 98 bp, Homo sapiens
gacgatgagagctgcgccgtggagctgcggatcacagaagtttttgaagaatgccggccagtcatcgagtgcccttggtttgggtacaaggtgcgttt

SEQ ID NO: 468620 - DNA, 82 bp, Homo sapiens
cttttagttgcttctcttccttttttctctccggtttctcatcactccaaccaggaagctcttcgtgggcggtcttgactgg

SEQ ID NO: 468621 - DNA, 100 bp, Homo sapiens
gtcaaaacaaataagttatgctatgaggatgacaaactctggagtaattggagccaagaaatgagtataggtactccaaagattcaggtttactcacgtc

SEQ ID NO: 468622 - DNA, 87 bp, Homo sapiens
catacctgctgatgtggggactgctcacgttcatcatggtgcctggctgccaggcagctacagcctccgcttggcgtcccgatgctc

SEQ ID NO: 468623 - DNA, 82 bp, Homo sapiens
tctgggcaaagaatgtagtcaatttagcctgtcctgggagctggagaggatgtcagcgagcctgacattgccctccctgaat

SEQ ID NO: 468624 - DNA, 85 bp, Homo sapiens
tgtctcctgcaagaactggctcaagaaatttgcctcgaaaaccaagtccagcaagactatgaatctctgttccaaatgctttgct

SEQ ID NO: 468625 - DNA, 102 bp, Homo sapiens
ccacggacatccctttggaaggctacctgttgtctccgatccagaggatctgcaagtacccgctcctccttaaggcaagatgatgatgaatgaagtcctggc

SEQ ID NO: 468626 - DNA, 96 bp, Homo sapiens
gaggagctccccagctggtggctggagcgaccccttgttctttggtggcgctgattgccagcgtcctgacgtcacagaagccctctgtcctcctca

SEQ ID NO: 468627 - DNA, 82 bp, Homo sapiens
gacgggccattttccagacctcatccagatattaataaggcagcggaaagaagaaatatgaatacggctccatcaagaccca

SEQ ID NO: 468628 - DNA, 83 bp, Homo sapiens
tctgtcagacacctgtccttccttctacagaccatgctggacttcttgtcggatcagggagctctttgttcaatgcctagcca

SEQ ID NO: 468629 - DNA, 99 bp, Homo sapiens
cagattcgccaagagaagaatctaacaaacggcaaagaacttactgattcttgaggagattgctgcgatgattgacactgagtttgccaagcagacctc

SEQ ID NO: 468630 - DNA, 100 bp, Homo sapiens
aggagttcgagcagatcgacaagtccgggagctgggcggccatttaccagccctgggcgctgcctatggcacagccaagagcggtaccggcattgcggcc

SEQ ID NO: 468631 - DNA, 100 bp, Homo sapiens
aggtgatccagcaaggtcggcagagcaaggggcttacgcagaaggacctggccacggacttggcgatgtacatcaatgaagttaaacgggacaaggagac

SEQ ID NO: 468632 - DNA, 75 bp, Homo sapiens
cgacgcaagactgtcccggcccggggggacttgatctcatcttcatgccaggccttgggtttgacaaacatggca

SEQ ID NO: 468633 - DNA, 98 bp, Homo sapiens
gacgacggctcctgggaggtcatcgaaggctaccgggcccagcacagccagcaccgcacgccctgcaagggaggtgatgggcagaatctgtttacgaa

SEQ ID NO: 468634 - DNA, 102 bp, Homo sapiens
tggatgactgagtacctgaaccggcacctgcacacctggatccaggataacggaggctgggtgtatcagttcctatccctgtgattggactgagggacgaag

SEQ ID NO: 468635 - DNA, 89 bp, Homo sapiens
aagaatgaaactctaagtatatcagtttttagaacttcagccataaaaatgggcagaattttccttgatcatatcggtggtacccgtct

SEQ ID NO: 468636 - DNA, 100 bp, Homo sapiens
tgcatccccactgcggccccctggtgctggccctcagcagtcccggcctctggcagcacttgccccaaaggaatgaatctgaagtctgctgcagtaaaac

SEQ ID NO: 468637 - DNA, 82 bp, Homo sapiens
gttgcactggatccacccagtgaccggacttctcacccccaggatgtcatcgagggtacttaagagattatggcatcagaaa

SEQ ID NO: 468638 - DNA, 80 bp, Homo sapiens
agtataaaccactgggaaaactgaagagagctagaacagttcaccgagactcagggcagcacattccccctgttcccagg

SEQ ID NO: 468639 - DNA, 74 bp, Homo sapiens
gacagagcagacttaccctgaagtagttagaatgttggctagagatttactacatccgtccttggaagaggaaa

SEQ ID NO: 468640 - DNA, 82 bp, Homo sapiens
tggacttctacgcgcgcttctcgccgtccccgctctccatgaagcagttcctggacttcgaggctgacccgcggctgattga

SEQ ID NO: 468641 - DNA, 50 bp, Homo sapiens
agcgcgaatatcgtcatcgttagaaggtttctagagaggaaggatctccc

SEQ ID NO: 468642 - DNA, 100 bp, Homo sapiens
gacaaacagtggtggtggagacgggccccacatcagctccaaggtcagggtgattaagctgtcaggtgggcgggacgaccctgggacagtctccactggg

SEQ ID NO: 468643 - DNA, 95 bp, Homo sapiens
tcatcatgaccttccagaattacgggcaagcgctgttcaaacccatgaaggtaccgtgagggttttctctggaagcgtggccgggacaacgggca

SEQ ID NO: 468644 - DNA, 75 bp, Homo sapiens
tcttgtgttttcagcttttcacatgtctggttttgcaccatcacaggctttggtatcaggatgattctggcctca

SEQ ID NO: 468645 - DNA, 75 bp, Homo sapiens
ttggtgtgcagccagcggaaaacctcttgttcctcctagaagaaccactcgttttgactattattttatcactct

SEQ ID NO: 468646 - DNA, 75 bp, Homo sapiens
tatgaatgctacttggatgcctcttaagcttgtctttagcttcaatgaaaagctttttggcttactggtgaagga

SEQ ID NO: 468647 - DNA, 83 bp, Homo sapiens
acagctgcctacagaaccgtcccaaaatatggcaaagaaacctattctgaggcatgttatttgaaagcaattgagacgcaacc

SEQ ID NO: 468648 - DNA, 95 bp, Homo sapiens
gcccgctcttctccctgcttaacgagaaccataggcatttccggagagttcttttgaagtcacttcagaaggatctacatgaggaaatgaactac

SEQ ID NO: 468649 - DNA, 83 bp, Homo sapiens
aaaacttttaaatgcaaaacactcagagaaatcaccaccttctacaggactctgaaaaggaatcttgcccaagcagtgatgaa

SEQ ID NO: 468650 - DNA, 98 bp, Homo sapiens
agccgcggatcgccgcgctcagcgacaaacaagtgcccgcctggctgggtgggtgagcggtgtcagctggaggacccctgtcactcaggcccctgtgc

SEQ ID NO: 468651 - DNA, 96 bp, Homo sapiens
aaaacgcttccatctttatccagagccagaagatacctgaaattcctgcagatgttgtgggtgcccttctgttcctggaggattatgttcggtaca

SEQ ID NO: 468652 - DNA, 100 bp, Homo sapiens
caggcttttcttggaggagcatatcagaaacataactgccatagtgaagcaacttaatcgggatatcgaggttttcatcctgcagctggagggagagaaa

SEQ ID NO: 468653 - DNA, 74 bp, Homo sapiens
gacagcagcctttttggtatagatatgaagatggctgtgccacccacgtatgccgatcttggcaaatctgccag

SEQ ID NO: 468654 - DNA, 100 bp, Homo sapiens
cgtcattcgaggtccgggtccggcttgcggggtcagcgaactggagaggcgccatgggctggatatggtttgaagtggtgaacatggatttttctcggct

SEQ ID NO: 468655 - DNA, 82 bp, Homo sapiens
ctccgcaaaccaacctcctggctccaaagctgcagttccaggtaccgaggagaaggcattgtatatgggacactagaggagg

SEQ ID NO: 468656 - DNA, 50 bp, Homo sapiens
ccgagctatagagaaaggagatgaggtgacttaagagattaaaattaatt

SEQ ID NO: 468657 - DNA, 107 bp, Homo sapiens
gcctcagcctcccgagtggctgggattacagatctgtaagagcaaagctaaagaatctcagcagtattatcacagcttggctgtccggcagagtctggctgtccatt

SEQ ID NO: 468658 - DNA, 98 bp, Homo sapiens
ttaaaatgctttcgaggaaacttgctcaacttcctgatagatgtacactgaaaactggacattataacattaaatctcttacctcagctagaagctcc

SEQ ID NO: 468659 - DNA, 50 bp, Homo sapiens
tgactttcagctatggaatcgagtttatgtggccgaggcagacaagtgga

SEQ ID NO: 468660 - DNA, 96 bp, Homo sapiens
cacagcccatccccagaagatcctggtcccctgctttaaccatcgaaaatgaggacagcctcaccaccatcccagagctcaaggaccatctccgaa

SEQ ID NO: 468661 - DNA, 102 bp, Homo sapiens
tctcaccaccctggtggcctttccctccagctctgtctatcctaccaaggtgctactcgtgagcagtagtcgccatccagacagatggattgtccctggagg

SEQ ID NO: 468662 - DNA, 100 bp, Homo sapiens
gagcgcccggattggggatgagtatgcggaggacagctctgatgaggagatgtggacgaatgccgaacccacaacggtggctgccagcaccggtgcgtga

SEQ ID NO: 468663 - DNA, 83 bp, Homo sapiens
ttgatgatgagaaattaaggaaagaattttctccttttggatcaattaccagtgctaagggccatgatccaaaggaaccagag

SEQ ID NO: 468664 - DNA, 100 bp, Homo sapiens
caaagccagcgttacagtaatgttccaggactcacaccacccggcaagaactgctcactacggctccctgccccagaagtcacacggccggacccaagat

SEQ ID NO: 468665 - DNA, 50 bp, Homo sapiens
ctgcccagctactaggccacgactggggtgagaactctgtctcagtcgac

SEQ ID NO: 468666 - DNA, 98 bp, Homo sapiens
ctggccctccagctccctgaacacggcagcaaggacatcggaactactctgacctacgacactctccggtttgctgagtttgaagattttcctgagac

SEQ ID NO: 468667 - DNA, 100 bp, Homo sapiens
cagtcaacagctacagccaattttgctaactttgcacatttcaacagtcatgcaggtctgacggtaactgctgtaaaagactcaggagaatggaatttgg

SEQ ID NO: 468668 - DNA, 100 bp, Homo sapiens
tgaagacactatattctttgtgtgtgacacccataggccagtcaatgtcgtcaatgtatacaacgatacccaggtgctaaaatgatgtattttctggaca

SEQ ID NO: 468669 - DNA, 104 bp, Homo sapiens
cggctgagaacggcagcggcgagggctccacgtgcagcgtctctccgggtacccactgatggtaatgctggcctgctggctgaaccccagattgccatgttctg

SEQ ID NO: 468670 - DNA, 100 bp, Homo sapiens
caactccagggtgtctggtccacgacctatcctaggcgccatgcaggaacgaatgcaggaatttgggaactgagctgtgcaagtgctgaagaaggagatt

SEQ ID NO: 468671 - DNA, 83 bp, Homo sapiens
ccgcaagctggcggctctgctgaagttccacaccctggactaaataaactatcaatcttgcccagactggagaaaggactgca

SEQ ID NO: 468672 - DNA, 75 bp, Homo sapiens
atgaaaccattaaagttttagaagatcggaagcatcggagagcaagagacaggtccagatcctcctcctcttcct

SEQ ID NO: 468673 - DNA, 96 bp, Homo sapiens
acatctactgggtcagcttcatcctcggcggcggtggccgctagctccaaggaaggtgtgaagatgccttaagaaaaaataagagcttaattgggc

SEQ ID NO: 468674 - DNA, 100 bp, Homo sapiens
cacattgttgctgatgccacctcatcaagaagcatgatggacaggatgtttgccctcgagctgctctgttaaaagcgaaaatgaaacaattgcctgcggc

SEQ ID NO: 468675 - DNA, 71 bp, Homo sapiens
cggagcagcgcgtcgtggggcgagcggcagcgccgtggggaagacatgcttgctgatcagctacacgacca

SEQ ID NO: 468676 - DNA, 90 bp, Homo sapiens
atgaagagcaagctgcaaatcatttttatctgcaaggggttatctggctgtaacccttacataagcaagaacacaccacagccatcagca

SEQ ID NO: 468677 - DNA, 100 bp, Homo sapiens
gctgtcgcctgctgctggctcctcactggatggagctatgacattgaagagaggaaggttccaaaacccaagtccaagtcttatggtgcaaacttttctt

SEQ ID NO: 468678 - DNA, 100 bp, Homo sapiens
gatacagcaggcgctcaccatgttccctggagctgcatcttcctcccgtgaggctggccgagctccacgctgatctgaagatacaggagagggacgaact

SEQ ID NO: 468679 - DNA, 90 bp, Homo sapiens
ccatggtctccggcagcagcggcctcgccgccgcccgtctcctgtcgcgcagcttcctccgtcattagtaattatcagcactttagatgg

SEQ ID NO: 468680 - DNA, 100 bp, Homo sapiens
gccttccgctggatgaacaacctgctgatgagggaggtgcccctgcgttgtaccatccgcctgtgggacacctaccagtgctgccgggccaccactctcg

SEQ ID NO: 468681 - DNA, 100 bp, Homo sapiens
ggaagatcaagaaagtgggaaccactgagaaggaacatgaagaggcgacaggaagaagggtattacagccgcctggaagccgagaggcgcagacagcacg

SEQ ID NO: 468682 - DNA, 100 bp, Homo sapiens
ggagctgggtctggagacgccgtggcagcctgaacggagtgtgcgacggattgggagggtttggaaatcccttgtctccaggttgctgggattgacttct

SEQ ID NO: 468683 - DNA, 75 bp, Homo sapiens
tcgcaccgcggacgcccgctgagcttggcgcacgggccgaccagtctgcgctcctcagaccaccggcaggtgaac

SEQ ID NO: 468684 - DNA, 100 bp, Homo sapiens
ggaccgcccgcccccgcgcttcgaggataccggcgctggtctagatgcttttcgaatatttctaaaatcagagtttagtgaagaaaatgttgagttctgg

SEQ ID NO: 468685 - DNA, 100 bp, Homo sapiens
tctactttgagtgctgtctccatgtttgatgtatctgagcagggacccagatgcgcagcctgggggtgagctgatgctgggtggcacagactccaagtat

SEQ ID NO: 468686 - DNA, 90 bp, Homo sapiens
gcgcgaggccgcagagctaaatgggggcctctccagggagtgctctgttcacggctccatcgctgttagactacaatgatgaaattcgtc

SEQ ID NO: 468687 - DNA, 75 bp, Homo sapiens
gctgaatgatgctgtgggattttctagagtcattcacgccattgctaattcggttatcaatactctggctgacca

SEQ ID NO: 468688 - DNA, 100 bp, Homo sapiens
ctggttcagctttatctatattttttgactgctctgctcctctatgctggacatcaaatttccagcacccatatatctcccatcagcatcctaccagcct

SEQ ID NO: 468689 - DNA, 100 bp, Homo sapiens
ccatccgaccttataagtagagtacgaggctatctggaaatgaggcttcctggagtcccatttcgtggtatgctgtttggaggagattttcacaagtgat

SEQ ID NO: 468690 - DNA, 97 bp, Homo sapiens
cctcagcctcccgagtggctgggattacaggtattttcttaaagtgacaatagtgagaagactgacagatttggtaaaagagtatgatcttattgtt

SEQ ID NO: 468691 - DNA, 136 bp, Homo sapiens
gcggcgcccaggtcctaattcgggaaacgtgcaccttgactaattcggttttctgtggctacgagagcagacaccccaatatcctgcgcctgtataactatttccatgatgcacgccgggtgtacctgattctgga

SEQ ID NO: 468692 - DNA, 76 bp, Homo sapiens
aggcgcctcttcttagttgatgatttagttgattctctgaaggatttccatttaaacagggttaatttggaagaat

SEQ ID NO: 468693 - DNA, 101 bp, Homo sapiens
ctagaagtctggatgtcggtgggcctctgagatatgccgtttacggcctccgcagcattcctagtgtctctctacataaaggacatctggctgggggctca

SEQ ID NO: 468694 - DNA, 82 bp, Homo sapiens
gaacaatgaagctcctgaagccgacctgggtcaaccacaatggtcaaaatgcagatcttcgtgaaaacccttaccggcaaga

SEQ ID NO: 468695 - DNA, 83 bp, Homo sapiens
cttcaccttcacgatgtttcccttggtcaaaagcgcactaaatcgtctccaagttttcggctttgtgagaaaccttaccatca

SEQ ID NO: 468696 - DNA, 75 bp, Homo sapiens
cgaaggctgaggtggcagcggcaggagagtccggccgcgacaggacggatattagaaatggctactccccagtca

SEQ ID NO: 468697 - DNA, 75 bp, Homo sapiens
tcagaactctctttatctctcctacagtctccaaaaaaagttggtgatgacattgccaaggcaacgggtgactgg

SEQ ID NO: 468698 - DNA, 100 bp, Homo sapiens
ccacaagacgactcaataggaggaaggtcgtccttggtggaaggaaccatgaactggcatctccccctcttcctcttggcctctgtgacgctgccttcca

SEQ ID NO: 468699 - DNA, 100 bp, Homo sapiens
cgtccctcaaaccttgcttctaggagataaaaagccacttccggctcctgcgtcgctccggaagcctgcgagttccggaagccttggtaatccagattcg

SEQ ID NO: 468700 - DNA, 90 bp, Homo sapiens
gattatagctctgtatgagaaggacaacacctacttaggtattgactgggctcccaagagcgaccgcattgtcacttgtggggcagaccg

SEQ ID NO: 468701 - DNA, 90 bp, Homo sapiens
aaggtgttaagaccatttttactaaggagactgaagaaagaagttgaatcccagcttcccgaaaaaacactttttcaaaaatggcaatgg

SEQ ID NO: 468702 - DNA, 90 bp, Homo sapiens
caacagcagcacaaaattaatctcctgcagcaacagatccaggggaagttgcctacacggatcacagttcccctctctgtgatcagccag

SEQ ID NO: 468703 - DNA, 75 bp, Homo sapiens
tggagagggatgtgtggctgcgatcctcggggaaaccgaggcctgaattattggaacaactttggaaagccagag

SEQ ID NO: 468704 - DNA, 88 bp, Homo sapiens
gcggccgtcttagcctgcgccgcgaggtctgcggcctcgattgtttgctacatgaggagaacttctcggtgaggtgccctaagcacaa

SEQ ID NO: 468705 - DNA, 96 bp, Homo sapiens
aaaaggacctgccagagactgggagtgttgactgctgcaaggaccaagccgttgccgagagatggatgagcagattagactgatggaccagaacct

SEQ ID NO: 468706 - DNA, 100 bp, Homo sapiens
gcctggtcctgctgcaggtggcaagctctggtatcactcctccttgcttcaatctctttgccctcttcgatgctcaggcccaagtctggttgcccccaaa

SEQ ID NO: 468707 - DNA, 75 bp, Homo sapiens
gaaaactggatgctgcagacactgaacgaggagccagtggattcactccttctccagttgcacagccacaccctt

SEQ ID NO: 468708 - DNA, 74 bp, Homo sapiens
gggaaagatctaccttctggaagctactactacgtggtgcttggaaaggcaagtgaaccggagcaaacgacttc

SEQ ID NO: 468709 - DNA, 98 bp, Homo sapiens
cgggcgggtgaagatcggccactacattctgggtgacacgctgggggtcggcaccttcggcaaagtgaaggatggactcaccctgtcacccaggttgg

SEQ ID NO: 468710 - DNA, 96 bp, Homo sapiens
ccttcgcctccaggatgcgctgagccctacaacacccccagcggccgccggctcccccacgaggcctccggtgtggctgtctctgatggtgtcatc

SEQ ID NO: 468711 - DNA, 75 bp, Homo sapiens
gacatttcttcggcattctgcaacaggtgtcgtgaaaactacccctaaaagccaaaatgggaaaggaaaagactc

SEQ ID NO: 468712 - DNA, 100 bp, Homo sapiens
gctactgccgcttcagttctcccggtgtggccacgagtcgggtgaatctgtggatgactgtgggggcggctacagcgagtccatagctgagatctgtgag

SEQ ID NO: 468713 - DNA, 82 bp, Homo sapiens
ccggagctgggcgcggattcgccgaggcaccgaggcactcagaggagatgtcgtgatctcaacagcttgtcacccaacagaa

SEQ ID NO: 468714 - DNA, 100 bp, Homo sapiens
tgtccgactgggagcagaggaagccttgaggacctactcacagataggaattgaagtctctgctggatgaaccgaatcctaacagtccagccaatagcca

SEQ ID NO: 468715 - DNA, 100 bp, Homo sapiens
gagagatggagagagacctagttagggtaaccaggagccgacaacaactcctgacgcaatggttcagccttttactaccatcccatttccaccacctccg

SEQ ID NO: 468716 - DNA, 100 bp, Homo sapiens
aaagatttttagtggccccaaacgggtcctggacccaagccagaagcctctgcaaagcttccttccagacctgcagataactatgacaactttgtcctac

SEQ ID NO: 468717 - DNA, 100 bp, Homo sapiens
cagagcagctcatcaacccctttggagaggatgatgatgattttgagaccaactggattgtcgacaggaatttgcaggtcctggtgcatctcatccacag

SEQ ID NO: 468718 - DNA, 100 bp, Homo sapiens
tgcttctcatgaagcagaaaggagtgatgaatcagcccatggcttacgctgcacttccatcccacggtcaggaatactcccccagttgcaagaggcgcag

SEQ ID NO: 468719 - DNA, 82 bp, Homo sapiens
caaagatctattaagattgtcacatcttaaaccttccagtgaaggaagctgaagtcttcagcagaaccctgacctaggtagg

SEQ ID NO: 468720 - DNA, 100 bp, Homo sapiens
aacagggacacctggttccagctgcagcacgtggacgctgactcggaagtgcaggcgaggccttcttgggcagctttgtggccagcgggatggggccctc

SEQ ID NO: 468721 - DNA, 51 bp, Homo sapiens
gtgacatgtccagcatgaatcccgaatacaagaggtggaaacatacagaag

SEQ ID NO: 468722 - DNA, 97 bp, Homo sapiens
tgaagtaactcggatggccagaaagtttactcatatttcagctctgttacagtcatccgtccttggctcaggatttggagagcttgcaccaccaaaa

SEQ ID NO: 468723 - DNA, 101 bp, Homo sapiens
tttgaagcgttcgatcttttaacatcacatcacatgctgacagcacaagaagatgaccttgaatgatgccatgaggaacaaggcaaggctgtcaattacag

SEQ ID NO: 468724 - DNA, 101 bp, Homo sapiens
ggcagctaccagcagtgcataaacgaggcgcagcgggtgaagaaatcttcccaaggctgcagacaccgacggatttgctttgggagccagagtagctgccg

SEQ ID NO: 468725 - DNA, 98 bp, Homo sapiens
gtaaaaagaactcttaacggccgatgcagctcttccaaagctaaggatcccattgaagataccacgctgcatgtgtccttagtagtcatgtctcctta

SEQ ID NO: 468726 - DNA, 98 bp, Homo sapiens
ctgggtcctcgctgtggggcaatccgggcttgcagacgaggaccctatgtactcggaactgggcttatcttgtacgctttatccaaagaaatatatgt

SEQ ID NO: 468727 - DNA, 96 bp, Homo sapiens
gaatccagatgactattttctcctgcgttggctccgagcacgagacattcagaagtgggagtatgtccctctcgggccattccttgggaagagttt

SEQ ID NO: 468728 - DNA, 51 bp, Homo sapiens
acctggatgacaacgagaggagattttgaagccagcttcataaggctattg

SEQ ID NO: 468729 - DNA, 98 bp, Homo sapiens
tctatgatgctgatggtgatggagattttgatgtggatgatgccaaagttttattagggatggaagcttcctggcgccaggtggccggtggccgaggc

SEQ ID NO: 468730 - DNA, 75 bp, Homo sapiens
tgagaattcctcaatgactgccctctaaaggaagaggctgaccggttccctgatgtgttacctgcttctgctact

SEQ ID NO: 468731 - DNA, 83 bp, Homo sapiens
cttttgggtcttggcacaagcacatatgtttgtgaagctcaaggaaagtgctggccagctggaaataagagctctttctctaa

SEQ ID NO: 468732 - DNA, 75 bp, Homo sapiens
gagaactcttcaggtgtcaccaaggtaacacaagtggcaagacagccgggaacccctaccccatccccttattca

SEQ ID NO: 468733 - DNA, 135 bp, Homo sapiens
tccactgtatctgggaattgccaaggagaagagtaccaaggctgctagtgaacagcgacgtggagctgcgggaacgggtactgaggggaaaataccgtattccattctacatgtccacggactgtgaaaacctgc

SEQ ID NO: 468734 - DNA, 75 bp, Homo sapiens
gaggcgggacgtcatggaagtgggaggaacaggaagagaagagtgtggcctcctagaaatctagcacggagaaag

SEQ ID NO: 468735 - DNA, 88 bp, Homo sapiens
agcagctggacccgctcaccatctacggcatccggtgtttgggaaaagttcttaagttctgaaacgccgcggatcaatgtctttatgg

SEQ ID NO: 468736 - DNA, 87 bp, Homo sapiens
agtccttgatgatgaatcggttggcaaacgtccgaaagtatgaaatgcttcatgtcacacctccaatgagcccaccagatgtcctca

SEQ ID NO: 468737 - DNA, 75 bp, Homo sapiens
aaaaggagaaggaagaagcagatcttcttttggagcagcagagactggattttttatcaagcagaaatgcatcga

SEQ ID NO: 468738 - DNA, 75 bp, Homo sapiens
cgagaggtgcggcgaaggaggcagaggcacttatgcttgtcagctattggatgaactcccaatgatatacagctg

SEQ ID NO: 468739 - DNA, 75 bp, Homo sapiens
tttaacctggaggatgcagtgaaagaaacttcctcagtaaagccatagtggtaaaatggatgaaaacagatttgt

SEQ ID NO: 468740 - DNA, 74 bp, Homo sapiens
gtaccaagagttccgtaaacagtgttacacggctttcctccacctgcgaagattctctcgggcctagccgtcct

SEQ ID NO: 468741 - DNA, 75 bp, Homo sapiens
aaattggactactgcttgctgcaaaggggcttcataaaagtcagagttcatgtttgtcaggacctaatgaagaac

SEQ ID NO: 468742 - DNA, 97 bp, Homo sapiens
agatggagcactacggccagtggtcaggcggccggcatgaggacagagcgggatgccaccagcttgtccaaagggaagttccaggagctcctggtgg

SEQ ID NO: 468743 - DNA, 98 bp, Homo sapiens
cccggtagagcccagctcagcgcccggcagccttcgacgcgatgttccgccggagcttgaatcgttttccgtgctatcaagactaatcaggaccttct

SEQ ID NO: 468744 - DNA, 82 bp, Homo sapiens
ccgccatgctgtctctagactttttggacgatgtgcggcggatgaacaagcggcagcaattaccagctctggctgggtcgcc

SEQ ID NO: 468745 - DNA, 73 bp, Homo sapiens
atgacctgaggaatatcgtgcagcccaaacccttgccttcccaggatgagaacaagttgagcagtgccaacgg

SEQ ID NO: 468746 - DNA, 50 bp, Homo sapiens
tgaagagggaagacacgcggaaacagattcctggtcgggtggcttccagt

SEQ ID NO: 468747 - DNA, 77 bp, Homo sapiens
aaatcgagaaaaacctcagcgacctgatcgacctggggcgacgacctgtcaccttgattggcttcagcctgggagcc

SEQ ID NO: 468748 - DNA, 75 bp, Homo sapiens
ttgccagagacctggcaaatgacatcatgacactggcggctgccgagtgatagagcagaaggaggttcccaatgg

SEQ ID NO: 468749 - DNA, 75 bp, Homo sapiens
ccgaccccaaaagagtattcttggatcttgcacaggaaggaattaaaggaaggtgggagtcaatcattttgacaa

SEQ ID NO: 468750 - DNA, 82 bp, Homo sapiens
ggcccgaggccggaggaacccggactccggcgtagcgaaatacactttcgggaaatggcctctaaatcctggctgaattttt

SEQ ID NO: 468751 - DNA, 90 bp, Homo sapiens
gaagaaaagccaatcgtgcagaaaatccaggataaggagcacaagtgtcctttgatttgtgggaggaaactccgttgtggccttcatagg

SEQ ID NO: 468752 - DNA, 87 bp, Homo sapiens
ctgggctgcagtgaccccgctttcctcacgcccaggatcagtttgacaacttagaaaaacacacacagtggggaattgatattcttg

SEQ ID NO: 468753 - DNA, 110 bp, Homo sapiens
gatagagaaggaggatcaaaatcagacagtgaagatataacaagatcagcaaatctaactgaccagtgccgcagaatggaattcggcattgttcctacacagcttctcgg

SEQ ID NO: 468754 - DNA, 96 bp, Homo sapiens
ggccgagcagattctacaacacatggtggaatgtatccgggaggtcaacgaggtcatccaggatgtccatgaggagccccatctctgcccagctgg

SEQ ID NO: 468755 - DNA, 75 bp, Homo sapiens
tggagatgatgtctcaggccatgattaggaataaatgatggtgctgcagctgtcgttcttatgaagaagtcagaa

SEQ ID NO: 468756 - DNA, 100 bp, Homo sapiens
cttcgacctggagctgggccaggccgtggagcatgaagaggaaccacctcagaatatgaaaccacaatcaggaaacgataagccattatcaaaaacagct

SEQ ID NO: 468757 - DNA, 100 bp, Homo sapiens
tgcgagggttgaagattgtgaagcaatagcctaagtgtgaagcctcagtttaggtcatctggtggttcagaacactcaacagagggctctgtatccttgg

SEQ ID NO: 468758 - DNA, 75 bp, Homo sapiens
ggatagagaacgggaccggcaccactgagaaagaagctgaaacctatcaacactcttcaaaatgcaatggaatgt

SEQ ID NO: 468759 - DNA, 90 bp, Homo sapiens
cgccgctggagatcctttcctgcttttggtttccctggcaggggttgaactgtggagtgtgtggctgctcctgctaaggccaagccggct

SEQ ID NO: 468760 - DNA, 100 bp, Homo sapiens
tgaagctgccgccgttgcctccgccgccaagagtgagcgagcggacccgcgatgggcaaataagggcgagactgaaaaatcaagtcactcagttgaagga

SEQ ID NO: 468761 - DNA, 101 bp, Homo sapiens
cgggactgcactcgagtgtccagacctgctcgatggatcatgcggccagatgatgccaacgtggccggcaatgtccacggggggaccatcctgaagatgat

SEQ ID NO: 468762 - DNA, 100 bp, Homo sapiens
attcaggatcttaattttatgctgtggattctgaacttaataatttggcctgtgagtcgatctttttaggctgtggaatgggagtgtgatgaagctacca

SEQ ID NO: 468763 - DNA, 49 bp, Homo sapiens
ggaaaagcgaggcaaggcaggcgggaggaatttgatggggtcctgagag

SEQ ID NO: 468764 - DNA, 97 bp, Homo sapiens
gtcgacggcgccggcggctcctgtgggcgacagatgcgaaagaaacgagttccagtgccaagacgggaaatgcatctcctacaagtgggtctgcgat

SEQ ID NO: 468765 - DNA, 100 bp, Homo sapiens
gtcagaaactcagccactggttgccttggtaggcaataaaagtgcctcatctccagacatggagcccagctatgggggaggtctctttgacatggtaaaa

SEQ ID NO: 468766 - DNA, 100 bp, Homo sapiens
caaagagcaactgaagattcatacgcagctggcagatattatcatagttgctgcagcgggacgaccctgggacagtctccactggggcagatccagctga

SEQ ID NO: 468767 - DNA, 75 bp, Homo sapiens
gcggaccatgggcgacaaagggacccggagccttcacgtaaatgggtccagtcatgcctcccagtaagaagccag

SEQ ID NO: 468768 - DNA, 98 bp, Homo sapiens
atccagcagcctctgcttcccaggagagaggtgctgaagtccacgaagagccgtcctgggccgccggacacccccgctggggccgatgcccaacagtg

SEQ ID NO: 468769 - DNA, 82 bp, Homo sapiens
aagaaggcaacgacgttccatctgtggaaggacctaccaaccaggaaggtgctcgggtcttcggggcactgggtcccatcgg

SEQ ID NO: 468770 - DNA, 83 bp, Homo sapiens
cgctgcgccgcaacgccgagcgcaccgacatctgcctgctcaaaggtaatcattaccaaatgaggaggaaaggacgatgtcat

SEQ ID NO: 468771 - DNA, 75 bp, Homo sapiens
tcagttggaagcagccgatccagcctgcggagcctgtggggcagccatccgggtgacctgcataggttcctgcgg

SEQ ID NO: 468772 - DNA, 101 bp, Homo sapiens
gagactttgaaagggagtatggaaaacttcagcatgctgtccccggcataggtccatctctgcagaagccatttcaggagtacctggaggctcaacggcag

SEQ ID NO: 468773 - DNA, 90 bp, Homo sapiens
ctcttacagtgcactcggcaggcagtacccctcttctctgttttcctttggaatatggataaatacaccatgatacggaaactagaagga

SEQ ID NO: 468774 - DNA, 75 bp, Homo sapiens
aagggagttctggcagcttctccgagaccccaacaccccactgttgcaagatggagttttgctctgttgcccagg

SEQ ID NO: 468775 - DNA, 75 bp, Homo sapiens
ttcatttaaagagatttcagcaggtgccagctattcaacagaaaagaacggtggcttttctaaaccaatttgtgg

SEQ ID NO: 468776 - DNA, 98 bp, Homo sapiens
cgcgccgaccgcgttcctatggacagacgcacagacacctgcaggtaagactcggaccaaggacaagtaccgcgtggtctacaccgaccaccaacgcc

SEQ ID NO: 468777 - DNA, 88 bp, Homo sapiens
ccctgccgcgccccatccgcaacctggaggtcaagttcaccaaggcgagaaccactgtctctgatcaacgtgcggaagaggaacgtgg

SEQ ID NO: 468778 - DNA, 100 bp, Homo sapiens
ggcgctccgagagctccaggagaagcaggctctgatggagcagcagagacggtccggcctctttggcctacccccgttggctccgctgccccaggtcgat

SEQ ID NO: 468779 - DNA, 74 bp, Homo sapiens
gtttctctgggtttgcccctctgcaaccacaggtatctgtaattcttgcccaccaaacaagcctgcagaatctg

SEQ ID NO: 468780 - DNA, 121 bp, Homo sapiens
ctttgtgattgttagtggaacttctacccgacacttacatgccatggccttctacgttgtgaaaatgcctactttggggataaaggattatttggtcttctggatttggaggcaatcagcg

SEQ ID NO: 468781 - DNA, 98 bp, Homo sapiens
caggatgaagaggttggagatgggaccacatcagtaattattcttggtggtgatctttgtgaagtctgtgcagcggtgcattgccttggcccagctac

SEQ ID NO: 468782 - DNA, 75 bp, Homo sapiens
cggtgatgcggctgtgaagccctagtcggtccccagtctatgtgaggatctcctgtcttctgttgaccagccact

SEQ ID NO: 468783 - DNA, 80 bp, Homo sapiens
aaacaataggacggaaacgccgaggaacccggctgaggcggcaggacatggatttgattgacatactttggaggcaagat

SEQ ID NO: 468784 - DNA, 83 bp, Homo sapiens
tgtccagagtggaatagttggtcccagcttatcatcagcacagatgagtgctgaagctgctgaaagatggcagaagaagtggt

SEQ ID NO: 468785 - DNA, 100 bp, Homo sapiens
gggacttgggaggagctgtgtaacagttgtgaaatggaaaatgaggtacttaaagtgctttccgaagctgctatttcagaaataaactatcaatcttgcc

SEQ ID NO: 468786 - DNA, 82 bp, Homo sapiens
caaagatgaggccacaaggacaccagcaactgaagaggctgcctacttggtatcaagacctcttcttgggtgaatttggtat

SEQ ID NO: 468787 - DNA, 87 bp, Homo sapiens
tctgggagcgcgatgagcctggaacggaagtgaggatcacctacagccccatggctgggggttatggagtgatgggtgacgatggtt

SEQ ID NO: 468788 - DNA, 89 bp, Homo sapiens
aaaaacttcagcatgtgccaggaacacaacctcaccttgatcaggttttacacatccataagtagacctttttggagcctcaccagcca

SEQ ID NO: 468789 - DNA, 100 bp, Homo sapiens
acgcattatttacccctatgaaatgtttcagtctggagccaaccatgtgtttgtgaatagcacaatggaagaagctggactttgtgggttaagagagaaa

SEQ ID NO: 468790 - DNA, 101 bp, Homo sapiens
cgagggggatggagcgagcgccgagccgggtcagtactttgccagacgtttatcaaaatggggctgctgtcttctttcacttgtagtgacgagtttagctc

SEQ ID NO: 468791 - DNA, 82 bp, Homo sapiens
ctctgggatcccggccaccagcaattgtccgatcctgataacttaagtgactctctcttttccggtgatgaagaaaatgctg

SEQ ID NO: 468792 - DNA, 90 bp, Homo sapiens
ggcggatctggaggagcagttgtctgatgaagagaagttacgccccatggtgtccatcctgccagcagactgattcagaatgggaggctt

SEQ ID NO: 468793 - DNA, 82 bp, Homo sapiens
gatatcgacgtcgtgatccagaagtccagagctgaggactgcctgtttgcaggtctccgggccagggcaatgttccgcacgg

SEQ ID NO: 468794 - DNA, 83 bp, Homo sapiens
cgcgtccgcgccggccccacagctctgcgtccggttgggccatatggtgctcttcccagtctggttcctgtacagtctgctca

SEQ ID NO: 468795 - DNA, 75 bp, Homo sapiens
cccagcaacctgcggacccacctcaagatacatacagctggctcctctcattcaaaaaaaacaactggctctaaa

SEQ ID NO: 468796 - DNA, 100 bp, Homo sapiens
ctcagcaagcagaaccagcttctcctggagaggcagagcctgtcggaagaggtggaccggctgcggacccaggatgaagtcattgctgtttccgaaaagg

SEQ ID NO: 468797 - DNA, 96 bp, Homo sapiens
agaagatccctagtgagactttgaaccgtatcctgggcgacccagaagccctgagaggtctgccctggccgtgaaggccccatcttcttcggagat

SEQ ID NO: 468798 - DNA, 100 bp, Homo sapiens
cgcgcgcgagccgagtgtgagcggaaaggggcccggcgtctgcctcgagactgaagaccggtgaaaggtgtagcagtcactcggcctacacccacagcat

SEQ ID NO: 468799 - DNA, 83 bp, Homo sapiens
cgaaaagcgtttccgcagacagaagtggggagaagcggaggacttgcaccttcgagatcccctgtgtttacccagctggagga

SEQ ID NO: 468800 - DNA, 102 bp, Homo sapiens
ttcagatgggatctttccggatcaatccagatggcagccagtcagtggtggagctatccgtggtcctgaaccagttatgtgtgttgcatgagaaaacgccag

SEQ ID NO: 468801 - DNA, 82 bp, Homo sapiens
ggcagagcagggcggcggcgactcggtgtttcccattaaacactaccaggacaaaatcaggccttacatccagctgccatcg

SEQ ID NO: 468802 - DNA, 83 bp, Homo sapiens
ccgggcctagcccagagacatggagagttgctacaacccatgctgtggccttgctggtgggagagaaggtacaagaggagacc

SEQ ID NO: 468803 - DNA, 75 bp, Homo sapiens
accttacctgtcaccttggctctcccacccaatggagatggctctaatggttgttaaaattacacactgtcctac

SEQ ID NO: 468804 - DNA, 90 bp, Homo sapiens
taatccattctcggattctagaacaatcaagaagttggtatatgtttacctggttcgatatgctgaagaacagcaggatcttgcactcct

SEQ ID NO: 468805 - DNA, 74 bp, Homo sapiens
gttaatgtggtcacctcggaaattgcagcccttttagtaaaaccacagaaggtggggtggaagacaacccgtga

SEQ ID NO: 468806 - DNA, 100 bp, Homo sapiens
cctagaacttcaatgaagatacagcaaaaccagtctattagacggccaagtcgacagcttgccccaaacaaacctagtatggctgtgacccgatccaaag

SEQ ID NO: 468807 - DNA, 74 bp, Homo sapiens
ccgggcgcggcggcggcggcggtggaggagccggagcataatggcaacgtgttggaccttccggagcttctcag

SEQ ID NO: 468808 - DNA, 90 bp, Homo sapiens
tcaaagaagtgaccaaaaagtcatctacatttcaggtgaggtccagagatatatccagagaggagtggaagggctcggagacctacagcc

SEQ ID NO: 468809 - DNA, 98 bp, Homo sapiens
ctctggagaggaagaatgagctgatctcccaggactctgacagcgactccgacgatggtattttgatcacaactatagcctccaagggagaattgcag

SEQ ID NO: 468810 - DNA, 100 bp, Homo sapiens
agcctagcacccagagagcaggaggctcctgggacccaatggcctctggatgaaacgtcaggaatttactacacagactttgatgatagcatgttcgtta

SEQ ID NO: 468811 - DNA, 101 bp, Homo sapiens
gaagtactgagttcagatatcttgccccggtgggccatcattggttggctcctgacaacgtgcacgtgtgaaatggcctttccccgggtcaagccagcacc

SEQ ID NO: 468812 - DNA, 101 bp, Homo sapiens
ctgccccagctccgtctcggcggcggcggtgccggtggtggtgtgcacattgagccccggtatagacagttcccccagctgaccagatcccaggtgttcca

SEQ ID NO: 468813 - DNA, 75 bp, Homo sapiens
atatgtcaggaatgtgattcttcatcttccaagctctccacacaaggagatgcaagtcaggtgattgggcctctt

SEQ ID NO: 468814 - DNA, 83 bp, Homo sapiens
gtcgagggcgccatggcggtgaatgacggtggccacagatgtctttaattccaaaaacctggccgttcaggcacaaaagaaga

SEQ ID NO: 468815 - DNA, 50 bp, Homo sapiens
aacattgatgaagatgaagatttagagagttgtaaagatgtggcacctgt

SEQ ID NO: 468816 - DNA, 100 bp, Homo sapiens
aacgacgttgggacttctccatcctgtggatcccattgtaggagtcccaataaagcggaattcatcagagccaagtatcagatgttagcgttcgtccatc

SEQ ID NO: 468817 - DNA, 100 bp, Homo sapiens
tgttggttccaatgctgggattggctgcttttcagatggtgaattgtctttgagtcggtcacttgtcaatagctctgataaaatcattcgaaaggctggc

SEQ ID NO: 468818 - DNA, 51 bp, Homo sapiens
ccctggggcagatcctcttctggaggtggacttgaggcgccagcagatttc

SEQ ID NO: 468819 - DNA, 98 bp, Homo sapiens
tctctcatctcgctcggctgcgggaaatcgggctgaagcgactgagtccgcgatggaggtcaatgagctgaaggagaaaggcaacaaggccctgagcg

SEQ ID NO: 468820 - DNA, 73 bp, Homo sapiens
acggccagatctgccctccactatttctgcctggttcagaacccctgctagagaggtgatgcagttgtttgga

SEQ ID NO: 468821 - DNA, 100 bp, Homo sapiens
tccgtgtgggtggacgtcaaggactcctgcgtgggctcggtgatgcagatcgtgctggggatcttgagtgcagtcctaggaggatttttctacatccgcg

SEQ ID NO: 468822 - DNA, 82 bp, Homo sapiens
cccgtgtccgggctacctgtttgaagagattgctagcactgggggccacagtgctgatctcagcagctccattttttgtcct

SEQ ID NO: 468823 - DNA, 100 bp, Homo sapiens
gttcaagctctacctgaccatcatcctgctcctgggtgccgtggcatgtcgatttgtccttcactacaggtactgtctgatgagcgtgaaaggttgtttc

SEQ ID NO: 468824 - DNA, 75 bp, Homo sapiens
atcaggatttttggcctaccctccaaagaaaaggcagcacaacaagattcgcagcgtggaggggagccagctgaa

SEQ ID NO: 468825 - DNA, 75 bp, Homo sapiens
ctctgaaggccgccagcccagccccagccccagccctacagaggaggataagatcaatgccctcattaaagcagc

SEQ ID NO: 468826 - DNA, 100 bp, Homo sapiens
gaagccagccagaccaggaacccaccagaaggaaccaattccggacacataacaagcagcagtgaggacaccaaaggatctagtgaaaagccatttgatg

SEQ ID NO: 468827 - DNA, 100 bp, Homo sapiens
cgacgggcgggtgaagatcggccactacattctgggtgacacgctgggggtcggcaccttcggcaaagtgaagggaaagccatttaagaagttcctggaa

SEQ ID NO: 468828 - DNA, 83 bp, Homo sapiens
tactgttgaaagcgacaagtggaggcgccgctctagcggccgggactctgaactatggcggttcaagcactgtcttcctgttg

SEQ ID NO: 468829 - DNA, 75 bp, Homo sapiens
gcagcctctacccggcagactttaacatccagcgtgctcttgctaaaactggagctgaatctatcagtttgcttg

SEQ ID NO: 468830 - DNA, 73 bp, Homo sapiens
ttggttacctatgtacctgttaccactttcaaaatacttcctgcaggacaacctgccgagggcaccacctgct

SEQ ID NO: 468831 - DNA, 100 bp, Homo sapiens
tgtggacattgaccccactggactgcagtcacagtggactcccaaggggcagcattccatggcaatagattctggtttcaggaactctggcataacggtg

SEQ ID NO: 468832 - DNA, 82 bp, Homo sapiens
cggtgtgcctcggcagccttgcgctgctctaatggtccggacttccgtgtgtgagaagccctaccactgcaactgggacggc

SEQ ID NO: 468833 - DNA, 98 bp, Homo sapiens
tcatctcaaaaacaaaattctgaactcaggacttggcaagagtggtgaaaggacataggaaggagtctggggaactgtactacagcattgaaaaagaa

SEQ ID NO: 468834 - DNA, 90 bp, Homo sapiens
aatagctcaaggaaacctttccaacacagatgtccaagctgccaaggtcatcacactgaaacggtgttcaaccgggttttgccagggcct

SEQ ID NO: 468835 - DNA, 97 bp, Homo sapiens
ggcttcggcccccaccagagactcgataacgaaggaggcccaacttcattcaataaggagcctgacggatttatcccagacggtagaacaaaaggaa

SEQ ID NO: 468836 - DNA, 88 bp, Homo sapiens
tctttttgttcaagataaagtgattttttgcctttgttgattaactggacaaattcagcagcgtcaccctttacaccagaaagctggc

SEQ ID NO: 468837 - DNA, 48 bp, Homo sapiens
aaaacatagtgcccaagctgggacgactgggtttggattcagaagagg

SEQ ID NO: 468838 - DNA, 105 bp, Homo sapiens
cgaccttgagctccaggagttcgtctcttacgtctgcggaagtgcagctgcctcagttcttagcgcagagccccccaagatgaacccagtggtggagccactgtc

SEQ ID NO: 468839 - DNA, 82 bp, Homo sapiens
ccacagtcctgggctctctccagaaggtatccctggggactcattggcgccccctgaggtggactttgacaggctgctggcc

SEQ ID NO: 468840 - DNA, 75 bp, Homo sapiens
cgggaggtgaatttccatgtcaacatagtcctgcctccacagccacggggacaccctgcacctattcccacggga

SEQ ID NO: 468841 - DNA, 98 bp, Homo sapiens
gcggatggccccaggtgtaagcgcagaaagcaggcgaacccgcggcgcaataacggcatgtactggcattgaaaacattgacgaagctattacattgc

SEQ ID NO: 468842 - DNA, 98 bp, Homo sapiens
gttcatgacaatgactttgagccctaccttactggacagtcaaatcagcactttcagaccatgctgaagtctaaattgaatgtcttaacactgaaaaa

SEQ ID NO: 468843 - DNA, 82 bp, Homo sapiens
ccggtcttggggggatggttccatcatggcgtcaatgcagattcatgatgttgctatcaaaagttgagaaattgtcagaaga

SEQ ID NO: 468844 - DNA, 90 bp, Homo sapiens
gttctagaggcatggttgaaattgaattgcagacctgttatcctaaactaggtgagtcagcttttggtacatgtgatgattttcagtgta

SEQ ID NO: 468845 - DNA, 73 bp, Homo sapiens
ttggctacagttgaatctctggaacagtaccttttgaaaatggttgatgctatgaaactgggagtaaaggaaa

SEQ ID NO: 468846 - DNA, 51 bp, Homo sapiens
caaggacagcttttttcctgcaagatgcagacaatctctttgaacatgaat

SEQ ID NO: 468847 - DNA, 75 bp, Homo sapiens
ggaaaaaatcccaaggtctgcaaagtctgttctctggggaggcagtaaggggccgtggagctggcctcggcctcg

SEQ ID NO: 468848 - DNA, 100 bp, Homo sapiens
tgaagactgtgttgacggcagtgatgaaaagaactgtggaactgcaagcacatgttgaccagataactgaaatggcagcagtaatgaggaaagccattga

SEQ ID NO: 468849 - DNA, 75 bp, Homo sapiens
cccttccacgtcatccgcatcaacaagatgttgtcctgtgctggggctgacagattgccaacactcctgatagct

SEQ ID NO: 468850 - DNA, 83 bp, Homo sapiens
ctggggccaagggacaatggtcaccgtctcttcaggaggatacgaagcgttttcggcttcctgcccggagctgtgcagcaaac

SEQ ID NO: 468851 - DNA, 51 bp, Homo sapiens
gctgtcgagcctgcgagagcagaaggttgctgatcccacaccctttcatat

SEQ ID NO: 468852 - DNA, 90 bp, Homo sapiens
cccatctgtataccactcagatatcccaaagatcttactgtgccgagatcgctcacaatgtttcctccaagaaccgcaaagccatcgtgg

SEQ ID NO: 468853 - DNA, 100 bp, Homo sapiens
ccgggtgctgctggttagtgtgctctgagggagggtccgagccagccgctgttttgccggaggagcccctcaggccgctcttgtcaggatggtgaagctg

SEQ ID NO: 468854 - DNA, 82 bp, Homo sapiens
agaaatgaacctgcccacggtgtccgcgctcaggatattgtgacccccaatgggctgaatgtgaagaagttttctgccatgc

SEQ ID NO: 468855 - DNA, 96 bp, Homo sapiens
tttttcagctggttgtggaggaaatcttcaatccagatattggaactgacccaggagtgtgatgaaaagaaatcccagtatgatagctgtgcagca

SEQ ID NO: 468856 - DNA, 117 bp, Homo sapiens
cttaaaacagccaatgcgatatatggagagaaaacgtatgcatttcacaatactacaagcaaaccagtgcaaatgatgtttatgaagaaaaagcttcacatttttcacatagaaaag

SEQ ID NO: 468857 - DNA, 83 bp, Homo sapiens
cccacccggacgccgacgaaagccagcgagctcctcagcctcaggcgatcagtgggtgaccgcggctgcgagggactttgtca

SEQ ID NO: 468858 - DNA, 129 bp, Homo sapiens
tactgcagccacgcgggcgagcggctgtgtggatgtcggcgaagccgcgggcgaggcgtcgacattccagatggctatcctgcttcagtacaacacggaagatgcctacactgtgcagcagctgaccga

SEQ ID NO: 468859 - DNA, 74 bp, Homo sapiens
cgaagaagactcccccacatctggtgcttagatgagtacgaagatgatgaagcagggcagaaagagcggaaacg

SEQ ID NO: 468860 - DNA, 87 bp, Homo sapiens
acaaggcaaagcgaaattggtcattctcgctaacaactgcccagctttgagactttgagaatcactacaagaaaaactccttgtggt

SEQ ID NO: 468861 - DNA, 78 bp, Homo sapiens
tttgatgagaaaatagcaacaaaatataaaattatgaagttcaagtctaaggttggtgttcatattgctgatgtgagc

SEQ ID NO: 468862 - DNA, 98 bp, Homo sapiens
ctgctgcacccacgaatctgcccacccctcctgtaacccagcctgtttcacttcttgaagctaaaccagccccagaaatatttgaaaatgaagtcatg

SEQ ID NO: 468863 - DNA, 96 bp, Homo sapiens
cagctaagtagacatttagtgggactctggacagctgataatgcaactgcaacaaacttgttgaaacgcattttgatatgtgcagcgggggctaca

SEQ ID NO: 468864 - DNA, 83 bp, Homo sapiens
tgaactacaaccccggttgccgctttctcctctcctaaccgttaagtgcgctaagagacaagaggagcagcagcggcaccgcc

SEQ ID NO: 468865 - DNA, 75 bp, Homo sapiens
aaaacattcaacaaagatacagtgattatagtgggtagaaatatttctgtcatggctcattcaaagactaggacc

SEQ ID NO: 468866 - DNA, 90 bp, Homo sapiens
tgtttccgtcagtacgcgaaggatatcggtttcattaagagctcccccatccaggaatccactgctcccgagctgccttcggagacccag

SEQ ID NO: 468867 - DNA, 82 bp, Homo sapiens
acatcaaagataaaccctggcatatttggaattacatgaatgacagtcttcgaaccaatgtgtttgttcgatttcaaccaga

SEQ ID NO: 468868 - DNA, 74 bp, Homo sapiens
atttaaacctgagccactatctgaaggctcgagaattacaagctcgggtactaaaacgtgttcagatggaacag

SEQ ID NO: 468869 - DNA, 140 bp, Homo sapiens
gacagagtcaccatttgatttggaacagcagtggcaagatctcatgtccatcatggaaatgcagaccaacagcaaagcctttactgccaagacttcctgtgtgcggcgccgctaccgtgagttcgtgtggctgagaaagc

SEQ ID NO: 468870 - DNA, 100 bp, Homo sapiens
gtccttactgcggaaagcttgtcctggtataaagatgatgagctgcagaagaaagatcagcaactggagcctaaaaaaagtaccagccctaaaaaagctg

SEQ ID NO: 468871 - DNA, 77 bp, Homo sapiens
gtgtacccatgtgactaatttgtccaaagagaggtctgtatgagctgttggctgctctgccagcccagctgcagcca

SEQ ID NO: 468872 - DNA, 100 bp, Homo sapiens
gcactgctctcagactatgttctccacaacagcaacaccatgagacttggttccatctttggtgtaccacatgaaggaagatggttgggtgaaagtagaa

SEQ ID NO: 468873 - DNA, 110 bp, Homo sapiens
acaacatgcgatgtttggaaatgatacaattacctgcacgacacatggaaattggactaaattaccagaatgcaggggtgtttaatgaacgctgccgaattcacttcaag

SEQ ID NO: 468874 - DNA, 100 bp, Homo sapiens
aaacccaaaaaggcaaaagacgcaggcaaaggcacaccactcactaatactgaagatgtgttgaaaaaaatggagatgccagagacgcggaacaattgag

SEQ ID NO: 468875 - DNA, 87 bp, Homo sapiens
agggttggggactcgaacccccgcttcgcagctcaggagcctgaggtccgaaaggtggacccccaaaagtacaagggcatatttaac

SEQ ID NO: 468876 - DNA, 50 bp, Homo sapiens
caaagctgcagaaaccacagtggtagagaatggcttcctttgggtggaag

SEQ ID NO: 468877 - DNA, 90 bp, Homo sapiens
gtgcttcgtgaagctaatcaagcaattaatcccaagttgcttcagttggtcgaagacagaggttcaggttggaaagggcaaagaaattac

SEQ ID NO: 468878 - DNA, 51 bp, Homo sapiens
ttcgacatgacaggtcactagaggcagatcgggagcggtgccgagaaaaat

SEQ ID NO: 468879 - DNA, 82 bp, Homo sapiens
ccccgaatcaaaaaatgaagctgaaggggcagatgacttacaagtttgaagatgccgcatttggattggatgaattccaaat

SEQ ID NO: 468880 - DNA, 99 bp, Homo sapiens
ttacgtggggctgcaggctgaggatgggcactggacgggtgattatggtggcccacttttcctcctgccaggtactccaaagattcaggtttactcacg

SEQ ID NO: 468881 - DNA, 90 bp, Homo sapiens
tggatatgtccttcatatttgattggatttacagtggtttcagcagtgtgctacagtttttagcttcagtatcagacacagcacagcagc

SEQ ID NO: 468882 - DNA, 100 bp, Homo sapiens
gctcaagaactgcagcattgcagccgccaagacgatggcttctttacctaaaaagactcttctggcagatagaagcatggaattgaaaaatagcctcaga

SEQ ID NO: 468883 - DNA, 99 bp, Homo sapiens
gttcttggggctacccctatggtgtcttcccggaccagcggtgcagtcccgccaaaggaagaggagctccgggcggcggtggaggttctgaggggccac

SEQ ID NO: 468884 - DNA, 101 bp, Homo sapiens
agcaacgccgtgcagctgcccatcgaccaggcattcccatcaagagcaccatggacaaccccaccaccacccagtatgccagcctcatgcacagcttcatc

SEQ ID NO: 468885 - DNA, 131 bp, Homo sapiens
tgccacccgcgctccctccgccgccgccgccttgctgctgctcaaagctgctgccgccccttgggctaaaagttacagaatgtctgaaggggacagtgtgggagaatccgtccatgggaaaccttcggtgg

SEQ ID NO: 468886 - DNA, 90 bp, Homo sapiens
gtctttgctacgtacagcaaaaggtatgataagtattatcagcaacataatagttctgggcatcttcattaagtacaaggaacttcggac

SEQ ID NO: 468887 - DNA, 100 bp, Homo sapiens
gcgctatggagtgttctataagttccaacctattgacctcatcagactgtattggtgatcacgtaccgagaacccccaaatcctgagtatcaggaattcc

SEQ ID NO: 468888 - DNA, 111 bp, Homo sapiens
cctccacaatgaagacaggtaatgtggaggaaagagagcttgtcatgttaagtgggcagaccaacatccacctcagcaaaaacttcttcctgacgaatcgcgccagggagc

SEQ ID NO: 468889 - DNA, 74 bp, Homo sapiens
aagcatttagagagcatcagcaatacaaagaagtttgtcatcctgatattggtggcaagatcataatgtgtcct

SEQ ID NO: 468890 - DNA, 100 bp, Homo sapiens
ctgtcatcacaaaagagttgattgaaattatctctggtgctgcagctctgtacatggccacctctggcctagaccaccagctgaagatctttgacttgcg

SEQ ID NO: 468891 - DNA, 82 bp, Homo sapiens
tccagagcgccgcgcacttcgtcatgttcttcgcgccctggattatatctgtccaagatgcgagtctggttttatcgaggag

SEQ ID NO: 468892 - DNA, 95 bp, Homo sapiens
ttcgagtgaccgagaccgcggccgggaccgagggataaagataaagtttctctaaccaagaccccaaaactggagcgtggcgatggcgggaagga

SEQ ID NO: 468893 - DNA, 98 bp, Homo sapiens
taccgtatgcagtcccccaggatacagggtcaaaggagagcacaaccatcgcagttggaagcccatggggcaggaagagaaacgtctcagagaaaagg

SEQ ID NO: 468894 - DNA, 99 bp, Homo sapiens
gggaggaggccccagacccaggcgccccgccagcccagctgcacgtaagcggactggggcagcacctactccgtgtcagtggtggagaccgactacgac

SEQ ID NO: 468895 - DNA, 83 bp, Homo sapiens
tcatcctgggtatgggctacaaagagaacgggcccatttggaggccagcgctgagaagtggaacaggttgctgatgtccttag

SEQ ID NO: 468896 - DNA, 119 bp, Homo sapiens
gaagaagagccagaggtgatccctgggcctccatcagagagccctggcatgctgactaagctccagggcaccagtgtcttgtcacctggactccacataggactaattattatactggc

SEQ ID NO: 468897 - DNA, 83 bp, Homo sapiens
ggagtgtgacctcatggagactgacatcttggagtcgttggaagatctagggagattcatatgggacattgtgtaaatctgac

SEQ ID NO: 468898 - DNA, 50 bp, Homo sapiens
gaacagcctatgtgggcttccacggaggtactccaaagattcaggtttac

SEQ ID NO: 468899 - DNA, 103 bp, Homo sapiens
gctgaccgctcaagagattctacatcagtttggtttcactcagaccgagcccaagcctttcattgatgtgagtgtcatcacaagatttaatgagtacagtaaa

SEQ ID NO: 468900 - DNA, 99 bp, Homo sapiens
gagcccctcgagcgcagcaggccgccccgccagcatgattcacagtctgagaatgaggcttcaccagtaaaacggccacgactacttgagaatacggaa

SEQ ID NO: 468901 - DNA, 75 bp, Homo sapiens
ttgcaaaatgacagatcttctagaagaagtgtaaactggagttgctggtgggcagccctgcttcctgcatggaac

SEQ ID NO: 468902 - DNA, 95 bp, Homo sapiens
ttggcgcggtgtaaaacgaccgcagatatgcacccaatgtccagggagcgtgcaaaatttgtcaaaagtggccttttattgtaaaacgacacgag

SEQ ID NO: 468903 - DNA, 82 bp, Homo sapiens
caccaaaccaatttctcctgcaaaccagggtatcagaggcaacaagattgacctggctgaaaggagagaggtttcccagcag

SEQ ID NO: 468904 - DNA, 90 bp, Homo sapiens
ttcacggacattcagcaagattttaaggagcatttctaccagaggcagcaccggctgcccgagccctcctgcccacagctggccacactc

SEQ ID NO: 468905 - DNA, 97 bp, Homo sapiens
ctggctgcagtaaaaatcattaaattggagcctggtattgggagagttgctgctacatctttaggaaatttgactaaccatggttctgaagatttac

SEQ ID NO: 468906 - DNA, 100 bp, Homo sapiens
tgtgggcccagccctgtgccaggaggctggctggaataaaggtgaccaagaatatggcccaggtgaccaaagccctggacaaggccctgagcaccatgga

SEQ ID NO: 468907 - DNA, 100 bp, Homo sapiens
catgaccgaaaatcagaagacaaacttgccaaagctacaagagacaggtggctggcatttgagtccagggccttccgcggggagcagtttgttctggaga

SEQ ID NO: 468908 - DNA, 75 bp, Homo sapiens
gggacagccgcccctggtgcacacaccctcgtattctcctgcccttccccagtgacaaccatgagtggaaaaaac

SEQ ID NO: 468909 - DNA, 90 bp, Homo sapiens
cagcatgctgagcctcctcgtctggatcctcactctctccgatactttctcccaaggatcacagaagaactgcagcttcctggggagcag

SEQ ID NO: 468910 - DNA, 100 bp, Homo sapiens
ggagatcactcccgctgcgattcagaaggctgaccccgcactacatctacccaccagccatcgtgcagcccagcgtggtgatcccagccgcccctgtccc

SEQ ID NO: 468911 - DNA, 75 bp, Homo sapiens
gggagccccgcctgaggtgccctaaacacactatgaccggggacggcaaaacagaacagaaaggcggagataaaa

SEQ ID NO: 468912 - DNA, 49 bp, Homo sapiens
atgaccaaagcattcctcttctatggctcagtagatgaaggcgtttctg

SEQ ID NO: 468913 - DNA, 93 bp, Homo sapiens
ggaggccatcatcatgaaggacgtgcccgactggaagacaatgcagatcttcgtgaagactctgactggtaagaccatcaccctcgaggttga

SEQ ID NO: 468914 - DNA, 93 bp, Homo sapiens
gcacctggcgcccagcgcgcccgtggccgctgccgcctccgccccagcaaaacccttgaagatcgtttgaaaattgaagcaaaaaatgggaca

SEQ ID NO: 468915 - DNA, 75 bp, Homo sapiens
cgggtcctcagcttccacagcgtgtctggctgaccccagcccacagcaggaaggccctgcggaattcccgcatcg

SEQ ID NO: 468916 - DNA, 102 bp, Homo sapiens
gcgagcccggtccccgccggcaccatgacctggagtggaagatcatttatgttggctcggctgagagtgaggaatttgatcagatcctagactcggtgctgg

SEQ ID NO: 468917 - DNA, 50 bp, Homo sapiens
ggaacatgcagagtctgcacaagttcgactagtgatagtggatggtattg

SEQ ID NO: 468918 - DNA, 73 bp, Homo sapiens
cgaaaagttcctccaggtttgccatcttcagtgcattggatcgttgtgtgatggggataacagcagttgagat

SEQ ID NO: 468919 - DNA, 144 bp, Homo sapiens
gcaggaggttcctagagttgttcagaatcctccaaaaccagtcatgaccactagacccacagctgttaaagcaacaggtgctggagaatctggtaaaagcaccattgtgaagcagatgaggatcctgcatgttaatgggtttaa

SEQ ID NO: 468920 - DNA, 73 bp, Homo sapiens
cccgggacctgggctgggaacccgcggtggagcgggacacgaacgtgggtcctgtcatgccagggagtcattc

SEQ ID NO: 468921 - DNA, 76 bp, Homo sapiens
cctggcggccgagctcgcccacgtcgtcatcacgcaactgctgctgtggacagggtctcgctgtgtcacccaggct

SEQ ID NO: 468922 - DNA, 75 bp, Homo sapiens
atctatggagcgccattcaaagtcaaacttgtcagtgtcctaatcccagagaaagagcagaagcctaaaggcaag

SEQ ID NO: 468923 - DNA, 72 bp, Homo sapiens
acctgggttgatatatcttccaacactgccgggaagggcgggacactcactcaatatgaaggcaaactgaga

SEQ ID NO: 468924 - DNA, 89 bp, Homo sapiens
ggaacaggccgaactgctgtatgggctctttacgcagctccttcaagcaagctttcgggaagaagaagtccccaaaatctgcgtcctct

SEQ ID NO: 468925 - DNA, 100 bp, Homo sapiens
gggggcatggagtgcaccctggggcagcaaaccagtccagctacgggggcccagccagccagcagctgagtgggggttacggaggcggctacggtggcca

SEQ ID NO: 468926 - DNA, 88 bp, Homo sapiens
cccctgccgtgtggacccgtaaaataaaatgggagcagcatttctttctattactactatctatgctgagactggttcaggttttgta

SEQ ID NO: 468927 - DNA, 71 bp, Homo sapiens
aagatcggtgagattgccactgggtcccccgtgtcaactgaactggtcatgttgtcataggaacaactgga

SEQ ID NO: 468928 - DNA, 100 bp, Homo sapiens
cgtgaaactgaaggacaacgagaagaaccggaagctctttgaccttctggatgtccttgagttcaaccagattcttcgctgctgctgccttaccgccgag

SEQ ID NO: 468929 - DNA, 83 bp, Homo sapiens
ccccggcaccgcgcctgctgccgggttgcgctccgtgcacctcttgcggatgtgttttcgcattataacaaggacctgttgac

SEQ ID NO: 468930 - DNA, 87 bp, Homo sapiens
ggcctcttctggaccaggaaactctccacttgttgacctcctgtactggagagacattaagaagactggagtggtgtttggtgccag

SEQ ID NO: 468931 - DNA, 100 bp, Homo sapiens
aatacaatgcagttccttaaaagctgcttccagtgggaatccacattaagaagtacaatagcattcgcgactgtgagctgcttgtccccatcctgcggcc

SEQ ID NO: 468932 - DNA, 74 bp, Homo sapiens
ctgacctccgcgcgacgtacccgccgccgccgttggctggaggtaagaatgattgatgttggctgatattggag

SEQ ID NO: 468933 - DNA, 100 bp, Homo sapiens
tgggacctttcctggatggccgactctgatgccagtatggactggagatgatgggagccagttggatagccccatggaaatccccaaagagctctggatg

SEQ ID NO: 468934 - DNA, 98 bp, Homo sapiens
gctgcagcctggatgggaagttcaagtttactgcgaagtccacccagcgttccggaggttttcctttggaatatggataaatacaccatgatacggaa

SEQ ID NO: 468935 - DNA, 75 bp, Homo sapiens
aaaacgggtcagttggcagccatcaaagttatggatgtcactgagctgatcacctgcctttccagaccggagacg

SEQ ID NO: 468936 - DNA, 75 bp, Homo sapiens
cggagcctggaggaagagaaggcagctgtgactgaggcagtgcgggccctgctgccagctgaggtgggtgtcctg

SEQ ID NO: 468937 - DNA, 98 bp, Homo sapiens
tgagcagggtctgcacgaaataaagctcctgggcaaggggacgtctgcagctgaaaacgggtatgcaggagattagaagccagtgggcatgagcgtgg

SEQ ID NO: 468938 - DNA, 46 bp, Homo sapiens
aggccccagaactatcttttcgttcttggccaggctgactgagaga

SEQ ID NO: 468939 - DNA, 101 bp, Homo sapiens
actgactgcagcatcgacctccggggctcaagtgatcctttcatctcagcctcctcagtagctgagactacaggtaagaatgattgatgttggctgatatt

SEQ ID NO: 468940 - DNA, 98 bp, Homo sapiens
gactatggcatctatgttatcaaccaggtttagcttcttctcccgagataagaagcgcctggccaacacacagagaaacgtgcacatccaggagtcct

SEQ ID NO: 468941 - DNA, 75 bp, Homo sapiens
cgcgccgctgctggttgctgtccctgcccactttccttgtggaactgtccagagtgctggcaaatccaggaaaca

SEQ ID NO: 468942 - DNA, 100 bp, Homo sapiens
ggtgtggccttattcctgttggacagccttgtatgcaggttacaaccacaggcctcaagtggaacctcatcgtgatgagaggagatggattgaaaagcag

SEQ ID NO: 468943 - DNA, 90 bp, Homo sapiens
ccaatttgcctccacttagtgagcggaagaatgagaagaaaatcttcattggcctcatcccccatgaccagggcaactttgtcaacggca

SEQ ID NO: 468944 - DNA, 100 bp, Homo sapiens
ttcgctgctcagccagctcctgcgaccgccctgcgcttcgtgcaccggggcggtccgttgccaaagccaggaattgaaagatgttggccatcgtgatcag

SEQ ID NO: 468945 - DNA, 90 bp, Homo sapiens
acccgccctaaccacactatttatatcaacaacctcaatgagaagatcaagaaggatgtacctgttggatcagactgatgtgttggtggt

SEQ ID NO: 468946 - DNA, 75 bp, Homo sapiens
caccaaaagcacagaattgttactagaaacgtcgcctctgccttctcaatctataaccctacccagcccagatga

SEQ ID NO: 468947 - DNA, 99 bp, Homo sapiens
ctctacaccaagacctgcgcagccgccaacgaggagcgcaaaaagtgcatgactacggggccccccaggaggcgactctcggggccaacaaggtgatcg

SEQ ID NO: 468948 - DNA, 50 bp, Homo sapiens
ggccgaggtggcggcggctcctcagtctgcgggccaggcatcgacatccg

SEQ ID NO: 468949 - DNA, 96 bp, Homo sapiens
ctctgattttgggggtaaagattctgtcactagtccagacatggatgaaataactcacgatgatgaagaacgagagcttcaaatggatcctgcaga

SEQ ID NO: 468950 - DNA, 50 bp, Homo sapiens
gggctggaggccccggcggctaggttgtgaactaaaggccgacaaagatt

SEQ ID NO: 468951 - DNA, 83 bp, Homo sapiens
aataataaaggaagtctgtgatgggtccatattcaagcctttcatctttgttgatgacgtaaaacttgtccccaaaacacagt

SEQ ID NO: 468952 - DNA, 74 bp, Homo sapiens
cttcgtcgctgttgctgccgccatacgcgctctccctgtttaggtcttgatgcagaactttattatgtgagaaa

SEQ ID NO: 468953 - DNA, 114 bp, Homo sapiens
aaaagaaccttggaatgtgaagagacatgagatggtagctgaacccccaggtctcctctgagcctccggcctccataagacccaaaacagatgacacctcttcccagtcccccg

SEQ ID NO: 468954 - DNA, 74 bp, Homo sapiens
tttcaggagtttacccaagaaccattggtggagatagaagctctaagcgaaagacatgaggcctcagcctgaaa

SEQ ID NO: 468955 - DNA, 75 bp, Homo sapiens
cccgctgccgtcgccgccgccaccatgcccaagagaaaggaaagccatcaccaagtcgggcctccagcacctggc

SEQ ID NO: 468956 - DNA, 51 bp, Homo sapiens
ttcagcaggtcctgttggagatgatagtatatgaatgacctaaaggtacaa

SEQ ID NO: 468957 - DNA, 101 bp, Homo sapiens
accgagcatccagtcatctcctataaaggaatggcggcgctagatagtaaggcatcagggaagatgggaatgcgagctgtagtctattatatgactaccac

SEQ ID NO: 468958 - DNA, 50 bp, Homo sapiens
gcccctggctcctgctcctggatcagacactcctctaatttacaaagcag

SEQ ID NO: 468959 - DNA, 75 bp, Homo sapiens
ctggaatatgaagagacacagtatggtagccacacccccagggtggtttataaaatcctccaatgaagctactaa

SEQ ID NO: 468960 - DNA, 75 bp, Homo sapiens
gacaaggcaaagaacctgaagacgacccaaaagggtacctagatcaaggatctggattttgcataactggtaaaa

SEQ ID NO: 468961 - DNA, 50 bp, Homo sapiens
ggggctgctgtttctcttcgccgacgggcggcaccttcctacttctgccc

SEQ ID NO: 468962 - DNA, 82 bp, Homo sapiens
ggcaaaggctacaagctgtccccagaggactacacgctcaagaggctgggaggcggcagaatgcagccagaggagggcacag

SEQ ID NO: 468963 - DNA, 75 bp, Homo sapiens
ggttgggttacaactcaatctccagaaagtggtgctgtaccctgtgtgccatgtgcgtaacctgatgctgtggag

SEQ ID NO: 468964 - DNA, 96 bp, Homo sapiens
tttcatctgtggatggagtattgatgccttcaattaagttgcagagttctgatggagagatatttgaagttgatgtggaaattgccaaacaatctg

SEQ ID NO: 468965 - DNA, 83 bp, Homo sapiens
cagacctgcaagctctttgacacacagcagttcttgtcaggggatcatcgtcttgctcttcttttatctcagtttgtgggtag

SEQ ID NO: 468966 - DNA, 100 bp, Homo sapiens
gaaagaagttatgcttgttggaattggtgacaaaatcagaggcatactttatagcaacacagtcactcctggcggcaaaccaaacaaaaccagagtcatc

SEQ ID NO: 468967 - DNA, 100 bp, Homo sapiens
gctggtcgccgccgcggccgcctggaattgtgggagttgtgtctgccactcggctgccggaggccgaagtctaagtaccatgtgacgttttttggagaaa

SEQ ID NO: 468968 - DNA, 96 bp, Homo sapiens
gcagatggcggatgccctgcagtacctgcagaaggtctctggagacatcttcagcagattctacaagggggttgctcctctctggatgagacagat

SEQ ID NO: 468969 - DNA, 96 bp, Homo sapiens
ctgtgggggttatgagccccccactctccaggagctccgtgctcaagtccgccctggagattgggtctctccacattgccccggctgctctccaac

SEQ ID NO: 468970 - DNA, 100 bp, Homo sapiens
taatcaaaagagagcaaaatttaaggagttatatttggctaaagagggtgtggcaggtgtttccagtgccatggaccacaccttctcaacaacatcaaaa

SEQ ID NO: 468971 - DNA, 88 bp, Homo sapiens
aggaagagtgatgtggttttggataaggatctgcaatcagaactattgaacttctccattcagaccgccactcacacctatgggaaaa

SEQ ID NO: 468972 - DNA, 75 bp, Homo sapiens
cccaccctacatttagcgcatcatgtgatccggatagaggaaagggtcgccagagacaagccattttgggagaac

SEQ ID NO: 468973 - DNA, 100 bp, Homo sapiens
ggaggtcctgccgtccatgcggaagatcgtcgccacctggatgctggaggtccctgtgcgttttattgcgacctgccggtgggaactttgtctccgagtc

SEQ ID NO: 468974 - DNA, 83 bp, Homo sapiens
aaggtcggcagagcaaggggcttacgcagaaggacctggccacgggaacggcaggagcagctgatgggatatcggaagagagg

SEQ ID NO: 468975 - DNA, 100 bp, Homo sapiens
tgtaccccactcacaagtctctgaagccgtgcccgttcttcctggagggaaagtgccgctttaaggagaactgcagagtcgtgtcccaaatgcgaacatc

SEQ ID NO: 468976 - DNA, 83 bp, Homo sapiens
ctcgcgccggctatggccgtgccctggggctgagccctcaggaggttccagccttggcaagaggagtgtggcccttcctggaa

SEQ ID NO: 468977 - DNA, 75 bp, Homo sapiens
ggagtccgccccgtgaggagaatggactcagaaggggtagaaattatgttaggagtttgtgcaagtggtctgttg

SEQ ID NO: 468978 - DNA, 83 bp, Homo sapiens
ggaaccatcaaacaaggctgcagagattgctgctgcagaaaacaatggaaatgaatcaggtgtaagagagctactaaaaagga

SEQ ID NO: 468979 - DNA, 75 bp, Homo sapiens
ttagaaatgtatgcagacttttttgcacatccggacctgtttgtgaggtgaagaacaaattggttttgagctagt

SEQ ID NO: 468980 - DNA, 100 bp, Homo sapiens
ctgggaggtggccatcttcggaccccccaacaccctctacgaaggcggctacttcaagattagccgatgaattacatatgccatctctccctgaaatgat

SEQ ID NO: 468981 - DNA, 90 bp, Homo sapiens
ccctttccaaggaaaagatcgaaaagaaacaatgactatgattcttaaggctgtcacatggtgactgaagaacttcattccataacgttt

SEQ ID NO: 468982 - DNA, 75 bp, Homo sapiens
tcttcccaaggaagtgggtgacatggctcccatctattttaaggaaattcagttcatgaagataagaagtttctt

SEQ ID NO: 468983 - DNA, 100 bp, Homo sapiens
gcaaaaagaaactggagccaccatcaagctgtctaagtccaaagatttttacccagaggccagtaatagtagccatgagtctcgtattggtctagctgag

SEQ ID NO: 468984 - DNA, 90 bp, Homo sapiens
ccattttttcaccatgctaaaaagataagtttataccatggatagcacaaaggagaagtgtgacagttacaaagatgatcttctgcttag

SEQ ID NO: 468985 - DNA, 75 bp, Homo sapiens
tgcaaggcaggatatgaagagaaaaatggcacctgtcaaggtgaaaggtgtagcagtcactcggcctacacccac

SEQ ID NO: 468986 - DNA, 100 bp, Homo sapiens
cggcgccatggcagggcttgcagataccccatgtttccccatcactcgaggagtctgggcagagactggactacaccgtgggagaatctgcaaaggtgtt

SEQ ID NO: 468987 - DNA, 80 bp, Homo sapiens
cgcaactctcagttcgagagtaaaggtactaggttttgacaagcttgcatcatgcgtgagtataagctagtcgttcttgg

SEQ ID NO: 468988 - DNA, 83 bp, Homo sapiens
gactgctgagcccgtccgtccgccgccaccacccactccggacacaggtagcagtagctgatgtgcagtttggccccatgaga

SEQ ID NO: 468989 - DNA, 82 bp, Homo sapiens
ggcgctcgagacttaccagagccacaaggaatttatgttgatgcagttaactccttgggccaaacagcactttttgttgcgg

SEQ ID NO: 468990 - DNA, 76 bp, Homo sapiens
ggaaagacttcacgtcttgccgaatgaaaattaagcctgatcaagatgacaacctcccaaaagcaccgagacttcg

SEQ ID NO: 468991 - DNA, 100 bp, Homo sapiens
agacatgagcaagaaaagcctctgggagcagaagggaggctccaagacctcatcaacaattaagtttgccgagaagttccaggaagtgaaggaagcagcc

SEQ ID NO: 468992 - DNA, 99 bp, Homo sapiens
aactcagatcttaagtagtgatatttctcttttgtctgcccctattgtaagtgcagatggaacacaacagatcgaacggttggaagtaagcagccttgc

SEQ ID NO: 468993 - DNA, 100 bp, Homo sapiens
gttggagaatatgtgcggcattatccacgaggcaaacgagtgcctggtgaagaatgtgatgggatcactagcatgtctgcggagagcggccctgggacga

SEQ ID NO: 468994 - DNA, 100 bp, Homo sapiens
actcaggctttgcaggagttagccgaccacgaggaacctttattccacagtggtgtgtggagtacatgcgatcattaccaggacccaagagaggagttgc

SEQ ID NO: 468995 - DNA, 50 bp, Homo sapiens
tttctggaaatggaccaatgccagggaaatgatctgctggaggattcccc

SEQ ID NO: 468996 - DNA, 75 bp, Homo sapiens
agcttcttcctatttgccatgggtcagcccaaggctgccccctcggtcactctgttcccgccctcctctgaggag

SEQ ID NO: 468997 - DNA, 98 bp, Homo sapiens
ctgctcagaccctcaatgacacgctggatgacatcatggcaggaactgatttcatctgaaattgaagagacaatcagagaaaaactatagaccactca

SEQ ID NO: 468998 - DNA, 98 bp, Homo sapiens
gttctttatcaccttgaccaagcccacctggttggacggcaaacatgtggtgtttggaaaagtcattgatgggatgtgggaggcgaaagtgcaacaag

SEQ ID NO: 468999 - DNA, 100 bp, Homo sapiens
aaggctttgccgcagttcatcttcctccctgtgtactttccatttgccttcctggattcatgatgttgctatcaaaagttgagaaattgtcagaagaaat

SEQ ID NO: 469000 - DNA, 75 bp, Homo sapiens
agggctccaggcatccggtcctggtccctgctggttgttggaatcgaagcctcttaaaatggcagatgacttgga

SEQ ID NO: 469001 - DNA, 75 bp, Homo sapiens
atatcctgtatatggcaccagacctcagacaattcagatccttccgctgaggaattgagaaaactaatgatgttg

SEQ ID NO: 469002 - DNA, 101 bp, Homo sapiens
actttcctccggactcctgcacgacctgctcctacagccggcgatccactcccggctgttcccccggaggaggagacatcacagctttcccagatcgggag

SEQ ID NO: 469003 - DNA, 82 bp, Homo sapiens
cctaacaggcccgcctgtctgctcgtggccagcggcgccgccgaagatcacccggaagttcaggctgaattctgaaggcaaa

SEQ ID NO: 469004 - DNA, 100 bp, Homo sapiens
tttgattatgaagagctgaagaatggagactacgtcttcatgaggtggaaggtcaaaatgcagatcttcgtgaaaacccttaccggcaagaccatcaccc

SEQ ID NO: 469005 - DNA, 98 bp, Homo sapiens
tcttccctgggctggtgaagtacatgaactcagggccggttgtggccatgatataaagatgaagcgcagctgtataaagaagagcacctgaggaatcg

SEQ ID NO: 469006 - DNA, 83 bp, Homo sapiens
gtgcacctcagcactatcccaagactgctggcaacaggtgttggagagcacaatggctgaacaagtccttcctcaggctttgt

SEQ ID NO: 469007 - DNA, 100 bp, Homo sapiens
gagcagttgaagaagtgaagaaattattggtacctgcaggtaggagtcaatgaagacatcttagtcttaacaagttacagataatctctgactggcatgt

SEQ ID NO: 469008 - DNA, 100 bp, Homo sapiens
cagatgcagatctgaagacctattttactgataagaaaacacatctttacacactaaggcagccgatgaagtgcaaccttcacatgaatgggaatgttat

SEQ ID NO: 469009 - DNA, 75 bp, Homo sapiens
ctccttctcaatcttggaacagcacccccttctttaagggtgatcagcccatgacctaaacctccagacaaaata

SEQ ID NO: 469010 - DNA, 100 bp, Homo sapiens
gccagctctagctcacaggttacagccagcacatcgctctctgatgtaaaggatggagtaaatcaagcagcacctgcatttggatttggcagcagtcaag

SEQ ID NO: 469011 - DNA, 75 bp, Homo sapiens
ggggacttcacctttgtctcctcagcagacgcggaaggatttttacctcctataactccaccagaaaagtttttt

SEQ ID NO: 469012 - DNA, 100 bp, Homo sapiens
cagccactaactacaatcaccatcttgttggtgcttcctcatgtattgaagaattccaatcccagttcatttttgacaatgaaggccaaacagctctaca

SEQ ID NO: 469013 - DNA, 76 bp, Homo sapiens
cgcccgcccccgcgcttcgaggataccggcggtgtccctggccagtgtccttccacctgtccacaagcatggggaa

SEQ ID NO: 469014 - DNA, 75 bp, Homo sapiens
gatgctcgccttggggaataatcactttattggtctatagtaaagagatgtggcatctgatgaaaaggaagacaa

SEQ ID NO: 469015 - DNA, 75 bp, Homo sapiens
ccccggagacagcggcacagaggtgcttctgccagatgcctgaaaacttcatgcctcctgttcccatcacatcac

SEQ ID NO: 469016 - DNA, 100 bp, Homo sapiens
tggacatagtcagttggataaaagacccgaaccaagcacattggaggacatgaaagatcagatgtcaacttcatctgtgcaggcattagctgaaagaaaa

SEQ ID NO: 469017 - DNA, 83 bp, Homo sapiens
aaaaaacaggcgtattctggtaatttcgaggaggcaaatgttctgaaaaagactctgcatgggaatggcctgccttacgatga

SEQ ID NO: 469018 - DNA, 100 bp, Homo sapiens
agcgagctgagtggttgtgtggtcgcgtctcggaaaccggtagcgcttgcagcatgggagtgaggattctttggacaccagcctgagagctcacggggtc

SEQ ID NO: 469019 - DNA, 101 bp, Homo sapiens
cttgacgaggctgcggtgtctgctgctattctccgagcttcgcaatgacttgaaactgcatctgcagagcactgattatggtaacttcctggccaacgagg

SEQ ID NO: 469020 - DNA, 82 bp, Homo sapiens
tcggctgcagacttggccaaatggacgggactattaagaaagaagcttccggttctgaggtcctggaggtgccatttccctc

SEQ ID NO: 469021 - DNA, 99 bp, Homo sapiens
ggagtggagtgatatcagacaccgagcttcagcaagctctctccaacggacattatctttctggggacccagtttgccttcatgaagaaaagacaccag

SEQ ID NO: 469022 - DNA, 78 bp, Homo sapiens
cccgaggctgaagccattgctccacaggttggcaatgatgtgtcagaagaattggatacaaaactccctcttgatggt

SEQ ID NO: 469023 - DNA, 98 bp, Homo sapiens
tgagcccgcggaaccgcagccatggttcttgatagtccacaatgggtgaaccacagcaagtgagtgcacttccaccacctccaatgcaatatatcaag

SEQ ID NO: 469024 - DNA, 75 bp, Homo sapiens
cacaatatgttgagatgtgctattttgacaacacttattcatcttgttcagatgttttctggcaaaggccttcct

SEQ ID NO: 469025 - DNA, 100 bp, Homo sapiens
ggcttcccgtctcgtcaccctctggtgtgaccatgaagctcatggatgaggtcgccgggatcgtggctgcacgccactgcaagaccaacatcgtcacagc

SEQ ID NO: 469026 - DNA, 50 bp, Homo sapiens
cagctgtgctttgttttgacaggtggtcgttctcgttaccggaccacttc

SEQ ID NO: 469027 - DNA, 98 bp, Homo sapiens
gctgtaaataatacccgagaggaaataggcccggcagcgcctagaagcctgcagctccggagcagtggccgcgccacgccggccccagcgcgcagaac

SEQ ID NO: 469028 - DNA, 74 bp, Homo sapiens
tggaagaagctatacaacagtatgagagagcatgcaaagctattccttgagcgagagcgggcagcccagctagc

SEQ ID NO: 469029 - DNA, 74 bp, Homo sapiens
caagaagcagatgcgcattttgatggactctttttgatcagaacaatgctgcaaaaaaagaagagtcagaaact

SEQ ID NO: 469030 - DNA, 82 bp, Homo sapiens
agcaggactgcgccgcgtcttcctcaaggctatgactttgcagccgtcctggagtggttcgcggagcgtgtggaccgcatca

SEQ ID NO: 469031 - DNA, 100 bp, Homo sapiens
cagttcaattatgaatctcaggaacaccaccttctgtcaggagcggcctattgccaattcatggacatgctcttccctggctgcattagtttgaagaaag

SEQ ID NO: 469032 - DNA, 90 bp, Homo sapiens
cctggaggggatctctggccaaggagtgtacgacctgcaggctgggacaatgaaaagaaaatagctattttacatgaaaattttacaacc

SEQ ID NO: 469033 - DNA, 75 bp, Homo sapiens
ggtttcctcattgcgcaagaggtccaaaggcttctaagcatgcgggagaagaagatcctatgaatgcactccaga

SEQ ID NO: 469034 - DNA, 90 bp, Homo sapiens
cggagcataggaggaaaattcatcatctgatgacaggatctatgcaactaacccagagatgacacagagatgaatgagatgtggctcctg

SEQ ID NO: 469035 - DNA, 74 bp, Homo sapiens
cgaccaagagggtgttcgactgctagagccgagcgaagcaactgccattggatgtccagaatcccctgtagttg

SEQ ID NO: 469036 - DNA, 89 bp, Homo sapiens
gcagtacctcctgatttagagaaactgtggagtgatttcaaagatcagcagaaagctgttagagccacagctgaaacaactacaaacaa

SEQ ID NO: 469037 - DNA, 97 bp, Homo sapiens
aataagaaaaacagaaaaataataattacatctgcaaagaccttatttccagatggaggacggccataccctcttcgactacgaggtccgcctgaat

SEQ ID NO: 469038 - DNA, 75 bp, Homo sapiens
aaggccaaaaatgtgcatactcacagagttagagagagggatggtgctcaaggatctaaatttacttgatcgctg

SEQ ID NO: 469039 - DNA, 100 bp, Homo sapiens
tttgcctttagtgcacccgctgccagaagggctgagggcttctgcagatgctaagaagtcccatgcaggcaaggtggtgctgaggagctggtacgagaag

SEQ ID NO: 469040 - DNA, 74 bp, Homo sapiens
tacagaagggcgacctctgtgccatttctttggtggggaacagaaagatgtgtcatggcaatgctgagaaggag

SEQ ID NO: 469041 - DNA, 88 bp, Homo sapiens
gcggacttcgacacctacgacgatcgggcctacagcagcttcggcggcggcagagggggcaagctctgtgtgattgattggaagacat

SEQ ID NO: 469042 - DNA, 97 bp, Homo sapiens
cagagcaggcaccgtagccccagtgccctgtacaaccctgtattgagcaagtcaacaacctacgagagatccaagcactgaggcgcctgaatccgca

SEQ ID NO: 469043 - DNA, 50 bp, Homo sapiens
caaggcactgctttttcatgacggctgttactgaggcggagacacgggtg

SEQ ID NO: 469044 - DNA, 80 bp, Homo sapiens
ctcgcactaccctgactacagctggagcgcccagaggcgagccctggtggaggaagagagttgtggaaagtaaaaatgta

SEQ ID NO: 469045 - DNA, 75 bp, Homo sapiens
ccacttgcacgaaagctttcctaggccaaaaagagctcctctggtgcaagtgtggtagctattgacaacaaaatc

SEQ ID NO: 469046 - DNA, 125 bp, Homo sapiens
ttcaattttggggctccctcgggcacctccggtaccgctgcagccaccgcggcccccgcggcagtccagagcgtgagtccattcacatcctgagtgttgatgagaagaacaagttgggagccaag

SEQ ID NO: 469047 - DNA, 75 bp, Homo sapiens
cgactgcaactgctggattgctgcaaggctgagggacgagaacgaggaatcacccttcggtcatcgtgcagcctg

SEQ ID NO: 469048 - DNA, 75 bp, Homo sapiens
tcgccaaactgcaggcacaagtgcgcattggtgggaaaattcctataggcaatggaaactgatctcaattcccag

SEQ ID NO: 469049 - DNA, 75 bp, Homo sapiens
gtacacctggtatgccagatgagaatgacagaccccaccaacaactgaacgctttggtcaggctgctacaatgga

SEQ ID NO: 469050 - DNA, 90 bp, Homo sapiens
ctagcagatgattgtatgaagcacttcaagggctcggtggagaagctgtgtagtgtggagcaggtgttccaggctggtgatgtgccttcg

SEQ ID NO: 469051 - DNA, 74 bp, Homo sapiens
gttggagaactacagaaacctggtctccctagggattaatgaaaatcaagttccatcctcagacaagaggtaaa

SEQ ID NO: 469052 - DNA, 100 bp, Homo sapiens
tccttccttcctccccacccattcctttaaatccggagggggaaaaaatcccaaggtctgcaaaggttatgaagacagtatggagtttccagaccatagt

SEQ ID NO: 469053 - DNA, 93 bp, Homo sapiens
tcaggatcgtcttcagctacatattctgccttttcaacactacacagatggagatcttataacaatttttgatagttctgacctttcctttgc

SEQ ID NO: 469054 - DNA, 100 bp, Homo sapiens
caccctgggcagtatagagacgtcggacttcacgaaagccattgatctggtgacgaaagccacagaggaggacaaagccaagaactacgaggaggcgctg

SEQ ID NO: 469055 - DNA, 115 bp, Homo sapiens
cggctctctggtccgcagcggcaacagtaacgaaaaacagggctgccaagtacctggcccagatcattgtgatgggcgtgcaggtggtgggcagggcctttgcacgggccttgcg

SEQ ID NO: 469056 - DNA, 75 bp, Homo sapiens
atcacacgcataatggatgaaaggaaccgacaggttccagcaacagatagaaatgctttaagttcactctgggga

SEQ ID NO: 469057 - DNA, 50 bp, Homo sapiens
gttggacagtcagcatttgcagactttggagctaatttcgttactcgaaa

SEQ ID NO: 469058 - DNA, 51 bp, Homo sapiens
gcccttatcagtaacacctgagatgatgctggagggtcttgaaatctttac

SEQ ID NO: 469059 - DNA, 101 bp, Homo sapiens
gccaggacggcgagggggacacgaggaaagactagtcgagagacagaccccccccggaattctgagcaccaaaaggccaagactaaggggctgcagagcgg

SEQ ID NO: 469060 - DNA, 82 bp, Homo sapiens
tctggtgtaccaggcgaagctggccgagcaggctgagcgatacgacggtaattggtacgcctcagagaccggcagcgtcaaa

SEQ ID NO: 469061 - DNA, 82 bp, Homo sapiens
tcttggtgaagaaggcggcctgcaccaggacccacttcggcacagacaatgcagatcttcgtgaagactctgactggtaaga

SEQ ID NO: 469062 - DNA, 100 bp, Homo sapiens
ataaagtttgatgacagtgacacagaacagatagctgaagaaggtgacgataatttggctagtttccaatacttatctacaggaatcgccatgaccccag

SEQ ID NO: 469063 - DNA, 101 bp, Homo sapiens
ccgccaaccgcaaccattgacgccatgtcgggttattcgagtgaccgagaccgcggccgggaccgaggtggacagaggactgcagaaaatcaacctatcct

SEQ ID NO: 469064 - DNA, 100 bp, Homo sapiens
tttggatcggcatctagtctttccgcttcttgaatttctctctgtaaaggaggtatctcagcgtttgagtcagccaggagtagcaataggtttggcttgg

SEQ ID NO: 469065 - DNA, 88 bp, Homo sapiens
tacccaatgcctgtttattcaccatcaacaaagaagaccacacactgggaaacatcattaaatcgggactgcagccttcagatgccca

SEQ ID NO: 469066 - DNA, 80 bp, Homo sapiens
cctacccatccgccaggagccctcttccttcaggtccagcaccatgtgctaggtcactcccagcgcgaggccacacctgg

SEQ ID NO: 469067 - DNA, 75 bp, Homo sapiens
ggttccccggcccacagtgggggtgtgcaaacccgagagaactgggtaaaatcccagaggaatccaaagccctct

SEQ ID NO: 469068 - DNA, 89 bp, Homo sapiens
agcagttccacttaggcaagattgaggagcttctcagtggagtgcagccgctgcccaaaggggaccaagtgctgaacttctctgatgca

SEQ ID NO: 469069 - DNA, 100 bp, Homo sapiens
ctggatcaggatcacgtcgcagtcctaggaagtccactagcagcttctaaggacttcctcttcaaattcctggtgattggcagtgcaggaactggcaaat

SEQ ID NO: 469070 - DNA, 96 bp, Homo sapiens
gagtgccttctgtgtgggccgaatgctgtagctgctgggatagctctggattaatcgaattacagctgctagccaggaacatggactgaagtatcc

SEQ ID NO: 469071 - DNA, 129 bp, Homo sapiens
gtgcaacaacctcttgaggatcgaatcttcactcccgctgtctcagcagtctacagcacgatttctctatgaatcatcatcaagaactctgggagaacttttgaattcataaccaagccaacatctcca

SEQ ID NO: 469072 - DNA, 100 bp, Homo sapiens
gcggagtcggggctcctgacggaggagagacttcagcatgcaaaccttcatctgttcggcttgcaccgtcattttcattccatgctgctggccttcagat

SEQ ID NO: 469073 - DNA, 77 bp, Homo sapiens
agcggaagaatggcagtgctcaaactcaccgaccagatgccttcaattaagttgcagagttctgatggagagatatt

SEQ ID NO: 469074 - DNA, 100 bp, Homo sapiens
aatttaacctgaagttggtcatcaaaccagaaactgtagacaatgttcagcgttgtcagttccttgatgacagaattctacagtgtataaagcagtatgc

SEQ ID NO: 469075 - DNA, 125 bp, Homo sapiens
gaagaaccattgttagtgaacgtggacaaagctgttgtctcagggagcacagaaattctttcttgtggagaagttattcatgtgaagatccttggaattttggctcttattgatgaaggtgaaac

SEQ ID NO: 469076 - DNA, 95 bp, Homo sapiens
caataaccctgagttattcagtggcatgctgaaaatacgaatcgggttgggtatctacagccattggttgctgttcaggtcagctttgctcctaa

SEQ ID NO: 469077 - DNA, 100 bp, Homo sapiens
cgctccatccgtccagataacatgtcggagtacagcaagcagatgcagagatgccctgtgcaccaaggtgccggaactgatcagaaccatcatgggctgg

SEQ ID NO: 469078 - DNA, 82 bp, Homo sapiens
ttgaaatgaaacgaagccctgaagagaagcaagagatgcttcaaactgaaggcagccagatgggccatcaactgagaaagac

SEQ ID NO: 469079 - DNA, 75 bp, Homo sapiens
agaatgcatacttggaatgaatccttctagagacgtccacggtttggtgcacctcgatttggaggaagtagggca

SEQ ID NO: 469080 - DNA, 80 bp, Homo sapiens
cccaggctcgcctcgactccaaatggttgaaaacagatatacaggtcaaaatgcagatcttcgtgaaaacccttaccggc

SEQ ID NO: 469081 - DNA, 83 bp, Homo sapiens
tgaagaggttctacacaattgaatccacattcatctcaatggaaggatcctgccttaagtcaacttatttgtttttgccggga

SEQ ID NO: 469082 - DNA, 73 bp, Homo sapiens
atcgtaagcgcacgtttaaacatctcaagctatatgttctcctttcagccaagacctttcaccagtgcagggg

SEQ ID NO: 469083 - DNA, 83 bp, Homo sapiens
tctgatttcagagactctccgcaacagaaccatctcaaggggatatgagactttctactcggaatatcctgagtgttgcgtgg

SEQ ID NO: 469084 - DNA, 83 bp, Homo sapiens
ccagccttctagggcggcggaggaaggagtcaagactgagaacaacgatcatattaatttgaaggtggcggggcaggatggtt

SEQ ID NO: 469085 - DNA, 87 bp, Homo sapiens
cctcctgagtggctgggactacagggagtcaaggtggacgcgagagaccacagtggagccacagcccggatgctggccaagcagtac

SEQ ID NO: 469086 - DNA, 75 bp, Homo sapiens
gatcaacaaggccacgccctacaactacccagtgtcactactccatccagaagggagctgcgtttctgggacttg

SEQ ID NO: 469087 - DNA, 100 bp, Homo sapiens
caccgacatgttcaagatactgacgtattcctgctgttcccagaagcgaagtggagagcgccagagtaatggacgccttctggcaagaggggagagcctc

SEQ ID NO: 469088 - DNA, 96 bp, Homo sapiens
gacccggcgggcggcctcgcgggtcagatctgccgacaccccaggccatcgagccccaggccatcgtgcagcaggtcccagcccccagtcgaatgc

SEQ ID NO: 469089 - DNA, 100 bp, Homo sapiens
ctgggagctgtagaccggagctgttcctattgggccatcttggctccaccaccctgggtggttctcttcccaaagtggaagccaaattcatcaattatgt

SEQ ID NO: 469090 - DNA, 49 bp, Homo sapiens
ctggagggcactaccagatggggacccagatgatgtggtaccagttggc

SEQ ID NO: 469091 - DNA, 100 bp, Homo sapiens
tctctgtacccactcaccttgtttgtcccaggactcctctatctcctccaggagtggagtcaacatatcaatggagcaagtcacagtcgtcgatgccagc

SEQ ID NO: 469092 - DNA, 100 bp, Homo sapiens
ccggcggccctcacagcaaccagcaccagatgaaggagcattcctcttgggtattgttgcagcatctggcagtgagactgaggatgaggacagcatggac

SEQ ID NO: 469093 - DNA, 80 bp, Homo sapiens
gggaccacggtcaccgtctcctcagggtggcccagttgaaatccttcccttcctctaccttggaagtgcctaccatgcat

SEQ ID NO: 469094 - DNA, 101 bp, Homo sapiens
acacttggatgatttgctgccgctgacgtttttagatttcatccagacttaattcagtgcacaaatgagatgaatgtgaacatcccacagttggcagacag

SEQ ID NO: 469095 - DNA, 101 bp, Homo sapiens
ggccagctcaaccgcttcgtgcaactctccgggcggccgcacctgccagatcttaccaatatatttgagtccttcctgcctcagttattggcctatcctaa

SEQ ID NO: 469096 - DNA, 104 bp, Homo sapiens
gccaggctggccttcgtacggggaggacgaagcggggcgaagagaggcctctcatttccagttcctccatgacgtggcaagtgaagacaggaatgaaaggaatg

SEQ ID NO: 469097 - DNA, 74 bp, Homo sapiens
gaaagacccaggagaagccgcccaaagaactgttttcggctttgtgagaaaccttaccatcaaacacgatggcc

SEQ ID NO: 469098 - DNA, 93 bp, Homo sapiens
cgaggcaaggagctaaagcagcgtgcgttcagccctgggcctcaggcccagagccagcacgagacatccgctgcgagttctgtggtgagttct

SEQ ID NO: 469099 - DNA, 50 bp, Homo sapiens
caccagtggaagatgatcacatcccagcattagtgaccagaaggatccca

SEQ ID NO: 469100 - DNA, 74 bp, Homo sapiens
tcagcttgttaattcctggctgcagatgattcagtccctcaaggcgttgattgaaaatgcagatgctgtatatg

SEQ ID NO: 469101 - DNA, 98 bp, Homo sapiens
ggagaaaggaagcaggaaaacagcgggccagacagggatgtgcggaggggtaagtagaatgctgacttgctcatcagttttgcacagtggcaattttg

SEQ ID NO: 469102 - DNA, 75 bp, Homo sapiens
gggatgtgaaaactctgttactgaagaacatccatgatagcagtcttctgtaaatcgaacttttcaagaattctc

SEQ ID NO: 469103 - DNA, 75 bp, Homo sapiens
acagaatgtacgaccttgttgctgttgtggttcactgtggaaggtcacaatccaaggtccggctcctccgcgtcc

SEQ ID NO: 469104 - DNA, 100 bp, Homo sapiens
tgccctcacaccagacctacggagggagctggaaattcctgacgttcattgatctggcacctgaatggacagaagaggacctcagccaactgacaagaag

SEQ ID NO: 469105 - DNA, 75 bp, Homo sapiens
ctccatccactcggtgaatgttttccagggacacacggaggactggtgattgcagctggaagtgcccatgaccga

SEQ ID NO: 469106 - DNA, 100 bp, Homo sapiens
gataagcatgccctgaaaaagtatcgtcgagaagcctatcatcgaataccctctaccatctgctttggtcagggtgccgctcgaggatttaaaagcaaca

SEQ ID NO: 469107 - DNA, 101 bp, Homo sapiens
ctcactgcactccatactgaggaggaaaattataatgtggttgcaccaggctgtctttcacaatccagttgcctttccccatcttcctggttctgctcctt

SEQ ID NO: 469108 - DNA, 82 bp, Homo sapiens
ttgtttctctccctctgcccccccttccccacgcaaccccagatccatttacactttacaatgatatcatcaagttgaatcg

SEQ ID NO: 469109 - DNA, 101 bp, Homo sapiens
gacagtggctggcggtgcctggacgtacaacgagaattagaactgcagcgtcagcgtgacttgcataagatcaagcagcttcagcagacagtgagagacct

SEQ ID NO: 469110 - DNA, 97 bp, Homo sapiens
cttcttagtcctcagagctccccagtcccccgagaagtttactgggaaaactgccagactgattcttgctattccaaatcctcttccacgttgacag

SEQ ID NO: 469111 - DNA, 75 bp, Homo sapiens
gaaataacccttgatcctcctcctaattgcagatcttttagagaaatctcgggttgttaaacagccaagaggtga

SEQ ID NO: 469112 - DNA, 100 bp, Homo sapiens
atcgtcttcgcctatgcctgccaggctgctggctataatagatgaatttgagcagaagcttcgggcctgtcataccagaggtttggatggaatcaaggag

SEQ ID NO: 469113 - DNA, 75 bp, Homo sapiens
ccaggctctccagtttttcgtcgagagattcactatggaatcgacaagttggatggcttgaggactggtactaaa

SEQ ID NO: 469114 - DNA, 75 bp, Homo sapiens
ccatttcttcgatcgcagctacgacaagggcctcgcttggtaccgatgttcccgctgcctgtcaccaacgggaag

SEQ ID NO: 469115 - DNA, 75 bp, Homo sapiens
agaaggaggggcttattctgcctgagacacttcctctcactaagaagaagatagtggtgagctggcaaagccaaa

SEQ ID NO: 469116 - DNA, 50 bp, Homo sapiens
gaaatttgcctcgaaaaccaagttaatacaatctgttggaatgacactgg

SEQ ID NO: 469117 - DNA, 100 bp, Homo sapiens
gccaagcgtcctgcccggccgttcctgagtgggaagggcttggtgatctatccgaaaattggagacaagctggacatcatctgcccccgagcagaagcag

SEQ ID NO: 469118 - DNA, 51 bp, Homo sapiens
ctggtgtcacctatcagtaaaaggctagcttgtcactttctgcaaaggttt

SEQ ID NO: 469119 - DNA, 75 bp, Homo sapiens
aagacaaggcgcccaccccacagagcaagttttctgaaacgtggcccagataaaggccactgtgaaacgcaaggt

SEQ ID NO: 469120 - DNA, 83 bp, Homo sapiens
ggtcgaacagttttttctaatggctattcaaggatgaatcctccatgttcttccagtttggcccatcaattgaacagcaagct

SEQ ID NO: 469121 - DNA, 90 bp, Homo sapiens
cccagatacgctgggaaccttccccagccatggcttccctggggcagatcctcttctggaggcttttatcttgagaacatggtgtctgga

SEQ ID NO: 469122 - DNA, 50 bp, Homo sapiens
cggggcctgatgaatgacatcgttctcccgaagatgactcggatacaaaa

SEQ ID NO: 469123 - DNA, 83 bp, Homo sapiens
caaactgtcacagaaagagctgttaacacttcctagataacggcagaaaaatatggctcaggagactaaccagaccccggggc

SEQ ID NO: 469124 - DNA, 74 bp, Homo sapiens
ggagcagccgccggcgcctaagagcctgcctagggtagttaaaagacgagtgaatgctctcaaaaacctgcaag

SEQ ID NO: 469125 - DNA, 83 bp, Homo sapiens
tggccgtgccctggggctgagccctcagaggttgacggatatattcagacgttacgacacggatcaggacggctggattcagg

SEQ ID NO: 469126 - DNA, 75 bp, Homo sapiens
tttcagtatctcctgtgtgttctttcttatgatccaactaaacatccaggagggaaaacccctgatcctaaaatg

SEQ ID NO: 469127 - DNA, 111 bp, Homo sapiens
tgttccaacctgggagaggagctggaggtcatcttctcactctttgacagtaaagagaaccggccaatcaggtaccctcctctgaaatcaaaactctttaattaaagagac

SEQ ID NO: 469128 - DNA, 75 bp, Homo sapiens
caagacttctttgtggctttgctaaaggacaggccctctttggattccagtacgatgcatcagaccataccatgg

SEQ ID NO: 469129 - DNA, 117 bp, Homo sapiens
aaattcttcagctgctcggacagatgaagctccccaaggagctgcaggaggaatgccagctcctgagcaggcctcattggtggaggaggggcaaccacagacccgccaggaagctgc

SEQ ID NO: 469130 - DNA, 100 bp, Homo sapiens
caggagtgaagtcccagggatattctgtgctgacgagatgatgcctattggccagaaggaaagcgtgtggcaatggaggaccgatatcgtgcagactttc

SEQ ID NO: 469131 - DNA, 60 bp, Homo sapiens
cctggaacgtgcgctcagcactgggattttctgtaacagtaacgagtagccagagtactc

SEQ ID NO: 469132 - DNA, 50 bp, Homo sapiens
agaaggacctagcacttcctattggtctctgtggcacattttgtttcccg

SEQ ID NO: 469133 - DNA, 100 bp, Homo sapiens
tccctcacggacagcagcgtccttcctacagcaacttcccactccaggtggccagacgggagttccagaccagtgttgtctcccgggacattgacacagc

SEQ ID NO: 469134 - DNA, 50 bp, Homo sapiens
gctgccaaagccttagacaatactatactggcaattgctggagaagattt

SEQ ID NO: 469135 - DNA, 100 bp, Homo sapiens
ataccactacatgcagcagcttcctgtggatatcttgatattgcagagctgccaggatatcgcagatgaattcagagcacaggagattgatggacaggcc

SEQ ID NO: 469136 - DNA, 77 bp, Homo sapiens
gaagtcagagctgcacaaagggaaagggaacagtggaggccatgtgtcttttggcagtcagtccagatgggaattgg

SEQ ID NO: 469137 - DNA, 78 bp, Homo sapiens
atgtggatacgagcgatgagaagtcggcccaggaagaggttgaagtggatattaagattgtagaaggcatgaaacaaa

SEQ ID NO: 469138 - DNA, 75 bp, Homo sapiens
tctgagttcttgggcacgttcatcttgattgcttcatccctccacccctcatcttcggggctggcatcgactcca

SEQ ID NO: 469139 - DNA, 82 bp, Homo sapiens
caacagcaaaccggggtctccctcccaggacacaggagtcaaggtgaaatgacaatggatgctctgttggctcgattgaaac

SEQ ID NO: 469140 - DNA, 96 bp, Homo sapiens
tgataagcagaggattagaaaagatgctgtgggcccgcaagagaaagcagaggtttccagccaatggattctggtcaactggtggagattggctga

SEQ ID NO: 469141 - DNA, 96 bp, Homo sapiens
tatgacctctctccaaagtctatgtcccggaactcctccattgccagtgatatgttgacagatttgcaatggaattagaacaaagccgaaatttga

SEQ ID NO: 469142 - DNA, 90 bp, Homo sapiens
atttttggtttcttacatgaaaaatcaaaatggtacatttaaggaacttagtgatttggcccgtgaccctccagcacaatgttctgcagg

SEQ ID NO: 469143 - DNA, 93 bp, Homo sapiens
ccaaggtacagtcgccgcgtgcggagcttgttactggttacttggtttacccaaggtccagcctagcccctaggcaccatgtcggacagtgat

SEQ ID NO: 469144 - DNA, 82 bp, Homo sapiens
tttttaaatagctggagtcggggccccatcgagaaatggccgcgtcggcagtgtactaatggtcacttgatgtgcgctggct

SEQ ID NO: 469145 - DNA, 82 bp, Homo sapiens
tctgcaggcttgccgaagaagggagcgtccgtctccaagagagtatgaagagagtgcgtctgtagggcagggaagatggcgg

SEQ ID NO: 469146 - DNA, 83 bp, Homo sapiens
caagcaaagatcttccctgagaacaatgcagatcttcgtgaagactctgactggtaagaccatcaccctcgaggttgagccca

SEQ ID NO: 469147 - DNA, 101 bp, Homo sapiens
gcaagattcgatgtctatatttaagtatctccgctacttcactcgcactatccttgatgctagatgccatggacaatattaccaggcagaaccaattctac

SEQ ID NO: 469148 - DNA, 85 bp, Homo sapiens
ggcctcccgaagtgctgggattacagtccctgctgtccactcccgcgggttttcccacttcctccaagcaagcagcgacttcccc

SEQ ID NO: 469149 - DNA, 100 bp, Homo sapiens
cagatgataggaatcccatctcatttaggtatattgagatcttcagaagtagcaggagtgaaatcaaaggattttatgatccaccaagaagattgctggg

SEQ ID NO: 469150 - DNA, 101 bp, Homo sapiens
ctcatcctcttggcaggatcacagtcgcttcctgtctagtccaagattttcatacgtgaactgtgaaattgggtgaggatgcccccaattccagtgtggtg

SEQ ID NO: 469151 - DNA, 50 bp, Homo sapiens
aagtaagaaaagcatcccgaaggagccttcccagccctctaccccaagag

SEQ ID NO: 469152 - DNA, 78 bp, Homo sapiens
ggcgcgaagaggctggactcggattcgttgcctgagtaattcgccaaaatgacgaacacaaagggaaagaggagaggc

SEQ ID NO: 469153 - DNA, 100 bp, Homo sapiens
ttcccagaagtggaattgcttggtcaaacgatggcccctgagttctgcagcctcgaggaaggcctgccctatctggacatggtgattgcagagacgctga

SEQ ID NO: 469154 - DNA, 98 bp, Homo sapiens
gagctgagcgcctccagcgagaagttgagggagaaaggcgggcccgggaacagcttccacagcgcggcacctgtacctccggggtggcgctggggttg

SEQ ID NO: 469155 - DNA, 75 bp, Homo sapiens
gactgcttggatgagaagcagtgtaagcagtgtgcaaacaagccttcctacagcaacttcccactccaggtggcc

SEQ ID NO: 469156 - DNA, 100 bp, Homo sapiens
gaggggcgggctcctggcaaggcattcgctcctgagcggaatcctgcaaaggctaaaggttggtcttcaggttgtggcagtcaaggctccagggtttggt

SEQ ID NO: 469157 - DNA, 96 bp, Homo sapiens
tctttgctgtcagccacgacaagctcctggccgtgagcgataggtgaggacctgcgggtgcggaggaggagaggcacgggtggctcagagagcagc

SEQ ID NO: 469158 - DNA, 100 bp, Homo sapiens
agtcgagactactggccgaaggggcgtctgcggctctccgccgtccccagccctgcctctccctgggctctgtgttgaagggctccatgccattgttgtg

SEQ ID NO: 469159 - DNA, 83 bp, Homo sapiens
atagaacggtcaaggagattatgtctacgtttacaggctcaggccacagggtcaccacatacatcgcccacccatggaggcgg

SEQ ID NO: 469160 - DNA, 98 bp, Homo sapiens
cttgaaggacgacccgacggtgatcactcagcaaatcctgaaggaacccaaagtggctgcttctgttttgaatccctatgtgaagcgttccattaaag

SEQ ID NO: 469161 - DNA, 82 bp, Homo sapiens
agcttatgcaacatgctcagcaggagcttcatcaacgatatatgtcagatctaaagatgctcccataatactctcagatagt

SEQ ID NO: 469162 - DNA, 97 bp, Homo sapiens
ctggaaggaaaaagatctaaagtcacccggcggccaaaggccagtgactaccaacgtttggaccagaagaggaagaacttgtcgcttttcctaagca

SEQ ID NO: 469163 - DNA, 82 bp, Homo sapiens
cgacaagaggctgagtgaaggccgggggctgccccctccccccagcaggaaatccaaatctcctcccaaagtgcccattgtg

SEQ ID NO: 469164 - DNA, 74 bp, Homo sapiens
gaggatcactcggtgcacctgcttttttctgcaaatcgctgggaacaagtaatacagattctgttcatcttgct

SEQ ID NO: 469165 - DNA, 100 bp, Homo sapiens
ttatctcagatatggcccagactaaggagtccatagttaatcaactccattcgagcgtgagaacagggaatcttgaaacctgtttgagactgttatcttt

SEQ ID NO: 469166 - DNA, 75 bp, Homo sapiens
atggcgggagagaagaagcgcaggcacaggaagctggtgacggcgatgaacgtcaccttcaggccattcagagga

SEQ ID NO: 469167 - DNA, 75 bp, Homo sapiens
acgagtggacctacgaggaacaattcaagcagaccctgcggatcaacgtgtgttactggcgagagatggttcctg

SEQ ID NO: 469168 - DNA, 100 bp, Homo sapiens
ctgtggaaagaagttgcaaaacactggttgcacgtgcattatttaatcacatagacaagtcaggattgaaggatagttctgtcgaagaactcaagaaaag

SEQ ID NO: 469169 - DNA, 99 bp, Homo sapiens
atggagccctgggcgcgggggcggcgtgtcaggtggttgcggagctggtaagcaaaccagtccagctacgggggcccagccagccagcagctgagtggg

SEQ ID NO: 469170 - DNA, 101 bp, Homo sapiens
aaacaattcttcgacatactctccagcttcaaggtttggaaatcccttgtctccaggttgctgggattgacttcttgctcaattgaaacactcattcaatg

SEQ ID NO: 469171 - DNA, 101 bp, Homo sapiens
cgaaccgtcatttccatgggacgagattctgaactcattggtgtcaagaagaattgtaagcagattgaatctgctaaattattacctgatacacccgttca

SEQ ID NO: 469172 - DNA, 98 bp, Homo sapiens
gccgcccgtccccggcacacgcgcagccccggcctctcggcctctgccggagaaacaggacatggatttgattgacatactttggaggcaagatatag

SEQ ID NO: 469173 - DNA, 82 bp, Homo sapiens
ccggaatcgtgtgctgggctggtcccccttgggcactgtgttggcactcactgaaaataacttcgatgacaccattgcagaa

SEQ ID NO: 469174 - DNA, 75 bp, Homo sapiens
tctgctaatccacccaaaatgtgcctggtgctccaaagagatcatggggaatttcagaggtcatgccctccctgg

SEQ ID NO: 469175 - DNA, 75 bp, Homo sapiens
gtataagtatttggctcttaatatgcattatgtaggtcatggcaaaaccccaaaagatgccgcgtcagttcgagc

SEQ ID NO: 469176 - DNA, 75 bp, Homo sapiens
catggggctgtttggaaagacccaggagaagccgcccaaagaactggttgcaacaaggacagtgtcagagcaggc

SEQ ID NO: 469177 - DNA, 75 bp, Homo sapiens
tgctttgtgatcgaaaccctgaccggatcccataaacactgtcgcacaggtgcagcagtgatcaatggctctcag

SEQ ID NO: 469178 - DNA, 51 bp, Homo sapiens
agatagacagctcaaatgaattggtgttggtgtctgtccagtcccttatat

SEQ ID NO: 469179 - DNA, 74 bp, Homo sapiens
ttttgcaagggcgaggtcagccccaaactaccggagccagcaccgctctttgaccttgccatgcttgccttaga

SEQ ID NO: 469180 - DNA, 90 bp, Homo sapiens
tcggggctgtgatagaccaagggctgatcacgcggcaccacctcaagaagcgggccttgtctccttcagatggagcccgtgaactacgaa

SEQ ID NO: 469181 - DNA, 90 bp, Homo sapiens
tgcgcgtggaacggctgcttttggaaggtctcggcgcggaagatggccggcggcgtggacggccccatcgggatcccgttccccgaccac

SEQ ID NO: 469182 - DNA, 142 bp, Homo sapiens
tcgcgggtagaggcgggcggcgcgcggcggcggcgctcggcgatggtaggcgtccctggagcggccgccttccagcgctgctgacttgagtaaaccaatagataaaaggatatacaaaggaacacagcctacttgtcatgac

SEQ ID NO: 469183 - DNA, 50 bp, Homo sapiens
aaaagccccgcctctgccttcggataggctgatgagatcgagaagatttt

SEQ ID NO: 469184 - DNA, 90 bp, Homo sapiens
acggtgccctttccacccacctgggctgaggaccctgggccagcctatggagatggctttgtccagggatctgaaaccactttgcagtcg

SEQ ID NO: 469185 - DNA, 101 bp, Homo sapiens
ggcgcatcactcccagctgcgcaaagcttgcgaggtggcgttaggtctgctgagaacagacccagtccctgaggaaggagaagatgttgctgccacgatca

SEQ ID NO: 469186 - DNA, 97 bp, Homo sapiens
aaagaagcagtatctatgcccatcgtttcccccaagaaagagcagctgagtccttgcatcttgtggcagctggtgtgcccagcactgagtctgtagg

SEQ ID NO: 469187 - DNA, 75 bp, Homo sapiens
aggctataaatgcagcactggctcagagggtcaggaacagagtcaatttcaggtggatgatgctggcaaaataga

SEQ ID NO: 469188 - DNA, 49 bp, Homo sapiens
tccagagttttcaagaaaattcaaggtgccagtgggatgggccggtacc

SEQ ID NO: 469189 - DNA, 92 bp, Homo sapiens
gttcaagaaaaaggagacttcgccaccaagggagaaaaggacatggatttgattgacatactttggaggcaagatatagatcttggagtaag

SEQ ID NO: 469190 - DNA, 76 bp, Homo sapiens
cagaagctctgaatcgtgttcctgaatgaaagaagtcagcattgatgttgatgggacaatgacagtggactggaat

SEQ ID NO: 469191 - DNA, 73 bp, Homo sapiens
tcggtcttgggttcccggagagattgccacgatctcaccaggcataagctcctgtgaatatactttaaacacc

SEQ ID NO: 469192 - DNA, 74 bp, Homo sapiens
caccacggccagagggggcccagggaaggctatgtccaaactgggtcttcggcaggttacaggagttactagag

SEQ ID NO: 469193 - DNA, 75 bp, Homo sapiens
tccgcagacaccgcaaagcgatctggggacgcggggcgggccccccagcgtgccaagttggaggccgccattgcc

SEQ ID NO: 469194 - DNA, 98 bp, Homo sapiens
tccagaggacataccacctccaggatcaggatgcagagcaaatgaagaaacacccctgccgccagtgtgacaagtctttcagctcgtcccacagcctg

SEQ ID NO: 469195 - DNA, 75 bp, Homo sapiens
ggacatgcagccgtttggcatggtggcatccttagctgggcctggagggcaagtggaaatagaacagaacttcct

SEQ ID NO: 469196 - DNA, 90 bp, Homo sapiens
ccatgtcagacgcagccgtagacaccagctccgaaatcaccaccaagctgctctgttaaaagcgaaaatgaaacaattgcctgcggcaac

SEQ ID NO: 469197 - DNA, 88 bp, Homo sapiens
gattttgtcttccatggggaatgatggtggagctatatacctttctggaattgacatgatacatggcacacccgtactagacatcaag

SEQ ID NO: 469198 - DNA, 99 bp, Homo sapiens
cttggtgatattcgccattgaaatagctgcggccatctggggatattcccacaaggatgaggatctgcaatcagaactattgaacttctccattcagac

SEQ ID NO: 469199 - DNA, 74 bp, Homo sapiens
cgctcccttgtcacgcctcgggaagcgcgcacctgccaagcaggttagctcccagcgatgccagatgggatcag

SEQ ID NO: 469200 - DNA, 80 bp, Homo sapiens
ctgctgggcctcttcctccccgcgctctggcgtagagggggatatgagactttctactcggaatatcctgagtgttgcgt

SEQ ID NO: 469201 - DNA, 76 bp, Homo sapiens
gttgtcagcacttggaatacaagatggttgccgggtcatgttaattgggaaaaagctttgtgtccctggtgatgtt

SEQ ID NO: 469202 - DNA, 88 bp, Homo sapiens
cggccggtgccagcacctttcggcttctgagacggcggcagcagcggcattcagactttgaatcctcctcttccaccaccccctctcc

SEQ ID NO: 469203 - DNA, 82 bp, Homo sapiens
cgggatctcggtgctgcagacggcgagacctcctgcacagccctggactttgtctcacaagatgaaatgttgacgcccctgg

SEQ ID NO: 469204 - DNA, 146 bp, Homo sapiens
tcaccctctgccgagtctcaatatctgtcttcggtggactccttcggcagtccacccaccgccgccgcctcccaggtcacgccgccagcgctgctcctcaggccagctccccaccggactacacaatggcctgggcagaatattac

SEQ ID NO: 469205 - DNA, 75 bp, Homo sapiens
catcagcatatgcatgaccgagatgacctctatgctgagcagattgcctcggtctggcatggtaccctctcgaag

SEQ ID NO: 469206 - DNA, 82 bp, Homo sapiens
ctagccgtctgcaccagcgacttcggtgagaagccctaccactgcaactgggacggctgcggctggaagtttgcgcgctcag

SEQ ID NO: 469207 - DNA, 75 bp, Homo sapiens
aatcgccagctcccggcactgctacctctgacccaaagcagtttgcctgagaatacagatcaacccacagaacaa

SEQ ID NO: 469208 - DNA, 100 bp, Homo sapiens
cagatagcaaacttgctgacagatgaatcacagctttgcccacctgtaatgaggatacactgctggatcccagctattgacctgaaaagtggttctggaa

SEQ ID NO: 469209 - DNA, 100 bp, Homo sapiens
tgaaaatccgcagcaggaagcttgggaacctcaacctactggcttactcgcatccagtcttttctctactgcaatgagaacggcctcctaggcagctttt

SEQ ID NO: 469210 - DNA, 82 bp, Homo sapiens
gggaatgaagcgggcgctgggcagcaattctgtggtgttcttggtcacacatttatggagtttctgaagggcagtggagatt

SEQ ID NO: 469211 - DNA, 50 bp, Homo sapiens
aagaacgggaacaaaactctgcaaagccttctagacaagctcagtggaat

SEQ ID NO: 469212 - DNA, 98 bp, Homo sapiens
ttctcctcattgaagctatgcagtatttctttggcatcactgcagctagtaatttgccttctggattagagtgataatcttcaaaatgaagactttgg

SEQ ID NO: 469213 - DNA, 100 bp, Homo sapiens
agacagtcctcgtcagcactgactttcagctatggaatcgtttcttaaacaattaggtctacatcctaactggcaattcgttgatgtatatggaatggat

SEQ ID NO: 469214 - DNA, 74 bp, Homo sapiens
ccgttcctggagattctgattgagttgctctaggtcgtaaccagcctttgaaaaaggagaaaccaaaatggaaa

SEQ ID NO: 469215 - DNA, 83 bp, Homo sapiens
ttcagtatctttacataagaaattcattgctgattgctacacaagattagaagccgtttgagcaaggaagacattgaacgtat

SEQ ID NO: 469216 - DNA, 83 bp, Homo sapiens
cgatccagcctgcggagcctgtggggcaggaaactggagcacccatcctaactgatgatgttagcctgcaggtgttcatggac

SEQ ID NO: 469217 - DNA, 87 bp, Homo sapiens
ttcatcctataataccagaacagagcacgtttaaagtactttcaacaaagggtcagttaaatgaaagcatggaccatgggggagttg

SEQ ID NO: 469218 - DNA, 90 bp, Homo sapiens
gtccggctgctggatggaggggattttgtcagcttgtcgtcaagatgaagactggcccatttgcagagcactccaaccagctgtggaaca

SEQ ID NO: 469219 - DNA, 100 bp, Homo sapiens
ctcgggtcgttgtggtgcgctgtcttcccgcttgcgtcagggacctgcccgactcagtgaagatgggtgtgaacctgacacgcagcaacaaggagacggt

SEQ ID NO: 469220 - DNA, 83 bp, Homo sapiens
cgaaaggaagcaagcagttcagaagagccaaggaataaacatgcaatgaacccaaaagggtccaataaaacactggctgattc

SEQ ID NO: 469221 - DNA, 75 bp, Homo sapiens
ccgtgagatgggttttagctgccgccggagtcgagtttggcaatgaggagcagcagctggcgtgggccaagcggg

SEQ ID NO: 469222 - DNA, 90 bp, Homo sapiens
gcacagtcaaggaagaagtgggctgaagaatttaatgatgaaactaatgtgagattttgccagcccttttgctgttccagtggatctcag

SEQ ID NO: 469223 - DNA, 113 bp, Homo sapiens
ctttgctgacatggaattgctaagaaaagtagtagtccctgggatccgtatgtccattaaacttcatcagatggcccactgcgtgaccttggttcagctgtccatttcctgtg

SEQ ID NO: 469224 - DNA, 101 bp, Homo sapiens
cactcgggctgggtcaggagcggctgcccgaggtccagaggaagtgtgtggacagcgcggccttcctggccgcatgtttcgccaagggatgcatgacttga

SEQ ID NO: 469225 - DNA, 88 bp, Homo sapiens
ctgattcaagactcctctgctttggactgaagacccttcttatgactcagtcagaagaggagcttggggcaataacatgaattctggc

SEQ ID NO: 469226 - DNA, 100 bp, Homo sapiens
cacagaggaaactctgcattctcgcttcctggaggccttcccttcttcttggtggtgttcttgagtaagataatctggactggcccccgtctttgcttcc

SEQ ID NO: 469227 - DNA, 88 bp, Homo sapiens
atgttttctgtctacgatggacatggagggtctcctatggacagaagtgcgggcaaggagctttgttcctccccgatgtcaccctccc

SEQ ID NO: 469228 - DNA, 83 bp, Homo sapiens
tgagggagtcatatttggagaaccaaggtattagtgctttggttgaaatacctaagaactgtgttgtggcagcagttggcaaa

SEQ ID NO: 469229 - DNA, 75 bp, Homo sapiens
ttttgcaacgccataggcttccagcgactgctggtgatgtttctgagcgagtgtcttggtgggggcgcccaaagc

SEQ ID NO: 469230 - DNA, 90 bp, Homo sapiens
cggttatactctgcaaggtggtgttccagtggcaaacagctgtataaactcttgtaaacaggaaaatttccagaccaaccaattcacatc

SEQ ID NO: 469231 - DNA, 74 bp, Homo sapiens
cttcgggaggccggacgcctgcgggccgagagggccgaaaaggctgcagataatgctcggaatatttttcaatg

SEQ ID NO: 469232 - DNA, 95 bp, Homo sapiens
ttcgtagcacgcttgcttgcatcctggaatattctcaaccagacagaggaccccagtaagtgcagtcctcggttttgggaggagctctttctcat

SEQ ID NO: 469233 - DNA, 96 bp, Homo sapiens
caactgggagaatgtaactgaaagatacatggcttgcaaaaagtaaaccacgatcgttatgctgaaatcctaatgtacctggctagctggtggtga

SEQ ID NO: 469234 - DNA, 74 bp, Homo sapiens
acttgagctgaaagcgaaaaactatgctgaccagaatgtaaaaaaagattggtctgaccatgctctctggtggg

SEQ ID NO: 469235 - DNA, 101 bp, Homo sapiens
ccgcagccgcagaggaggagcgcagcccggcctcgacatgcgtcgggatgtccaggaaatttttcgcatgaccccccacgagaagcaggtcatgatgttca

SEQ ID NO: 469236 - DNA, 90 bp, Homo sapiens
cacttttcccgtgtcgtttgagtgcatcttctcaacaaccctaggaggctgctttgaatgctgcatcaagtgtctgggaggagtccccta

SEQ ID NO: 469237 - DNA, 100 bp, Homo sapiens
gagtcatcggacgccagaatctggagctgcggcgccaagatgagtggagaggagaacccagccagcaagcccacgccggtgcaggacgtacagggcgacg

SEQ ID NO: 469238 - DNA, 100 bp, Homo sapiens
attagacaacagagtcattgatcttaggtatttgactacagtcattccttatgagaaaaaaaacggaccaccgtctgttgaagatcttcaaatattaaca

SEQ ID NO: 469239 - DNA, 74 bp, Homo sapiens
gcctgcagcgggagctggacggcgagcgcgagcggcgcgagaaagggttcggtccgagcccggtgggaggctcc

SEQ ID NO: 469240 - DNA, 75 bp, Homo sapiens
atgagatgtctgaagtcctccgggacttcccagagctgctggaacccaatgtgaatattggactggcggagcctt

SEQ ID NO: 469241 - DNA, 100 bp, Homo sapiens
gggtccaacagcaggcctatggaatgggtgaaaatcctatttataagagtgccgtaacaactgtggtcaatccgaagtatgagggaaaatgagtactgcc

SEQ ID NO: 469242 - DNA, 75 bp, Homo sapiens
gaatgaagagctgccagatcccacagttgactaatctccttcagaatcaagcagtgaaaggaaaagttgctggag

SEQ ID NO: 469243 - DNA, 80 bp, Homo sapiens
gcaaaagcaaagaccagaaagagtgtctcatcttcttcaagataacttgccaaaatatggagcagcatattgtatgggac

SEQ ID NO: 469244 - DNA, 100 bp, Homo sapiens
tcccaagtggctgggattacaggtggctgccacactcaacaatttggctgtgctctatggcaaaaggggcaagtacaaggaggcagagcctctgtgccag

SEQ ID NO: 469245 - DNA, 75 bp, Homo sapiens
cgaggagaagtaccaggaggcgttggccaagggaatgaatctgaagtctgctgcagtaaaacacagaaggcttta

SEQ ID NO: 469246 - DNA, 100 bp, Homo sapiens
tgcattttgcccattcggctgtggatagagaagcaggaagagcactggacttggagtcaggggaagatggtgaaaggaatgggaggtgctatggatttag

SEQ ID NO: 469247 - DNA, 100 bp, Homo sapiens
cccggcaaggaaacttcgcaggctggttgcttatcaagtgtcccacaaatgaaaaaaatttctacatcttacgaggaaagacggaagcaagctaccgcta

SEQ ID NO: 469248 - DNA, 100 bp, Homo sapiens
gctgctggactacaaggacgagttctcgggcagaggcgacctccccgcgttccatgcgcacagggacaggggtgacgcatccaaagaagacattgacact

SEQ ID NO: 469249 - DNA, 74 bp, Homo sapiens
cagctggctctggaggacgccaaagaaggctacagaattctgcttggtcagaatcgtgatggcattgtgttcag

SEQ ID NO: 469250 - DNA, 82 bp, Homo sapiens
tggaggcggcgggatggaggcggcggccggtctggcggcttctctgttgacaactcagctggttccacaccctggcaattgt

SEQ ID NO: 469251 - DNA, 100 bp, Homo sapiens
cgctgagcctcctcacacggttcgtcgtctcgggttcgagcccagtgggcttagccactcgccatggactcccagaaaatatgcacccaatgtccaggga

SEQ ID NO: 469252 - DNA, 74 bp, Homo sapiens
tcctgttctgatagcgtggaagaattcaattcgccacaatctctctctgaatcgttatttcatcaaagtgccgc

SEQ ID NO: 469253 - DNA, 71 bp, Homo sapiens
ctggtgtaccaggcgaagctggccgagcaggctgagcgatacgacgcgggtccatatggaatatttgctgg

SEQ ID NO: 469254 - DNA, 100 bp, Homo sapiens
caagttcaagaggttgtgtgcatcaacagtgatgggaaatcctcattgacgattcaatttgttgaaggccaatttgtggactcctacgatccaaccatag

SEQ ID NO: 469255 - DNA, 101 bp, Homo sapiens
aataacacaacaagtttagggagtccatggccagaaaacttttgggcatgcatatgcgctagaacttctatttgatcagttgcatgaaggagctaaagctc

SEQ ID NO: 469256 - DNA, 100 bp, Homo sapiens
cgggacaaatggacctccgtgaaggcgtccgtcctgcgcatcgcagtgaaaggtgtagcagtcactcggcctacacccacagcatcgaccttgtgaaccc

SEQ ID NO: 469257 - DNA, 74 bp, Homo sapiens
gtccgagtcccaggtcaagagcctctgcgagaagacaatgcagatcttcgtgaagactctgactggtaagacca

SEQ ID NO: 469258 - DNA, 101 bp, Homo sapiens
accagttagtggtgctcaacgtgtacgacatgctgcatatctatgtgagactgaattttcctcttagacttcagctaaaactgtgtattgcatcaggctga

SEQ ID NO: 469259 - DNA, 87 bp, Homo sapiens
aagagctgcacaaccaagaggtgcaaaaacgaaagcaactggagctcagatctccgcaaatgacttcattgccaagaagagaagaaa

SEQ ID NO: 469260 - DNA, 100 bp, Homo sapiens
ggagccggcgcccccgccctgtaggctgtattcatcaccaaagaaaaaacttacaccaatgcagaaatcggttagtccattagtttggtgcaggcaagtt

SEQ ID NO: 469261 - DNA, 83 bp, Homo sapiens
ctcacgcgggtgcggcccgactacacggcgcaggaactgtggctgcaccatctgtcttcatcttcccgccatctgatgagcag

SEQ ID NO: 469262 - DNA, 75 bp, Homo sapiens
agccaccatgtcaccagatatgaacacatgtacatctgatcagttccagctcagaattctgcaaatgcagatttt

SEQ ID NO: 469263 - DNA, 100 bp, Homo sapiens
gggagctggtggagccaaggaaacaggatgctgatagtctccagcgggcctggactgtgggctggtgtgtggaactgcctatcacatggaaagaatttgc

SEQ ID NO: 469264 - DNA, 100 bp, Homo sapiens
caaggcaagaccgaattcagaaggatatcgacgtcgtgatccagaagtccagagctgaggactgcctgtttgcagataccccatgtttccccatcactcg

SEQ ID NO: 469265 - DNA, 116 bp, Homo sapiens
gggagcacggatccaagaaggagtggagtctttggctggctatgcagacatctttctgacgtccatgaccctgcagtggcacttgtatgagatggcacgcaacctgaaggtgcagg

SEQ ID NO: 469266 - DNA, 80 bp, Homo sapiens
gggagggacgccctctgccttcgaccggatcctggactttccttatcccagttgattgtgcagaatacactgcctgtcgc

SEQ ID NO: 469267 - DNA, 51 bp, Homo sapiens
gagtgcttaaggaattgcctgatcaaggaggcacaggtgtactatggtggc

SEQ ID NO: 469268 - DNA, 101 bp, Homo sapiens
ggatcccaggtgctgcggttccaggctatgtatgtcaaaaaggatgttcctttgtggcaaaaacatggacggaacttctgaaacatgtgagagaaacccat

SEQ ID NO: 469269 - DNA, 75 bp, Homo sapiens
gcttatgccaagaggaacagcagtgtaaatgactcagctccaaagacaacaggccctccctctgccctcccgtct

SEQ ID NO: 469270 - DNA, 100 bp, Homo sapiens
cagaaccaaatgctgaccctcgaaaaaaagatggagccctgcatatgattggctctttagctgaaatacttctgaagaatggtcagtctgtagacgttga

SEQ ID NO: 469271 - DNA, 100 bp, Homo sapiens
ccggtccaaggcggtgcgctgggggccggggcgcgtcgcaggtagatggcacaaaccttcagggttttactaatcagcaagcagtagaggtattgcgaca

SEQ ID NO: 469272 - DNA, 74 bp, Homo sapiens
taccaaggacagcttttttcctgcaaggttaaagatcgaggtccggaagccactaggagattttttaattggtt

SEQ ID NO: 469273 - DNA, 82 bp, Homo sapiens
cactgcccggctgccttccacctccagtgctgacgctgaccggaaaggagattgagattgacattgaacctacagacaaggt

SEQ ID NO: 469274 - DNA, 100 bp, Homo sapiens
ctacgaaaaagccctggtggagctgaaggttgcaggaagccctcaatctagaagagtagaggtccaaaggtgccatatgttcacactgtgagcctgcaag

SEQ ID NO: 469275 - DNA, 90 bp, Homo sapiens
tcgtctcttacgtctgcggaagtgcagctgcctcagttcttagcgcagctagaaaccagtgcctgaaagaaactccaattaaaataccag

SEQ ID NO: 469276 - DNA, 50 bp, Homo sapiens
gccgccgacccgccgagcaaaatgggtagaatccgccaagctttgagaga

SEQ ID NO: 469277 - DNA, 74 bp, Homo sapiens
gcaaacctccaaggggcctgtatgtttatggagatgttgttgtattccctgaatgactataaaccacccatttc

SEQ ID NO: 469278 - DNA, 102 bp, Homo sapiens
gttgttcacaggcttaactccaagactgtgttcgggagtccttggaactgtggtccatggtaaagttttacaggtcaccaggcagcagggattggaaaccag

SEQ ID NO: 469279 - DNA, 88 bp, Homo sapiens
aatttaatggcaagtgagatgattgcactcaacagatctttaccagatgttaggttagaagggttcgatacaagaggctgttttccta

SEQ ID NO: 469280 - DNA, 82 bp, Homo sapiens
gcttttgtgctcattttggttctcagtttctacgagctggtgtcagatcatggaagggaagtggttgctgtgtatgttactg

SEQ ID NO: 469281 - DNA, 83 bp, Homo sapiens
cttcaagctgctcatcatcggcgacagcgaacactctgctccagccaaggtggtgagggcagctgttcctaaacagcgcaaag

SEQ ID NO: 469282 - DNA, 82 bp, Homo sapiens
gtctcacctgaggtgaaccttcgaccttggacttctcagcctccagaatgaccagcatgttttggaaatttgatcttcactc

SEQ ID NO: 469283 - DNA, 100 bp, Homo sapiens
gcctcagccacccaagaagctgggaccacagctgtgaattcctttggacaattgatgatatttatcattgtgcccagtttctacaaataaaagatgggtg

SEQ ID NO: 469284 - DNA, 83 bp, Homo sapiens
ctggagtttgtgacgctgtgatgaacatggtccaagacaattcctgggaaagttcagttcttctcaagtgagggttctgacac

SEQ ID NO: 469285 - DNA, 90 bp, Homo sapiens
gtcccccgggcccggcagcgtcgctggagctgtggctcatagtggccacagaagaagtagttactgcagaatctgtggatggtgccattc

SEQ ID NO: 469286 - DNA, 100 bp, Homo sapiens
gagtaaagctgctggacaacaccatggaaatatttgacattgaggaacaacttgaaacagccaggaagtttctatattatgaaatgggctataaatctcg

SEQ ID NO: 469287 - DNA, 100 bp, Homo sapiens
gacagacagacaagacaaatgtgcccttggctgggatcaccaggagaaattgcagctgcatgaatcccaaaaagctgctggaagtgaacaagcagtggga

SEQ ID NO: 469288 - DNA, 102 bp, Homo sapiens
ctcacggttttctgaatggaaatcaggaacaaactgctcatcactgtctggtacctgagctgcagagagaagtcagagagacggggtctcactatgttgccc

SEQ ID NO: 469289 - DNA, 75 bp, Homo sapiens
ccggggcattattcatttctccagctctgtaagcactatcctttgtactccctcaacgtggcctccatgtggttg

SEQ ID NO: 469290 - DNA, 75 bp, Homo sapiens
gaagtgaggccaatgaagaactgcggcagaaatttgaggttcctggtagagttacacagttgtgccgccagtata

SEQ ID NO: 469291 - DNA, 82 bp, Homo sapiens
gggggccttcagacagttttggggtggtctttctcagatggtcatccagactcagagctctctctacagagaggaaattctc

SEQ ID NO: 469292 - DNA, 100 bp, Homo sapiens
gcggtgtcgaggctctccctgcacagcatcgcgcagaacaaagggatcagcctcttcgagcactactgctactcccggggcggcatgcgccacagctcct

SEQ ID NO: 469293 - DNA, 75 bp, Homo sapiens
acataggagaacagggctactcctccacaaactccagtgacagcagcataagcttaaatcgtctcagaaggacaa

SEQ ID NO: 469294 - DNA, 50 bp, Homo sapiens
ctgccacaatgggacatgtgcaaggattcctcaccatcggggctgatctc

SEQ ID NO: 469295 - DNA, 75 bp, Homo sapiens
tggttacctatgtacctgttaccactttcaaaaaagaacatgagctgcctgtggacatggaaaccatcaacctgg

SEQ ID NO: 469296 - DNA, 75 bp, Homo sapiens
cttcgccctggtgatcgcgctcgttcccgtcggccggggccctgggaggagcggggacactgaggacctctctcc

SEQ ID NO: 469297 - DNA, 100 bp, Homo sapiens
agagaatctgctacaactgctgactgatgatgaagcctggaatggattcgtggctgctgctgaactgcccaggctgggcttcatcaccaggcctcctcac

SEQ ID NO: 469298 - DNA, 50 bp, Homo sapiens
cagccattgaacgggagtatgggcagatacttccaggctttggtgaataa

SEQ ID NO: 469299 - DNA, 100 bp, Homo sapiens
accaaatggataaatgctcgattttcaaagatgatgaaacatgcttggaataattataaaggttatgcctggggattaaatgaactcaaacctatatcaa

SEQ ID NO: 469300 - DNA, 98 bp, Homo sapiens
ctccagtatgttgccatctctaacctaccagctgccactttccaggatgaagtgaagctgccggccaaactgagcatcagcaaatcgctgaaagagtc

SEQ ID NO: 469301 - DNA, 74 bp, Homo sapiens
acttccggtaccttgctgaagttgcgtgtggtgatgatcgaaaacgcatttcagaagatggacacaaagaagaa

SEQ ID NO: 469302 - DNA, 75 bp, Homo sapiens
ttggtttaatgaacacacacattccagagaactgtggaggaatttcagcaatatgcagcagcccttcaagctgga

SEQ ID NO: 469303 - DNA, 100 bp, Homo sapiens
aaatccaaaaagccgagtagagaagttatcagtgtactaatggtcacttgatgtgcgctggctgttttatccacctactagcagatgcccggctgaagga

SEQ ID NO: 469304 - DNA, 100 bp, Homo sapiens
gccaggcgtggaggaagaggcattgaggactttccttacctgtttttccagctcacccactgccagcagagggtaccgtgagggttttctctggaagcgt

SEQ ID NO: 469305 - DNA, 98 bp, Homo sapiens
actccacctgcctctgcgacccgggctgggtgggggaccagtgccagcactgccagggcaggttcaagtctgtgtatgatgaccaaccaaatgcgcac

SEQ ID NO: 469306 - DNA, 98 bp, Homo sapiens
gaactcaaaacagacccatctttggatcttcattcattaagcagtgcagaaacacaggtatgatctcgtgaaatcttgagagaaactgaatgacgaat

SEQ ID NO: 469307 - DNA, 75 bp, Homo sapiens
atttggcttcaatgtcatattttgggaaactaaatatattttgccaactttggaaaaagaattattcttggcaga

SEQ ID NO: 469308 - DNA, 85 bp, Homo sapiens
gcagaggggtccatacggcgttgttctggagtgtgaacatggctacgcctcttcattcccgtccatgccgagcccccgactgcag

SEQ ID NO: 469309 - DNA, 75 bp, Homo sapiens
ccgtggcttcggaggcaagtttggtgtccagatggacagagttgatcagctgctggagccagttctgcttctcgg

SEQ ID NO: 469310 - DNA, 100 bp, Homo sapiens
gctgtgcaacatcgaggccgacacctactggtgcatgagcaagctgctggatggcattcaggatgaagccccacccgcccttcaggatgccagccttggc

SEQ ID NO: 469311 - DNA, 75 bp, Homo sapiens
gaacatttgtagcattgatttcccggatctggtaacatggcaaaagatgttacacttccaggggctccccactca

SEQ ID NO: 469312 - DNA, 82 bp, Homo sapiens
ggcggttcttgccggaagcggagagcggctgatcgcagtccggagcccgtgatgctgatgagcgagagaagtggatccatgc

SEQ ID NO: 469313 - DNA, 99 bp, Homo sapiens
cgcggcatcctcagcatggccaactccgggcccaacagcaacaggtctcaattctggccttggtcgcacgggcactctgatagcctgctacatcatgaa

SEQ ID NO: 469314 - DNA, 82 bp, Homo sapiens
ccttgggctacgcgtatgtgaacttccagcagccggcggacggtactggctgtgatcgaacttctcaaccctcagagactta

SEQ ID NO: 469315 - DNA, 75 bp, Homo sapiens
ccagagtccgcggccggggcgcgggaggccaggtcagagcagcccaccatgggatggggagggggtggaggctgc

SEQ ID NO: 469316 - DNA, 100 bp, Homo sapiens
gtcgtcctggcctatgagcctgtgtgggccattggtactggcaagactgcaacaccccaacaggcccttagccgacagcgagaaactgcctattcagaaa

SEQ ID NO: 469317 - DNA, 109 bp, Homo sapiens
ttgctcttggtgaattttcaacattgaattcaaagttgaaaagcggtaactctgctgctgtggaaaaggctccaagtagctcctctaactgtcctccatctgcaccaac

SEQ ID NO: 469318 - DNA, 100 bp, Homo sapiens
cacgagctgccctgccctggaagtaatcttactgccaggaactcctgccaccgccaccggctcccatggcccacatacccagtgggggtgccccagcagc

SEQ ID NO: 469319 - DNA, 98 bp, Homo sapiens
tggtaattaccatcaatactatggaatgcattttgaaacttaaggatgggatacaggttatcaatactctggctgaccatcatcatcgtgggactgac

SEQ ID NO: 469320 - DNA, 96 bp, Homo sapiens
ggaactttgggtcctgaatcttctgggagctgaggaaccagatatcttgaaaagctgccagaaagcccgagctacactggaaatcctcatccctga

SEQ ID NO: 469321 - DNA, 100 bp, Homo sapiens
atggtgaatgtatcgggccaaacaagtgcaagtgtcatcctggttatgctggaaaaacctgtaatcaagttctgagccatctgaagatgaagagtcccaa

SEQ ID NO: 469322 - DNA, 55 bp, Homo sapiens
ggccgaatcttccttcaggatatcaagaatgagtccctggaacgccagatgcgtg

SEQ ID NO: 469323 - DNA, 83 bp, Homo sapiens
ctgcagtcggcactgctactgcgaagacagctggcaggagggtgaggacaaaatcttcttaatcaacaagcttcactccatct

SEQ ID NO: 469324 - DNA, 100 bp, Homo sapiens
agatcgatgcttttcattatatccagctgggaactgtctacagcaaaactggatcacaagtctttcggtcggagaactggaaggtctgggcagagtcgag

SEQ ID NO: 469325 - DNA, 98 bp, Homo sapiens
agccatcaggtaggctgcgttgaggatctttgctcttccatccgcctttgatcgtcttcctcttcagccatccaggttcatgaagatttgcccgtttt

SEQ ID NO: 469326 - DNA, 100 bp, Homo sapiens
gggaccggcgtgggagcgacgccagcgcctcaacagctagagaccgttggatggcagcttaaccttcagatggctcactctgctcaagcaaaactaaaat

SEQ ID NO: 469327 - DNA, 83 bp, Homo sapiens
ctgtacttgagcagtcacctggcacagggggatatgagactttctactcggaatatcctgagtgttgcgtggatgtaaaaccc

SEQ ID NO: 469328 - DNA, 100 bp, Homo sapiens
tcagtactcaaactcattgaaaatgaatcagattatttggccttatggaactggtgagttccagaaagctgagtctgatctggattacattcaatacagg

SEQ ID NO: 469329 - DNA, 51 bp, Homo sapiens
ccaacggcgaggactgcctcaaccagatcccagatgcagtgactggttact

SEQ ID NO: 469330 - DNA, 100 bp, Homo sapiens
agggcacgccggggcccgccgtcaggtggaagcgacccaaggcctccggtgtggctgtctctgatggtgtcatcaaggtgttcaacgacatgaaggtgcg

SEQ ID NO: 469331 - DNA, 99 bp, Homo sapiens
ggccccggagctgcctggaggcggccgcactcggtactatactggcaattgctggagaagattttgcaattgttgcttctgatactcgattgagtgaag

SEQ ID NO: 469332 - DNA, 87 bp, Homo sapiens
agactttggttggtggaggctgtggcaatggaacaggcttgagaaacaggccaatatacccagtagaagaattagaagaagaaagcg

SEQ ID NO: 469333 - DNA, 100 bp, Homo sapiens
atcttcctgacccgcttcaagaagcctgctgagttcaccacagtgctttgagtacccgaatttcatccgagtggtcatcacagtccccgaggtgatgatg

SEQ ID NO: 469334 - DNA, 75 bp, Homo sapiens
catgacagctgagttccttttggaggatccgtcttcaggcagacctgcctagagctggaacgttacctccagagc

SEQ ID NO: 469335 - DNA, 75 bp, Homo sapiens
aattggtgtaaaatctgaaggagaaatgcctgaggaagtgcaccatggagaggaggaggtggagacttttgcctt

SEQ ID NO: 469336 - DNA, 80 bp, Homo sapiens
agctttctggatccagttcagaggattcagagaagttaccggtattgtaagaacaagccgtacccaaagtctcgcttctg

SEQ ID NO: 469337 - DNA, 100 bp, Homo sapiens
gaaaggcgacaaaggtgatcctggtatttcaagcattggtcttccaggtcttcctggtccaaagaaccccatgcatcccagctcaaggtggtcagagcta

SEQ ID NO: 469338 - DNA, 76 bp, Homo sapiens
cagccatgagcggcggcgtgtacgggggaggtagtagattccatggatgcattagataaagttgtccaggaaagag

SEQ ID NO: 469339 - DNA, 75 bp, Homo sapiens
cctgaagcctcaaagtttcatggtggagtctttcattttggatcaggatgatttggaaaatccaatgctggaaac

SEQ ID NO: 469340 - DNA, 82 bp, Homo sapiens
gaagctggccgagcaggctgagcgatacgacggccggacgacccccgcgggagccggggcccagaaacccgcccgggcagcg

SEQ ID NO: 469341 - DNA, 80 bp, Homo sapiens
aagaacaagaagctccggaattctgctatgaaacccacgtagtcgaacaccgtgatgcttctcctgcagggcgtgtgatg

SEQ ID NO: 469342 - DNA, 98 bp, Homo sapiens
tagtctgctgctgtgaaggagatactgaaggagcaggaaaaccggaagggcctgatagccgccatctgtgcagaagactgtgcagtctttgtaactga

SEQ ID NO: 469343 - DNA, 75 bp, Homo sapiens
caagagaatgtgtcagccgatgcaccgagtccagcccaggaaaatggagagatggccgccctgctcccccaatga

SEQ ID NO: 469344 - DNA, 90 bp, Homo sapiens
ttttaactttcattgtcttttccgcccgcttcgatcgcctcgcgccggctgctctttccggggagctgcctcagccgccccccttgctgt

SEQ ID NO: 469345 - DNA, 100 bp, Homo sapiens
tcggatccggcggtcgtgaggtctggacgagtcaagaaagccgtagccaacgctgttcagcaggaaggtctacctgaagggtgtgcaccccaaatttcct

SEQ ID NO: 469346 - DNA, 80 bp, Homo sapiens
tggcagcaaggtgggcccggacggcacaccctacgttaccgtgctcaagggcgaccattgacgaggtggagacggacgtg

SEQ ID NO: 469347 - DNA, 100 bp, Homo sapiens
tgccggtcgaccccagccagcgcagcgacggggcgctgcctggcccaggcgcacacggaagtgccgttcttggaacacctcacagcttgccacatctgat

SEQ ID NO: 469348 - DNA, 75 bp, Homo sapiens
cattatataccttggggaaagctgatgcgcagttgtgtagcagttgagtaatgctggttagctgttaaggtggcg

SEQ ID NO: 469349 - DNA, 97 bp, Homo sapiens
aagatcggcaggcgagattgcctgacccaggcctgctcggccctcacagggctgaccccgcactacatctacccaccagccatcgtgcagcccagcg

SEQ ID NO: 469350 - DNA, 100 bp, Homo sapiens
ctggattgcagcagttctgtgaggcagcctagtttgcatatgagtgctgctgcagcttcccgagacatcaccttgagccttttagaagatccttacccga

SEQ ID NO: 469351 - DNA, 90 bp, Homo sapiens
gacccagacggggaaagcggaaggaatgtcgcgtgagctcagagttctacagagtcaccactgaacaatatcagaaagctgctgaagagg

SEQ ID NO: 469352 - DNA, 90 bp, Homo sapiens
ctgcagatttcctgcagcctgaaaggcatgttggagacttgggcaatgtgactgctgacaaagatggtgtggccgatgtgtctattgaag

SEQ ID NO: 469353 - DNA, 71 bp, Homo sapiens
ttgtggccttagctacaggagaggctgggctaagcagttccaagctttccatgtccaaggccctccctctc

SEQ ID NO: 469354 - DNA, 125 bp, Homo sapiens
caataattctccattgagaagagagaagaacattctcgaatacctagaatgggacttaattcagtgcacaaatgagatgaatgtgaacatcccacagttggcagacagtttatttgaaagaacta

SEQ ID NO: 469355 - DNA, 74 bp, Homo sapiens
atcagtagtaaccttggtgaaacctcatttagtaaaggaagcagtacaggttttgattaagcactcagctgatg

SEQ ID NO: 469356 - DNA, 75 bp, Homo sapiens
tcaaattgcctagtgtaccttctactcatctgccggcagggccaggccctcgggaccaaggatcacgtcatgact

SEQ ID NO: 469357 - DNA, 75 bp, Homo sapiens
cctatttgcacaccatccaggagtcagtttattactggaaaaacaccttccaccatgaccacctcagcaagttcc

SEQ ID NO: 469358 - DNA, 101 bp, Homo sapiens
tgcacagccgcggcggcagcagcagtgagagattggcggcagtaagcacacaatgaatgatcacctgcatgtcggcagccacgctcacggacagatccagg

SEQ ID NO: 469359 - DNA, 75 bp, Homo sapiens
ggacacacccaggaaaagactcaggacggacaagcacagtcttcggaagtaccttctccaggcaaattccgttcc

SEQ ID NO: 469360 - DNA, 78 bp, Homo sapiens
cctggcaaccgccccgtctgagaagcgggagacactatattcaatcgtgctaagctcctcaatgttggctttcaagaa

SEQ ID NO: 469361 - DNA, 150 bp, Homo sapiens
cggacacgtcctgtactgagctgtaagaagcggaggcttgttcgacccaacagcatcgttcctctttccaagaagagcctggccacccagtggctccaccgccctgatggatccactgaatctgtcctggtatgatgatgatctggagag

SEQ ID NO: 469362 - DNA, 76 bp, Homo sapiens
aaaggcatttctcctagctgttgacgttggtgctcgtgacctctttatggaccccactgaaaatcggactgttcaa

SEQ ID NO: 469363 - DNA, 83 bp, Homo sapiens
attggcttggataagtcagggcttatactcctgtcttgaattggttccttccattatgagcaacttgttgaatccagatgcca

SEQ ID NO: 469364 - DNA, 83 bp, Homo sapiens
aggaggaagacgaatcgttaaacatcttaggtcagttacaggcccaaaaactgcgactggcatacacaaggagctctcattat

SEQ ID NO: 469365 - DNA, 83 bp, Homo sapiens
ccggcggctgctgctgctgctgacgctgctgctgcccggcctcggggagatggcagcagaaaaggccaaagcagcagccgggg

SEQ ID NO: 469366 - DNA, 50 bp, Homo sapiens
caccacgagaattccgcagcccacacgcctttctgagaaaagtctacagc

SEQ ID NO: 469367 - DNA, 75 bp, Homo sapiens
gagatcgtggacaagatcatgggcaaaggacagatccaggacgtggcccagtggaacatcgggagcctccggacc

SEQ ID NO: 469368 - DNA, 75 bp, Homo sapiens
cctgaatacagcccaccgccccattgaccactgggatgcagtcaacctgtccacaagaatcggaatgtcagttaa

SEQ ID NO: 469369 - DNA, 100 bp, Homo sapiens
gaaaatctgtgacattgcaagggaaaaagtaaataaagctgctgtttttgaagaggactatgatttaatctccaaagaaccaaagccttttgtatttgag

SEQ ID NO: 469370 - DNA, 74 bp, Homo sapiens
aagaaccgcgcgggaagccccagcccgcagccctcggggcctcattatctggtttggagacatgaactttcgga

SEQ ID NO: 469371 - DNA, 82 bp, Homo sapiens
ctgtcttcggtggactccttcggcagtccacccaccgccgccgcctcccagagcaatcgcaggcgctggctcagtcaataaa

SEQ ID NO: 469372 - DNA, 51 bp, Homo sapiens
cgactaccaccgcagcgacgagcaggtgaccattgtgaggtagatattttg

SEQ ID NO: 469373 - DNA, 139 bp, Homo sapiens
cctggctgctcgtgccaagcttcgagcctggaatgatgtagatgccctattcaccacaaagcatccacctccagatcgacaggcagtacctggaagaccaggcccctttccctccaagcagcaagtagctgatgaagat

SEQ ID NO: 469374 - DNA, 76 bp, Homo sapiens
cagagaggggaagtgatttgcctcagcttgtactccctgtgtctaggtcgtttgggaaacgccttggagagtcaag

SEQ ID NO: 469375 - DNA, 107 bp, Homo sapiens
ctccagaagaccgagcgggactatgtgggcacgctggagttcctggtgtcggaatacggttggacagaatgaactgaagattacaagtgatcaagtgataaattcag

SEQ ID NO: 469376 - DNA, 75 bp, Homo sapiens
ctaagtccaaagatttttacccaggttgtttacattcagagctctatcaataagaggaatacatattacagtgaa

SEQ ID NO: 469377 - DNA, 101 bp, Homo sapiens
cgacagcagcagcagcagccagtattcgggaaaggcagacaggtgtgacacagtgaccagcgccgtgatgatgcagtatagccgtgacttgaagggccact

SEQ ID NO: 469378 - DNA, 82 bp, Homo sapiens
cgagaggccgtgcgggacgcgggcgccaggaccggccgaacgcagaggacacaactcagatgggaagttcatcgcccgggca

SEQ ID NO: 469379 - DNA, 74 bp, Homo sapiens
ggaacccttgccgctgctgtcctgcgaccccaagcaggctcagtattctcaccatgtgatccaggagattctag

SEQ ID NO: 469380 - DNA, 75 bp, Homo sapiens
ggggaagatgagatgtcagaagctaaggacaatggcagtagagatgagactctgaagaagaagctatggagacta

SEQ ID NO: 469381 - DNA, 73 bp, Homo sapiens
ctggaggaaagctgaccaggcggcttgtgaacagtcaggccaatggaagcactgttgtgaagaacttatgaaa

SEQ ID NO: 469382 - DNA, 126 bp, Homo sapiens
cccttgcacaacgaggacgccttccagcacggcatctgctttgaggccaagagaatgtgatcaatgggcaggactacgaagtgatgatgcagattgactgtcaggtgatggacaccaggatcctcc

SEQ ID NO: 469383 - DNA, 74 bp, Homo sapiens
ggccaagcccaagcaccgcgtgtctctggatggtcgtcagatccgtgtggatcatgcaggcaagtctgctcggg

SEQ ID NO: 469384 - DNA, 90 bp, Homo sapiens
cccaaacttcttaacccctagaccggtttttagtccattgactatgcagcctaatggattttttatcaagcagaaatgcatcgaacaacg

SEQ ID NO: 469385 - DNA, 96 bp, Homo sapiens
agcctggcgctgtgtgaggaagggctacggccactgtgtggtgggaagaggccggcactgcaggaaaggaaaaggaaaattttggacgaagctgtg

SEQ ID NO: 469386 - DNA, 100 bp, Homo sapiens
gattgagccgcgcacgctacagtacaaggaatagccaggtctggctgggtcggcacaacctgtttgagcctgaagacacaggccagagggtccctgtcag

SEQ ID NO: 469387 - DNA, 101 bp, Homo sapiens
tctacccccagcatgagcggcctgcgcgtctacagcacgtcggtcaccggctcccgcgaaatacaaactggactctcaggacaaaacgacaccagccaaac

SEQ ID NO: 469388 - DNA, 75 bp, Homo sapiens
gaatatgaagacatagctgtgaagctgggaactgatctagaataagggtctccccagacacccgagcacccaccc

SEQ ID NO: 469389 - DNA, 82 bp, Homo sapiens
ggagaccctcatccagctgatgcccttcttcgtgactgatcctttgaaatactccagccatgactaaaagagaagcagagga

SEQ ID NO: 469390 - DNA, 99 bp, Homo sapiens
ctgcggcgcgcagagcgaggctgcgggaccccaggatgggggacaggaggctgcggggcctcagcttgttggagcgcagggacctgtggcggcgggagg

SEQ ID NO: 469391 - DNA, 100 bp, Homo sapiens
caaacatgcaggactctagtaacccgcgaaatgatgggatagcgttgcaaatccttaaaagagtcttaacgcttggatttacactgggcaacgtggttgg

SEQ ID NO: 469392 - DNA, 111 bp, Homo sapiens
cctcatcagtgtgcatagtggcagaaattataaagaaggttgaaaggagcagggaaaagatccagaagcatgaaccttaatctcatctttaaaataaggagaattactgag

SEQ ID NO: 469393 - DNA, 75 bp, Homo sapiens
agacggctcacctgtgcgggatggaacaaaaggttaaaggaaaaggtgcttctggaagttttgttgtggttcaga

SEQ ID NO: 469394 - DNA, 82 bp, Homo sapiens
gcacctcatcccctggatgggggaccacaagatcctcatcgacagcggaatcggacatgtccaaaccaccgtgttacgaaga

SEQ ID NO: 469395 - DNA, 50 bp, Homo sapiens
agacttcagaaagccccgtgagagaaaagtttaattggttggggtcagat

SEQ ID NO: 469396 - DNA, 101 bp, Homo sapiens
ggagacccctctgctgcaccacttcatggtcgcccagagcaattttgaggcccttcaagatttcttccgcctctttccggagtacaagaacaacaaacttt

SEQ ID NO: 469397 - DNA, 74 bp, Homo sapiens
cttctagagattactatgaatgcactggaatctataaagaggaaatggctagtgatgagctgaaagagatgcgg

SEQ ID NO: 469398 - DNA, 87 bp, Homo sapiens
catgaagatattcgagaagaagttgacaccttcatgtttgagaaactaatctggattcactccctctggttgatacccactcaaaaa

SEQ ID NO: 469399 - DNA, 76 bp, Homo sapiens
caacaaccttatttcgtgctgtgaatccagagctcttcattaaaccttatgcaaatcctgcatttgaaacaacaat

SEQ ID NO: 469400 - DNA, 118 bp, Homo sapiens
caagaagaccattcagatgggatctttccggatcaatccagatggcagccagtcagtggtggaggttcggggtgagggcactggcgtgctgggctcattatccctgcccctctcagag

SEQ ID NO: 469401 - DNA, 83 bp, Homo sapiens
cagacggattcatttagagctgcggaacaggacgccctctgatgcccgcaccgccgccatgatgtgcgaggtgatgcccacca

SEQ ID NO: 469402 - DNA, 96 bp, Homo sapiens
cagggatcaaaactcattcgaaaagctaaagaggcaccattcgtacccgttggaatgggtaccacagaccatgtcatcgtcctggcgtccacgaac

SEQ ID NO: 469403 - DNA, 98 bp, Homo sapiens
ctgacttcaagaatgaagccacggacccttgcgttgcctcttgaagtggatttaactaaagcgaagagacaagatcttgaaccgtctgtggaggaggc

SEQ ID NO: 469404 - DNA, 98 bp, Homo sapiens
ccggggccgctggattctgaggaccagcagatggccagtcacgagaacccaggtgcgttcttcacaaaggtggtggatgtgggtgccacctctctgaa

SEQ ID NO: 469405 - DNA, 100 bp, Homo sapiens
atgtccagatgatagtattggatgaggaaagagccagacttctcagaggtcagtctgttcaacaagtgggaccccagggccttctgtatgttcagcaaag

SEQ ID NO: 469406 - DNA, 75 bp, Homo sapiens
caccgagcccgcaaaaccatgtccaaaccaggaaatggacagatttcaggtatgctgctgaaagtgggaatcctc

SEQ ID NO: 469407 - DNA, 100 bp, Homo sapiens
ttgaaaaaatgtcatgaagtagaaaggcacagcctatgtggtgctcacctgcataaacctctttattggcatcaatggaagcatggccacctttgtgctt

SEQ ID NO: 469408 - DNA, 100 bp, Homo sapiens
ggccgaggcgcggcggcgcggctgccggctgccctgtgaatgggaagttacgcgaagtccacccagcgtttctgaggtgtgtgttttggatctgcggaag

SEQ ID NO: 469409 - DNA, 98 bp, Homo sapiens
aaagatccacaaaccagagaaagctttccagcagtcagttgaacaagacaacttatttgatgatttaatcaaagatctcaaatcagagttaagtggaa

SEQ ID NO: 469410 - DNA, 100 bp, Homo sapiens
tgtaaagcttgttcgaatgtctgcaagccagttagaagccctctgtcctcaggagtggagtcaacatatcaatggagcaagtcacagtcgtcgatgccag

SEQ ID NO: 469411 - DNA, 98 bp, Homo sapiens
atgttcagtctgatggccagttgctgcggctggttcaagcggtggcgggagcctgtcaggaacaagactgccaatggagactgccgcagagacccccg

SEQ ID NO: 469412 - DNA, 83 bp, Homo sapiens
cggacggggccctgacacggccaccctactgcctggaggccggggagccgacgcctgcaggggaaatgctgtctgtagctgag

SEQ ID NO: 469413 - DNA, 110 bp, Homo sapiens
cacgcgggcagtggccggacgctgaagcccaggagagcgatggagacgtatgcggaggttgggaaggagggcaagatccctacctgtttcaaggacctgccagtctgaga

SEQ ID NO: 469414 - DNA, 75 bp, Homo sapiens
cgcggccttcacacatcccagccggtgactgcagtgaggagagcacagaatggggattcaacacctcggcaatgc

SEQ ID NO: 469415 - DNA, 74 bp, Homo sapiens
ccacttaactgtgaaaaagatatttgttggtggcaattttggaggtagccccggttatggaggaggaagaggag

SEQ ID NO: 469416 - DNA, 59 bp, Homo sapiens
tggtaggctatgaccacgagaagccaggatatgggccctcacattttccaaacctgtcc

SEQ ID NO: 469417 - DNA, 82 bp, Homo sapiens
caaggtgattcagattgcaacgtcatcctccacagctaaggaatcacccttcggtcatcgtgcagcctgggaagagaccttt

SEQ ID NO: 469418 - DNA, 97 bp, Homo sapiens
gacttcagggaggatccggacccccgcaaggtcaacctgggagtgggagcatgagatactttgatagagcagccttatttgtggaagcttgcctcaa

SEQ ID NO: 469419 - DNA, 100 bp, Homo sapiens
gagaactactatgtccagcctatttgcacaccatccaggagtcagtttattactggaaacaggagcgagaacccgagcagcgccatgagcaacactaccg

SEQ ID NO: 469420 - DNA, 75 bp, Homo sapiens
aggcctggtatggagaacgagaggaaagaagtcccttatcacggtactccaaagattcaggtttactcacgtcat

SEQ ID NO: 469421 - DNA, 75 bp, Homo sapiens
acactttaaaagtttggtcagcagtcacaggcaaacatgaacttacgagaggtgttaaaaaaatatggtaaagat

SEQ ID NO: 469422 - DNA, 74 bp, Homo sapiens
acggacctgtctgggtctcagccgccaaagaccccgtccggttcatctgcagaagccagcggacgcctctgttc

SEQ ID NO: 469423 - DNA, 100 bp, Homo sapiens
cgttcttgcctcaggccagtcgcctccaggccaagagggatccttcacccgtgtctggtgagcgagtgctgtgctttcatgggcctcttctttatgaagc

SEQ ID NO: 469424 - DNA, 50 bp, Homo sapiens
atgtcacaagagtcggacaagttgctgcttttgctcagaggacatccatg

SEQ ID NO: 469425 - DNA, 74 bp, Homo sapiens
ctgtcactcaacaggtacgacaaggtgaccaagaatatggcccaggtgaccaaagccctggacaaggccctgag

SEQ ID NO: 469426 - DNA, 75 bp, Homo sapiens
ccaaagagttgtaccgagactataaccacggtgtgctgaagataaccatctgttagagaccgggtttcaccatgt

SEQ ID NO: 469427 - DNA, 108 bp, Homo sapiens
cgcaggacatgctgctggagatgctggaggacatgaccacagatggagaaggatgaaactgtgagtgactgctccccacacatagccaacatcgggcgcctggtagag

SEQ ID NO: 469428 - DNA, 82 bp, Homo sapiens
ttttactactgtgacaacattaacgataatcagacagctaaatggagtctgagcagctgttccatagaggctactatagaaa

SEQ ID NO: 469429 - DNA, 75 bp, Homo sapiens
ttcaacttctgctgactctgcttcctcctccgatacttcccgcagtcggcttgcagccaatttactggagcaggg

SEQ ID NO: 469430 - DNA, 150 bp, Homo sapiens
aagacgtcaagttggctgaggcacaccagcaggagtgctgccagaaatttgaacaactttccgaatctgcaaaagaaggactatggcagccagggacgccacttcaggcagcctgtcagaggagagcagtgctttggacctgccatcagc

SEQ ID NO: 469431 - DNA, 83 bp, Homo sapiens
cacgtgcggaggaaggactcctcgctctatatagaacactctgctccagccaaggtggtgagggcagctgttcctaaacagcg

SEQ ID NO: 469432 - DNA, 74 bp, Homo sapiens
gttgaagcgcgactggaaggagagctggtcccctgtcccctggcaggtttttgattggtcaaggagcacatgta

SEQ ID NO: 469433 - DNA, 101 bp, Homo sapiens
taaactggtacggctgtgtagaaggccagcaacccatcgtcagaaaagttctgtcaaaggaagagccctggggctgtgcgggcgctgcttccagaggagac

SEQ ID NO: 469434 - DNA, 83 bp, Homo sapiens
cccattgcacttcagtatctcaggcggcaccctgtccccgaggaggggaccatgacacaacctcctgccccccgaggtctgca

SEQ ID NO: 469435 - DNA, 96 bp, Homo sapiens
ccgctggcggggcccggacagaagatggtgcagaagaaaccagccgaacttcagggtttccaccgttcgttcaagttaagtgggcagaccaacatc

SEQ ID NO: 469436 - DNA, 100 bp, Homo sapiens
gagcttcctgataacgaggctgtggagcagcacaggtacaatcattggtttgatgggatggcgctgcttcaccagttcagaatggcaaagggcacagtga

SEQ ID NO: 469437 - DNA, 49 bp, Homo sapiens
aggacttctgtaccctcaatatctgcggttttgactctgggaggagggc

SEQ ID NO: 469438 - DNA, 100 bp, Homo sapiens
gccttccagctgtttgaccgaacagatacacaatcatcatcttactagttctctgtgttgctcgctaaccagtcccccagttcagtagactggagcccag

SEQ ID NO: 469439 - DNA, 83 bp, Homo sapiens
ctcagttggaagcagccgatccagcctgcggagcctgtggggcaggaaatactcctttacaccttgctgtgatgttaggaaat

SEQ ID NO: 469440 - DNA, 100 bp, Homo sapiens
acagaaggaaattcaacagaacttagcataaatgctgaagtacctcagccagaccccaaccagcccaagccggagggacggcagatgacccctgtgaaag

SEQ ID NO: 469441 - DNA, 75 bp, Homo sapiens
atccaagtcaccaagaaattactgtctcaagtgatacgatgttgcctgaagaaaaagtttgtaagtactgtggag

SEQ ID NO: 469442 - DNA, 75 bp, Homo sapiens
gatcaacgtcctccgggaccggagtcagaaccctccgcagagtaaagcggggccttttccgaagtggttttagct

SEQ ID NO: 469443 - DNA, 98 bp, Homo sapiens
cgccttcgtggactaccccgaccagaactgggccatccgcgccatcgagaccctctcggtctcaggggccagccaagcccccacccccaaggaagcca

SEQ ID NO: 469444 - DNA, 100 bp, Homo sapiens
cctgtcagtggctctcttggccctcctgaaatggattggcttccaggtcctcctcagcattggggaactcagcttggccatcgtgatagctctcacgtct

SEQ ID NO: 469445 - DNA, 90 bp, Homo sapiens
tatgcctactgcaccatccccacctaccccagcggccagatcggcttcatgctgtgcagcaagaacccgtcatccgtccttggctcagga

SEQ ID NO: 469446 - DNA, 98 bp, Homo sapiens
gcgcaggatgggatccggctcctccagctaccggcccaaggccatctacctggacatcgatggacgcattcagaagtgttctaagaacggaagcatct

SEQ ID NO: 469447 - DNA, 76 bp, Homo sapiens
tcctaccatgtcagccttcccagtagctgggaccacagcatgcaatgatgctacctgttctgacccatcatatccg

SEQ ID NO: 469448 - DNA, 100 bp, Homo sapiens
agatctgtccagtttgatgcctttgtgaagatgaagaatcttaaagagctccccatcttcccgggaagccagccgcccaccagaggagcccagcgccccg

SEQ ID NO: 469449 - DNA, 78 bp, Homo sapiens
gctgtgcatattatcctggttattaatgcaggatagagggaggaatcagcagcttggaaattcaagcacgtgatctgg

SEQ ID NO: 469450 - DNA, 75 bp, Homo sapiens
tgttacttccaagtcatcaccagaaagatcatggggaatttcagaggtcatgccctccctggaaccttctttttt

SEQ ID NO: 469451 - DNA, 50 bp, Homo sapiens
ttcagtcactggtttgcagagtccaggtgtggggatattcagctttgcca

SEQ ID NO: 469452 - DNA, 126 bp, Homo sapiens
cggcttcctagtgagtcggcggctgatttagaaggaggttcaggctacggtgagccgaaggtactgggcctaatcgctacgtgcctctttggctatgatgcctatgtcaccttccccgttcggcag

SEQ ID NO: 469453 - DNA, 82 bp, Homo sapiens
cttggactgagtcctgcaggacacaggtttttagaacttcagccataaaaatgggcagaattttccttgatcatatcggtgg

SEQ ID NO: 469454 - DNA, 74 bp, Homo sapiens
aaaaacccttcactgtgaagagacatgagatgattgccaaatccccaggtcacgagaagagaatgccttctaga

SEQ ID NO: 469455 - DNA, 82 bp, Homo sapiens
acacttctcagagctgcccctggacgaccaggtcatcctgctgcgggcagtgtactaatggtcacttgatgtgcgctggctg

SEQ ID NO: 469456 - DNA, 75 bp, Homo sapiens
cagaatgccaaatgtgtttgcatgctgggtaactataactacccaatattgcagccatggagtccatgcttaata

SEQ ID NO: 469457 - DNA, 75 bp, Homo sapiens
cgccttggcctcccgaagtgctgggattacagaagagcttctcctcatcaactggggatgattacagttcttcct

SEQ ID NO: 469458 - DNA, 100 bp, Homo sapiens
catcgttgctgccttcttcgtcaagggtgcagtactagccgctgtgtcaagtcacaaattcaactcattctatggggatccccctgaagagttaccagat

SEQ ID NO: 469459 - DNA, 75 bp, Homo sapiens
cccaaagatccccgttcctggagattctgattgagtgatgtcttggcattgcccattttcaagcaggaagattcc

SEQ ID NO: 469460 - DNA, 100 bp, Homo sapiens
ttaattcaaggtcacacaatgtcggggatggacctccagatttccttactggttcgtcacaaggcatcgcagaaggtttatgctatgaagcttcttagta

SEQ ID NO: 469461 - DNA, 101 bp, Homo sapiens
caatcaatcaataagaacaagtcccaggacttcagactaggctcagaatctatgacacaatgattcctccccggggctgtgcttatgtctgcatggttcat

SEQ ID NO: 469462 - DNA, 50 bp, Homo sapiens
ctgctataacctacaagcagttggacagggccgcaagcttcttatcattg

SEQ ID NO: 469463 - DNA, 100 bp, Homo sapiens
aggcgatcaaggccaagtatccgccagtcaataggaagtacgagtgtgagtcttgggcgtctttggtactggcttttttaggggtctgcctggggattac

SEQ ID NO: 469464 - DNA, 100 bp, Homo sapiens
gtgagcggagacttaaatgccgtccatggagccatgcgtgtgctgacaggcgttgacccggacgacacctataatgagaccccctacgagaaaggtttct

SEQ ID NO: 469465 - DNA, 124 bp, Homo sapiens
tttacacggggaaggctccaaacctcgacaaaatggctgatgatttgctggcagctgctgacaaggtggagccgccaccaaaatgcagattttcgtgaaaacccttacggggaagaccatcacc

SEQ ID NO: 469466 - DNA, 75 bp, Homo sapiens
gtttggaaagacccaggagaagccgcccaaagaactggaaagaccacagcaagattctttcattcgtctcctcct

SEQ ID NO: 469467 - DNA, 100 bp, Homo sapiens
tggccctgtccctggctccctcattaccgtcgccagcggagcgaacccgagagcgtggagcgggctgggccaggtccaaccgtgactgccagatcgacca

SEQ ID NO: 469468 - DNA, 74 bp, Homo sapiens
ataaaatgtcagcttttaaggtgcctacaccaactaatgttacaattgaatcctataacatgaaccctatcgta

SEQ ID NO: 469469 - DNA, 100 bp, Homo sapiens
agaagaggagaaggagcagtccgtgctcaagttttgattcccaccatggccatcacccagtttcggttatttaaattttgtacctgcctagcaacagtat

SEQ ID NO: 469470 - DNA, 90 bp, Homo sapiens
gcgaccgagccggagctgctcgacgaccaagaggcgaagaggtcaccatggctgttattggctcccttgctgtccccagctgttccccag

SEQ ID NO: 469471 - DNA, 98 bp, Homo sapiens
ggcagctcaccgctgctaaggaggagtctggtggccgaagccgtagtgggagtattgtggaacttatagactggcatcagtactatgacatagtttat

SEQ ID NO: 469472 - DNA, 83 bp, Homo sapiens
ttaaagcctactcagatcaggagcacatcaaactctggaggaggaactcttgatcaagatgccgaaccctgtgttcagaacct

SEQ ID NO: 469473 - DNA, 100 bp, Homo sapiens
gccagactcgggaggaggcagtggcgctcggcgtgggtctgtgcaacaatggcttcatgcaccacgggtaacaagatgctcaactatagtgctcccagtg

SEQ ID NO: 469474 - DNA, 100 bp, Homo sapiens
ctcctactcccccttgttctccagtacaaccttcaaaacaactggaatatttagcaaggattcaaggctttcaggggccacctacagatgctcctgcagt

SEQ ID NO: 469475 - DNA, 90 bp, Homo sapiens
gtcttagttcgagatgtgtgtatttcatcactggatttcctggaacaaattttgacatttagccccatggatcggttaacagcagaagaa

SEQ ID NO: 469476 - DNA, 100 bp, Homo sapiens
accacgacgtggtggagcccctctacatcgaggcccagcgacttctccgtgtcccttaaagcgtcagggaagaacaaacacttcaaggtgcagctcgtgg

SEQ ID NO: 469477 - DNA, 75 bp, Homo sapiens
tcagttggaagcagccgatccagcctgcggagcctgtggggcagtctgcgctcctcagaccaccggcaggtgaac

SEQ ID NO: 469478 - DNA, 75 bp, Homo sapiens
cagctacaggaaaaacaagtggattgttgaaggccggctccggaggtttggagacttgaaggaggacaaagtgac

SEQ ID NO: 469479 - DNA, 100 bp, Homo sapiens
tctgggcatcgcagccttctacttgtcccatgaggaactgcaagcacatgttgaccagataactgaaatggcagcagtaatgaggaaagccattgaaatt

SEQ ID NO: 469480 - DNA, 96 bp, Homo sapiens
gctgtctcggcaccttcacctccctgctgctgctggcgtcgacagtgggcgagggcctggcctgccaccagctgtgcgcccgagggcactgctggg

SEQ ID NO: 469481 - DNA, 100 bp, Homo sapiens
tccaaggagtataatgaatttgctgaagtatttctgaaggcatttgctgttggtgtccagcaatggacgtgatgctgaatccaggcagtgccacttcgaa

SEQ ID NO: 469482 - DNA, 83 bp, Homo sapiens
cagagcgtcacggcgtacgccctcatggggaaaatctccccggtgactttcagacctttgaagacaatttaattgaagcaagg

SEQ ID NO: 469483 - DNA, 96 bp, Homo sapiens
tatgaccaactaattgaaattaacctcagtgaggagaccagccactaactggggcgtacacagtgaccctggatggacgagggccctcaagggtca

SEQ ID NO: 469484 - DNA, 100 bp, Homo sapiens
cctgggccgccgctgctacctgcagcgccgtgtggcacgacacaaaaatcagtccagaagcactggaaatccatggatcattcacatggcttggacaaac

SEQ ID NO: 469485 - DNA, 101 bp, Homo sapiens
gcctaccaggaggccaggggtgtcgccatggttcgttccaccagtcataaaccagatgaaatctatggcatgattgaaagactatctcctggcactcgcaa

SEQ ID NO: 469486 - DNA, 98 bp, Homo sapiens
ccacctgctacgcctcaggctggggcagcattgaaccagaggagtggtctccatcacccaactccatgcttcgagtcctgctctctgctcagacctcc

SEQ ID NO: 469487 - DNA, 100 bp, Homo sapiens
ctggtgttcggttatggagcctctctcctctgcaacctgataggatttggctacccagcctacatctccaacatgaaccgtgaagaccggaatgtgctgc

SEQ ID NO: 469488 - DNA, 90 bp, Homo sapiens
gctgcggcgcctgggactgcaccgcaccgagggcgagctccaggttctggctccttggcagcaatggctgtatttgaagataagtttagg

SEQ ID NO: 469489 - DNA, 74 bp, Homo sapiens
gctgctaccccactcctgggccgtccctgaaggtttactcctggcttgggggcattaggaagcactggaggctc

SEQ ID NO: 469490 - DNA, 74 bp, Homo sapiens
gtgaaggagtgcagaggcatcacctgaaagtgctccagacaatgaaacatccaaatctgctaatcaagatacct

SEQ ID NO: 469491 - DNA, 75 bp, Homo sapiens
acactgccggggcccaaccacaagacgactcaataggaggaagggaaacatgcacaattcttggattacaacagg

SEQ ID NO: 469492 - DNA, 75 bp, Homo sapiens
caacagatactgctgcttagaatggagaaggaaaatcagaagctccaagactcttagaaagaaccatccgatcag

SEQ ID NO: 469493 - DNA, 82 bp, Homo sapiens
gccgcctctgtattacttaccaggcctccggtgtggctgtctctgatggtgtcatcaaggtgttcaacgacatgaaggtgcg

SEQ ID NO: 469494 - DNA, 100 bp, Homo sapiens
gaggcggcggagcagcgggcggaggtggaccggatgctcaggtagtgggcagcagtcagtgacaggtgtaacctctgtggatgacagcaacagttactgg

SEQ ID NO: 469495 - DNA, 98 bp, Homo sapiens
tccttcctgggtggaaaggaatgagttgctccttgagggcaggacagttcttatggctttatccgttgcgtaagcacagagaggtctgcgaggtcaaa

SEQ ID NO: 469496 - DNA, 95 bp, Homo sapiens
ggagatggaaaaggagttcgagcagatcgacaagtccgggagctgggcggccatttaccaggtcaaaatgcagatcttcgtgaaaacccttaccg

SEQ ID NO: 469497 - DNA, 80 bp, Homo sapiens
gatattagtgaagggactgttgttccagaggatcgctgcaaatctccaacctctgggtcctgggcccagtctgccctgac

SEQ ID NO: 469498 - DNA, 75 bp, Homo sapiens
gccagggaaccctggtcaccgtctcctcaggccacggcagagacaacgtgtgtaccccaagtgcacatggctgac

SEQ ID NO: 469499 - DNA, 75 bp, Homo sapiens
caagaatgaagccacggacccttgcgatgtctttggtggacttgggaaagaggttgctagaagcagcaagaaaag

SEQ ID NO: 469500 - DNA, 83 bp, Homo sapiens
ggactgcctcactgagcaaccaagagaattgaatgatctggcacgggaccctccagcacagtgttcagcaggtcctgttggag

SEQ ID NO: 469501 - DNA, 51 bp, Homo sapiens
caaggactcacagtggctgcaaggcaactttttcctgtacctgtgaggagc

SEQ ID NO: 469502 - DNA, 90 bp, Homo sapiens
cgtagtgggagtattgtggaacttataggtccctgtacccctacccgaccggcgtcgccgcttcctagccatgaagtggatgatcactga

SEQ ID NO: 469503 - DNA, 90 bp, Homo sapiens
ctgaacatcatcgacatggccctgagtgaatacccagaaaatttcatgatctgccagagcatcttttggagatcgaaaggtagaactttc

SEQ ID NO: 469504 - DNA, 105 bp, Homo sapiens
gtggagagagcgagctgagtggttgtgtggtcgcgtctcggaaaccggtagcgcttgcagcatggttatcaatactctggctgaccatcatcatcgtgggactga

SEQ ID NO: 469505 - DNA, 100 bp, Homo sapiens
ttcgtggcatctatgcttacggttttgagaagccttccgctattcagcagagagctattattccctgtattaaagtgtgtgctgacttgataagaggcgc

SEQ ID NO: 469506 - DNA, 50 bp, Homo sapiens
ctggttaaacaatttcatcagattaaagaaatggaatctatttggaattt

SEQ ID NO: 469507 - DNA, 75 bp, Homo sapiens
cagccccccagcacaaactgctttggtggaagatcccgggacatcaaagacgtcagactggatggcgagtcccag

SEQ ID NO: 469508 - DNA, 87 bp, Homo sapiens
ggaacggcggcgacaagggtgttcccgaactagagtggggaggtggggaagacagggctccagctaccacaggacgggctctgggta

SEQ ID NO: 469509 - DNA, 82 bp, Homo sapiens
cgtggctcctgctgcacatgtatgacagtgacaagtatggtttgaagtggtgaacatggatttttctcggcttcacatgtac

SEQ ID NO: 469510 - DNA, 100 bp, Homo sapiens
cctgctcaagccgctcttccccacctgcccggtgcccgaggaggcagccaagctcgtagcctgccactccgtgcgtctgactcccagcaccgcttctgga

SEQ ID NO: 469511 - DNA, 75 bp, Homo sapiens
ccaaaaatgaccaagtccctggaggagatgttaaagtaacccatcttgcaggacgacattgaagattggtcttct

SEQ ID NO: 469512 - DNA, 75 bp, Homo sapiens
cgcggtgctgcgagggcagaacctgggagtacttttcgtcagggtttggtgattggaagtaaacctgtaatttac

SEQ ID NO: 469513 - DNA, 74 bp, Homo sapiens
aaaaacaagactggggctgctcccatcattgatgtggtgcgatcggaagttccaggttaaaggcagcctcagct

SEQ ID NO: 469514 - DNA, 117 bp, Homo sapiens
ctgatgattacgataaaaagaaactagtgaaggcgtttaagaaatttttgaatcagagccgacaggcacttgaattgaaaatggaaaaccctactgctggtggtgctgcggtgatga

SEQ ID NO: 469515 - DNA, 100 bp, Homo sapiens
catgccggtgtggtggcggcggcggagactgcgggcccgtagctgggctctgcgaggggttggcatctgcacatccttcctgggcatctcgtgggcactg

SEQ ID NO: 469516 - DNA, 100 bp, Homo sapiens
aattcagtggttccagtaaagatttgaaatttgttaaaatgagaaatacctttggaagccatacatatgaaaatcaggatttacttcagatgcaatatga

SEQ ID NO: 469517 - DNA, 90 bp, Homo sapiens
ctcggacccacggagccggcagcccagcactccgcagcacaacggcatgaaactgtccatgaagggctctcacggccacacccaaggcgg

SEQ ID NO: 469518 - DNA, 99 bp, Homo sapiens
cgcaggaacggctccagcatcaagatccgtctgacaggtcgtcacgctgtggtacagagcacccgaagtcttgctccagtccagctacgccacccccgt

SEQ ID NO: 469519 - DNA, 100 bp, Homo sapiens
gcaggatctccttcccagccttcagaaattgccggtctgggagttgggggcaaggagaagatcctggagagctcaaaggatggctactgacatgcagagg

SEQ ID NO: 469520 - DNA, 100 bp, Homo sapiens
aagatgataccctgtgacttcctcatcccggtccagacccagcaccccatacggaagggtctgcatcacaagccaatggagatcttcgtggatgatgaga

SEQ ID NO: 469521 - DNA, 76 bp, Homo sapiens
tgatggtgctgctcacatctgtggtccagggcagggccactccagcaatggctgccatccggaagaaactggtgat

SEQ ID NO: 469522 - DNA, 75 bp, Homo sapiens
cccggagaacaccttgcccactcccatggtcctgcagagcttggttctacagccattgggatccagacatcagag

SEQ ID NO: 469523 - DNA, 51 bp, Homo sapiens
caaccacctgggctgcctggtcttcagcagatcaggagaacctcagtctga

SEQ ID NO: 469524 - DNA, 100 bp, Homo sapiens
cgaagcagaacgcctcattgtggtgcatctccaccctgctgatgctggtcaccagcgacatgtacacactcatcaactatgtgggcttcatcaactacct

SEQ ID NO: 469525 - DNA, 100 bp, Homo sapiens
agggcctcctgccagccccagcccctggagaggatgcagaaactatgttccaacttcctgtcaacaatcttggcagtttaagaaaagcccggaaaactgt

SEQ ID NO: 469526 - DNA, 100 bp, Homo sapiens
ggttgggacgcagtctcttaaatatgataatcagagtcaacctatttgatttcttgacaagaccacaatctgatcccaaagatgtgctccacaaatccag

SEQ ID NO: 469527 - DNA, 82 bp, Homo sapiens
ttaatgtttacggcgaagtctactcaacgtttccaagcaattctgtggtgttcttggtcacacatttatggagtttctgaag

SEQ ID NO: 469528 - DNA, 100 bp, Homo sapiens
gcgctggtcgtcagcgccgaggctgggctgaggcgccgcggtaccatgaggcgccggtttttctattgggaaagctactgatcggatggatgctttcagg

SEQ ID NO: 469529 - DNA, 101 bp, Homo sapiens
aagtgatgtctttacataagcaacttcagaatgctggtggcaaggaatcagttgattgggttggagactacaatgaaccattgactggtttttcatggaga

SEQ ID NO: 469530 - DNA, 82 bp, Homo sapiens
ttcgttgtgccagcgactaaaaagagaattggcagagggggtcgatttgggaggaaaggtgtggctataaactttgttactg

SEQ ID NO: 469531 - DNA, 90 bp, Homo sapiens
ggcagctgagaaatgctgtgtctgtggtcacttgattttggagaaggttggaagtgtatcctcccttcttattttttctagctgttggag

SEQ ID NO: 469532 - DNA, 98 bp, Homo sapiens
ttccatgtcaacacggatgatcacagggctaattcacctaaataagattgatcctcatgctccaaatgaaatgctctatgggcgaataggctacatct

SEQ ID NO: 469533 - DNA, 75 bp, Homo sapiens
tgaaccctcaggaagtgatccaggggatgtgtaaggctgtgcccttcgttcagtagagacggggttttaccgtgt

SEQ ID NO: 469534 - DNA, 50 bp, Homo sapiens
tggtatagcccaccagaaaggacagatggtgaccctctttcagatgtggg

SEQ ID NO: 469535 - DNA, 78 bp, Homo sapiens
aaggagcagatttacaaactggccaagaagggccttactccttcacagatcggaacccttctctgaagcaacagctct

SEQ ID NO: 469536 - DNA, 100 bp, Homo sapiens
ctgctggacaacaccatggaaatatttgacattgagggttcaggataagtttgaggtgctgaattacacaagcattcctatctttctcccggaagtcacc

SEQ ID NO: 469537 - DNA, 100 bp, Homo sapiens
gggaaatctcctgctcgaaatagatccccaagtaagcccttggcacggaaattaatggattgggaagtagtaagcagaaattcaatatctgatgacaggt

SEQ ID NO: 469538 - DNA, 100 bp, Homo sapiens
aggaccaccagctaccatagttgctattgatgaagaaagtcggaatggcttgaactcaaacttgaatgtaaatatggatatgaacagtattaaagagcca

SEQ ID NO: 469539 - DNA, 100 bp, Homo sapiens
ggaagatggtagctgtaaacctggccactggaaaacgaagccggttgttatgacaatggaaaacactatcagataaatcaacagtgggagcggacctacc

SEQ ID NO: 469540 - DNA, 83 bp, Homo sapiens
cggatgtcggcgaagagttcaaccagggctctggaacttcatccattctctatgaaacctcttctgaggcgggcgatggccta

SEQ ID NO: 469541 - DNA, 100 bp, Homo sapiens
tgcgaggctgagaacagtgtctccagagagaggagtgagcccaagaagctgtctctgaagggcgtattttggggtcaaagcagagtgaacaccgtccctc

SEQ ID NO: 469542 - DNA, 75 bp, Homo sapiens
tttaattccttttcgaccttcaatccagttccaaggactccacgggaaacaaaggatggagtatggcccaagacc

SEQ ID NO: 469543 - DNA, 73 bp, Homo sapiens
cagcactgactttcagctatggaatcggccaaacgtaccaagaaagtcgggatcgtcggtaaatacgggaccc

SEQ ID NO: 469544 - DNA, 100 bp, Homo sapiens
ggtgcagattttaatttcagtgactgaattaaaaggtgtcaagaagctcagaatgctgcggttggatttctcacgatgtccagtgttatctccatgtctg

SEQ ID NO: 469545 - DNA, 100 bp, Homo sapiens
cagccatgaccaacctggccatagtaaactgtcaagtatatgggagaaatgcacttaatctgaaggccaaagagtgtggccagatgcaaaataagtggct

SEQ ID NO: 469546 - DNA, 75 bp, Homo sapiens
acgccagggctgcctgctggtacctgcgcggtgaataaccctataccttccaatttgaaatcagaagcaaaaaag

SEQ ID NO: 469547 - DNA, 73 bp, Homo sapiens
ggatgccgtttgtgccaaagtggacgctgccaacagggtgttaactgtctggcctatgatgaagccatcatgg

SEQ ID NO: 469548 - DNA, 86 bp, Homo sapiens
cctgcagcggaaccggacccagtccctgagccgcccctacacccacagcaattctgtggtgttcttggtcacacatttatggagtt

SEQ ID NO: 469549 - DNA, 100 bp, Homo sapiens
gcctgctgcactttgggttcaaggcgacagtctcctctgagcctccggcctccataagacccaaaacagatgacacctcttcccagtcccccgcgccttc

SEQ ID NO: 469550 - DNA, 83 bp, Homo sapiens
caagctgaagacatcaagaagatcttcgagttcaaagagaccctcggaacgcggctatgagaggttttcctccgagtacccag

SEQ ID NO: 469551 - DNA, 98 bp, Homo sapiens
tttgcctccacttagtgagcggaagaatgtggcttacagaagagacgaaatgtggtctgagggacgatatgaatatgaaagaattccgagagaacgag

SEQ ID NO: 469552 - DNA, 100 bp, Homo sapiens
gttccccatcttcaccctcatcaaaggctcccttcagaatgacccattttacactatgtcttcagcagtggtgcagttatatgcagcagatcggaactgt

SEQ ID NO: 469553 - DNA, 100 bp, Homo sapiens
gggcttgaaaccaagataccattttgctgctttggaaaagacctattatgagaggcttccatatcgattcatgatgttgctatcaaaagttgagaaattg

SEQ ID NO: 469554 - DNA, 101 bp, Homo sapiens
tctaaaagtgatgggtgtcatgaaaaggccaaggagtcttgggagatgaattcagaagagaagctggaacagagcaccatagtgaaagagcggggcactgt

SEQ ID NO: 469555 - DNA, 100 bp, Homo sapiens
tggaccagttgatgggcacctcccgggacggatgacgctgtcagtatagaaagtggtacaaacactgaacgccctgatacacctacaaacacgccaaatg

SEQ ID NO: 469556 - DNA, 97 bp, Homo sapiens
ggcgtgatccacatccgagttgtggtgaaaggcctggggccaggacgcttgttctcccaggagaaagccatgttcagttcgagcgccaagatcgtga

SEQ ID NO: 469557 - DNA, 94 bp, Homo sapiens
ggagcagatttacaaactggccaagaagggccttactccttcacagatcgtgaataaccctataccttccaatttgaaatcagaagcaaaaaag

SEQ ID NO: 469558 - DNA, 87 bp, Homo sapiens
atcctgaagttccctcacattagccagtgtgaagacctccgaaggaccataggtacttggaaaaatggacaaggattgtgaaatgaa

SEQ ID NO: 469559 - DNA, 82 bp, Homo sapiens
tttgggcgtcccattgccatgagatttaccgcattgtttctcagaagcaaatgtcagacagacgcgaaaatgacatgtctcc

SEQ ID NO: 469560 - DNA, 75 bp, Homo sapiens
gcagccgatccagcctgcggagcctgtggggcaggaagcaagatttccagatgtagcaaatgggtttattgagga

SEQ ID NO: 469561 - DNA, 97 bp, Homo sapiens
aaattaaaaaagtcaagaagaaaggaagaaaagatgatgatagtgatgatgaatctcaatcatcccacactgatatcttcaaaggaggaagaagaaa

SEQ ID NO: 469562 - DNA, 114 bp, Homo sapiens
tcccaagaagcaggaatgaaagtggcgctttctccgccccagcacacttcatagctgccacgatatagttttacgaagaagttacttgggaagttggggctttagtatcgttgg

SEQ ID NO: 469563 - DNA, 100 bp, Homo sapiens
ggaggatcctcagaagttttggacaagcctccccaaatgtggcaggtgctggagaatctggtaaaagcaccattgtgaagcagatgaggatcctgcatgt

SEQ ID NO: 469564 - DNA, 83 bp, Homo sapiens
tggcggagagcggcctgcgggcgatcgggccgaggtttgggccccatggtatccctgtgacagtatttcccaaaagggaatat

SEQ ID NO: 469565 - DNA, 90 bp, Homo sapiens
gtgattagcttcgcagtctggaaagctttaggagttcacagtgtgcacatcctcatgggctcctgttacaagaccaaaaaattcctgctc

SEQ ID NO: 469566 - DNA, 82 bp, Homo sapiens
actgatccaaggaatatttaatgtgccatcttttgcacatatcaacacagatatgccttatgccagcctggaccatcttgga

SEQ ID NO: 469567 - DNA, 80 bp, Homo sapiens
gctgtaccaaatgttgtgtggcattaagcacctccattctgctggaattattcacaggattcaaggcctcttccagatgt

SEQ ID NO: 469568 - DNA, 100 bp, Homo sapiens
cccctgggcagacctcttcagaaatagcagagccctaatttgtttagaactgtaatatgcacagttaaaacaacttgtcctctcaggaccttttgcagtt

SEQ ID NO: 469569 - DNA, 98 bp, Homo sapiens
ggaggtggaccagaacttttggaactagtgccggcggctctccaccccccagccgcctgtcttggttagatggctctggattaggattctcactggaa

SEQ ID NO: 469570 - DNA, 82 bp, Homo sapiens
tggccctcctggtcatcccgcctgccatcacccccggacgccgcaccaggctgcaggccagcccttcaagttcactatcccg

SEQ ID NO: 469571 - DNA, 98 bp, Homo sapiens
acatcctggaagctgggaaatgatctccagatcacactaagtttgtgggaagcttcaaaaccaaacaagacttcatagatttgattgaagtaatctat

SEQ ID NO: 469572 - DNA, 101 bp, Homo sapiens
cggacatgaacctgaacgtcatcaacgagggcggcattgacaagctgggcgaggtgtggccaaacgtggacaactatgagctgtacgaaaagctggagctg

SEQ ID NO: 469573 - DNA, 100 bp, Homo sapiens
gctattcggagtcaccagacctggagtttgagtatgctgacacagacaagtgggctgcagagctctcgggaaggttgtgcaggaccagcgttccctgtgc

SEQ ID NO: 469574 - DNA, 100 bp, Homo sapiens
gtcgatttattccctatactgaggagttcagtgaaaaactagagatttagcatgtagactgctggggcaatcaatggatgaaagtggattaccacagctg

SEQ ID NO: 469575 - DNA, 50 bp, Homo sapiens
tgataacaccctgtaacagctgaatcttaccaatatatttgagtccttcc

SEQ ID NO: 469576 - DNA, 98 bp, Homo sapiens
catgaaccgcagccaccggcacggggcgggcagcggctgcctgggcactatggaggtgaagagcaagcggaatggccaaagactatgacgggtcttcc

SEQ ID NO: 469577 - DNA, 51 bp, Homo sapiens
ccatcattgatgtggtgcgatcggttcatgggacggctccagacattgcag

SEQ ID NO: 469578 - DNA, 74 bp, Homo sapiens
aggatttcaacatgcctctgacaatctctagtgaaatggaaaattttgtccagagttcaggggaagatggtatt

SEQ ID NO: 469579 - DNA, 75 bp, Homo sapiens
tcccacaggaagtgtcacacagcagtcaagtatgtcccaaacgtctgggcccagatcattgatctgatgatgctg

SEQ ID NO: 469580 - DNA, 98 bp, Homo sapiens
cggctataataatagcaaacatcgatggcctactggggataacattcatgcagaacatcaggaggataatgaagcgccggactctgaagaggaggatg

SEQ ID NO: 469581 - DNA, 100 bp, Homo sapiens
ggcgctagcccagcccgacccagattacaggctgtgccagccctggaaaaacagttacaattgttgttcgtggttctaacaaactggtgattgaagaagc

SEQ ID NO: 469582 - DNA, 101 bp, Homo sapiens
gtcctaaatgtggcgacttgtgcacacatgtagagacctttgtatgttggatggcaagcatgtggtgtttggcaaagtgaaagaaggcatgaatattgtgg

SEQ ID NO: 469583 - DNA, 88 bp, Homo sapiens
ggcgggacagagcgcctgcgaccccagtcggtgctccggggaggtcacctgacgaggaggtcttgtacagatggaacagacaaagcag

SEQ ID NO: 469584 - DNA, 51 bp, Homo sapiens
cagctcacccactgccagcagagggacttccttccccgcggttcaggaatc

SEQ ID NO: 469585 - DNA, 100 bp, Homo sapiens
gcaagaactgcttgacagagaggccttggaaaagacttaattcagtgcacaaatgagatgaatgtgaacatcccacagttggcagacagtttatttgaaa

SEQ ID NO: 469586 - DNA, 100 bp, Homo sapiens
gcagtcagagtcaaaacagagcttttggaatctgaacaagggatcatccaattatgatgggttttgaaccccttgtgaaccagaggctacttccacctac

SEQ ID NO: 469587 - DNA, 100 bp, Homo sapiens
cagataagaaaaagcgcaaggcaaatacacaggaaaattcacgaattgtgagagtaagagttatagccggaataggccttgccaagaaggatatattggg

SEQ ID NO: 469588 - DNA, 75 bp, Homo sapiens
aaaacttcttgccaaccaaattgtcgagatgtccacagaaggaggatttggtggtactagcagcagtgatgccca

SEQ ID NO: 469589 - DNA, 100 bp, Homo sapiens
cgtctggtggccttttgtccctttgcctcatcccaggttgccttggaaaatgccaacgccgtgtctgaaggacccatggatgaaggaccagatcttgatc

SEQ ID NO: 469590 - DNA, 96 bp, Homo sapiens
aaggtccggggcttgccctggtcttgctcggccgatgaagtgcagaggtttttttctggagaataaaggcagccccgttgatgactgaaaatgaca

SEQ ID NO: 469591 - DNA, 50 bp, Homo sapiens
caaccacgagacggccttccaagggccgcgatgggcctcttggaacattg

SEQ ID NO: 469592 - DNA, 75 bp, Homo sapiens
aagtaatgggatgaataaaattggactcagagtttccattgacactgatatgatatccatttggggatgaagtct

SEQ ID NO: 469593 - DNA, 89 bp, Homo sapiens
agtgcagggcatcatcaatttcgagcagaaggtggttattaacttggtgatgcttttggctgaaatgaaaatacaggaccgcgctgttc

SEQ ID NO: 469594 - DNA, 82 bp, Homo sapiens
gagccgagagccacactttcaagtaaaccaggcctatgaaggggtgctgcagctggtggaggctcgcgggcgctacgaggag

SEQ ID NO: 469595 - DNA, 75 bp, Homo sapiens
ggcctggcactggccaaggagattggttcgtgctggccgtgggcagcgccgtctttgatgccatgttcaacgggg

SEQ ID NO: 469596 - DNA, 100 bp, Homo sapiens
tttctctctccctgcattgcctctggccgagctgcaaccgcctccgcctattacagaggttccagatgtggaatctcgtgaagacttaattaaaaatcac

SEQ ID NO: 469597 - DNA, 98 bp, Homo sapiens
cgcagtggtcgcttcttctccttgactgcttttcaggaagccttggacgctgcaggtgataaacttgtagtagttgacttctcagccacgtggtgtgg

SEQ ID NO: 469598 - DNA, 100 bp, Homo sapiens
cgacttagcaaggtattctctgccatgttggcgattcattccaacaaaccagatttctcgaatgctggcagccaaaaccgttttggctatccgttatgat

SEQ ID NO: 469599 - DNA, 101 bp, Homo sapiens
acacccgccgagcacaggctgacctggcctatcagcttcaggtgagctacatggaaatttactgtgaaagagtacgagatttgctgaatccaaaaaacaag

SEQ ID NO: 469600 - DNA, 80 bp, Homo sapiens
aggaagatccctcagagggcccaggagagacagaatggagggacgccactgctgtacgctgtgcgcgggaaccacgtgaa

SEQ ID NO: 469601 - DNA, 88 bp, Homo sapiens
tgatccctgaggaattcttccagtttctttatcctaaaactggtgtaacagtttacgttgttaaagggaagctggacgagataataaa

SEQ ID NO: 469602 - DNA, 82 bp, Homo sapiens
tgacaacaccgttcccccagccgggctgatgccatggacaatattaccaggcagaaccaattctacgatacccaagtcatca

SEQ ID NO: 469603 - DNA, 126 bp, Homo sapiens
gaaaaaaagcagacaatctgaggatgatgttgacttggggatccaaaggcacaggtaattcagaggtccgtggggccagccagcctgagcttgctcaccttcaaagtctatgcagcaccaaaaaag

SEQ ID NO: 469604 - DNA, 75 bp, Homo sapiens
gtctcattaatcacaccaacaaaaagatcctgtggtacagttatctcgtgtggaagcctttcctttcccccaaat

SEQ ID NO: 469605 - DNA, 75 bp, Homo sapiens
aaccagagcttgtgtagcgtcagatccttgagtgataaaggagtagaggacacatgacggaagtgtgtatttttg

SEQ ID NO: 469606 - DNA, 75 bp, Homo sapiens
gggacgggtcccgcggcgagcgagctcctgaggtacggcgtcggggagatacaactcgtcaacgaatcaaattca

SEQ ID NO: 469607 - DNA, 75 bp, Homo sapiens
tcccgtgccaaccctgggggacagggctagccccttgagcagtccaggtgaatctggattgggaaagtcgacatt

SEQ ID NO: 469608 - DNA, 73 bp, Homo sapiens
catggctacatctcccggtgcttcacgcggaaatacacgtctcctctgagcctccggcctccataagacccaa

SEQ ID NO: 469609 - DNA, 98 bp, Homo sapiens
tgagttttctcaaatccgatatgatgctgtgaagagtaaacacaacaccccgatcccccaaggaggcagaggagccatccagtttgtcacgcattatc

SEQ ID NO: 469610 - DNA, 101 bp, Homo sapiens
cctggttccagctgcagcacgtggacgctgactcggaagtgcagaaaccgaaccctcaccaaacagatctgcttgcacatccacttgcacgtagacctcag

SEQ ID NO: 469611 - DNA, 90 bp, Homo sapiens
cgctcgcggcctggcccttggcctcctcctgctgctactgtgtccagcgcagaatggcagcaaagacaactctctggacatgctgggcac

SEQ ID NO: 469612 - DNA, 101 bp, Homo sapiens
cctggatggtgaagaaggagggaacaagaggcccatgccctgccatgctgtgacctacaagcaaactaaatagccaacatttctgaacccctaagtctcct

SEQ ID NO: 469613 - DNA, 98 bp, Homo sapiens
tggagcagatcctggaggatgtgcggggtgcgccggcagaggatccagtgttcaccatcctggccccggaagggcagcgggtggcatgagacgtggga

SEQ ID NO: 469614 - DNA, 83 bp, Homo sapiens
ctctcaaagcaataccaggatagctgttgtttcagagaaagtatctggagtccatctttcaccatcttctcctgagattgtac

SEQ ID NO: 469615 - DNA, 82 bp, Homo sapiens
acggcgagcgcgagcggcgcgagaaagctgtgacaaaccctgtgcccacgctgcctccactgccgggagactcagggctggg

SEQ ID NO: 469616 - DNA, 82 bp, Homo sapiens
gacgcggacatggtcatgagctttgtgaacctgggaactgtggctgcaccatctgtcttcatcttcccgccatctgatgagc

SEQ ID NO: 469617 - DNA, 75 bp, Homo sapiens
aagaagagctaaaatctctggacaaagaaatttctgaagcacgaaagcaagagattatcaaagtcactgaacaac

SEQ ID NO: 469618 - DNA, 82 bp, Homo sapiens
ggagctgagggctgatgggttctgacggataatttccaagccagagggtcaccatgaagttcaatcccttcgttacctcgga

SEQ ID NO: 469619 - DNA, 100 bp, Homo sapiens
ggtgtgtttaagacccagaaaatatcaagctggttcaccatcattaatagcaaacaaatgggaagttattcttgtttctttcgagaggaaaaggaacaaa

SEQ ID NO: 469620 - DNA, 80 bp, Homo sapiens
cacactaacgagattcaagattatttgcaacagctcacgggagcaagaacggtgactgggtacctggatatgtgatcgag

SEQ ID NO: 469621 - DNA, 83 bp, Homo sapiens
ccaagtatgcgcccagcggattctacattgcctccggaggtgacttaagagattaaaattaatttggttgctgttggttctga

SEQ ID NO: 469622 - DNA, 75 bp, Homo sapiens
gctcatctggaattttgccgatttcatgactaaccagtgttatctgatcatttcaaattgggaccacttaggaac

SEQ ID NO: 469623 - DNA, 99 bp, Homo sapiens
cagggagggtcggacctgcctcaataccgccaaggccctaaaccagttgtttgagaaaatcatggcattagacattgatgagcgccacctactgcgtct

SEQ ID NO: 469624 - DNA, 96 bp, Homo sapiens
tggtctgcggggacctgcccgcggcacctctggagcacctagccgcgctgttctcggaggtgcacatcctcatgggctcctgttacaagaccaaaa

SEQ ID NO: 469625 - DNA, 75 bp, Homo sapiens
tcttgtcatgctagcactgcattaagtgatgcatacagttcttccctgtggaacagtagagacctagtctgcctt

SEQ ID NO: 469626 - DNA, 101 bp, Homo sapiens
ttactggagtaggtgttagtaaggtcctgggctgaagagatggggagcagccgctgtgggcctggggctcaccctgttcacctgtggcccccacactttgc

SEQ ID NO: 469627 - DNA, 82 bp, Homo sapiens
tacaagctcatggatcatgtggggactgagccatccattaaggaggatgcaggcagccagcaggttgggtttctgctgggca

SEQ ID NO: 469628 - DNA, 100 bp, Homo sapiens
ccgccaagcgcccgtcggacggggaggaggagcaggagctggaggaggagccgccgccgccaggttcaaaccttgtactactcagctgatcacaagctgc

SEQ ID NO: 469629 - DNA, 75 bp, Homo sapiens
ccccactccgcgagaccctggtgcacctcaatcttgctggtacacggtcctcttctcgcacggcaatgccgtgga

SEQ ID NO: 469630 - DNA, 100 bp, Homo sapiens
acaccgttcccccagccgggctggtgtggacactgccagcggctgcagccgacttggaatgacctgggagacaaatacaacagcatggaagatgccaaag

SEQ ID NO: 469631 - DNA, 100 bp, Homo sapiens
tgggagcgcgtctccttgaacgttgtcccgcctgggattgcgagcttcttacatccgtgtttgacaatagcatcaagacttttggagtaattgagagtga

SEQ ID NO: 469632 - DNA, 75 bp, Homo sapiens
ctgacctctatagcctggcccattcctacctcgccctggcctggtgctacctcgggatgctgctggagcggaagg

SEQ ID NO: 469633 - DNA, 74 bp, Homo sapiens
gtggacaagtggcagtcggcgtgatcgcagatgaacacaatgacgtacagaagaaaacctttaccaaatggata

SEQ ID NO: 469634 - DNA, 100 bp, Homo sapiens
agaaaggaaggaatatatcctgactgattggcagctgcaatgactctccgcacggtattattgtcattgcaagcactattggcagctgcagagccagatg

SEQ ID NO: 469635 - DNA, 51 bp, Homo sapiens
cgtaagaaacgctttgcaaagcaagagagagcaggagattcggatgggtca

SEQ ID NO: 469636 - DNA, 96 bp, Homo sapiens
ggcccgggctgcggcgtgtgcgcgcccgccagctgctccggagatacgtacctcactgtggaccgaaatcgtctatggtatgtgccgcgccatctc

SEQ ID NO: 469637 - DNA, 74 bp, Homo sapiens
cggaagtgcagctgcctcagttcttagcgcaggtctccagaaatgctttgggttcatctttcattgctgcaagg

SEQ ID NO: 469638 - DNA, 100 bp, Homo sapiens
cacccgaggagttccgcccctttctggcaaagatgagggggattcttaaggcagttgcagtggtgcagaatggctgacctcagtcttgcagatgcattaa

SEQ ID NO: 469639 - DNA, 90 bp, Homo sapiens
ggactccctggagaagcagatggaaaaggttgcacactgggccacagaggatccagcaaggatgaagaaatggagcagcacagacttggg

SEQ ID NO: 469640 - DNA, 83 bp, Homo sapiens
ctttctggcctggaggctatccagcgtatggagagtgcaatcacgctgtggcagttcctgttgcagttgctgctggatcagaa

SEQ ID NO: 469641 - DNA, 75 bp, Homo sapiens
agatgatgacgatgatgatgaagaggatgatgatgaagaagttatcattaccatgttggtgacctgttcagtttg

SEQ ID NO: 469642 - DNA, 90 bp, Homo sapiens
tcccagctgcgcaaagcttgcgaggtggcgttagcatgagtctgctttgccctgggatgaccatagaccacaagttacctggcgggggga

SEQ ID NO: 469643 - DNA, 111 bp, Homo sapiens
ctggttctgctgcttctgggccctacgcgcggcttgcgcgtgctggagaatctggtaaaagcaccattgtgaagcagatgaggatcctgcatgttaatgggtttaatggag

SEQ ID NO: 469644 - DNA, 90 bp, Homo sapiens
aaagaaccattgaagcttgagagaaaagcccccaaaagcagctattcaggtcagcagcaaggacaagatggagtaaaagtccagcaagct

SEQ ID NO: 469645 - DNA, 49 bp, Homo sapiens
tatagaggataccccattggttccattaagttgcttttacagagttaac

SEQ ID NO: 469646 - DNA, 75 bp, Homo sapiens
cccgcccctcggacactgcccccgccgccgccggagctctgcagcacgaacatacatatgatagttgagaaagac

SEQ ID NO: 469647 - DNA, 83 bp, Homo sapiens
ttctctgacatgcggacgtgtcgcgtttgcccattgaatcagctgaaaccaacttctgagaagttccagaaaataaatcagat

SEQ ID NO: 469648 - DNA, 83 bp, Homo sapiens
caaatgtctgactctgactctcggactgagaaacgcaagtctctgctttctatccgtcaagatgataaagtcgtgtgcccgag

SEQ ID NO: 469649 - DNA, 51 bp, Homo sapiens
catcttctccctcccttgcctcaggtgtgatgaatgcagactctgctacca

SEQ ID NO: 469650 - DNA, 75 bp, Homo sapiens
gcaacacagccttgtcccgggagcttaaggtggacccccaaaagtacaagggcatatttaacggattctcagtta

SEQ ID NO: 469651 - DNA, 95 bp, Homo sapiens
gatgtgcggggtgcgccggcagaggatccagtgttcaccatcctggccccggaagggttgtgagtcccggcccagcccctccacccccctgcccc

SEQ ID NO: 469652 - DNA, 73 bp, Homo sapiens
tgaaaatgaattcaacataccattaggatcttaccgagctgttccagacaactataaggtgatttttctgcaa

SEQ ID NO: 469653 - DNA, 74 bp, Homo sapiens
ggagaacacccccccatggaggcgagctgcaagctttcttcctggtggcagatgacatcatggattcatccctt

SEQ ID NO: 469654 - DNA, 83 bp, Homo sapiens
gtgcgatgtgcggaagggcacctccacccgatgtgaagttcatttccaatccgccctccatggtggcagcggggagcgtggtg

SEQ ID NO: 469655 - DNA, 97 bp, Homo sapiens
gccagctgactgcacttcttttttgagaaaggaaggaatatatcctgactgattatgctgtgagagaagtaaggaaatattcctcagttcataccat

SEQ ID NO: 469656 - DNA, 103 bp, Homo sapiens
atcctcattgctactgccctctgcgctcctgcatctgcctccccatgtcacccctcctaatttctcagtgtcacaagtgcccaacatgcccagctgtccccag

SEQ ID NO: 469657 - DNA, 75 bp, Homo sapiens
cagcaaccactccagaaactttccctccttcagttcgatcctttggtacagaagacagaccgacagatcgtccaa

SEQ ID NO: 469658 - DNA, 75 bp, Homo sapiens
gcaagcgcggggaaccaaggagacgctcctggcactgcagtggttcaatgcacagagaaagacgcaagtttttaa

SEQ ID NO: 469659 - DNA, 82 bp, Homo sapiens
cccctcttgtttgtgttgtgtgtggaaatggcgaactcggcaaatacaaacaccgtggaaagagccagacttctcagaggtc

SEQ ID NO: 469660 - DNA, 100 bp, Homo sapiens
gctcaaaacgcccgtgcggaccacggcctgtcagcacgtaacaatcaaccatgacgaccgaatctggatcagactcggaatccaagccggaccaggaggc

SEQ ID NO: 469661 - DNA, 50 bp, Homo sapiens
tgtcccctacgtcctacatgagacacttggcatttcacctgaagaaaaat

SEQ ID NO: 469662 - DNA, 87 bp, Homo sapiens
tgtgtcctgttccgcttctccgaggacgccttcaactccacttttatctccaccataggaagaaggtagataatgactataatgccc

SEQ ID NO: 469663 - DNA, 100 bp, Homo sapiens
ctacttgaagatagccatcagccgctacgtgactcttttctccagtttagaagaagaatgtgaatcctctctttgcacatctgcgttaagagccaggaat

SEQ ID NO: 469664 - DNA, 101 bp, Homo sapiens
gcagcagtgactccttcggagcccctccacaagttccatctaggcctacgagggccccgcccagtgtcccaaggtatgatcgggtacggcatggccaaggg

SEQ ID NO: 469665 - DNA, 98 bp, Homo sapiens
agctcatcagtgatgaggcccaggccgacctggcgctgcggaggttggtcaaagaaaaagtgatgtatgaaaaagaggcaaaacaacaagaagaaaag

SEQ ID NO: 469666 - DNA, 100 bp, Homo sapiens
tcgggctggtgcagccccgggccaggccgcggccggggcaggagcgcagttatagctgaggtggtaccagtttaagaagtgagaacttcttcactgactg

SEQ ID NO: 469667 - DNA, 100 bp, Homo sapiens
gggggcggcggtggcgccggcggcgggacagtctattcttattctgagaaggaacttatatgccacaatcagttctctctctttcttgttggctctggag

SEQ ID NO: 469668 - DNA, 100 bp, Homo sapiens
ctacgaccacaccgtgcgcttctggcaggcccacagcggcatctgcacccggacggtgcagcaccaggactccgcactgggggccacagtgctgatctca

SEQ ID NO: 469669 - DNA, 100 bp, Homo sapiens
aaggagtttctgggcaggaccggtggcagttggttcaccgttacttcatccccaatccgaggagcaggagatggaatggaaactgaggaaccacctaaat

SEQ ID NO: 469670 - DNA, 71 bp, Homo sapiens
tgtgcctagaggaattccagacgcccataacgtgtaccatcaagtcttcagccacattgtttctctagaag

SEQ ID NO: 469671 - DNA, 90 bp, Homo sapiens
caagccacaatttccatcaaaaagtgattaagcagagaatggagaagaaggttgattccaggctcgtcctttgacacgctacctgcctgt

SEQ ID NO: 469672 - DNA, 50 bp, Homo sapiens
ttgtggatttgccaggaatgaccaagacttcattatcctggcagtatggg

SEQ ID NO: 469673 - DNA, 75 bp, Homo sapiens
tggtgctgtaaccacctcacagattccagcttcggaacaagagaccctgatccagaagcagcaaggtctagcaat

SEQ ID NO: 469674 - DNA, 101 bp, Homo sapiens
ttttccaaagtcacgctcattggccggaggaagctcaccttcgacgaggaagcttataaaaatgtggtggtgttcccactgatgaagagcaggcgactggg

SEQ ID NO: 469675 - DNA, 75 bp, Homo sapiens
cttgtgttcatcctgttctagcatttccagatgaatgtggccccgtcccagagcaccacccgagacatcaggagc

SEQ ID NO: 469676 - DNA, 100 bp, Homo sapiens
taaagaagatccatttgtatttattcctgaagatgacccattatttccacctattgagaagcggtacctccggcggcgggcagctttgggacagctgaac

SEQ ID NO: 469677 - DNA, 100 bp, Homo sapiens
acaaataacaggacctccagaccgatgtcaacatgctgcagaaattattacagaccttcttcgaagtgttcaggtgggagatgccatcccagcagtggag

SEQ ID NO: 469678 - DNA, 51 bp, Homo sapiens
gaaagaatgtacagacattgagagcaggttcaagtgctggggccggcagtg

SEQ ID NO: 469679 - DNA, 100 bp, Homo sapiens
ggaaagaagatatgacctatgcagttcgaaaactggataacactaagtttagatctcatgaggctacggaaacaggccgagaagaacgtggagaagaaaa

SEQ ID NO: 469680 - DNA, 100 bp, Homo sapiens
gctgctgagcctgggaactgcaggcaatttatcatctcaagttccccttaagagacttctgaacacctggacaaacagatatccagatgctaaaatggac

SEQ ID NO: 469681 - DNA, 75 bp, Homo sapiens
tgctgcttcagcaaaacaagaaatttcaaaacttgatcaaggtggtgaagcagtattttccaatttgaagattca

SEQ ID NO: 469682 - DNA, 71 bp, Homo sapiens
ctggggctgtccctgctgcagcagcccaggaggagaagaattgctgaaaagggatcaacaatagaaacaga

SEQ ID NO: 469683 - DNA, 100 bp, Homo sapiens
tcaccgtgacatccgaggtgcctttctccaaaagagacgaggtcttgctacattgtccaggatggagaagtaggaattcttaaggatattgttatggagg

SEQ ID NO: 469684 - DNA, 75 bp, Homo sapiens
gtgctgctggatgttgctgttttcctggcgtgttagcggtggtcagcaggatatacgtggcatttcaagtgatca

SEQ ID NO: 469685 - DNA, 100 bp, Homo sapiens
tgcacgacgatgaggtgacagtcacggaatgtatcctgtcaggtataatgtcagtgaatggcaagaaagttcttcatatggatcgaaacccttactacgg

SEQ ID NO: 469686 - DNA, 100 bp, Homo sapiens
gaagaaaactacagctgggctctgcctgctgacctggggaggccattggctctatggaaaacactgtcttctcattcacaggttaaggctacctttccag

SEQ ID NO: 469687 - DNA, 138 bp, Homo sapiens
aaacagagctgagcagtggaatgttaactacgtggaaacatctgctaaaacacgagctaatgttgacaagaaaagcttcactggcctgagcaagaacttgctaagaagtctattctaaatgcagaagattcattgatc

SEQ ID NO: 469688 - DNA, 75 bp, Homo sapiens
gaggaagtggtcctaactcctgcagagctcattgaaagattggagcagtttttgaatcagagccgacaggcactt

SEQ ID NO: 469689 - DNA, 100 bp, Homo sapiens
actatgcagagacatgagatggtagccaacccctcagaagcacagatcagatttctaaaggccaaactccatgttatgcaggaggaattggataatgttg

SEQ ID NO: 469690 - DNA, 82 bp, Homo sapiens
tgccctgcagtacctgcagaaggtctctggagacatcttcagcagagactgacttgcataccaaatgtgtggtggatgtgga

SEQ ID NO: 469691 - DNA, 83 bp, Homo sapiens
ttctgaggcctccccaaccatgtgcaattcccgttttacggagaagacttttactgtgaaattcctcggagctttcgtcacct

SEQ ID NO: 469692 - DNA, 82 bp, Homo sapiens
gagcgcgagcggcgcgagaaacagcaatgcagagtccctggacaggctcctgccacctgtgggcactgggcgctctccccgg

SEQ ID NO: 469693 - DNA, 96 bp, Homo sapiens
ccccggagccgccggccgctagcgtcagcgccagccagatgttctacatttcaactccatcaaatattaaattgatgtttatgggctaacctggaa

SEQ ID NO: 469694 - DNA, 75 bp, Homo sapiens
tgccaagaagatgagaccgggggaggcgacgctaagttgctgatcgtggcgcaaaagctggcaggctgacagagg

SEQ ID NO: 469695 - DNA, 100 bp, Homo sapiens
aagcctatgtcaagtgtcaagataaagtgagtcagctgtacatggatatgggccctcacattttccaaacctgtccatctgctaactattttgactgcag

SEQ ID NO: 469696 - DNA, 82 bp, Homo sapiens
aagaaggagccagctgtacttgaactggagggcaagaagtggagagtgtcgttgcagttcgataaggagcagatggtcgcgg

SEQ ID NO: 469697 - DNA, 82 bp, Homo sapiens
agctcccacttgaaagcacaccagcggacgcacacaggaatcgggcgcctgattgctgagtgtcatctcaaccccatcatcc

SEQ ID NO: 469698 - DNA, 100 bp, Homo sapiens
tgaggacaatgataacagtttggcgtctgaccaaacacaccaagttcgtgcgggacatgattcgggaggtgtgtggctttgccccgtacgagcggcgcgc

SEQ ID NO: 469699 - DNA, 87 bp, Homo sapiens
gctggcgcacctgggcgtgcaggttcccgtgtcagtggctatgatgacacctcaagttatcactccccagcaaatgcagcagatcct

SEQ ID NO: 469700 - DNA, 75 bp, Homo sapiens
cttctccggcccctccagctgccccctgtgtggcaaacctttcttgagctcagggtttccaaagccacaatttcc

SEQ ID NO: 469701 - DNA, 74 bp, Homo sapiens
cacctacagaaacaaaatgtcaacaaattgatgggaggcagccttctgtgctgtgattcttgccctgctgcttt

SEQ ID NO: 469702 - DNA, 75 bp, Homo sapiens
actccaggagagcatgaatatggattatttccagcgcccattcatgttggatgggcgggatccccgctgtgaacg

SEQ ID NO: 469703 - DNA, 100 bp, Homo sapiens
ctctcagttgtcgtttctctcctgctaattcctgaaggtgtttcagtcacctccagtaacacgggcgtgccagatatctcgggttctgtgtactccaaaa

SEQ ID NO: 469704 - DNA, 101 bp, Homo sapiens
tcccagcaccacagtccttctgcagtccctcgtccagccacccccaggttgcccccaagtttcctggcagtgtgtgatactgaggaggtgagcttgtttct

SEQ ID NO: 469705 - DNA, 76 bp, Homo sapiens
ctagtccttccgatggaagcactagacaaagttcacctgaggtcttcgccttgatcgtgttctcctgcatctatgg

SEQ ID NO: 469706 - DNA, 73 bp, Homo sapiens
cgtcctggaattacttcaatcaatacctccctgcacttggctattcaaaacgggtccatctgatgaatcctat

SEQ ID NO: 469707 - DNA, 82 bp, Homo sapiens
cccaaaatgacaaaacgggaagcagcattaatactaggtgtaaggtatattcaagagcaaatgaccaagagccatgtgggtg

SEQ ID NO: 469708 - DNA, 83 bp, Homo sapiens
tcatatcaatcatagcattttctggacaaacctcagccctaacggtggtggagaacccaaagacaatgcagatcttcgtgaag

SEQ ID NO: 469709 - DNA, 75 bp, Homo sapiens
gcgggatggaggcggcggccgagggaatctggaaaaattgcaatcaaaacatcatttctctaagaaaattttggg

SEQ ID NO: 469710 - DNA, 155 bp, Homo sapiens
aaaacagtatcaagattcacctaatcaaaagaaaagaacaaatgggcttcagccagcaaagcagcagaattctttgatgaaaaggcgacggcggattgacagaagtatgattggagagcccacaaactttgtgcatacagctcatgttggatcag

SEQ ID NO: 469711 - DNA, 75 bp, Homo sapiens
ctcagaagagtggagggagcgaatcgccaacacgagtgtcatgcggttcctggtgtccaagcggaagttcaagga

SEQ ID NO: 469712 - DNA, 75 bp, Homo sapiens
cattgttttcagctaacagtaaccccagtcagccataatggcaggtgaagaaattaatgaagactatccagtaga

SEQ ID NO: 469713 - DNA, 74 bp, Homo sapiens
gcactatgtctgcggaagtccccgaggcagcctccgcggaggagcagaaggtatggcgtgagtcccgagaacat

SEQ ID NO: 469714 - DNA, 98 bp, Homo sapiens
gtgaactgtgaggagttcgccgagttccagggggcagctggcattttatgctatgtgggagcctatgtcttcatcacttatgatgactatgaccactt

SEQ ID NO: 469715 - DNA, 82 bp, Homo sapiens
agagctacattacagattttttcaacaggaagtatcacagtaacaggtttctaagcatgaattgaggaacagaagaagcaga

SEQ ID NO: 469716 - DNA, 88 bp, Homo sapiens
cgtcgccatggccgcggttcccgagttgctgcagcagcaggaggaggaccgcagcaagtagagacgggggttcaccatgttagccagg

SEQ ID NO: 469717 - DNA, 98 bp, Homo sapiens
tttgatgatattgtggatcccaatgattcagatgtggaggagaatatatcctctaaatctgatgttcaaaccttgtactactcagctgatcacaagct

SEQ ID NO: 469718 - DNA, 90 bp, Homo sapiens
agagaacctcatcaatttccacatttcttccaagttctcttgccctgagacgcttcgccgacacgaggtgaccatctgcaattacgaagc

SEQ ID NO: 469719 - DNA, 75 bp, Homo sapiens
gcctgggggctgaggatgacaaaaaagccttcatagacattcactactttcactgcctaagaatcctggaccttc

SEQ ID NO: 469720 - DNA, 50 bp, Homo sapiens
ctgaatctcctcccagctgaaggtggctggtcattgaccgcaaggtttac

SEQ ID NO: 469721 - DNA, 50 bp, Homo sapiens
gtcattcctttcctgtcccaagaggagtggagtcaacatatcaatggagc

SEQ ID NO: 469722 - DNA, 50 bp, Homo sapiens
caaaccatcttctcccaaggtttttgcagaatcaggaaacccaggcccaa

SEQ ID NO: 469723 - DNA, 90 bp, Homo sapiens
aaaagctgggaagctgaagtttatcattccttccccaaagagaccagtcaagctgctcagtggagggaaactcttatcactactattgat

SEQ ID NO: 469724 - DNA, 96 bp, Homo sapiens
caagtccatgtacacgcgagattataagaagcttgggttcattgatctgaagaagctgaagaaaaacaggacagtgagaaaccacttttagaacta

SEQ ID NO: 469725 - DNA, 100 bp, Homo sapiens
ttggagaggccgagggtttgatgaaggtggaggcagcgcggctctcaggtaactcacgtagtgctccacctacacgagggcccccgccatcttatggtgg

SEQ ID NO: 469726 - DNA, 75 bp, Homo sapiens
ctttcactgccatcggggacaaggtccctagctgttggtagtaagtccggttataaatttttctccctttcttct

SEQ ID NO: 469727 - DNA, 83 bp, Homo sapiens
caccaacggcgaccggatccggttcattctggacgtgcttctgcccgaggtgtggaaacaggaagagaactagaactggaagt

SEQ ID NO: 469728 - DNA, 75 bp, Homo sapiens
aacaggctgcgccaggctttatcggaccacagcttccctctcacatgataaagtggtatcctgaggtgcggcacc

SEQ ID NO: 469729 - DNA, 96 bp, Homo sapiens
cgtggacacctgtgtcagcatgtgggacctggttctctccatcgccttgtctgtggggtgcactggaggaccgagcagtggccaaggaagctgtac

SEQ ID NO: 469730 - DNA, 82 bp, Homo sapiens
tggtcatatccccctcctctctctctcagtcgatgatcggctgaatgtaacagaggaactaacgtccaacgacaagacgagg

SEQ ID NO: 469731 - DNA, 50 bp, Homo sapiens
tttcaccacaagaagggctgccagagatacggggtcaaccttcattcttc

SEQ ID NO: 469732 - DNA, 90 bp, Homo sapiens
ttctggtggggagatgaacccaacctagtgggtgtaatacatcatgaactgcaggctggtagcagtgtttgatgagcaggatccacatca

SEQ ID NO: 469733 - DNA, 75 bp, Homo sapiens
ggaatgaccaccatggcagatggcaacagaggatgtcaacaattttttggagaaacctctgcgccatgagagcca

SEQ ID NO: 469734 - DNA, 100 bp, Homo sapiens
tggcccaggttcttcaaaagatggcgaactttctgaccaagtatacaactacccagagggcctaggagaagtgctgtatagagagcagttcgacttcaac

SEQ ID NO: 469735 - DNA, 123 bp, Homo sapiens
gctcaccagcctggccgcagcactggatgaaaacaaggatggcaaggtcaacatcgacgacctcgtcaagatgatgtctttctacctaaagatattgacctagacagtgtggatatggatgag

SEQ ID NO: 469736 - DNA, 89 bp, Homo sapiens
aacacattacgatggatgatggaaacataagggtgaggtggctttgaccccgggttgcccggccagcacgaccgaggaggtggctggac

SEQ ID NO: 469737 - DNA, 100 bp, Homo sapiens
acaacatctttaccatctcatctcaagaatggaggtgtgaagcctcagtttaggtcatctggtggttcagaacactcaacagagggctctgtatccttgg

SEQ ID NO: 469738 - DNA, 96 bp, Homo sapiens
ctcagaactgttccttcagccaaagaaacaagccgtggaataggtgtatcaagtaatggtgcaaagcctgaagaaacagagcaaatgcagcgttac

SEQ ID NO: 469739 - DNA, 114 bp, Homo sapiens
tcgaccacttccagatccttcgggccattgggaagggcagctttggcaaggtcaccgacgatgagggcgcacctgctgtcctggagcttccgatctctgttcggggaccctgtg

SEQ ID NO: 469740 - DNA, 100 bp, Homo sapiens
ctccgtcctctgggctcaagcagtcctcgcatctcagcctcccaaggagctgggacctcagacccagactcttttcaagactacattaagtcctatttgg

SEQ ID NO: 469741 - DNA, 76 bp, Homo sapiens
gtcctccatgcgcagtcatgagtcgcttcaagtttatcggaactggcgctgaagaccctggggacagatggccttt

SEQ ID NO: 469742 - DNA, 82 bp, Homo sapiens
gatcagacgaactacgaacccctggacgggagagtctgccggcggagaatataagcagggaggagagagcgatggctttttt

SEQ ID NO: 469743 - DNA, 78 bp, Homo sapiens
ttagcgtgaaaaccacaagcaggtccaaagagagagtggacattgaagtggacctaattcggttttccttttaaaagc

SEQ ID NO: 469744 - DNA, 82 bp, Homo sapiens
ccagaaacccgacccagtgccgcgcagctgctggagccgctgctttgatgggagcacccctgtccatgcagcagcattttcg

SEQ ID NO: 469745 - DNA, 58 bp, Homo sapiens
ttggaggccggggccgcgctgagggcgcccagctgtttcaccagtgatcattaaagaa

SEQ ID NO: 469746 - DNA, 100 bp, Homo sapiens
atcaccctggacaaagtctgcaacatggctagagactgccgggactggtcagatgaacccatcaaagagtgcgatgatggtgtgagcatccccggggagt

SEQ ID NO: 469747 - DNA, 75 bp, Homo sapiens
atgtgcaattcttaaagaatgggcagagctgaagccatttattggtatcttggatggttaacatctaaatgctta

SEQ ID NO: 469748 - DNA, 100 bp, Homo sapiens
ttttctgttgtgacagacacttcacatactgctgattacaggctgtgccagccctggaaaaacagttacaattgttgttcgtggttctaacaaactggtg

SEQ ID NO: 469749 - DNA, 99 bp, Homo sapiens
gggcggacagcagcctcgggtgcaatcctggagccccccagtgaggaactcatcccaagaacagtatccataaggaagatggaaaagggggacagaata

SEQ ID NO: 469750 - DNA, 75 bp, Homo sapiens
ctacagccagtcttctatgtttccacatcggtcagaaaaagatgaagcagtcaattatagatttcttcaaaccag

SEQ ID NO: 469751 - DNA, 98 bp, Homo sapiens
ttgcgatggagcatatccggacgaccaaggccagcactccttgcccgaggacagagatggcgagcgcccggattggggatgagtatgcggaggacagc

SEQ ID NO: 469752 - DNA, 100 bp, Homo sapiens
gcagccgtcggagcacttactggagtccaagatgctaatggctttcctcttaacatcctttgcttattgcctcacttaatccagcattttgacagcccaa

SEQ ID NO: 469753 - DNA, 75 bp, Homo sapiens
cgcctgggtccctgctggagtatgctgggtgcagaggacgtggtgatggcgttttccaggtcggagacggaagac

SEQ ID NO: 469754 - DNA, 117 bp, Homo sapiens
aggaacattgggaaggatggcaaattccagattttagtttgccttggaacaaggcacaacttcctgaatggaccatgactcccaccaaagatccctgtctctgattcaccaaacagc

SEQ ID NO: 469755 - DNA, 83 bp, Homo sapiens
cgaaatggctgcagaaatcgactttctgagagagcaaagtggagccttttgccagcttgaccgaggccgtgcggagctcagtt

SEQ ID NO: 469756 - DNA, 82 bp, Homo sapiens
ccccacatgggcaccattgaaaggatgggacctgaaggagaagaaggagaaggtggaggagaaggcaagccggaaagagcga

SEQ ID NO: 469757 - DNA, 50 bp, Homo sapiens
ggagactgcatcaggctctcgttgctggatttgtgcgactcggtgaagga

SEQ ID NO: 469758 - DNA, 100 bp, Homo sapiens
cacgggggtccccagtccccgggccacggatccaccttcccatgatttttagactctgaggagcagttggagctaatccacattatggaaatggaaacca

SEQ ID NO: 469759 - DNA, 82 bp, Homo sapiens
cgccagatcaacctggagctctacgcctcctacgtttacctgtccatgtctgaccagtgcacaggacttcagggcttcctgg

SEQ ID NO: 469760 - DNA, 100 bp, Homo sapiens
agtacacctgtttccaggacaaccaagcattttcatgaaacaaccccaaataaaggaagtggaaccacttcagctggttggtggagaatttgaactggag

SEQ ID NO: 469761 - DNA, 83 bp, Homo sapiens
cgccgcccgtccacacccgccgccagcgggtccatatggaatatttgctggtagggatgcctccagaggactggccacatttt

SEQ ID NO: 469762 - DNA, 100 bp, Homo sapiens
acatgaagccagtcctgacaatgggcagaacgaattcagtgatatcattaagtccagatctggcagtacatgccacactactacccttcctgctcttgtg

SEQ ID NO: 469763 - DNA, 74 bp, Homo sapiens
gaacagtctcgttgctgcctctgtgtacgctgaggggggagattttaggtgatgggcaagtcagaaagtcagat

SEQ ID NO: 469764 - DNA, 76 bp, Homo sapiens
cttgctcccatccctgcagcatgaacaaggaatgaatctgaagtctgctgcagtaaaacacagaaggctttaaaat

SEQ ID NO: 469765 - DNA, 75 bp, Homo sapiens
gaaggcctgggttcagcgcaggatgatgctggatcagtgccttgaactgcaggcgaggccctgggaagggccagt

SEQ ID NO: 469766 - DNA, 74 bp, Homo sapiens
gcgagagcacgaattccagagcaagcagcaggcggagtctcgctctcagtcaaaatctccaacgggaactcctg

SEQ ID NO: 469767 - DNA, 82 bp, Homo sapiens
gctggccgggctggctgcggccgccctgggccgggccccaccggacgctgggagtgtccactcgccttccaccagcatggca

SEQ ID NO: 469768 - DNA, 83 bp, Homo sapiens
cgagggctgtggaagaaatatggagacaagaggattattgacactcccatatcagagggagtgcatccgccccaacccttttc

SEQ ID NO: 469769 - DNA, 83 bp, Homo sapiens
ctgactttcagctatggaatcggtgctgtcctggagccgagagctgccttgcgcttggcgcgccctgcacacctccccggtct

SEQ ID NO: 469770 - DNA, 98 bp, Homo sapiens
cccgcagcggcgccgaggacagtgcagccgagttgcgtctccctcgcgcgaggaggaaaattcttccagcgatggtctcccactcagagctgaggaag

SEQ ID NO: 469771 - DNA, 83 bp, Homo sapiens
cgtgtgaaggacctgtgtcagcgtgctgagtaccagacggcgtgtgagcagctgggacaggtgaccctggcagcaaccccaac

SEQ ID NO: 469772 - DNA, 96 bp, Homo sapiens
ggaccatcccccaatcctctcatcttgtcctacctgaagtatgccattagttcccagattcttggtgccaccattgagaactccaggattgtcctg

SEQ ID NO: 469773 - DNA, 102 bp, Homo sapiens
tgcaatgcaagaagggctgggccctgcatcacctcaagtgtgtagctggcgctcacataaacaaagacagcagctggccaaagctcgaactgcagagctggg

SEQ ID NO: 469774 - DNA, 75 bp, Homo sapiens
taatcaaaggccttcagagactggagtacagaggatatgattctgctggcctctctatccggagcgtgtgctgga

SEQ ID NO: 469775 - DNA, 101 bp, Homo sapiens
gggcagacggattcatttagagctgcggaacaggacgccctctgatatgaaggatttgggggcagagcacttggcaggtcatgaaggggtccaacttctcg

SEQ ID NO: 469776 - DNA, 119 bp, Homo sapiens
cggctctccgccgtccccagccctgcctctccctgggctctggtgtggatgaggtcaccattgtcaacattttgaccaaccgcagcaatgcacagagacaggatattgccttcgcctac

SEQ ID NO: 469777 - DNA, 71 bp, Homo sapiens
acaagtacatgtttgctacaaaggtggtggaacaatatgaattatactgtgagatgggctccacattccaa

SEQ ID NO: 469778 - DNA, 74 bp, Homo sapiens
acacgatgagcgtgtgttggttgctttcggccagcgggacggcatccgagacaatgcagatcttcgtgaagact

SEQ ID NO: 469779 - DNA, 76 bp, Homo sapiens
gaccgggagatgatcctggcggattttcaggaatttagataatgggctgtgtgcaatgtaaggataaagaagcaac

SEQ ID NO: 469780 - DNA, 50 bp, Homo sapiens
tttaaacaagagatttccacagaagggcgccaactgctgcgattccagga

SEQ ID NO: 469781 - DNA, 75 bp, Homo sapiens
tgcggaagggcacctccacccgaatgatatggaacctagcaaagctgttccactgaatgcatctaagcaagatgg

SEQ ID NO: 469782 - DNA, 73 bp, Homo sapiens
taaagaccagatcttgctggaaaaagaagctgagattgactggggcgactttggggtagaggcagtgtctgag

SEQ ID NO: 469783 - DNA, 88 bp, Homo sapiens
aaccctgttagtgatctcctagcatcagggaagcaggagctggccaacagctcggatgcgaccctcccagaccggccgctctcccctc

SEQ ID NO: 469784 - DNA, 101 bp, Homo sapiens
gtgcccagggccccgggcccgagcccaccttaggtcccctcacccggctggagggcatcaaggatgggtcatcagttaaggaagttgaaacctaccaccgg

SEQ ID NO: 469785 - DNA, 50 bp, Homo sapiens
gtctctgccaagaaccaccagtctgcccatgtccctgagcaccattgcaa

SEQ ID NO: 469786 - DNA, 100 bp, Homo sapiens
cggacgtcggcttctccccgcgggagcccccagcatggggacaggaccagatggtagaatcaccaagaaggatatcgactcttttgtgcctagtaaagtt

SEQ ID NO: 469787 - DNA, 83 bp, Homo sapiens
atcgccgtggccaacatcgtcaactctgtgaagcagcggcctctccaggcctacaagccggaagactgtgcagtctttgtaac

SEQ ID NO: 469788 - DNA, 83 bp, Homo sapiens
cccgggagcagggagggctccgctagcccggggggccctccccgcggggcagatgttgttgccgaagagattggactgggagg

SEQ ID NO: 469789 - DNA, 82 bp, Homo sapiens
cagccctcgcctcccgagtcactgcagccaacccttcagcaaggtgaggcggaaccaaccctcctggccatgggaggggccg

SEQ ID NO: 469790 - DNA, 50 bp, Homo sapiens
ctctacagcttacctcctgaaggtactccaaagattcaggtttactcacg

SEQ ID NO: 469791 - DNA, 88 bp, Homo sapiens
gatggagacaccctctgggggtcctctctgagtcaaatccagtgatgagccccgctagggccgccccgcgctgagagcccagccccgc

SEQ ID NO: 469792 - DNA, 75 bp, Homo sapiens
cgccgccggagctaacctcggggaccgagatgcaggtgagcgtgtaggagccttcactatggtctgcaaagatgc

SEQ ID NO: 469793 - DNA, 101 bp, Homo sapiens
gagacatgaaaaagatgagcaggaatgttttgctacaaatggaggaggaggaggacgacgacgatggggatatcggggataaaaacattcagatggcagat

SEQ ID NO: 469794 - DNA, 50 bp, Homo sapiens
atcactttagaccctccacctaattgcagcttaaagcttttcaagccagg

SEQ ID NO: 469795 - DNA, 100 bp, Homo sapiens
gttccagtctctgcagtctttatggacaaacctgaagagtttatatctgaaatggacacgttggaacttgccaggaatccagcaatgatgcaggagatga

SEQ ID NO: 469796 - DNA, 100 bp, Homo sapiens
ctcaacactctgaactgaaacaagaagatatgcacccaatgtccagggagcgtgcaaaatttgtcaaaagtggccttttattgtaaaacgacacgagagc

SEQ ID NO: 469797 - DNA, 75 bp, Homo sapiens
agatgatacctttctaacagcccaagggctatctgatgggttagagtgcctttgagaagaaatcagtggatactg

SEQ ID NO: 469798 - DNA, 100 bp, Homo sapiens
gcggcggcccgcagagaccctcggaggtggacccaagtggagagattgtggaactggcgaaaggtgcatgtccctggaaggagcatctctaccacctgga

SEQ ID NO: 469799 - DNA, 74 bp, Homo sapiens
gaaggagccattatttatgtcatcaagaagaatgacgatggtcaaaatgcagatcttcgtgaaaacccttaccg

SEQ ID NO: 469800 - DNA, 119 bp, Homo sapiens
ccatgaacctcctgccgtgtaaccctcacggcaacgggctgctctacgccggcttcaaccaggaccacgagctcccagctcctccagcagccgacaggaggcccgtcaagatgcaggca

SEQ ID NO: 469801 - DNA, 75 bp, Homo sapiens
cttcgatcgcctcgcgccggctgctctttccggtgatgaacggcagcagccactcaccaacagccatcaatggtg

SEQ ID NO: 469802 - DNA, 83 bp, Homo sapiens
tccaggacacccctgaagccgagaaatgatcttgatgtggaagaaatggaggactcagaaccaaggatttccaagtgatttct

SEQ ID NO: 469803 - DNA, 108 bp, Homo sapiens
cgccttttctggcggcggtagatttgaagcgcttcaaaggaccggacccagagaagaggaaaactctaccggtgcaggaaatctactttcttcaatgtgttaaccaat

SEQ ID NO: 469804 - DNA, 100 bp, Homo sapiens
gctccacagagaatgctctgcacccgttgatttccagctattcttcagatgctctggattttgagacggagcacaaattggaccctgtatttgattctcc

SEQ ID NO: 469805 - DNA, 100 bp, Homo sapiens
gcgtcccccgggggcccgtactgcacatcgtggtggtcggatttcaccacaagaagggctgccagtgtctcagtttgaaactgaattctacatcagtgga

SEQ ID NO: 469806 - DNA, 100 bp, Homo sapiens
tgggatgctggaggacatctgggggccacaaatgctccttctcctggagacgcaactcaaggttatctaccttgcctgctcctatgccacagtgtacctg

SEQ ID NO: 469807 - DNA, 75 bp, Homo sapiens
gagattgtgaagaagaatttcgatctccgccctggggtcattgtcagacgaagggaacgtcatcgtttggaaagc

SEQ ID NO: 469808 - DNA, 100 bp, Homo sapiens
tgccaatggagaaaccagcaagggtgatgagctgcgctttggcccgtgtgaaggcaaagaagaatgctgctccattcagaagtgaagtctgctttgggaa

SEQ ID NO: 469809 - DNA, 101 bp, Homo sapiens
gacttaatggtacagattcattctattcttgcaaagattggaccaaaaggcatccaaccatgatgaggtaccttgttgaacaaactaactctgccactgag

SEQ ID NO: 469810 - DNA, 101 bp, Homo sapiens
aaagcagatctggatcatcaaagacagctgtcggaaaaggtaacagaagatggaactcgaaatcccaatgaaaaacctacccagcaaagaagcatagcttt

SEQ ID NO: 469811 - DNA, 75 bp, Homo sapiens
aaggaccagcataacctctacaatgggtgcaccgtggaagactatgaccgtctgaggcctttatcttacccaatg

SEQ ID NO: 469812 - DNA, 98 bp, Homo sapiens
cagagtaaactcaagatgctggagaagcttcatcttccctcatctccagtgccacagcagcagctctactgagctctggggctgtggactactgcctg

SEQ ID NO: 469813 - DNA, 100 bp, Homo sapiens
tcatcccagtagttttggaatgtacccatctcagatgaagtctgagtgtacggtttgcagatatgcctggaaaatcaaggaagaaaaagaagaacatgaa

SEQ ID NO: 469814 - DNA, 100 bp, Homo sapiens
tgcttggaattctgcccactctgcggagttagcagtcacgacctccagcacagtaacaatttggacaagacagcaaatgctattgtcgaagttttctaaa

SEQ ID NO: 469815 - DNA, 100 bp, Homo sapiens
cgacaagccgctggcagccgcggatctcaccgccgctcaggatcacccggaagttcaggctgaattctgaaggcaaacttgagcagacggtctccatggc

SEQ ID NO: 469816 - DNA, 87 bp, Homo sapiens
cgggcggacagtctggactcctcaggcctctcctctgagcgctcagactcagaccaagtgtatcggatctgtcgttctggaaagaag

SEQ ID NO: 469817 - DNA, 100 bp, Homo sapiens
gtccacattctgcacctgatagtgcaacacttcaaggcaaatcctgatcctaactgttgtcttggagtatttgggctgagcttgtacaccacagaaagag

SEQ ID NO: 469818 - DNA, 75 bp, Homo sapiens
tgcgtcatcctaaggaacatcgacggcaccgcgtccgtgctgcagcgccggtcccccaatgaggagtacgtggag

SEQ ID NO: 469819 - DNA, 98 bp, Homo sapiens
cacgcccctgcccgaagcctgacccgactgcctctctcagtgagtgagaagcgccaccttcaagtgaacgtcaccaacccagtacagtgcagcctgca

SEQ ID NO: 469820 - DNA, 75 bp, Homo sapiens
cggacgccgacgaaagccagcgagctcctcagcctcaggtgctggagaatctggtaaaagcaccattgtgaagca

SEQ ID NO: 469821 - DNA, 83 bp, Homo sapiens
cgctcatcatcccccccgacgccgtcgcggtggactgcaaggtgcactttacaggtccccgatgaaccaagagaaccctccac

SEQ ID NO: 469822 - DNA, 98 bp, Homo sapiens
tggttctccctgggctgcatgcttttcaaacttctgagaggtctgcgggccaggcatcgacatccgcaacgactatcagcagctgaagcgcctggaga

SEQ ID NO: 469823 - DNA, 82 bp, Homo sapiens
gctggagctggagctctcggagggattcctacaggaagcaagtagtaattgatggagaaacctgtctcttggatattctcga

SEQ ID NO: 469824 - DNA, 82 bp, Homo sapiens
gatctgcccacctcagccttccaagtagctgggactacagacatgcgccagcacgcctggtgaatttccaatcatcagccca

SEQ ID NO: 469825 - DNA, 98 bp, Homo sapiens
gcagccaacctatgttgccctgagttacataaatagaacattgacatcaccaatttcagcagcagctggagcgatggcctggccttctgtgctctgct

SEQ ID NO: 469826 - DNA, 92 bp, Homo sapiens
aggaacgaggcaaggagctaaagcagcgtgcgttcagccctggggtactggctgtgatcgaacttctcaaccctcagagacttagatcttcc

SEQ ID NO: 469827 - DNA, 94 bp, Homo sapiens
ccaccatgtctctgaagcatctcaccaagaagctgctaaaccgggatatccagagcctggtgaaatgggagagtgagaataaaatggtctgtga

SEQ ID NO: 469828 - DNA, 98 bp, Homo sapiens
gcttatactggagaggtttctacaggaacacgaggaaactccacaaatacactttcgggaaatggcctctaaatcctggctgaattttttaaccttcc

SEQ ID NO: 469829 - DNA, 100 bp, Homo sapiens
ggatcaagaagatttctttcttcatgaccctgcccttgccagaatttcctgcgctgttccacctcattcaacttcagaaaatgacagatggcgagacctg

SEQ ID NO: 469830 - DNA, 100 bp, Homo sapiens
cagacctggcactacttgtccaagacgtactggtggcgaggtgtcatggagaaactccagctgggcccagagattctgcagcgggaaaatccaaggctta

SEQ ID NO: 469831 - DNA, 100 bp, Homo sapiens
gatgaagacccagcattattccagtcagtcaagaccaagagaggccctttgggacccaactggaaggctcgtgaagaagaaatgactgcaaaagtaaggg

SEQ ID NO: 469832 - DNA, 100 bp, Homo sapiens
ttcaggaaacatccaagaaaaatgtccttaaagcaattgagcaggctgatctactgcaggagatgaccttgaatgatgccatgaggaacaaggcaaggct

SEQ ID NO: 469833 - DNA, 119 bp, Homo sapiens
gtttttcctgtcgtacgtgggacaggccacgctgtccgtccgcagtaccgacgcctgcaggcctccggtgtggctgtctctgatggtgtcatcaaggtgttcaacgacatgaaggtgcg

SEQ ID NO: 469834 - DNA, 90 bp, Homo sapiens
ggactatgaaaagaacgctaaaggttccaactactggagaaacaggatgtgatggtggtgggggagcccaccctgatgggcggggagttc

SEQ ID NO: 469835 - DNA, 98 bp, Homo sapiens
cctgcatgtctggctacctcgtggacaagtttgcagatcgggagcgcaaggtcgccctcaaggccatgatcaaaacaaacggctcccacatctgcata

SEQ ID NO: 469836 - DNA, 100 bp, Homo sapiens
gataatatcaaggacatcaggacaccgggagtgggagagattggactgggagactcagcagaacccagaagtaccatggcttctgacctagagagtagcc

SEQ ID NO: 469837 - DNA, 75 bp, Homo sapiens
cccaccggaggtttatcacaagctctggattaatcgaattacagctgctagccaggaacatggactgaagtatcc

SEQ ID NO: 469838 - DNA, 100 bp, Homo sapiens
atcctgctcgtccatgtcctgctcatgcccaggtgtctttcctgaagactatcttcccgtctcaaaatggacatgatggatccacggatgtacagcagag

SEQ ID NO: 469839 - DNA, 50 bp, Homo sapiens
gaggaattccaagatttttttagtttgtcagggagccactggtgatgtgg

SEQ ID NO: 469840 - DNA, 50 bp, Homo sapiens
cctggcacccggtgcttatgtctttggctacaagcatgagacgaagctga

SEQ ID NO: 469841 - DNA, 83 bp, Homo sapiens
ccaggaagtgaaaatgtgctgcctcgagagccgctgacaatgcagatcttcgtgaagactctgactggtaagaccatcaccct

SEQ ID NO: 469842 - DNA, 100 bp, Homo sapiens
cttcccaggggcttcctttggactggactgtccctgctcatccattctcctgccacccccagacctcctcagctccagggtgacatccagcagctgctct

SEQ ID NO: 469843 - DNA, 100 bp, Homo sapiens
gaaaactctataccgtcatcctcgtcgaactgaggtccgtaaaattattagagtttgcaaaggaattttggaatatcttacagtggcagaggtggtggag

SEQ ID NO: 469844 - DNA, 90 bp, Homo sapiens
ttgctttcattgtgggagagatgaagaacctgagtcaggacgtaaatggaaccctggtttcagcgttaaaaacaatggccagtcagggag

SEQ ID NO: 469845 - DNA, 98 bp, Homo sapiens
ttcaaagcacctagtacctcctaccattgtcaactggaacggaaaacagttcttccttcaaagcatgcagtacctgaagtaatagaagactttctctg

SEQ ID NO: 469846 - DNA, 90 bp, Homo sapiens
cctcccggcttcccggcttcccgtctcgtcaccctctgcactggcctgtgtttgtggaggtgaaagaccttttgacattggtgccgcccc

SEQ ID NO: 469847 - DNA, 75 bp, Homo sapiens
aagattcttccaaggaaccagtgcgaaggatttcaaatatgcgtgcattagagaatgattttttcaattctcccc

SEQ ID NO: 469848 - DNA, 75 bp, Homo sapiens
gttgctaagacttggcgaagcgctgcgctcgcgcccggatccctcaggtctcggcgcggaagatggccggcggcg

SEQ ID NO: 469849 - DNA, 99 bp, Homo sapiens
gagaggagcgtcaacagcagcaccatgggcatttataagacgctgtttggcatatcgaaaagaagatcgatttgatgtgcaccagctggcaaatgaccc

SEQ ID NO: 469850 - DNA, 90 bp, Homo sapiens
gggcgccctccgccacgcagccggccaccgccgagacccagcacatcgccgaccaggtgtgcaactgaggaacatggctcaagaaactaa

SEQ ID NO: 469851 - DNA, 75 bp, Homo sapiens
gcctcctttgaccagatccatgactgttggtggaggggcaacccccttcatttatctcgtgagcggtatcggaag

SEQ ID NO: 469852 - DNA, 100 bp, Homo sapiens
gtcatttgtaccagttaactaacttgggaggaaacagaacaacacactcctgaggtgggaatgatggttagatgctgccgaacatacgaagaagtgtgcg

SEQ ID NO: 469853 - DNA, 101 bp, Homo sapiens
ataacctggacttcaatccacctcatgtacatgagtggttattattgagtcgagaatttttgggaaaagtaacacgtggagagtcaatttttgagtggaag

SEQ ID NO: 469854 - DNA, 74 bp, Homo sapiens
tcacctttaattacaatctagcagacggaactgaactcaggctggagaatgctggaggagaccttaaggatggc

SEQ ID NO: 469855 - DNA, 90 bp, Homo sapiens
agacatcatgagggccgttaccattacgatccatctccgattcctccattgcatatgtgaaaggtgtagcagtcactcggcctacaccca

SEQ ID NO: 469856 - DNA, 74 bp, Homo sapiens
cccgcctgcccgcccgggagctgtcggccccggcccgactctatcacaagaagttatttctcaaactctgaggc

SEQ ID NO: 469857 - DNA, 100 bp, Homo sapiens
ggggccacagatttacctttgctatagaagaggaagagataagcctccacttacagatctgggatatttggagttcttacaacatggcagacattgacaa

SEQ ID NO: 469858 - DNA, 74 bp, Homo sapiens
gcctggctcggagcagcagcctctgaggtgacgcatccaaagaagacattgacactgctatgaaattaggagcc

SEQ ID NO: 469859 - DNA, 88 bp, Homo sapiens
ttgccaggagcacagtggccacaccatagtctccctggatgcagcccgcagggacaaggagctttgtttgctagcaaaatgctttaag

SEQ ID NO: 469860 - DNA, 100 bp, Homo sapiens
tggagaaggcgctccggggcgaagcagtttctccttggaccaagatgactgatggaaaactctccacctctacaaatggcgtagccttcatgggtattct

SEQ ID NO: 469861 - DNA, 83 bp, Homo sapiens
gtccaggctgaagaagactctggtagtgggcagcagtcagtgacaggtgtaacctctgtggatgacagcaacagttactggag

SEQ ID NO: 469862 - DNA, 83 bp, Homo sapiens
cgcgggagcagttggggactcaatgtgtgggcaacaaggcttgttagcagtggcacaagatcttacagaggatgaagaaacag

SEQ ID NO: 469863 - DNA, 100 bp, Homo sapiens
cggaactctcccgtcaacaccaagaatcaagctgtgaaggtgctgatagtctgcagcacaggtttagctgggattatgctgctcaactaccagcaggact

SEQ ID NO: 469864 - DNA, 90 bp, Homo sapiens
atcccgtcctttcgctatgaagagagcgacctggagcggggatacacgtccatctcaggttttgcgcacagctgcttccagtatgccatc

SEQ ID NO: 469865 - DNA, 74 bp, Homo sapiens
tgtgggcagaaagttgaggaagaaagaactcaagtacaacccaatgaggatgatgccaccagtccccatttctc

SEQ ID NO: 469866 - DNA, 100 bp, Homo sapiens
ggattgagtctctggggagcccctcaaaagcctgatccagacatttaatgtggatgcaccatgccagaccgtggaagatttaacgaatggggttgtgatg

SEQ ID NO: 469867 - DNA, 51 bp, Homo sapiens
tgggaactgaggaagcgcccaagagctacttcctcagccgagcccagagcc

SEQ ID NO: 469868 - DNA, 100 bp, Homo sapiens
tggtgtgggccttgcaaaatgatcaagcctttctttcatgatgataaggatgccttctatgtggcagacctgggagacattctaaagaaacatctgaggt

SEQ ID NO: 469869 - DNA, 75 bp, Homo sapiens
aaggagtactcaaaatcgatggatgagagccggctggataggattggagctggagtgagccttccaggaattttg

SEQ ID NO: 469870 - DNA, 88 bp, Homo sapiens
tggcgctttcctgggttgcttctggcggccatggtgttgctgctgtactccttctccgggcacacgtgtttcacgttgacaggtttgc

SEQ ID NO: 469871 - DNA, 145 bp, Homo sapiens
aggccaacatacttacccagaaccgctgtcaaaactgcttccaccctgaggaggcccatggagcaagataccaggttgtcttgctcttcccaaattgaatttgcagtttttgactcttcatgactacctgctaaggaactttaac

SEQ ID NO: 469872 - DNA, 90 bp, Homo sapiens
ctggaagaaggccctcaccagaacccaacccttggacttcagcctccagaactgtttactcctggcttgggggcattaggaagcactgga

SEQ ID NO: 469873 - DNA, 95 bp, Homo sapiens
tacagcaaacatcattcaagatgtccagcaaagggagcagcacagatggcagaacagacttagctaatggtcccagaacagttttcttctgggct

SEQ ID NO: 469874 - DNA, 97 bp, Homo sapiens
tcccacctgcatgtaccggctccccaacgtgcacggcaggagctacggcccagcgccgggcgctggccacgtgcagtagagacgggggttcaccatg

SEQ ID NO: 469875 - DNA, 100 bp, Homo sapiens
tggcttttaaggaggacacccggacacctggaagctgggaaatgtgactgtgaagtgctgaccacactcaccccagacactggccgtatcctgtccaagc

SEQ ID NO: 469876 - DNA, 83 bp, Homo sapiens
cgggcactgagcaccgccaccatggggaaggggctgactacacagacttagtcttctccactccgtgttcctgcagctagaga

SEQ ID NO: 469877 - DNA, 82 bp, Homo sapiens
ccgcgaggacgaggcggcgccgccgggctgtggagaaggatatggccctgaagccacatgagcggaaggagaagtgggagcg

SEQ ID NO: 469878 - DNA, 110 bp, Homo sapiens
agaactgggaataggaaggcttccggtagtgcttgcccagattgttgcctgccctgatgtgcttcctcggaagatggcaacacctggagcagtgcaggagtcctgcagcc

SEQ ID NO: 469879 - DNA, 100 bp, Homo sapiens
gtcctctgacatcgcctgcagccgagcgggcccgttccgccggagctgaggaccaggctctttattgagaaactaccaaaacatcgagattacaaatctg

SEQ ID NO: 469880 - DNA, 98 bp, Homo sapiens
ccgcatcgcaaccaccgccctggccatctaccatgtggactttgagtacccagactatgatgactacagagcagaggctttccttcaccaacagaaga

SEQ ID NO: 469881 - DNA, 75 bp, Homo sapiens
cgacggccgctgcctaagctggaaagagctgactgctgggcaggaacgtctctcaggagaaagagtggaagagaa

SEQ ID NO: 469882 - DNA, 96 bp, Homo sapiens
tgaagcggccaatggcacggaggcctgcgtggccaattcctgtccccccagcagcatggcatcgtgtgctgaaccctctgagccctctgccccact

SEQ ID NO: 469883 - DNA, 100 bp, Homo sapiens
gcgaggttctgagaattgcggcgagggtcgcctcgagagacggtttctgaggtgtgtggggcctcgggtcagttcgagttggagatcctgtccatgcaga

SEQ ID NO: 469884 - DNA, 98 bp, Homo sapiens
tatgaaaccatggtaaactttggacggcaaggtttaaaccttgcagctactgctgctgttactgcagcagtaaagagcagttcagagccccagttgca

SEQ ID NO: 469885 - DNA, 104 bp, Homo sapiens
gacagcagatgattgaagtggaaatatccaaacaggccctccagaatgagctggagagactgaaagagctttaccgatttgttacaactcaagcaagggccagc

SEQ ID NO: 469886 - DNA, 83 bp, Homo sapiens
cgacgacatggcctccgctatgaaggcgaacacaccacagccatcagcactggaatgcaaagaccagaacaaacagaaggaag

SEQ ID NO: 469887 - DNA, 80 bp, Homo sapiens
aagagcgacaagccgctggcagccgcggatctcaccgccgctcaggcaaacggggattcagcgtccgatcctttggaaca

SEQ ID NO: 469888 - DNA, 75 bp, Homo sapiens
ggtcccgccaagctgccgcactcacaccagcagaaccaaaatcgtgtgtggtggcagatcctcctcttcctgcac

SEQ ID NO: 469889 - DNA, 82 bp, Homo sapiens
gaattctaatttgaaccatgtttggattgaagccgcctctgtattacttaccagagatgccctgtatccaagcccaatatgg

SEQ ID NO: 469890 - DNA, 75 bp, Homo sapiens
gacaatggtcaccgtctcttcagatggtcctggtgctgcccaggaacccacgtggctcacagatgtcccagctgc

SEQ ID NO: 469891 - DNA, 75 bp, Homo sapiens
agaagaggtcccaatcccccactctttccgccctaatggaggtctccagtttcgcacattttctgtgacaagttt

SEQ ID NO: 469892 - DNA, 82 bp, Homo sapiens
caagaacctgcgggaggacggagagaaggcggcgcgggaggtgaagttgctgctgttgggatttttagactctgaggagcag

SEQ ID NO: 469893 - DNA, 80 bp, Homo sapiens
aaggaagagtggtaggagtgacccagcctcgaagagtggctgctgttacagcatcataggcgagtattagtggaatggct

SEQ ID NO: 469894 - DNA, 75 bp, Homo sapiens
gcacaatatcgggcagaaagataatcacggtgaggaaaatagcagctgaatactatgacaacctccctcactaca

SEQ ID NO: 469895 - DNA, 100 bp, Homo sapiens
ggcgaccggcggcgtccgaggaggtttctgctgatgtactccacggttctgtgcagctattacaattcagccctgacgacagcagtggttggagccatca

SEQ ID NO: 469896 - DNA, 100 bp, Homo sapiens
gtagcacgagtgcgggcagcagcagccccggggcccggagaggcataatagtggatccttgaatgttgaagatgtccttaccagctttgacaatacagga

SEQ ID NO: 469897 - DNA, 83 bp, Homo sapiens
atcaaatccgtgtcggagtccttacagcttcagaggatgattccgaagaagacggagaccataacaggacatttgatattgcc

SEQ ID NO: 469898 - DNA, 82 bp, Homo sapiens
gcaggttggagccgctgccgtcgccatgacccagtgcctggtgaagaatgtgatgggatcactagcatgtctgcggagagcg

SEQ ID NO: 469899 - DNA, 100 bp, Homo sapiens
tctcatattagtgcctgtgatggcatctttcatctaacactcacgtgaactggaaatttcagtttattggcgtgattggcggtctctgtgtgctgtaaaa

SEQ ID NO: 469900 - DNA, 82 bp, Homo sapiens
ctcagttggaagcagccgatccagcctgcggagcctgtggggcaggaagttctactacatcaccctgctacgagaccccgtg

SEQ ID NO: 469901 - DNA, 98 bp, Homo sapiens
ttagaagcagtataggcacagctcctccagataccagcacatgcagcccatctgctgacattgggactactactgagacatttctcttgggaagttgt

SEQ ID NO: 469902 - DNA, 82 bp, Homo sapiens
tcctctgttgttggatggagtgtccttgaaatgttcattagaatggcaacatacttgtttaacattgaattctgtgcaagaa

SEQ ID NO: 469903 - DNA, 96 bp, Homo sapiens
atcagcggctctttgtatgatgacttctgggaggtgatcagtgatgaacatggcatcgaccccaccggcacctaccacggggacagcgacctgcag

SEQ ID NO: 469904 - DNA, 101 bp, Homo sapiens
gaaggttgtccttatcagcagatcaaaggataaacttgaccaggtttccagtgaaataaaactgataaatttcaaacggaagagagtggcagcatttagaa

SEQ ID NO: 469905 - DNA, 100 bp, Homo sapiens
aagacatttcctctcctcccctctggatttctcagaggcaactcgagatgtggtgctgagccgggtgccggagcaggaggaggaccggacagtgagcttg

SEQ ID NO: 469906 - DNA, 120 bp, Homo sapiens
agaacccggcgagagtgattgccatttggctgaagtgtggtgtggctctggtgctactcgtgagcagtagtcgccatccagacagatggattgtccctggaggaggcatggagcccgagg

SEQ ID NO: 469907 - DNA, 115 bp, Homo sapiens
cctgaccaccacttgctctgcgctgaggtgctgggacagccatggtttcagacgacaatgcagatcttcgtgaagactctgactggtaagaccatcaccctcgaggttgagccca

SEQ ID NO: 469908 - DNA, 75 bp, Homo sapiens
cctgcactctcatcgctctcggcctcggcctcggcctccgacacggctgaggctgaggtggcctccttgaaccgt

SEQ ID NO: 469909 - DNA, 85 bp, Homo sapiens
cattcacatacgtcaaggaaattgaggtgttcaagcagccctggccagggatcatgcgcacagtctatgggaaccacgaacgctt

SEQ ID NO: 469910 - DNA, 125 bp, Homo sapiens
caaaaccatgactgcgctggccaaggccatctccaagaacgtgctcttcgctcacctggatgacaacgagaggaggtacatgtcccagagcaagcacacggaggcccgggagctcatgtactcgg

SEQ ID NO: 469911 - DNA, 75 bp, Homo sapiens
aggaaacatccctggcccaggatcagtaggtggaatagctccagctatcaaatggctgttgatggtgggtgtggg

SEQ ID NO: 469912 - DNA, 100 bp, Homo sapiens
agcgtgagcagccggaggatcgcggagtcccaatgaaacgggcagccatggccctccacagcccgcaggctgaagccgacgtagcttctctgaacagacg

SEQ ID NO: 469913 - DNA, 100 bp, Homo sapiens
ctggagtctgcgaaggccgggacccggttccccggcccacagtgggggtgtgcaaacccgagagaactggccttttccccacgactctgaaagaggacag

SEQ ID NO: 469914 - DNA, 88 bp, Homo sapiens
gggacgggcagctagcgcgaccctgagccggcgcccgtggtccggccatggacgacctcggtttgatgaaatcctggaggccagtgat

SEQ ID NO: 469915 - DNA, 100 bp, Homo sapiens
tgcttcagagtgtgaagtcaaatgcatgccaacattccagttttttaagaagggacaaaaggttttcattgctcagtcccgatcatctggaagtcaccga

SEQ ID NO: 469916 - DNA, 100 bp, Homo sapiens
gcagaatctccagaacaaggaggaggtggtgatcatggagacagatttggctgaaatgcctgagaaaggaggtggcattggtagggtggtcaacggagcc

SEQ ID NO: 469917 - DNA, 102 bp, Homo sapiens
ggactgagtggacctttgagtgacaagatgggggtgttccaaagagaccatggcagcctgcagctaggactttaatattagtgatgatgaaccaggttatga

SEQ ID NO: 469918 - DNA, 74 bp, Homo sapiens
aggacccgaagcctaaattccaggaggctgagctgactgctgcccactttggaggaggcggtgggctccttcac

SEQ ID NO: 469919 - DNA, 100 bp, Homo sapiens
ccaagaccgtgctggtctttctcaacctcatcttctggctcaacctgaattcctgaagcagcctactaatatatatgctcacgaatctatggatattgta

SEQ ID NO: 469920 - DNA, 75 bp, Homo sapiens
atcaccttaaggtgttaagtgtaaggatcttcatgatgaaatttctgtaaatggatacaatgtctctttgctata

SEQ ID NO: 469921 - DNA, 75 bp, Homo sapiens
gtctgggatgcgctgggagcctaggatccccgacaggatcgaatcatcaatttagttgttggcagcttaacatcc

SEQ ID NO: 469922 - DNA, 90 bp, Homo sapiens
ggcctttatgcaatggttggggctgcagcctgcttaggaaaaccagtgttctctggacatgaaaagcaaactgaatacaagtaaacaagc

SEQ ID NO: 469923 - DNA, 74 bp, Homo sapiens
aactaagcagggcggtcgggggacctcagcagccatgtcgaagccccatagtgaagccgggactgccttcattc

SEQ ID NO: 469924 - DNA, 98 bp, Homo sapiens
acaggaagacctgcaccactgtcgccttcacacaggcatttgttgctatcggggactacaatggccacgtcggtctgggtgttaagtgctccaaggag

SEQ ID NO: 469925 - DNA, 75 bp, Homo sapiens
tgacatcaagagacctatcaagacctgtatccaggaaaaggtccttttggtgtgaaccatggggtggaacttcac

SEQ ID NO: 469926 - DNA, 100 bp, Homo sapiens
agtttgcgggactcagtcccatcactccaaggagagaagattccccgccactgtatgtctgaagatagcaaatatgttttaatacaaatgttatgggaca

SEQ ID NO: 469927 - DNA, 75 bp, Homo sapiens
cttccccagccacgtggaactctgtatccagcatgctccaaggccacagctctgtgttccaggccttgctgggga

SEQ ID NO: 469928 - DNA, 75 bp, Homo sapiens
agccctacgccgtggacttccagcgcagacccaacatgagtgaagtttcctgcaagaaacgggacgactatttgg

SEQ ID NO: 469929 - DNA, 75 bp, Homo sapiens
ctgtgtcccgcaatgccaacctcagcaccatcaagcaggtaccattgttggatactggtgacatcatcattgacg

SEQ ID NO: 469930 - DNA, 80 bp, Homo sapiens
atacaaaggcggccacgcgcggcgccgctcggaggaggaagccaagaatctggtgagcgaagccatcgcagctggcatct

SEQ ID NO: 469931 - DNA, 100 bp, Homo sapiens
acaaaggttaccatgaaggaaatcttactgaaggcagtgaagcgaagaaaaggatcccagaaagtttcagatgttgaaatgcttcaggccagtacatcta

SEQ ID NO: 469932 - DNA, 83 bp, Homo sapiens
gatgggtgagagaattgaggtgacttttccataattcaggatcaatatggaaattatgtaatccaacatgtactggagcacgg

SEQ ID NO: 469933 - DNA, 83 bp, Homo sapiens
ccgcgcttgctgctggtaacagggccttgcctagtgggccttccttcccaggagtgcctgtgaagaaaacggggtattgccct

SEQ ID NO: 469934 - DNA, 100 bp, Homo sapiens
cgccaaacctgagtttctacagaaatgagatccgcttcctgcccaacggtgagggtcccgatgtcctggtgtacagcttggactttggtgggcatctgcg

SEQ ID NO: 469935 - DNA, 75 bp, Homo sapiens
tagctgaatacctctcctacgactccagtgaccaactgaaaagctccatcattggcaagaagaagccagcagcag

SEQ ID NO: 469936 - DNA, 100 bp, Homo sapiens
gtttaaacagccaaaacagttcattcatattcagccgtaaatgtatgcagcccaaagattttaattttaaaacaccagaaaatgataagagatttcagaa

SEQ ID NO: 469937 - DNA, 100 bp, Homo sapiens
ggcaggcctagtttgactctgacagtcctcccactaaggaacttgctactaccagcaccatgccctaccaatatccagcactgaccccggagcagaagaa

SEQ ID NO: 469938 - DNA, 83 bp, Homo sapiens
cctcttctgtgtcagggaatgctcctggctggtgcggacacaacccaataggtgtttcccattaaacactaccaggacaaaat

SEQ ID NO: 469939 - DNA, 90 bp, Homo sapiens
gaagagcttcttattcatgttatcactgagcagaatggggaatgcatcagcaacccccacacccccctccagatcagccatggatgccac

SEQ ID NO: 469940 - DNA, 99 bp, Homo sapiens
ctcacatcttcaggtgcctcattcacatacgtcaaggaaattgaggcaaaccacagggaagctggaaaagaagcggccctggcagaagtggctgacgag

SEQ ID NO: 469941 - DNA, 51 bp, Homo sapiens
tttgacatagaagctgctgatcgcacctgttccttggacaagaatacctgc

SEQ ID NO: 469942 - DNA, 100 bp, Homo sapiens
gggcgccctggagacggaggatcctgcgttaatctatgactatgccattgtgctattcaaggaagagcctaggctggatgtcttgatcaataacgcaggg

SEQ ID NO: 469943 - DNA, 100 bp, Homo sapiens
tgcaaatatttcaataagtacccaaaagaaatggactcagaactcaaggaagaaattcctgtgcatgaggaattcattttgtgtggtggagccgaaaccc

SEQ ID NO: 469944 - DNA, 100 bp, Homo sapiens
aagttgccttattaaaagtgagctacaaggaggtgaaattgactgtgtggataaggacggcaacactcctctccatgtggctgcaagatacggtcatgag

SEQ ID NO: 469945 - DNA, 48 bp, Homo sapiens
ccctcctgctcccccgaaccgctcggcaccacagtgatgcggatgaca

SEQ ID NO: 469946 - DNA, 101 bp, Homo sapiens
ccggtactgttgaaagcgacaagtggaggcgccgctctagcggccgggactctgaactatggcgagaactattgtcgagtgatgcgatgaaagaatataac

SEQ ID NO: 469947 - DNA, 83 bp, Homo sapiens
gcccgctgccttcacaccccggacatccgcgccacacgaagagcctaggctggatgtcttgatcaataacgcagggatcttcc

SEQ ID NO: 469948 - DNA, 95 bp, Homo sapiens
gaaagagaagtttctggtcactccccaggattatgcgcgatctttgtagaatttgatggctgtaactggaagcaacactcctgggtaaaagttca

SEQ ID NO: 469949 - DNA, 86 bp, Homo sapiens
agaatgcaatgatgaaagcttctggttcagatatggatcctgagcttgaaaaaaaactgaaagagaataaaatatctttagagtcg

SEQ ID NO: 469950 - DNA, 83 bp, Homo sapiens
cctttatttctcgtcggcggcgccctgcaccgcgcctcgcaaatgagtgagatcattggccgagacctgagtggcttccctgc

SEQ ID NO: 469951 - DNA, 75 bp, Homo sapiens
gctggcttgctctgagctgcggttactgtgtccaggccccgggttctcagtgagaaagatcagtctaaagaaaag

SEQ ID NO: 469952 - DNA, 100 bp, Homo sapiens
gtagaacaaacagagcttcagcaagaacagcttcaaacaggtcagtcaggagatcctagagctattaaatactacaacagccaaggaacaatccattgtt

SEQ ID NO: 469953 - DNA, 74 bp, Homo sapiens
gaagagtcaataactgaagacttaagggtgtacaactatgagcctttgacacagctcaagaatgtcagagcaaa

SEQ ID NO: 469954 - DNA, 75 bp, Homo sapiens
ttccccggcccacagtgggggtgtgcaaacccgagagaactgggcagcactcgtcggaggcaccaccatgatcat

SEQ ID NO: 469955 - DNA, 50 bp, Homo sapiens
ccaccacagagcccatcaagcccgagcagagtcatggaggtctggcatgg

SEQ ID NO: 469956 - DNA, 100 bp, Homo sapiens
caagtgtcagaactgcttcaagccccgcgagtcgcatctgctcaacgacgaggacctgacgcaggcaatctataagatggtttcctctgtaatgaaaatg

SEQ ID NO: 469957 - DNA, 98 bp, Homo sapiens
gagaattagagtatgctacaaagatatctatagagaaatggggtttggtcactatgaagaagaagaaagctgttgggagaaacaaaagagtgaaaaga

SEQ ID NO: 469958 - DNA, 143 bp, Homo sapiens
aggcaaggacctgggtggctttgatgaggacgcggagccgcggcggagccggaggaagctgatggtcatcttttccaagcacttccaggttggcttaaagggttaccctaggccagcagtcagctcagtcagggtggtgacca

SEQ ID NO: 469959 - DNA, 145 bp, Homo sapiens
gcatcagaaggaaagcgcccatctgaaaatcttggtcaggtactattcggggaaagaattgaaccttcaccatataagaacctaaaggcagacccagaagagctttttacaaaactagagaaaattgggaagggctcctttggag

SEQ ID NO: 469960 - DNA, 96 bp, Homo sapiens
tgggagcgagcgcagcaaagcgcccagcctgccgcctcgctgtccctgcggcttctggggagtacccaaaggcaagtggaacagctctaatggggt

SEQ ID NO: 469961 - DNA, 100 bp, Homo sapiens
ggaactgctgacgcttgatgagaaggacccacggcgtctgttcgaagacttctgcctggtgtcgaaggtggtgggcagatgccgggcctccatgcctagg

SEQ ID NO: 469962 - DNA, 87 bp, Homo sapiens
cagttgtccatgaccctgaaggtccaggagtacccgaccctcaagtattctgaagaagccaataatctcattgaagaatgtgaacaa

SEQ ID NO: 469963 - DNA, 100 bp, Homo sapiens
ggtacccaccaggccgattatgtccattgttctcttggagcagctggtcatcatggtgtcatggagaaactccagctgggcccagagattctgcagcggg

SEQ ID NO: 469964 - DNA, 95 bp, Homo sapiens
cagaatggcatccagagagaggctctttgaactttggatgctttattgtacaaaggtatatttgcttacttaaactaccatgttcctcgaacgag

SEQ ID NO: 469965 - DNA, 51 bp, Homo sapiens
caacattctacagaatgctcaggcaagaactcccctggagcaggaaatttt

SEQ ID NO: 469966 - DNA, 100 bp, Homo sapiens
ctccagccccagccccaagggcagagggtacagccaaagaccggagctttggagagatgaagtttaaacagtgtcctacagagaacatggctcgtgagca

SEQ ID NO: 469967 - DNA, 74 bp, Homo sapiens
agtgtccatcatcaggggaagatcaaacacaggagccaaaaacctgtatatcatctccgtgaaggggatcaagg

SEQ ID NO: 469968 - DNA, 100 bp, Homo sapiens
agaagatcacccggaccaaggaggaggccctggagctgatcaacgatcataatctactttctcagcccaaggagcatagcattgttcagaagcatcacca

SEQ ID NO: 469969 - DNA, 75 bp, Homo sapiens
caaagaagaccacacactgggaaacatcattaaatctggagacctttggcgacttggcctttggcgacatcttcc

SEQ ID NO: 469970 - DNA, 100 bp, Homo sapiens
attcaaaccagaaaacattagcctgaggaacaagaagagctggacatccgcccaaaggtatcgtctcttctgggaaagctcgtcagctacaccaacctca

SEQ ID NO: 469971 - DNA, 97 bp, Homo sapiens
atgtcgttatggtgggaggattgactgctgctggggctgggctcgccagtcttggggacagtgtcagcatttaggtcgatctcgagaactacagtat

SEQ ID NO: 469972 - DNA, 100 bp, Homo sapiens
ggaggacatgagtcacttctcgttgaggctggagggaggccggcaggactcggaggacgaggaggagattccaacatgccatgggaggagtacctgcctg

SEQ ID NO: 469973 - DNA, 100 bp, Homo sapiens
gcatgcacaaatgaatggtaggaaaattactctgaaaagagaacaagagagtgagaaaccaagccaagctggcagagatggaggaggagctacgttatgc

SEQ ID NO: 469974 - DNA, 103 bp, Homo sapiens
ggacagccgcgcgctgagggtctcggggcgggcgccgcgggacctctccgggccatgggatgaccgagtgggagacagcagcaccagcggtggcagagacccc

SEQ ID NO: 469975 - DNA, 103 bp, Homo sapiens
ttctcttcaacgcgtacctccacctggagaaggccgactcctggcagaggcccttcagcacctggatgcaggaggctgcagtgcaatggcgcgatctcggctc

SEQ ID NO: 469976 - DNA, 100 bp, Homo sapiens
acctcaccgtgcaccttcgcaagaagcaccagttcaagtggccctcagggcatccccgttttcgaggccatgtggaagtgttacatcaccttttgcttgg

SEQ ID NO: 469977 - DNA, 75 bp, Homo sapiens
cctgatggcacattcagctcctgtaagaaggatttccagatgtgacttgcactcagaagatcagtggtcaacttc

SEQ ID NO: 469978 - DNA, 98 bp, Homo sapiens
gtccgagccagccgctgttttgccggaggagcccctcaggccaatggctattcaagtggacaagttcaactttgagagtttcccggagtcccctgggg

SEQ ID NO: 469979 - DNA, 75 bp, Homo sapiens
gagccgggagttcaagaagaacactccagagaccctatatctacggacctacgtctcagggggaaaggatgcaaa

SEQ ID NO: 469980 - DNA, 74 bp, Homo sapiens
ccggagccgctgtgtgcaaagttcctattgatggtccccccatactgtccgcaggcttgtccaaaaggaaacat

SEQ ID NO: 469981 - DNA, 100 bp, Homo sapiens
ccactgtccgccagacctgctgctgcttcaatgtccgcatcgcaaccaccgccctggccatctaccatgtgggccgcgatgggcctcttggaacattggt

SEQ ID NO: 469982 - DNA, 76 bp, Homo sapiens
tcactacctgcacaacgttcaaccatgctcggtcatctgtggcagtatatcaagatgttaccagacctaaaagcag

SEQ ID NO: 469983 - DNA, 96 bp, Homo sapiens
actgctggcagcaccgacgaacccccaatgctgaccaaggaggagcctgttccagaactgctggaagctgagacggagtctcgctgtgtcgcccag

SEQ ID NO: 469984 - DNA, 100 bp, Homo sapiens
gtctacactgagtcggaggcgaagaaatggtggagtcaatgaagaaagtagcagggatggatgtggagctgacagttgaagaaagaaacctcctatctgt

SEQ ID NO: 469985 - DNA, 87 bp, Homo sapiens
gaactgtgaggagtttgaggggtctgaagactgaaagagtcgaatggtttgttggcagtgctacagttgaaactccagcagcgccgg

SEQ ID NO: 469986 - DNA, 102 bp, Homo sapiens
ggcgaatgctgggagagtccgacgagcgctgcactaacgcaggatccggctgccgaaggtcctcgccaggttgtgaactaaaggccgacaaagattatcact

SEQ ID NO: 469987 - DNA, 88 bp, Homo sapiens
ccgaggaggcagccaagctcgtagcctgccactccgtgcagataattgacgaccttgccaacctagtggagaacacagatgaaaaact

SEQ ID NO: 469988 - DNA, 100 bp, Homo sapiens
gccctgtccagagcctccagggccctgcgccttgctccttttgtctaccttcttctgatccagacagggggccgaaggccagagaccaggatttggctac

SEQ ID NO: 469989 - DNA, 76 bp, Homo sapiens
ttgctgtggggttgacccagaacaaagcattgccagaaaacgttaaggattctcagcaagttacagaagtatcttt

SEQ ID NO: 469990 - DNA, 82 bp, Homo sapiens
agaatacagagagaaaattgagacggagctaagagatatctgcaatgatgtactgacataaatgagcatattctgatgtact

SEQ ID NO: 469991 - DNA, 75 bp, Homo sapiens
cagattcgcagtggtcgcttcttctccttggcagaagtcaattcatctggaaagactatctctgagtcagactta

SEQ ID NO: 469992 - DNA, 75 bp, Homo sapiens
gcatggcggccttgaccagccagtggtatataatgtttacatggcagggaggcagctgtgttctaagcggtaccg

SEQ ID NO: 469993 - DNA, 100 bp, Homo sapiens
aatcaagttcggggcaaagtgttcccaccggcagcaaatatggaatatatggggccccaaggaccaaaagggcagaaaggtgagccttatgcactgccta

SEQ ID NO: 469994 - DNA, 100 bp, Homo sapiens
tcggtgattgaggacaagaccatcgagctcatgagcattggctgtgatgactacttaggctccgacaaagtcgtggacaaatgtggggtgtgtggaggag

SEQ ID NO: 469995 - DNA, 74 bp, Homo sapiens
ccacaccccccgccgcagcagcaccggcgacagtcaccacgttctgcgcttttccgagtcggacatatgagcag

SEQ ID NO: 469996 - DNA, 105 bp, Homo sapiens
tagaggaaaaaattgaaagagaaaaggaattagcagaagacattatgtcagtatcttctcacaggtatgaaacacctagcgatgctattgaggtgataagtcctg

SEQ ID NO: 469997 - DNA, 100 bp, Homo sapiens
ccgggacggcgagcggcgggcggcggaggaggagacggcaggtcggcaacaggataagacctcgtctaacctacatgaagctgcttcggactgtgtatgc

SEQ ID NO: 469998 - DNA, 100 bp, Homo sapiens
tcaagtccagctgctcgcccgtctacattgccgcttacaaacacgcagatggcaagaagattgatggcaggagggtccttgtggacgtggagaggggccg

SEQ ID NO: 469999 - DNA, 49 bp, Homo sapiens
gaaagtcttcgagaagttgcaggaattgaatgatctggcacgggaccct

SEQ ID NO: 470000 - DNA, 100 bp, Homo sapiens
attgaaccatccctggatcatgcaagattacaactatcctgttgagtggcaaagcaagaatcctgttccttctgaccaaggggacatggctctgaagatg

SEQ ID NO: 470001 - DNA, 100 bp, Homo sapiens
tttgggagagcccggagacggtgtcccagctggattcggtgcgggtctggctgggcaagcactacaagaagataaaccgagaaaactggtgtacaataga

SEQ ID NO: 470002 - DNA, 100 bp, Homo sapiens
caaaagaccacactgtcagacagaaagaggaagtatctccaggcagaagtcaattcatctggaaagactatctctgagtcagacttaaaccactcttttt

SEQ ID NO: 470003 - DNA, 100 bp, Homo sapiens
gggttccatgtgatggtggagtaggaggcaggtctccgcggaaatccttttgtactattgctcattcatacttgttcatcaaagcctggagtccttaagg

SEQ ID NO: 470004 - DNA, 96 bp, Homo sapiens
cagtgagccctgtttttgccaccacactccagcttgggatgtgatggtggcaggtgggatggagagcatgtccaatgttccatatgtaatgaacag

SEQ ID NO: 470005 - DNA, 88 bp, Homo sapiens
gaggggcaaagctcaagatggcggacaaaacgccaggcggatctcagaaggccagttcaaaggctctgacgcccgctctgcggcttcg

SEQ ID NO: 470006 - DNA, 88 bp, Homo sapiens
ggagaagatgtggtggcttccgtttgttggtggaggaggtggcaggcctcggcgcctaagaaagctgtcaagataaaacctcacccac

SEQ ID NO: 470007 - DNA, 75 bp, Homo sapiens
tttccacagggaattgagttggctctggctccgctactgcatcgtgtgcttctgtccaagaggcagagagactga

SEQ ID NO: 470008 - DNA, 49 bp, Homo sapiens
ttcaccacttacgaaatcagggtcaagaacacccatctcggctttctcg

SEQ ID NO: 470009 - DNA, 100 bp, Homo sapiens
tgcatgaacatctccagccagggtttggaaaggccccttggattcctggctggggacaatgatgacctggaccctggccagaagagccctggccctccag

SEQ ID NO: 470010 - DNA, 90 bp, Homo sapiens
gagcgaacgaccaagagggtgttcgactgctagagccgagcgaagcgtgtcgtgaaaactacccctaaaagccaaaatgggaaaggaaaa

SEQ ID NO: 470011 - DNA, 74 bp, Homo sapiens
ttagaattgcacttggaggacaaggtggagccgccaccaaaatgcagattttcgtgaaaacccttacggggaag

SEQ ID NO: 470012 - DNA, 74 bp, Homo sapiens
ctgcgggtgcggcgggtcctggccgaagtcttattgccagcagttttgaagatgactcccgtgtagcctcaccg

SEQ ID NO: 470013 - DNA, 100 bp, Homo sapiens
ttggcttcagggtctggatctcagcttcttccccaggaacatcaacaggtgcttgagaaacttctatggaactcccaagcctccagcagaacccagccct

SEQ ID NO: 470014 - DNA, 100 bp, Homo sapiens
gatcttcatgtgtctcttctaagctgaataaagctgttttggaactgtcaggtacctcaaagcacccaacatgagtgaagtttcctgcaagaaacgggac

SEQ ID NO: 470015 - DNA, 75 bp, Homo sapiens
ctctgctgtgggcgctgctggcgctctggctgtgctgcgcgacccccgcgcatgaagatggctgtgccacccacg

SEQ ID NO: 470016 - DNA, 90 bp, Homo sapiens
gtgagcgagcggacccgcgatggttgtcgagatgtccacagaaggaggatttggtggtactagcagcagtgatgcccagcaaagcctaca

SEQ ID NO: 470017 - DNA, 75 bp, Homo sapiens
cggcggcgctttcggcgcgggcccgggccccgagcgcccgaacaggtggacgacccaccggagcccgtgtacgcg

SEQ ID NO: 470018 - DNA, 100 bp, Homo sapiens
ggaagcaggactcggggcacttggggtgtccgcaatgttgccagtgtctgtctgcagattggctacccaactgttgcatcagtaccccattctatcatca

SEQ ID NO: 470019 - DNA, 76 bp, Homo sapiens
tgcacaacgttcaaccatgctcggtcatctgtggcagtatatcaagcttactgcagagtgggtctgggcatctgct

SEQ ID NO: 470020 - DNA, 100 bp, Homo sapiens
cgcggccacggagcccgaggacccgccccgcggccgggggatgctgcccatcccagtggcggctgccaaggagacgattgatctggagccagaaggaaga

SEQ ID NO: 470021 - DNA, 100 bp, Homo sapiens
cagtaactgaacattggtctaaagtctttccaaaaggtcaaggttcacaagaaatgcactcggtgatggaaagagagccactattctgaagaacacttgg

SEQ ID NO: 470022 - DNA, 95 bp, Homo sapiens
gctccgaggggtctggaagccagagaccaacgagatcctgcacatgtctttatacattggtgaagtaggagacatcgtagtgggacgaatcacag

SEQ ID NO: 470023 - DNA, 76 bp, Homo sapiens
tgatccagaggagatccggatgctcatccataaaactgaagatgtgaatactctgatcattgagactgaaaatatg

SEQ ID NO: 470024 - DNA, 99 bp, Homo sapiens
cgatgagctcaatcggcactgggatttgatggtcctcgaagatttgaggatttagggtcaaggtgtgaaggaccgagacccaaagggcctcgttttgaa

SEQ ID NO: 470025 - DNA, 75 bp, Homo sapiens
cggcagcgatcaagcaggcagcgggctttgccagcaaaaccgaaacagcaggaagaagatgagccttaggtctga

SEQ ID NO: 470026 - DNA, 98 bp, Homo sapiens
ccagagaagacctcaaagggctggaggagacagtgtcatgggcaatgtctaagctggcggctgcccatcgaggagccattcgggccttacagatgttt

SEQ ID NO: 470027 - DNA, 90 bp, Homo sapiens
caggctttcaatcaacccaaggtgatgcttttgctacgacctcattttctgctggaactggtggcacttactcaaaagcatctactccta

SEQ ID NO: 470028 - DNA, 100 bp, Homo sapiens
atgatttaaacaagagatttccacagaagtaggagagaagtttgctgaggaatgccttcaagcacaaagtgatgaatgactgccttcaagtctcaagaaa

SEQ ID NO: 470029 - DNA, 75 bp, Homo sapiens
tgcacgagacctcgcagtaccacgtccagagacgagttgtactgctgtcacaggaaatggacgctggattacaag

SEQ ID NO: 470030 - DNA, 83 bp, Homo sapiens
tcgcgctggagctgtgtgaggagatcgtggtctatgggatggtcagcgacagctactgcagaatgtccctcttccagtggaaa

SEQ ID NO: 470031 - DNA, 100 bp, Homo sapiens
cttggccttggagcgaggctatcacaagctgcaccagcttctaaccgaggtgtgctgatctgcaaaccctggacacaatgcagccaattgagaggaaaag

SEQ ID NO: 470032 - DNA, 75 bp, Homo sapiens
cgcgtctctctgctgcggcgcggggaccgctgtgctctcgccacgaggccccctggtggctgccacactgatgag

SEQ ID NO: 470033 - DNA, 90 bp, Homo sapiens
atggattggagtgaaccggagaccccgaaaacggaagcgcagggagaaggaagaggtgtttgaaaaggtgggagagttcagagcacacgc

SEQ ID NO: 470034 - DNA, 80 bp, Homo sapiens
cgtcgtggaagcaggactgcgccgcgtcttcctcaaggtcctgaacgaggctgtgggggccctgatgtaccacaccatca

SEQ ID NO: 470035 - DNA, 100 bp, Homo sapiens
gccaaaatggcgaccggcaactactttggattcacccacagcggggcggcggcggcggcggctgcggcccaatataggttcccaccttagggtcccagga

SEQ ID NO: 470036 - DNA, 50 bp, Homo sapiens
acgtggacgctgactcggaagtgcaggtctcctctgagcctccggcctcc

SEQ ID NO: 470037 - DNA, 100 bp, Homo sapiens
cttccctgggctggtgaagtacatgaactcagggccggttgtggccatggatgagctttctgatgttagccaaggcggatctaaagctaccactccagca

SEQ ID NO: 470038 - DNA, 100 bp, Homo sapiens
agagtggggaaaaagaagaagaaaacaaagggaccagatgctgccagcaaactgccactggaactgttgggaatcaaagagctttccaaacctgcctacg

SEQ ID NO: 470039 - DNA, 75 bp, Homo sapiens
gccatctctttataattccctaagcatggctatgcagactctaaaagatcacaaaatggctcttcttcagatggc

SEQ ID NO: 470040 - DNA, 75 bp, Homo sapiens
catgctgtgcagcaagaacccgacacccccaaaggatggatttgtaatcgctgacgttcaactagttacaagcaa

SEQ ID NO: 470041 - DNA, 90 bp, Homo sapiens
agcaggagctggaggaggagccgccgccgccagacctaagtcagtgttagtctaccactgtacatctggtaacctcaatccctgcaaccg

SEQ ID NO: 470042 - DNA, 80 bp, Homo sapiens
ccagatccatttacactttacaaccctctttcccagctgcccgctcctcagcacccgaagattcgcctgtacaacgcaga

SEQ ID NO: 470043 - DNA, 50 bp, Homo sapiens
atattgcacaccttatacgggagggctggagtgcagtaacaccactgaag

SEQ ID NO: 470044 - DNA, 100 bp, Homo sapiens
gcaaagaccagtcctttctctttgaacgacagcgtattactggaagagattgaagcctacaaccatgcaaaactcagattgatggacaacttttcttaat

SEQ ID NO: 470045 - DNA, 100 bp, Homo sapiens
ggcgagacggcggcaggacggcggcaggacagagcgggatgccaccagcttgtccaaagggaagttccaggagctcctggtgggcatcgttgtggagaat

SEQ ID NO: 470046 - DNA, 83 bp, Homo sapiens
cttcctggcctgggcgctccggtggcggcggagccctcccaggcccaatacttcaaagcatcctacctctgctcaatatatat

SEQ ID NO: 470047 - DNA, 100 bp, Homo sapiens
taaagatggcggcttcctagtgagtcggcggctgatttagaaggaggttcaggctacggtgagccgaagaatgcaagttctagccggtttttcctacaag

SEQ ID NO: 470048 - DNA, 100 bp, Homo sapiens
aatactcttccctcaaaggaaagctcttgcagccaatgccggaacaggatttgctgttgctgagcctcaaatcgcaatgttttgtgggaagttaaatatg

SEQ ID NO: 470049 - DNA, 74 bp, Homo sapiens
gtgtaccggcagaaggcccgggtctcccaagagctcaaggtgtcacagatttatcagagcattgagttttctcg

SEQ ID NO: 470050 - DNA, 98 bp, Homo sapiens
tgtttgtggacttggggagcggtctgtgcagacttttgcagacaaatcaaaacaagaagctctgaagaatgacctggtggaggctttgaagagaaagc

SEQ ID NO: 470051 - DNA, 48 bp, Homo sapiens
catccgtcagctgaactagacccaggtatgaaaatgaaagtcttcaga

SEQ ID NO: 470052 - DNA, 73 bp, Homo sapiens
gacacaactaaactcactgtggaatgctggaggaaataatgctggccatacagttgttgtggattctgtggaa

SEQ ID NO: 470053 - DNA, 83 bp, Homo sapiens
gatgtgcaacaaagtgcgatgactaatagggatgccaaaggaaaaatatgatcctccagatcctcgcagaatttataccatca

SEQ ID NO: 470054 - DNA, 100 bp, Homo sapiens
agcataattatattggatgtcattgagccatctgggctcattcagcaggaaataatggaaaaagctgcaatatccaggagagcacagacatagatgacga

SEQ ID NO: 470055 - DNA, 74 bp, Homo sapiens
ctttgccatcgacatatttcctgtcaccaacaaagatttcagctgtcggaaaaggtaacagaagatggaactcg

SEQ ID NO: 470056 - DNA, 90 bp, Homo sapiens
atgaagagtatacctgggaagagaatgagtccctggaacgccagatgcgtgaaatggaagagaactttgccgttgaagctgctaactacc

SEQ ID NO: 470057 - DNA, 88 bp, Homo sapiens
tgagaatccagagaaagatctctgaccactaaatctgtgtgcagcccgaccctgcccgccctggactggcagctgccgtcccactcag

SEQ ID NO: 470058 - DNA, 82 bp, Homo sapiens
ggctccctcgggagctcatcttcgtggggcgtgaggagtgtgagctcatgctacagagacgtctcccacaacctgctccggg

SEQ ID NO: 470059 - DNA, 97 bp, Homo sapiens
tgtttttggactctaatttcacggacactgaaagcagagaccatggagcttcttgagggaaatctggtttctggattaactactgaatagcaactgc

SEQ ID NO: 470060 - DNA, 100 bp, Homo sapiens
acctcagcctgcgggactgctcggctcggcttctaggcgatttggtgcttccagatgtgagttatcaggtggaatccagtgaggaggatcagtctcagac

SEQ ID NO: 470061 - DNA, 75 bp, Homo sapiens
ctgctccgccccagacctgtcggcgaaagggatgaagcctgctgggagcgtgaatgacatggccctggatgcctt

SEQ ID NO: 470062 - DNA, 100 bp, Homo sapiens
gcttgagaacttgtgccccagttgctgtgctccaaggacacacaggatcaattacatctttacagacaaagctctgatggcaccaaatcttgactccttt

SEQ ID NO: 470063 - DNA, 88 bp, Homo sapiens
gccgagctggacccggaccggttttggccgaacgaccctgtcaccaacatttgccaagcagccgacaaacagcttttcaccctggtgg

SEQ ID NO: 470064 - DNA, 115 bp, Homo sapiens
aggcctcctgtgggacgccagtcaccagcaggagcagccaaccagcagcagccatcatggaggtcaatgagctgaaggagaaaggcaacaaggccctgagcgtgggtaacatcga

SEQ ID NO: 470065 - DNA, 98 bp, Homo sapiens
aagctccaggaccttctacgtacagaatcccctactttgaaactagtgctgccaatgggacaaacataagccaagcaattgagatgcttctggacctg

SEQ ID NO: 470066 - DNA, 50 bp, Homo sapiens
tgctggtcagcactgcggctgtggatgaggatcgcagtacggaacctgac

SEQ ID NO: 470067 - DNA, 82 bp, Homo sapiens
ccaaatgccagactgattgtcatgctcagggaccctgtggagagggtctccgtctctccaccgggggcttcatccttccagg

SEQ ID NO: 470068 - DNA, 90 bp, Homo sapiens
ggctgcgctctcttccctctgctgggcgtcctgttcttccaggggtgtccgcaatgttgccagtgtctgtctgcagattggctacccaac

SEQ ID NO: 470069 - DNA, 75 bp, Homo sapiens
cttctctcggtcccgggagcccccgcccggaccgtactatgccacgagggtgaatgcggctgacattgagaaccg

SEQ ID NO: 470070 - DNA, 90 bp, Homo sapiens
gctgaaggaaaacctccttatgctgatatacatccaatgaggtacatccagcagtggtcattcgacaacgaaagtcataccgtagaaaag

SEQ ID NO: 470071 - DNA, 83 bp, Homo sapiens
atataaagcatttgtgcattcagatgctgctaaacaagcttcaacggaccacaccaaaatgccatctcaaatggaacacgcca

SEQ ID NO: 470072 - DNA, 88 bp, Homo sapiens
gattttcaaatcttgtattacaggctcttctcgttttactgaaaaaggcacctcctcaggaatgtatcctgtcaggtataatgtcagt

SEQ ID NO: 470073 - DNA, 82 bp, Homo sapiens
gactttccaaagcgctggaattatgggcgtgagccactgtgcccaggaagcagtcaattatagatttcttcaaaccagcttc

SEQ ID NO: 470074 - DNA, 74 bp, Homo sapiens
cctgctgaaggaatgccgcaataagattgaatacctgcttaagaagcttacagaagctatgggaggaggttggc

SEQ ID NO: 470075 - DNA, 75 bp, Homo sapiens
gtccaggagcactatcaggactttgacaagataatctcaggagacactgaagaagggaggctctgtggacagagg

SEQ ID NO: 470076 - DNA, 98 bp, Homo sapiens
tctgtgacagggtccaacagggcctggtccgtgtccggtcccccaaatctgtcgtccctgcccccaggagtcgggcgctgctgtctgtgaattctttt

SEQ ID NO: 470077 - DNA, 98 bp, Homo sapiens
aaggtcgcgatggttttcttgggaacacgatagacagcatattctggcagagatcagggaagatgtgccttggagaggaagcatgtcttaaatctgga

SEQ ID NO: 470078 - DNA, 98 bp, Homo sapiens
ggggatctaccatctcggactcccgacccgccgccggctccggccgcgtttcccgggtaaaggggaatctttgcctacatgaactacagagtcccccg

SEQ ID NO: 470079 - DNA, 100 bp, Homo sapiens
tgattctttaagaaaatcagataacttgtactggagagaaatcctacaagtgtggtactttggaagttcgtcttatgggctgccaagatatcctagagaa

SEQ ID NO: 470080 - DNA, 75 bp, Homo sapiens
cgcagatgttgtcaaggtggcctaccaggaggccaggggtgtcgccatgaacacaccacagccatcagcactgga

SEQ ID NO: 470081 - DNA, 100 bp, Homo sapiens
caatgcaaaccctctctctaccacgagcagcgccctgggagccctcacgagtcccggtgtgtggaggtcattgcaaaggaaggacaaaacctgaaagagc

SEQ ID NO: 470082 - DNA, 98 bp, Homo sapiens
ggagctcatcgggcagattagcgacatccgagtgcagaacctgcaagattcctgaatttgacaacttgtacctggatatgaatggaattatacatcag

SEQ ID NO: 470083 - DNA, 75 bp, Homo sapiens
actaaacaaattcatcccagaaatctaagagacacgaagatcgattgagaagttattagaatgggaaaacaatag

SEQ ID NO: 470084 - DNA, 75 bp, Homo sapiens
ttgtagatctagaagtcactttggaagaagtatatgcaggaaattttgtggaatcaccatccaggggagactcca

SEQ ID NO: 470085 - DNA, 90 bp, Homo sapiens
acgaggaatggcggcggctgccgcaggacctgcagcatcccagagatattttctaaatttggcacagtcttgaagattatcacctttaca

SEQ ID NO: 470086 - DNA, 75 bp, Homo sapiens
ctcccgagtggctgggattacaggactcaatgatctttgaggatgtggctgtgaactttacccaggaggagtggg

SEQ ID NO: 470087 - DNA, 83 bp, Homo sapiens
ctcagtgtcagttacctccgggtgaagagcttcttccaagctctgatccagtatatacggcctgtgttcgtgtcccggtcaga

SEQ ID NO: 470088 - DNA, 100 bp, Homo sapiens
cagacgcgggccagcctcagcaccgacagccgacgcgcagatagcagagccatccttgggggtgaaattgatgcccatgaagacagcttcaaatctgcag

SEQ ID NO: 470089 - DNA, 100 bp, Homo sapiens
gcagctggcgcagcccacgctcatgatcgacttcctcacccgcgcctgcgacctcgagcgccgccctgtgctgggctgccgggagctcgtcttcaggaac

SEQ ID NO: 470090 - DNA, 100 bp, Homo sapiens
caaggaggcggcggcggccgcagcgagtggcgagtagtggaaacgttgcttctgaggggagcccaagcccaaaatggagttaatcctgactgggagaaga

SEQ ID NO: 470091 - DNA, 88 bp, Homo sapiens
agaaaggagctcggggactcccccaaagacaaggtggacccccaaaagtacaagggcatatttaacggattctcagttacacttaaag

SEQ ID NO: 470092 - DNA, 100 bp, Homo sapiens
ctctaatgttgggaattggaacagaaggaccacatgtgggccttgttcaagccagtgagttattctccccacctcagaagtaccagcttttggtgtatca

SEQ ID NO: 470093 - DNA, 100 bp, Homo sapiens
gaacatgaagccagtcctgacaatgggcagaacgaattcagtgatatcattaagtccagatctgggtgctggtcaagataaactaggaatctatgtgaag

SEQ ID NO: 470094 - DNA, 80 bp, Homo sapiens
ggccccaaagacgctaaacgtgccctactctgccccgggggagaggaagcaggtcctggggaccaaggtggacgcggagc

SEQ ID NO: 470095 - DNA, 100 bp, Homo sapiens
ccccacctggccaaggacggggacaaggagagatgtcttggatgaccttgtaacattgcataattttagaaatcagttcttgccaaatgcactgagagaa

SEQ ID NO: 470096 - DNA, 74 bp, Homo sapiens
gccttcaaccactatctcagtgcaatgggaacctgttttgttcactggaacaatgaggaaaaacctggatccct

SEQ ID NO: 470097 - DNA, 75 bp, Homo sapiens
ctccgtcccccgcgggtctgctctgtgtgccatggacgggggacggcaaaacagaacagaaaggcggagataaaa

SEQ ID NO: 470098 - DNA, 100 bp, Homo sapiens
cccaagtggacatggcaagaacagcctacctggacctgctccgcctgatccgcaattttccagattattcaaagtatcaggatgggcatgtgaagtgact

SEQ ID NO: 470099 - DNA, 95 bp, Homo sapiens
acccacactcagccactgcgggcgaggagggcacaaggccaggttcccaagagctcaggctgtgctcctggcggacatcctccccacactcgtca

SEQ ID NO: 470100 - DNA, 100 bp, Homo sapiens
gccacccaagcttttgtatcctatggaaagtaaactgacaattcaggagacccagctggttgatgcggatgaaattaaaaggctaggaaagagatttaag

SEQ ID NO: 470101 - DNA, 83 bp, Homo sapiens
cttgtgactctccttcatgcctcccgacgtcccccgggccgctttggtttagaacactctgctccagccaaggtggtgagggc

SEQ ID NO: 470102 - DNA, 82 bp, Homo sapiens
ctggggccacgtggagctgctggaggcaagagtgagccatggagctacgtgtggggaacaagtaccgcctgggacggaagat

SEQ ID NO: 470103 - DNA, 75 bp, Homo sapiens
cagagcggagggagccccagacacggatcttttgccagaaatgagggcatactggcctgacgtaattcactcgtt

SEQ ID NO: 470104 - DNA, 100 bp, Homo sapiens
ccctgctctgtcactaacaagctgcgtgatcttcgatctatacaatatcagtgatggccgagggaaagttgggacgtttggcatcttcaaatctgtgtac

SEQ ID NO: 470105 - DNA, 100 bp, Homo sapiens
caaacaaattgttaaagatgccataatacatactgccatgaaagaaagctcacctttatttgatgatgggcagccttggggagaagaaactgaagatgga

SEQ ID NO: 470106 - DNA, 123 bp, Homo sapiens
aggagcaaagcaagtgaaggcacagacgcacgggacaggagagcctgggcaagactggagaggagctcactcctctacttgaaaaagaaagagatggattacggtgccgaggcaacagatccc

SEQ ID NO: 470107 - DNA, 48 bp, Homo sapiens
aacctctagtacagacaaccccaagtgtggtacaggtcctgcttgctg

SEQ ID NO: 470108 - DNA, 82 bp, Homo sapiens
acagtggagtctggcatcttattgtcctcctgcatatgcccaagaggattgggagtggaatggacaccagcagaagcaccac

SEQ ID NO: 470109 - DNA, 96 bp, Homo sapiens
ggagctcgcctgctgccctcttgcgcgcgggaagcagcaccaagttcacggccaacgccttggcactaggaaactggcgatggaatatgagaggag

SEQ ID NO: 470110 - DNA, 74 bp, Homo sapiens
aagacttctgcaggagagcctccgctgggctttcaagttgggaggttatattcaaaagaaaaaggaactgtggg

SEQ ID NO: 470111 - DNA, 98 bp, Homo sapiens
ggcgctgagccagcggggccggacctacaagaacagtgaggagcttcggtctcgtattgtgtctggaatcatcacacctatccatgagcagtgggaaa

SEQ ID NO: 470112 - DNA, 100 bp, Homo sapiens
gcccggctccggccccgggactaggggcgactgcctggggcgccggcgaggctgacccagctggatgttgacagccacctggcccagtgcttggccgaaa

SEQ ID NO: 470113 - DNA, 97 bp, Homo sapiens
tggctctggatatctacggagggaccatgcttagctcaggatccggtgtgagtcatcctgttctaaagcaagttgctgaacagtttctcaacatgag

SEQ ID NO: 470114 - DNA, 100 bp, Homo sapiens
cgttgaaggacaccagctgcggaatttgcggctttggcaggtgtcatggagaaactccagctgggcccagagattctgcagcgggaaaatccaaggctta

SEQ ID NO: 470115 - DNA, 100 bp, Homo sapiens
gaaggacacccgcaggaactcggcagaggagaaattcagacggctcccgaggatccaacttagaaataatgtttcattcaagataaggctcgtggcttag

SEQ ID NO: 470116 - DNA, 100 bp, Homo sapiens
gtgcagagccccaattcctacttcatggatgtgaaatgcccagtcgacattactctgaagggacgcacagttatcgtgaagggccccagaggaaccctgc

SEQ ID NO: 470117 - DNA, 97 bp, Homo sapiens
gcgaccgtcgcggaccatgggcgacaaagggacccgggccaattcctgtccccccagcagcatggcatcgtgtgctgaaccctctgagccctctgcc

SEQ ID NO: 470118 - DNA, 75 bp, Homo sapiens
acctcccaggacgactgtgtcagcaaagagcgcagctcctccagtaaggatgagtctgccttcatggtccacccg

SEQ ID NO: 470119 - DNA, 90 bp, Homo sapiens
gttcggcgctatggaggagctcgatggcgagccaacagtcactgatgagttccacccgttcatcgaggccctgctgcctcacgtccgcgc

SEQ ID NO: 470120 - DNA, 75 bp, Homo sapiens
ctatccataaagaaacagaagatgatcgtggtcatgacactattggctccctacacaccttttctcactgaattg

SEQ ID NO: 470121 - DNA, 100 bp, Homo sapiens
ctggacaaagcgtccatcatccgcctcaccacgagctacctgaagatgcgcgccgtcttccccgaagcgctcctttaccctcatcgtggaggcctgggac

SEQ ID NO: 470122 - DNA, 50 bp, Homo sapiens
attaaatgccgagaaggccagtacgcgagacggtcatctgttccagccgg

SEQ ID NO: 470123 - DNA, 100 bp, Homo sapiens
tgggcacagcatgcggaaaatactacagagtgtgcacactggctatcattgatccaggtaaagtcagtgataaatcttttgtttgctgcatatactggag

SEQ ID NO: 470124 - DNA, 50 bp, Homo sapiens
gttgaccgctcctccaactaaccagtgagacatggaatccattaaaattg

SEQ ID NO: 470125 - DNA, 75 bp, Homo sapiens
aatcagcgcactggcaagtgcagcgcctgtaatgtttggcgagtctgggtctcagcttcttggaagtgaaagacc

SEQ ID NO: 470126 - DNA, 74 bp, Homo sapiens
aatgctgagcctgcgaggcctgacatcacttaccaggagttcaaagaaggacgcagagccagccacacagcccc

SEQ ID NO: 470127 - DNA, 97 bp, Homo sapiens
aatgggatctctttggtaattgctacagattattgaagactggaattgaacatggagccatgccagaacaggtagaacgtcatgacatgaatacctt

SEQ ID NO: 470128 - DNA, 100 bp, Homo sapiens
agagagctgtctccagagaagttgggaagagcggacattcctctgtggaagatgcccaggccaccatggagctatataagttggttgaagtcgagtggga

SEQ ID NO: 470129 - DNA, 100 bp, Homo sapiens
aggaaagcgggaagactcatcggagcgtgtggatttgagccgccgcattttttaaccctagatctcgatttctacctggacaaggactggtactataccc

SEQ ID NO: 470130 - DNA, 98 bp, Homo sapiens
ttcagacaggttttacgaatattttttacacaaccatactgtaagattgatgttaaaggcatggtgttcaccccacttcatcagcgtacataagttat

SEQ ID NO: 470131 - DNA, 90 bp, Homo sapiens
gtagtcggacctttcccgctggcgcgcagcctcagctaggccatgggtgttgagagtgaccaggaaattgtgcagatgattggaacagag

SEQ ID NO: 470132 - DNA, 83 bp, Homo sapiens
ctccgcaccgcggcttaaatgatgtattttgtgatcgcagcgatgaaagatttgaatataacctgccgctttgcaggtgtatt

SEQ ID NO: 470133 - DNA, 123 bp, Homo sapiens
tcagcgcctatggcgaggtcggacgcgtcttctttcaggctgaggatgtgactgccatcatcttcgtggtggccagcagcagctacaacatggtcatccgggaggacaaccagaccaaccgcc

SEQ ID NO: 470134 - DNA, 90 bp, Homo sapiens
atcaaacttatttttgtgatattctccagcatatcttttctgttgtgacagacacttcacatactgctgccttatgtttgatcatcggcc

SEQ ID NO: 470135 - DNA, 100 bp, Homo sapiens
attctatagctgttgatggctcaggaactaaagtaccagcaacttcaaggtttctgccagcccactgttgtatacgcttattgagaaaacaatgcaaaat

SEQ ID NO: 470136 - DNA, 76 bp, Homo sapiens
ttcaccttcaacttgggcttctcgggcaagttctatcatactgaaacaagctcagaggtgtgcagcgaaacctggc

SEQ ID NO: 470137 - DNA, 75 bp, Homo sapiens
tgaaggaggcgaattttcagttgataggtcctgcattcagctcttttcacatttgatttgattgaaagtgttcta

SEQ ID NO: 470138 - DNA, 82 bp, Homo sapiens
ccgctcctaagcctgcacagccgcggcggcagcagcagtgagaggtctgcgaggaacagaagtgcgaggaggaggtcttccc

SEQ ID NO: 470139 - DNA, 98 bp, Homo sapiens
cggggttcgtcgggcctgtggaagaagcgccgcgcacggacttcggcagaggtctcggcgcggaagatggccggcggcgtggacggccccatcgggat

SEQ ID NO: 470140 - DNA, 100 bp, Homo sapiens
ctgtcctcacagaggcagaccctgcagccagaaccagtgttatccaaggagcagcctgcgttccagtatagcagccacgtctcgctgcaggcttccagtg

SEQ ID NO: 470141 - DNA, 100 bp, Homo sapiens
ctgtgtgcccctgatgctttgtttatggtagcctttcagctgtttgacaaagctggcaaaggagaagtaacttttgcacagtttaatggcaacgagaagc

SEQ ID NO: 470142 - DNA, 101 bp, Homo sapiens
cagtttctcggtttatgtgctcttccaggagccctctggcacaaatggaagaagaaagaagggagcaagtagctaaaattaagaagatggagatggagatg

SEQ ID NO: 470143 - DNA, 99 bp, Homo sapiens
cccggccactgcggatccctgaaaccaaattcatgatgttgctatcaaaagttgagaaattgtcagaagaaatcatggagataatgcaaaatttaagta

SEQ ID NO: 470144 - DNA, 83 bp, Homo sapiens
gggtcacagacatttcatggggctccactaacagatctattccagaggggagcttcaccacttcattgacggctttaatgaag

SEQ ID NO: 470145 - DNA, 100 bp, Homo sapiens
aagatgatggggacatatctaaacagcaggctcaggccacagggtcaccacatacatcgcccacccatggaggcggccggccaatgcccatgccagtgcg

SEQ ID NO: 470146 - DNA, 100 bp, Homo sapiens
agctacaaaatatgctcgatggatagcattcactggaatccttcagtgaatctacagacctattttctcaggagctcagcctggccttacttcagtgata

SEQ ID NO: 470147 - DNA, 80 bp, Homo sapiens
gcatgccagtaaaactactcatgtcagctgttctgcaggatcccatgagaaggttgatctcctatcaagagtttttggca

SEQ ID NO: 470148 - DNA, 75 bp, Homo sapiens
ttagctgtgctcgcgctactctctctttctggcctggaggctatccagcgcaactgcgatgtctgtggactgtct

SEQ ID NO: 470149 - DNA, 100 bp, Homo sapiens
cagaccacaggaaggagggtggaagtatggtttccagagctgttggacaaatatcttattcccaatgctacacaaccagaaagtaaggtgttctacttga

SEQ ID NO: 470150 - DNA, 71 bp, Homo sapiens
ccgggtggtggttaaaccatgttaaggaggattttacagaggatctcacattcttgaaggtggcattgaag

SEQ ID NO: 470151 - DNA, 100 bp, Homo sapiens
cccgctcaccaggagccccttgccaggagtgttcaagatgctctctctggaccgatcccactgagtccatagaggccactgtattctattgaagaacatg

SEQ ID NO: 470152 - DNA, 83 bp, Homo sapiens
cttttctcagatgttggatatttgcttggaaaaacgtgtgggtacgaccttgcttgcattgaaaggctctagttacagtggac

SEQ ID NO: 470153 - DNA, 87 bp, Homo sapiens
aggtgggacgagcctaatgaagtgggcagatgattctggaccagatgaagcctgaggagccttccagctctaagatagcaggatagg

SEQ ID NO: 470154 - DNA, 85 bp, Homo sapiens
attcagaaggatatcgacgtcgtgatccagaagtccagagctgaggactgcctgtttgcagttgatgatgttcagggatgtggct

SEQ ID NO: 470155 - DNA, 90 bp, Homo sapiens
cagatgaggacacctgaggttcagattaagaaatctgccccaaagtcttagaactgttctgggaggtgatcagtgatgaacatggcatcg

SEQ ID NO: 470156 - DNA, 75 bp, Homo sapiens
tcgtaagcgcacgtttaaacatctcaagataacgtggttagaaggccattcactggcacagacagtatttacgtg

SEQ ID NO: 470157 - DNA, 82 bp, Homo sapiens
aaaaatgtcatttttaccaactgtgtaaaggatgaaaatgtcaagcagtgccgtattcacctggaccaacctgctggtggtg

SEQ ID NO: 470158 - DNA, 75 bp, Homo sapiens
ggcgggactgccacgtccaagcaaaccgggaaaggagaggatcccggagccgttgattccaggcgtgaattccaa

SEQ ID NO: 470159 - DNA, 100 bp, Homo sapiens
tgcaatcgatcaaatattttcatccctgaggttaacaattaccatcaaaatgttttgtggagactatgtgaaaggtgtagcagtcactcggcctacaccc

SEQ ID NO: 470160 - DNA, 50 bp, Homo sapiens
agcaatttaaagatcctctccaagagtcgacttcaatgttcctatgaaga

SEQ ID NO: 470161 - DNA, 82 bp, Homo sapiens
ctactgaggattctgtggcagtgcccagggtgtcgtagtcattcttcagcacaattcttaattggagaccaagaaccctggg

SEQ ID NO: 470162 - DNA, 75 bp, Homo sapiens
ctttggttggtggaggctgtggcaatggaacaggcttgagaaacaggagacggtggctcagggagtaaaggaagg

SEQ ID NO: 470163 - DNA, 97 bp, Homo sapiens
atttcaaccataaagacatcttaattgggcacgaaagaggtacaatccttggatttaccctccgaccatacagaatgagctaccgggaagtcaagta

SEQ ID NO: 470164 - DNA, 100 bp, Homo sapiens
cagctcttcttgcagaactggaaaaaattaaaaaagaaagagctgaagagcaggccaggaaggaagctgagaagtacaaagctgaagatgagaagcagag

SEQ ID NO: 470165 - DNA, 98 bp, Homo sapiens
tggagtctgcgaaggccgggacccggttccccggcccacagtgggggtgtgcaaacccgagagaactggataagtttataccatggatagcacaaagg

SEQ ID NO: 470166 - DNA, 100 bp, Homo sapiens
tgacatttaattttagggtcctttatatagaagggagacaatggccaatgtacatggtggactatgccggcctgaacgtgcagctcccgggacctcttaa

SEQ ID NO: 470167 - DNA, 90 bp, Homo sapiens
ttcgaggtggagtcggagctgggacgattattcttggagaaaccctgtctgtttactgtaaccttttgcactcaaattcctttatcagga

SEQ ID NO: 470168 - DNA, 95 bp, Homo sapiens
agcagctacctgagcctgacgcccgagcagtggaagtcccacagaagctacagctgccaggtacacggtcctcttctcgcacggcaatgccgtgg

SEQ ID NO: 470169 - DNA, 73 bp, Homo sapiens
aatcaactacctaatgttatacaggctctggaaaaacatgaaggctaaagaattacctccaaagccattgtca

SEQ ID NO: 470170 - DNA, 98 bp, Homo sapiens
ttgcgaggaagccgccgggcgccgcgcctttgggaagagaggatggtgatgcaccggttacaaaagatgagaccacctgcatttcacaagacacaaga

SEQ ID NO: 470171 - DNA, 71 bp, Homo sapiens
ctgtgtttccgcagcgagagcgaggaggagatggactcaccctgtcacccaggttggactgcactggcctc

SEQ ID NO: 470172 - DNA, 50 bp, Homo sapiens
actcctgcttccagacgacaagtcggcacattcaggaccccgcgagccag

SEQ ID NO: 470173 - DNA, 98 bp, Homo sapiens
ggccacaactctgcagtggaccacagcattcctgaaatacatccaggaaagacatggagattctcttaaaaaggttggttcatgtgatcctggttaat

SEQ ID NO: 470174 - DNA, 106 bp, Homo sapiens
cgctgcgcggcgcggcggccgggccctcgagacggggacggaacccaagacagaccaggatgaggagcattgccggaaagtcaacgagtatctgaacaaccccccg

SEQ ID NO: 470175 - DNA, 80 bp, Homo sapiens
ctggactttgggcgtcccattgccatgctgctggagccagttctgcttctcggcaaggagcgatttgctggtgtagacat

SEQ ID NO: 470176 - DNA, 100 bp, Homo sapiens
attcaggaaggcctgagaccatggaaaacttgcctgctctctacactattttccaaggagagtgaaaatgcctcgtgtaaaagcagctcaagctggaaga

SEQ ID NO: 470177 - DNA, 100 bp, Homo sapiens
cttagaggaattaaactttggccctgcgcctcgtccagcctaggttccacccttttctgggaacgtatacactgaatatcctcgaagaaattggtggtgg

SEQ ID NO: 470178 - DNA, 75 bp, Homo sapiens
gctggggctgcagcggatcaccggtggacctccctctgagattctgccactggtacaagctgtccccaaagcctg

SEQ ID NO: 470179 - DNA, 99 bp, Homo sapiens
gaacagttgaacatgaagaatactggaaagttgctatgttttgatggaagcccttacacttggtgggttggcaaagccaacgagaagcactactactgg

SEQ ID NO: 470180 - DNA, 100 bp, Homo sapiens
cttattcagtgtataatggactctcagaataaaggaaagacctcagagtgttctcagatcacagaagaactgcagcttcctggggagcagtttcacctcc

SEQ ID NO: 470181 - DNA, 101 bp, Homo sapiens
cacaacgcttgttatgttttcatcacttctctccagaaggaaccgcggcatttgcagtttttcagcgaatttggcaatagtgatatttatgtgtcactggc

SEQ ID NO: 470182 - DNA, 98 bp, Homo sapiens
atctccatcacccaccaacaacaccacaataatccacagccaagatcacagattctgctggccatattctctactccaaagaggatgcaaccaagggg

SEQ ID NO: 470183 - DNA, 98 bp, Homo sapiens
cacgcagtgctacatgcacaacaagcatgagctcgcccacgccttcgaccgctacgagaccgctcactcgcgcccgcattgagatgttccacaagagc

SEQ ID NO: 470184 - DNA, 100 bp, Homo sapiens
ggaggtgccgctgccgtggccgcccggctgccgggagccgacagcttcgcgccggcttctcctcttccttaaagccttttccgaaacagagcagacaaag

SEQ ID NO: 470185 - DNA, 78 bp, Homo sapiens
actctctaaaaatgcagatcatttactgcacctaaagacaaagatcttgagccagatgattgtgcatccatttacatc

SEQ ID NO: 470186 - DNA, 83 bp, Homo sapiens
cgcgttcttccgcagcatagactgggacttggtttggtgcacctcgatttggaggaagtagggcagggcccttatctggaaag

SEQ ID NO: 470187 - DNA, 75 bp, Homo sapiens
aagaagatgtaaagaaataaatatttccttcattccacatgaatctcaggtgtctgcttttggggcagagttttc

SEQ ID NO: 470188 - DNA, 90 bp, Homo sapiens
gggatcgtgaccgagaccgtgaccgagagcgtgaccgagagcgcgaatatcgtcatcgttagaagggtagaatttcagaacaaattctac

SEQ ID NO: 470189 - DNA, 100 bp, Homo sapiens
ggcggaggacgcgcccggcgcccctgagccggccgagcggcgacggaccgcgaggtgaaaattaccagtccaggcctgttcagaattgtatatatcgcag

SEQ ID NO: 470190 - DNA, 75 bp, Homo sapiens
attccttctgttctggtggctcgatcttcattgctttcctctggacttgttgacctgacagttcaagaaaaggag

SEQ ID NO: 470191 - DNA, 100 bp, Homo sapiens
tgtttgtatggggcaagaacatccgagggtgcctgggaatcggtcgcctggaggaccagtatttcccatggaggcagtatatgaacctctagaaaatgaa

SEQ ID NO: 470192 - DNA, 80 bp, Homo sapiens
tgttccgcttcctgcgtatcatccccagcatgaagcaaattgtggctactaatttgccccctgaagatcaagatggctct

SEQ ID NO: 470193 - DNA, 90 bp, Homo sapiens
cgcagcagatcagggaccggctgctgcaggccatcgacccccagagcaacggctggccctggccttccacgacggcagcgtccacatcgt

SEQ ID NO: 470194 - DNA, 82 bp, Homo sapiens
ccttcgccaggtcgccggccacccccacatcatgttcctctgaacaacagggagaatatctctgatcccacctcaccattga

SEQ ID NO: 470195 - DNA, 90 bp, Homo sapiens
aaagaatctgatgagccttttaggcctgttcaggctcgtggtcccaagaagcatctgaagcgggtggcagctccaaagcattggatgctg

SEQ ID NO: 470196 - DNA, 97 bp, Homo sapiens
gggaacatggcgccggggcccccgtcgttgctgccgggattttggaggccggggccgcgctgagggcgcccagctgcttttgaacttctcagataga

SEQ ID NO: 470197 - DNA, 75 bp, Homo sapiens
tgactagcagcttcattttgaagcccacgcactggaggcagacatggagctggagtttctggagacagcgtgtgc

SEQ ID NO: 470198 - DNA, 75 bp, Homo sapiens
tgttcagttgattatgccagccagatgcagatacactctggaaatgattaaactagtaccacataatgaaagtgc

SEQ ID NO: 470199 - DNA, 95 bp, Homo sapiens
gctctcaaatatcactgttgtgaatacagagagggaaaaccaactgtaacgtgccacccaaattttcattcattggctcccatgtactatcgagg

SEQ ID NO: 470200 - DNA, 100 bp, Homo sapiens
ctggtcttccctgaccccgcggccggacgacccaagcccgctgagcaggatgaggacatttccactgggcctgggagatgggcaattctattcatggaca

SEQ ID NO: 470201 - DNA, 98 bp, Homo sapiens
tataagccgactgcagagactggtgaaactgtgcacccagaaacatcagttggacactgatctgtttccccatttagatacagggtcttgctgtgttg

SEQ ID NO: 470202 - DNA, 74 bp, Homo sapiens
ccgagagcgcgaatatcgtcatcgttagaaggctaaatttattgtgaagaaatcagaagatgaagaagacgccg

SEQ ID NO: 470203 - DNA, 74 bp, Homo sapiens
ctgaacaacatctggcccgcccacaccaacaggatcctaaggcctttgtagtccttcagccactgtgggccctg

SEQ ID NO: 470204 - DNA, 100 bp, Homo sapiens
aacaacagcctgttccaaatagtgatgctgtcttgaattgtcctgcctgcatgaccacactttgccttgattgccaaagagagtatgaagcccgcttgga

SEQ ID NO: 470205 - DNA, 101 bp, Homo sapiens
tacaagactctgcgacagattcgacaaggcaatacaaagcagcgtatcgatgagtttgaagcaatattgggaaaatgaggtacgttagtgttcgcgatttt

SEQ ID NO: 470206 - DNA, 78 bp, Homo sapiens
ttgggggtcagcatgctgaggatcctcttcctcctgggtactgagcagtacagtgaatacacaggctatgctgagaca

SEQ ID NO: 470207 - DNA, 97 bp, Homo sapiens
cccaggacccccaagccgccgcggacgcaggatgacgtcatgatgccccagcgggtgaggctgcaacacgaggctgccgttcagcacccgtcgagcg

SEQ ID NO: 470208 - DNA, 75 bp, Homo sapiens
ttcgcctctcagcaccctcaccgtctactaattatatccagatcgagagacagaagattctgaaagggttcaatg

SEQ ID NO: 470209 - DNA, 83 bp, Homo sapiens
tcccccggctccatcgacctcaaggacatcaacttccggccgcagatgtcccagttcctccgtgtcacaaagcagtacctgcc

SEQ ID NO: 470210 - DNA, 96 bp, Homo sapiens
caagatcaaagtgccagcagattcagtgtcatgtgaggacgtgcttcctgcttcatagataagaggttaaaattgcagagttttctcgtactccag

SEQ ID NO: 470211 - DNA, 98 bp, Homo sapiens
gcgattctctgcgggacctggcagcaccccgggccagctctggggaaggaggaatatccttcccaacatcaccactacttacctcaagtcgtgcattt

SEQ ID NO: 470212 - DNA, 75 bp, Homo sapiens
agaaattttatcttttgaaacacgttctgattaaccaagggatgatcctttcaaaaataaagccttgttatttag

SEQ ID NO: 470213 - DNA, 78 bp, Homo sapiens
ggttccacccttttctgggaacgtgagtatcaaccaagtaacatccaggagatgagggctcggcacaaagaggctttt

SEQ ID NO: 470214 - DNA, 98 bp, Homo sapiens
taaagacatcttaattgggcacgaaagaggatctcaaagatttcatgagacaagctggggaagtaacgtttgcggatgcacaccgacctaaattaaat

SEQ ID NO: 470215 - DNA, 99 bp, Homo sapiens
ctgtgccatcggcaaagccaggcaagctgcaaagacggaaatagagaagcttcagaaagggttcaaagacaccagtcagtatgtagtaggagaattggc

SEQ ID NO: 470216 - DNA, 75 bp, Homo sapiens
cgaagagattcttttacatctggaggaaactgatgaaaattttcacaagtgtgataaagcggaattgggaatata

SEQ ID NO: 470217 - DNA, 48 bp, Homo sapiens
agcgaagagctgcttctgtatcttaagcctcccgcgacgatgcccctc

SEQ ID NO: 470218 - DNA, 75 bp, Homo sapiens
ccacagacacaaggccagaccacaggatgagacctgcacgcagtggctcacagcagcacgatttgtgacagcccg

SEQ ID NO: 470219 - DNA, 100 bp, Homo sapiens
agtaaaggagcatgtagctcatccggagcaacatcttccaagtcaaggtccatctggttggtattgacatctttactgggaagaaatatgaagatatctg

SEQ ID NO: 470220 - DNA, 97 bp, Homo sapiens
agggcgctatttgtacttctaaatactccagtccttttccatgcactggaggagagggaatggatttgtaaactcaagagcttctccaaatttgatt

SEQ ID NO: 470221 - DNA, 100 bp, Homo sapiens
ttgggagttaaatcctccagaagtagaggactccgtcttgcagtacgcggcctggggtgtccaagggcagcagctgggattgttgtctgagattctgcgt

SEQ ID NO: 470222 - DNA, 100 bp, Homo sapiens
acacggccacctggagtggcagaagattgcagaggagctggggtggagacctttggcgacttggcctttggcgacatcttcctccacctgctcacgggca

SEQ ID NO: 470223 - DNA, 82 bp, Homo sapiens
cggaagatcgtcgccacctggatgctggaggatgccggctccaggagcagcagtggaggtcgggaacgcctcattgtggagc

SEQ ID NO: 470224 - DNA, 98 bp, Homo sapiens
aaaactcagaaaatacgtggttggagagctcatctggaattttgccgatttcatgactaaccagtcaggggacgtctctatgccaccctggggcccaa

SEQ ID NO: 470225 - DNA, 96 bp, Homo sapiens
atttttgttccagaggatgatgatgatgatgactaacagggaccatgcctggccggatgctgccgcctggcttcagtgccatctgcatgtcctcag

SEQ ID NO: 470226 - DNA, 60 bp, Homo sapiens
aatgctgtggcatctgttgtcgcaggtatattggtgaagattgtccccagtggatggtcc

SEQ ID NO: 470227 - DNA, 74 bp, Homo sapiens
cttgcaacaattgttatgcttgagcaagagcagctctacctgaggtcaggtgtggtgtcctctgccaccttcga

SEQ ID NO: 470228 - DNA, 83 bp, Homo sapiens
ccgggctacgctcctccatcacgtggaactgtggctgcaccatctgtcttcatcttcccgccatctgatgagcagttgaaatc

SEQ ID NO: 470229 - DNA, 100 bp, Homo sapiens
gtttgtatggacaggcttgtccatctgtaacttcattaagttcttttagaactcatcaaattgaagctgttccaaccagctctgcaagtgatggatttaa

SEQ ID NO: 470230 - DNA, 100 bp, Homo sapiens
ctgtcctaccgcgagattgtgaagaacagctccaacgatgagaccatcgctgccaagcagtttgcctatctggggcgcctggctcacgaggttggctgga

SEQ ID NO: 470231 - DNA, 138 bp, Homo sapiens
caaatgcaaaagttacctgttgctattccagcacacaaactccctgacagaatactgccaagatgcgtttacgagacaggaaagactctccccagctgctcatggatgctaaacacatctttcctgtcacctttcctt

SEQ ID NO: 470232 - DNA, 119 bp, Homo sapiens
cgcactgggaccccggaatcccgcgcgctgcccacgattcgcttctgaggtgctggagaatctggtaaaagcaccattgtgaagcagatgaggatcctgcatgttaatgggtttaatgg

SEQ ID NO: 470233 - DNA, 100 bp, Homo sapiens
ttccagttcatctaactcttatttctccgttggcccaaccagtcccagcgctgtcgtgctcctctactcggtaagaatgattgatgttggctgatattgg

SEQ ID NO: 470234 - DNA, 51 bp, Homo sapiens
gaacagccctccatcttgcagcccagaagtatcaaaggtgcagaatctggg

SEQ ID NO: 470235 - DNA, 83 bp, Homo sapiens
cgcgtctccgcgttcccagcccgggtccccgcgttcacagccccagcgcagatcatggaagggaagtggttgctgtgtatgtt

SEQ ID NO: 470236 - DNA, 97 bp, Homo sapiens
ttgcaagtacagcagccacacccagatcttccaagcacagccacttctgtgaacatccctgacctgcttcctggccgaaaatacattgtaaatgtct

SEQ ID NO: 470237 - DNA, 75 bp, Homo sapiens
catattccaataccgataaatctttgagcaacaccttctttggattgagtttcttccagagggaacgaagaagag

SEQ ID NO: 470238 - DNA, 100 bp, Homo sapiens
acacctgtgttcagggatgacgtttgctttttcatcagccagtcaggtcaaacatgtgttgacatcaaggacaacgtggtggatgaagggttctacttca

SEQ ID NO: 470239 - DNA, 89 bp, Homo sapiens
cattgaagcagatttccagcaacaagtgctttgggggattgcagaaagtttttgaacatgacagtctctagtgatccctgaaaagttcc

SEQ ID NO: 470240 - DNA, 75 bp, Homo sapiens
aaatcatgccccgagtgcgaccaacaggtatttcagagagatgggaatgatttgcacatgacatataaaatagga

SEQ ID NO: 470241 - DNA, 100 bp, Homo sapiens
agtgctttccccgcgtactcgggatggcggcggccgcgctgaggctcccggctcagactggtcttctgaggacctctgccctctacacagcggcctcttc

SEQ ID NO: 470242 - DNA, 83 bp, Homo sapiens
tataattcccggcttctcgagaagacactacagcctcaaggagtctctgctggatgaaccgaatcctaacagtccagccaata

SEQ ID NO: 470243 - DNA, 90 bp, Homo sapiens
gcgttgcgtgccctacttcaaggataagggcgacagcaacagctctgccggctggaagatgggcaccagttgcgtcttgaagtgccatca

SEQ ID NO: 470244 - DNA, 90 bp, Homo sapiens
gccaggacatcctggaacctgggaaagggaaataatgcaaaaggtgtcccaaggctcctgaccagtgaacaaagatttgagaaagacagc

SEQ ID NO: 470245 - DNA, 95 bp, Homo sapiens
cctctgcaacctgataggatttggctacccagcctacatctctttaatagaaaatggtcagcttgaaattgtgacaggtggctgggttatgcctg

SEQ ID NO: 470246 - DNA, 97 bp, Homo sapiens
atgccaagcagaaaattacctaaatgcactctttcgaaagaaagggtgtcctcaagaggatagtgacattgccttcttgattgatggctctggtagc

SEQ ID NO: 470247 - DNA, 98 bp, Homo sapiens
aggcgcttccgcgaccacccggagtgattgcccggcagagcgcggttcaaaccttgtactactcagctgatcacaagctgcttgatgggaacctacta

SEQ ID NO: 470248 - DNA, 75 bp, Homo sapiens
cagcagcccctgcccaagtctcaagtccacaggaggcccccctgttgctcagccgctcttctaaaacattcaaac

SEQ ID NO: 470249 - DNA, 80 bp, Homo sapiens
actggtgctgatggctcccttggcgaaggagtctgtttttcaacccaggaaggggagtccaggttgtcaatcggtcacag

SEQ ID NO: 470250 - DNA, 98 bp, Homo sapiens
accaaggaatctgcttttcaagtatgccaccaacagtgaagagagctggactggccattatggaggaggagctgcagcattcccattgtgtgaattgt

SEQ ID NO: 470251 - DNA, 50 bp, Homo sapiens
aaaatcttcgaagacttttcaaaaaagttggtgattcaaggaaagcacat

SEQ ID NO: 470252 - DNA, 100 bp, Homo sapiens
ctccacggccttgtgtcaagaaatctccacaaagtgacagtgaatgatggagggggagttctcagagtcattacaattttgaaagacatagccaatcgat

SEQ ID NO: 470253 - DNA, 100 bp, Homo sapiens
cgaaataccactttggaaagacagactttctattgtgttccggtgcctggggaatctacgtggggcttcctgaactatgtatgtgattgctagagctcaa

SEQ ID NO: 470254 - DNA, 50 bp, Homo sapiens
gactgcgccgcgtcttcctcaagggttttggccaaattgggcgagggcac

SEQ ID NO: 470255 - DNA, 100 bp, Homo sapiens
atgaagctaccggccagggttttctttactctggggtcccggctgccctgtggcctcgctcctcggagggggccttgatgctctcagcaagaaagcgaag

SEQ ID NO: 470256 - DNA, 74 bp, Homo sapiens
ggcagaggctggacacgtggacatctgccacatgctggttcagaaaacttggaatataacgtggagcctcaaga

SEQ ID NO: 470257 - DNA, 100 bp, Homo sapiens
gagcggcactcggcctgagcggcttcggaaatgtgtggacacctacaagtaccttttcatcttctctgtggccaacatgaggaacagcaagctgaaggac

SEQ ID NO: 470258 - DNA, 100 bp, Homo sapiens
atgtgcaaagtaaaatcctgggttatagatcaaaagaaacctgttcgcttctatcatgattggaatgacaaagaggatgtgtcagaactaaggaatgaat

SEQ ID NO: 470259 - DNA, 79 bp, Homo sapiens
gaggcctcctcagccatgtggaactgtctcctttacagaaaggggcttggataaggaggaaagaccatcagaagaaaag

SEQ ID NO: 470260 - DNA, 75 bp, Homo sapiens
attgacgccatgtcgggttattcgagtgaccgagaccgcggccgggaccgaggtattctaccttgtaaatactgt

SEQ ID NO: 470261 - DNA, 83 bp, Homo sapiens
agccttttctctgccttgcttgcttgagcttcagcggaattcgaaatggagcggtggtgccccccccgggcacggggccatgt

SEQ ID NO: 470262 - DNA, 100 bp, Homo sapiens
acaggagctgtagagaggaccccggtacatctgaaagccgggaaatgttggcagatatccctgttacaatctgtacatatccatttgtatttgatgccca

SEQ ID NO: 470263 - DNA, 75 bp, Homo sapiens
ccatgtcatccacttcgcccaacctccagctttccagaacatgaattccaaaaggaaagcagaaacctggaaaag

SEQ ID NO: 470264 - DNA, 76 bp, Homo sapiens
gcggcgtgccctgcttgtcacagctgataggaagatgtcttcaggaaatgctaaaattgggcaccctgcccccaac

SEQ ID NO: 470265 - DNA, 100 bp, Homo sapiens
atggaatcacggtttttggaacaaggattttggatgaagaagtttttgagcgtgctcaggcagttcttcaagctgtgacagctgtccagacagcaaatac

SEQ ID NO: 470266 - DNA, 100 bp, Homo sapiens
gcaacccgtagaggatgatccttcctcagattatattaatgccaactatattgattgacctgtgtaattatgcagaagaatggagctggattacacacag

SEQ ID NO: 470267 - DNA, 75 bp, Homo sapiens
aaagttcacgtgactgtggatctcaagtactaccggccaactgaagtggatgataatgaagataattcaaatgat

SEQ ID NO: 470268 - DNA, 96 bp, Homo sapiens
atgccgggggagcggggccttccacaccccctccgtgggtgtgtggtggaattctactaagtatcagtcggccctacaagacaaagcccacccacg

SEQ ID NO: 470269 - DNA, 75 bp, Homo sapiens
tggtacgtgcgcttcctgtgggagtgacccgccgcccccgacccaggtcttgccccagaagctgcgggcacatcc

SEQ ID NO: 470270 - DNA, 88 bp, Homo sapiens
gacgctcgctccgctcgtcccgctcgtcatggcctacccgggatacggaggagggtggttcagcactgagtcatgcttgcttctgcta

SEQ ID NO: 470271 - DNA, 54 bp, Homo sapiens
gggcagcagccgcttcctagaagaccagagacaaggtctcactatgttgcccaa

SEQ ID NO: 470272 - DNA, 100 bp, Homo sapiens
catcaccttcgtggtcgtctggtcctactacgcgtacgtggtggagctctgcgtgtgtggtatgcaagattacaattatgtgtgggccaactgttttgag

SEQ ID NO: 470273 - DNA, 82 bp, Homo sapiens
caaaaagtttgtcattaaacccatcgacaagaaggcacctatccggtgtttaaagccgtcccagtgcccaacatgacacctt

SEQ ID NO: 470274 - DNA, 51 bp, Homo sapiens
ctgtgaactaccatgacgaaacagcttagcctgcgacgcttatgattagag

SEQ ID NO: 470275 - DNA, 99 bp, Homo sapiens
tttggaacctcgtctttttattgacggtgtcttgtgtgaaaggcacgcacagaggctgggctgcggtccagatgcgtttgctccatgaattggtctacg

SEQ ID NO: 470276 - DNA, 74 bp, Homo sapiens
cgccccgcagccccccaacatcctgctcctgctcatggacgacggcagctggtggaatttttgaagaaaatgga

SEQ ID NO: 470277 - DNA, 75 bp, Homo sapiens
cacatgtgagggctgcaagggcttcttcaagatggtaccggaagctctgcccccggctagacgaccctgcatgga

SEQ ID NO: 470278 - DNA, 87 bp, Homo sapiens
gggggcctttcctgaggacggcgtacggagtgtggttgtatcacggactgattcaccgagcccaaccgtactcaactcacatatttc

SEQ ID NO: 470279 - DNA, 75 bp, Homo sapiens
cgctcaagtttgtggcccgcaactacctggaacctggtgaccctggcagcaaccccaacaaacgccagaggcagc

SEQ ID NO: 470280 - DNA, 75 bp, Homo sapiens
tccaactgtacaccaaagaggagcggtctcagatgcaaacatcagtgggaattgtacccacacaagcaattgcaa

SEQ ID NO: 470281 - DNA, 98 bp, Homo sapiens
ttcgtttaaggctttcttctttctcctgtggacaagccagtgctaccccattcacagacatcaaggaactttgcttacataccaagctgttagcccca

SEQ ID NO: 470282 - DNA, 100 bp, Homo sapiens
caacttcgcacggggcaccggcgtcattcagctgtacgagatccagcacggggacctgaagctgcttcgggagagacgtctcagagaggctgtgcagctg

SEQ ID NO: 470283 - DNA, 82 bp, Homo sapiens
ctccatcttcgcggtagctgggaccgccgttcaggccgctgcgcggccctgcgcatgctgctggcagatcagggccagagct

SEQ ID NO: 470284 - DNA, 100 bp, Homo sapiens
cctctacttgatgaattacgccaagagtcagcctgacatggccattatggccgtcaacacctttgtgaagctcccctcccacccggtcactccgtccagc

SEQ ID NO: 470285 - DNA, 100 bp, Homo sapiens
agattgcaaagagttatggatattctggtggggagatgaacccaacctagtgggtgtaatacatcatgaactgcaggcctcgctcaaggagcacccccgg

SEQ ID NO: 470286 - DNA, 82 bp, Homo sapiens
aacgcgggcgcctgaaggagttgttgtctcggcagcgcccgcggagacgtgaagaggatgacactcctgtccaggacactaa

SEQ ID NO: 470287 - DNA, 75 bp, Homo sapiens
agaaaatacaaatcacacgcataatggatgaaaggaaccgacaggtgacttcatggtcatgacgattttcttcaa

SEQ ID NO: 470288 - DNA, 50 bp, Homo sapiens
aagatttccttaaaattgctggtggtcctagctggactgctgcaccttgg

SEQ ID NO: 470289 - DNA, 83 bp, Homo sapiens
tctggaagctactactacgtggtgcttggaaagctaatgggaatgacagcaagaaatttaaacgagatagacctccctgttcg

SEQ ID NO: 470290 - DNA, 146 bp, Homo sapiens
cagacagttacccctcagtttcttcattcctttggcactcaccacacagacagcactttggtgataaagcaggaattgagcccctgagtcctgagttggtggcagctgcatctgctgtggcagattctctcccttttgataagcaa

SEQ ID NO: 470291 - DNA, 75 bp, Homo sapiens
cctgcaacacctgcggcctcactgggacccccaggaggtgaccctgcagaactgataaatttcaaacggaagaga

SEQ ID NO: 470292 - DNA, 152 bp, Homo sapiens
gacctgagcaagttcggaaaaaacattgcaaacatgtgtcgtgggattccaacatacatggctgaggagatgcaagcatccaggtgggaggcactgttatgttctgctccgagggctgccaggccattgtggacacagggacttccctcatc

SEQ ID NO: 470293 - DNA, 82 bp, Homo sapiens
tctcagtagccatgctcatgatcggcgtgtttggatgtactttacagaaaatgtcactgaaattcacaaatgcaaaacggat

SEQ ID NO: 470294 - DNA, 51 bp, Homo sapiens
ccgggatcgtgaccgtggaggaataatcatgggccagactgggaagaaatc

SEQ ID NO: 470295 - DNA, 75 bp, Homo sapiens
gtactggctacccttctctcgcaagcactatgttggccatggaaatgctatcaatgagctgaaattccatccaag

SEQ ID NO: 470296 - DNA, 75 bp, Homo sapiens
aaaggagcaagagcaagatcaccgtgacatccgaggtgcctttctccaaaaggatgagattgtctgaaacgaaga

SEQ ID NO: 470297 - DNA, 95 bp, Homo sapiens
gttgaaaatcctacagctacagagattcaagatgtatgttcagcagttggacttaacgtatttcttgagcgacctggcatgtcaccagggaaccg

SEQ ID NO: 470298 - DNA, 82 bp, Homo sapiens
agatctccaagctccgcaagctggaggcctcgggcaaggggccagcggctggactctattacctggcagaactgatagaaga

SEQ ID NO: 470299 - DNA, 100 bp, Homo sapiens
tccctgggaagctgcatgatgtggaacacgtgctcatcgatgtgggaactgggtactatgtagagaagttaaacagggtaaagatggtggaaaaggaaaa

SEQ ID NO: 470300 - DNA, 100 bp, Homo sapiens
ccaagaagctactggacctcgttcagcagtcatgtaactataagcagcttcggaaaggagccaatgaggctcaaggacatggtgccaaaggagacaatgt

SEQ ID NO: 470301 - DNA, 82 bp, Homo sapiens
tgagctcggccggcaaccgagggacccgcgtccaggtttacccaaggtccagcctagcccctaggcaccatgtcggacagtg

SEQ ID NO: 470302 - DNA, 100 bp, Homo sapiens
tgctgactttgggttggccttaaaatttgaggctggcaagtctgcaggcgatacccatggacaggaagggcctgtcccagtcggctttaccctatcgacg

SEQ ID NO: 470303 - DNA, 73 bp, Homo sapiens
atgaacttagcagcagctccactgaacagataaggggctcccttaaggaaaagacagttgaaaatcttgagaa

SEQ ID NO: 470304 - DNA, 108 bp, Homo sapiens
ggaccggtgccggagagccacgcatgcgcactggtgactgggtacctggatatgtgatcgagtattcttctgggtgtttctatgaggatgtttttggatgaaattggc

SEQ ID NO: 470305 - DNA, 98 bp, Homo sapiens
tggctttggcatgatttatgattccctggattatgcaaagaaaaatgaacccaaacatagacttgcaagaactaaagcaaatcttgtaaccccgagga

SEQ ID NO: 470306 - DNA, 119 bp, Homo sapiens
ccgtcgccggcagcgccgcgaaggcggtgctcgggccagcccttctctgccgtccctgggagacatgctgctgctgaagaaacacacggaggacatcagcagcgtctacgagatccgcg

SEQ ID NO: 470307 - DNA, 97 bp, Homo sapiens
cgggctcaacaaattcttgttttgcagagcaagaagaatggctacgtgactgtcagtgagatcaaagccagtcttaaatgggagaccgagcgagcgc

SEQ ID NO: 470308 - DNA, 100 bp, Homo sapiens
ctctgggtgtgcgggcggcctggcgcggcgctccgtcccggacgatccccagtatcctttgacagtgaaataataatgatgaatcatgtttacaaagaaa

SEQ ID NO: 470309 - DNA, 90 bp, Homo sapiens
gaatccgtggccccctaccaagggcccagcagggacccagaccagaaaggcaaggaggaactctctggaatgaaaaataaaatacaagta

SEQ ID NO: 470310 - DNA, 83 bp, Homo sapiens
gtttgctgactacctcgcccacgagagtcggagtaatctcaggggcgatataatcaatgaggtggtcctaaagttgctcaagg

SEQ ID NO: 470311 - DNA, 100 bp, Homo sapiens
ccccttcccaactgcggacatgctgggtggatccggatcgcatggaagacgcagcctggccgcgctctcccagtcccccggcagagggcagtagagatgg

SEQ ID NO: 470312 - DNA, 100 bp, Homo sapiens
caggcagcggcagagagggaatggtgcaggcaggcgctgagaaggacgcgcagtccatctctctcagggaccagttactctccacaagaaaattcacaca

SEQ ID NO: 470313 - DNA, 141 bp, Homo sapiens
ctccgggcccgcccccggcctatgcccccactaacggggacttcacctttgtctcctcagcagacgcggaagttctggacatggcaagacatgtgccactctatcgggcactgctggaattgcttcgggccattgcttctt

SEQ ID NO: 470314 - DNA, 100 bp, Homo sapiens
gatcaagtacctggatcctgagtacatcgaccgcattgccatacctgatgcctctaagctgcaattcatcctagcagacaatgtaactctgcaaatcgat

SEQ ID NO: 470315 - DNA, 76 bp, Homo sapiens
cgccacccctgttcacaacatgctgccaggtgctggagaatctggtaaaagcaccattgtgaagcagatgaggatc

SEQ ID NO: 470316 - DNA, 99 bp, Homo sapiens
gtgttaccaagaggggattgatctgctcctgcaggttctgaaagaagtcaatgaaaggattctattttgcaaagctgtattatgaagctaaagaatatg

SEQ ID NO: 470317 - DNA, 75 bp, Homo sapiens
actttctcctggggaacccgttcagctctccagtgggacagcgcatcgagatccagttgtcatcggtatccagga

SEQ ID NO: 470318 - DNA, 98 bp, Homo sapiens
ggaagctgtatgttgcaaatgctggggatagcagccgtgctatcaagactaatcaggaccttctcccagaaactccatggacgcacattttctacaat

SEQ ID NO: 470319 - DNA, 110 bp, Homo sapiens
cgcagagctaaatgggggcctctccagggagtgctctgttcacggctccatcgctgttaacaatgcagatcttcgtgaagactctgactggtaagaccatcaccctcgag

SEQ ID NO: 470320 - DNA, 90 bp, Homo sapiens
acggaccaaaggcaacatgaagtacaaagcagtgagtgtcaacgaaggctataaagtctgtgagagcaccgtatgtgccctgaaattgcc

SEQ ID NO: 470321 - DNA, 100 bp, Homo sapiens
ggacctgcaccctctcagggatgccctgcccgagctgctggggctcgaggctggcagccggcgccaagcccgcaggggctcccacctgaaggagaataag

SEQ ID NO: 470322 - DNA, 50 bp, Homo sapiens
tcagacgcctcacttaggacaagctgacaaacgggctcatcataatgcac

SEQ ID NO: 470323 - DNA, 100 bp, Homo sapiens
acttctgttatctgctcagacaagactggtacacttacaacaaaccagatgtcagtctgcagggaagatcctagtacctccccctctccggggacccgag

SEQ ID NO: 470324 - DNA, 100 bp, Homo sapiens
ctgttgacgacagctctcctcaggatttggagttccatggagtgatgagattttattttcaagataaagctgctggaaactttgcaacaaaatgtattcg

SEQ ID NO: 470325 - DNA, 82 bp, Homo sapiens
atctggtgtaccaggcgaagctggccgagcaggctgagcgatacgacgggaaatcgtggaacacatggtccagcactttaaa

SEQ ID NO: 470326 - DNA, 75 bp, Homo sapiens
tatgagttcctggacaagctggatgtggtgcgcagtgaaccctgcggcttcgaggcgacctacctggagctggcc

SEQ ID NO: 470327 - DNA, 76 bp, Homo sapiens
aggaatgcttactgttgcgtggttcgttattaacaggcctccccaaagccagtcctgtgtcaccaatcaaaggaaa

SEQ ID NO: 470328 - DNA, 96 bp, Homo sapiens
gagatcttgggcaccgagagggactacgtgggcaccttgcgcttcttgcagtcggctcctgatggaaagggaaggcccctagtcctggcaggatct

SEQ ID NO: 470329 - DNA, 50 bp, Homo sapiens
aatgagagcctacaacatgtcagccaaagtcatacactggctatcagaaa

SEQ ID NO: 470330 - DNA, 86 bp, Homo sapiens
ctcagttggaagcagccgatccagcctgcggagcctgtggggcaggttgaatgcctttgagaacttgatgcataaaatttgcatga

SEQ ID NO: 470331 - DNA, 51 bp, Homo sapiens
cttccgccagtggagacaacaggaaataatgaagatgtttcattttcaaga

SEQ ID NO: 470332 - DNA, 83 bp, Homo sapiens
ttttagatcctaagaagcccccgggaggagcagaactttgagggcgaaggggccttgtggtgagcatgggtttatgcgtctta

SEQ ID NO: 470333 - DNA, 74 bp, Homo sapiens
gcctctcggcctctgccggagaaacagaagttgattcaagtcagttgagacgccagttgtgtggaggaagtcag

SEQ ID NO: 470334 - DNA, 75 bp, Homo sapiens
ctttgctgtacatcgtattacacctgaggaggccaagggtccaccaaaatatactaaatctgttctgaaaaaggg

SEQ ID NO: 470335 - DNA, 75 bp, Homo sapiens
cagcaccaaggggctctactcagacactgagctccagctaggatgatcgaggttgtttgcaacgaccgtctgggg

SEQ ID NO: 470336 - DNA, 76 bp, Homo sapiens
ggaatggcctcctcccttagctccctgttcttgggatgcgactctgtacaagtgtcacagaaagtgaggttgcacg

SEQ ID NO: 470337 - DNA, 49 bp, Homo sapiens
agacgggctcccccgggatgatctacagatcatgagcgtcttgttgttc

SEQ ID NO: 470338 - DNA, 83 bp, Homo sapiens
ccgcagtatcatgctggccaagaagatcatcattaaggacggaggcacgtttcaccagtgatcattaaagaatgggcagctta

SEQ ID NO: 470339 - DNA, 89 bp, Homo sapiens
gaagtgctccactcgaacagatgtgagcgagaaagccgttgcctccagcaccacttctaatggattcaggagcagttccagaaaaatcc

SEQ ID NO: 470340 - DNA, 98 bp, Homo sapiens
actgagggtgaagtggcaggaggaggaggaggggctccggctggtctgtggtgagggccacgactgcttcccggtgctgttcacctatgacgccgccg

SEQ ID NO: 470341 - DNA, 90 bp, Homo sapiens
gccgtcggcagcaagaacagagagagaggtggacagatctgagagatactgaggggatcccaacaagccctcaggattcagaagtgttaa

SEQ ID NO: 470342 - DNA, 50 bp, Homo sapiens
accagtggaagatgatcacatcccagacagagtctgactgttgcccaggc

SEQ ID NO: 470343 - DNA, 100 bp, Homo sapiens
gcccgtcagtccctgctctgtgcgcgcctccatctgggccatggatgggggggacacagcgattgccacgcgccattggaatgtccctggccaaggagct

SEQ ID NO: 470344 - DNA, 50 bp, Homo sapiens
cggcgaccggcggcgtccgaggagatcctcttctcatgtagacggctttc

SEQ ID NO: 470345 - DNA, 51 bp, Homo sapiens
tagagattagccaaacagccaagcagattgctgacagaactggaatctcct

SEQ ID NO: 470346 - DNA, 100 bp, Homo sapiens
cgccgctggagatcctttcctgcttttggtttccctggcaggggttgaactgtggagtgtgtgggacccttgaacatctgtgaagaaatgactattctgc

SEQ ID NO: 470347 - DNA, 100 bp, Homo sapiens
agaacctcatcgctgcgacgaaaaaacctaaaggcagacccagaagagctttttacaaaactagagaaaattgggaagggctcctttggagaggtgttca

SEQ ID NO: 470348 - DNA, 75 bp, Homo sapiens
gaacggaaaactcccaacttcctgttggatataaagtacctgtcaccattgttgctggcttatgaagatatgatg

SEQ ID NO: 470349 - DNA, 100 bp, Homo sapiens
gcaagtgcagcctgcatttgtcactgaccactgaagtgtatgtttgtgcaaggtggacgccctgcttcatctggcccgccagaatcgggctgtggcccgc

SEQ ID NO: 470350 - DNA, 99 bp, Homo sapiens
cggtgtctggcggatgcggtcgtgaagatagaccaagatcactccatggatgaaatgacagctgtggtgaaaattgaaaaaggagttggtggcaataat

SEQ ID NO: 470351 - DNA, 74 bp, Homo sapiens
ccggaggagcccctcaggccgtgtaccttgaaagacttttaacatacgcagagatagatatctgtccggccaac

SEQ ID NO: 470352 - DNA, 78 bp, Homo sapiens
attcgcagtggtcgcttcttctccttggtccaggaggcccaggaggtcctgggggacccatgggtcgcatgggaggcc

SEQ ID NO: 470353 - DNA, 98 bp, Homo sapiens
cgtggtccaccatcggtgacctcaccgcctcggttcgccctcagccgccccgtattaattttaaagacccacagtttgctgaagattacatttttaaa

SEQ ID NO: 470354 - DNA, 83 bp, Homo sapiens
gccctggccgtggggaggaccggaggagagtgacatcaccgaggagacagaggtggaggtccctgagcttccatcagtccccc

SEQ ID NO: 470355 - DNA, 75 bp, Homo sapiens
ctggacccaaggacatggtggtcggattctttcttgtggagaagttattcatgtgaagatccttggaattttggc

SEQ ID NO: 470356 - DNA, 98 bp, Homo sapiens
atgagagcctgaggagccattttgagcaatggggaacgctcacggactgtgtggacctcaagattcctggaaagaagccccagcccccaggggaaacc

SEQ ID NO: 470357 - DNA, 75 bp, Homo sapiens
ttgatttggttggaatgctcttttaccgatgctttaacatacagccactaggcatgcttcccaagagccaagtga

SEQ ID NO: 470358 - DNA, 100 bp, Homo sapiens
cagactcctatttgaagtatttgacgaaaatagactggtgcagtacagaaggtttctaaaaaattagaaatgcacgtttacagcaagaggttggagatca

SEQ ID NO: 470359 - DNA, 114 bp, Homo sapiens
gtggggttgtggtcctggccaagagctacaatgagcagcgcatcagacagaacgtgcaggtgtttgagaagtcccccctgcgggtgaagaacttcgggatctggctgcgctatg

SEQ ID NO: 470360 - DNA, 100 bp, Homo sapiens
gcgtgatccggcaccaaatcggcccgcggtgcggtgcggagactccatgaggccctgggagaagcagaatttgcccgcatcatgagcattgtggacccca

SEQ ID NO: 470361 - DNA, 75 bp, Homo sapiens
gaagaagtcttcaggggagattgtctactgtgggcaggtgacaatctccaatagacttgtgtcttcaccttgctg

SEQ ID NO: 470362 - DNA, 82 bp, Homo sapiens
aggagctgtgcagccgcgaggaggcgcgggaggtgttcgagaacgaccccgagacgctgagctgactgctgcccactttgga

SEQ ID NO: 470363 - DNA, 78 bp, Homo sapiens
atggcattccagaatatctcagatgagcagggtccatgcctttttagagcagtggggactcgttaattaccaagttga

SEQ ID NO: 470364 - DNA, 100 bp, Homo sapiens
agtagctccagcgccgtaagcgaggcctccttctcctacaagatcatacatctgtcggtggcctgggagacagtttttatgaatacttactgaaagcatg

SEQ ID NO: 470365 - DNA, 118 bp, Homo sapiens
gttcctattcggccatctttgctcctccctgcaactaactccattcttaattgctgacctcaagagaatttgcaagacaatagttgaggctgcaagtgatgatgagagacgaaaagct

SEQ ID NO: 470366 - DNA, 100 bp, Homo sapiens
ctccaggagttcgtctcttacgtctgcggaagtgcagctgcctcagttcttagcgcagcaactccatgggaagaacctggtttttagtgacggctacgtg

SEQ ID NO: 470367 - DNA, 98 bp, Homo sapiens
gcggtccctgtgacctgtggagacacggccagatctgccctccagctgtgggtgagcgtggaggatgctcagatgcacaccgtcaccatctggctcac

SEQ ID NO: 470368 - DNA, 98 bp, Homo sapiens
aatgagaaccctacttgcctaaatgaggaatgtctttcctaccatctaaaatacgaaggtttctggctggatgacatgaattggaatgctttagaatg

SEQ ID NO: 470369 - DNA, 83 bp, Homo sapiens
atttgcatttcgttagctttctggattatatcaatgactgcaagcacctattatggaagaaggtagataatgactataatgcc

SEQ ID NO: 470370 - DNA, 82 bp, Homo sapiens
gccggttctgcaccatcttcaggtcctactccaggggcgctcagtacctggagtagaacagaaaaattattatgtctgtgtt

SEQ ID NO: 470371 - DNA, 50 bp, Homo sapiens
ctgcgattggactgcacaggattgagaaagttcaggagccctggaaagga

SEQ ID NO: 470372 - DNA, 98 bp, Homo sapiens
agcggtgttggaacttcgttgcttgcttgcctgtgcgcgcgtgcgcggacatggcctcaaacggttttccctgatgaatttcacctccagactttgaa

SEQ ID NO: 470373 - DNA, 99 bp, Homo sapiens
tggagtatcagagccaggcaaataagtaccacaactcctgcctcatagccaatggagatcttcgtggatgatgagacgaagttgacgctgcatgggttg

SEQ ID NO: 470374 - DNA, 104 bp, Homo sapiens
gtttccggaagtgtatagggaaacctgggggctccctggacaactccgagcaggtgagaagccctaccactgcaactgggacggctgcggctggaagtttgcgc

SEQ ID NO: 470375 - DNA, 75 bp, Homo sapiens
gacaggcgtggcagagggagcagtgcccgagcgcggtgagggttcagagtatggtgccagtggagaagatgcgct

SEQ ID NO: 470376 - DNA, 80 bp, Homo sapiens
ataattgataacaccctgtaacagctgatttggaaattttagcattcaggtgccaggaatgcagatgggacagccagtgc

SEQ ID NO: 470377 - DNA, 100 bp, Homo sapiens
ggcggcgccgagcgcggggtcttggtccaccttccagcacaaggagctgatggccgctgacaggggacgcagccaagatgcagattcacctggaagttct

SEQ ID NO: 470378 - DNA, 100 bp, Homo sapiens
gattggctgcggggcccacctctctaagcctatggaaaagcttctggagtttacagatgcttcctcagcaacggaaagccatagctaagttcaaggagcc

SEQ ID NO: 470379 - DNA, 90 bp, Homo sapiens
gaaaaaagaaaactctagaagtctggatgtcggtgggcctctgagatatgccgtttacggtgtggacaacagtgagtatatgcggaatgg

SEQ ID NO: 470380 - DNA, 110 bp, Homo sapiens
gggcatcggacatcctggcctttgggcataaatactcagaagaaggcggagtgtctctatgtattcccctgccagtggaactaccgtcccgatcactgcatgtacggaag

SEQ ID NO: 470381 - DNA, 96 bp, Homo sapiens
gatttttgcatgagacgcttctggacaggttgtggttcaccttgaaactattctaggagcctcagttcaacatgttaaactgaagaaaatgaagta

SEQ ID NO: 470382 - DNA, 101 bp, Homo sapiens
actgctgcatctgcaacaacagcagttccactcttgtcctggggacccagctttaactttagcatctggtatgttgaacttagtggcattgatgatcctga

SEQ ID NO: 470383 - DNA, 83 bp, Homo sapiens
aaagaacctgcaattacatcgcagaacagccctgaggcaagagaagaaagacaatgcagatcttcgtgaagactctgactggt

SEQ ID NO: 470384 - DNA, 75 bp, Homo sapiens
cacagctggagcggcgagctctgcagggggagtcggtgaagtacttcctggacaacttggaccggatcggccagc

SEQ ID NO: 470385 - DNA, 87 bp, Homo sapiens
ctgaaccaggacctggacccggacccaaagtgccatgtctttaatattggccatcgggactttgatgtggagaagcgacttcggaga

SEQ ID NO: 470386 - DNA, 100 bp, Homo sapiens
gtcgacatgagtgatgtggaggaaaacaacttcgagggcagagaggcactggctacaattaggcttctcgacgtcctgtgcgaaatgactgtgaatactg

SEQ ID NO: 470387 - DNA, 71 bp, Homo sapiens
gattcgcagtggtcgcttcttctccttggtagttttgcagaagtgcaaagtcaagtctctcttgcacagtc

SEQ ID NO: 470388 - DNA, 50 bp, Homo sapiens
caccctcaacaaacaccagcgctttgggtttggacatatttgactctttt

SEQ ID NO: 470389 - DNA, 97 bp, Homo sapiens
cagagccgccatcttgtgggagcaaaaccaacgcctggctcggagcagcagcctctgagctgagctgactgctgcccactttggaggaggcggtggg

SEQ ID NO: 470390 - DNA, 75 bp, Homo sapiens
acttcacaggaattgccatttgatcttaaatgtatttcggcattgggttgaacatcatttttatgactttgaaag

SEQ ID NO: 470391 - DNA, 100 bp, Homo sapiens
ggctagctttggcgaggggacggagccggatcaggagccgccgccgccatatcagtatcagatgtagaaggtggtgatggactgcagctcagaaaggaac

SEQ ID NO: 470392 - DNA, 82 bp, Homo sapiens
ccgtccggagccagccaacgagcggtatcatgatattagctggtttgacatcaagtcatttgtgagtcatcagatcttctcc

SEQ ID NO: 470393 - DNA, 90 bp, Homo sapiens
cgctactggaggcggcccgcttcctggaatggcaagcgcagcaacaacagagagcacgtgatccagagacaatggccccgatgggatgga

SEQ ID NO: 470394 - DNA, 83 bp, Homo sapiens
gcagatggcggatgccctgcagtacctgcagaaggtctctggagacatcttcagcaggagcacgtttgccgtggacgggaaag

SEQ ID NO: 470395 - DNA, 98 bp, Homo sapiens
cttcagtgtggagtaattgacactttcgaggtgcaacaatcgaacacagtgtatagtagttactgggtcagatgtgtttcctgatccatgtcctggaa

SEQ ID NO: 470396 - DNA, 75 bp, Homo sapiens
gaggcggcgccgctcccaagatgtcgcagacggccatgtccgaaacctacggagctatgaagacatgattggtga

SEQ ID NO: 470397 - DNA, 83 bp, Homo sapiens
agggaccaaggtggaaatcaaacgctcaggggagagagaaagcccagaaagaaagctactccagggtcctatggatatttcag

SEQ ID NO: 470398 - DNA, 100 bp, Homo sapiens
caactttgaagagatcgactacaaggagatcgaggtggaagaggggctaacaatggacacccagaaggacgttcaacctccaaagcagcaaccaatgata

SEQ ID NO: 470399 - DNA, 50 bp, Homo sapiens
cgcgcctccatctgggccatggatggtagagacggggtttcaccgtgtta

SEQ ID NO: 470400 - DNA, 98 bp, Homo sapiens
aaccaggaaggggcgacgcctgtgagcttggccttggagcgaggctatcacaagctgcaccagcttctaaccgagtgaaaggtgtagcagtcactcgg

SEQ ID NO: 470401 - DNA, 50 bp, Homo sapiens
ctatggaattaagtgccatgaaagattatagctggacagacatccgctgc

SEQ ID NO: 470402 - DNA, 83 bp, Homo sapiens
ggggcccctattttggaatacattgtgaaatatagaagtgaaacaaagcttagcaggagaggagagccagagaagtgacaggg

SEQ ID NO: 470403 - DNA, 83 bp, Homo sapiens
ttccctctacacgcaaatcccaggatatatcccctggggcagctggtggggctgaagatggtttctttgtgcccccaaccaag

SEQ ID NO: 470404 - DNA, 74 bp, Homo sapiens
agacatgggaatcactctgcatcttatcaccttttgccatgatagcatttctttcattggacagttccttacaa

SEQ ID NO: 470405 - DNA, 97 bp, Homo sapiens
tgaagttgaagaagtactctcatggagacaagcgccctgcccacccttggagccaggcacacagtgacgactcggaggccaccagcctgtcctctgt

SEQ ID NO: 470406 - DNA, 90 bp, Homo sapiens
cccacctgggttctggtggacctctcggctttcctggtcagcagcgacttgattcttacaaccagtacagaaaatagacatgaatctcac

SEQ ID NO: 470407 - DNA, 50 bp, Homo sapiens
catgccagcccagaacagagaatcaggaaagtccatcagcttgataatgg

SEQ ID NO: 470408 - DNA, 100 bp, Homo sapiens
ctgggctccagagtccctcgggtctcaggtcatggcggtcgcggggcccgcgcccggagctggcgccagggggggccctcagcctcttggccttgaacgg

SEQ ID NO: 470409 - DNA, 130 bp, Homo sapiens
cgtgactctgcaccctgcccagaggtccctcagcaaagatggtacaaaagagtctttggaggatgcggctttgatgggttctagattctgagaaggacttgaaagtactcatgaaggagatggccccttt

SEQ ID NO: 470410 - DNA, 83 bp, Homo sapiens
cgctactctctctttctggcctggaggctatccagccgctgataaagcagtttgtgtccgacgtggcctggggggagctggac

SEQ ID NO: 470411 - DNA, 98 bp, Homo sapiens
agccaccaatgtttacttgatagttatccttgttagcttcggtctcttcatgtatgccaaaagggaatggccaaatccagtgctattgaaacagcctg

SEQ ID NO: 470412 - DNA, 100 bp, Homo sapiens
ggtggagattctggacgcaaagacaagggagaagctgtgtttcttggacaaggtggagccgccaccaaaatgcagattttcgtgaaaacccttacgggga

SEQ ID NO: 470413 - DNA, 75 bp, Homo sapiens
atttattacatgatgtcattcagtgattgagactttagaagacagctttccatcgacactaggccctttagacca

SEQ ID NO: 470414 - DNA, 83 bp, Homo sapiens
ggctaggcgaggagctggagtggctgttcttaatgcctccaaaggaattcaaaatatggaagtcaaattatgtaccacctcct

SEQ ID NO: 470415 - DNA, 90 bp, Homo sapiens
cccgtgtcctgcaggtattgggagatccacagctaagacaccgggacctcctggaagccaaaaatgctcaggagcatctatcggctgcac

SEQ ID NO: 470416 - DNA, 75 bp, Homo sapiens
aatgatgaaggctcactggacatatacgctgggttggacagtgctgtttctgctaaacccacagttcagccctcc

SEQ ID NO: 470417 - DNA, 100 bp, Homo sapiens
cggcagcgcccccggcaggcgcggtggcggtggcgcgcagccagaatttcgctaaggagtttgtgatcagtgatcggaaggagctggaggaagatttcat

SEQ ID NO: 470418 - DNA, 78 bp, Homo sapiens
gatgaagaaagtgaggaagggaaagcagcaatttcacaactcaggttcaacctggtttgtgatcggaagcacctgaag

SEQ ID NO: 470419 - DNA, 90 bp, Homo sapiens
aatggaccaacttctttggcaagtggacattttactggctcaagttcatgtgaaatggattttggacactgatattttcaatgaatggat

SEQ ID NO: 470420 - DNA, 90 bp, Homo sapiens
aaagtgtttgcatctcagtggttgaatcataggcaagtggtgtgtggcacaaaatgcaacacggttgcaattgtagctcaagacttggca

SEQ ID NO: 470421 - DNA, 100 bp, Homo sapiens
cccagaggtcgtggaggtggccgtggaggcagaggtggcatgggcaactccgaagtcaagcccgcactctgattacctttgctggaatgataccataccg

SEQ ID NO: 470422 - DNA, 75 bp, Homo sapiens
gccgacaacgccttcatgctgctcacgcaggaatcagagatcattgatttcttcctgggggcctctctcaaggat

SEQ ID NO: 470423 - DNA, 100 bp, Homo sapiens
gccccggacagcggccccgaagcgggcggcctgcactcgggaaaagaagcccatctgtgtccagagatcagaatagaagatacgaccaaagggaagaaag

SEQ ID NO: 470424 - DNA, 110 bp, Homo sapiens
ctctcagccctctcagctgcaccggaccaccaacaggtatggcatttcaaatatagatacaaccattgaaggaacgtcagatgacctgactgttgtagatgcagcttcac

SEQ ID NO: 470425 - DNA, 101 bp, Homo sapiens
atcgggcccgcaagggcggagggggcccgaaggacttcggcgcgggactcaagtacaactcccggcacgagttgtcacaggtagtactgatggaattggaa

SEQ ID NO: 470426 - DNA, 111 bp, Homo sapiens
gcggtttaccatggaacccgtgaccaagtggagccccaaacaagtggtggactggactagagggctctgtgtatgaatgacaaggataccttcagccagctcattctggat

SEQ ID NO: 470427 - DNA, 75 bp, Homo sapiens
ctggagaaatgttcatggtatcaattttgtcagtcctgttcgaaaccaaggtgaatggcattgacctccgtggtg

SEQ ID NO: 470428 - DNA, 74 bp, Homo sapiens
aggccaccatggttctggtctcctggatcatgtgctgtccgcaggcttgtccaaaaggaaacatcggaatgacc

SEQ ID NO: 470429 - DNA, 75 bp, Homo sapiens
ccagtcccacttcaaacattcgtctcggaaaccccgcctcttacagtcacgagatcctgcaaaagttccaggtgc

SEQ ID NO: 470430 - DNA, 100 bp, Homo sapiens
tggacaatgaagactattactcgttgctgaacgtgcgcagggaggaaccctaaggactctgcaatatgaataattccctagagaacaccatctcctttga

SEQ ID NO: 470431 - DNA, 100 bp, Homo sapiens
taaacacatcaccttgatttttaatcccacggcatctgggaacaaagtcagtcgccagtcagtgttgtgtggaagccagaacatcgttctcaatggcaag

SEQ ID NO: 470432 - DNA, 106 bp, Homo sapiens
tcatctcctactgtcccacggccaccgaagagatcagtgtactgttacccggacatacctattccttcacaagttctggttcttcagtgctgcttactattttggt

SEQ ID NO: 470433 - DNA, 83 bp, Homo sapiens
ccttgctcctcgccgcggcggggactgcagcaccgaacaagatttgtgatgaaatggagcctggaacaaactcttttcgggta

SEQ ID NO: 470434 - DNA, 82 bp, Homo sapiens
cctggagcctcagttggaagcagccgatccagcctgcggagcctgtggggcagagaagcctgtgtctcccaaatcaggaaca

SEQ ID NO: 470435 - DNA, 100 bp, Homo sapiens
tcttctgtggattaactcagtggctcaacaggctgaagggaggtaaatattccggattggattgttgaccttcgccatgagttgacccacaagaaaatgc

SEQ ID NO: 470436 - DNA, 100 bp, Homo sapiens
agagcatgatctagaagaggatgagagtggcactcgacgaaaaggagtgtgattctggagagtgacccccagcaagtgatccagaaggtgaattttaggg

SEQ ID NO: 470437 - DNA, 80 bp, Homo sapiens
gccccgccgcccgggaaagcagggcgtccgagctgggccacagcctgaacgagaacgtcctcaagcctgcgcaggagaag

SEQ ID NO: 470438 - DNA, 100 bp, Homo sapiens
gagactggagcagagccgctgggcgccggagccgaggcgagcgccgcgcgcaccactgtgaagtttagcaactgcaatggaaaaagaaaagtacaatatg

SEQ ID NO: 470439 - DNA, 71 bp, Homo sapiens
acagtgaagagagtgattctgattatgaggaagaggatgaggaagagtccttgaatgaagtagggtatgat

SEQ ID NO: 470440 - DNA, 75 bp, Homo sapiens
cagagtgatagtttgtggcttgtagaattctatgctccatgggcagctgcaatgactctccgcacggtattattg

SEQ ID NO: 470441 - DNA, 90 bp, Homo sapiens
gattatgtcagccaaagctactcctactcatctattttgaataaatcagaaactgaaccgctactttgagaaccctcaagtgatccccga

SEQ ID NO: 470442 - DNA, 97 bp, Homo sapiens
aacaacgatggcattttgaaaacagcaaagtctttagtagctttcccaaaactcaaacggcaagttttgttgtatgaacctcaagtcaactcaccca

SEQ ID NO: 470443 - DNA, 100 bp, Homo sapiens
ctcccgtccttctcatccttcgtgacagagctgaatgaacctctctccaatgaagatcgaaatctcctctctgtggcctacaagaatgtggttggtgcca

SEQ ID NO: 470444 - DNA, 100 bp, Homo sapiens
ggccgagacaccttgcagctgccgccgccgccaccgagccgccgcgtcaacatggctgaacaggagcctcgttctctgtcagaatcgccctacttgccct

SEQ ID NO: 470445 - DNA, 100 bp, Homo sapiens
aggttctaaatggcttctaagaagttgggtgcagattttcatgtttctagtgccaaacttaaaagaaaaaagaactggttcggaacagcaatatatacag

SEQ ID NO: 470446 - DNA, 100 bp, Homo sapiens
ctctgctcctcctcgcctgcgaagcatcacgtccgcttcccgacgctgagggcagccccgtccagggtggcttctggcacagcagcttaattgaccggaa

SEQ ID NO: 470447 - DNA, 100 bp, Homo sapiens
ggatgaaggagccagtttggctgaaaataaaaggaaaatttctaccttgaaccgtatctgaaagaggttattcgggaaagaaaagaaagagaagaatggg

SEQ ID NO: 470448 - DNA, 101 bp, Homo sapiens
cgcaaacggtgggggtcggccggggccgcttcaccacttacgaaatcagggtcaaggttctgtacagagtaatgagatgtgtgacggctgcaaaccaggtg

SEQ ID NO: 470449 - DNA, 100 bp, Homo sapiens
agacgatggcggagggagataatcgcagcaccaacctgctgggtgtccgcaatgttgccagtgtctgtctgcagattggctacccaactgttgcatcagt

SEQ ID NO: 470450 - DNA, 100 bp, Homo sapiens
tcccagggcatatgtctgcacgctgaggccgaggcggagaaggggcttcctgagcgtcccagtacactgacagaggggctcccacaggatcagaggctgg

SEQ ID NO: 470451 - DNA, 100 bp, Homo sapiens
tcagcctgtcaccagcgcgtctctccacatacattctaagggagcacatggtgaaggaagagagaagggcacagttacctaagtatcaacgtaatcttcc

SEQ ID NO: 470452 - DNA, 51 bp, Homo sapiens
cctggccacgccccttcccgaggagaatgcacctgcttcccaaggcctgaa

SEQ ID NO: 470453 - DNA, 75 bp, Homo sapiens
acaaggccctgagggagactgcggaggagataattgacgaccttgccaacctagtggagaacacagatgaaaaac

SEQ ID NO: 470454 - DNA, 98 bp, Homo sapiens
gcctcgcgtgctagcggtgcccttgtgagccactgcgttctccaaggccagaacgggacagctcctttagcggcagagttttccgagtgaccttcttg

SEQ ID NO: 470455 - DNA, 49 bp, Homo sapiens
cggcgagcgcgagcggcgcgagaaaataaaataccatgaggagtttgag

SEQ ID NO: 470456 - DNA, 78 bp, Homo sapiens
aagctcatccgcaaggtgtccacgtcgggtcagatccgacagaagcccgagcgggaagaagttccgcagcaagccgca

SEQ ID NO: 470457 - DNA, 83 bp, Homo sapiens
cgttctgcaccagcgccttgatcgagtacttgagcaaaatgatgcttcaacacccaggccaggtctctgcctcggaagtgagt

SEQ ID NO: 470458 - DNA, 90 bp, Homo sapiens
atggtccacaaaccaagtgggcaaataatggcagttaaacgggtcacagaaagtcgagagagccaaatgacgattgaggagaggaagcag

SEQ ID NO: 470459 - DNA, 50 bp, Homo sapiens
caatgttgcacttaactgatattcaggctgggcggggagcgtcggaccag

SEQ ID NO: 470460 - DNA, 100 bp, Homo sapiens
ggtgatggagattttgatgtggatgatgccaaagttttattagcatgcagcagattggaataaatatgatgaccgattgatgaaagcagcagaaaggggg

SEQ ID NO: 470461 - DNA, 100 bp, Homo sapiens
gtttgtccggctctttccactaaaccagcaagacgtcccagataagtttaagtttcagctcctggcatcagctctattcaaatctggttcagattttaca

SEQ ID NO: 470462 - DNA, 90 bp, Homo sapiens
tctgaatgttgtgaccactaatttggggtctctctttttggcatgtcggccctgttactccctgggaactttgagtcttatttggaactt

SEQ ID NO: 470463 - DNA, 100 bp, Homo sapiens
attcatacgcagctggcagatattatcatagttgctgcagttctttatagctccaagctctacagattcttcaaatatattgagaatagggatgttgcaa

SEQ ID NO: 470464 - DNA, 88 bp, Homo sapiens
cagacagtttttgtttcaaaagaaacatgttggaagatcaaaggcacagatcaataagatggagtggtggagccgcttggtgtccagt

SEQ ID NO: 470465 - DNA, 75 bp, Homo sapiens
catggtcagtgccatttcgcctttatcgtggtggagtccaccctggctgtgtagagacaggatttcaccatgttg

SEQ ID NO: 470466 - DNA, 98 bp, Homo sapiens
agctgcagttggatagccccgaagatgcagagttcattgttgccaagtctattatcctcccagtccacaacgctgaaccgtggctggacgaatgtttg

SEQ ID NO: 470467 - DNA, 100 bp, Homo sapiens
atctctgtgcactgataataaccctgcagctcttcaagaagcccagccccttcatcttcatcagccagcgtccctccccagagacccaagacaccatcca

SEQ ID NO: 470468 - DNA, 100 bp, Homo sapiens
tgcagattagcctcgaaggctatgagaaggctttggaatttgccaccctggccgccaggctcagcacagtcacaggaacatgagagaatttcaagaatcc

SEQ ID NO: 470469 - DNA, 100 bp, Homo sapiens
aagctatcatgaaggtgttgaacttggctctcatgtttgcagacggttggcaggcaggcctgggcacttggcgtgaaaactcaaatgcagcatggattaa

SEQ ID NO: 470470 - DNA, 98 bp, Homo sapiens
ccgagctgcacgtcctcgaacgcgaggccaacagccccgccggaaatcactgtggaaaatcttcccagttatttcagacttcagaaaccattattgat

SEQ ID NO: 470471 - DNA, 99 bp, Homo sapiens
gcccgcgaggcgggcagccggggcgtccaggccgcccattgtgtccttgcccaggaccccgagaaccaggcgctggcgaggttttactgctacactgag

SEQ ID NO: 470472 - DNA, 75 bp, Homo sapiens
caggtcagagttgctccaagcaagttcacttcttcaactgagatggacatgatataatctccattgagtcaaaga

SEQ ID NO: 470473 - DNA, 80 bp, Homo sapiens
tcttctcaaactcagacaatgaaagatctataccatctcttgttgatggctgtacgtgctgaagctgtcagatgacattg

SEQ ID NO: 470474 - DNA, 100 bp, Homo sapiens
ggagcaagaggcagagctgtgggcggtggagtctagacttccccaaggcgtgtacccagagagctgcttttgcacattttcctgaactctatgattttgc

SEQ ID NO: 470475 - DNA, 82 bp, Homo sapiens
tcgagtatctggtgaagtggaaaggatggcccccaaagcctgagacctgggaggaagctggagaaaagatgccctctgaatc

SEQ ID NO: 470476 - DNA, 100 bp, Homo sapiens
ccccagagtccaatggatcaacacagccaagatttatactatggtggggaagctttctctgtagagcagccacagtcttttacttgtccctattgtggaa

SEQ ID NO: 470477 - DNA, 100 bp, Homo sapiens
tctagaatatacaaagacaaaaggagattctgatgaagaagttattcaagatgctgtgttggggtggaagaggaggaggcgcccgacatcgacatatacc

SEQ ID NO: 470478 - DNA, 98 bp, Homo sapiens
tctacctggacatcgatggacgcattcagaagaaacgcttcgttaagggactcaggcagtacgggaagaacttcttcagaattagaaaggagctgctt

SEQ ID NO: 470479 - DNA, 82 bp, Homo sapiens
ctggagcctcagttggaagcagccgatccagcctgcggagcctgtggggcagctttgtaggcagccaatcccagagaagcag

SEQ ID NO: 470480 - DNA, 101 bp, Homo sapiens
taggttggtccgaagtttgaaccggacagaagcgctggtcggcgtctggcggttgcagatgctattctaggcaatcagatgttcacacattatgaccgggc

SEQ ID NO: 470481 - DNA, 84 bp, Homo sapiens
ggagacctcgctgcgctcatggcgtcgcccgggtcaaaatgcagatcttcgtgaaaacccttaccggcaagaccatcacccttg

SEQ ID NO: 470482 - DNA, 75 bp, Homo sapiens
ggactccttcggcagtccacccaccgccgccgcctcccagggctgaagaagatgcagagcagcctgaagctggtg

SEQ ID NO: 470483 - DNA, 143 bp, Homo sapiens
gaagttcctgatggagctgtaaagccacccacaaacaaactacccattttcttttttggaactcatgagacttaaaggcattaggatttcctgaaggacttgtgatacaagcgtattttgcttgtgagaagaatgagaatttg

SEQ ID NO: 470484 - DNA, 74 bp, Homo sapiens
ggggaaagtatttgtggtaataacccttaccgggagtttcactgaaggttttccaacctattggtggtatgtct

SEQ ID NO: 470485 - DNA, 83 bp, Homo sapiens
gcagtacctgcagaaggtctctggagacatcttcagcagtgcctccggagccagcgtggtggccatagacaacaagatcgaac

SEQ ID NO: 470486 - DNA, 100 bp, Homo sapiens
tcatttctaagcaggttcatgccagcccagaacagagaatcaggtggaagccaagctaattgacaaactggatagcctgatgtcagaaggcaaaggtgac

SEQ ID NO: 470487 - DNA, 98 bp, Homo sapiens
gagaaaagctctacactggactaagagaagttgttaccgaacatctcataaataagcattcctctgaatattgatttgctgaatagcccagacttatt

SEQ ID NO: 470488 - DNA, 83 bp, Homo sapiens
ccagataaagattctgggaaatcagggctccttcttaactaaagcctctgaaaatgatttgctgaacaagcgcctgaagctcg

SEQ ID NO: 470489 - DNA, 90 bp, Homo sapiens
caagccgggcggcctgccccgccggagcagcatcatcaaggcaggtaaagtgaggaaacatgcaactgaacaggaaaaaactgaagaggg

SEQ ID NO: 470490 - DNA, 90 bp, Homo sapiens
catttacctccctggtctcaggtgtctctcacaggagaacccgtacagatagcgctgactctggacattgcaagtatctctagcatttca

SEQ ID NO: 470491 - DNA, 75 bp, Homo sapiens
tcgctctcggcctccgacacggaccatggccaacctggagcgcaccttcatcgccatcaagccggacggcgtgca

SEQ ID NO: 470492 - DNA, 90 bp, Homo sapiens
ctgggatggaaattttttgatcatgcggcacatcttgggggagctctttttggaattgaagaactgaatgtcatcatgtctggaatcaag

SEQ ID NO: 470493 - DNA, 101 bp, Homo sapiens
tctaggagcatctgaaagacaggtgtgcgtcatgcacttgaagcacctgaggaccctgctgagccctcagagctccaaacgagaatggaagccgctggagg

SEQ ID NO: 470494 - DNA, 82 bp, Homo sapiens
tggccgctatcatcccagcagtggagttcagcccactactctgaaccagatgcagctgactttgcctgtagcctcatagaac

SEQ ID NO: 470495 - DNA, 90 bp, Homo sapiens
cgctgggcgaccagagcagggtcgagatgtcctacatcccgggccagccggtcaccgccgtggtggtacatgtccagggccgccgggtcc

SEQ ID NO: 470496 - DNA, 116 bp, Homo sapiens
taaaaaacattggtgttgacaatccagcagctaaagttttagttgaaactaatctggattcactccctctggttgatacccactcaaaaaggacacttctgattaagacggttgaa

SEQ ID NO: 470497 - DNA, 98 bp, Homo sapiens
gcaaggctcttccctgaccattttctactgtccctgcgcgagaccaagatcactccatggatgaaatgacagctgtggtgaaaattgaaaaaggagtt

SEQ ID NO: 470498 - DNA, 100 bp, Homo sapiens
gcggcctctgccgccgagtatggtttccgcaaagagagggcggcgctggaacagttgcagggtcacagaaacatcggtcttgcgcttcagtcgtgggcga

SEQ ID NO: 470499 - DNA, 75 bp, Homo sapiens
ccaagcgcctctactacctctggatgtgctgaccggttccctgatgtgttacctgcttctgctactgatccaaac

SEQ ID NO: 470500 - DNA, 119 bp, Homo sapiens
ggctgctgtgcggctgcgacgacgccggcgactgcggcgctgcagcggagacggaaggctcgggaggcggcgccatcatcaagatggtgctcatgtggaccagtggtgacgccttcaag

SEQ ID NO: 470501 - DNA, 75 bp, Homo sapiens
aagggctgttgctaatgctaaaagcattggacaccttatttttgctatccagtcagttcgctgctattcccatgg

SEQ ID NO: 470502 - DNA, 96 bp, Homo sapiens
ctcttgcagcacctggggctcatgggcagtttgaagagaacacatgaagaagaggatgattttggaaccatgcaagtggcgactgcacagaatggc

SEQ ID NO: 470503 - DNA, 50 bp, Homo sapiens
cctggcctcactcaaacagtaaacgagaagtctcaggggatccagaactg

SEQ ID NO: 470504 - DNA, 121 bp, Homo sapiens
cctggacggcaacctcattatccgctatgatgtggaccgggccatctccgggggctccattcagggtttctacagccaggtagccaaacccctgctggtggatgtggatttgcagtacccc

SEQ ID NO: 470505 - DNA, 87 bp, Homo sapiens
tggtttcgggatctcggtgctgcagacggcgagacctcctgcacagccactgaggcggctcccagctgcgttggcgacatggccgac

SEQ ID NO: 470506 - DNA, 100 bp, Homo sapiens
gagggctgcgaaagaagttgtagatgcattatgttcaagataaattatttgtgggtctagaacatgctgtacccacttttaatgtcaaggagaaggtgga

SEQ ID NO: 470507 - DNA, 75 bp, Homo sapiens
cgagcgacggcggaacccgtgggcctgtggactgcagcctcggcggtcagcagtgatcctgccatgaagcagttt

SEQ ID NO: 470508 - DNA, 51 bp, Homo sapiens
ggaagacttgcccatccaatctgggataagagttggtgtccttgttctttt

SEQ ID NO: 470509 - DNA, 100 bp, Homo sapiens
aggacaccgtgacttcccggacgctgggaaatgaggttgacggatatattcagacgttacgacacggatcaggacggctggattcaggtgtcgtacgaac

SEQ ID NO: 470510 - DNA, 100 bp, Homo sapiens
cactttggcatcgtcggcctcaacatgaatggctactttcacggtgattctgggggtccacttgtctgtaatggtgtgcttcaaggtatcacatcatggg

SEQ ID NO: 470511 - DNA, 50 bp, Homo sapiens
cagatatgcaagtctgtgaattttccaaggtctcattctgacagtgaaag

SEQ ID NO: 470512 - DNA, 100 bp, Homo sapiens
agtttgctaaatttgaaaaggagaaaatgaatgccaaatgggacacggcatggagagtagaaaactgatttctgctacagacattcagtactctggcagt

SEQ ID NO: 470513 - DNA, 75 bp, Homo sapiens
gattccaagtaactcttatttggttcaaatggtgaaagacgatgacccctcctggaagcccacttttatcgtgaa

SEQ ID NO: 470514 - DNA, 90 bp, Homo sapiens
agggaagaagcctaaaggacagtcaaagaagcagcccagtggaaccacaaaaaggccaatttcagatgtcatctcaactcgaactccacc

SEQ ID NO: 470515 - DNA, 50 bp, Homo sapiens
gtcggaaccgacagcctcctccgagaaggtgtctccagaacgctatagct

SEQ ID NO: 470516 - DNA, 98 bp, Homo sapiens
gagtgaagcagcctattgcagaaatagctcttgaagtcctattggctggataattttgcaaaagattctgtaaaccctggagtcatggtgttgctggg

SEQ ID NO: 470517 - DNA, 100 bp, Homo sapiens
cagagttcaaggaggccttccagctgtttgaccgaacagattaagcctgatcaagatgacaacctcccaaaagcaccgagacttcgtggcagagcccatg

SEQ ID NO: 470518 - DNA, 100 bp, Homo sapiens
tatctctagtctttatgggaaacctcagcttgatgatgtatctcagggtaatactgaacaacctgtccaaactagcaagattggacttggaagaagagag

SEQ ID NO: 470519 - DNA, 83 bp, Homo sapiens
cgtgtctgctgcaaagcttaatttgcccattaatattatagttattgccttgtctgtcaagatccgcagttatgaagaacact

SEQ ID NO: 470520 - DNA, 100 bp, Homo sapiens
cgctgctgtgaatcacatatcccaactgtcagaggagcagctctattaccaggttttaaacttcgccatgatcgtgtcttctgcactcatgatatggaaa

SEQ ID NO: 470521 - DNA, 100 bp, Homo sapiens
ctcttccaaaagcgcagaccacagttacatgtatggagaatggctggtctcctactcccagatgcatccgtgtcacagaatggggaaatggagagagaac

SEQ ID NO: 470522 - DNA, 82 bp, Homo sapiens
tcgcgccggctatggccgtgccctggggctgagccctcagcaattctgtggtgttcttggtcacacatttatggagtttctg

SEQ ID NO: 470523 - DNA, 83 bp, Homo sapiens
cgccctggcggctctagggaccccccccgcgcctgcacttagccccgcgcccgaggagcatcagatccatgctgctgctgact

SEQ ID NO: 470524 - DNA, 82 bp, Homo sapiens
ttccagcttcggaacaagagaccctgatatggctcgtggacagcagaaaattcagtctcagcagaaaaatgccaaaaagcaa

SEQ ID NO: 470525 - DNA, 83 bp, Homo sapiens
gcccgatcccttacacaccttctccgagttcaagcaggcctatatcacctgtgtctttctcgagaagcaggtggaaacatgag

SEQ ID NO: 470526 - DNA, 75 bp, Homo sapiens
aacagaaacagaaacgattgtggaaacagggtggatccatgctgtgctcacttctcaggactgtatggcttttgg

SEQ ID NO: 470527 - DNA, 74 bp, Homo sapiens
agatcccaggcggtgacagagtggagccatggctagagatttttggaagtaccagcacagtgacgcttcctgaa

SEQ ID NO: 470528 - DNA, 75 bp, Homo sapiens
gctgatccccatgactgctctgcttatactggctggacaggggatggtttagacaacagtgtagcttcacctggt

SEQ ID NO: 470529 - DNA, 75 bp, Homo sapiens
ttgcatacaagaatgtgaaatttgttctcaagcacaattccagtgtctcgccccatcctcaccctcagggttccc

SEQ ID NO: 470530 - DNA, 74 bp, Homo sapiens
cgcaggctgcagagagatcgtctccctccaagtggcaccacttcacccctggatggcctggtgggaatccaaca

SEQ ID NO: 470531 - DNA, 100 bp, Homo sapiens
caactgctggtttgtggcagcctgctcgtcacttgcctcccgggagtcgctgtggcaaaaggaacttacaatgtctcagaaaaatggtgggaatgttctt

SEQ ID NO: 470532 - DNA, 98 bp, Homo sapiens
aacagataatcgtccacgtaatccaagagaggctaaaggaagaacaacagatggatcccttcagctattggatgaactcccaatgatatacagctgtt

SEQ ID NO: 470533 - DNA, 100 bp, Homo sapiens
cgatgaaaggaatgggtctgggaccttaacagggagccatggaatccagatcttacataagatggaagtctctcacactagatactgaacattaaataga

SEQ ID NO: 470534 - DNA, 83 bp, Homo sapiens
gccaagggaccaaggtggaaatcaaacagggctctgaactcctacttcgagcctccggtggaggagagcgccttggaacgccg

SEQ ID NO: 470535 - DNA, 88 bp, Homo sapiens
ggggacttgaaccagctgagcgctgccatcccggccacgcgggtggaggtgtccgtgtcctgcaggtacaccaggggttggaaaaacc

SEQ ID NO: 470536 - DNA, 78 bp, Homo sapiens
ttggattgtctgcttcaagccctggctcaaaatataactctcaggagccttctccgcagttggcttcctcggtagctt

SEQ ID NO: 470537 - DNA, 51 bp, Homo sapiens
tggatgggatcatttcggacttcgaaggcccagctgagagccagcctggag

SEQ ID NO: 470538 - DNA, 100 bp, Homo sapiens
ctggccgcggcccgcctcagcatctggtacagccgactgacatcattgcctcaagcgacattgaagagttcctcagggaagcagcttgcatgaaggagtt

SEQ ID NO: 470539 - DNA, 75 bp, Homo sapiens
tggacagtggagaaggcccagccaatgaagatgaagacataggaggtccaggggcaagttcatcctactctcgag

SEQ ID NO: 470540 - DNA, 83 bp, Homo sapiens
gcagccccgggcacggcggaggcagcggagccctgggccatcggtgcgcgcggagccatggttatcatgtcggagttcagcgc

SEQ ID NO: 470541 - DNA, 75 bp, Homo sapiens
gctgaggcggcgcggcagcggagggacggcagtctcgcgcgagtaattccctcctggtcccagacagtctaagag

SEQ ID NO: 470542 - DNA, 50 bp, Homo sapiens
agctgcggaacaggacgccctctgatttaacaagcacaagccctggctgg

SEQ ID NO: 470543 - DNA, 75 bp, Homo sapiens
gttcggccaagggaccaaggtggaaatcaaacgttttcctttggaatatggataaatacaccatgatacggaaac

SEQ ID NO: 470544 - DNA, 75 bp, Homo sapiens
gcgggccgacctgcccgcggctgacgggcatgtacaacgccaccacccggcaggtggaaacggagctcttcccct

SEQ ID NO: 470545 - DNA, 76 bp, Homo sapiens
agggaatccaatatttctgcctctgacataatttgggagaacctaactgtgtcatgagatgaacccggtacctcag

SEQ ID NO: 470546 - DNA, 90 bp, Homo sapiens
caggttcacgccaacagtacctcattgctctttggcgactcttattgatgactctgttagaccaaatatgactttaaaggccatgatcac

SEQ ID NO: 470547 - DNA, 82 bp, Homo sapiens
ccggcccggcggctgctgctgctgctgacgctgctgctgcccggcctcgggatctgactgcagccatgagcagcaatgagtg

SEQ ID NO: 470548 - DNA, 82 bp, Homo sapiens
gactggttgaccaactggtggaacccctgggaatggaagttggatacactttgtgacttgtacgagacactgaccattacac

SEQ ID NO: 470549 - DNA, 74 bp, Homo sapiens
gtgggattccagtaatgacaccgttcgtctgtagttactgtggaatcaataagccatggcatctaagaaatttg

SEQ ID NO: 470550 - DNA, 75 bp, Homo sapiens
tgataacgaagcagctattgtccaggactccatccccgtgtctacctccctccttggagacacttccgacacgac

SEQ ID NO: 470551 - DNA, 100 bp, Homo sapiens
ctggcttgacagggcggcgggagctgcgggagctgcggcagctgcggcctctggtactatactggcaattgctggagaagattttgcaattgttgcttct

SEQ ID NO: 470552 - DNA, 100 bp, Homo sapiens
ggaagatactgcagagatattctactccatctcattcattgtacagcagcccctgtcaaagggaacaggaagcagtccacggagggtgacgccctagacc

SEQ ID NO: 470553 - DNA, 48 bp, Homo sapiens
actctccgaagaggaattgacatagccattcaaactcctccccacgac

SEQ ID NO: 470554 - DNA, 83 bp, Homo sapiens
aaaatgacagccttcatttctctgaacatactgccttatgggacagatcaaattattaagtgactctccatcttgtagagaaa

SEQ ID NO: 470555 - DNA, 75 bp, Homo sapiens
accttgcgcttcttgcagtcggtcacttggtacatatgaccgtggtctccggcagcaacgtgactctgaacatct

SEQ ID NO: 470556 - DNA, 97 bp, Homo sapiens
gaggaggaggggctccggctggtctgtggtgagggtcgagccgtgctgcacgtggctctgcggaaccggtcaaacacacccatcctggtagacggca

SEQ ID NO: 470557 - DNA, 50 bp, Homo sapiens
cgcagacctgtcaccaggagacaagggaccatgggctgtggctgcagctc

SEQ ID NO: 470558 - DNA, 51 bp, Homo sapiens
gctgagccagcggagctgcttggtgtcgtgaaaactacccctaaaagccaa

SEQ ID NO: 470559 - DNA, 95 bp, Homo sapiens
aggcagagttcccgctctcttcacagacgcagtcttcagcaaggaagtgctgggaacgccctggagtgaacccaggaagatgcctgcagtgggtg

SEQ ID NO: 470560 - DNA, 82 bp, Homo sapiens
atcacttataaatggcgccgaagcaggacccgaagcctaaattccaggaggtaatctcaggggcgatataatcaatgaggtg

SEQ ID NO: 470561 - DNA, 74 bp, Homo sapiens
tgcctgcggcggagactgcatcaggctctcgggagtaccctgacttctaccggaagctctacggcctcttggac

SEQ ID NO: 470562 - DNA, 99 bp, Homo sapiens
attacatcaaagacacactgagatgaagactcttaagatgacagaaggtgatttttctggtgatcgaggacttccggggtaatgacagtgatgaaatgc

SEQ ID NO: 470563 - DNA, 90 bp, Homo sapiens
gaagtttgtcggcccttgccttggcagagctgaggtgctggagaatctggtaaaagcaccattgtgaagcagatgaggatcctgcatgtt

SEQ ID NO: 470564 - DNA, 100 bp, Homo sapiens
cttctcttcctcagggctcccgtgtctgctcgccctccgacgctgctcagttccctgtattgaacactgatatacaaggaatgaatagaagtcaagaaaa

SEQ ID NO: 470565 - DNA, 98 bp, Homo sapiens
gtccctcagcccttctgagctctgtgctgaacaaggagccaaccccctgcagaggaatgaaatgggacacacacccttggattatgcccgagaagggg

SEQ ID NO: 470566 - DNA, 100 bp, Homo sapiens
tgcagggctgttccgtggagaaggccaacaaccccggggtgcgagaggtggtgtgcatgacactcctggaaaacaggagccctctggcacaaatggaaga

SEQ ID NO: 470567 - DNA, 73 bp, Homo sapiens
taatgaactcagtgtcccccccgcaagcattgttgcaagaaacggggaagataaccgaagggtggtttgagaa

SEQ ID NO: 470568 - DNA, 76 bp, Homo sapiens
ctctcccgcgggcaccgaggactccgctcctgcccagaacattctagtatgccagtagaaaaaaatatcactttag

SEQ ID NO: 470569 - DNA, 115 bp, Homo sapiens
gaaaaaaccaacaccttcctgtgcagtcctgttggaatttgtattttgatcacaactatagcctccaagggagaattgcagaattggcctgacctcttaccaaaactctgtagcc

SEQ ID NO: 470570 - DNA, 88 bp, Homo sapiens
tgtccacgtcgggtcagatccgacagaagattgatatcagtaaatgccattatttagtggatttggacaccatgagagaaacaccccg

SEQ ID NO: 470571 - DNA, 99 bp, Homo sapiens
gtggtgttagcacctcagcccatcccaggccatggtaggggaggagtgtgtaggtgccatcgtttgcaagttggatatgcacaaaaagatgttccgcag

SEQ ID NO: 470572 - DNA, 49 bp, Homo sapiens
ccgggctggagcctctggaagaagagcatgaataatctttcatttagtg

SEQ ID NO: 470573 - DNA, 96 bp, Homo sapiens
caactgctgctgccgttgttgtttctgctgtagaagaaaaagagcgacaaggtgctggggcaaccaatggaaaagacaagacatctggtgaaaatg

SEQ ID NO: 470574 - DNA, 98 bp, Homo sapiens
ggcccacaaccaagccatggtgcactggtcgggacacaacagcagcgcctatatgaacccaatagcaatggcgagatcaaggggtccaatccagtctt

SEQ ID NO: 470575 - DNA, 75 bp, Homo sapiens
ctcccaaagtgctgggattgcaggcgtgaaccaccgcacctggccctggtagtgatatttaatccaatccaacaa

SEQ ID NO: 470576 - DNA, 100 bp, Homo sapiens
ctgtgtgtttgttcatcagactcttcaccagaactaaggagacactagccacaggccatttcatgagcgtcatcaacattttgatgcagctgagaaaagt

SEQ ID NO: 470577 - DNA, 100 bp, Homo sapiens
cgccgcgcagctacctcatgactattgcaccacgcccggggggacgctcttctccaccacaccgggagtaatctcaggggcgatataatcaatgaggtgg

SEQ ID NO: 470578 - DNA, 82 bp, Homo sapiens
gagacttttctcagatgttggatatttgcttggaaaaacgtgtgggtacgaccttgctgctagcagaagaaagtcttcccac

SEQ ID NO: 470579 - DNA, 74 bp, Homo sapiens
atttattccacctaaggaaaaaccaattgtgaaacctaaggaagaaatattatggctcttcgaaatcatttagt

SEQ ID NO: 470580 - DNA, 101 bp, Homo sapiens
tttcaacagaagagtgagagatggaacccgaagaagaaaggattcgttacagccagagattgtatggtttgaagtggtgaacatggatttttctcggcttc

SEQ ID NO: 470581 - DNA, 82 bp, Homo sapiens
agagcgcagcgccgagcgcggcccgggcgccatcgagccttggcggcggacgtgcaggtgcagctgaacctggtgttttaga

SEQ ID NO: 470582 - DNA, 82 bp, Homo sapiens
gaaatgtcatcagcttctgaggaatctgtgctttctgtcccagaactccagtgccgccaagccagacgaactaggtctgagg

SEQ ID NO: 470583 - DNA, 98 bp, Homo sapiens
gttggcaaaccagatatatgacttggcagaaggagaagacagcctgaagaagatgcagctgatggagcttgcgattctgaatggcacctacagagatg

SEQ ID NO: 470584 - DNA, 75 bp, Homo sapiens
gcggtcgaagaaggggacgccgacaaggttgcagaagttttacaagtacctccaatgagagtatatgaagtagca

SEQ ID NO: 470585 - DNA, 49 bp, Homo sapiens
agcttctgcagtgcattgttgatgaggggtgagcccctccagactccga

SEQ ID NO: 470586 - DNA, 75 bp, Homo sapiens
ctggaatcattgaaggcgcagcccaagcgctggtcagactacgtggagcgatacatgaattcagatactacctcg

SEQ ID NO: 470587 - DNA, 80 bp, Homo sapiens
gaacctcacctttccagggcgcaaggtgtggaaccactttgacagcggttcgtgcccaggccaggccatcggtgtcaaaa

SEQ ID NO: 470588 - DNA, 75 bp, Homo sapiens
ttttatacttgcttttgcttcagcgttctgtggttgtcaacaggtcaatgtgacggtggactacattagaccagc

SEQ ID NO: 470589 - DNA, 150 bp, Homo sapiens
ctcgcccgcctcgtctcccacgaccgcgtgggccgcctcagcccctgtgtgcctgcgaagccacctctcgcagtactccacttccggactcctggactgcattaggaagacctctttccctgtcccaatccccaggtgcgcacgctcctg

SEQ ID NO: 470590 - DNA, 75 bp, Homo sapiens
aattcaacatgtctgtctgtatgaaattgctctttcaccatgcctggatcacttcctttgaatgcagaagcttgc

SEQ ID NO: 470591 - DNA, 100 bp, Homo sapiens
aaggccttgaccagtgagattgcactgctgcagtccaggctgaagacagagggctctgatctgtgcgacagaaacccagtgacttgattgtaaaaattta

SEQ ID NO: 470592 - DNA, 100 bp, Homo sapiens
gccgcgtgtggaggaggctgaagtctcacatcagaggtgtcaaggtgccattgagaaacagaaattggtgtatattttgaacagagatgctgcagcccga

SEQ ID NO: 470593 - DNA, 100 bp, Homo sapiens
tcctgctgcctccccggagctcccgggccagtagacaatgcagatcttcgtgaagactctgactggtaagaccatcaccctcgaggttgagcccagtgac

SEQ ID NO: 470594 - DNA, 98 bp, Homo sapiens
cagaagtccagagctgaggactgcctgtttgcagatacactgcctctaggactgggacagatagccactgagtacctgcttcaaatcaccctgcacgt

SEQ ID NO: 470595 - DNA, 74 bp, Homo sapiens
accttttagccgatgctgtggccgttacaatggggccaaaggaaaaattgatgggacacttgggtgttgtattg

SEQ ID NO: 470596 - DNA, 98 bp, Homo sapiens
cagatcctggaggatgtgcggggtgcgccggcagaggatccagtgttcaccatcctggccccggaagggtcctggcggcagagaccacgtcccagcag

SEQ ID NO: 470597 - DNA, 101 bp, Homo sapiens
gctgcgccgggccccgggccccgatggccccgaccgcgtgctggagctcttcgacccacccaagaatgagagaagacagtgctagagtctatgaaaacgtg

SEQ ID NO: 470598 - DNA, 82 bp, Homo sapiens
agtccgcgggaagatggcggcgccgctcatccccctctcccagcaggacacaatgtttgcacgaggactgaagaggaaatgt

SEQ ID NO: 470599 - DNA, 83 bp, Homo sapiens
tacagacctaccggtctgtcagtgagatggcttctaacaagaattaaacaaccaccatgtcgagcaaaaaggcaaagaccaag

SEQ ID NO: 470600 - DNA, 75 bp, Homo sapiens
gatgctggagaattataggaacctggtctccctggaccggaaaggagaaacagtctaaactgcatgaaagtcctg

SEQ ID NO: 470601 - DNA, 74 bp, Homo sapiens
cgccaagggggtgcagtacaacagttaatttggagtggcccctggagtcagtttcctacaccatccgaggcccc

SEQ ID NO: 470602 - DNA, 101 bp, Homo sapiens
cgcggaggaggctttggggaccgggaccgggatcgtgaccgtggagggcaaatcctgatcctaactgttgtcttggagtatttgggctgagcttgtacacc

SEQ ID NO: 470603 - DNA, 100 bp, Homo sapiens
ttactcagctgagtgtgccacacaggtagccctggacggcattcagtgttttgcccaagaagatgaaaggattgttcttgttgacaacaaatgtaagtgt

SEQ ID NO: 470604 - DNA, 85 bp, Homo sapiens
cgcgcgcagggcctgcagcgggagctggacggcgagcgcgagcggcgcgagaaagtgaccaggcattgatgcacccccaggaagg

SEQ ID NO: 470605 - DNA, 100 bp, Homo sapiens
gcagagccctgcgatactattatgacaagagtacccaaaggcaagtggaacagctctaatggggttgaagaaaaggagacttgggtggaagaggatgaac

SEQ ID NO: 470606 - DNA, 100 bp, Homo sapiens
tgggaaacccatactctcaacaactcagaatgataatgggtattatccaacaaaagaggccatattcaatgaaggttcacaggtggctgttggtctttag

SEQ ID NO: 470607 - DNA, 99 bp, Homo sapiens
cgcgagtgggagcaccaggatctcgggctcggaacgagactgcacggtatcatgatattagctggtttgacatcaagtcatttgtgagtcatcagatct

SEQ ID NO: 470608 - DNA, 100 bp, Homo sapiens
caggcgcctcctgccaggtctgctcctcggtcgcccacccgcctgcccgccatgtggggtgcagatgatgcctgggcagatgtggaggacgtcacggagg

SEQ ID NO: 470609 - DNA, 104 bp, Homo sapiens
agtttcacttcatcccttttcattttgaagatattgcggtggtggagatgagcgatgccttccggcagccgtccttgttttaccaccttggggtgagagaaagt

SEQ ID NO: 470610 - DNA, 83 bp, Homo sapiens
tgtttctctccctctgcccccccttccccacgcaaccccagatccatttacactttacaatcagttggccttatttcctcagt

SEQ ID NO: 470611 - DNA, 98 bp, Homo sapiens
actcagcctgatgtcatttaccaaatccataagggcatccgcttcgatcctgaaattccgcaaacactacgactagagtttgctaaggcaaacacgaa

SEQ ID NO: 470612 - DNA, 50 bp, Homo sapiens
ttttaaagagcagactagacttctcaaggaccgcctgtatttcgtgatgg

SEQ ID NO: 470613 - DNA, 98 bp, Homo sapiens
cggcctcaccatacaggaacagggcagacgttagcgtgagtgatcactctcaatcccggatgcctgaggaagtgcaccatggagaggaggaggtggag

SEQ ID NO: 470614 - DNA, 104 bp, Homo sapiens
gcaagaccagcctgatggagcgcttcaccgacgacaccttctgcgaggcctgcaagtccaccgtggatgatgaggagtctgatgaggaagctgtgaagaaaacc

SEQ ID NO: 470615 - DNA, 100 bp, Homo sapiens
gtttaagcagctcgggcagctcggtggggtcaaacgtctccattgagcgcggaactcgccacgttaaacgagaagattcatcaccgctttgatggctgcc

SEQ ID NO: 470616 - DNA, 90 bp, Homo sapiens
tcccgtctcacaggggataagaagtttcaggccacctcagggggggactgccccccacctccctcctgtctctgcagggagcctgcccgc

SEQ ID NO: 470617 - DNA, 75 bp, Homo sapiens
ctactactggttccatcgtatggctcatgcaacgaaggttttgggaacagtaaaatggttcaatgtaaggaacgg

SEQ ID NO: 470618 - DNA, 98 bp, Homo sapiens
accgctctcgcttcgtcctacacttgcgcaaatgtctccggaaagatgaatgggagggctgattttcgagagccgaatgcagaggttccaagaccaat

SEQ ID NO: 470619 - DNA, 98 bp, Homo sapiens
aagaaggggttcctggtcatacaccagtactaccaaggacagcttttttcctgcaagtattaattttaaagacccacagtttgctgaagattacattt

SEQ ID NO: 470620 - DNA, 100 bp, Homo sapiens
agcacgtaccagaggtggaagtccaagtcaaacgcagaaggactgcctcactgagcaaccaagaatatggaatatatgaacgctgtcgagaattggtgga

SEQ ID NO: 470621 - DNA, 112 bp, Homo sapiens
attcagaaggaacttgcagaaatcacattggaccctcctcccaactgtaggatcacctgctgttaccagctaccacccataacaagaccacaagaccaaaaatgtcaattgt

SEQ ID NO: 470622 - DNA, 100 bp, Homo sapiens
aacaacagcttgtaaaggcctggggatcttctcatccacgggagttttctaaggatgcaggcgaaagagaacgctgcgatgactggggactagacaccat

SEQ ID NO: 470623 - DNA, 100 bp, Homo sapiens
cacctcatctttgacatggacggacttcttctggcgaccgtggcagccatgtattacagctactacatgctaccggacggcacttactgcctggcgccgc

SEQ ID NO: 470624 - DNA, 100 bp, Homo sapiens
tttccacaatggaaccaattgttttacagtctgttccgcatgatcgttataataagatagacgatcagctgaacactctcttgaaggagttccagctaac

SEQ ID NO: 470625 - DNA, 98 bp, Homo sapiens
ctgagagctgggaagaggcggcagacagcggggtggcgcccctcccaatgtggatcctgaggcctactcctggttccagtcggtggactcagatcaca

SEQ ID NO: 470626 - DNA, 100 bp, Homo sapiens
acatggcaacaggaaagtctaagggatatggctttgtctcctttttcaacaaatggtctctgctggatgaaccgaatcctaacagtccagccaatagcca

SEQ ID NO: 470627 - DNA, 101 bp, Homo sapiens
atttatttctttggagacaaaactatgccatgattcgcctttgccagtctcatctcgtgtctgctttgttaagttccatgatccagactcagcagttgtgg

SEQ ID NO: 470628 - DNA, 100 bp, Homo sapiens
aaaggatgaagaggacgaggtcattgacgaggtggagaccattggcgatgcctattgtgtagctgggggattacacaaagagagtgatactcatgctgtt

SEQ ID NO: 470629 - DNA, 76 bp, Homo sapiens
tgaagatgtccttaccagctttgacaatacaggaaatgtttttgttgacctcctgtactggagagacattaagaag

SEQ ID NO: 470630 - DNA, 75 bp, Homo sapiens
ctcagcggctcccaggtgcgggagagagatgaaggatttgggggcagagcacttggcaggtcatgaaggggtcca

SEQ ID NO: 470631 - DNA, 75 bp, Homo sapiens
caagagtcatggaaaaaaccaagtggctggatatcaaaggaaatcatgaattgctggaatccacaaataccaaac

SEQ ID NO: 470632 - DNA, 98 bp, Homo sapiens
gatgccaccacctcatccaccccagccaggtacctgcacatgttgttctttgtcagtgctgtcaagtgtgtgccagggtgatccatggtcactttccg

SEQ ID NO: 470633 - DNA, 75 bp, Homo sapiens
ccgctggtgatctccggtagcactcgggccggcggacagtgagggcgcggctattcaggcagctatcagccaggc

SEQ ID NO: 470634 - DNA, 83 bp, Homo sapiens
caaaacaaactgaaaacgcaagccaggctaaacagttggcagcacttattttagaggagattgcaattgattgtcataataag

SEQ ID NO: 470635 - DNA, 83 bp, Homo sapiens
ctggaaaggaattgttttggcctaggatcatccaggattttttatcaagcagaaatgcatcgaacaacgagaatcaagatcac

SEQ ID NO: 470636 - DNA, 80 bp, Homo sapiens
gcccggagttccgctcctgcgggcttagcaggaaagggtgcctaagcaattctgtggtgttcttggtcacacatttatgg

SEQ ID NO: 470637 - DNA, 82 bp, Homo sapiens
agctcaagaagatcatcaagcgcaagcacaccctaccgaattacaagatcaggctaaactgtgaaaatgcagtcctcaaaga

SEQ ID NO: 470638 - DNA, 100 bp, Homo sapiens
cgcgtgagacagatcaagatcaagaccggcgtggtgaagcggggaagatggtgaaaggaatgggaggtgctatggatttagtgtccagtgcgaaaaccaa

SEQ ID NO: 470639 - DNA, 89 bp, Homo sapiens
gaacttctgcccagctctccttgataatctcagtgataccttgaagaagctgaagataacagctgttgacaagactgaggatagtttag

SEQ ID NO: 470640 - DNA, 51 bp, Homo sapiens
aggacgacatgttgcttttcgtggagaaatgcactcggtgatggaaagaga

SEQ ID NO: 470641 - DNA, 82 bp, Homo sapiens
tgctcctcgctgtggctttggtccctgaagaggaaggagaaggaatatgagcatgaaatggagcggctggcacgtgagaaga

SEQ ID NO: 470642 - DNA, 100 bp, Homo sapiens
tgagaacaagacggtggtcgcccccatgctggattcccgggctgcgtactccaacttctggtgtggaatgacttcccagattcatttggattcaaggttg

SEQ ID NO: 470643 - DNA, 98 bp, Homo sapiens
tcggggtgagcggccagctcatcgactccatggccaactccttcgtgggcacgcgctcctacatggctaaaggtggtggcgccctcctgcactcagtc

SEQ ID NO: 470644 - DNA, 100 bp, Homo sapiens
ctcaggaccatgatggctcagtttcccacagctatgaatgattgcctgcttcctttccatcttcttcctaagtatctgtgtttattctactgtgttcagg

SEQ ID NO: 470645 - DNA, 90 bp, Homo sapiens
ccccatcaccggcacacattgtcgtcttgagagctgatgacaataacatgggcaatggctgctctcagaagctggcgactgctaacctcc

SEQ ID NO: 470646 - DNA, 100 bp, Homo sapiens
cgcccaccggtttttctgccacttttgcaagggcgaggtcagccccaaactaccggtaagaatgattgatgttggctgatattggagtgctcattcacat

SEQ ID NO: 470647 - DNA, 100 bp, Homo sapiens
ggctcggtgccttacaatgaatttggggaaagagttgtcaaacgaaacccatgtttctaatgaccagcaggaaatttggtgagcggcctccacctaaacg

SEQ ID NO: 470648 - DNA, 100 bp, Homo sapiens
tgccttattttttctcatggatgttcttcttcgagtatttgtagaagggaccctgatgctcccataagacagaaaatgccccttgatgatctggatagag

SEQ ID NO: 470649 - DNA, 100 bp, Homo sapiens
caagaggatcattcagagccgagagagggaaatgaaagacttgaaggagaagatgaaccaggtgatctgtgaaaatggttcgctattcacttgacccgga

SEQ ID NO: 470650 - DNA, 88 bp, Homo sapiens
aaatcttctccctggacctcgtgcatacgaaagttcaggagccctggaaaggagaaggaataagacggcaggaggaagagagagagag

SEQ ID NO: 470651 - DNA, 90 bp, Homo sapiens
ctgtggattgcaaccttgaatgagaaagaccatttatctgcgaattatgtggaaattcttacacagatattaaaaatttaaagaagcaca

SEQ ID NO: 470652 - DNA, 83 bp, Homo sapiens
attactcatcatgatctcttcacccgcaccatgatcgttatgaatgatcaggaaaattgcctaagaattatgacccaaaagtt

SEQ ID NO: 470653 - DNA, 98 bp, Homo sapiens
tgtatggaaactcatcaggacggaagcacaggggccactcagagtcgcccgagaagagccggcatcatggattccttcaaagtagtgctggaggggcc

SEQ ID NO: 470654 - DNA, 49 bp, Homo sapiens
aacttctgctacagacgactcaagtgcctggaagagctgggatgtctgg

SEQ ID NO: 470655 - DNA, 100 bp, Homo sapiens
ccatcctgggcaaacctgcggacagcccccctccatgcgcctgaaggcccgacccagcagccctggcttttccgtgcttacctgcagcgccttctccttc

SEQ ID NO: 470656 - DNA, 100 bp, Homo sapiens
tacctcccctgttataacacctgaccgccacctaactgcccctgcagaaggagcaatggccttggctcctgagagctctgtgggcaccttcgcacgggcc

SEQ ID NO: 470657 - DNA, 110 bp, Homo sapiens
ccaaagctgtgatgaatggcttggcacctggcagcaatgggcaagacaaagactggggcagcacctactccgtgtcagtggtggagaccgactacgaccagtacgcgctg

SEQ ID NO: 470658 - DNA, 90 bp, Homo sapiens
gccgccactgcccgtacctggacaccattaacaggcttgcttccggcgtcatggctcaaagggccttcccgaatccttatgctgattata

SEQ ID NO: 470659 - DNA, 135 bp, Homo sapiens
gcgggcggcagcatgtcggtggcggggctgaagaagcagttctacaaggcgagccaggttggtgttcgaggaagagacattgttgttcttggtgtggagaagaagtcagtggccaaactgcaggatgaaagaaca

SEQ ID NO: 470660 - DNA, 75 bp, Homo sapiens
cagacaacaatagtaatacactcttacccttacaggaactgtggctgcaccatctgtcttcatcttcccgccatc

SEQ ID NO: 470661 - DNA, 99 bp, Homo sapiens
cagccggccaaccgcagccaggagaaggagttcgtgcaggcgtacgaggatgtgctggagcggtacaaaggtctgccaagccagaagcccaaggagcag

SEQ ID NO: 470662 - DNA, 83 bp, Homo sapiens
ctccgggatgatcgataagaacgagctgaagcaggccctctcaggtttcgtgtggacgaatgtggaacctcgctctgtggctg

SEQ ID NO: 470663 - DNA, 141 bp, Homo sapiens
cctcggccaagaagataatcgtcaagcacgtgacggtcatcggcggcgggctgatgggcgccggcattgcccagggaatgcagagagcaaccaatgtcacctaccaagcccatcatgtcagcaggaacaagagaggtcagg

SEQ ID NO: 470664 - DNA, 100 bp, Homo sapiens
cgcagctcagcgcagcgctgcggcctttcggcagccgaacggccgcggcaggaagaaaacaggcagattttggcgcggcaaaagtcaaactcacagtcgg

SEQ ID NO: 470665 - DNA, 100 bp, Homo sapiens
atactctcgctcacgcagcaggagcaggggacgaaggttacaagccctgtgacccccaggtgatccgagaccgcgtggcccacatggagttctgttatca

SEQ ID NO: 470666 - DNA, 100 bp, Homo sapiens
ccaacatcctgaccaagcccgatccaagaaccttctggactaatgatgatccagatggttggtaaaggctttttcctagttcagacaaaggaagtgtcca

SEQ ID NO: 470667 - DNA, 100 bp, Homo sapiens
gaaggcttttgatccttttgagaaataaagatctgaaagaaatggcataatcttaaaacttgacatatgtagagtgtgtcggtcagaaggaacacctgag

SEQ ID NO: 470668 - DNA, 75 bp, Homo sapiens
gcggagggaccaaggtggagatcaaacgttcaatgaaagatcacccacagcagcagccaggcatgttgtcccgtg

SEQ ID NO: 470669 - DNA, 50 bp, Homo sapiens
ggctagtccgacgaagagtggcaatggctgccatccggaagaaactggtg

SEQ ID NO: 470670 - DNA, 103 bp, Homo sapiens
tcccgggagatcccaggcggtgacagagtggagccatggctagagggactggtgattgcagctggaagtgcccatgaccgagctggcgtcctccgggggcggg

SEQ ID NO: 470671 - DNA, 100 bp, Homo sapiens
gtggtcctacctggggatattatcaaatctactactgttcatggcagcttttaatctagacaacgagcaaccagattatgatatggattcagaagatgag

SEQ ID NO: 470672 - DNA, 101 bp, Homo sapiens
agttcgaccagaaggcgctgctggagttccgcgacaccatcttcgacaacatcctcaagggcagcacgctgaggaaacgcaagatgtacgaggagttcctc

SEQ ID NO: 470673 - DNA, 75 bp, Homo sapiens
caagacagagcgctactcctggcagtgcgtcaatcagagcgtcctgtgcgcactctcgagtggaccctgaggagc

SEQ ID NO: 470674 - DNA, 75 bp, Homo sapiens
gaggtcagggtacagcgccaagtacacgttccagaatgaagctgataggaccttgatatatataactctctacat

SEQ ID NO: 470675 - DNA, 75 bp, Homo sapiens
atcaccacttgaagaagagccacttgctcctcaggaaccctattttggactgacagcattggggagtcagcaatg

SEQ ID NO: 470676 - DNA, 75 bp, Homo sapiens
cagcagatcaaaggataaacttgaccaggtttccagtgaaataaatttggactgagcaacaaatttgaatctgaa

SEQ ID NO: 470677 - DNA, 82 bp, Homo sapiens
caacctgaggctgccccggccgcctgcgcacccggcagcaccatgacagaataccctctaccatctgctttggtcagggtgc

SEQ ID NO: 470678 - DNA, 102 bp, Homo sapiens
gcaagaaaaaccgacgaatctttacctacactgactctgatagatacaccaatttggaggaggtgacttcatggtcatgacgattttcttcaatgtgagcag

SEQ ID NO: 470679 - DNA, 85 bp, Homo sapiens
ccctggtcttgctcggccgatgaagtgcagaggtttttttctgctcatctttgggtgaaaaattgtcgggatcttctgcagtcca

SEQ ID NO: 470680 - DNA, 74 bp, Homo sapiens
tgacatttaattttagggtcctttatatagaagggagagtaggtggtcctggctctgccatatgacacccccgt

SEQ ID NO: 470681 - DNA, 51 bp, Homo sapiens
ctcttctcaaagaggaccctgcttactggacctggctcgttggaagagtcg

SEQ ID NO: 470682 - DNA, 100 bp, Homo sapiens
cacccgggaggccaagctgatcctggcgctccaggatgaggtgtccgccatggctgatggcctgccttgctctgccaggaaccatgagtgaggcccgcag

SEQ ID NO: 470683 - DNA, 90 bp, Homo sapiens
gcgctggggattcttcccgaacaggcgcttgccctctcttttatgatgtggtggtacagtgggagctattctgacatgtccactggaagt

SEQ ID NO: 470684 - DNA, 101 bp, Homo sapiens
ggaagaagatggcgctcaccagatcttatgccttcattcatccggcatggtccaacaattccaagacgaactgatatctgtcttccagattcaagccctaa

SEQ ID NO: 470685 - DNA, 98 bp, Homo sapiens
agatctgggccgcttgcctcctgctcctcctcctcctcgccagcctgaccagtggctctgttttcccacaacagggtggattacggaacaacaacgag

SEQ ID NO: 470686 - DNA, 50 bp, Homo sapiens
ccaggggctctgggagtggctgccagagtttcactcttgtggcccaggct

SEQ ID NO: 470687 - DNA, 100 bp, Homo sapiens
gcccgggccgcgaggacgaggcggcgccgccgggctgtggagggccatgaagcccccaggaggagaatcgagcaatctttttggaagtccagaagaagct

SEQ ID NO: 470688 - DNA, 98 bp, Homo sapiens
cgagaccgtgaccgagagcgtgaccgagagcgcgaatatcgtcatcgttagaagatcgcaccccctccctccctggcggagcccctgaaggagctgtt

SEQ ID NO: 470689 - DNA, 100 bp, Homo sapiens
tgttctctgtgttctcagaagacgttctgtatttcagcttcctgctatgtgccctctttgttcctaaagggtcaaagaattgactgtagatccaactgct

SEQ ID NO: 470690 - DNA, 101 bp, Homo sapiens
gtgcgcagcagaaagcatttaaccagcatggctacttcatattttggaaagcagtttttaagacaagttgttcatcgagacctgaagccgagtaacatcct

SEQ ID NO: 470691 - DNA, 75 bp, Homo sapiens
acggtggtgctcctaagggaccacaaatacgtgatttggagagaggtgagatcggactggaactgttcggctgcg

SEQ ID NO: 470692 - DNA, 100 bp, Homo sapiens
acctgtggaaaaatcaccgcccatggccagcccttggaagaggctacaacacaggttttctaaatagctttgaggagttacaggctgaggaatgcggcat

SEQ ID NO: 470693 - DNA, 50 bp, Homo sapiens
aagaactcttgaagaccaggaataacacatctgtggaaccctccattctg

SEQ ID NO: 470694 - DNA, 100 bp, Homo sapiens
gcagctggagctgagcaaagtgcgtgaggagtttaaggagctgaaagcgcgtgtggaaattggtgaaagtgtacgtggagaggatgtctacattgttcag

SEQ ID NO: 470695 - DNA, 75 bp, Homo sapiens
ttcttgcaacaggttaacgtgtatggcgtgtgcgtgccaggccttatgacctatagaagccaggcggtgcaggaa

SEQ ID NO: 470696 - DNA, 76 bp, Homo sapiens
tggcgtggacccaggctctgaagcagaaggcagcgggctcaagagctccacgcaggagatcggtgaggagctgatc

SEQ ID NO: 470697 - DNA, 97 bp, Homo sapiens
cttccgacagttgtgttgtgccaatggtggagaagaaaacttcgggcaaaaagccctcccacgtttgaggggagtcatgagccgtttcctgaatgtg

SEQ ID NO: 470698 - DNA, 100 bp, Homo sapiens
attatgaatttaacagtaatgctgccgccaccggcaactaacctatgaccttctgacctctgaactcttcacccaatgatgacctgaccatgcctgcctg

SEQ ID NO: 470699 - DNA, 100 bp, Homo sapiens
gtttccagtgagctccagcttgctccatccatgaccacagtggaccagctcgagtctcaagtggacaatgggagaagatagcattcttcacaaggccaag

SEQ ID NO: 470700 - DNA, 87 bp, Homo sapiens
tgctgaggatcgaggaacgttgtctgctgcggttggatttctcacgatgtccagtgttatctccatgtctgcccctttcttcctggg

SEQ ID NO: 470701 - DNA, 98 bp, Homo sapiens
aaagtagagctagtcgtggctggaacagagagaaattcagatgcttgggatttgctttacattctaagtggatttggagaagagacaataaagaataa

SEQ ID NO: 470702 - DNA, 82 bp, Homo sapiens
ccgctttgccaagaagatggacaagatggtgcagaagaagaacgcgactatatttcagcggtatgaaatacaagagaataat

SEQ ID NO: 470703 - DNA, 74 bp, Homo sapiens
tggcctcatctgttccagggaggtgggattgacgcttccagagccagaactgagcccagtgagagcgcaccctg

SEQ ID NO: 470704 - DNA, 73 bp, Homo sapiens
tttgctgcatctaccttccctactatactggcaattgctggagaagattttgcaattgttgcttctgatactc

SEQ ID NO: 470705 - DNA, 51 bp, Homo sapiens
cacggccaacgccttggcactagggctggtgagattggagagatgaaggat

SEQ ID NO: 470706 - DNA, 75 bp, Homo sapiens
caacagtgtatgctcgaaatcctggatactgcagggacaacgccacaggtcatcatctggatcatcccattctgg

SEQ ID NO: 470707 - DNA, 82 bp, Homo sapiens
gctgaaggaagctgccttgtacccacatctcccgccaggtagtgggcagcagtcagtgacaggtgtaacctctgtggatgac

SEQ ID NO: 470708 - DNA, 100 bp, Homo sapiens
caatctcctatgcagttgataacggcagcgacaataccttgctcctgactgattataacggaggaacatcagaagcaccgagagatggctgttgactgcc

SEQ ID NO: 470709 - DNA, 50 bp, Homo sapiens
ccattttctactgtccctgcgcgagatgggcgagctttggttcatagcat

SEQ ID NO: 470710 - DNA, 90 bp, Homo sapiens
gcgtgatgaaacagttcctggaaactgccattaacctccagctttttaagcagataactgttcccaggaaaaaaaggaggaaatcctgga

SEQ ID NO: 470711 - DNA, 50 bp, Homo sapiens
cttgactccgctgctcgccatggttgcaaaggagtttggcttccaaaata

SEQ ID NO: 470712 - DNA, 100 bp, Homo sapiens
cggagacgcagatgtggacttgaaagaagctgcagcggaggaaggcgagtcagaaacagggtttctaacctacctggatgtgtcagtggggaagattgtg

SEQ ID NO: 470713 - DNA, 100 bp, Homo sapiens
gtaacccccctgggcgcccttggagtaccgttcggggaacccgagcgtcatgttagggtgaagcagaggacctcagtgctgaacatgctaaggaggttgg

SEQ ID NO: 470714 - DNA, 100 bp, Homo sapiens
gccgcacggagagcccagccaccgccgcagctgcgttcctttgcctgcaacaggggtcaagatgagttttgcctgacttctttgatgtcctgaactttcc

SEQ ID NO: 470715 - DNA, 75 bp, Homo sapiens
gcttttgtaacttttgatgatcatgatacagttgataaaattgttggctttcatgagaaggacaagaagccatat

SEQ ID NO: 470716 - DNA, 51 bp, Homo sapiens
cgctggcaggaatcgtcatgaccaaaggttcgatacaagaggctgttttcc

SEQ ID NO: 470717 - DNA, 100 bp, Homo sapiens
ggcaccaccaagcgctttcccgagaccgtcctggcgcgatgcgtcaagtacactgaaattcatcctgagatgagaattcagtttgcctgttctgtatgca

SEQ ID NO: 470718 - DNA, 98 bp, Homo sapiens
cttaaataaggttcagactgcaaatgaagttaagaatgaggagcccgtgttttctagagacggcagcaaattctttatgacagtgcctgttaagcaag

SEQ ID NO: 470719 - DNA, 101 bp, Homo sapiens
gtgaccaacatgctgtgatgtgtgccgagggaggaattgtgctaggaaaagaatgtcagtgattgttcgcactccatctggaaagttacgactctactgca

SEQ ID NO: 470720 - DNA, 75 bp, Homo sapiens
agcagtaagggactgagctgctgtgtggcgtgtggaaagaagaggaaccagaaaagaatgtttgtgaagttctgg

SEQ ID NO: 470721 - DNA, 75 bp, Homo sapiens
cgcagtggtcgcttcttctccttgcactgtaatggcgttgactggcgtcagaagctggactctcagcgaggggct

SEQ ID NO: 470722 - DNA, 97 bp, Homo sapiens
atccagaaaccagcacagactgtgacggtgcactacatcctccaggaggtggtgatgggtgggatggtgttggaaacaaacatgaatgaaatcgtgg

SEQ ID NO: 470723 - DNA, 80 bp, Homo sapiens
acttgcagtcatcatccattaccacaaaattagaggggcacagccgaacccttcccgaggctccacaacttgtacagcac

SEQ ID NO: 470724 - DNA, 75 bp, Homo sapiens
gccgcaagtacccgtccatcatagtcaactgcgtggaagagaaggtttgaaagagaagatagtgaggagctttga

SEQ ID NO: 470725 - DNA, 75 bp, Homo sapiens
gttggaaatggcacctatggacaagtctataagcagcagccgctcttctaaaacattcaaaccaaagaagaatat

SEQ ID NO: 470726 - DNA, 80 bp, Homo sapiens
ctcatcatgatattgtacgatttctggtacagttagatgactacagaaaaggcgacggcggattgacagaagtatgattg

SEQ ID NO: 470727 - DNA, 83 bp, Homo sapiens
tcgctggcaccccgaacgggttgcttcccccgctgcgaggttttaaaatcaaagatgggaaaatcggagaaaattgcccttcc

SEQ ID NO: 470728 - DNA, 75 bp, Homo sapiens
acgaatttactaaaagtgaaattagcagttggaattcctggaaatgacaataaaatgtctactgttgtggagctg

SEQ ID NO: 470729 - DNA, 100 bp, Homo sapiens
tccctctggcccggcctgacccggtctggcttgttcgggctcagcggccgcgaggccgcagctcccggatcagtgaggaggaggacctgcacctggggac

SEQ ID NO: 470730 - DNA, 74 bp, Homo sapiens
taacaacctgcttggcaagtttgaactcacaggccactgcagaacaaattagacttgcacagatgatttcggac

SEQ ID NO: 470731 - DNA, 74 bp, Homo sapiens
gtaaagatggaaaaccagttattgaatatcaagaggaggagttgttgagcatgcttgagaagggaggataaaaa

SEQ ID NO: 470732 - DNA, 74 bp, Homo sapiens
agaggcgctcatccacagagccacatctgttaggcatcctctggtatcacgattccaaaacccccaaagccacc

SEQ ID NO: 470733 - DNA, 100 bp, Homo sapiens
cggtgctgcaagagaaggcactcaagtttatgctggcaaaaactcaggggaatgtgtttgccactgatgccatcctggccacgctgatgagctgtacccg

SEQ ID NO: 470734 - DNA, 100 bp, Homo sapiens
ggctatgggcccatcgactacaaacggaacttgccgcgtcgaggactgtcggcgttatgttgccctgaaccaaagctaaataatggtgaaatcactcaac

SEQ ID NO: 470735 - DNA, 90 bp, Homo sapiens
gggaggccaagaccgctgtgtggaggtagccgcagcgccagcaccaggacggcccccaagttacatgaactacctgctagactcacaccc

SEQ ID NO: 470736 - DNA, 90 bp, Homo sapiens
caaggagaaatccggttgttgcaatcttacgtggatgctgatgcactgggggccacagtgctgatctcagcagctccattttttgtcctc

SEQ ID NO: 470737 - DNA, 75 bp, Homo sapiens
agctcttcaagaactcggcaacaagcttagcgagttctgtacagagtaatgagatgtgtgacggctgcaaaccag

SEQ ID NO: 470738 - DNA, 87 bp, Homo sapiens
cagaaagatgaaaactaagaagtaaatcaatgctaaatgaagaatctgtactttgaattacatgaatgacagtcttcgaaccaatgt

SEQ ID NO: 470739 - DNA, 96 bp, Homo sapiens
agagacaatgtcatgtgattcagcctaatatctcacgtcgtctcggagatgcagccaagaaagccatcagtaaattgacaaccaggacagtaaaga

SEQ ID NO: 470740 - DNA, 100 bp, Homo sapiens
cccatgatgatcctgccatgcaggcaggccctgagcacgctgctgtgtgagcagcaggtcatcaagagagagggcacaggtacagagatgcccatgattg

SEQ ID NO: 470741 - DNA, 100 bp, Homo sapiens
caaaaaccaactgaagcagctgacagagagcagcccgacggccatggaggctgaagagacgatggaatgccttcaggagttccctgaacatcataaaatg

SEQ ID NO: 470742 - DNA, 97 bp, Homo sapiens
actacagaaacctggtctccctaggttgggataattcttcactattccacccttgccacagtactatgggtaggagtgacagctcgaaatatctaca

SEQ ID NO: 470743 - DNA, 74 bp, Homo sapiens
acatcatggatcagaggtcattagaggaaggagaggggccaataggtggtcctggctctgccatatgacacccc

SEQ ID NO: 470744 - DNA, 98 bp, Homo sapiens
tcagcctccccagtagctgggattacaggttgttcttcgtgggctcccgggagggccacctaccggaccttctgtccatgatccacattgagcgtttt

SEQ ID NO: 470745 - DNA, 99 bp, Homo sapiens
cccgattccagcgccagcagcagcaacaacagcagcatgaacgtgcagggtgattatgagccaactgatgccaccgggttcatcaacatcaattccctc

SEQ ID NO: 470746 - DNA, 100 bp, Homo sapiens
attatgggagggctggccaacttctgctacagacgactcagatttgtaggtgaaaatgcccagccaatcctagaaaataatattggaaaccgaatgcttc

SEQ ID NO: 470747 - DNA, 83 bp, Homo sapiens
ggaagcggccacggcagagcctggtgcctgaagaggagtcggagttcaaatctgaacatcaatgatgtactagggaactactc

SEQ ID NO: 470748 - DNA, 100 bp, Homo sapiens
gctgagcagtcaactcaaatgcaagtccaagaggaggaggaggcggaggtccaagcggaaaggtgagaattatgaagatgatgacctagtaaattctgat

SEQ ID NO: 470749 - DNA, 101 bp, Homo sapiens
tgcttctgtcattgctgctgactgctctggcttcctccaccaaaggacaaactaagagaaacttggcgaaaggcaaagatggcagtggcagcaccatgatg

SEQ ID NO: 470750 - DNA, 98 bp, Homo sapiens
accaagccaaatggtgacaaggaactctctgaggctgaggcgcccaggatacatctgatttaatgtcacctagcaaacgtagctctcagaagtacata

SEQ ID NO: 470751 - DNA, 90 bp, Homo sapiens
gagagcgagctgagtggttgtgtggtcgcgtctcggaaaccggtagcgcttgcagcatggctctgacgcccgctctgcggcttcggtgtt

SEQ ID NO: 470752 - DNA, 101 bp, Homo sapiens
cgccgccggagctaacctcggggaccgagatgcaggctgaaactgccgccaaccggatctgtaaggtgctggctgtcaaccaagagaacgagcacctgatg

SEQ ID NO: 470753 - DNA, 90 bp, Homo sapiens
ggggcgcaccacagagaccggcttcaatatcttcacccagcatggagtccaatgtgctgattgctgctaacagtcagggtacaattaagg

SEQ ID NO: 470754 - DNA, 75 bp, Homo sapiens
cccggactggatcaacaccggggagtctgcggcctcagttttatgaccctgtggagccagtggactttgaaggac

SEQ ID NO: 470755 - DNA, 98 bp, Homo sapiens
gagaaaaggattccagtcttagcgatcagcatcagcaaaggctccgaggtgccagaggcatatggcaccctgtgctgcgcacactaaagaaccgcatt

SEQ ID NO: 470756 - DNA, 90 bp, Homo sapiens
ggcagcatcttcagctcttgggtttagcaaaagttcatctccttctgcatccttaactgagaatgagtgactgcagatgagctgtggaaa

SEQ ID NO: 470757 - DNA, 99 bp, Homo sapiens
gcctcatctgcttcatctgcccggcgctgatctacaagaaaatccacaagaacgcactttcctcccaggacgtagacaagtttggcaacgagatcaccc

SEQ ID NO: 470758 - DNA, 82 bp, Homo sapiens
cggactgcggttggggcgggaagagccggggccgtggctgacatggagcagcaaattgtggctactaatttgccccctgaag

SEQ ID NO: 470759 - DNA, 99 bp, Homo sapiens
cccgaatgcatctaggtaccaatggagccaactgtggtggggcttccgagtggacctgccaatcaagtcggcccgctaccgtggccagtacaacaccta

SEQ ID NO: 470760 - DNA, 96 bp, Homo sapiens
gtctttcaatggcttcaagacaaccagaagtgcctggtgctggagaatctggtaaaagcaccattgtgaagcagatgaggatcctgcatgttaatg

SEQ ID NO: 470761 - DNA, 50 bp, Homo sapiens
gtcagaacttcaccacacttgaagctgatctccagcaccctgccggtggc

SEQ ID NO: 470762 - DNA, 90 bp, Homo sapiens
cggcgcccggatgggcagctgagggctggtgaattaccagatctctgtcaagggcagtaacctgttcaagttggaagtgcgtcttttgga

SEQ ID NO: 470763 - DNA, 74 bp, Homo sapiens
tcgcggtgggtcctcgcttgcagttcagcgaccacggacttcaaacaagtgtgaagaggctgtgtggcgagatt

SEQ ID NO: 470764 - DNA, 50 bp, Homo sapiens
gtccgacagccaggcccgggagaagcagcacacttctgcttttgttcctt

SEQ ID NO: 470765 - DNA, 75 bp, Homo sapiens
ggcgccgcactcctccgcatccctctttaacagttccttgtggagaagcactggtataagcagtgggaggcatac

SEQ ID NO: 470766 - DNA, 95 bp, Homo sapiens
ttcagggtcgaagctgctgaagtggtttttcctaatggaaaatcacatacctttccaggttttcacaacatggtatgattggtgtaactcaacca

SEQ ID NO: 470767 - DNA, 75 bp, Homo sapiens
cattcccgggaggggggagcggcgttggaggccaccgtttccaggtatttaccttgctgtggattgctgactgga

SEQ ID NO: 470768 - DNA, 50 bp, Homo sapiens
gaagagcttggcagaggtgttcgaaaaatatttacagaaagccttctgtg

SEQ ID NO: 470769 - DNA, 100 bp, Homo sapiens
gctgggaccccgacagccttgctgactatttcaagaagtttggaaattttagcattcaggtgccaggaatgcagatgggacagccagtgccagaaacagg

SEQ ID NO: 470770 - DNA, 88 bp, Homo sapiens
ggagtttacacaggcaaactgtcagaaaagagtagcctgggctgtctggaaatctgaggggtcacgggcgtcagcggtccagggaagg

SEQ ID NO: 470771 - DNA, 88 bp, Homo sapiens
cgccgctctgccacggtctgcccacccaacgcgaagacggtaacccgtgtgactttgactgggttatcaagttatacccaaccagcag

SEQ ID NO: 470772 - DNA, 75 bp, Homo sapiens
gtggttgcaacggagataaattcccggaaccgcgattcggcgtgtcagaactgataaatttcaaacggaagagag

SEQ ID NO: 470773 - DNA, 75 bp, Homo sapiens
ctggcttttaaggaggacacccggacacctggaagctgggaaatgcctttagaaataagagggccatatgacgtg

SEQ ID NO: 470774 - DNA, 83 bp, Homo sapiens
ggcccctgcagcggaaccggacccagtccctgagccgcccctacacccacaggtcagggaagtcaaagatgcatccctgagtt

SEQ ID NO: 470775 - DNA, 100 bp, Homo sapiens
ggtttctgctggtccaagcaaacttctcctgccacgcctaaccttggagagcagggctttgttcgcgggggtcacagctctcatggctgcagctagcgtg

SEQ ID NO: 470776 - DNA, 100 bp, Homo sapiens
agcggtcgccgcgggatttggagctgcctagcctcgcggtcggtgctggagaatctggtaaaagcaccattgtgaagcagatgaggatcctgcatgttaa

SEQ ID NO: 470777 - DNA, 109 bp, Homo sapiens
ttgcgaaggatccccaacggggaggccaacgtgaagaaactgtgccctgtccacggtgcctcctgcatgtcctgctgccctgagctgtcccgagctaggtgacagcgta

SEQ ID NO: 470778 - DNA, 75 bp, Homo sapiens
cgagaactggagagaactgctggaaggagactggatgatagaattgaatgaatctgaagtctgctgcagtaaaac

SEQ ID NO: 470779 - DNA, 75 bp, Homo sapiens
caaggtgcaagagtccacaaagggacctgatgaagcgaagatcaaggaatcagagatcattgatttcttcctggg

SEQ ID NO: 470780 - DNA, 109 bp, Homo sapiens
ggctcccgcaccatggaggaggacgacagctacggcctatgaaaggaggttccctacatgtcctttgattccgatgttcgtgggcagtgacactgtgaatgaattcaag

SEQ ID NO: 470781 - DNA, 100 bp, Homo sapiens
tgccggggagtgcgcagagacacaagatagtgaaactagttctctaatggacatagaaaatgtaattctggcaaaaatccatgaagatgaggaagaccac

SEQ ID NO: 470782 - DNA, 75 bp, Homo sapiens
atcaacctggagctctacgcctcctacgtttacctgtccatggcaaaatcctgacagatgactttgcagacaagg

SEQ ID NO: 470783 - DNA, 100 bp, Homo sapiens
agacgcagctgccgcgccggggcctgagctgccgcctcctccgccgcccgaaaacccggagtgccccgcacagtctgcgctcctcagaccaccggcaggt

SEQ ID NO: 470784 - DNA, 50 bp, Homo sapiens
ccccgggataaggacaagagatgggaaggatattgagtcgttgatgtctg

SEQ ID NO: 470785 - DNA, 83 bp, Homo sapiens
tctgccctggcccccaagatcggccccctgggtctgagagaagaaaccaattggttgggacactgatatttcctggcttactg

SEQ ID NO: 470786 - DNA, 104 bp, Homo sapiens
cacaaaacagcagatttcccaagagcagcggaaaatgatccagtcacagagcttacaagaccctatgaaaaaattagttgagaaagaagagaagaagaaaatca

SEQ ID NO: 470787 - DNA, 92 bp, Homo sapiens
gaggggccactgctgggccctgaggctgcaccaagtggcgaaggagccggctccaaggtgaaaggtgtagcagtcactcggcctacacccac

SEQ ID NO: 470788 - DNA, 100 bp, Homo sapiens
cgtgaccgagagcgtgaccgagagcgcgaatatcgtcatcgttagaagtacaagccagctgccatgttgtgagcacataccacatagctccatggagatg

SEQ ID NO: 470789 - DNA, 94 bp, Homo sapiens
atgaattggatatcaagccagagaagtgcccgaggagagttaacaggttatgggcacgctgcacctggcaccgatgcgggcaaggccttctgca

SEQ ID NO: 470790 - DNA, 100 bp, Homo sapiens
gagcatgaatggagcaaaatggcggatcatgtgcagatgcctgtgaggagccaccaacatttgaagctatggagctcattggtaaaccaaaaccctacta

SEQ ID NO: 470791 - DNA, 127 bp, Homo sapiens
atggaccgacacgggtattgtaccgctgagggaaaggagcgggactccggacctccaggagcaggggaaatgctgtctgtagctgagcacttcctggagcagcagatgcacccaacagtggtgatca

SEQ ID NO: 470792 - DNA, 74 bp, Homo sapiens
ataacaaagcccttgctgttatggttgatataagaaaggaggtattcgaacttctggaaatgggagtgctcagt

SEQ ID NO: 470793 - DNA, 83 bp, Homo sapiens
ggccgcaaactgacacctcagggacaaagagatctggacagaatcgccggacaggtgccagatgtgacatccagatgacccag

SEQ ID NO: 470794 - DNA, 100 bp, Homo sapiens
catccaggagtcagtttattactggaaagcaccgaccgtcacgagctaacttcctggaagagctttccgtctattttcaaattctttaccgaagcctcag

SEQ ID NO: 470795 - DNA, 75 bp, Homo sapiens
gctgaagagacctggagccgacagacgaagctatacagcggcaccgccggaacctggctgagtggttcagccggc

SEQ ID NO: 470796 - DNA, 88 bp, Homo sapiens
attacactgaagaagtagagtatttcaaccataaagacatcttaattgggcacgaaagaggtgtgtgtggtttcagcgcagcatggct

SEQ ID NO: 470797 - DNA, 82 bp, Homo sapiens
attggctgttttcctcacattcctcaagcaggttcaagaagacgtggaagctgcgggctctgaaggaaggcaagacaagcat

SEQ ID NO: 470798 - DNA, 100 bp, Homo sapiens
aatgaccaatgtgtgatttcagtggaataaatggcgtccaaagtcacagatgctatagtctggtatcaaaagaagggccatgtttatgagtggactaagt

SEQ ID NO: 470799 - DNA, 96 bp, Homo sapiens
tttaagaaaggacagcattcctgtgacctctgcctaccatccataaaatactcattcccctctcaggtggtattaaagataatcaaacattatcaa

SEQ ID NO: 470800 - DNA, 74 bp, Homo sapiens
taatgtgatgaaactccttcggatggccctcagtggacagcagcttcgttgtgtggaagatcttcagacaattc

SEQ ID NO: 470801 - DNA, 118 bp, Homo sapiens
ccgggatcgtgaccgagaccgtgaccgagagcgtgaccgagagcgcgaatatcgtcatcgttagaaggtacttttaggttgaaatacgcccctccagcagaaagtctggactccacag

SEQ ID NO: 470802 - DNA, 82 bp, Homo sapiens
ataggatcaaagacaaatggaaagttcctattgtggtatctgaacgggaactatttggttctgttggtgtcattggtggtca

SEQ ID NO: 470803 - DNA, 74 bp, Homo sapiens
ctcagatttgcagggaacaaactccagaaggccaaatgcctcgatgacttacgagccctcaaggggaagcattt

SEQ ID NO: 470804 - DNA, 82 bp, Homo sapiens
tgtccagccacgtcgctttgttttcccacgctaggagctaccacaacaggccctgggaggagcggggacactgaggacctct

SEQ ID NO: 470805 - DNA, 100 bp, Homo sapiens
tccttcctcgccttcgtgctgggcaaccggcaaacagacctgctgcaggaggagctcaagccggagaacaaaggcatccgtgtcattctggaccttactc

SEQ ID NO: 470806 - DNA, 109 bp, Homo sapiens
gttgggttcagttttcttcagaagaaggacttcggaatgcactacaacaggaaaatcatattatagatggagtaaagtctctgctggatgaaccgaatcctaacagtcc

SEQ ID NO: 470807 - DNA, 88 bp, Homo sapiens
tgcaaagtaaacagggtgccttgtggaaccgggtggctgctgagaggggtcacggggacatctgctccctcctcctgcaacacagccc

SEQ ID NO: 470808 - DNA, 75 bp, Homo sapiens
gaagctctggaggaatatgtgaaaaaagtaaactctattcagatgtgtcttcatacagtttggagcaagagtcga

SEQ ID NO: 470809 - DNA, 101 bp, Homo sapiens
tcgtggggaccttccccttcaactcttttctctcgggcttcatctcttgtgtggggagtttcatcctagcggttttttgctccactcaagcctgttagaat

SEQ ID NO: 470810 - DNA, 50 bp, Homo sapiens
gggccgcctgctcgttcctgacagaatcctgtgggccaaagctgaccaac

SEQ ID NO: 470811 - DNA, 96 bp, Homo sapiens
ctgagtccatctttcttgatgaccttggaacaaatctaaaagaagctgccagacttggtattcacaccattaagctcatcgaggagtgcaccgacc

SEQ ID NO: 470812 - DNA, 50 bp, Homo sapiens
gcaacatctgcttctcctcctcagaggtgaaaggtgtagcagtcactcgg

SEQ ID NO: 470813 - DNA, 100 bp, Homo sapiens
tggcggatggcccccggtgcaagaggcgcaaacaagccaatcccaggaggaaaaacggtggaaaggagactatggaaccaggatccagcagtacttccca

SEQ ID NO: 470814 - DNA, 75 bp, Homo sapiens
gtctgatcccttgctcccatccctgcagcatgaacaaggaccctaaagtaaattggttgaagaaattagatccca

SEQ ID NO: 470815 - DNA, 75 bp, Homo sapiens
accagatgtacttgtgcttcctgctggccgtgctgctgcaggaagctgccacttttgctagagagcaaggctttg

SEQ ID NO: 470816 - DNA, 100 bp, Homo sapiens
ggcggtgctggtggcggcggcggcggaggcgacggcagcggtcccagcggcagcagcagcggcgggaggagcctccgggaacgggcagctgctgctgcag

SEQ ID NO: 470817 - DNA, 100 bp, Homo sapiens
tgggcctgacagagaaggctcactcaaggatcagttggctttagcaattggacggggaggtttactgcatcgacgcgcggttctacgggaacgtcagccg

SEQ ID NO: 470818 - DNA, 82 bp, Homo sapiens
tataagtagcttaaagatgacaccttgcattccctatttagaaaggcctaaagaatgtatttgacgaagcaatattggctgc

SEQ ID NO: 470819 - DNA, 75 bp, Homo sapiens
gcttcagcccaagttactgaacagcagtgttgtactgctacttctataaacggacagccgtaagactaggcgatc

SEQ ID NO: 470820 - DNA, 90 bp, Homo sapiens
actcagtccaattaaaactgatctgataagacctcagatcagacagagagtattgggaaagggtcgttgtggtgcatagacccagagtat

SEQ ID NO: 470821 - DNA, 75 bp, Homo sapiens
gagatgctattgcccggctcaaggaggtcctggtgcttgatggtcgaggccatctcctgggccgcctggcggcca

SEQ ID NO: 470822 - DNA, 90 bp, Homo sapiens
gatctgtcctgaatgtggcttggttgtagacgaagttatacggaagcgtctcctcattgatggagatggtgctggagatgatcggagaat

SEQ ID NO: 470823 - DNA, 51 bp, Homo sapiens
gaacaggcacgtttgaaagctttaaaggtctgccatcatggatgttctcgc

SEQ ID NO: 470824 - DNA, 90 bp, Homo sapiens
atttgggagatggctcgtcgttgtatcacaggaggaaattatggaagtggaaattacaatgattttggaaattataaccagcaaccttct

SEQ ID NO: 470825 - DNA, 100 bp, Homo sapiens
aattatctctggtgctgcagctctcttcaagtggaaataaagagattatttcgcatattagtcaacatggaggaaaatggccttactggtttaaaaaaat

SEQ ID NO: 470826 - DNA, 100 bp, Homo sapiens
atgggggacgtgctgtccacgcacctggacgacgcccggcgccagcacatcgcaggtgaccattgtgaggtagatattttgttctaattttccagatgag

SEQ ID NO: 470827 - DNA, 75 bp, Homo sapiens
cgcgaagaggctggactcggattcgttgcctgagagatgcagaggatgctatttatggaagaaatggttatgatt

SEQ ID NO: 470828 - DNA, 89 bp, Homo sapiens
accctgtgcgctggccctcaaccatcagtccctgctttaaggtgacccaggcctctctccggtctcacattggagttgtgccccaagac

SEQ ID NO: 470829 - DNA, 75 bp, Homo sapiens
cttactaaccacgaccatcaaatccgtgtcggagtccttacagccagagagatgacacgggggaaattcctcaat

SEQ ID NO: 470830 - DNA, 75 bp, Homo sapiens
ctggacctcagctacccccgcacccacgcggccctgctgaaagtggcgcaaatgtgtggacgaatgtggaacctc

SEQ ID NO: 470831 - DNA, 82 bp, Homo sapiens
cgctcgcccctcttttccatgtatccgtccaggtgtcgtgaaaactacccctaaaagccaaaatgggaaaggaaaagactca

SEQ ID NO: 470832 - DNA, 50 bp, Homo sapiens
agatccgacatcgacgcagtctacagctttcagcagaggccaaggcagca

SEQ ID NO: 470833 - DNA, 100 bp, Homo sapiens
tttattattcatggagacatccgctaaaacatcaatgaatgtaaatgaaatattcatggcaatagagagattaacaagcggatcacagaggagcaagccc

SEQ ID NO: 470834 - DNA, 82 bp, Homo sapiens
cgggcagctgtgcccgggcggcacggccagccctgggcgctgcctatggcacagccaagagcggtaccggcattgcggccat

SEQ ID NO: 470835 - DNA, 100 bp, Homo sapiens
gactctcctgcagaccttcccaggaagccagagccacacacaccatcatggtcctggaatcaaccctcaaaagcgtattgagtgccttatggaatttgtc

SEQ ID NO: 470836 - DNA, 71 bp, Homo sapiens
aatttttacgtctagatttccatgcccatggaaggattgatttccagagacttatgttacttgaggaagac

SEQ ID NO: 470837 - DNA, 75 bp, Homo sapiens
cgattatggacccggccgaggcggtgctgcaagagaaggcactcaagtttatggcatgaacaaccgggaggtgct

SEQ ID NO: 470838 - DNA, 100 bp, Homo sapiens
gatgcggccaactccaatgggcctttccagcccgtggtccttctccatattcgagctttgcccgaagtttttacatacaaattctactagtcacacctgg

SEQ ID NO: 470839 - DNA, 98 bp, Homo sapiens
aacgatggtctttcctctgcattgctgatcttgtacttggattcagcaaggaaccttccgggaaccaacagtgtttgtaatgaagaacatcagactct

SEQ ID NO: 470840 - DNA, 75 bp, Homo sapiens
gaagagacctccagcaagcagagctctgggcctcagaactgtgctgcctgtgttcacgagggcatatatgaagaa

SEQ ID NO: 470841 - DNA, 51 bp, Homo sapiens
gcaccttgcgcttcttgcagtcggctaccggctctctgaccagttccacga

SEQ ID NO: 470842 - DNA, 90 bp, Homo sapiens
tagctatccagacagagcagctaccctcagctctagctgatactacagacagtacaacagggagacattacctcatccctcaagattgct

SEQ ID NO: 470843 - DNA, 80 bp, Homo sapiens
tctcagaggacgccttcaacaccaccttcatctccaccatcgactctcagcgttctcatctctcttccttcaccatgaag

SEQ ID NO: 470844 - DNA, 90 bp, Homo sapiens
ggaagcccctctgaagcctcctcgccgccgtttctgagaagtgtaaggcaaacattggtgggcaccgatcttcctgttcattctgcaaga

SEQ ID NO: 470845 - DNA, 90 bp, Homo sapiens
gcgctatgtcccactaaaggatcaacgtaacgtgagcatgaggttttccaatcagatggagatggacacatggatcatttactgccaggc

SEQ ID NO: 470846 - DNA, 101 bp, Homo sapiens
ccggaacccagagactgcatcagagccactgtctgaggaaaccgtggctgccaggctttctgtttcactcttgcgtcacacccagctactacctgtagaca

SEQ ID NO: 470847 - DNA, 89 bp, Homo sapiens
gcttaataaaataaccgtccccgccagtcagaagttgaggatggacaaccggaaattttctacacattttggaattcagttactcaggc

SEQ ID NO: 470848 - DNA, 96 bp, Homo sapiens
cttctcagctatgataacctcagtgcaaatgaaatgcttccagactgcacacttttacttagaggacagtacatcccctagagttatatccacacc

SEQ ID NO: 470849 - DNA, 75 bp, Homo sapiens
caggaatacatggaagtccgggagagaatacacagagccagcttcctcagcaccttcaagcccccagcctacgag

SEQ ID NO: 470850 - DNA, 76 bp, Homo sapiens
ccgccatgcacaagctgcacttcctgcacagggtatgtccagaaatcttgatgcatgtatctgaaaagaaaatttc

SEQ ID NO: 470851 - DNA, 111 bp, Homo sapiens
gagttctccaaacatgatcgtttactgcaaaacacgatgaggcgagtggtacgacagagcaagtttcggcatgtatttgggcaagcggtgaaaaatgaccagtgctatgat

SEQ ID NO: 470852 - DNA, 83 bp, Homo sapiens
atcggccagtccgagcgtgccggacacagccagatagcctgggctggaagctcttctacgtcacaggctgcctgtttgtggct

SEQ ID NO: 470853 - DNA, 89 bp, Homo sapiens
agaggaggggtgccggccgggattcgcggcccggagctcgggaccggaaagaccacagcaagattctttcattcgtctcctcctagcct

SEQ ID NO: 470854 - DNA, 71 bp, Homo sapiens
acatgaccccagctacctccccaataggtgcatcagcaaaaaatggccccatttatgatgtagtttggaat

SEQ ID NO: 470855 - DNA, 74 bp, Homo sapiens
gagcgacccgtggccttgtgtttcagggtgtcagatgcctgatacattcaattcatggtttcttataaccctac

SEQ ID NO: 470856 - DNA, 98 bp, Homo sapiens
gtacaggatgcaaatagctcagaggtccatggtttatctaacaattaagccattaaacctgagtcaagttgaaggtgggaaagcagtgccactctccg

SEQ ID NO: 470857 - DNA, 82 bp, Homo sapiens
gtgctaatgacgtaagcatgatacaagaagcccatgttggcataggaagctgcagtaaaggaagatgaagaagaagtttcag

SEQ ID NO: 470858 - DNA, 83 bp, Homo sapiens
tgaggatgtagatttaccagaagtagatggagcagatgatgcagtttcagcgtcgaaagtggccagaaatgaagagaccttct

SEQ ID NO: 470859 - DNA, 99 bp, Homo sapiens
cagtttccacttcccaagaaccttctggccaaggtgattcagattgcaacgtcatcctccacagctaagttttctggatatgccgcagaaggatccgtg

SEQ ID NO: 470860 - DNA, 90 bp, Homo sapiens
ctgaagggcaaggaaagcagcatagagaatgagatagccgtcctgagaaagtctgtccacgttctctgtgggttcattgccggacttgag

SEQ ID NO: 470861 - DNA, 100 bp, Homo sapiens
gttcttgctgcatgtggttgatttccccatggcagatctgctgctcatccttgggacctccctggagctgcatcttcctcccgtgaggctggccgagctc

SEQ ID NO: 470862 - DNA, 83 bp, Homo sapiens
gccgcgtcgaagacatggaccagggctacggagcattttgaaagcgaagcagaagccgtagaatcagcggcgagcctgttgaa

SEQ ID NO: 470863 - DNA, 98 bp, Homo sapiens
tgaaggacacggccaaccgcctacgtatcagctccatccaggccaccactgcggcgggctctggagctcccagctcctccagcagccgacaggaggcc

SEQ ID NO: 470864 - DNA, 100 bp, Homo sapiens
ccggaactggtcgaatgaggcacctaaaaattgtataccgcagattcagaatatgcttttaaggctattaaccagggtggccttacatcagtagctgtca

SEQ ID NO: 470865 - DNA, 97 bp, Homo sapiens
tcagctttatgtcctacgacgaaattagccagctccgcctggaagtcaccaaagcagtacagcctctcttactgggaagaatcatagcttcctatga

SEQ ID NO: 470866 - DNA, 98 bp, Homo sapiens
gaatggacaccttgaagcagaggagcagcaggaccagggaagatggagagttggaagaaggtgaattggaagatgatggggcagaggagacccaggat

SEQ ID NO: 470867 - DNA, 90 bp, Homo sapiens
cccgcttcgaggtggagagagcccagtgggaggtggagcgggcggagctgcagctgtctgtgatcctggaaacatacgtgtgactgaagc

SEQ ID NO: 470868 - DNA, 96 bp, Homo sapiens
gttcttggctttggtcgggggccagcccccagccctggagaagctcaaaggcaaagtggccaactttgacccaggcaccttcagcctgatgcgctg

SEQ ID NO: 470869 - DNA, 100 bp, Homo sapiens
caggcatcagttggtactcgccatgaaactcaaagatcgagagggtttggacagaggagccaaaggccaaatttccactttcagcagttttatttcagct

SEQ ID NO: 470870 - DNA, 75 bp, Homo sapiens
tcggcaatattgattttagacaggatacaagaccctcctgaaaggaatttccgggaagttcaatagtggtgagtt

SEQ ID NO: 470871 - DNA, 50 bp, Homo sapiens
gcacgaggagcgattcctcaagaacaaaggcagacggtaacaagtactcc

SEQ ID NO: 470872 - DNA, 96 bp, Homo sapiens
gaaaaagtgtgacttggcagctggagtggaatttgaggcctccccaaccacctaccaaaaaaggagggtgaaatgaaaggaagaagaaaaactcag

SEQ ID NO: 470873 - DNA, 50 bp, Homo sapiens
tagccagcccgagcaagtaaagattgaggctgcctaccacaaggacttta

SEQ ID NO: 470874 - DNA, 82 bp, Homo sapiens
tactattcggggaaagaattgaaccttcaccatataaggaaacccagcgtttgctggcagaaccagttcctggcatcaaagc

SEQ ID NO: 470875 - DNA, 90 bp, Homo sapiens
caacgacgggctccccggctcggctctcgctgcggcagacgggctcccccgggatgatctacaggaagggcctgtcccagtcggctttac

SEQ ID NO: 470876 - DNA, 86 bp, Homo sapiens
gcagaagtcgcgtgtctaggtgagtcgcggtgggtcctcgcttgcagttcagcgaccacgatgaaggatttgggggcagagcactt

SEQ ID NO: 470877 - DNA, 83 bp, Homo sapiens
atgtttgaacaaactcgaagaacagctgtggaaagaagttgcaaaacactggggaaatcctcattgacgattcaatttgttga

SEQ ID NO: 470878 - DNA, 101 bp, Homo sapiens
ccaatcattggaagatttggaacctcactgaaaattggtattgttggattgccaaatgttggacatgccaccactgctctttgaggtgtcatccctggaga

SEQ ID NO: 470879 - DNA, 97 bp, Homo sapiens
tttttgacatagatgatgcaaagccatgtgaagatgtgcttgcttcccctttgccttctgccatgattctaagtttcctgaggcctccccagaagca

SEQ ID NO: 470880 - DNA, 82 bp, Homo sapiens
attctggcacctcaacggctgatgatttctggctaccggctctctgaccagttccacgacatcctcattcgaaagtttgaca

SEQ ID NO: 470881 - DNA, 90 bp, Homo sapiens
cacaagctccagcatcccgtcaggggttgcagcatcaacaacagcaacttgtgattggcggtgaccggatattcagttgcacatccccac

SEQ ID NO: 470882 - DNA, 90 bp, Homo sapiens
aggaggccctacccccaccctgtgagaggtagatataatctgtggtgatcacctgttggagcagtatcaaactctaagggaaatccgacg

SEQ ID NO: 470883 - DNA, 82 bp, Homo sapiens
gatgccaaagaattgagctgaagcagggctacacatttttcatcccttccgacacatgcctcactcctgtcagcagttccac

SEQ ID NO: 470884 - DNA, 75 bp, Homo sapiens
actttgtgaatgagctgcgctatggagtcgcccgcagtgaccaggatgccttccgcgccttccaccctgacctgg

SEQ ID NO: 470885 - DNA, 74 bp, Homo sapiens
gcaccaggcaaaccaccatcacatctcattttgcaaaggggctaactcaggtgagatggagccgctatagtcct

SEQ ID NO: 470886 - DNA, 100 bp, Homo sapiens
tgtccagcagacaactgatctagaaataccacccccagttcgaacaactgccacagcagcaagcaacttgattgaagtatttgttgatggtcagtctgtc

SEQ ID NO: 470887 - DNA, 83 bp, Homo sapiens
cttgctcgcccgcagccccgagaccgcagatgaaggatttgggggcagagcacttggcaggtcatgaaggggtccaacttctc

SEQ ID NO: 470888 - DNA, 99 bp, Homo sapiens
cttttcagacattcctgggataaacagtgtgaccgatgtcatatgctaggccactatacagatgtgaccatagccgatgactactcagatccctttgat

SEQ ID NO: 470889 - DNA, 87 bp, Homo sapiens
cggcggacgcgcccgggacgcgcggcggcaccgggaggccgggccgagcgatcgtcagtatttaaacagatcacatcatgcgtgagt

SEQ ID NO: 470890 - DNA, 80 bp, Homo sapiens
aacatggacatgaagaggaggatccacctggagctgaggaaccggaccccggcagctgttgatgataattagaagcatgc

SEQ ID NO: 470891 - DNA, 74 bp, Homo sapiens
ccgcgcgcgcctcagaagctcccggacgcccagatcacaaaatttgtccaggatagacatagagctagaagaaa

SEQ ID NO: 470892 - DNA, 107 bp, Homo sapiens
gggaaagtgatgtccctctgaaaactgaggaatttgaagtgaccaaaacagcaggcgtcacctcctcctgtcgcctggccctcgccatgcagaccccgcgagcgtcc

SEQ ID NO: 470893 - DNA, 100 bp, Homo sapiens
gctgccggagcccgagtggatcggggacggagagaacacgagcccatcaggattttttatcaagcagaaatgcatcgaacaacgagaatcaagatcactg

SEQ ID NO: 470894 - DNA, 74 bp, Homo sapiens
aacatcatgcagtggaatgcagttatatttggatcataggtatattgaactgttcctgaattcatgtccaaaag

SEQ ID NO: 470895 - DNA, 50 bp, Homo sapiens
acattgatgttcctccagcaagactgctctccagaatgttgagattgccc

SEQ ID NO: 470896 - DNA, 83 bp, Homo sapiens
agatcaacttggacaggaattggaagaactcacagctagtctatttgagctctaaagtctttctggaaattgacaaccgccag

SEQ ID NO: 470897 - DNA, 100 bp, Homo sapiens
aggtcctggaatgtctgcagcagttcaaggagcagggacaagttacaggaatgttctccaagcagcaatccaaaagagtctcaaggatccttcaaataac

SEQ ID NO: 470898 - DNA, 83 bp, Homo sapiens
cagcgctcaattgcccctaggactcacccttattccccatccctgaatattgccgagccttagaagagaatgaaatatctgag

SEQ ID NO: 470899 - DNA, 75 bp, Homo sapiens
agcaaatggaaagaaatcccactgggcagagcttgaaataagtggtgctgcaacatggtctggaactctgagtca

SEQ ID NO: 470900 - DNA, 75 bp, Homo sapiens
tagccctcctcacctgccaccatattctgcttatgactttcagaagacttgcactatctgccagatgctgcttcc

SEQ ID NO: 470901 - DNA, 75 bp, Homo sapiens
acaaccccaccaacgccacgctcagcaccttcattgaggacacagcattgttggttttgccatgtactattttac

SEQ ID NO: 470902 - DNA, 76 bp, Homo sapiens
atgccatcctgaacgtctctccctgtcctagctctgtaactgtttacagagcctgtgtgaaatgcagcaaaggggt

SEQ ID NO: 470903 - DNA, 76 bp, Homo sapiens
ccgtccatcatagtcaactgcgtggaagagaaggaaataaagtctttgcttttgctttttggaggtcagtttgcca

SEQ ID NO: 470904 - DNA, 87 bp, Homo sapiens
gaattcggccatgagccgctacatactcatcatggggctcctgtacaagtgtactggttctgcctgtctggagggccatggagaaga

SEQ ID NO: 470905 - DNA, 74 bp, Homo sapiens
gaaagcttgaattacctacatgctccaatactgttggcactagtggcaggagaagctgctggtatcatggaaaa

SEQ ID NO: 470906 - DNA, 75 bp, Homo sapiens
tctctacctgaacgtctatgtgccgacggaggatggtgtgcctaccgcatgttgccgctgctgtttctgctggga

SEQ ID NO: 470907 - DNA, 102 bp, Homo sapiens
ctcgctgggagagaggtacctctccttttccctctccctttccctaagaataccctctaccatctgctttggtcagggtgccgctcgaggatttaaaagcaa

SEQ ID NO: 470908 - DNA, 100 bp, Homo sapiens
gcgcgaagctggccaaagcctgcccagacggctcacctgtgcgggatggaacaaaagtttttgaaatcatgaatcctgtttatagtcctggatcttctgg

SEQ ID NO: 470909 - DNA, 100 bp, Homo sapiens
acctgcttggctgctagagaaagagtctattcttctccgctcctccgacccaggaatccattacattgggcgtatggaagagggcagcattggccgtttt

SEQ ID NO: 470910 - DNA, 100 bp, Homo sapiens
cctatacctgccacgccaataactcagtcactggctgcaacaggaccacagtcaagacgatcatagtcactgacccctgtaaaagagcccaacagtgaaa

SEQ ID NO: 470911 - DNA, 83 bp, Homo sapiens
gctgcttccagtgttcgccgagaggctgaaggtgatgtggccgccctcaaccgacgcatccagctcgttgaggaggagttgga

SEQ ID NO: 470912 - DNA, 80 bp, Homo sapiens
gaggaaaagaacagagccatcattcaagaagtttgcttcatgggcttggcaactcttgtgaaatttcatagatctcgtcg

SEQ ID NO: 470913 - DNA, 75 bp, Homo sapiens
ctgatggagctcaagaccagggccctgcagctggaagaggagctgttccaggtggagcgcgtgtcgcacccgctg

SEQ ID NO: 470914 - DNA, 100 bp, Homo sapiens
gtgtcagcaaccagagggaaaccactgtagtctgggacaagataactggagagcctctctacaatgctgtggagttttgattcatcatggataatctgtc

SEQ ID NO: 470915 - DNA, 50 bp, Homo sapiens
ttcattccgcagcagcactccgacagggctggacatggaggaaggcaagg

SEQ ID NO: 470916 - DNA, 89 bp, Homo sapiens
cacgtcgccttggcgcaacaagcgagcgacggaggcgccggtgccaggtggcattcagctacctgccccagaatgacgatgaacttgag

SEQ ID NO: 470917 - DNA, 82 bp, Homo sapiens
cacgggctcctacctcctggacggcaagccgctcagcaagctccacatccccgtggtgtcctgtggccaggcggaaagcagt

SEQ ID NO: 470918 - DNA, 75 bp, Homo sapiens
gtggttcctgcatgaagacagtggctggcggtgcctggacgtacaattccaggaatggatggaggtgctttaact

SEQ ID NO: 470919 - DNA, 100 bp, Homo sapiens
tttgaggcacggtgggctttccttggttcaaaccacagattacatttacccgatcgtagacgacccttacatgatgcagccgagaccgacccgcccgccc

SEQ ID NO: 470920 - DNA, 59 bp, Homo sapiens
gccctggcccagctcaacacctgatttcgggaatgctggcagactttgtgtcccagact

SEQ ID NO: 470921 - DNA, 104 bp, Homo sapiens
ctcaagcaagggctgtatgagctctcagcaagcaactttgagctgcacgttgcacaaggaactgtggctgcaccatctgtcttcatcttcccgccatctgatga

SEQ ID NO: 470922 - DNA, 89 bp, Homo sapiens
cgagacgttgttgagtcccctgtgtcctcttctggatgacgaagatgatcctgcagaagctgaaaaggagggaaatgaaatggagggtg

SEQ ID NO: 470923 - DNA, 100 bp, Homo sapiens
gcctcggccaggaccggcgcgagaggcgatccagtctctcaagattctactgtttcccaagaggagaactcaaaagaggataaaatggtcactgtttgtc

SEQ ID NO: 470924 - DNA, 50 bp, Homo sapiens
ccgggaccggagaggaagcggagcgacttcctgattctcccaggattcat

SEQ ID NO: 470925 - DNA, 75 bp, Homo sapiens
tgcctctttttgccaccaatcccttcgatcaggatgttgaaatttccatgcagtatcggcatgatggagcttgcc

SEQ ID NO: 470926 - DNA, 90 bp, Homo sapiens
gaagagtggctggttgctgcgacagaatgagaaacttggatgagtgtgaggtgtgccgggacggaggggagctgttctgttgcgacactt

SEQ ID NO: 470927 - DNA, 100 bp, Homo sapiens
accactcctgctgcatcacctggacggccgtggtggccgggctcatctgctgataggatcacgagaccattcaaatctctccattccttcaagagctcct

SEQ ID NO: 470928 - DNA, 90 bp, Homo sapiens
gggaggaccagggaagcagtgaaaatgatgagagataatggatcttctaaccaaagacggagatttaatccacagtatcataacaacagg

SEQ ID NO: 470929 - DNA, 100 bp, Homo sapiens
gacggctcacctgtgcgggatggaacaaaagaactttgaccagaataagctggaagaagaaatgagaaagcgaaaagaaagagtagaaaaatggcgagaa

SEQ ID NO: 470930 - DNA, 78 bp, Homo sapiens
tcagcacaaggaaactacctggaggccatcaatctgtcattcaatgagtgcctggaagagctgggatgtctggttgag

SEQ ID NO: 470931 - DNA, 82 bp, Homo sapiens
tttgctacagcatcccacattaagtcaacgtctattatcctcccagtccacaacgctgaaccgtggctggacgaatgtttga

SEQ ID NO: 470932 - DNA, 98 bp, Homo sapiens
acacaacaatcagatggcaccagggactggcagctccactgccgtcaactcctgttctcctcagagcctgggccccacggttcccctgatagacctgg

SEQ ID NO: 470933 - DNA, 74 bp, Homo sapiens
catcttgtccagaactctgtcaaatgaagaacactttcaagaaccagctgttcatagtttcaagttgagtcgaa

SEQ ID NO: 470934 - DNA, 98 bp, Homo sapiens
ccacgtgcagatccccttcgagatcaccctttggatcctgctggcctccctggccaagattgatcagcttgaacgggtctttttacgacttggccatg

SEQ ID NO: 470935 - DNA, 76 bp, Homo sapiens
ctggtgtgggtttcccaagcaaggttccttggaagaagatgtctgcagagatcagtacaatggaacatgaattttc

SEQ ID NO: 470936 - DNA, 100 bp, Homo sapiens
gattgggaagaaagaagcaagaatggtgttgtaaaagatcagccttcaggccagaagcggactcctagaagaggggagcagcaaggatggaatgacagcc

SEQ ID NO: 470937 - DNA, 100 bp, Homo sapiens
gttcctgctgccctcaaggtcgtgcgtctgaagcctacaagaaaggtaactctgggtgcctttgggcatgaagaagaagttatctctaatcctttgtctc

SEQ ID NO: 470938 - DNA, 80 bp, Homo sapiens
gcggcggtgacaacgacggcggtggtgacgggcaccgggctcgcgggtagcacagagctgacaggcagcacgaatctgat

SEQ ID NO: 470939 - DNA, 101 bp, Homo sapiens
cggagagagagggaaggacggggcctggcccccgggactccctgtgccttgcttggagctgacgccgacggatctggcagaggacggaaattaagtggaga

SEQ ID NO: 470940 - DNA, 75 bp, Homo sapiens
tggcaaacagtgtttgcctctggttcagctcatacaacagcttcttaggttgattcttcaccacactgaaaccat

SEQ ID NO: 470941 - DNA, 98 bp, Homo sapiens
tggaaaatgtatctgcaaagcaggctaccagcaaaaaggagacacttgtgaacgaagcatgagtgggaaaagcatgggacctgcgccgcccaggtgga

SEQ ID NO: 470942 - DNA, 75 bp, Homo sapiens
gcatcgtgggcgccggctcccagtttgggctgaccccgcactacatctacccaccagccatcgtgcagcccagcg

SEQ ID NO: 470943 - DNA, 75 bp, Homo sapiens
acttggttcaatgggtagcctcaccatgaaatcacagcttcagatcactgtggttgaaggcctttcactgttgga

SEQ ID NO: 470944 - DNA, 87 bp, Homo sapiens
ccgtgcggagaccactgttcaaggccacagtttgaagaaaacaggtctgaaacaaggtcttacccccagctgcttctgaacacagtg

SEQ ID NO: 470945 - DNA, 82 bp, Homo sapiens
cccccaccgccgccccctccggcgtgttcatgcccccggggtacactgaggaggggacggctccgtcttcacattgtgcaca

SEQ ID NO: 470946 - DNA, 73 bp, Homo sapiens
ttccatcatttcctgctaagccaaacagagaagatgcttgctctgtcaaggcacagcctattgtctcctttgc

SEQ ID NO: 470947 - DNA, 97 bp, Homo sapiens
tggagaagaggtggtgactttgctggaagatttggagagggagcttgatgaacctagacagcagtatgttggtgagagtgaacgtgctgtgcgacaa

SEQ ID NO: 470948 - DNA, 117 bp, Homo sapiens
agtggatgaacatgtgcttggtgtcgtttttccttgagctgaacgtcttgcaacagtggccgcacgcatagagtgtgaacatggctacgcctcttcattcccgtccatgccgagccc

SEQ ID NO: 470949 - DNA, 100 bp, Homo sapiens
gttctctaaaaaaactggctgtgaataatatagctggtattgaagaggaaatctcattggaattggaagcagcagtgcaagaaaaagaagaaatgaagag

SEQ ID NO: 470950 - DNA, 96 bp, Homo sapiens
cccgcctgagatggctggacacagcctagccagctcccacagaaactccagcctcctttcatgtactctgcccaacggttttgggggacaatctgg

SEQ ID NO: 470951 - DNA, 89 bp, Homo sapiens
ccccaatatctcaaagaattactaaaggacttgatgtgaatgaatgtgaactgctcagtggggtgtgtggtgaagccttctgtgaaaac

SEQ ID NO: 470952 - DNA, 82 bp, Homo sapiens
gggagatgggcctactcgcccgccaccctgcgctgccgccgctctgaggagttaaaggctttacaggaagtatggtgctggc

SEQ ID NO: 470953 - DNA, 50 bp, Homo sapiens
cgctcgcgccgggcccgtggccggaaaccaagtatctggagcaaacagaa

SEQ ID NO: 470954 - DNA, 100 bp, Homo sapiens
gcgtgagcagccggaggatcgcggagtcccaatgaaacgggcagccatggccctccacagcccgcaggtgtacgtgaacggagagtgggtgaccaacatc

SEQ ID NO: 470955 - DNA, 90 bp, Homo sapiens
gctccttcaagcccagcgagcatgtgatggctcatgaagcaatggaatatgatgttcaggtgcagttaaatcatgccgaacaacagccag

SEQ ID NO: 470956 - DNA, 100 bp, Homo sapiens
cagaaataccagtccccagtgagggtgtacaaatacccctttgaattaattatggctatggactcaccctgtcacccaggttggactgcactggcctcaa

SEQ ID NO: 470957 - DNA, 98 bp, Homo sapiens
gggccctcttcgacagctacacaaatctggaacgggtggccgattactgcgagaacaactacatacagaggtaccaatcttgggaaaaagaagcaaca

SEQ ID NO: 470958 - DNA, 89 bp, Homo sapiens
gcccccggaaaacctaaccatgaagacttgaacttaatacagcaagaaagaccatcaagtttaccagatggttcctacctggctgagtt

SEQ ID NO: 470959 - DNA, 96 bp, Homo sapiens
ccccgtgtttgctgcggcaaggacgagccggggcgctgaagtgggaagccttcagccttccagaactacagaatttcttgcgcatcttggacaagg

SEQ ID NO: 470960 - DNA, 88 bp, Homo sapiens
gtgatgaaagcacatggtacaggaagcggctcagccccagggcagcacatcagagacaccatggaacacagccattcctctgccgtcg

SEQ ID NO: 470961 - DNA, 98 bp, Homo sapiens
aaccctcagaagaatttaatggatatctgtactttgaactcaagtaaacaaaagggaagattttctcgttgatactggagactgcacaacaatggggc

SEQ ID NO: 470962 - DNA, 100 bp, Homo sapiens
gcccgcttcaaccccaggggaccagaggaactcagccctgattgcgatgtccggtctgtgctacgacagcaaaatgttccaggtgcatcaggtgctctgc

SEQ ID NO: 470963 - DNA, 73 bp, Homo sapiens
gtgtggtggaattccagttcatgctgcccacatctcatccaaacagaaaacgccaggtcttcaagggtgtctg

SEQ ID NO: 470964 - DNA, 89 bp, Homo sapiens
ttccaaagctgggaatcctattttttattatgttgcacggagccatcagtggcctatgtacataccacgccgggtctgccttcaggctg

SEQ ID NO: 470965 - DNA, 100 bp, Homo sapiens
ttgtcaaggtggcctaccaggaggccaggggtgtcgccatgcacgcttcctgggctgttacagtcaatggacttatcaacactgaaatgttatcctcctg

SEQ ID NO: 470966 - DNA, 100 bp, Homo sapiens
tcattgcagtctgagttgctcagctttattttggatcatgtcttcattgaacaggatgatgataataatagtgcaggtaccagcatcaagatgatttatg

SEQ ID NO: 470967 - DNA, 83 bp, Homo sapiens
gctacccgctctttgccgtgacaacaccgttcccccagccgggctgcattttgaaagcgaagcagaagccgtagaatcagcgg

SEQ ID NO: 470968 - DNA, 73 bp, Homo sapiens
ttacggagacatgctcttattgtacaggttttcctttggaatatggataaatacaccatgatacggaaactag

SEQ ID NO: 470969 - DNA, 100 bp, Homo sapiens
aaatcaagcctagtgcttcgttttgtgaaaggccaatttcatgaatttcaagagagtaccattggggtttctccttggaccaagatgactgatggaaaac

SEQ ID NO: 470970 - DNA, 100 bp, Homo sapiens
gcatgtgatcactctgggactcgtggggctgcagcaccggaacaagatcactcaaggtgaaggataatctactaataccagcactttgaatgaaaatttg

SEQ ID NO: 470971 - DNA, 82 bp, Homo sapiens
gcgcatgatggcctactgcgaccagatcttccaggacgagacgggcaagaaccgcatttgaagacatgctggagaacccact

SEQ ID NO: 470972 - DNA, 98 bp, Homo sapiens
tgggagctcattaggaccatggtggatcgggcagaggccaccgacgagagtgctggggaataaaaaggggatcttcactcggcagagacaaccaaaaa

SEQ ID NO: 470973 - DNA, 76 bp, Homo sapiens
tctgctgacattgggactactactgaggagttaaagttcctcgtaattttcgcttgttggaagaacttgaagaagg

SEQ ID NO: 470974 - DNA, 75 bp, Homo sapiens
cagcatttgccaaggagacatccctcttagactctggctcctcctcctcctcagaagatgaacgacccaagagat

SEQ ID NO: 470975 - DNA, 100 bp, Homo sapiens
agaaaagaaatggaagattggattgcagcattaaagactgtgcagaacagggagcactttgagaccttcccctcctccaatgagtcccgccaatgcccca

SEQ ID NO: 470976 - DNA, 82 bp, Homo sapiens
aggagtcggaggagccgcgggcggcgcggcccagctcgttccagaggtggtttgtgctccccctactgcctatatcgacttc

SEQ ID NO: 470977 - DNA, 96 bp, Homo sapiens
ctcgggcagcctcaacgagaactcggagggcaccggaggtaggactgcttgcattaaaggacttcctcatcctttttttcatgaaactgagcttgc

SEQ ID NO: 470978 - DNA, 100 bp, Homo sapiens
tccatcatcgtgtcattgcccatgaccagcgttggggatgccagcaggccgtggccatggatcatctgcagtcattcattgcagattgtgatcgtagaac

SEQ ID NO: 470979 - DNA, 96 bp, Homo sapiens
tgctcctgctgggcctcaaggaccgcgagattccactgtgtaaagtaattagattcaacatagactacacgattcatttcattgaagagatgatgc

SEQ ID NO: 470980 - DNA, 82 bp, Homo sapiens
agagacgctctgaactgactgccccgcatcaccggagcgtcccagctgcgaggaggactcgctcagcagcagcctgaaaact

SEQ ID NO: 470981 - DNA, 100 bp, Homo sapiens
tgaagaccacaataaaagagacctctacttagctcagcaattcttaccttgaacattttagtggacaaaccaaatgaccaatcttcaagatggtcttcag

SEQ ID NO: 470982 - DNA, 80 bp, Homo sapiens
taagtggcttcaaagagtgtaattggagttaagcaaaggcattcattgttaaccttggactcttgacgtttaggtatgtg

SEQ ID NO: 470983 - DNA, 83 bp, Homo sapiens
cctcggccttccgacgtgggcggtgggccccagccccacagaccagcccagcattcaggcataatcaccagcaacacccggga

SEQ ID NO: 470984 - DNA, 82 bp, Homo sapiens
cagaagtggaaggagcagaacgtgagggtgtaacttacaaaaagttggtgacaaagttcctgctgatataaggttaacttcc

SEQ ID NO: 470985 - DNA, 100 bp, Homo sapiens
aagatggccgcccccgtggatctagagctgaagaaggaatcatattgacaggtcatgaaaatgagaccaaaagatctctggaagcgattaatgataaaat

SEQ ID NO: 470986 - DNA, 107 bp, Homo sapiens
aagtttcccagaaaaaatgcccagcgcggcgcggggctgcggagtcgtccggagccgctgcgcggtgctggagaatctggtaaaagcaccattgtgaagcagatgag

SEQ ID NO: 470987 - DNA, 101 bp, Homo sapiens
cgcagagcaccaggcccaccgtgaaagctgggttaacaactttggccatgaaggtcttggactcttattggatgagctggaaaagcttctggacaaaaaac

SEQ ID NO: 470988 - DNA, 100 bp, Homo sapiens
gacccaagcccgctgagcaggatgaggttggatatgtcaagtgaccagatagctgccaatctgcaagcagttattaatgaagtttgtaggcacagaccgc

SEQ ID NO: 470989 - DNA, 100 bp, Homo sapiens
gcgcgctcttcgcccttctgcagcagccgctgtttctggccatgatgggtcctctccagggagaccctctgtggcaaagtacccacgtttgttcgaatgc

SEQ ID NO: 470990 - DNA, 82 bp, Homo sapiens
gaaaacaaaagaccaacccttgagggaagagaattatctctaagggatgtgacagatgatgaatcctttgttgatgaactga

SEQ ID NO: 470991 - DNA, 90 bp, Homo sapiens
acccagtcccacttcaaacattcgtctcggaaaccccgcctcttacagtcacgagtttcatcaagaccaacttctcctgaaaaattttca

SEQ ID NO: 470992 - DNA, 75 bp, Homo sapiens
ctgaaatagaagatcttgcaagggaggcaagtgaggcctatctggttggcctttttgaagacaccaacctgtgtg

SEQ ID NO: 470993 - DNA, 99 bp, Homo sapiens
aatccctttgagtttccaagtcaggatatgtgcctttcagctttaaagagaattgaagccggagaattttcatccttgggccttctcatcatgtgcccc

SEQ ID NO: 470994 - DNA, 109 bp, Homo sapiens
gcgggcagaggatgcagtggaggccatcaggggccttgataacacagagtttcaagctgatcttgcatctttaatggataaaacatttgagagaaagttgcctgttagt

SEQ ID NO: 470995 - DNA, 76 bp, Homo sapiens
tgatgatgatatcattatgctgacctctgacgagctgcaatttggttatgagcttgacctcagagatgatgtggtg

SEQ ID NO: 470996 - DNA, 100 bp, Homo sapiens
atcagacagaacagttaatcctcaatttaagcctgatctaacccctagaaacagtcagatgagtgagcctcatagcggtttgacgctcaaatgtgccaag

SEQ ID NO: 470997 - DNA, 100 bp, Homo sapiens
agcaaactgggaagaggaccctcaccaggaaccacatctgccagcaccttgatcttgaacttctcagcctccagaacgttaatatgatcctctgttgaag

SEQ ID NO: 470998 - DNA, 80 bp, Homo sapiens
acggaaacaaagttattttgctcgattttgaagatgatgatctctacggccagtctgtagaggatgattattgtatttcg

SEQ ID NO: 470999 - DNA, 100 bp, Homo sapiens
ggaactgaaacatgaaaacatcgtggccctgtacgacttccagactgcaataaggtcactgatcagtgcctgtccttcttcaaacgctgtggaaacatct

SEQ ID NO: 471000 - DNA, 75 bp, Homo sapiens
tatctgtgtcgttcttggcagaaattatattttccagcccgtgtctgcagctgtcggaaaaggtaacagaagatg

SEQ ID NO: 471001 - DNA, 100 bp, Homo sapiens
gcgatggcggatttagataaactcaacatcgacagcattatccaacggctgctggaagaccctggtgggcagcagtgggaccattctgaccacaatgcct

SEQ ID NO: 471002 - DNA, 100 bp, Homo sapiens
ggggcggccctacgtagcctggcttctggccccgaggtactgaagagtgagccgtatggggagaaggctgatgtctgggcagtaggctgcatcctttatc

SEQ ID NO: 471003 - DNA, 122 bp, Homo sapiens
gaaagaagggaatgagtttaagatgatgcctaacaggagaaatatgtatacagtacagaataattcaggtccctgattaccctccaaactatattttattccttaataacttaccagaagag

SEQ ID NO: 471004 - DNA, 74 bp, Homo sapiens
gaaattgcctcttctacatacctcatggccgcgatgggcctcttggaacattggtgtgttcatctgcattcgat

SEQ ID NO: 471005 - DNA, 101 bp, Homo sapiens
gccgccttggacctcctgggaggcgaggacggtctctgccagtataaatgcagtgacggaaacttggatttaactggccagaagcaggtattcaaagcaga

SEQ ID NO: 471006 - DNA, 100 bp, Homo sapiens
ctgggccagaggcagaaaacggacggaagaaaaggtctggccgctggaaactgacaaactagctctcccgatgagccccagcccgcttagcccgagcccc

SEQ ID NO: 471007 - DNA, 83 bp, Homo sapiens
cggcgctctcctggctcccttctgccccagctccgtctcggcggcggcggtctttcccagggaactccgatgaagtgttccaa

SEQ ID NO: 471008 - DNA, 50 bp, Homo sapiens
cgctgaagaggaatcaattttggcaagtgaaccggagcaaacgacttccg

SEQ ID NO: 471009 - DNA, 82 bp, Homo sapiens
gaggaggtcatgaaggacctgagcctgacgcgggccgcgcggggccatgttcaccggcggcatgcgggaggcaagccaggac

SEQ ID NO: 471010 - DNA, 82 bp, Homo sapiens
ccagctccccttcggttgtgcctgttgccagggaccagctggaactggacaggctgaaagtcatccatgcctggcttattat

SEQ ID NO: 471011 - DNA, 100 bp, Homo sapiens
ctgactgcacttcttttttgagaaaggaaggaatatatcctgactgattgattgacttctaaggactcttggtacatgaggaagaaacccggaaggggaa

SEQ ID NO: 471012 - DNA, 74 bp, Homo sapiens
cctgatccatggcaacgggccaaccaaggtggtctgtttttctggggggccaccaacacctcccgtgaatctac

SEQ ID NO: 471013 - DNA, 87 bp, Homo sapiens
cttcggaatgcactacaacaggaaaatcatattatagatggagtaaaggtgtttgtggagcggtccaacctgggcctggtacagcgg

SEQ ID NO: 471014 - DNA, 130 bp, Homo sapiens
caaaaaaaaagaagcctctcactttcagtccaagctaattacacctcctcctccaccaccctcaccagaaagtttttcagaagaagtgaagtcaagatgaagaaccatttgcttttctggggagtcctgg

SEQ ID NO: 471015 - DNA, 73 bp, Homo sapiens
gtcgctcttgtgccctagcaccccgagaaccgtcagtttgagccagatgcataaagatagggaggtggtgatg

SEQ ID NO: 471016 - DNA, 82 bp, Homo sapiens
aaagctgccaagttgaaaatggacgagtaatcgcctgctttgattcattgaaaatcaagggtaaaattccattctgatatca

SEQ ID NO: 471017 - DNA, 98 bp, Homo sapiens
tatatctgtaaagggtatctgatcaagccaacaacagtgacggaatgcctccatacattgtcttccaaggtccatgaggatgcacacttatttatcca

SEQ ID NO: 471018 - DNA, 100 bp, Homo sapiens
cgtgcttgacctatgtgcagctcctgggggaaagacactagcgttgcttcagactggctgttgccgtaaaagcagctgttaagtatgcccttagcgtagg

SEQ ID NO: 471019 - DNA, 82 bp, Homo sapiens
acgaagccacccccaccctcaccaaatcctgaggaggatgaaggggctggccctggaggccgagagtgagctggagagacaa

SEQ ID NO: 471020 - DNA, 100 bp, Homo sapiens
ggaacacagtgaatgtctctagtcgtatggacagcacgggggtccccgaccgaatccaggaccagctgtactggcgctacgatgaccacacgaggcacat

SEQ ID NO: 471021 - DNA, 87 bp, Homo sapiens
cagcagtgtttctcgggttggaaaagccattgataagcggtcttgcgagtggctggttccctgcagaagagcacagaagtgatgaag

SEQ ID NO: 471022 - DNA, 74 bp, Homo sapiens
ataaactccaacacgatcccggggctcaagtggcttaacaagtttgtgaagtgtggatatgcaggctctaactt

SEQ ID NO: 471023 - DNA, 75 bp, Homo sapiens
gggaagtcggggtctccttcgccttctgtctttctgcgtcctactagcaggctactgcagcactggggtgtcagt

SEQ ID NO: 471024 - DNA, 51 bp, Homo sapiens
gttgaacttctcgttcagttggcaaggtcttgtccagaatgccgtgtgata

SEQ ID NO: 471025 - DNA, 75 bp, Homo sapiens
tttgtcagatgtgttgaacctcgattaagattctcttcaaaggaatctaaagacagcaagacatcatctaaagat

SEQ ID NO: 471026 - DNA, 98 bp, Homo sapiens
aggctgttcttcaggacatcaaccgaaagggcggcaccaatgggggaatctcagtctttgaggagattttaatctcacatgcaaattcagtggcttag

SEQ ID NO: 471027 - DNA, 83 bp, Homo sapiens
ccgttctctcaggctcccgttcaggtgaaaggtgtagcagtcactcggcctacacccacagcatcgaccttgtgaacccagcg

SEQ ID NO: 471028 - DNA, 75 bp, Homo sapiens
gaagaaaactttattgatctcaacgttttaaaggcccagacatatcacttgttactccacaggatccgctgaaca

SEQ ID NO: 471029 - DNA, 87 bp, Homo sapiens
agggtggaacgcgggcgcctgaaggagttgttgtctcggcagcgcccgcggagacgtgaagagctgcggttggatttctcacgatgt

SEQ ID NO: 471030 - DNA, 74 bp, Homo sapiens
acagaaaatgacatccagaagttccccaagctccgggtgccaccacaattagtcctctggagaatgccatagaa

SEQ ID NO: 471031 - DNA, 102 bp, Homo sapiens
catgtcgggttattcgagtgaccgagaccgcggccgggaccgaggcttcgagagctgtgcccaggagtgaacaaccagccctacctctgtgagagtggtcac

SEQ ID NO: 471032 - DNA, 96 bp, Homo sapiens
cttcagaatcgatggagtccaacatatgatgtatcttctatcttaacatcaattcagccaatggagatcttcgtggatgatgagacgaagttgacg

SEQ ID NO: 471033 - DNA, 100 bp, Homo sapiens
agcagttatactacgtatatgaaagaggaagtggataggaagattaaatgatgaagggccatttctgattctttgtcccttgtctgttttgagcaactgg

SEQ ID NO: 471034 - DNA, 50 bp, Homo sapiens
gggagcatggcagccaacgtctcggcaactgaccaaccacatccgggagt

SEQ ID NO: 471035 - DNA, 82 bp, Homo sapiens
acgcttcttctggaagaccagccaacagacatatctgaagagatggattaagaatgctttggattaaggattgtggagcaca

SEQ ID NO: 471036 - DNA, 74 bp, Homo sapiens
tccccctgccccgttcacaatgttgaaaggattgttgacaaaaggaaaaataaaaaagggaagacagagtattt

SEQ ID NO: 471037 - DNA, 78 bp, Homo sapiens
tgggtgcccgtggaccacaggccctcgttgcccagatgctgaaggggatgctaagggagataaagcaaaggtgaagga

SEQ ID NO: 471038 - DNA, 88 bp, Homo sapiens
gcggcggcggcagtgacgtcgccggaaatccccggcttcctgactgatgaagagtgtcggctcatcatccatctggcgcagatgaagg

SEQ ID NO: 471039 - DNA, 83 bp, Homo sapiens
ggaaccggatatttaagtacaatggtgggcttaattttagcaagatgagaagatgaagtgaatttatggattctggtttttct

SEQ ID NO: 471040 - DNA, 115 bp, Homo sapiens
ctcggatcgaatccctcacgcgggcgcggatcgaccggagcagagagctggcgagcaagatgccatggacaatattaccaggcagaaccaattctacgatacccaagtcatcaaa

SEQ ID NO: 471041 - DNA, 74 bp, Homo sapiens
agcaagtggagaagctgcaggcccaggtcaccctgtcaaatgcccaggatgctataaaatcaccacggtcttta

SEQ ID NO: 471042 - DNA, 108 bp, Homo sapiens
ggcggttgaggctgggcggcccaaggtggaaggaggggccgtgaggctgagaagaaagccaaggtcattgcaggaatgaatgctgtggaagaaaaccaggggcccggg

SEQ ID NO: 471043 - DNA, 100 bp, Homo sapiens
aaatttccaactcctcagagttttctgctaaggagaacaagatcaggatcctcatgaccagccaaagagaagaagaattaggaagcataaatcaaagaaa

SEQ ID NO: 471044 - DNA, 98 bp, Homo sapiens
tggccgcggctactacctggagatgctgatcgggacccccccgcagaagaacatctgttgggccacttagaacaagccaaaagccttcctccaggcag

SEQ ID NO: 471045 - DNA, 100 bp, Homo sapiens
aatgaatgtacacacctcattgtgcaagaaccaaaaggtgaattcatcattggccgagttatcaaagccatgaataacagctggcatccggagtgcttcc

SEQ ID NO: 471046 - DNA, 83 bp, Homo sapiens
gtcgcgtgtctaggtgagtcgcggtgggtcctcgcttgcagttcagcgaccacgacatgaagagtatttctggagaagaatca

SEQ ID NO: 471047 - DNA, 83 bp, Homo sapiens
cggccgaggacggggacagcgacgacgcggaggcagagaagggaacgcccggcccagccccgcgaggattaaatccaccacac

SEQ ID NO: 471048 - DNA, 82 bp, Homo sapiens
acaccccccgccgcagcagcaccggcgacagagctgccatcagtcatgctcttaaacggggactgcccagagagcctgaaga

SEQ ID NO: 471049 - DNA, 74 bp, Homo sapiens
ttagctcagcaattcttaccttgcgatgcaaaaactttctggatggagctagaagatgatggaaaagtggactt

SEQ ID NO: 471050 - DNA, 100 bp, Homo sapiens
gcccattatttcacagaggacagctcctcagaagcctcaccttctccctgcatcacagagagaagcaagcagaaggcccggaggagaacaagatccagct

SEQ ID NO: 471051 - DNA, 75 bp, Homo sapiens
gtatattcactctgaactgagagattcgcttcaagctcagcttatcaatatgggtgttattcctaccttagtgaa

SEQ ID NO: 471052 - DNA, 100 bp, Homo sapiens
actgcagaaaccacttcacctcatcccagccatgatggaagttcatttaagtcaccagacacagttcagtgtctgtggtcagatatcaatcattcgcttc

SEQ ID NO: 471053 - DNA, 51 bp, Homo sapiens
gtcctcgcggacgtcagccaaggttatatatgccgcaattttacagggtct

SEQ ID NO: 471054 - DNA, 82 bp, Homo sapiens
cctgggaagccaacgaccacacgcagattatatctgtccaagatgcgagtctggttttatcgaggagcttccggaagagacc

SEQ ID NO: 471055 - DNA, 90 bp, Homo sapiens
cactggaatgaaatctattactttgtggaacagttggctcacaaattcatcagtaatatatttggtctgcggcctgtcgattatacagat

SEQ ID NO: 471056 - DNA, 51 bp, Homo sapiens
caccaccggatcaacttcgacaaatacgggtccatatggaatatttgctgg

SEQ ID NO: 471057 - DNA, 101 bp, Homo sapiens
gctgtatgcactacctcctcctccccagttctactcaagccttattgaagagataggaactcttggttgggataatggtgcttcatgccccacctccaacc

SEQ ID NO: 471058 - DNA, 74 bp, Homo sapiens
ttgataacaccctgtaacagctgaatttctctatgaatcatcatcaagaactctgggagaacttttgaattcat

SEQ ID NO: 471059 - DNA, 71 bp, Homo sapiens
ggagaaatccttcgcaatgtcaccatcctacgagagagtttcattctgtcgcccaggctggagtgcaatgg

SEQ ID NO: 471060 - DNA, 85 bp, Homo sapiens
gggagatcgtgggcgagctgggcgacggcgccttcggcaaggtttacaaggaggatacgaagcgttttcggcttcctgcccggag

SEQ ID NO: 471061 - DNA, 100 bp, Homo sapiens
cgccgctgggcctgtccgctggcgtcatgcctcccgtcctcacggaagtcatctgtagctttgcccaggaggccacgcactgtgtaatccttcaaggaca

SEQ ID NO: 471062 - DNA, 102 bp, Homo sapiens
gcttcagacagcatatttgagtcatttccttcgtacccacagtgcttcatgagagccagagactgctgctactttgaaacgtacgatagaggccctgatgga

SEQ ID NO: 471063 - DNA, 82 bp, Homo sapiens
gtctggagtgcgtgggggaccggctgttggcgggttgcacttcccccagctggccctgaggcggaggctggggcagctgagc

SEQ ID NO: 471064 - DNA, 98 bp, Homo sapiens
aatttcagctactgcaagctcagtaccacaggttccacttccaaacatgagttccaggccgagacaaagaagcttttggacattgttgcccggtccct

SEQ ID NO: 471065 - DNA, 100 bp, Homo sapiens
tgctccttccgataccattacccgtgtgccattgatgcagagggattgagctctctttgctctgatgagccatcttcagaaattatgacttcttcctttc

SEQ ID NO: 471066 - DNA, 96 bp, Homo sapiens
gttggttctctttgtcattttcaacagtctgcagatccataatgagatggcatcaacatcagataaaggtgcccaaggaagaaatgacaagaaaga

SEQ ID NO: 471067 - DNA, 101 bp, Homo sapiens
ccacctggcggccatcgtcatcctgctgctgaagatctggaagacgcgctcctgcgccgcggtcccagtctccagctgcctctgactgctcatcctcatcc

SEQ ID NO: 471068 - DNA, 90 bp, Homo sapiens
cccgaccaccggagaattcctggggcgcaccgccaagagctgggtgccggtggtggtgtgcacattgagccccggtatagacagttcccc

SEQ ID NO: 471069 - DNA, 98 bp, Homo sapiens
gtgagggtgatgttcgggaggaggccttgtccacaggtactccaaagattcaggtttactcacgtcatccagcagagaatggaaagtcaaatttcctg

SEQ ID NO: 471070 - DNA, 90 bp, Homo sapiens
ttttgaatgtatgtttacaaacaaaaccttcactcttgagaaggggctgatagggaaatcctcattgacgattcaatttgttgaaggcca

SEQ ID NO: 471071 - DNA, 75 bp, Homo sapiens
atcgacatcaagtcggccggggatttaggttaatttggagtggcccctggagtcagtttcctacaccatccgagg

SEQ ID NO: 471072 - DNA, 75 bp, Homo sapiens
agaagcaagaaggccctggacacagcaatatctctgggctttcacagataccctgtgtaacgaactcgaccagga

SEQ ID NO: 471073 - DNA, 110 bp, Homo sapiens
gatgggtggaagagagcaacgccagagcccaggtgcccagaggactttcttccagcttctgctgtccttctttgtggagagcaagaaagtgagtgagaaggttggaggag

SEQ ID NO: 471074 - DNA, 83 bp, Homo sapiens
cttcacctgcagaagcgtgtcgttctgcaccagcgccttgatcgagtacttgagctcccggagccctgcctgttccctgtcca

SEQ ID NO: 471075 - DNA, 98 bp, Homo sapiens
tcttgttgtttgttgatggagggtggatggtggatgttagagaggctgaggccaccatggagcagtgtgcgtgcgtggagagagagctggacaaggtc

SEQ ID NO: 471076 - DNA, 75 bp, Homo sapiens
ctctgtttggggagacgtccgccaagggcctgctttcttccccgggcgatgtgcagagatctttgccaggggtca

SEQ ID NO: 471077 - DNA, 100 bp, Homo sapiens
gaacatcgacatcgccagcatcgacatggtttccgaagtcaacatgtttcttaaacaattaggtctacatcctaactggcaattcgttgatgtatatgga

SEQ ID NO: 471078 - DNA, 83 bp, Homo sapiens
gggcgccatggcgaccggagcgaacgccacgccgttgggtggtctttgggaagaagcttcctgcctttgccaccatccccatc

SEQ ID NO: 471079 - DNA, 90 bp, Homo sapiens
tcggtggcaggagggccggcggagcgccatggcctgcatcctgaaggcttcaacggaccacaccaaaatgccatctcaaatggaacacgc

SEQ ID NO: 471080 - DNA, 75 bp, Homo sapiens
tcgccgccgtcagagccgccctatcaggtcatgcaagacaagataatctgccttccgaaaagagtgcagcctgct

SEQ ID NO: 471081 - DNA, 75 bp, Homo sapiens
ggacactgtacagggacgtgatgctggagaactgcaggaacctggcctcactggacggagtctcactctgttgcc

SEQ ID NO: 471082 - DNA, 75 bp, Homo sapiens
ggaactcaatggaacacaggctggaatggaccaggctggtagatgaggcaggtggaagtcatcataaagtttctg

SEQ ID NO: 471083 - DNA, 100 bp, Homo sapiens
ttcccgcgtccgccgattcctcctccttggtcgccgcgtccttggctggcgttgtttacaggcattggagtttttacatgctaatcaagtgatccacaga

SEQ ID NO: 471084 - DNA, 53 bp, Homo sapiens
gaggccgaggcgggcagatcacaaggtcaggagatcaagaccaccctggctaa

SEQ ID NO: 471085 - DNA, 100 bp, Homo sapiens
gggagatggaggaaaaggagatattacggcggcagatccgcctactgcagggaaaagtggaagctcagcacatactggccagtgcaccaacagacaggaa

SEQ ID NO: 471086 - DNA, 83 bp, Homo sapiens
gcctctcgctaccaccgccgacggtcttcagggtcacgagatgagcgctatcggtcagatgccagagacgcggaacaattgag

SEQ ID NO: 471087 - DNA, 100 bp, Homo sapiens
agcatggacctgtcagcaactaaggaacaaaagtaatgaagatttacacaaactttgaaatgattctggggaccattctgaccacatgcattactatcag

SEQ ID NO: 471088 - DNA, 75 bp, Homo sapiens
atcattgcttcaagaatgctgacccttgtagaaacttaattcagtgcacaaatgagatgaatgtgaacatcccac

SEQ ID NO: 471089 - DNA, 90 bp, Homo sapiens
gaggaagacttggatcttttcatgaactcctgctggagccacccaaggaggcaagtgaggcctatctggttggcctttttgaagacacca

SEQ ID NO: 471090 - DNA, 100 bp, Homo sapiens
cggagaccccgaaaacggaagcgcagggagaaggaagaggtgtttgaaaagaattcctagaggacctgtgcaacaacctcttgaggatcgaatcttcact

SEQ ID NO: 471091 - DNA, 51 bp, Homo sapiens
aacaggcggagggtcggcgtaggagttccgattctgaagaggcatttgaga

SEQ ID NO: 471092 - DNA, 96 bp, Homo sapiens
acggaaactctcaagcacctgcaggacatcaacatcgccacccctgttcacaacatgctgccaggtaagaatgattgatgttggctgatattggag

SEQ ID NO: 471093 - DNA, 50 bp, Homo sapiens
gatgacaatgcacaatggcatgatctttggaattagacactccttcacag

SEQ ID NO: 471094 - DNA, 80 bp, Homo sapiens
caaaactgttcggacttccccgttagaactcgcgtttccacttcagagatctgaaaccaaggacgccaagccatacaaat

SEQ ID NO: 471095 - DNA, 82 bp, Homo sapiens
tcgttgcttgcttgcctgtgcgcgcgtgcgcggacatggcctcaaacgtccagaatgacagggtccagaaactggcgagcca

SEQ ID NO: 471096 - DNA, 50 bp, Homo sapiens
agaaaggcagcgaggtggagagcggaaattgatggaaaatccctgctatt

SEQ ID NO: 471097 - DNA, 75 bp, Homo sapiens
tgtcacacattacctgtatctttgccagtttagctggatgctcattcaggaggacaatgcaataattgaaatttc

SEQ ID NO: 471098 - DNA, 101 bp, Homo sapiens
agctgtgctcgcgctactctctctttctggcctggaggctatccagcctcggagcccaagatcctcttctcctacaaatgccaagtggacgagacagagga

SEQ ID NO: 471099 - DNA, 97 bp, Homo sapiens
gaaatggcacctatggacaagtctataagaaggactccatgaaagatgacagaagaagttattgtgatagccaagtgggactacaccgcccagcagg

SEQ ID NO: 471100 - DNA, 127 bp, Homo sapiens
ccgtggccttcgcgtctgcccggccaagaggcaaaggggaggttacgcagcaaaccatccagaaggctactgcagcactggggtgtcagttgttggtccgacccagaacgcttcagttctgctctgc

SEQ ID NO: 471101 - DNA, 51 bp, Homo sapiens
ctcctgagtagctgggattgcaggccacagccacctcttcttgctgcaaag

SEQ ID NO: 471102 - DNA, 100 bp, Homo sapiens
ccctgttgtacatccactggacctaaaatatgaccctgatccagatcaaatggggagcctgcggccttgtgttggcaggcaatgcagtcattttccttac

SEQ ID NO: 471103 - DNA, 76 bp, Homo sapiens
ctgttccgcaggaggagaaatgatcgaagaactcacgtgctgtgtgtcagactgagctttccctgattcattctac

SEQ ID NO: 471104 - DNA, 115 bp, Homo sapiens
cgccatcctgcaccgccaccggcccgacctcataaaccagcctggacaccaagtctgtgtcagaaggccacctcaagaggaacatcgtggtgaagaccgtggagatgcgggatgg

SEQ ID NO: 471105 - DNA, 82 bp, Homo sapiens
aatagagctgccagaggttccctccgagccccttcctgagaagatcccaggtgccagaaccctgtggagcatcatgaactgg

SEQ ID NO: 471106 - DNA, 95 bp, Homo sapiens
gcgcggctgcgacggcccaggagcgcgtctcggcgggagcctcagatggtgttatggtccagattactgcagagaacatggattccttgaggcag

SEQ ID NO: 471107 - DNA, 100 bp, Homo sapiens
ctttgacagcctcctgacctgtaggacgagggattccttgttcttctgcctgaaggtggaattgcgtttgttgccataaaaggagcatttaaagtttact

SEQ ID NO: 471108 - DNA, 75 bp, Homo sapiens
ctggtgaaaagcttctccgagagacaacatgccaatttggctggcacgctgagcggccatgcctcctgggtgctg

SEQ ID NO: 471109 - DNA, 74 bp, Homo sapiens
ttcaaacagtgtcaatacaaagatactctccccaagcccaagtatattcacaacttgctaaaagcagttgagat

SEQ ID NO: 471110 - DNA, 100 bp, Homo sapiens
atcttgactgccatccttgcctcgctcactgcacgccagaacctgaggagagaatggcatgccagggccggtgcataaacttctcccgagttccatctca

SEQ ID NO: 471111 - DNA, 74 bp, Homo sapiens
ccgggacctggcactcgccgatgaggccagcaggtgtgccgggagcagtttgtccgcttgcacagcgagcccat

SEQ ID NO: 471112 - DNA, 81 bp, Homo sapiens
tgcacccagaggccggggaccttgccaaccctcccaagaagttcagagagctttttagatgaggaatttcctcactatgat

SEQ ID NO: 471113 - DNA, 75 bp, Homo sapiens
aggcccagatgcgcgcgatgctggaccagttgatgggcacctcccgggacggatattgggagtgtgtggcatgca

SEQ ID NO: 471114 - DNA, 75 bp, Homo sapiens
cgagaccatcctggccaatatgtcatgttgtcataggaacaactggagaagaataaagtggacacgaaaagggag

SEQ ID NO: 471115 - DNA, 100 bp, Homo sapiens
tgcggggtgcgccggcagaggatccagtgttcaccatcctggccccggaaggcctcacactccccgacttgcccgagcagttctccccacctgatgtggc

SEQ ID NO: 471116 - DNA, 105 bp, Homo sapiens
ccacttggaacagtttatagagaacttcagaaactttcaaagtttgatgagcagagaactgctactgtcgacaaagatgctgaattagtggcccaatggaactat

SEQ ID NO: 471117 - DNA, 100 bp, Homo sapiens
ctgcactggccatccagcaactggctgagggactcacagctgatgacctgctgctcgtgctgatctcaggttcatgggcgggggtggtgagagctgcagc

SEQ ID NO: 471118 - DNA, 50 bp, Homo sapiens
cacaagaaaccattccaaatagtgggaagttaagatatgccaacaacagc

SEQ ID NO: 471119 - DNA, 100 bp, Homo sapiens
aaagtatcagccgtcctatgataccacaatcctcacagaggatgcttatagaattttatgagtcaccagatccagaaagaagaaaaagatttcctgggaa

SEQ ID NO: 471120 - DNA, 50 bp, Homo sapiens
gactgcacacaatatcttgaaagggtctattgacattcagggatgtggcc

SEQ ID NO: 471121 - DNA, 75 bp, Homo sapiens
ccccagcgacacccgaggggctacacagtatataaggtcaccgcccgggaattagcttaccgaaaggagatggtg

SEQ ID NO: 471122 - DNA, 74 bp, Homo sapiens
cttgctgctcccgcccatctaattggctttggtctagtgtggacgaatgtggaacctcgctctgtggctgtgtt

SEQ ID NO: 471123 - DNA, 82 bp, Homo sapiens
gcgacaccgcggctctggatgccttctacaacgcgggttgtggcagcactgcctgaaggtatgagaccagattctaatcttt

SEQ ID NO: 471124 - DNA, 100 bp, Homo sapiens
ccacaaaaacagagagtaaatatagtaaaaggcaatgagaaccccagaaacagaaagcagctacaacctgattgtcctgggtcacataatgccagctgag

SEQ ID NO: 471125 - DNA, 96 bp, Homo sapiens
accctgtatatccaaggaagtcatgtgccagttaggtttacatcaaaagggagaagagacttgctaagaaatactatgataaattatttaaggaat

SEQ ID NO: 471126 - DNA, 121 bp, Homo sapiens
ccagacccggcgaccatccagcagaagagcgatgccaagtggagggaggttaccccaaaggccaccccgaagcagggagctttgaggctgacctgaagcacttgaaggagaaggtgtctgc

SEQ ID NO: 471127 - DNA, 82 bp, Homo sapiens
atttgccctatgggatgagaacatcagggaccttgctgcaagaaactgcctggtaggtgaaaataatgttctgaaaatcagt

SEQ ID NO: 471128 - DNA, 145 bp, Homo sapiens
gcacgccagctggtagaaattgcagccagggatattgagaaacttctgagcaacagatctaaagccctggtggggatgtatggcattgagaatgaagtcttcctgagccttccatgtatcctcaatgcccggggattaaccagcg

SEQ ID NO: 471129 - DNA, 100 bp, Homo sapiens
acgtggaggagctcaaggggatgtcgctgctggttcgggcagagtccgacgtgcatccactctgggagagcgtggacctggttcctgggggcgatcgcca

SEQ ID NO: 471130 - DNA, 80 bp, Homo sapiens
tgcatatcagagatattacagtttacaggctgactactggaaggtcagcccaaggccaaccccactgtcactctgttccc

SEQ ID NO: 471131 - DNA, 100 bp, Homo sapiens
acctgtgacttaccagggaaacttatacaggccgcttttgagaggacaagcccagattccaaaacttatgtcaagctgccgcgggcggacacgccagagg

SEQ ID NO: 471132 - DNA, 75 bp, Homo sapiens
agctctccaagttcagcatccccaagcagggggaggcagcggaggaggagaaagagatggacctcccggactcgg

SEQ ID NO: 471133 - DNA, 88 bp, Homo sapiens
catgatgaacctgttttctccgtgaccacaatattaaccaggatgaatggcgattctgtttctggcgtctgcatacgcaagtccccaa

SEQ ID NO: 471134 - DNA, 75 bp, Homo sapiens
atgagaacctcatttctcttccaagttgtgtgctgctcatctccctactgaatcagatgcaccaaatcattatca

SEQ ID NO: 471135 - DNA, 83 bp, Homo sapiens
cgcagttccgacaaaggtcgcctttgctactaccgcgactggctgctgcggcgcgaggctcacagaacatttcctgcctgttg

SEQ ID NO: 471136 - DNA, 89 bp, Homo sapiens
gcaaatgaacctacacacttcacggtggactgtactgaggctggggaagatggtcagtaggacagaaggtaacattgatgactcgctca

SEQ ID NO: 471137 - DNA, 80 bp, Homo sapiens
gctttgtgatcgaaaccctgaccggatcccataaacactgtcgtgtattggaacaacacaaactaacaaaagaacagtgg

SEQ ID NO: 471138 - DNA, 98 bp, Homo sapiens
ttgaagagtctggaagcagaaatccttcaattgcaggaggttcaaaccttgtactactcagctgatcacaagctgcttgatgggaacctactagatgg

SEQ ID NO: 471139 - DNA, 100 bp, Homo sapiens
ccgggctgccccgcaggatcatcaaggtaaaatttggtaataccacctttaaaacagatgtgtaccttaagtcactcaaccctcagtggaactcggagtg

SEQ ID NO: 471140 - DNA, 90 bp, Homo sapiens
aagaagaaaacaagggaggagaagacaagctaaaaatgattcgggaatatcggcaaatggcgccatggctgcggagcggacccggccgct

SEQ ID NO: 471141 - DNA, 100 bp, Homo sapiens
ttgcaccggggtgggcgcaagccagtttctgtggccatcagtctggaaggcgtgcacgtcatcgatagcagagagaagattcttctgatgtagagcgact

SEQ ID NO: 471142 - DNA, 51 bp, Homo sapiens
gcgtcggacctgcacgagctgtctgataaggatgacattcggctgctgccg

SEQ ID NO: 471143 - DNA, 100 bp, Homo sapiens
gtttgcaaacaaattattgacggtcaaggtatttcatgccgaggttctgaaaatattgtgcacagggcaggctgaggacacagccacgtgatacccactg

SEQ ID NO: 471144 - DNA, 82 bp, Homo sapiens
ggagggacacgctggtctgaggatggacgcaggagcgcactcccccggctccctctctggttgggattgccctgaagccctt

SEQ ID NO: 471145 - DNA, 97 bp, Homo sapiens
gtgctgcctgcattcgcggggcatgttcccgaggctgtcaccagcgagcagctgatgcagctgtacagtgcgcgccagcggcggcggctgaaccggg

SEQ ID NO: 471146 - DNA, 100 bp, Homo sapiens
ccatggctccctgcagtaccctttaacgatattgaagcacagattcgagaaattcaaggcaagaaggcagctcttgatgaagctcaaggagtgggcctcg

SEQ ID NO: 471147 - DNA, 75 bp, Homo sapiens
ggaaaatggaatctgaaccctcagcagttttataccatgttccggaaacagtgcttcttagtcctacgtcagcag

SEQ ID NO: 471148 - DNA, 100 bp, Homo sapiens
ctggccagctcaaccgcttcgtgcaactctccgggcggccgcacctgccagggaaagcaggcaggatgggagagtcgccgatagaaccacctcttccctg

SEQ ID NO: 471149 - DNA, 75 bp, Homo sapiens
gtttgcgagcgggagcgaggggcgccggctggggtgtgtgctcctgtgagcatgtttttgaacacattaacaccg

SEQ ID NO: 471150 - DNA, 75 bp, Homo sapiens
cagcaaccggcctgccttcatgccctctgagggcaggatggtctcggtggaagatctcaccgccagccatgatgc

SEQ ID NO: 471151 - DNA, 82 bp, Homo sapiens
ggctgttgtgaggactaagggtgcggcagtgcctggtacatggaggcaagtgaggcctatctggttggcctttttgaagaca

SEQ ID NO: 471152 - DNA, 75 bp, Homo sapiens
tgcggacggtggcgggcgagcggctcctctgccagaggtaaaatgtcggttccaggaccttaccaggcggccact

SEQ ID NO: 471153 - DNA, 100 bp, Homo sapiens
cagctggtgggtgtacacactgctgtttaccttggcgaggcctttcaccaagtccatggtgaaagtgggagatacattggatcttctcattggagaggat

SEQ ID NO: 471154 - DNA, 115 bp, Homo sapiens
agcctgcaggacggcgcggcagagtccccgtacgcctacagtaacgggactttgaacatgtcggggatcgccctcagcagactcgcccaggagaggaaagcatggaggaaagacc

SEQ ID NO: 471155 - DNA, 82 bp, Homo sapiens
ggagatcccgctggtgaccctgccgctggcgagcgccaccgcatgggtgtcgtgaaaactacccctaaaagccaaaatggga

SEQ ID NO: 471156 - DNA, 88 bp, Homo sapiens
cgcgaggcaggagagaggaggaggagtgcggcgcggcggccccgggaccaaggaggaggatgctggtggtggaggtggcgaacggccg

SEQ ID NO: 471157 - DNA, 51 bp, Homo sapiens
agcactctcaggaacctggcaacaggtattgttgcagcatctggcagtgag

SEQ ID NO: 471158 - DNA, 100 bp, Homo sapiens
agcttcattcagatgtggtggaatatgccaaggaaaaactggagagcttcatcaaaaatagtgatagctttgataagaatgaatctgaagtctgctgcag

SEQ ID NO: 471159 - DNA, 100 bp, Homo sapiens
catcaccaacatcgagatgattgacgacggctggtggcgcggggtgtgcaagggccggttctacgcggccgagatctgcatcgccctcaacttcctgcac

SEQ ID NO: 471160 - DNA, 98 bp, Homo sapiens
ggaaattaaccggagaatggcagacgacaataagctcttcagggaggaattcaaccttggatttacactgggcaacgtggttggaatgtatctggctc

SEQ ID NO: 471161 - DNA, 93 bp, Homo sapiens
gctttttcaagggagctgataaagaacttcttcccaaaatggaaagacgcttctggggccagcttatggttcccctattgagcagacacaagt

SEQ ID NO: 471162 - DNA, 100 bp, Homo sapiens
gctctgtgcaatcctcacattcaagctgataggctgcgctaccggaatgtcatccagcgagtgattaggcctgtagtggtggagacacgcccagtggatg

SEQ ID NO: 471163 - DNA, 75 bp, Homo sapiens
gaactggcagaggaaaaattacctatgacgctttctaggcaagagattagcctgaggcctgctcagtcgttccta

SEQ ID NO: 471164 - DNA, 100 bp, Homo sapiens
aatcagctggcctggtttgatactgacctgtaaatcatcctttaggaaggtgatgtctggcccaactcatcagctgaaatcaccgtgtactttaacccac

SEQ ID NO: 471165 - DNA, 103 bp, Homo sapiens
ctcaacgcctggaggacgccgtacggggccagcattttccaggttacttcttgctgcagattctgcgcaggatcggagctgtgggccaggctgtgtccaggac

SEQ ID NO: 471166 - DNA, 98 bp, Homo sapiens
aaaaagaaacaagtaaaactggatgagcagctcatggagaatacagattctgttcatcttgctctgaaattaaataattctgaactcatggggagaaa

SEQ ID NO: 471167 - DNA, 101 bp, Homo sapiens
gggtattgttccagatcttaacagtatccagctccaggtcccacaggggctcttcttccccacgaaaaagatcttattcaagttcatcatcttctcctgag

SEQ ID NO: 471168 - DNA, 90 bp, Homo sapiens
aacgatcatcgagctaaaatatcgtgttgatactgtggatggtagggaagaaaagtctgcttctgattcttctggaaaacagtctactca

SEQ ID NO: 471169 - DNA, 75 bp, Homo sapiens
gccgccgcctgccctcagccgcccgctggccgggagcggagcccctgtgggcctttcgggaagacttggaatgcc

SEQ ID NO: 471170 - DNA, 74 bp, Homo sapiens
cttggagtgcctcaccgagccagcctaccgtatgtgaacgggagctgtgtgtgtttgcttttcaaaccctggga

SEQ ID NO: 471171 - DNA, 75 bp, Homo sapiens
gcggagacccttcgagaaatctcgtctcgaccaagagctgaagctgatcgagctagagccggtgcaggccacgca

SEQ ID NO: 471172 - DNA, 100 bp, Homo sapiens
gtctactctgtcgctcttgtgccctagcaccccgagaaccgtcagtttgagccagatggctacatatcgaaatcgaattgtgagccaaaatctcagcaca

SEQ ID NO: 471173 - DNA, 74 bp, Homo sapiens
tgcacttgcactagcagcgaacgattcggaagatgatccctatgatcttgaagatgtttctgcacagaaatgag

SEQ ID NO: 471174 - DNA, 102 bp, Homo sapiens
cccgactgcagctccgtggatttcagtgtcttttctgcctgctcagttccagttgtcactaatctcaggggcgatataatcaatgaggtggtcctaaagttg

SEQ ID NO: 471175 - DNA, 51 bp, Homo sapiens
aggcgggaggacgggctgccgcagcaagctgaacagctgggaagagaagac

SEQ ID NO: 471176 - DNA, 75 bp, Homo sapiens
tgttaaggattccaagtaactcttatttggacactcacatgggagtcaagaaggtggagcaaacacaacctctgg

SEQ ID NO: 471177 - DNA, 90 bp, Homo sapiens
tgagcagtgggaaaaatggaccaacttctttggcaagtggacattttactggctcaacctacgctcactccccaacccatcccaacattg

SEQ ID NO: 471178 - DNA, 90 bp, Homo sapiens
aacaaggcctggcagtttcctcctcacgtcaacggagctgctctcgtttgaggatgtggcgatgtacttcaccagagaggagtggggcca

SEQ ID NO: 471179 - DNA, 51 bp, Homo sapiens
gggaagatggcggctgggttcaaagtcggtatttcttcaatagatatatct

SEQ ID NO: 471180 - DNA, 82 bp, Homo sapiens
ggagattatagctctgtatgagaaggacaacacctacttaggcgtcctttctgaagaacagatccggaagaagaagattcgg

SEQ ID NO: 471181 - DNA, 75 bp, Homo sapiens
cttcaggcgacccgtactgggcctactctggacacaactcagatgggaagttcatcgcccgggcacagcggatag

SEQ ID NO: 471182 - DNA, 82 bp, Homo sapiens
caagtgccaagttatttactttcccatcaggtttcctgatgtgagcaggatggagagcaatacatcatcatctttggagaat

SEQ ID NO: 471183 - DNA, 100 bp, Homo sapiens
ccaggacatcctggaacctgggaaaggcagtgcctgatttgagatggggtcccaggtctcggtggaatcgggagctctgcacgtggtgattgtgggtggg

SEQ ID NO: 471184 - DNA, 82 bp, Homo sapiens
agctgcggcgagtcctgagcggccaggacgacgaggagcagggcctgactgcgcaggactggcattgcggactgacctccag

SEQ ID NO: 471185 - DNA, 88 bp, Homo sapiens
cggccgccgcgctcggtccagtcttcccggctggaaggatcccggctactcaacagaaatgaaggaggaatctgtaaagaaacaccag

SEQ ID NO: 471186 - DNA, 100 bp, Homo sapiens
ggagtccggcccccgaaagaggatcctgggtttgagcagtttaaaatgtcagaaagattgcatgggaactggatcagactgtacttggaggaaaagcatt

SEQ ID NO: 471187 - DNA, 100 bp, Homo sapiens
tgggcgtcaagccctaccactgctcctactgtgataagtccttccggcagctctcccacctccagcagcacaccaggcgggatgtagctcattttgggat

SEQ ID NO: 471188 - DNA, 100 bp, Homo sapiens
aacatccctggaagctctagacttctgaggcaccccagctttccctgttccaggaagaagcttagcccaggaaaaacaaagaccagttggacccagagat

SEQ ID NO: 471189 - DNA, 98 bp, Homo sapiens
ttcaaggcaaaaatatccatgtgcctctgttgatcgtcttggactcctatatgagagtcgcgagtgtgcagcaggtggcaaatggtaggatccaaagc

SEQ ID NO: 471190 - DNA, 96 bp, Homo sapiens
atgtggatgaaacaggaaacaatccttctgtttctttaaaactggaagaaatgtttatgaacctcagttgcagcaccatgtggctcaaaagaagat

SEQ ID NO: 471191 - DNA, 100 bp, Homo sapiens
tggtcttccaggtcttcctggtccaaaggcctagccgcccgtgactctcacactgtctcctgcatgacgggtggcgcctcccgcagcttcccttctctct

SEQ ID NO: 471192 - DNA, 100 bp, Homo sapiens
ttgctcttttctactatcctttggaaggttcaaagtctatgaacagattgttaaaggaaatgggctggcaggaagacagtgaaaatgatgaaacatgtgc

SEQ ID NO: 471193 - DNA, 75 bp, Homo sapiens
atgcagtcattccagcaccaacaggatccaattttttgctccactcaagcctgttagaatcaccatggaatacag

SEQ ID NO: 471194 - DNA, 90 bp, Homo sapiens
agtttgtcccagattttcagtctgataaccgacaaattgatggccaggagatcactgccaccgccgtgctggccccctggcctaggccac

SEQ ID NO: 471195 - DNA, 101 bp, Homo sapiens
aatggttctacctatcatacaattccgagaaaaggatctcacagctatcagaggactcctgaaacctggagagctacctgctgtataaaggctggcctgag

SEQ ID NO: 471196 - DNA, 90 bp, Homo sapiens
gcagccctggccgcgcactcgcctcagctgagcctggacgatcctacacctgccacctccgatggatccactgcctctgtgcctgcctgt

SEQ ID NO: 471197 - DNA, 95 bp, Homo sapiens
agcaggaaagctgccatcagctgagcaagtccaccaacagtttctgtgtcccacttcatctttaataaggtccgggcccaccagctggtcttgcc

SEQ ID NO: 471198 - DNA, 73 bp, Homo sapiens
ttcatttagagctgcggaacaggacgccctctgattgcctgatttgagatggggtcccaggtctcggtggaat

SEQ ID NO: 471199 - DNA, 73 bp, Homo sapiens
gccacctgcctttgacctttttgaagcctttgcaaaagtcgagtttgagtggctgaggcagttttggtttcaa

SEQ ID NO: 471200 - DNA, 74 bp, Homo sapiens
gcgcgtggaacggctgcttttggaagaaatggcacctcgaaaggggaaggaaaagaaggaagaacaggtcatca

SEQ ID NO: 471201 - DNA, 75 bp, Homo sapiens
tgttggttgtcgcccatgatctgatccggaagatgtcacctgtttttagaacttcagccataaaaatgggcagaa

SEQ ID NO: 471202 - DNA, 97 bp, Homo sapiens
ctgcttttgtggcgctcttgctcctctctccttggcctctcctgggatcggcccaaggccagttctccgcagggctgggaagaaacggtggatgccg

SEQ ID NO: 471203 - DNA, 87 bp, Homo sapiens
accttggaacagaacaagaggacaggaggtgtcgttccagattattcagagctgggagagcttcccccacgatctcctttagaacca

SEQ ID NO: 471204 - DNA, 75 bp, Homo sapiens
tttgctctctgcattccagttagcaaatggggttatgaagacagtatggagtttccagaccatagtagacatttg

SEQ ID NO: 471205 - DNA, 96 bp, Homo sapiens
caatggccagcgccagctgcagccccggctgcccactcgcctcacctgagcctggggaaactgaacagccaagactcctataacaattttaccaac

SEQ ID NO: 471206 - DNA, 75 bp, Homo sapiens
ttcagcttcagcctgctcaagaactgcagcattgcagccgccaagacgaagcaaggtctcgctgtgttaccctgg

SEQ ID NO: 471207 - DNA, 83 bp, Homo sapiens
ccggcttgtagcatttagggcaaggtatcatctggtggataaagatcatgacagtttatcatctggacttcaagctgcaggca

SEQ ID NO: 471208 - DNA, 75 bp, Homo sapiens
cgaggaggcgcgggaggtgttcgagaacgaccccgagacgcgggctgacgcacgaggcacacaggaaggaggtgg

SEQ ID NO: 471209 - DNA, 88 bp, Homo sapiens
cttctgctcaggctcctggtagctcatatccccctcacatgcagcatgaagaggaaccacctcagaatatgaaaccacaatcaggaaa

SEQ ID NO: 471210 - DNA, 71 bp, Homo sapiens
gaaatggcaacttgcgcggtggaggtgttcgggctcctggaggacgaggatccaaactactggatacaggt

SEQ ID NO: 471211 - DNA, 74 bp, Homo sapiens
accagtgaggcagaatatgtatcggggatatagaccacgattccgcagggacctggacactgtggagtctgtcc

SEQ ID NO: 471212 - DNA, 75 bp, Homo sapiens
caccttgctggctgctgccagcattgcttacatcagccgatggaggcagaagaagctgctgctaaagcatcatca

SEQ ID NO: 471213 - DNA, 119 bp, Homo sapiens
acaaccgcagcagtggtggctatgaacccagaggtcgtggaggtggccgtggaggcagaggtggcatggggagaactgcgacacatcaccaagctgaagccctggagcctctttgatgt

SEQ ID NO: 471214 - DNA, 90 bp, Homo sapiens
ctccagtctataagcccaggaagccgtcttcgaactcaggagaaggccatcgaagacggcaatttggaggaaatggaagaggaagtacgg

SEQ ID NO: 471215 - DNA, 90 bp, Homo sapiens
cggccgaggtagaggcagtggcgcttgagttggtcgggggcagcggcagagcagcccgacggccatggaggctgaagagacgatggaatg

SEQ ID NO: 471216 - DNA, 75 bp, Homo sapiens
aaggaaaaggaggaattcgccgtgcccgagaatagctccgtccagcagggacaagaatccttcaagaaacaggaa

SEQ ID NO: 471217 - DNA, 100 bp, Homo sapiens
ccacttccacttaatgaataactgtgaaattattcgatgacatgatgtatgaattaaccagtcaagccagaggactgtcaagccaaaatttggaaatcca

SEQ ID NO: 471218 - DNA, 83 bp, Homo sapiens
tggcaatggcacaaagttctctcgatcagggcatacatctttcttcgacaaaggacggcgcctcatctcccagagatcttcct

SEQ ID NO: 471219 - DNA, 83 bp, Homo sapiens
gactccttgggggtcgagcacataacggggttcgggtgtctcgtgtgtgaacatcacagttgttgacctcctgtactggagag

SEQ ID NO: 471220 - DNA, 134 bp, Homo sapiens
aatggcgaccggcaactactttggattcacccacagcggggcggcggcggcggcggctgcggcccaatataggtgtcatggagaaactccagctgggcccagagattctgcagcgggaaaatccaaggcttatt

SEQ ID NO: 471221 - DNA, 83 bp, Homo sapiens
agatgatgaagttacagcaataatcgcttccttcagaggaggaggtggaggaggaggaggatggagagctgcccaagacaggg

SEQ ID NO: 471222 - DNA, 100 bp, Homo sapiens
caaagctagtgattacctggtagacctcattgcctttcttcgtagcacctttgctgtattcacacaccttcctgtgagaagcctcttcctcttaaaacag

SEQ ID NO: 471223 - DNA, 120 bp, Homo sapiens
ccaacatcaagatcttcctggtgtccgagtgcgccctgatgctggcgcagggcacggtgggcgcctacctgagtttgccagatccggcccggtgcctgggttccaggaggacacgctgca

SEQ ID NO: 471224 - DNA, 82 bp, Homo sapiens
tcctgtgttaacttcctatgttaacgtgctgtgacaccagaggagtctcgctctcagtcaaaatctccaacgggaactcctg

SEQ ID NO: 471225 - DNA, 90 bp, Homo sapiens
ctcgactcttggcgccaccgcctcatgcactgtgtaggaaaccctgatagattggtgtgatgaaaaggaacttaatttgatattaacaac

SEQ ID NO: 471226 - DNA, 128 bp, Homo sapiens
gcacccgagcaaaccccagcaagatgcggaggctgcctcggcggagcagaggaaccacacgctgatcatgctggcaaacttccccagactctgcgaggaaacggaaaggattgttgctaaccacattc

SEQ ID NO: 471227 - DNA, 50 bp, Homo sapiens
ccagcacttcatccagcagtgcacagaaatggaatctatttggaatttgc

SEQ ID NO: 471228 - DNA, 87 bp, Homo sapiens
ccgatatatgttctctaggccttttagaaaacatgaatgattacggacctgaagccaaagaacaagatgcgctagtggacagattgc

SEQ ID NO: 471229 - DNA, 50 bp, Homo sapiens
catcaactacagttctgtgtgtcaagctcggcttattccaggggtgtgtt

SEQ ID NO: 471230 - DNA, 116 bp, Homo sapiens
tttccgggagctgcctgagccgctcttcccttacagtttctttgagcagtttgtggaagcgatcataaacagctgttgtgtgacgtgatgattgtggcagaagatgtcgagataga

SEQ ID NO: 471231 - DNA, 49 bp, Homo sapiens
tggatccaggataacggaggctggatatatagatcaaggtcgaaatccc

SEQ ID NO: 471232 - DNA, 91 bp, Homo sapiens
ctgctgttgcggccgctgccccagggctgcggggacgggcgtgatggtgggcatgggtcagaaggattcctatgtgggcgacgaggcccag

SEQ ID NO: 471233 - DNA, 100 bp, Homo sapiens
agaggtggacagatctgagagatactgagctgggagtgtccactcgccttccaccagcatggcaacgtcttcacagtaccgccagctgctcagtgactac

SEQ ID NO: 471234 - DNA, 100 bp, Homo sapiens
ggactacagacatgcgccagcacgcctgggaccgtttggagggagccattcacctacaggagcaggacatggagaactcaagacaggtcctgaactccta

SEQ ID NO: 471235 - DNA, 82 bp, Homo sapiens
agagaccccctgccctctgacgccattttgcagactctgatcacagtgaaacgttccatgggaacttgggccatgagaaaca

SEQ ID NO: 471236 - DNA, 100 bp, Homo sapiens
cggcgggcacgcacggcccgggccggcgctccaaggcccgcccgggagggccggggccgcgctcagctccccagaggcccatctcaacacagagaaccgc

SEQ ID NO: 471237 - DNA, 82 bp, Homo sapiens
aatatctgtcttcggtggactccttcggcagtccacccaccgccgccgcctcccagacgcaaacatgcagatctttgtgaag

SEQ ID NO: 471238 - DNA, 82 bp, Homo sapiens
gcgacgagctgaccctgggagacatcgacggtgtccctggccagtgtccttccacctgtccacaagcatggggaacatcttc

SEQ ID NO: 471239 - DNA, 98 bp, Homo sapiens
cgggcacgcgcgcgcgccaccggcccggcagcacgtgtggagtgagagcgaggactgcctgcctttcttgcagctagcacaggattacatctcctcct

SEQ ID NO: 471240 - DNA, 99 bp, Homo sapiens
ggggcctgggtccacgccgagggcaggacgaacttcaccaggtactccaaagattcaggtttactcacgtcatccagcagagaatggaaagtcaaattt

SEQ ID NO: 471241 - DNA, 96 bp, Homo sapiens
ccaagaggtggttaaagccatattggagtagcgaggaatctgattccaagcaaaaaccagttcaacttagcaatcaaagacatcccagaggttaca

SEQ ID NO: 471242 - DNA, 82 bp, Homo sapiens
gcgagggctacccgctctttgccgtgacaacaccgttcccccagccgggctgaagaacatgagctgcctgtggacatggaaa

SEQ ID NO: 471243 - DNA, 98 bp, Homo sapiens
ttgactactggggccagggaaccctggtcaccgtctcctcagaccagccggttcctgctggaagctcctggtctgatctggggataccatgtccaagc

SEQ ID NO: 471244 - DNA, 98 bp, Homo sapiens
tacgcagccggcctggtgtccacgcaggtatcgagaaccttccctgcgaacttcagaggaacttccagctgatgcgagagctggaccagaggacggaa

SEQ ID NO: 471245 - DNA, 100 bp, Homo sapiens
caagaggaggaagaagaagaagaagaggaagaagctgaagaagaagggcaaggagaaggcggaagcacagcaggaggtggagcccatgtgcaaggagagc

SEQ ID NO: 471246 - DNA, 75 bp, Homo sapiens
tgaatagacaacttcttgatcatatggattcatggacagctaaatttagaaatcacttttcaggattagaagagg

SEQ ID NO: 471247 - DNA, 98 bp, Homo sapiens
tggactttgaacaggtggtggatcgcattcgcagcactgtggctgaggtcgcacggggcaggcggttgcagttcgagccaaggcctttggattcagcg

SEQ ID NO: 471248 - DNA, 99 bp, Homo sapiens
ggaaaagcaggaagctggaaaggaaggtactgcaccatctgaaaatggtgaaactaaagctgaagaggatggagatgaagatgaggaagctgagtcagc

SEQ ID NO: 471249 - DNA, 82 bp, Homo sapiens
gaaaccagccgaacttcagggtttccaccgttcgttcaagttccagggtctccctccactgctgtagtaacccgggtccggg

SEQ ID NO: 471250 - DNA, 98 bp, Homo sapiens
aaaattggtatcaccttcaaggagcacaagtagctgctcttccaagcaaggaagtcgacaggtcgggaaagaggttaaagaagacacgcaagtatgat

SEQ ID NO: 471251 - DNA, 75 bp, Homo sapiens
tgttctgatcactactgacttgttggagccaaaaacctgtatatcatctccgtgaaggggatcaagggacggctg

SEQ ID NO: 471252 - DNA, 90 bp, Homo sapiens
cggctgcaggggtcagtgatggagctgcttcaggaggaagagggtaatctggaagagtttcctgacctactctgctgctgtgattaaaca

SEQ ID NO: 471253 - DNA, 71 bp, Homo sapiens
caacccagaccacacccttgagcctgagcccgacattattcctgaggcactactcctgtgtgtgaggacat

SEQ ID NO: 471254 - DNA, 82 bp, Homo sapiens
gacccaggagaaattcgccctcaaatttgctggcctagacctgaactcttcagataatcagagtggaggaagtacagccagc

SEQ ID NO: 471255 - DNA, 98 bp, Homo sapiens
ctgaggaggggccccagcagcccccgaaggccctatcaggacatggagtatgaaagacgatcttcttcagcagtatcgttctgctgtgtgcaaactag

SEQ ID NO: 471256 - DNA, 100 bp, Homo sapiens
agaagcctgtacctgttttatacttgcttttgcttcagcgttctgtggttgtcaacagcaggatcaggtgagctgtgtccagaaaaccaacgagaaggag

SEQ ID NO: 471257 - DNA, 75 bp, Homo sapiens
aagaggactttcaaatggtgaagaaacaccccggagagaaatggcaagttccaatcctgtgtatatggagatgga

SEQ ID NO: 471258 - DNA, 96 bp, Homo sapiens
agtacttttccacagtcagctgccatttgcggcttaaggcatgttactccacaggatccgctgaacataggatgttgccacaaaatctacctcgtg

SEQ ID NO: 471259 - DNA, 100 bp, Homo sapiens
attatgcgaagaactttacgtggacatcccatttaattctcagaagccgatcacaagattccaggagggcttcgtgtatggacctcaagcgttggaggta

SEQ ID NO: 471260 - DNA, 100 bp, Homo sapiens
tcttgcattccatatttccatcagatgggggtccgcgggtttgggaggagtatgccaaccagcatggccctggacagtggagaggagaaaaggaacgtgg

SEQ ID NO: 471261 - DNA, 100 bp, Homo sapiens
tttatattgctgttggaatatctggagccatccaacatttagctgggatgaaagacagcaaggatgctgaaaacgccattcaacagatgggtggccagtg

SEQ ID NO: 471262 - DNA, 83 bp, Homo sapiens
ccggctatggccgtgccctggggctgagccctcaggtatggatcctggcgggagccagtcaacccctattatgtcaatgccgg

SEQ ID NO: 471263 - DNA, 100 bp, Homo sapiens
ggaaggcaagcctgcctgcttctgcatcgacagatagccgtcttcagcttgagccccatcactagacttggagtccaggtgtgagaaatttctacaaaaa

SEQ ID NO: 471264 - DNA, 75 bp, Homo sapiens
aagaagaccaaggcccaccatgccccaggaattacatgaatgacagtcttcgaaccaatgtgtttgttcgatttc

SEQ ID NO: 471265 - DNA, 100 bp, Homo sapiens
ggtcgatggtcggcggcgcccggatgggcagctgagggaactctaatgatccaggacaaagaagttaccctggagtatgtatcaagcctggatttttggt

SEQ ID NO: 471266 - DNA, 75 bp, Homo sapiens
aagcaagcagttcagaagagccaaggaataaacatgcaatgaacccaaaaggtgatcaccagcagcttgcaaaac

SEQ ID NO: 471267 - DNA, 98 bp, Homo sapiens
gaccctggcccggaggaagaaagccaaggagggtttattttcttgaaaaggctccaggcttcggcttggaaaatcccaccgccaaaattgagcccagc

SEQ ID NO: 471268 - DNA, 83 bp, Homo sapiens
tgatgagaaataaggacaaaagccaagaggaggacagttcgctacacagcaatgcatcgaggcctgatcaaccccgtataacc

SEQ ID NO: 471269 - DNA, 97 bp, Homo sapiens
gttggaaatacaagatcatcatctgtttctagagatgctttcaattcagctgaaaggataagttctgaacgtcgaaaagaaaagtctcgagatgcag

SEQ ID NO: 471270 - DNA, 110 bp, Homo sapiens
tgggatggtattttagacttgccagaacagaacactattcacaaagattgcctgcagtttattggcacctacaaaggcagcacctaagcaaaagattgtgaagcctgtga

SEQ ID NO: 471271 - DNA, 100 bp, Homo sapiens
gcgggaacacagagagcgaagccagctcaccatggatgatgatatcgccgcgctcgtcgtcgacaacggctccggcatgtgcaaggccggcttcgcgggc

SEQ ID NO: 471272 - DNA, 100 bp, Homo sapiens
ctatacccacaacactgtccgagggtgctcttatttctacaggtcctacaacgtgactttaaaaagacagcagaaagcaaaaatgtcccattggaacgag

SEQ ID NO: 471273 - DNA, 100 bp, Homo sapiens
agagaatgactaatagtagcagctccccaagccttctaaatgacagtgccaagccatattcagcccatggaaaaatatattcagggggaagagatgtaat

SEQ ID NO: 471274 - DNA, 101 bp, Homo sapiens
tccagatgaggtgatggcaacggccaacttcggcaagatccagatcgggatttacgtggagatcaagcgcagcgatggtaatagcctgcagctggtgtttt

SEQ ID NO: 471275 - DNA, 90 bp, Homo sapiens
cattcaagaacctggcatctatagggaagtgctcagcggctgcactggacgtcctcgccaatgtcttccgggaggaactgctgccccacc

SEQ ID NO: 471276 - DNA, 96 bp, Homo sapiens
agtcaccaggcctcagcagccaggtggagcccctccccactgatcgaagacctcaagttgcatttgctggtctggcctttgcgtccttctacctgg

SEQ ID NO: 471277 - DNA, 82 bp, Homo sapiens
gaaaaggcaacatcctgtcacaggccatgctctggcaaaaacgaacaagatcactcaaggtgaaggataatctactaatacc

SEQ ID NO: 471278 - DNA, 100 bp, Homo sapiens
gggaccagacggtctcagacaatgagctccagggttatgaagacagtatggagtttccagaccatagtagacatttgctacagtgtctgagcgagcagag

SEQ ID NO: 471279 - DNA, 50 bp, Homo sapiens
gaaagagattgggtacttaatgtgctggcctacatgcagttgctggagga

SEQ ID NO: 471280 - DNA, 100 bp, Homo sapiens
gtcccaaaggtggtggcaatgcagtaaagtgctctggtctggggtctctctgtgaaacacaatcctcagaaagtgggtaaagaccatacgttggaggatg

SEQ ID NO: 471281 - DNA, 100 bp, Homo sapiens
gagggatccttcacccgtgtctggcgacgttgtggacgtttaccagcgggagttcctggcgctgcgcgatcggttgcacgcagctgagcaggagagcctc

SEQ ID NO: 471282 - DNA, 83 bp, Homo sapiens
taattcacgcagagccggctttgcagtgtggccagactccactgatgatagctgccgaacaaggcaatctggaaatagtgaag

SEQ ID NO: 471283 - DNA, 100 bp, Homo sapiens
acgagggttacatgatatccacttggtcaccatcagaaaagctaagtttgctgtatagtgaggatcaggagatctgatcctgattgcagaaccttccctg

SEQ ID NO: 471284 - DNA, 100 bp, Homo sapiens
tttcatggatgcccctgtttctggtggtgtgatgaatgcagactctgctaccattttggctgtttggatcctcctttgaaaaagtctcctaaacagacag

SEQ ID NO: 471285 - DNA, 75 bp, Homo sapiens
aaggattccaagtaactcttatttggttgaagccatccttgtcaatatatttggtggtatcgtcaactgtgccat

SEQ ID NO: 471286 - DNA, 73 bp, Homo sapiens
tactgaagtggaaaggcttttctgagcaccccctgtaatggcctatcctgctactacaccaacaggcatgata

SEQ ID NO: 471287 - DNA, 75 bp, Homo sapiens
gagcagagctctccgggttccccggctcgcggggcccggcgaagggcagatcttcgtgaagactctgactggtaa

SEQ ID NO: 471288 - DNA, 50 bp, Homo sapiens
tcctgaatcgagcagagaaactcttgctagagaagttttggatgttgctg

SEQ ID NO: 471289 - DNA, 100 bp, Homo sapiens
tccccctgcgccgccgccgccgccacccccgggctcggggtggcccccgcttcagtcccagggcaggctgacaaacgggctcatcataatgcactggaac

SEQ ID NO: 471290 - DNA, 50 bp, Homo sapiens
caacattcagacccatttccagtcatgacgcgttccttcacctcgggcag

SEQ ID NO: 471291 - DNA, 101 bp, Homo sapiens
cagagactgctgagcccgtccgtccgccgccaccacccactccggacacaggttgtgaccgagattcccgacgagagagactgaggggaagagaggaagga

SEQ ID NO: 471292 - DNA, 100 bp, Homo sapiens
cttagcattccctctgaagatattgcaagaaatttgatgaaacggacagtgtgtgccaagtggtgtgtgccaggtgctccgactaccgggccgaactgaa

SEQ ID NO: 471293 - DNA, 90 bp, Homo sapiens
gaggagcccatggcatcatagttgtgtatgatgtgacagatcaggtatgatctcgtgaaatcttgagagaaactgaatgacgaatgaaac

SEQ ID NO: 471294 - DNA, 83 bp, Homo sapiens
ggggtttcggcctggaggagttgtacggcctggcactgcgcttcttcaaagtcagaagaagaagttgtagaaggagagaagga

SEQ ID NO: 471295 - DNA, 83 bp, Homo sapiens
ctggacgtgcacgcagcccggcgggaggataaagaccaccacgactagacgcttgaagcaaagctgccatcccagaagacgac

SEQ ID NO: 471296 - DNA, 75 bp, Homo sapiens
ggagaccattccaaatctgggaccagtctcggcaaatattacacttctctccttcaatgctggggtgaaaacaac

SEQ ID NO: 471297 - DNA, 101 bp, Homo sapiens
ctgcctccgcgctcgcccgggctgcgctgggcgctgccgctgctgctgctgctgctgcgcctgggccagctcctctggtgcaagtgtggtagctattgaca

SEQ ID NO: 471298 - DNA, 82 bp, Homo sapiens
aggagagatagaggcagcagaagccagggcagctgaaagacagagaccttcaggctcttgtcaggatggtgaagctgttcat

SEQ ID NO: 471299 - DNA, 50 bp, Homo sapiens
atgccttctctcgccagattgctggccggtggctgctgaaacaaaaatct

SEQ ID NO: 471300 - DNA, 100 bp, Homo sapiens
gaccatatatgtcattgggcagggatcaggtggacaaactggatgccttggagagtctgcgcaagcaagaggagcatgtgacagagcctgcccctctcgt

SEQ ID NO: 471301 - DNA, 80 bp, Homo sapiens
aaatctaatgctgggatgaagcatgcttcctgctcgaccccaagttgaaaaggaatttggtttctgttgcaagaaagatc

SEQ ID NO: 471302 - DNA, 90 bp, Homo sapiens
aaaagggggaaaatgcccaggaggaagcaggagcagcccaagcgccttccctcacttttagaaagagcgttttcgctacgtaaagcacat

SEQ ID NO: 471303 - DNA, 87 bp, Homo sapiens
caaggcgggggaggcggcggcccagccacgatggaatgtatcctgtcaggtataatgtcagtgaatggcaagaaagttcttcatatg

SEQ ID NO: 471304 - DNA, 109 bp, Homo sapiens
cgctggagcacaaaagagtctccgcggtggaggtctgcgttgctcttgcttttcctcgctggggtgtacggaactttatattgctgttggaatatctggagccatccaa

SEQ ID NO: 471305 - DNA, 100 bp, Homo sapiens
ttctctaagagatgcctgcagcctgccatgggacgtggggtccaccggtacagccacacccactcgcccgggtctatggccacggtcggagagtggtcct

SEQ ID NO: 471306 - DNA, 99 bp, Homo sapiens
ggccgcatcttcacaactccgtcttacagaggtgaccatgctttgggattttcatagtttgagtaattcctatgggctctaccacccagcgagttaaag

SEQ ID NO: 471307 - DNA, 74 bp, Homo sapiens
ctctctgtccccggccgccatggagcagccgccggcgcctaagagattttaggtgatgggcaagtcagaaagtc

SEQ ID NO: 471308 - DNA, 75 bp, Homo sapiens
gatatgacaggggtaacacccttccagatgatttttgagggtaaagcccacagcttgaagccaagcataaaggag

SEQ ID NO: 471309 - DNA, 100 bp, Homo sapiens
cagttactataaaaaccgaagatgatgatgatgatgatgtcaagagcacttctgaagactacttaatgatatcttggggcttggagtacccataatacag

SEQ ID NO: 471310 - DNA, 99 bp, Homo sapiens
gcggacgggaaggcgggagacgagaagcctgaaaagtcgcagcgagctggagccgccggagggaactacagcctgtccagtgtgctgcccaacgccccc

SEQ ID NO: 471311 - DNA, 90 bp, Homo sapiens
aggggcctgtgtacttgctgtagatgaaaatggacagagcgggatgccaccagcttgtccaaagggaagttccaggagctcctggtgggc

SEQ ID NO: 471312 - DNA, 100 bp, Homo sapiens
gagcctgttggagaaacacaaagaggaaaatatatgcagatgatgaacattcttaagccaattgcctttgatgttattcatttcatgtctcaactatttg

SEQ ID NO: 471313 - DNA, 75 bp, Homo sapiens
cggctgcgcgagcggagggaggcgggtgctaattgcagtgattttctggaatctaagggatgttttgccaacaca

SEQ ID NO: 471314 - DNA, 90 bp, Homo sapiens
aaagaaatcaagattgaaccagaaccatgtggcacagactgcttccttttgctgctgatcatcctggccaatggtgggccccaggccctc

SEQ ID NO: 471315 - DNA, 90 bp, Homo sapiens
ctgtctgctagaaataactgtgagcacacaggcaaagtgtttcatggatttcaaagctggaggcgccttatgtcacattcttggggctgc

SEQ ID NO: 471316 - DNA, 75 bp, Homo sapiens
ctgtgttccagttaataaagcatctacaaatgaggcagcctggggcagtgagaaagatcagtctaaagaaaagga

SEQ ID NO: 471317 - DNA, 100 bp, Homo sapiens
tggacgggtgattatggtggcccacttttcctcctgccagaatgtatgacaacatgtccacaatggtgtacataaaggaagacaagttggagaagcttac

SEQ ID NO: 471318 - DNA, 90 bp, Homo sapiens
aattatttcaagtggaaagtcaatgttgatttacccaatactaatgggaaccattgagcatttgccttgtggtgtctcctcagctgtatt

SEQ ID NO: 471319 - DNA, 50 bp, Homo sapiens
gcatgagtggcaggcccttcagccagatgccttcaattaagttgcagagt

SEQ ID NO: 471320 - DNA, 100 bp, Homo sapiens
agcaggatgttgccagtctcttggaagagtttggtccaattgaatcaattaatctatttatttgccagtatcacatatggctggcagcggacacaagggg

SEQ ID NO: 471321 - DNA, 88 bp, Homo sapiens
cagcacagccaaggaacagaattagaagaaaaggaaccctggcctgaggtacttggaaaaatggacaaggattgtgaaatgaaacgca

SEQ ID NO: 471322 - DNA, 75 bp, Homo sapiens
aatcccctgtttgagaaaaggcctaagaattttggcattggcggctgcaggcttcagcctgcgctggttggtgaa

SEQ ID NO: 471323 - DNA, 100 bp, Homo sapiens
aaaagtggaagcgaagccgaaaaaggcagcagcgaaggctcaggaagaggccaaagaagcagaaatgagcagaaaggagttggggcttgatgaaggcgtg

SEQ ID NO: 471324 - DNA, 74 bp, Homo sapiens
aaatttacttctggatgccaatctgaatatcaaaatagcagattgagaacctagatccccgaggaattcagcta

SEQ ID NO: 471325 - DNA, 75 bp, Homo sapiens
gaatttgtgcaatgtttagccaacccaaattaccttaattgttgtcaagttattaagcaacaaaagatcacaagc

SEQ ID NO: 471326 - DNA, 74 bp, Homo sapiens
tggggctggcctgcggcgcctgggcgctctgaggtggagcgatttagccaagaagttcagattacagaagcccg

SEQ ID NO: 471327 - DNA, 101 bp, Homo sapiens
gtggtttatctaaaaaccaaagagtactgcagtggactgtaaaataacatcgtctacgactggagataaacactttgataaaagtcccactaaaacaaggc

SEQ ID NO: 471328 - DNA, 88 bp, Homo sapiens
catatctaactccttgtgtcacatgtccagtaccaacacaaagtggccaggaaaattctaaagcctgaagtgattcagaacatgaccg

SEQ ID NO: 471329 - DNA, 97 bp, Homo sapiens
cgtggtcgtaggaggctgtcctgtctgcaggtgcatagcgggctgctgcttcatccccttctgcgtggatgccctgcaggacgtggaccattactgt

SEQ ID NO: 471330 - DNA, 90 bp, Homo sapiens
cggtctgcccctggaggtggtagcaaggttccacagaaaatttggaagatttgcacaaagcagcagagaagcatagcatgtccagcattt

SEQ ID NO: 471331 - DNA, 98 bp, Homo sapiens
ttcgcaagcatcctagcagccttctccaaagccacattttgcagatggcgtgtacctggttctgctcatgggccttctggaagactactttgttcctc

SEQ ID NO: 471332 - DNA, 82 bp, Homo sapiens
ctcaaagggaacttggaaatgacattggcatccagattatccactgcagaagatgagaatgtgcctactgctcctgatcctc

SEQ ID NO: 471333 - DNA, 75 bp, Homo sapiens
tcgaagcggatttccgattgaatgttgacattcgtgaaattaaggagatccgcccagggaagacctcacgggact

SEQ ID NO: 471334 - DNA, 138 bp, Homo sapiens
aaatgagtgccaataaaataaattcttttgaactagatcgagctgatagagaccctagtaacatggtagttattactagtaaaagcggagagatcttgtatcgtatttcaccgtgggcaaagtatgtggttcgtgaag

SEQ ID NO: 471335 - DNA, 98 bp, Homo sapiens
gatgtggaattaatttacggaggtgttaagtacattctcaaggtgaaggttgctatccttaaatacatagaaactctggccaaacagatggatccagg

SEQ ID NO: 471336 - DNA, 98 bp, Homo sapiens
attatgatgctctgtttgagacacagccggagccagcaccgctctttgaccttgccatgcttgccttagatagtccagagagtggctggacagaggaa

SEQ ID NO: 471337 - DNA, 100 bp, Homo sapiens
tgaaagagggaaggaagatatttctcaaaataaagatgaatcttcactttctatgtcaaagagcaagtgtatgcaaaggcagaagcactgtgtaaagaat

SEQ ID NO: 471338 - DNA, 74 bp, Homo sapiens
atcacaggcaagacgctgttcaagggcagcgacctgtggcgggcgtgtttgtgtgcctgctggagtacccccgg

SEQ ID NO: 471339 - DNA, 83 bp, Homo sapiens
acggcaaagttttgcagatcttcaacaagaggacccaggagaaattcgccctcaaagaggcaaaaccttcaactgaggacttg

SEQ ID NO: 471340 - DNA, 90 bp, Homo sapiens
gatgagtccagcattctaagacgaagagggctccaggaaccaaatggcgagacaccatcatctttatacagagttgcagcagtacttcta

SEQ ID NO: 471341 - DNA, 110 bp, Homo sapiens
ccctttcacagctggctgtagctggccaaggagttctcgattaaagaggaaggggcagtgctcacatttctgggcaggacagagcgggatgccaccagcttgtccaaagg

SEQ ID NO: 471342 - DNA, 100 bp, Homo sapiens
ctacagcgctattatgattcgaaaaaccatcaaaagagatccattggcacaggagggttgttttggaaaccgaaataacaaataagtccgctttgaaact

SEQ ID NO: 471343 - DNA, 100 bp, Homo sapiens
tggatatgggagctgtggccctcagaatttaaacttaaggaaagagtgggaaagtgaggtacgagctcaactggaggcagtcctgtgcggaaatctgaag

SEQ ID NO: 471344 - DNA, 74 bp, Homo sapiens
aacgcttcgctggccatttaggagctctgctcaaagccagacgaataccctgaagatgtagctcctactgttgg

SEQ ID NO: 471345 - DNA, 90 bp, Homo sapiens
agaaaacggaatctaatcaggaggttgctaacccagaacactatattaaacatcccctacagaacaggaattgaggggagtgatgatgat

SEQ ID NO: 471346 - DNA, 74 bp, Homo sapiens
tggctgactgtcttcggagtcggctgcaagctttcttcctggtggcagatgacatcatggattcatcccttacc

SEQ ID NO: 471347 - DNA, 100 bp, Homo sapiens
ctcggcctccggcgcagcccggaaatgtccggcaagatcgagaaagcagaagatgctcatgaagcagcaggaccggctggaggagcgagagcaggacatt

SEQ ID NO: 471348 - DNA, 89 bp, Homo sapiens
gtaaaatggttcaatgtaaggaacggatatggtttcatcaacagaacgctagccctaattaaaccagatgcaatatcaaaggctggaga

SEQ ID NO: 471349 - DNA, 82 bp, Homo sapiens
cggggagctgaacgtggacagcctcatcacccggctgctggagggtatcgagaaccttccctgcgaacttcagaggaacttc

SEQ ID NO: 471350 - DNA, 50 bp, Homo sapiens
ggaggaaggcggcgcaccccgagaggtgtgacgtttctccagatacttca

SEQ ID NO: 471351 - DNA, 90 bp, Homo sapiens
ccttatgggtttctagaaggaaaatcacagaggtaaagcatcatttcatcacatcctgtcaaggggaccagttactctccacaagaaaat

SEQ ID NO: 471352 - DNA, 75 bp, Homo sapiens
gaagctgtctatggaggactccaagagccctccccccaaagcctgcaggatgtttcctcaatgaggggaaggctg

SEQ ID NO: 471353 - DNA, 75 bp, Homo sapiens
tggctggttactaccatgccaatgcagctgtgaacgatcagagaaaggagaagatgagtatgccaacgttgatgc

SEQ ID NO: 471354 - DNA, 50 bp, Homo sapiens
tgaatccacatagagaaagtgatgggagatttacaaacgaggaccacctg

SEQ ID NO: 471355 - DNA, 100 bp, Homo sapiens
atatactaaagcaggctaccaaggacagagtcagtgatttccataaattgaagcaaactccagtcagcccggtcaagcatgacagcaactcaaactcggc

SEQ ID NO: 471356 - DNA, 100 bp, Homo sapiens
gcgcaaacaagccaatcccaggaggaaaaacgtcctgccattgactctaccagaggagattcttcaagcttagttgctgaacttcaagaaaagcttcagg

SEQ ID NO: 471357 - DNA, 100 bp, Homo sapiens
tcagaactactatattcagtggctaaatggctccctgattcatgtgacaaagcataaatcatggacaccagagaataaggtggacctcaggaatccggaa

SEQ ID NO: 471358 - DNA, 142 bp, Homo sapiens
aaagaacaacttcgagacatttcaagtattggtcttaaaacagtaattggagaacttcctccagcttccagtgtgagaaagtggcgtgtgaaaagtgccctgggagccatgggccagtggcagcttgaagtaggagacccag

SEQ ID NO: 471359 - DNA, 100 bp, Homo sapiens
aaaatcagacctctgtggcagcattttttccagaacacaaaaggtggctttggctgaagcctaattccacagctccttgttttttgagagagactgagag

SEQ ID NO: 471360 - DNA, 75 bp, Homo sapiens
ctacaacatggtggacatcatacactctgttggatggcaagcatgttgtgttcggtcacgtcaaagagggcatgg

SEQ ID NO: 471361 - DNA, 100 bp, Homo sapiens
tggcccctcaccatcaccatcctcatctctcttgggtcaaaatgcagatcttcgtgaaaacccttaccggcaagaccatcacccttgaggtggagcccag

SEQ ID NO: 471362 - DNA, 54 bp, Homo sapiens
cggggtgtcagtgtggaggagactgaggtttttcgttggaatatacgttgcaca

SEQ ID NO: 471363 - DNA, 75 bp, Homo sapiens
gtggtgggctcagccggtcgagctgcgcgggagttgcagaggaaagtggtcgcttatggtcagaggagcagcctg

SEQ ID NO: 471364 - DNA, 90 bp, Homo sapiens
agattgaaagcctagagactgaaatggaattcaggaggcaggtggaagtcatcataaagtttctgtttcacccgtcgtccatgttcgagg

SEQ ID NO: 471365 - DNA, 83 bp, Homo sapiens
ggaaaatggtctgctctgcgaatcgacaatgcagatcttcgtgaagactctgactggtaagaccatcaccctcgaggttgagc

SEQ ID NO: 471366 - DNA, 101 bp, Homo sapiens
gcattttgacagagatcttccagaatttgggagctatgaagacatgattggtgaggaggtgccatcggatcaatactactgggctcctttggcccagcatg

SEQ ID NO: 471367 - DNA, 100 bp, Homo sapiens
cttattaacctcattcctgcacataagaagatgggtgtgaacctgacacgcagcaacaaggagacggtgaagcacagcgacgtcctgtttctggctgtga

SEQ ID NO: 471368 - DNA, 82 bp, Homo sapiens
ggtttggaaaagaaatcttagtaaaaacattacgagtggtgttatggctgattgtcctcacacaattggtgttgaatttggt

SEQ ID NO: 471369 - DNA, 100 bp, Homo sapiens
tgagatttaccgcaagggcaccatctccttctttgagattgatggacgtaagaacaagcttctgcagaaagccgtcattacacctgattttgaaaaaaac

SEQ ID NO: 471370 - DNA, 101 bp, Homo sapiens
ttttgggaaagccaaatggagctcagaaagctgtatggacctctgtgtgggtgcgtatagcagcaaaattcatcattcatgcccctcctggagaatttaat

SEQ ID NO: 471371 - DNA, 75 bp, Homo sapiens
catttctggaagcattctactttcgtaatggacctgaaagtggcagcaagattatggttcagtttcctcgtaacc

SEQ ID NO: 471372 - DNA, 124 bp, Homo sapiens
gctcacccgcagggcgatcaaatggtcccggctgctgcagggcgggggcgtccccaggagccggacagatgtttcagaaagaacaagtggatcctcttcagatgaaattgcagcaggtgaatgg

SEQ ID NO: 471373 - DNA, 100 bp, Homo sapiens
cctggccgacatcgcggccttcttccgatccggtgctggagaatctggtaaaagcaccattgtgaagcagatgaggatcctgcatgttaatgggtttaat

SEQ ID NO: 471374 - DNA, 100 bp, Homo sapiens
ttctttcgatcagagatcggcggagaccctcgaagtgcgcaaacttgacactcaccctgaccggtgaagctttgttctaagaatatttgtttcatctagt

SEQ ID NO: 471375 - DNA, 83 bp, Homo sapiens
acattaaaaattagagcagaagttttgagccactatattaaaactgctaagacaggtgctctagttcacagctataggggaac

SEQ ID NO: 471376 - DNA, 100 bp, Homo sapiens
tcctgaggaaggccgtccacaaggtctgctcaccaggtggccagataccgcccacgtgcccccatcattgctgtgacccggaatccccagacagctcgtc

SEQ ID NO: 471377 - DNA, 75 bp, Homo sapiens
ctagacctgaactcttcagataatcagagtggaggaagtacagccagcaacaacgactgaaagacctttcattca

SEQ ID NO: 471378 - DNA, 82 bp, Homo sapiens
gaggaacgaagaaacagacattcaacatgattgcatttgaaataacccaggaggctggagaattcatgatcactttcccata

SEQ ID NO: 471379 - DNA, 96 bp, Homo sapiens
cccaggaacgtggcgctcatcaccggtatcacaggccagatctattccagaggggagcttcaccacttcattgacggctttaatgaagagaaaagc

SEQ ID NO: 471380 - DNA, 96 bp, Homo sapiens
tggtgttttagaggataccttggtcccagagtcatcatgaaggcagagaattttttgtgggcctttccaaaaggacaaatcaacgaggtgctgaaa

SEQ ID NO: 471381 - DNA, 80 bp, Homo sapiens
aaaagcaagctgaagacatcaagaagatcttcgagttcaaagagaccctcggaactttcactgttacatgccttgaagtg

SEQ ID NO: 471382 - DNA, 75 bp, Homo sapiens
ccagccaggacggaagcgaaaatcgaattgtttgggcactgatgaggataatagccaaggttctggaggacaaca

SEQ ID NO: 471383 - DNA, 96 bp, Homo sapiens
tgcacacccttcctgggtgatggtgcactttacaggtccccgatgaaccaagagaaccctccaccatatccaggccctggtccaacggccccatac

SEQ ID NO: 471384 - DNA, 75 bp, Homo sapiens
gccacacaggtagccctggacggcattcagtgttttgagctcccagctcctccagcagccgacaggaggcccgtc

SEQ ID NO: 471385 - DNA, 121 bp, Homo sapiens
gctgcaacctgcagcacatcagcgaccgggagaacatagacgatcaatgaactgagccatgttcaaatccctgttatgttgatgccagatgacttcaaagcctattcaaaaataaaggtgg

SEQ ID NO: 471386 - DNA, 100 bp, Homo sapiens
tgagatatttgggctttatggacagaccacaggaaaggataaaagaatcagagtgtctcaacccttgacaagaggaccaagtgcctttattccagagaag

SEQ ID NO: 471387 - DNA, 75 bp, Homo sapiens
cagaagtgccgaaagagcactggactccggaagagttgtaaacaaacgagatgttcctgcccagtaaaacttcgc

SEQ ID NO: 471388 - DNA, 97 bp, Homo sapiens
taacatattactggcatcttcaatctggtagattggggtcaactggactacttagttgtagacatgccaccaggaactggagatgtgcagttatcag

SEQ ID NO: 471389 - DNA, 126 bp, Homo sapiens
cttacagccgctcgtcagactccagcagccaagatggtgaagcagatcgagagcaagctcccctgggacctgtggccgccgcccacagaccatgctcctggggcgcctgacttcccagctgttgag

SEQ ID NO: 471390 - DNA, 83 bp, Homo sapiens
ccaggttccaaatcatcaatgaagcaagtaaggcgtccaagaggagttatttccaccccagtgattagaacatttggaagagg

SEQ ID NO: 471391 - DNA, 75 bp, Homo sapiens
tgttccagaggatgatgatgatgatgactaacagcttggatttacactgggcaacgtggttggaatgtatctggc

SEQ ID NO: 471392 - DNA, 90 bp, Homo sapiens
cttggactcaagcaatcctctcacctgagcctcctggctagatgtgactacagatcagtcgcatcgaatacattcattcaaagaacttca

SEQ ID NO: 471393 - DNA, 76 bp, Homo sapiens
gggtaaatgtaccctggaagagggatactggacctgtgataggacattgcatattaccaagccttgtctgctgaga

SEQ ID NO: 471394 - DNA, 98 bp, Homo sapiens
gtgagaaaggcccacctgtgtcctggttgagggtctccagggttctttggggcccgagttgaacctggtcatgaatgaacagaaggagaaaattacag

SEQ ID NO: 471395 - DNA, 82 bp, Homo sapiens
attcctggtctacatcctgcgggtgcctttgaaaatcaacgacaacttgagcacagtcctcctgcatatgcccaagaggatt

SEQ ID NO: 471396 - DNA, 90 bp, Homo sapiens
cgccttggggaataatcactttattgagctcgtgagcctgcaggtcctggatcaacacccagttgggacgagtgaccacagggatgccac

SEQ ID NO: 471397 - DNA, 100 bp, Homo sapiens
agatcttaagtagtgatatttctcttttgtctgcccctattgtaagtgcagatggaacacaacagaaaaactgttcttgaaaaccacctgctatttagtc

SEQ ID NO: 471398 - DNA, 100 bp, Homo sapiens
cagaagtgcagaatctgggaggagagctcattgtgtcagggggttggagctggctcactgctcaggactctgggccttcccagactgggccccaacggag

SEQ ID NO: 471399 - DNA, 83 bp, Homo sapiens
gcccctgctctgcctggcgctgctgcccgcgctcgccgcacgaggtgccccacctcaaccagaatgcctggaacaacctggag

SEQ ID NO: 471400 - DNA, 100 bp, Homo sapiens
tatgccctgcaactgcaccagttacaggctggccagctaaactatgtggatccagctactggctatgtggtgctcacacagattgcccacttgcaaagag

SEQ ID NO: 471401 - DNA, 106 bp, Homo sapiens
acagtttgctctgctcttccaacaccagtggaagatgatcacatcccagtgagaaagatcagtctaaagaaaaggagaagaaagtgaaaaaaacaattccttcctg

SEQ ID NO: 471402 - DNA, 75 bp, Homo sapiens
gattccttgcagagacagctcaacacggcacttccacagcatctgacagatacgtctcatggtgtaagaaataag

SEQ ID NO: 471403 - DNA, 75 bp, Homo sapiens
gactgccttgtctatgcatatatcataaagggtgaatctggattgggaaagtcgacattaatcaactcattattc

SEQ ID NO: 471404 - DNA, 74 bp, Homo sapiens
gctttattgacctcgactcccatgcggtgcctggtggtgctagctcctcccacctcagcacctgctgcatctgg

SEQ ID NO: 471405 - DNA, 48 bp, Homo sapiens
tcgattgcattggcaatgagacaggtgctggagaatctggtaaaagca

SEQ ID NO: 471406 - DNA, 100 bp, Homo sapiens
tagcttctgttatcctgtgacctgcaggtactgggagatccatagggaggacggcggaacatctggaggctgggaaatgtgttccttgcctgtatctccc

SEQ ID NO: 471407 - DNA, 100 bp, Homo sapiens
ctgcgcagcatcaaccagggcctggaccgcctgcgcagggtcagccaccagggctacagcactgaggctgtgcagggctcgcggcctggcaagaatgtac

SEQ ID NO: 471408 - DNA, 51 bp, Homo sapiens
cgggaccgtggcttcggcttcatccgcttgatatgtgtcacaaagatgtct

SEQ ID NO: 471409 - DNA, 83 bp, Homo sapiens
gtgagattgcactgctgcagtccaggctgaagacagagggctctgatctgtgcgacagaggccgttgccgtctgcacccagac

SEQ ID NO: 471410 - DNA, 107 bp, Homo sapiens
cggggcccgccgccgctcaccgcagccccctcctggcgacccgcaagaatgtgggtgccggcaggacaggcgattggtaagtccttgtttatagagcaaaggcgggg

SEQ ID NO: 471411 - DNA, 98 bp, Homo sapiens
actaccacaaggcccatgcctgcatcatggacagtcattttgtttactcattcagccctgttgcaggtcccaataaactcttcataaggttgacagaa

SEQ ID NO: 471412 - DNA, 100 bp, Homo sapiens
gcctgggggcccgagaagcttcctctcagccaccattggttcaggcaatcttcagcggtgatccagaggagatccggatgctcatccataaaactgaaga

SEQ ID NO: 471413 - DNA, 75 bp, Homo sapiens
gtcgcgtctcggaaaccggtagcgcttgcagcatggagagcaagccctggaggttcactctttcaagaagtcgtg

SEQ ID NO: 471414 - DNA, 101 bp, Homo sapiens
catgatgatttctacttggtggtgtgtaacgactgtaatcaggttgtcaaaccgcaggcatttcaatcacattatgagtgaacacaacatgctcccttggt

SEQ ID NO: 471415 - DNA, 100 bp, Homo sapiens
tttctacaaactctgtgcctcaacaaccatttctaagtgatgagtgatgtgtctgcaggaggagccactgtttttcctgaagttggagctagtgtttggc

SEQ ID NO: 471416 - DNA, 100 bp, Homo sapiens
cgcgctctgcctgccgcctgcctgcctgccactgagctgcacagttggggatcttcaaaccaagatagatggcttggaaaagactaactcaaagcttcaa

SEQ ID NO: 471417 - DNA, 71 bp, Homo sapiens
aggtgctgagggactccttcattggggagaactctaggacttgcatgacaaatttacatgtattggagacc

SEQ ID NO: 471418 - DNA, 134 bp, Homo sapiens
agaggaagaggaactctaacaaggggagcttttgttggggcgacagctgctcctggctacatagctccaggctgaggaaaaggcagatgctctgaataaggagctgctgatgaccaaacagaagttgattgatg

SEQ ID NO: 471419 - DNA, 83 bp, Homo sapiens
gggggacctgccggcacgcgactccccccgggcccaaagaactgtggctgcaccatctgtcttcatcttcccgccatctgatg

SEQ ID NO: 471420 - DNA, 75 bp, Homo sapiens
cagccacctctcatctccagtatggactccatatcacagaagtctcaggctcctacagaagaagggaaaaaagag

SEQ ID NO: 471421 - DNA, 100 bp, Homo sapiens
attggagaaaagcattgatgacttagaagctaaagtccaggaagagattgaatgtgtagttggcagaaaccggagcccctgtatgcaggacaggagtcac

SEQ ID NO: 471422 - DNA, 90 bp, Homo sapiens
ctgggagatatgattaggagaagtggtggccacagtcgaaaaatcccaaggtgggatgtgtgtgggctgaaattccgagctgcggttgtg

SEQ ID NO: 471423 - DNA, 104 bp, Homo sapiens
cgcgccgtggctccggatctcttcgtctttgcagcgtagcccgagtcggtcagcgccggagacaatgcagatcttcgtgaagactctgactggtaagaccatca

SEQ ID NO: 471424 - DNA, 76 bp, Homo sapiens
gaaaatgccctcaaacgcgccaacggacccagtatttcaggaaaaacccagggtcattgtggattttgaaactgtc

SEQ ID NO: 471425 - DNA, 82 bp, Homo sapiens
cggatgagtacgataccgaagcgggctgtgtgccccttctccacccagagatgagctttgatccaaaccttctccacaacaa

SEQ ID NO: 471426 - DNA, 50 bp, Homo sapiens
tggacacagcatcggccctcatcaggctggctgctggcgggatggacacc

SEQ ID NO: 471427 - DNA, 138 bp, Homo sapiens
tcacatcggggacatcgtctccctgtacgccgagggctccgtcaatggcttcatcagcactttggggttgcagagcctgaggcctgtgatcagatgtacgagagcttagcgcgactccattcaaactactacaaacac

SEQ ID NO: 471428 - DNA, 101 bp, Homo sapiens
cctttcggcttctgagacggcggcagcagcggcattcaggttcctcaagccaggacctacgcacctgttgtgagtggtgttatagttctgcagggcgcaca

SEQ ID NO: 471429 - DNA, 110 bp, Homo sapiens
atctggtgtaccaggcgaagctggccgagcaggctgagcgatacgacgctgcagcagaaggccgtggctagtgagatcttcaagggcaagaaggataattaccctcagag

SEQ ID NO: 471430 - DNA, 100 bp, Homo sapiens
tctggacacagaagtatttgtgacaggcgcatattaaatttcctattgactacccctattcaccacctaccttcagattcttgaccaaaatgtggcaccc

SEQ ID NO: 471431 - DNA, 97 bp, Homo sapiens
cctggggcttcacccttaaggggggtctggaacactgtgagccgctcacagtgtctaagtctatccttcactggagtctgatgatgatgaccctgct

SEQ ID NO: 471432 - DNA, 75 bp, Homo sapiens
gataatcaaccaactgttacaatcaaggtctatgaagatataatgaagatctggaacttgaagatgccattcata

SEQ ID NO: 471433 - DNA, 100 bp, Homo sapiens
gcagacactggacatcatagaattttggtcgtttggaagaatggacaaattcaatatagcattggagaccgttacataactgaagactcccaccttcagg

SEQ ID NO: 471434 - DNA, 80 bp, Homo sapiens
tggtggggggatatcgccattccccaggttttgaacgaagaatgtgatcagaactggtacaaggcagagcttaatggaaa

SEQ ID NO: 471435 - DNA, 83 bp, Homo sapiens
tcgagggtcaggtgtgtgggcagggatccagacatttaatgtggatgcaccatgccagaccgtggaagatttaacgaatgggg

SEQ ID NO: 471436 - DNA, 83 bp, Homo sapiens
ctggagtcagtggaagacggagctggtcggcccgaaggcccagctgagagccagcctggaggttacccagcagcaggccaccc

SEQ ID NO: 471437 - DNA, 98 bp, Homo sapiens
tggaagctgatcacctggagtgaagacctcacacgaatccggagatgatgagtatcaaggggaccagtcagacacagaggacgaagtggactctgact

SEQ ID NO: 471438 - DNA, 90 bp, Homo sapiens
aaaggaacagcccggcttattgaacacatcagaatccacacaggttcaaaccttgtactactcagctgatcacaagctgcttgatgggaa

SEQ ID NO: 471439 - DNA, 154 bp, Homo sapiens
tgctgaaaattttccccagcagcactatgctaaggaaactccaaggcttgccttcaagaataactgcgaactacttgtctaccaggtccagaaggtcctccaggtctccctggaaatggaggtattaaaggagagaagggaaatccaggccaac

SEQ ID NO: 471440 - DNA, 87 bp, Homo sapiens
ggagcggcgccgagaggccgtgcgggacgcgggcgccaggaccggccgaacgcagagcccgagcgggaagaagttccgcagcaagcc

SEQ ID NO: 471441 - DNA, 82 bp, Homo sapiens
acattctatgcaagattacatatgtagctaatgctaaactaaacggatattcactctgaagtgggataaatgaagatgtgga

SEQ ID NO: 471442 - DNA, 100 bp, Homo sapiens
cagaggaagctggagagggatgtgtggctgcgatcctcggggaaaccgagtcatggctccgatcttcatcttgaagaagagtgacattgggtgactgctg

SEQ ID NO: 471443 - DNA, 100 bp, Homo sapiens
gaatgttgaagatgtccttaccagctttgacaatacaggaaatgtttgtaccaggatcatctatgaccggaaattcctgatggagtgtcggaactcacct

SEQ ID NO: 471444 - DNA, 100 bp, Homo sapiens
tttcctacgtacgtccactgtagtttttgcagatacaacactagctgtagcaaagcctatgtaaatcatatgatgagccgtcatttcaccaagctgataa

SEQ ID NO: 471445 - DNA, 100 bp, Homo sapiens
gatatgacgagtgaagtcctacaaattaccatgtctcctgacaagccttatttcaggcatggattccgtgaaggaacaacacctaaacccaagagggcag

SEQ ID NO: 471446 - DNA, 73 bp, Homo sapiens
gtccagcatccgaccaccgaggctggagggggagaacacccagacagccacaaccaaagtcccggagatccgt

SEQ ID NO: 471447 - DNA, 99 bp, Homo sapiens
ctgagccgcgccgcaccatgcccgccgtggacaagctcctgctagaggaggcgttgcaggacagcccccaggtattctttaggtgatgctagaaggcct

SEQ ID NO: 471448 - DNA, 82 bp, Homo sapiens
ggaaatcttcaatccagatattgccaaacgtctcaagtccagtaccagttttgcaaatattcaggaaaattcaaactgagac

SEQ ID NO: 471449 - DNA, 76 bp, Homo sapiens
tgaaatttacctaccctacattattccaaggggccgttgctccagggagaactgcaaatatcttcatccaccccca

SEQ ID NO: 471450 - DNA, 97 bp, Homo sapiens
actgcagcctcaacttcttgtcctcaagtgatcctcccaccttagcctcctaagtagctgggaccacagataaagactatttcctgattgtgattca

SEQ ID NO: 471451 - DNA, 100 bp, Homo sapiens
tcgccaccctgcggtggattgactacggcaaagtggccactcagatagcctgggctggaagctcttctacgtcacaggctgcctgtttgtggctgtgcag

SEQ ID NO: 471452 - DNA, 100 bp, Homo sapiens
atcggaaacatggcactgttgcctatcagaagtcaattcaaaggacctgcccccagagagaatgcaaacgacgctcatcaaacagagacctcctcctccc

SEQ ID NO: 471453 - DNA, 100 bp, Homo sapiens
gggaaaatccctgtcccccagaaggagacaggcaagccccccgaggaggctcggccggcgagagaagtcactgtcactgcgacacccaggctggagtgca

SEQ ID NO: 471454 - DNA, 75 bp, Homo sapiens
gagcgcgagcggcgcgagaaatggggtgccgaggctcaggcagcatgacgacggagacctttgtgaaggatatca

SEQ ID NO: 471455 - DNA, 97 bp, Homo sapiens
gctaactacaagaaatgttacactcgtgggttacccagaccaaactttggccatttaacggatccatttgacacaccagcatttaacaaactttata

SEQ ID NO: 471456 - DNA, 73 bp, Homo sapiens
gccgagctttgcgggaaagcagcgagtatgtagagaagcccttgaagctggtcctcaaagtaggagggaacga

SEQ ID NO: 471457 - DNA, 75 bp, Homo sapiens
cagacgtgctccaggaggccagaaggaaataccagaacagccctgtggcccccacagcccagcccaaagccccac

SEQ ID NO: 471458 - DNA, 75 bp, Homo sapiens
ccgacatcaacacctctaagactggagaagggtggcccagttgaaatccttcccttcctctaccttggaagtgcc

SEQ ID NO: 471459 - DNA, 82 bp, Homo sapiens
tccctgcagccttctggtataccatcgtcaccatgacaacactaggccttttatgtcacctcggtaccctggaggtccaagg

SEQ ID NO: 471460 - DNA, 101 bp, Homo sapiens
agcgtctgcaccttcagaaacagtgctgaagcctttaaatgcagcatctgcgatgtgaggaaaggcacctccaccaggtgttcaggcgcttcgtggaggtt

SEQ ID NO: 471461 - DNA, 75 bp, Homo sapiens
gcaagatggtgttggaaagcactatggtgtgtggatatcaaagtattgcagagtgccttagcagccatccgacat

SEQ ID NO: 471462 - DNA, 82 bp, Homo sapiens
acagagcctcgcctttgccgatccgccgcccgtccacacccgccgccagtgtcaacagcatctccaccctggagcctgtgag

SEQ ID NO: 471463 - DNA, 90 bp, Homo sapiens
tagcaacctcgccccttgcaacaaaggcagactgagcgccagagaggacgtttccaactcaaaagcaagtgcaccggcacctggaccaac

SEQ ID NO: 471464 - DNA, 83 bp, Homo sapiens
cagtactttgagaaaatggacgctgacatcaatgtcacaaaagcggatgttgaaaagctgaagtggtgtgcttgggtcgctgt

SEQ ID NO: 471465 - DNA, 48 bp, Homo sapiens
tcaacttaaaagatgccacctctaagaacactcctatgccaccttcac

SEQ ID NO: 471466 - DNA, 125 bp, Homo sapiens
gcgccgcgtagcttccatccgccagctgccatgagcgagcgcctccgtcccaggtgctggagaatctggtaaaagcaccattgtgaagcagatgaggatcctgcatgttaatgggtttaatggag

SEQ ID NO: 471467 - DNA, 75 bp, Homo sapiens
catcctgaaaaattcaacagcaggtcagacccagctgcttttgagtcccgcctggagaaacgcagtgaatttcgg

SEQ ID NO: 471468 - DNA, 100 bp, Homo sapiens
taccaccacttccggtgacccgttcttcggatgctcagggttctggggatgctacagttcatcaggatagtgacaacctctggtgggacgcctttgccac

SEQ ID NO: 471469 - DNA, 90 bp, Homo sapiens
ctgatgccttacacgaattacacatttgatttcaagtactatactggcaattgctggagaagattttgcaattgttgcttctgatactcg

SEQ ID NO: 471470 - DNA, 90 bp, Homo sapiens
gcgggctcaggatggggcggccgtggtgaggaaccctggactctcagacctcctgccccccgaggtctgcagtctcctgaacccagcagc

SEQ ID NO: 471471 - DNA, 98 bp, Homo sapiens
cgacaggatcgtggagagagatttccagtggacggacaacaccgggctgcgccgtgaagaacctggtggacagcagcgtctacttccgcagcgtggag

SEQ ID NO: 471472 - DNA, 83 bp, Homo sapiens
accttctttcttcagccgaggccgccgccgcctctccttgctgcagccatggaatgcctgaggaagtgcaccatggagaggag

SEQ ID NO: 471473 - DNA, 75 bp, Homo sapiens
gccggagcgcagccctgaggcccaggtgagagggtccaagcctggtaagaatgtccagcttcaggagaatgaaat

SEQ ID NO: 471474 - DNA, 74 bp, Homo sapiens
gtgaacatcgaatcatggaatcccttgcatggctctcagacatccaggcagaaattgatgcccacaatgacata

SEQ ID NO: 471475 - DNA, 74 bp, Homo sapiens
gcgagcaccgggaaggggagcgtggggccgctgaatgttggctaccagggtatttagcctagttggcaagcgag

SEQ ID NO: 471476 - DNA, 100 bp, Homo sapiens
aatgaatggatgaacaggctcttgcacacaaagaagagacatgatgtatttgcatccttccctgcttcagccagaatgcatatactacaactgctattaa

SEQ ID NO: 471477 - DNA, 97 bp, Homo sapiens
gcggctagtccgcggccctgctgagagggaaaaggacgccgcggtcttcccaggcgtcgcggagagcagagatgtggtcttgctatgttgcccaagc

SEQ ID NO: 471478 - DNA, 75 bp, Homo sapiens
accacgagatgtcactccagaggaaggaaaatcacctcggcagtgtttgaaggaaggatactgcaactctttgaa

SEQ ID NO: 471479 - DNA, 100 bp, Homo sapiens
acagctggtaaaagtctgtgccccaatggttcgatattcaaaaatgtgaaagatgttgcagaagtgttccagaagtggctgaagatagaaggaaaaaagt

SEQ ID NO: 471480 - DNA, 75 bp, Homo sapiens
ctcttagtcagcatccttcaccacacagttggaatcgagagcacaatcattgtggagaagacagttcaagacctc

SEQ ID NO: 471481 - DNA, 100 bp, Homo sapiens
ggcaggagcttttcgtaaagggaagtcatttctactggacttcatgcttagatacatgtataacaagggctgcaacagtacaacgtacatacaggatgcc

SEQ ID NO: 471482 - DNA, 51 bp, Homo sapiens
ccaaggaagaatttcctctgaagcaccgagcttggggcttccttggtcgca

SEQ ID NO: 471483 - DNA, 75 bp, Homo sapiens
tctttgtcattctggacgcacatttgatgcccaggaagttaaaccgaatttaacagagagaattcaggactatga

SEQ ID NO: 471484 - DNA, 104 bp, Homo sapiens
cagcaggcgaggaggaagatggcgggacggctgccggcctgtgtggtggactgtggcacggggtcaaaatgcagatcttcgtgaaaacccttaccggcaagacc

SEQ ID NO: 471485 - DNA, 83 bp, Homo sapiens
gtaaagtcgagtatctggtgaagtggaaaggatggcccccaaagtgtttcccattaaacactaccaggacaaaatcaggcctt

SEQ ID NO: 471486 - DNA, 83 bp, Homo sapiens
ccttcgcgtcccctgcaccatgagctggggcaccgagctctgggtatcatgatattagctggtttgacatcaagtcatttgtg

SEQ ID NO: 471487 - DNA, 75 bp, Homo sapiens
tgtctgctagtgccatctgaaatccttcctggaacttgccacttctgccccaccaacgttgggccaaccaaaagg

SEQ ID NO: 471488 - DNA, 101 bp, Homo sapiens
aaaatccaaagtgtgtggagtttgcaaacaaattattgacggtcaaggtatttcatgccgaggtttcatgtccttagcaagctactgagtttcatggcacc

SEQ ID NO: 471489 - DNA, 100 bp, Homo sapiens
aaaaggcctaagaattttggcattgacctgcgaccgcatcaagcagtccgccagcggaaccaagcggcgcgtgttcatcatcgagaccatgggcggctac

SEQ ID NO: 471490 - DNA, 87 bp, Homo sapiens
cagttcttcctcccagagctgcagcggcgcctggacgactgggtgtccgcaatgttgccagtgtctgtctgcagattggctacccaa

SEQ ID NO: 471491 - DNA, 100 bp, Homo sapiens
tatgaataccgcttcctggagttcacgactctgagtgctggtgacgcatccaaagaagacattgacactgctatgaaattaggagccggttaccccatgg

SEQ ID NO: 471492 - DNA, 100 bp, Homo sapiens
gtgcgaagcaaattgcaagttgttcatttcccccggcatgtgagcatttgtcctgtgctttcacattctttctgcatggagaaagtaatgtatgcacaag

SEQ ID NO: 471493 - DNA, 98 bp, Homo sapiens
ggcggcggcgcgcagcgtgtcaggcggagagacccgccgccaggtgattgcccacagtgagtatcaaaagtccaaaagaatttccatctttctgagca

SEQ ID NO: 471494 - DNA, 98 bp, Homo sapiens
acagttactttatcccttcatctgtggatgggcagagtcttttattcaaaacttcagcgttctctatagtcccttgaaaaggcatctcattggaagtg

SEQ ID NO: 471495 - DNA, 100 bp, Homo sapiens
ttggactcagagtttccattgacactgatatgggtgatgatgatgcttatctgtgtattcatgaagatcagactgtgtacatccagccttcccatttaac

SEQ ID NO: 471496 - DNA, 100 bp, Homo sapiens
atgtctgtacctactgatggtgctgtaaccacctcacagattccagcttcggaacaagagaccctggatgagtaagagatacttacagaaagcaacaaaa

SEQ ID NO: 471497 - DNA, 82 bp, Homo sapiens
gaagaaacagttagcgcaagacacaggacttacaattctccaagtaaacaactgggacttcagtactagtgctaataacatc

SEQ ID NO: 471498 - DNA, 74 bp, Homo sapiens
aaagaagctgcagcggaggaaggcgaggttatcccatcatcaggtagcaagttgaaacgaccaacaccaacttt

SEQ ID NO: 471499 - DNA, 50 bp, Homo sapiens
cagggacccggtgacagcgtgagaggatgttgagaaagagaaggaaaccc

SEQ ID NO: 471500 - DNA, 75 bp, Homo sapiens
gacaccaaataaaatagccatctcacctttgaaatcgccaaataagatgacctgtgtagaaaaagcaggaacaga

SEQ ID NO: 471501 - DNA, 101 bp, Homo sapiens
ctgtcttcatccaccgtggcaatatcctattccccagaccgaggccttcatgccccgaggactagcagacaaacaaggacctgaggaatgtgatgcagttg

SEQ ID NO: 471502 - DNA, 82 bp, Homo sapiens
tctttccagaggccaggctttatgggagcatgggttaccagcgacgcaccctagatcaatggcttttcaaaagcagcacacc

SEQ ID NO: 471503 - DNA, 85 bp, Homo sapiens
cctccttatgctgatatacatccaatgaggctggatgaactgcagctttgcaagaattgcttttacttgtcaaatgctcgtcctg

SEQ ID NO: 471504 - DNA, 75 bp, Homo sapiens
gtggtacttctcgcagtccccgcgcgtggtcatccaggccctgctgctcctgggggccgccgccctggcctgcct

SEQ ID NO: 471505 - DNA, 82 bp, Homo sapiens
cttgggtgaaaaatatatccgcagggttcggatgagaccaggggaagccagtttattaggaaccatttgcagatggatgaca

SEQ ID NO: 471506 - DNA, 91 bp, Homo sapiens
ggaactcaatcaaaccagtattcttttcacacaggttttgattcccaccatggccatcacccagtttcggttatttaaattttgtacctgc

SEQ ID NO: 471507 - DNA, 90 bp, Homo sapiens
ggaaggttgaattagtcttctctgccacgcctgagaagattcaaggctggaggcaaagctggaaaggacagtgggaaggccaaggctaag

SEQ ID NO: 471508 - DNA, 100 bp, Homo sapiens
gctcttggctctcaacttattcccttcaattcaagtaacagatggactagaggcttttaccagatttcttaaaactgaattcagtgaagaaaatattgaa

SEQ ID NO: 471509 - DNA, 90 bp, Homo sapiens
cgcagaaaccccgttgacaaggcactgctttttcatgacggcctcagagaaccatggctactgccaagggaatcgccataggcatcgacc

SEQ ID NO: 471510 - DNA, 100 bp, Homo sapiens
gcagcccctgcgtcgccgggaccctcgcgcgcgaccgccgaatcgctcctgcagcagagatcccgactgggcctcctacactctgggcgtcttcatctgc

SEQ ID NO: 471511 - DNA, 50 bp, Homo sapiens
gccatcgttgctgccttcttcgtcaagagaggtgtgggaaatggaactgg

SEQ ID NO: 471512 - DNA, 107 bp, Homo sapiens
gccagactcctggagatcgacccgtacttgaagccctacgccgtggacttccagcgcaggcctacatacagatcacttttgtggagccctactttgatgagtatgag

SEQ ID NO: 471513 - DNA, 74 bp, Homo sapiens
gagatttctgaaattattgatgggctctctgagcaggagaaaacatccagtacagacctttctgatatccctgc

SEQ ID NO: 471514 - DNA, 100 bp, Homo sapiens
tcaggaaaggccccatcttcccttcacacctgtctgcgctcctcagaccaccggcaggtgaacagcctgatgcagaccgaggagtgcccacctatgctag

SEQ ID NO: 471515 - DNA, 50 bp, Homo sapiens
atctactcctacgtcaggccagagaggtgtcagaaactatttaaaagaag

SEQ ID NO: 471516 - DNA, 96 bp, Homo sapiens
gagtggctatggtgggcaaactaagccgattttccggaaaaaggcatggaggagtgacggcaggaactttctgtgctctgacaacccttatgcacc

SEQ ID NO: 471517 - DNA, 90 bp, Homo sapiens
cttggttctgccagatgttcctggggttactgtaaatgggaaggacaggcagagctaaacaaggagcagctgatgagccagatccgggag

SEQ ID NO: 471518 - DNA, 100 bp, Homo sapiens
agcccgtggagtcggctgagggaaaagcgaggcaaggcaggcggactcagcccacctgcacccaggtgaaataaacagctttattgctcacacgaagcct

SEQ ID NO: 471519 - DNA, 75 bp, Homo sapiens
tggatgtggtggaccagtgcctcgtctgcctcaaggaggagtggatgaaggcaagtgtccagagaatggctggga

SEQ ID NO: 471520 - DNA, 98 bp, Homo sapiens
cccaggcctgcgtccgagtctccgccgctgcgggcccgctccgacgcggaaggtggccatgaacatcctcaacagcggccggttcagcatgggcagcg

SEQ ID NO: 471521 - DNA, 75 bp, Homo sapiens
gggggtggcgggcgcagctgctgtgacagatagaaaatgctgctgaagaacctagagtcttatgtattatacaag

SEQ ID NO: 471522 - DNA, 100 bp, Homo sapiens
cgacggccttgagcgaggaggagctggacaatgaagactattactcgttgctgaacgtgcgcagggagggaatgaaagctactggttgattttaaagtgc

SEQ ID NO: 471523 - DNA, 96 bp, Homo sapiens
caacccgaagcggcctgtgacctgtgaacagggctgtgggtggacccaagtggagagattgtggaactggcgaaaggtgcatgtccctggaaggag

SEQ ID NO: 471524 - DNA, 75 bp, Homo sapiens
tggcagatctgtccttaggaaagatatttaccaggaggacatgtatgcccaggactctatagagctactaacaac

SEQ ID NO: 471525 - DNA, 90 bp, Homo sapiens
gcacgcttcgctccaactcctgcagagctgagccggaggggaatccggaagggacacgctgaacagagccgctcccgaggccccggcgcg

SEQ ID NO: 471526 - DNA, 100 bp, Homo sapiens
ccaggaaaggaacgggatgatcatgaagagttagcctggcctggcataatgggtgggttggtcacttctgtgcaaattaatagaagtctgtccaggtaca

SEQ ID NO: 471527 - DNA, 74 bp, Homo sapiens
gggctgtgctccatggcgagctggacttgtcagcttgtgggaaagtgacatcagcgtccacccgctaaccctgc

SEQ ID NO: 471528 - DNA, 75 bp, Homo sapiens
tgagcaatcactttggattgaagatactacaaaatcagtttatcaattttctggatatgccgcagaaggatccgt

SEQ ID NO: 471529 - DNA, 74 bp, Homo sapiens
caccatgacaacgccttacccttcgctcccagcccagcaattaccagctctggctgggtcgccacaacttgttt

SEQ ID NO: 471530 - DNA, 83 bp, Homo sapiens
gggtccccgcgttcacagccccagcgcaggctgaccccgcactacatctacccaccagccatcgtgcagcccagcgtggtgat

SEQ ID NO: 471531 - DNA, 51 bp, Homo sapiens
tcgcagtggtcgcttcttctccttggctcaaccacaggaattatctcttgg

SEQ ID NO: 471532 - DNA, 100 bp, Homo sapiens
cttttgctcctggtggaacagttgttgcagcaagcgattcagggtttggattcaggatttgttcctagtgtccaagattttgataagaaacttacagaag

SEQ ID NO: 471533 - DNA, 87 bp, Homo sapiens
ccgtggccaccctgtgggcctggcgctggaggcagcggtgcacgtgcagggtctgcaagtggatgatgagattgtggagttcggctc

SEQ ID NO: 471534 - DNA, 88 bp, Homo sapiens
actctagaatatacaaagacaaaaggagattctgatgaagaagttattcaagatggtagacgttacatccaagaggaaataatccagg

SEQ ID NO: 471535 - DNA, 75 bp, Homo sapiens
ggataatcactaaattctgccgaaaggactgaggaacggtgcctggaaaaggtttgtctacagattttgagcgtt

SEQ ID NO: 471536 - DNA, 50 bp, Homo sapiens
cgccgccgctgccgcttccaccacaggaggagcaactgaagtcacatgaa

SEQ ID NO: 471537 - DNA, 73 bp, Homo sapiens
ttgatgaagcagatcgaatgtttgacatgggatttggtggtgctggacaacacagccctgaaccggattgcca

SEQ ID NO: 471538 - DNA, 80 bp, Homo sapiens
cagaaccacaggtggcagagaagaatgaggccaatggcagagagaccacagattggctctaccagtgcacctggacaggg

SEQ ID NO: 471539 - DNA, 96 bp, Homo sapiens
gcgagcaagatggcgcagacgcagggcacccggaggaaagtctgttactactacgacggtcacagaagatgtgaattcaagtatcaagacattttt

SEQ ID NO: 471540 - DNA, 51 bp, Homo sapiens
tcatatccactgccaaagggaccaagaaagcttcttgctatctacctccac

SEQ ID NO: 471541 - DNA, 51 bp, Homo sapiens
tttttaatgtggtgtttgcactgagggttatcaatactctggctgaccatc

SEQ ID NO: 471542 - DNA, 76 bp, Homo sapiens
taacccagtgcacacattaactgaagtggagcttctggcatttacatcaggttttgacccaccacatcagagtgac

SEQ ID NO: 471543 - DNA, 74 bp, Homo sapiens
tcatctccaggaaggacttcgagaccctctacaatgactgcaccaacgcaagattgctcatttagaaagtggat

SEQ ID NO: 471544 - DNA, 100 bp, Homo sapiens
gcgacccattcaggcacttatggccatttcagccaagatggggttttgctgtgttgcccaggctagtctccaactcctcagctcaagtgatcctcctgcc

SEQ ID NO: 471545 - DNA, 75 bp, Homo sapiens
ttgtcatgaagaaactcaatgatcgtgtcatgagaccacccgaaacaatgaaatgtaatacattcataagacaag

SEQ ID NO: 471546 - DNA, 100 bp, Homo sapiens
gtggtgggagaaccagccgactggagcaggcagcagcccagaccagcatctcagacatgtcgaaaaagatgttttgatccctaaaataatgagagaaaag

SEQ ID NO: 471547 - DNA, 98 bp, Homo sapiens
ttcaaagctccaccctccagcacattacccacctgcatcatctggggttccaatgcaggctggaagattatatctggatcaccaccagagcaagccct

SEQ ID NO: 471548 - DNA, 100 bp, Homo sapiens
aggagactcacttatgtgcacaatgacagaacaatggcagcccgagtacttataattggcagtggaggaagggaacatacgctggcctggaaacttgcac

SEQ ID NO: 471549 - DNA, 100 bp, Homo sapiens
ttcaaagttccccaagaagaactggaaaatgccagcctagtgtttacagtacctggagtagaacagaaaaattattatgtctgtgttcccttgggactca

SEQ ID NO: 471550 - DNA, 98 bp, Homo sapiens
gaaacccccaagatgggcatctattacattccattctcttgcaactagcaagtgaagccttgccaaatgacatgaccttggctcttgcttaccttctt

SEQ ID NO: 471551 - DNA, 100 bp, Homo sapiens
gaaggagctcatcaacaatgagctttcccatttcttagaggcatgaacaaccgggaggtgctggagcaggtggagcgaggctacaggatgccctgcccgc

SEQ ID NO: 471552 - DNA, 50 bp, Homo sapiens
tactggaaacccacaggcacacccaagctgaagccgacgtagcttctctg

SEQ ID NO: 471553 - DNA, 83 bp, Homo sapiens
cttctagaattttatgaggattatttcagcataccgtatcccctacccaaacaagctccaaatgagaagatgaagcaagtgtt

SEQ ID NO: 471554 - DNA, 99 bp, Homo sapiens
catctttgccaagaagaacgacattcccttcgagctgcgcatcgtggatctgattaaaggagcctgtggtgctgaccgacacaaatcttgtgtatcctg

SEQ ID NO: 471555 - DNA, 100 bp, Homo sapiens
gttacaggaggggcacaccgtccttttgtctctgcctttgaggttggcgggaactgaaactggtgatctgtgaaaatggttcgctattcacttgacccgg

SEQ ID NO: 471556 - DNA, 73 bp, Homo sapiens
tctttctggcctggaggctatccagcgtgactctgttttgagaagtgcaaccagatctctcctggaattcaac

SEQ ID NO: 471557 - DNA, 82 bp, Homo sapiens
cgccagccgcaccatgccgctcctaagcctgcacagccgcggcggcagcagcagtgagagcaatgcagagtccctggacagg

SEQ ID NO: 471558 - DNA, 98 bp, Homo sapiens
agattgtcagattgatgattcctcacttcatgcagtaattacattcaagacaagagcagaagctgaagcacttcttaatgaagaggataactcagaat

SEQ ID NO: 471559 - DNA, 74 bp, Homo sapiens
tatacgttcttcatccattagttatagtcaagagtctggagcagcaggcaggaaaaatactattgtattacaag

SEQ ID NO: 471560 - DNA, 100 bp, Homo sapiens
ttgctgtagatccccagatcacctcgctcgacgtgttgcagcacatcctcatccgagcctttgatttgagtggggccaaggagatctgttgaagaatgcc

SEQ ID NO: 471561 - DNA, 74 bp, Homo sapiens
ccttctgccatgattgtgaggcctccccagccacgtgaaactggatatgatgatacatacgcagaacaaagtta

SEQ ID NO: 471562 - DNA, 87 bp, Homo sapiens
aaaagagaagatgaagaaacccagcttgatatgttggacttgcaattgtgaccaaatatattacaaagggctggaaagaagttcatg

SEQ ID NO: 471563 - DNA, 100 bp, Homo sapiens
cgcctccaggccaagagggatccttcacccgtgtctggatcgacgagaacgtgctaggagcccagctggacgttgaggccgcccattcagagatcctcaa

SEQ ID NO: 471564 - DNA, 100 bp, Homo sapiens
ggccggagaggagcatgaatggagcaaaatggcggatcatgtgcaggtactccaaagattcaggtttactcacgtcatccagcagagaatggaaagtcaa

SEQ ID NO: 471565 - DNA, 75 bp, Homo sapiens
aaaaggaatttatggaccttactgcagaacgtcccaattcttcaggccaaggaggacgaatccatgaaccaacca

SEQ ID NO: 471566 - DNA, 101 bp, Homo sapiens
agaaagtggagcacagtgtggagggtgcccagcgcgccgctgctatcgcgcgccagaaggccgagattgccgcctccaggagatggaataaactgagactg

SEQ ID NO: 471567 - DNA, 100 bp, Homo sapiens
ctcaggccttattgcttctggctgcctagatggggaggttaggatttgggatttacaccctgccttcaaaggcctcaccttcactgacctgcctttgtgc

SEQ ID NO: 471568 - DNA, 100 bp, Homo sapiens
atggggggtcagagtgccggaccccagcacacagaagccgagacgacactgccctaaccatcatggaggtggccgaggtggaaagtcctctgaaccccag

SEQ ID NO: 471569 - DNA, 100 bp, Homo sapiens
ctcgcgccggctatggccgtgccctggggctgagccctcaggtcccagagggtggaaggagccaggacgcacccccactgctgctgcaggagccgctgct

SEQ ID NO: 471570 - DNA, 87 bp, Homo sapiens
tgaatgtcgaatgtgactgactagcagcttcattttgaacgtatccagtatgccaagaccgactcagatatcattgccaagatgaaa

SEQ ID NO: 471571 - DNA, 75 bp, Homo sapiens
taaagaaggaaaaaggaacgaacttcaaccaggcaaatgttctgaaaaagactctgcatgggaatggcctgcctt

SEQ ID NO: 471572 - DNA, 82 bp, Homo sapiens
tcccaagaagtccgagacacgcgacacgatgaggcgagtggtacgacagagcaagtttcggcatgtatttgggcaagcggtg

SEQ ID NO: 471573 - DNA, 98 bp, Homo sapiens
gcatggagcctctccggctgctcatcttactctttgtcacagctttccccagacatggccaacaagggtccttcctatggcatgagccgcgaagtgca

SEQ ID NO: 471574 - DNA, 100 bp, Homo sapiens
aagaggcatgccagaggtagagcagcaggtggtccattatggctgacatgcaaaatctggtagaaagattggagagggcagtgggccgcctggaggcagt

SEQ ID NO: 471575 - DNA, 126 bp, Homo sapiens
aacaacccccaggtggactggaaggactggaagatcggcttccagctggccaaacgtaccaagaaagtcgggatcgtcggtaaatacgggacccgctatggggcctccctccggaaaatggtgaag

SEQ ID NO: 471576 - DNA, 95 bp, Homo sapiens
gcttttgccacctgggctgtgaggacgtcagatccgcataccccagacgcctggaaaacagggttggaagcccagcgaggctagaggccagtccc

SEQ ID NO: 471577 - DNA, 90 bp, Homo sapiens
tgggtcagtccgccgctcaccccgcggccgcaccttcccgccttctcaggtggtgatgatgtccagcaactctgtgaagcaggagaagag

SEQ ID NO: 471578 - DNA, 89 bp, Homo sapiens
gttagtcattgtggatgatgatacattaataagcattccaggatgccttgaagattttctgtaggataaaaggtggtcgagtttcaact

SEQ ID NO: 471579 - DNA, 97 bp, Homo sapiens
gaaaggcaaagaaaatgatatggaaatggaaattaaatgggttccaggaatcaagaacccagtctcggttgccaacagactcttatgtgaagggcag

SEQ ID NO: 471580 - DNA, 85 bp, Homo sapiens
tgggtgtaccagaaaacaagtggctgcctcctggtgacggacatgcaaggttcaactactcaatttcatgctggcatgagaagat

SEQ ID NO: 471581 - DNA, 97 bp, Homo sapiens
tcacagctgcccattgcctaaagaacccagcttcaaaaaatgtttatctgctggagttccacccttccctcagcctggcagcacttatccccaaagc

SEQ ID NO: 471582 - DNA, 99 bp, Homo sapiens
tggacacaagcctcattttggaatattgcagatatgctgtgatagcatttggatgtgccagctgtccaaaattaacttgtgggcgagagggctgtggaa

SEQ ID NO: 471583 - DNA, 75 bp, Homo sapiens
ctgctttcctttccctcagcacacagaggatgatgctgactttgatgaagcagcaatgcagcaagtcttggaaaa

SEQ ID NO: 471584 - DNA, 50 bp, Homo sapiens
ctcgtggcctgcctctgcgtgcgtttatggggaagtgctcttggtaacac

SEQ ID NO: 471585 - DNA, 83 bp, Homo sapiens
gtcttctcgacatgtgtgtgggaggctgacccgcggctgattgagtccctctcccagatgctgtccatgggcttctctgatga

SEQ ID NO: 471586 - DNA, 98 bp, Homo sapiens
gctcgtcacttgcctcccgggagtcgctgtggcaaaagggcaaacttgaagataaatcttttgactccagctctttagaggatctaaagtgaccttga

SEQ ID NO: 471587 - DNA, 75 bp, Homo sapiens
aatcatttcggctctcatgttcctccatgataaaggaatcatctataggaagcggctcagccccagggcagcaca

SEQ ID NO: 471588 - DNA, 82 bp, Homo sapiens
gaccgcgcgcagggcctgcagcgggagctggacggcgagcgcgagcggcgcgagaaagtggaggtggaggaagcgtccctgg

SEQ ID NO: 471589 - DNA, 74 bp, Homo sapiens
gtcaaagccaacaagttagaccacgaggagaaggcagagcccccccaggctatgaatgccctgatgcggttgaa

SEQ ID NO: 471590 - DNA, 96 bp, Homo sapiens
cagaaacgctccctctacgtcagacatatctgaagagatggattaagaatgctttggattaaggattgtggagcacatttcaatcattttaggatt

SEQ ID NO: 471591 - DNA, 101 bp, Homo sapiens
catgcgatggtagatcaacccccagagtctcactctgttgctgaggctggggtgcaatggcatgatctcggctcactgcaaccgctgcctcccgggttcaa

SEQ ID NO: 471592 - DNA, 97 bp, Homo sapiens
ggttttcaacaagtgctccatcaatggccacagctatggacccacgcagccacccagcctcagcactcatctgcgcagccatggaggccctgggacc

SEQ ID NO: 471593 - DNA, 100 bp, Homo sapiens
ccttggtggtggcccagctgctcctggtgcagtggaagcagaggcacccacgctcctacaatgtgctgctgctaacatctgcagaagatttggactgcac

SEQ ID NO: 471594 - DNA, 98 bp, Homo sapiens
gcagcaatgaccttccctcgggaattccacctctgcgtttttccctccaggaaaatatatgcagatgatgaacattcttaagccaattgcctttgatg

SEQ ID NO: 471595 - DNA, 51 bp, Homo sapiens
ctcccaagtggctgggattacaggtatcctgaagcagtttatgttgtttat

SEQ ID NO: 471596 - DNA, 100 bp, Homo sapiens
gaaataccatcgtttcttgggtcgtcatttcccccgcttctatgtcctgtacacaatcttcatgaaaggggtatgatatcagctttctgatcaccaactt

SEQ ID NO: 471597 - DNA, 50 bp, Homo sapiens
ttccagagagccagaaagaagttcattttccagacactgaaagagcagaa

SEQ ID NO: 471598 - DNA, 100 bp, Homo sapiens
ctggaacaggctctctcacaacatgaggcccacggcgttggccaaaattcttggagtttacagaattggttataagaactctcagaacaacactgagaag

SEQ ID NO: 471599 - DNA, 100 bp, Homo sapiens
ggacggggcgccgcggccgggcgggcagcagtcaaaaggctgagtttcaaattctggataatgtagactcaacgggagagttgatagtgagattacccaa

SEQ ID NO: 471600 - DNA, 96 bp, Homo sapiens
ggccgaggagcccggggagggacccggagctccagctgagatctgtatctgtggacctgaatgttgatccctcgcttcagattgacatacctgatg

SEQ ID NO: 471601 - DNA, 75 bp, Homo sapiens
ggtctcgccccagcctggatcacagccgcagcgcctctagcagtcatccgtccttggctcaggatttggagagct

SEQ ID NO: 471602 - DNA, 75 bp, Homo sapiens
gccaggtttctgcggatgcttctgcgactcgctgatgaggaggtgggccccactatggtgggcgatgaacagtcg

SEQ ID NO: 471603 - DNA, 83 bp, Homo sapiens
aaaggcttcattgcgtgttttgctataggaattctctgctcactgctgtgttcagaatcaagtggatgaagttattgatgtca

SEQ ID NO: 471604 - DNA, 100 bp, Homo sapiens
ttctctgtagtcagcagtcggctttgattataaaggagaagtggagaagcacacatctcagaaaggcagtcactgaggagaatattgcttctttgcagaa

SEQ ID NO: 471605 - DNA, 75 bp, Homo sapiens
tgggaaatccatagctaagatgccaggaccccctgaaagcctagacatggcaatctataagatggtttcctctgt

SEQ ID NO: 471606 - DNA, 112 bp, Homo sapiens
cggtcgaccccagccagcgcagcgacggggcgctgcctggcccaggcgcacacggaagtgatggaggagatgtataagaaagctcatgctgctatacgagagaatccagtct

SEQ ID NO: 471607 - DNA, 98 bp, Homo sapiens
aaaaaactggctgtgaataatatagctggtattgaagagaaggccaatgatgaggccaatcagagtgatacaagtgtctccttgtcagaacccaagag

SEQ ID NO: 471608 - DNA, 90 bp, Homo sapiens
cagctcctggccagggcgcgctgccccgcgggtgtgcctgagcctccgcgccccgcaggccctggtgcctgagattgtgagggagaccca

SEQ ID NO: 471609 - DNA, 98 bp, Homo sapiens
tgaagaacactttcaagaaccaggtactccaaagattcaggtttactcacgtcatccagcagagaatggaaagtcaaatttcctgaattgctatgtgt

SEQ ID NO: 471610 - DNA, 83 bp, Homo sapiens
ctggtgctcttcctgcacgataccggcctgcaggtggagttcatcaaccccatcttcgagttctcgcgggccatgcggcggct

SEQ ID NO: 471611 - DNA, 76 bp, Homo sapiens
acttgcatcaagctgggcatccagggctcgtacttctgctcgcagatgatatcatcaagttgaatcgaaaggaagg

SEQ ID NO: 471612 - DNA, 80 bp, Homo sapiens
cctctatcttttgttctctggcatggaaggggtcctcagagttactgggctgagtcctggatgcactaatcgtgagcatg

SEQ ID NO: 471613 - DNA, 100 bp, Homo sapiens
cgagcggagcctcaggagccggcggggacgccatgcgagccagagtgtgaacatggctacgcctcttcattcccgtccatgccgagcccccgactgcagc

SEQ ID NO: 471614 - DNA, 90 bp, Homo sapiens
ctacaatggagtcgagtctagaattcacacagagccacctaggcattgaagttgatatcgatgtggagcacggagggaaaagaagccgcc

SEQ ID NO: 471615 - DNA, 75 bp, Homo sapiens
gtgggcctgtggactgcagcctcggcggtcagcaggagcttgaagaaatccgcaaatgtgggatgaaaaacttcc

SEQ ID NO: 471616 - DNA, 101 bp, Homo sapiens
caaggggcagatcgagaagaggaagctgcgggagaagcggcgctccaccggcgtggtcaacatccctgccgcagagcacgtcagctaactgttcagatgat

SEQ ID NO: 471617 - DNA, 74 bp, Homo sapiens
tggaatttgaagattctacagataaatcagctttctacaagttctgattaaagtcagaaatagacacaatgatg

SEQ ID NO: 471618 - DNA, 100 bp, Homo sapiens
agccgacggcaaaggtgtcgtggtggtcattaagcggagatccggccaatggaagcagtgctgtgatgaaatcatgaaaattgaaactcctgctccccgg

SEQ ID NO: 471619 - DNA, 100 bp, Homo sapiens
aaaagaaggaagacggagcagcacagtcattcctttgtgaaaaaggcattcagacttaattcagtgcacaaatgagatgaatgtgaacatcccacagttg

SEQ ID NO: 471620 - DNA, 138 bp, Homo sapiens
ggaagagctgatgagaatgctggcggaggacgagctccgggatgctgtactccttgtctttgcaaacaaacagttactggggcttccggatgcagatgacgatgcgtttgaagagtacagtgctgacgtggaagaaga

SEQ ID NO: 471621 - DNA, 103 bp, Homo sapiens
cacgccgcacctgcgcaacctcgccgtggccatgtgcagccgctacgtccacattggccaactgtattcaactgacaagctgatcattgagaatcgagacatg

SEQ ID NO: 471622 - DNA, 89 bp, Homo sapiens
agagacaactgctgcatcttagatgaaagattcataacgaaggaggcccaacttcattcaataaggagcctgacggatttatcccagac

SEQ ID NO: 471623 - DNA, 100 bp, Homo sapiens
ggaatataatcctgaggtgtttgacaaaacataccaattcttgaatgacatccgagcgaaagagaaagagtcttcccatgcacaagatgattaatacaga

SEQ ID NO: 471624 - DNA, 51 bp, Homo sapiens
ggagtgtctggagccctggccaccagcggccatgaagactttgaatttatt

SEQ ID NO: 471625 - DNA, 100 bp, Homo sapiens
tgctattcctggtctacatcctgcgggtgcctttgaaaatcaacgacaacttgagcacaggctgtaaagcggttcttgaaacaagagtgcaagtgccacg

SEQ ID NO: 471626 - DNA, 75 bp, Homo sapiens
ctcctatttgaagtatttgacgaaaatagactggccataagatgttttattgaaagaaactttcaatatcaagta

SEQ ID NO: 471627 - DNA, 100 bp, Homo sapiens
agctgcagtctttgtgggacaagcctggagatttgaaaaagagaattgaatctctgatagacagagactatatggagagagacaaagacaatccgaatca

SEQ ID NO: 471628 - DNA, 90 bp, Homo sapiens
gagactaccagaaggcttatgaggatggctgcaagactgtcgacctaaagcctgactggggcaagggtgacgagaacaagtcagtgcgcg

SEQ ID NO: 471629 - DNA, 75 bp, Homo sapiens
aaattaataaaatgcacatatcccagtccattgagcaggtttggatgcatctgctcagactacttctcatgaact

SEQ ID NO: 471630 - DNA, 100 bp, Homo sapiens
aactcaaaagtcaaccgctgaagagcagcaacagcaggtggctacccagcagttggcttttcagcagcagcttttacagatgcagcagttacagcagcag

SEQ ID NO: 471631 - DNA, 88 bp, Homo sapiens
gtgggcctccatcagcaagctccagtgctacgtgtccctggcattttaggtgtcggttgggtagaaaagacagctttgatttctggct

SEQ ID NO: 471632 - DNA, 89 bp, Homo sapiens
cttaaagatcagtatttcatgcaaagacatcagctacttaagcgccacgagaagtgtacagctgcagctatcaaggctataagagaaag

SEQ ID NO: 471633 - DNA, 99 bp, Homo sapiens
gagctgtcctttcaggaaggagccattatttatgtcatcaagaagaatgacgatggaagcagtcaattatagatttcttcaaaccagcttcaaaacaag

SEQ ID NO: 471634 - DNA, 100 bp, Homo sapiens
gcttgttcgaatgtctgcaagccagttagaagccctctgtcctcaggaacgagttgaagcagttaatatggctgaaggaatcattcacgacacagaaacc

SEQ ID NO: 471635 - DNA, 96 bp, Homo sapiens
tggtagcccccacccctctccgtccatggccccagatgacacttcaggatgaagtcgctcacacagtcaccgagagccgggtcctccagaacacca

SEQ ID NO: 471636 - DNA, 100 bp, Homo sapiens
gagcaatggaaatttcaggaattaagtcaaccacgttctcataccagcctgaaggtacaggacatctgcttcagccatgactgtcgctgggttgtggtca

SEQ ID NO: 471637 - DNA, 100 bp, Homo sapiens
ttggactgtgcttcgacgatttggttatgatgatgacctggatttgacacctgaatatttgttccccctagtggcagccaaaagattgaaggaaggtgat

SEQ ID NO: 471638 - DNA, 76 bp, Homo sapiens
ccagaacccagcagcttgccagcatcgttgcaggcagtgataaccttttagtaatcttgaaaagaaaatggtggaa

SEQ ID NO: 471639 - DNA, 100 bp, Homo sapiens
cagcatatttgagtcatttccttcgtacccacagtgcttcatgagagaaggacagaataacgggctcccagattcacaagccccaccaagaggatcaccc

SEQ ID NO: 471640 - DNA, 90 bp, Homo sapiens
cacatgggtcctggagatggaatacagatcctgaaagatctgcccatggcacgtgtggttctcaaatataggcattctgatgggaacttg

SEQ ID NO: 471641 - DNA, 75 bp, Homo sapiens
cctcaaggcggcccggcgggcgactggacggccggacaggattgtcagtggcttcgccccgaggagagctgactg

SEQ ID NO: 471642 - DNA, 109 bp, Homo sapiens
gtggtcgtctggtcctactacgcgtacgtggtggagctctgcgtgtaacatttttctgcacattgtggacttgtctgatcccaagcaaatctggaaatttgttgaaaat

SEQ ID NO: 471643 - DNA, 75 bp, Homo sapiens
agcattcctgaaatacatccaggaaagacatggagattctcttaaaaagttggaagtccattattgaccatcttt

SEQ ID NO: 471644 - DNA, 101 bp, Homo sapiens
ttcatatttggcttcaatgtcatattttggcttcagacagcaaagtcctgacatgtgcagccgtgtggaggatgccgaaggaattggaatcaggcagccac

SEQ ID NO: 471645 - DNA, 75 bp, Homo sapiens
gcagaccggaagagacacgcggggcttcaggcactgaaagaggacatgagcggctacacaatctacgacacgtcc

SEQ ID NO: 471646 - DNA, 74 bp, Homo sapiens
aagcagttaacagtgccaccggtgttccaactgtttaaaggcgtctgtgaggaaatgacctacgaggaaattca

SEQ ID NO: 471647 - DNA, 100 bp, Homo sapiens
gacagctgcaaggagttactgaagataatcgcttatcagccgtatggaaaatctgtggactggtgggcctatggcgtcctgttgtatgaaatgcttgccg

SEQ ID NO: 471648 - DNA, 83 bp, Homo sapiens
tgtgccccttctccacccagaggttgatgccggcccaggatggatcagacctgtgaactacccagaagaaattgtctgctgcc

SEQ ID NO: 471649 - DNA, 75 bp, Homo sapiens
ctgatggagatcgtcacctacggccggatcccttacccagtaatatttggtgaagatgttgcctttggtggagtc

SEQ ID NO: 471650 - DNA, 75 bp, Homo sapiens
ctacacggtctcctgggtcaagttatttgctggtataaaggatggagaaagcctgcagctctttgaacaaagttc

SEQ ID NO: 471651 - DNA, 100 bp, Homo sapiens
ggaaagatgagcgaggagacggcgacttctgacaacgattttcggctttgtgagaaaccttaccatcaaacacgatggccagcaacgttaccaacaagac

SEQ ID NO: 471652 - DNA, 100 bp, Homo sapiens
atattgtgtcttccccggccggtccctcgcctcccggccgagctgacggatcccatggtccattattgcctttaccaagtcgttacagaatgggctctcg

SEQ ID NO: 471653 - DNA, 100 bp, Homo sapiens
agaagcaggtgcttatgatggacctaggactgctggcccgggtcctttttgtgctgattgtgctgagccagctcaccattctcattatttttagatatcg

SEQ ID NO: 471654 - DNA, 83 bp, Homo sapiens
accggacccaggccctggatgggactgtctatgatgtcatgtttgtcagcacagacagccctcagcgcctttttccaggagac

SEQ ID NO: 471655 - DNA, 74 bp, Homo sapiens
tgcgccgcccgaggccgtcggccgccgtcagcgagggcgccgagcaacttcgaaacgcttcgttaagggactca

SEQ ID NO: 471656 - DNA, 100 bp, Homo sapiens
cttttatattcatctcaaaaacaaaattctgaactcaggacttggcaaacggtatccaactgttgaaaaacgagccagagtcttcaatggagcaagttat

SEQ ID NO: 471657 - DNA, 101 bp, Homo sapiens
cagagattcaggccagagttgtgggccgccgtcggcagcaagaacagagagagaggtggacagatctgagagatactgagccacctcgtacatctcatcct

SEQ ID NO: 471658 - DNA, 51 bp, Homo sapiens
ccacagaatcaggggaggcatgcttcagatcccaattttgttcgtactttt

SEQ ID NO: 471659 - DNA, 100 bp, Homo sapiens
atgctccagaacttcaaagggaaggtcattgtcatcgtggggcatgtggcaaaacacacagctgaggaaaccacccctactcctaatcccccgactacag

SEQ ID NO: 471660 - DNA, 147 bp, Homo sapiens
cgagaggagccggagacgagaccagaggccgaactcgggttctgacaagatggccgggctgccccgcaggatcatcaagtgatacgggaacaacacctccagagagtggtatttttggatttatgataaacttctctgcatttcttg

SEQ ID NO: 471661 - DNA, 50 bp, Homo sapiens
gaccagcttagcttctgtcctaaagctctattaccaggttttaaacttcg

SEQ ID NO: 471662 - DNA, 100 bp, Homo sapiens
tgtgacactgcatacagatgtaggtgatattaaaattgaagtcttctgtgagaggacacccaaaacatgtgagagatccggaaaatgaggcccataggaa

SEQ ID NO: 471663 - DNA, 90 bp, Homo sapiens
cttttaaaggaacttgatctggaaaaggaaattcggcgccttcatcagtatgtgaaatttgctgtccaagatgtgaatgatgttctagac

SEQ ID NO: 471664 - DNA, 97 bp, Homo sapiens
tcaaacgcttggattctacagcaacatattggtcaaaatgcagatcttcgtgaaaacccttaccggcaagaccatcacccttgaggtggagcccagt

SEQ ID NO: 471665 - DNA, 101 bp, Homo sapiens
gcctcccgagtggctgggattacagagttgcacggtcaattggcccgtgaaggggacgcctactttcaaacaaggcagacaggacacgacaggacggcggc

SEQ ID NO: 471666 - DNA, 88 bp, Homo sapiens
gtgattacagcaggagattatgaccttaacatcagtgatgctgcagttggagaagaaacttgaacgtgaacttgaggatgatgcacga

SEQ ID NO: 471667 - DNA, 100 bp, Homo sapiens
gttaatcctcaatttaagcctgatctaacccctagaaacagaatgtttcatccatttgtggaccaaaagatggagttggtttttatttttaaaaagataa

SEQ ID NO: 471668 - DNA, 100 bp, Homo sapiens
ggttggcgcccggcagcacgtgttcctggtttcaggtgtttgtggccagtcctcacaaaacacagcctattgtggagatcctgttaaaaaatcagcccaa

SEQ ID NO: 471669 - DNA, 90 bp, Homo sapiens
aatttttccatctaattatgacctccttcgccacttacagtatgcaacacattttcctatacctctgctggagaatgctggaggagacct

SEQ ID NO: 471670 - DNA, 100 bp, Homo sapiens
atcatggacacagttttgacagtaattcttttgggccgatgaagtctggcaaactgatgacctaatagagagaatccaggaagaggaaaataaaccttca

SEQ ID NO: 471671 - DNA, 101 bp, Homo sapiens
tttccatcaaaaagtgattaagcagagaatggagaagaaggttgattccagtgtatgttttaactggaaaaagtcttccatgaaaacgtcacttttaaaaa

SEQ ID NO: 471672 - DNA, 75 bp, Homo sapiens
cagtatctgcacaggaacttcattatccacaggaaatagggatccagccatccgtgggtcaggaggaatggagac

SEQ ID NO: 471673 - DNA, 74 bp, Homo sapiens
tacaactacaaccagctggaaggcagattcaagcagctgcaaggaagagctgaagagagacctgaaaattaaga

SEQ ID NO: 471674 - DNA, 74 bp, Homo sapiens
ctggcgggccttcaggtgcggcgtgagaggaaacttttgagaagaactttgaaagagaaacccataaaataagt

SEQ ID NO: 471675 - DNA, 73 bp, Homo sapiens
gcgacggcggcggcggcgggcacaggaagccagttgagggaagttctccatgaatgtacgtcacaatgatgat

SEQ ID NO: 471676 - DNA, 82 bp, Homo sapiens
cctgtctgggtctcagccgccaaagaccccgtccggtaggttgctgcttttgctcagaggacatccatgaccctaatggtct

SEQ ID NO: 471677 - DNA, 98 bp, Homo sapiens
tttgccattattctcggggctttcatagcagctgggtcacagactgggatgagcaacgggctgaaggcacgtttcccgggaagatctgaactggctgc

SEQ ID NO: 471678 - DNA, 100 bp, Homo sapiens
cttcgttttgtgaaaggccaatttcatgaatttcaagagagtaccattgggggtgtgatgaatgcagactctgctaccattttggctgtttggatcctcc

SEQ ID NO: 471679 - DNA, 100 bp, Homo sapiens
accataagggcttaactcatatatttaacccccctccaaaaaattcaaccctatgaaaagataaaggccaggggcttgcctgataatatatcttccgtgt

SEQ ID NO: 471680 - DNA, 101 bp, Homo sapiens
gtggaagttgatgtggagggagccaggtgcctatatctttctccagtttccaaggcaggaaaggtaaagagacaaagaaagtgccttgtacagatgcaaac

SEQ ID NO: 471681 - DNA, 75 bp, Homo sapiens
tccagatgctgaaaagagaaggtcaaacagctgaagaacacatctgttcgatttcaaaacagtcagatttcttca

SEQ ID NO: 471682 - DNA, 98 bp, Homo sapiens
gaacagggtggccgcttggtccaggttgacatgatgaaagaagcattagaaaaacttcagctcaatatagtagagatgaaagatgaaaatgcaacttt

SEQ ID NO: 471683 - DNA, 100 bp, Homo sapiens
cgcgcttcagcgtcccggcgccgtcgcgccactcctccgagtgatttgatgaaggctgctgcaggagagttcgcagatgatccctgctcttctgtgaagc

SEQ ID NO: 471684 - DNA, 98 bp, Homo sapiens
gagaggattacctttccaagccaatgcccaagacattataaaccctccacaaatgggaagtgttcctgtaatgacgcaaccaaccttaatatacagcc

SEQ ID NO: 471685 - DNA, 88 bp, Homo sapiens
ctccaaaaccagtcatgaccactagacccacagctgttaaagcaacaggtgggtgaaacagcagtgtgaatttgcaaaacaagcccag

SEQ ID NO: 471686 - DNA, 90 bp, Homo sapiens
gcaggtccctggccctcatgtacgagtccgagaaggttggggtcgcctcttccgagaaatgagccgtcagactgctacagcattacctac

SEQ ID NO: 471687 - DNA, 75 bp, Homo sapiens
tatcacagcagcatccgctctctggagacacctagctcccctgtttgacaaccctaagttggataaggagctgcg

SEQ ID NO: 471688 - DNA, 75 bp, Homo sapiens
gccccgccgctgagccgtcgcggagccgcgcagccctcggagcacgatggcccactgcgtgaccttggttcagct

SEQ ID NO: 471689 - DNA, 50 bp, Homo sapiens
gcccaacttccagcaggacaagcgcaaatgggagttggcgaaggcaagtc

SEQ ID NO: 471690 - DNA, 113 bp, Homo sapiens
ccaccatctccatcacccaccaacaacaccacaataatccacagccaaggtgacttaagagattaaaattaatttggttgctgttggttctgaacaaataatgagttctttta

SEQ ID NO: 471691 - DNA, 90 bp, Homo sapiens
acgagcaggaagctgcggctgagtcggttgcactgctgtgatccatcctcatctcctaaagatgcatcctgacttatctccacacttgca

SEQ ID NO: 471692 - DNA, 98 bp, Homo sapiens
gtgctgcaacccgcgcccgcttcggagagagaaatgctgggctcatgatggagcagtccaagaagtcctccctcatggtggcccgcagtattctcaac

SEQ ID NO: 471693 - DNA, 88 bp, Homo sapiens
cgggtcgccgcgccacagccgctgcggatcatggcgaatctggctttgggggaagaggaagaaaagtcggattacaagatcaaccacc

SEQ ID NO: 471694 - DNA, 76 bp, Homo sapiens
acctgaacttctcaggaagcagtactattcaagagacatatctgaagagatggattaagaatgctttggattaagg

SEQ ID NO: 471695 - DNA, 82 bp, Homo sapiens
ccacctgcccggtgcccgaggaggcagccaagctcgtagcctgccactccgtgctgcactggtctagagagcggcagttgga

SEQ ID NO: 471696 - DNA, 100 bp, Homo sapiens
tgcaagttgcacctttgagcaatggtctttgctgtgccttctctactgatggcagtgttttagctgctggactctgaacaggaagtgcctcctggaacca

SEQ ID NO: 471697 - DNA, 100 bp, Homo sapiens
ggacgacctcctgcagtgtcaccccgcaggaaagaccacagcaagattctttcattcgtctcctcctagcctgggggaccaggctcgaactgaccctgga

SEQ ID NO: 471698 - DNA, 75 bp, Homo sapiens
gggagcgtgatcacagtcctacaccaagtgttttcaacagaataatggctttcaatgagttcctatgtggatttt

SEQ ID NO: 471699 - DNA, 98 bp, Homo sapiens
tgcaaggtctctggaggaattcaatgatgtgtttccatgggtgaactatcaagatggcaacctcaacatttcaattccagtgtttagtattcatggca

SEQ ID NO: 471700 - DNA, 100 bp, Homo sapiens
aaacactaacttgtttccctgggaatttggaggtgggttcgaaaaatgactgtcatgtggcatgggtctctgcccaagctcgtaatgagactatagcaag

SEQ ID NO: 471701 - DNA, 90 bp, Homo sapiens
cttccctcggtctgggcttctctgaggcggcgagagatggtcaggtctggagctcgaccgggccaggcaggacagaagacttcagctgcc

SEQ ID NO: 471702 - DNA, 90 bp, Homo sapiens
gtatccagcaagagtgaccggggtgaagaagcaaagactcggcttctcgtcagtgcctcgcaggatggtaaacttatcatctgggacagc

SEQ ID NO: 471703 - DNA, 76 bp, Homo sapiens
cgggcctccacacgggcctccgaagagctgccgcgacgcccggcccgcagggcagatatcagttttagagaatgtg

SEQ ID NO: 471704 - DNA, 50 bp, Homo sapiens
ggcggaacacgaccagctgctcctcaagccttggacaagattcgctatga

SEQ ID NO: 471705 - DNA, 90 bp, Homo sapiens
tcaccttctgtctccacagcaggacagccgaactggaatctggatgagcagctcaagcagggagagacaaaggcagcgctgccctcgggg

SEQ ID NO: 471706 - DNA, 101 bp, Homo sapiens
ctcccagtctgaattctgtggattttcgtctaaaaataacaagaatgggaggagaagggttgctgcatctacctttatccctgactgccttgaagttgaag

SEQ ID NO: 471707 - DNA, 98 bp, Homo sapiens
ccagctcgaagaaggcgagcagggtgcgggagagccccttgcagaagacgccgtacgagcgagcagctgatgcagctgtacagtgcgcgccagcggcg

SEQ ID NO: 471708 - DNA, 75 bp, Homo sapiens
caggctcaggtgcagccgctggtgctggagaatctggtaaaagcaccattgtgaagcagatgaggatcctgcatg

SEQ ID NO: 471709 - DNA, 75 bp, Homo sapiens
ggctgtggaggttggggcctccagccatgacagtgatgagaaaggcagaggtggaggagacactgaagcgactgc

SEQ ID NO: 471710 - DNA, 100 bp, Homo sapiens
tggaggcacagctgcagtctgacgagaggggtggccatggtgcccggccctgcctcatagcaggctgccatgtcgcgggaggcgggctcatgccgcgtgg

SEQ ID NO: 471711 - DNA, 98 bp, Homo sapiens
tacctgcttcagtacaacgatcccaaccgccgagggctcatcattttgaacacagcacgaaaacattttggagctggtggaaatcagcggattcgctt

SEQ ID NO: 471712 - DNA, 88 bp, Homo sapiens
ctttcgctctttggactaatgggagttgcttttggaatgaatttggaatcttcccttgaagagaccttgcatcgaagtgggagtttca

SEQ ID NO: 471713 - DNA, 73 bp, Homo sapiens
ggaactatacaactatggagttgaccacttaggagaagaggcaagtagcgggtctgagagtgggagcccaaaa

SEQ ID NO: 471714 - DNA, 51 bp, Homo sapiens
cagtgagaggcatgcttccttagaccaggagctgggaatcccaagtgcaaa

SEQ ID NO: 471715 - DNA, 98 bp, Homo sapiens
ctcgtgatctgcccatcttgttactccctagcagtgtggtaagaacccaccatggccccctttgagcccctggcttctggcatcctgttgttgctgtg

SEQ ID NO: 471716 - DNA, 50 bp, Homo sapiens
tctgccccaaagtcttagaactggatgtgatggagctgcttgaagaagat

SEQ ID NO: 471717 - DNA, 82 bp, Homo sapiens
aggccctggcatcttttaattgtgtcccggcatggatatccggaacaacctcactaggttgcatgagctggagaattgctct

SEQ ID NO: 471718 - DNA, 82 bp, Homo sapiens
caaatcctccttcagcctcctggcgcccatccgcagcaaggacgtccgcagcaggtctcggcgcggaagatggccggcggcg

SEQ ID NO: 471719 - DNA, 100 bp, Homo sapiens
ccgggccgtgccccagatgcccaccgggatggagaaggaggaggaatcggtacaaagaattttacgtgaaagattttgtcgtcagagtccacatagtaac

SEQ ID NO: 471720 - DNA, 100 bp, Homo sapiens
aaatgcgctcgggctggaccagcagcaactccgaagtcaagcccgcactctgattacctttgctggaatgataccataccgaacgtctggggacaccaat

SEQ ID NO: 471721 - DNA, 73 bp, Homo sapiens
acgcgctaaggcaaagcacctgccaacaaatggaattttcttgagcatgtttctaatcgttttgccattggaa

SEQ ID NO: 471722 - DNA, 100 bp, Homo sapiens
gtcagccgcatcaaagaaaatggggctgcggccctggatgggcggctccaggagggtgataagatcctttcgctctactgagatgaagaaagaaaaagaa

SEQ ID NO: 471723 - DNA, 75 bp, Homo sapiens
atcgaagccatgatttaaatatcggcgttaagataaaaatgaatgccatttcccatccagtactgaagtgttaaa

SEQ ID NO: 471724 - DNA, 101 bp, Homo sapiens
ggatgtaataggagagaagatctataaggatggagaacgcataatcactcagagcatcctggccagaacaagccaaggagccaagacgagagggacacacg

SEQ ID NO: 471725 - DNA, 87 bp, Homo sapiens
ctgaggaaccagatatcttgaaaagctgccagaaagggaagaaggagaaagggccaacccctgaagaagcaatacagaaactgaagg

SEQ ID NO: 471726 - DNA, 50 bp, Homo sapiens
attttaactggaggagtaaacacagacagagatttgggattagaatctac

SEQ ID NO: 471727 - DNA, 82 bp, Homo sapiens
aaagatctaccttctggaagctactactacgtggtgcttggaaaggccagagtggactgggcaaatcaacgctggtcaacac

SEQ ID NO: 471728 - DNA, 100 bp, Homo sapiens
attagagaaagatattaaagacctagaatctgaacgccagcgcctggagaccatcctgaacctgtgtgccgaatacagccgggctgatgggggacctgag

SEQ ID NO: 471729 - DNA, 97 bp, Homo sapiens
agcctgtggctgtgcagggccccgagccggcccgggtcgaggattgatttccagagacttatgttacttgaggaagacaccaagaaggcaaagaaaa

SEQ ID NO: 471730 - DNA, 106 bp, Homo sapiens
cccaagcaacttagaatgcagcttcagcagaggctgcagggccagcaggtggttccttaaaaacagttattgctcaagatgaaaacctcccagaagatgttgtgag

SEQ ID NO: 471731 - DNA, 50 bp, Homo sapiens
caattgttgtgacttcactaataaaggtgagtgctccagttgtaacatct

SEQ ID NO: 471732 - DNA, 75 bp, Homo sapiens
gatcgggggcagcaacaacgatgccggatacaggagggacgtgcaccagctgcatcttcctcccgtgaggctggc

SEQ ID NO: 471733 - DNA, 100 bp, Homo sapiens
ggaagagatcacatagcagtgcccaggagaacaagcgctgcaaatacaatcactctaaaatgtgtgataggcttttgatgaggccattgctgaacttgat

SEQ ID NO: 471734 - DNA, 90 bp, Homo sapiens
ttgctcccgcctgagcccagcccccagaaaggattgtgacatatcgttggacccagaattgaggattcactccttctccagttgcacagc

SEQ ID NO: 471735 - DNA, 74 bp, Homo sapiens
acgcagatgctggagaagtccccttatgaccagattgcttcctccacagtttcctcaggaaaaaccagtgatca

SEQ ID NO: 471736 - DNA, 101 bp, Homo sapiens
cataccttttgggcttcagaatgcagtgttttcggccgaagaacagttgagaattgttgaagaacaaagaaagattcatgaggaaaggatgaaactagaac

SEQ ID NO: 471737 - DNA, 96 bp, Homo sapiens
ccgggatcgtgaccgagaccgtgaccgagagcgtgaccgagagcgcgaatatcgtcatcgttagaaggcattgccacctggggtatcgttgtcatg

SEQ ID NO: 471738 - DNA, 75 bp, Homo sapiens
aatgcaaagatgtagatgagagaaatgaggaatctacttatgggacccatatccatgagaaacgtgaagagcgag

SEQ ID NO: 471739 - DNA, 100 bp, Homo sapiens
agtggatgaacgtaccattggtgatcccgaggatttttgtcaagattggataaaccatgtatcacattgattgtagagatataatgatcattacttggag

SEQ ID NO: 471740 - DNA, 100 bp, Homo sapiens
gatgaagtgcgtgcatggaccatcagggcatgtggagaccccaaggcaaaaccatcctatcttatcgacaaaaacctggaatctgctgtgaaattcatag

SEQ ID NO: 471741 - DNA, 100 bp, Homo sapiens
aaatgaacgacacacatgttagagcccttctgaaaaaaaatgaccgctccttcatctgtcctgcagaaggttgtgggaaaagcttctatgtgctgcagag

SEQ ID NO: 471742 - DNA, 83 bp, Homo sapiens
gtcttaagaactcaggacaagcagcagaaatacatgcaacatggtgactggttgttgatcattatgaaaatcctagaaacgtg

SEQ ID NO: 471743 - DNA, 100 bp, Homo sapiens
ggctttggaatccaccagctacatccagctccctgaggtgctggagaatctggtaaaagcaccattgtgaagcagatgaggatcctgcatgttaatgggt

SEQ ID NO: 471744 - DNA, 71 bp, Homo sapiens
ggtctctggagacatcttcagcagcatgttggcagataaattgaacatgactccagaagaagctgaaaggt

SEQ ID NO: 471745 - DNA, 75 bp, Homo sapiens
cacgagccacgcctgatgaagccgccgatctggaaaggcaaatagggaactctaatgatccaggacaaagaagtt

SEQ ID NO: 471746 - DNA, 75 bp, Homo sapiens
gcaggaggatcactcgagcccagaagatcaagactagtgtgagcaacaaaaattacatgatgcgtaatgctgtgc

SEQ ID NO: 471747 - DNA, 74 bp, Homo sapiens
gaggaacaaattgtacatttgcccattctcaggaagagcttgaaaagaagatgttaccgagtacttcagtgaat

SEQ ID NO: 471748 - DNA, 83 bp, Homo sapiens
agtgctttgacctccgcagaaaggactctgtcagcaccttctcggctgctggaagtgaacaagcagtgggaccagcatttccg

SEQ ID NO: 471749 - DNA, 100 bp, Homo sapiens
ttccacactacctacagtgaaatagcatggatttcatccattatgctggctgttatgtacgcaggaggttggccttcattccacgatgtgatcaattctg

SEQ ID NO: 471750 - DNA, 75 bp, Homo sapiens
tgctggtgatcgcgctgatgttcctggcctggggggaagttactccacaggatccgctgaacataggatgttgcc

SEQ ID NO: 471751 - DNA, 51 bp, Homo sapiens
ctcaacaaccatttctaagtgagcccacccacctttgggttcctgttggac

SEQ ID NO: 471752 - DNA, 75 bp, Homo sapiens
tgagccagcagtcagtaatacagaagatcgtctggggaatatttttcatcttagttgcattgctgtttgtaattt

SEQ ID NO: 471753 - DNA, 76 bp, Homo sapiens
accaaaaagctttctgctaggggaacaatccctttgtgaaggctgctggtatgtgaatgtgtgccggttcccttgg

SEQ ID NO: 471754 - DNA, 74 bp, Homo sapiens
gaaaataagaacacagtggatgtcgagaacggtgcttctatggcaggatatgtttctgatgaagaattgaaaag

SEQ ID NO: 471755 - DNA, 90 bp, Homo sapiens
gttaaaacccgggatggctctgactatgagggctggtgctggccaggtggtgaaggtgggtctggttgaagactctccctccacagcagg

SEQ ID NO: 471756 - DNA, 100 bp, Homo sapiens
agaacttccattattgctgctgcaaatccagttggaggacattacaataaagccaaaacagtttctgagaatttaaaagtccgaaattgaagttcagagg

SEQ ID NO: 471757 - DNA, 100 bp, Homo sapiens
aacgcctggctcggagcagcagcctctgaggttattcagcttctcaaggctggaaaagcgaaggaagtttcctacaatgcactagcctcacacataatct

SEQ ID NO: 471758 - DNA, 82 bp, Homo sapiens
aaactggagagcttcatcaaaaatagtgatagctttgataaattctacttcaaagaaatcctgccacccgatgattaaacag

SEQ ID NO: 471759 - DNA, 115 bp, Homo sapiens
ctacatcttgggtatcctgcaggaggaggaggaagaagagaagctggacgctctgcaggggatcctctctgctttcctgtactaaggctcgtacgtctgcatcgattatcttacg

SEQ ID NO: 471760 - DNA, 100 bp, Homo sapiens
cctgcactctcatcgctctcggcctcggcctcggcctccgacacggtttcccaccgttttcgagaactcatgcagctcttccacactgcctgtgaagcca

SEQ ID NO: 471761 - DNA, 100 bp, Homo sapiens
agcgactcggaagattcgaggcggcgggggacaagtcggcgccccagagcggacgagatgcagaaactgaggcccagcagagattgagtaacttatgcga

SEQ ID NO: 471762 - DNA, 82 bp, Homo sapiens
ccaggagctgcggccccgtccggcccgggctgctcccggagccctgcctgttccctgtccatccaggccagcagctgaagga

SEQ ID NO: 471763 - DNA, 75 bp, Homo sapiens
ggacgcgtcatcgagtgtgacgtggtgaaaggtgagaattatgaagatgatgacctagtaaattctgatgaggtt

SEQ ID NO: 471764 - DNA, 74 bp, Homo sapiens
caagcgacctgtagagcgaagattttctcttcacagagccctcagagcccctccctgaggagtccaaacctgtg

SEQ ID NO: 471765 - DNA, 75 bp, Homo sapiens
acacaggtctgggagggatccctgtagcaggtgaccctggcagcaaccccaacaaacgccagaggcagccccctc

SEQ ID NO: 471766 - DNA, 50 bp, Homo sapiens
aaactgacttcgaggaattctttctaagattgatttccagagacttatgt

SEQ ID NO: 471767 - DNA, 118 bp, Homo sapiens
ctggatattgagccggatagacctattggatatggagcctttggtgttgtctggtgtgcaactgaggaacatggctcaagaaactaatcacagccaagtgcctatgctttgttccact

SEQ ID NO: 471768 - DNA, 75 bp, Homo sapiens
ggcgcggccggctgccggaaagtgtttcaccaaaaccaacagcactttcagcagcagccctcctcctgtggtccc

SEQ ID NO: 471769 - DNA, 82 bp, Homo sapiens
cgccgccgccgccggagctaacctcggggaccgagatgcaggagcaggccgggctctcgccatgggtcactgtcgcctctgc

SEQ ID NO: 471770 - DNA, 127 bp, Homo sapiens
ctttttggatcggcatctagtctttccgcttcttgaatttctctctgtaaaggagtctgaattaggtgacttagatacctggcaggaaaataccaatgcatgggaagaagaagaagatgcagcctgg

SEQ ID NO: 471771 - DNA, 124 bp, Homo sapiens
cctggctcctggctcctggctccctactcttctaaggatcgctgtcctgacagaagaggtctatgctccatcagcaagcactgccgactacaatagggactcgccaggctatccttcctccaaa

SEQ ID NO: 471772 - DNA, 110 bp, Homo sapiens
ttgtcgccttcctcttctgcatcctctggtccctgctcttccacttcaaggagacaacggccacacactgtgggctttctgaaacaaagactcattttgaagatgtttaa

SEQ ID NO: 471773 - DNA, 85 bp, Homo sapiens
acgctgaggccgaggcggagaaggggcttcctgagcgtcccagtacactgacagagattcccgatgtgccaggattctcctgggt

SEQ ID NO: 471774 - DNA, 89 bp, Homo sapiens
aagacccaaagtatgccctgaaaaagttgcaggaagaggcagaggaagaggaagaggaagaggacgtggccgtggcagaggaagagggg

SEQ ID NO: 471775 - DNA, 100 bp, Homo sapiens
gcagacctggtggaggtgttaaatgaaaaactctaagaaggagctgatgtggaggagcagctgagacagttcaagatgacgaccacagtagccacagact

SEQ ID NO: 471776 - DNA, 100 bp, Homo sapiens
accagctcacctctcaccgcgcatgtttggagttaaacacagtgggaatatcacttttgatgagattgtcaacattgctcgacagatgcggcaccgatcc

SEQ ID NO: 471777 - DNA, 75 bp, Homo sapiens
aagctaatttattgacttggcaagggcttattgttcctaacggcatcatcactggcgtgtacccggcaagcccct

SEQ ID NO: 471778 - DNA, 75 bp, Homo sapiens
ttctggcctggaggctatccagcgcccggcctgcatgcctacgaaaaggaggacagtgatgaagtccacctggag

SEQ ID NO: 471779 - DNA, 82 bp, Homo sapiens
aacgaccaagagggtgttcgactgctagagccgagcgaagcatggaaatcatattatgtagaatacttgggtgacatctgcc

SEQ ID NO: 471780 - DNA, 51 bp, Homo sapiens
gtaaagtcagtgacagccccatacagtgatgtgtgttctgaaattgtgaac

SEQ ID NO: 471781 - DNA, 100 bp, Homo sapiens
taggtgccaacattatgcgaagaactttacgtggacatcccatttaattctcagaagccgatcacaagaaatggcacctcgaaaggggaaggaaaagaag

SEQ ID NO: 471782 - DNA, 100 bp, Homo sapiens
cagacagcttccacagcctgacgccgaccttcgcagcgggctacattgagagacctcagctgattcgagcaaaagtgccaattgtgaagttcagggataa

SEQ ID NO: 471783 - DNA, 83 bp, Homo sapiens
gcttcgcccggctttgcagcggggacttcggcggcggcgcctcaggcacctcggcccgggtaagtaaggaggtctctgtacca

SEQ ID NO: 471784 - DNA, 100 bp, Homo sapiens
gagccagccggcccctgccgctggcccctaccccagcatgcccagcactgcggctgtcgtcactgcggacgtcttctttgccataaatgctcgaccaagg

SEQ ID NO: 471785 - DNA, 50 bp, Homo sapiens
atttcaaggacttgctgctgcacgatgtcagagatggctttggattcccc

SEQ ID NO: 471786 - DNA, 116 bp, Homo sapiens
gagcgcgaatagaactccacgaaacagacttcaatgggcagaagctaaagctatattttgcacaggctttcatctgagtggcacagtaactgagctggccactgcctctgaaccag

SEQ ID NO: 471787 - DNA, 89 bp, Homo sapiens
cttcctaagagataccgctcagaagaaaatgcaaaaaaactaatggaattagcctgcaacatgaagatgcaagagacaggctggctgtc

SEQ ID NO: 471788 - DNA, 83 bp, Homo sapiens
gtatgtccgctatccagaacctccactctttcggaggatacgaagcgttttcggcttcctgcccggagctgtgcagcaaacag

SEQ ID NO: 471789 - DNA, 100 bp, Homo sapiens
ggacagagcccgtggtcgcgcagtggccacagatgtctttaattccaaaaacctggccgttcaggcacaaaagaagatcttgggtaaaatggtgtccaaa

SEQ ID NO: 471790 - DNA, 76 bp, Homo sapiens
cccagatgaaatggatgagttcggtctctgcaagttcctgagactggcccagacgctgcggcactatggctacttg

SEQ ID NO: 471791 - DNA, 90 bp, Homo sapiens
caacttatcaacacaaggcagccacaggccaaaatcattgtattgactgactttaagacagctgattcagaggtaaacacagatcaagat

SEQ ID NO: 471792 - DNA, 74 bp, Homo sapiens
caaggagtttgggaaaaaccgcgaagtcatggggctctgtcgggaagattttatttggagagaagcaagcatct

SEQ ID NO: 471793 - DNA, 50 bp, Homo sapiens
ttcgccttcagctcgcacttcgaccccggagacgttctcttccagatggc

SEQ ID NO: 471794 - DNA, 75 bp, Homo sapiens
tcatctatgagaccttctacaagctggtgaaggagctcgaggccatgagcagatataccagcccagtgaacccag

SEQ ID NO: 471795 - DNA, 98 bp, Homo sapiens
tcggccccggcccctgccctggttccgttgcgcgccccggatgtggcgcggctgcgcgaggagcaggaaaagagttacactgttagaccttatgatag

SEQ ID NO: 471796 - DNA, 90 bp, Homo sapiens
gccagctgggaggaggccgtggtgtctctacctgttcaactcggttcccagtgcccccgacaagcccctgctggtgtctccatctcctgc

SEQ ID NO: 471797 - DNA, 75 bp, Homo sapiens
aacttcttatggacagcctcccactgctacaacacaggataaccttgatgataagctaaggaagtttgaaattcg

SEQ ID NO: 471798 - DNA, 90 bp, Homo sapiens
gtccagtcattccaaatgaagagatgcctggaagagagaagggcacagttacctaagtatcaacgtaatcttcctcggccaggacaggcc

SEQ ID NO: 471799 - DNA, 98 bp, Homo sapiens
ccactggccgctactacgccatgaagatcctgcggaaggaagtcatcattgccaaggtgacagagctgaatgaacctctctccaatgaagatcgaaat

SEQ ID NO: 471800 - DNA, 76 bp, Homo sapiens
ggaggaggtggagttgctgcccttccggagtccgccccgtgaggagaatggctaatggaggttggcaggatgctac

SEQ ID NO: 471801 - DNA, 89 bp, Homo sapiens
tcctgccgcgtgggcgaggactctgtggacttccggctccgcgtctctggctggccctgcataactcccgtttcctgagtctctgctct

SEQ ID NO: 471802 - DNA, 82 bp, Homo sapiens
ggacaggaactgtggacagtgaagagaggcctctcccaaagcacctgcgcagcaaccatctttcctgtgaaaaattccctct

SEQ ID NO: 471803 - DNA, 74 bp, Homo sapiens
gcgagcgctggacggagaggaaagcgaacatgtatcgattcgagggcactgggttttcaaacattcctcaactt

SEQ ID NO: 471804 - DNA, 115 bp, Homo sapiens
aaagcctctgctctgcctccggggacaagaaactagagcaaataaccgttttgaaattgtatctagaagagcagaagacagagaatggaaaagataaggaacagaaacaaacaaa

SEQ ID NO: 471805 - DNA, 75 bp, Homo sapiens
gcctcccgcccgccgcgctccagatgaagtgtgagcactgcacgcgcaaggatgtgacctgaaatggaagaattt

SEQ ID NO: 471806 - DNA, 75 bp, Homo sapiens
cctcatcctgccttgtgctcacagcttttgtcagaagtgtattgataaatggacagagaaaagtgacagtttcag

SEQ ID NO: 471807 - DNA, 74 bp, Homo sapiens
tccacgatggcctagcacgtggaattcgcgaagctgccaaagccttagacaacatgaatgtcagcatcatcatt

SEQ ID NO: 471808 - DNA, 98 bp, Homo sapiens
tggttggagggacagccccaggatgccgtgggccgcagccactcaggactgtcaaaggagtacgagagggcctccaaagtggaccagtttgtgacgcg

SEQ ID NO: 471809 - DNA, 100 bp, Homo sapiens
aaggcactgctttttcatgacggttgacatcatggacatatgtgagtccatcctggagaggaagcggcatgacagcgaaaggtctacttgcagcatcttg

SEQ ID NO: 471810 - DNA, 99 bp, Homo sapiens
aaactttccaatgagaagtggtgcacactcccgagatggtgcttgggacaacatggttaaaagggtcctggacagcatttacttcagccggaggttcca

SEQ ID NO: 471811 - DNA, 100 bp, Homo sapiens
gaaagagatccgcacgcagtatgaggcaatggcgtccagcaacatgcatgaagccgaagagtggtaccgctccaagttattagaggaagtaacacaaggg

SEQ ID NO: 471812 - DNA, 111 bp, Homo sapiens
ctacgcagaacccgggagtaggagactcagaatcgaatctcttctccctccccttcttggattttttatcaagcagaaatgcatcgaacaacgagaatcaagatcactgag

SEQ ID NO: 471813 - DNA, 100 bp, Homo sapiens
cccattacagacgcagcggttttgaccaggggacatagttctcaaactacttcagtatgaggcatcaacaaatgtagcagacaacaaagggtattttcct

SEQ ID NO: 471814 - DNA, 75 bp, Homo sapiens
ttgtgctcagtgacatcattcagattgctcgctgtaagcagctcatctgtgaccccagctacgtaaaagatcggg

SEQ ID NO: 471815 - DNA, 83 bp, Homo sapiens
gcctgtgtttaacccagtcaggtcccaggtgtggacactgccagcggctgcagccgacttggaatgacctgggagacaaatac

SEQ ID NO: 471816 - DNA, 100 bp, Homo sapiens
gggaaggaaatcatgtcaagcgaagccttgaaaaagctgccctgagacggtgtcccgccgaaagcctcacgattttgatgaatgtcgatttgatattagt

SEQ ID NO: 471817 - DNA, 100 bp, Homo sapiens
tgagaattggtgtaagacatcacaatcccattattcagagcgcgtatggagtggaaacgcttgtagggtttcaccaggctgaagtgcagtggtgtgatct

SEQ ID NO: 471818 - DNA, 76 bp, Homo sapiens
taggagactcagaatcgaatctcttctccctccccttcttgaaaatcccgttttgtcaacctaatgaagcattcaa

SEQ ID NO: 471819 - DNA, 100 bp, Homo sapiens
cgcacccaggagaaggagcagatcaagaccctcaacaacaagtttgcctccttcatagacaaggactctgatatgttggcttgtcataactattggcact

SEQ ID NO: 471820 - DNA, 100 bp, Homo sapiens
cggtttttctcttccttcgctaacgcctcccggctctcgtcagcctcccgccggccgtctccttaacaccgaacaccgttctggctccttggcagcaatg

SEQ ID NO: 471821 - DNA, 75 bp, Homo sapiens
ttgcaacgtcatcctccacagctaagacagagaaagagctggacccagatgggctgaagaaggagtcagagcggg

SEQ ID NO: 471822 - DNA, 83 bp, Homo sapiens
ccttccccacgcaaccccagatccatttacactttacaatctgtgccatcattggcgggaccttcaccgtcgccggcatcctg

SEQ ID NO: 471823 - DNA, 100 bp, Homo sapiens
cttgtttctggatgattctaagagaactgggcacctccgggctgtgaaaagttagggaagtgtctgacacctccagaatccattcccaagaagtgcctct

SEQ ID NO: 471824 - DNA, 75 bp, Homo sapiens
ttttgggactcgcctttgccctggcaaacactggaatcctactttttctgcttgcagccaatttactggagcagg

SEQ ID NO: 471825 - DNA, 100 bp, Homo sapiens
ctgctggctgccctgctggccgcgccgggagcggcgctggccccaaggcgctgccctgcgcagggaaacttggctgtaacttcaaaagaagatttgattc

SEQ ID NO: 471826 - DNA, 74 bp, Homo sapiens
tgcagagccaaaagtgaaccgaggaaaagcaggtacggaatgagccctggaacatttctatttcagcagaatat

SEQ ID NO: 471827 - DNA, 111 bp, Homo sapiens
ccgcgcgcagggcctgcagcgggagctggacggcgagcgcgagcggcgcgagaaaaggctgaggggatctggcggtggagcgctaggatcagacgcccccgcgatgaccag

SEQ ID NO: 471828 - DNA, 98 bp, Homo sapiens
gtgcacccccagtgggtgctcacagctgcccattgcctaaagaatgggctcgggatgagtttgaaggcctcttcaagcagccagcagaaaatgtcaac

SEQ ID NO: 471829 - DNA, 97 bp, Homo sapiens
atgtggactgcagtgctgcagtgccagttgctgatcatctgggctgtgatccacaaacccggttctttgtccctcctaatatcaaacagtggattgc

SEQ ID NO: 471830 - DNA, 103 bp, Homo sapiens
gatgctgatatcagtgatgttgcattccttgtggttggtgatccatttgggtcagaagagatcaattctacagaaatttccagtggttctgttgaggctttat

SEQ ID NO: 471831 - DNA, 100 bp, Homo sapiens
taacgagctggcgaagatgggcgacccggatctcctggaagtgttggcggaggaagggttttcggagctgccatacttcttacctctaccctaaatatgc

SEQ ID NO: 471832 - DNA, 97 bp, Homo sapiens
ctcccgccggaactccttcactctcagaggccgagtccctcccctccccacggctgcgtgtgaggaagagcaagcaggccctgagggactataagaa

SEQ ID NO: 471833 - DNA, 90 bp, Homo sapiens
cttcgatgatttactgaaatttgatgacctagatggaacacatgctctgatggagttaaacatagatgtagctgatgtggagagcttgct

SEQ ID NO: 471834 - DNA, 96 bp, Homo sapiens
tggaacgtgaagtagcagagtgaattctctggatctttgtcagcaaagccttctagacaagctcagtggaatctgaagggcccaccccatggagga

SEQ ID NO: 471835 - DNA, 96 bp, Homo sapiens
gagacgtcgctgaggggcttgcctgaagcgagggttccaatgacaggatttacacagagagcaactattgatccagaactgaatgaaatacacgtc

SEQ ID NO: 471836 - DNA, 75 bp, Homo sapiens
cgaagcctgacttggccaccttcgggttccccatctcatgctggacttcgagtaagaaggtgatttacagccagc

SEQ ID NO: 471837 - DNA, 100 bp, Homo sapiens
ccctcctttggtgacccacagctatcccctgaggcccgacccagagtgtcacaccctccgcagattgttctgcccattcataactgggaaccagaagagg

SEQ ID NO: 471838 - DNA, 51 bp, Homo sapiens
agcctcaatactgaggctgattggcttattgtgtaacagaacctggagcag

SEQ ID NO: 471839 - DNA, 80 bp, Homo sapiens
gagacctatgaccgaaagctcaagaatgaacttctaaaattatatctgggtgttggcacccagccactattctgccaatg

SEQ ID NO: 471840 - DNA, 97 bp, Homo sapiens
agagccggcggatgttcatgggcagcaccatcgagccagaagcagtatttgtcctggtgctgtaaaatacctggagtgctcggcgctcacacagcga

SEQ ID NO: 471841 - DNA, 98 bp, Homo sapiens
gggtcccgcggcgagcgagctcctgagctcccagcagtaggaggacagttgacatttaccatatcatatgaccttgaagaagaggaagaagatacaga

SEQ ID NO: 471842 - DNA, 95 bp, Homo sapiens
agccaggtgaagggccccgtaaattggaaggatgcacaagttccaaggttacgtttcagtggcgacagacaaagttgcagaaaagctgagctcta

SEQ ID NO: 471843 - DNA, 100 bp, Homo sapiens
gatccagcctgcggagcctgtggggcaggattgaaagaaggtggcaagaggaagaagcagaagcagagagaggagtcgaagaagaagaagtcgaccaaag

SEQ ID NO: 471844 - DNA, 48 bp, Homo sapiens
tgtccagaaaagctgccttatatgctgccgccagcaatctcaatgcct

SEQ ID NO: 471845 - DNA, 88 bp, Homo sapiens
tgttttcttggaagtcgatgtacatcagtgtcaggtgcattggatcgttgtgtgatggggataacagcagttgagattctaaacgctt

SEQ ID NO: 471846 - DNA, 80 bp, Homo sapiens
gagaggagccgggacacgcctagcgcgggctccagcggagctggagtttgttcagatcatcatcatcgtggtggtgatga

SEQ ID NO: 471847 - DNA, 97 bp, Homo sapiens
caccactgtgcaagtgaaagagctcagcagggagctgcaggagaaggagaaagtgattgaagtcctgcaggccaagctggatgctcggtccctcaca

SEQ ID NO: 471848 - DNA, 80 bp, Homo sapiens
gccgcgtccttggctggcgtgcgccatgtcagaaccggctggggatgtccgtcagaacccatgcggcagcaaggcctgcc

SEQ ID NO: 471849 - DNA, 51 bp, Homo sapiens
tgtggccgttacaatggggccaaaggagaaccagcagaaatccaccaatgt

SEQ ID NO: 471850 - DNA, 134 bp, Homo sapiens
ggggcagcgctcctggcgctgctggctgcgctctgcccggcgagtcgggctctggaggaaaagaaaggatgttaaagtctttagtgaagatgggacaagcaaagtggtggagattctagcagacatgacagcca

SEQ ID NO: 471851 - DNA, 51 bp, Homo sapiens
ggagtcttcagcacccccacaagcatgcagatcacaaggtttacatctggc

SEQ ID NO: 471852 - DNA, 96 bp, Homo sapiens
acaatgtggtccggaaacaggcagaggactcacaccacccggcaagaactgctcactacggctccctgccccagaagtcacacggccggacccaag

SEQ ID NO: 471853 - DNA, 98 bp, Homo sapiens
gcctttttccatctgcaggactatgaccaggcccgccactacctcctggctgccgtgaataggcagcctaaagatctccctagagcacgaaatcctgc

SEQ ID NO: 471854 - DNA, 74 bp, Homo sapiens
agatctgaatccagaggctctcggaggaagagctcagggtactccaaagattcaggtttactcacgtcatccag

SEQ ID NO: 471855 - DNA, 100 bp, Homo sapiens
gctactctctctttctggcctggaggctatccagcgccgggatagaaaatcgtcagctggacacagtaaatttctttttgaagagcaaggaaaatctttt

SEQ ID NO: 471856 - DNA, 83 bp, Homo sapiens
tgaggccggccacgccccgcacggctaccggctctctgaccagttccacgacatcctcattcgaaagtttgacaggcagggac

SEQ ID NO: 471857 - DNA, 100 bp, Homo sapiens
acagcacctcttcctgtacgcctcctgccaacgggacagacagtataatggccttgccttacacccagacaaaactctcgttgcaactggccaagtcggg

SEQ ID NO: 471858 - DNA, 75 bp, Homo sapiens
aaacattggaaaagaaatcctgataagaactgctttagatccgtgctcagctcacagagcagatgaaatgcctgg

SEQ ID NO: 471859 - DNA, 100 bp, Homo sapiens
ttcttcatattgaagaacttcaaccccacagtgtatctgaaaccaattttaacccactctggtcctccgctgactacaacattacctgaatggtgtggtc

SEQ ID NO: 471860 - DNA, 51 bp, Homo sapiens
aaattcagcaaccaggagacctggtgaaagcccagcctccgtggttcttaa

SEQ ID NO: 471861 - DNA, 90 bp, Homo sapiens
cttggacgtcatcgagtctgtcaacctcttgattgataggttatatgattggaaaaagagtcctgactctgatgtggctgctactttaaa

SEQ ID NO: 471862 - DNA, 100 bp, Homo sapiens
gcatcgtggacccggccgtcatggggggcttctccaactatgaaaaggcaccttcaagatccagaagacgaggctgcagcgagagggctttgacccacgc

SEQ ID NO: 471863 - DNA, 74 bp, Homo sapiens
caagcatgcagcttactgcttgaaaggtaagaatgattgatgttggctgatattggagtgctcattcacatgaa

SEQ ID NO: 471864 - DNA, 74 bp, Homo sapiens
cctcgagcagtttattaacaataatgtgtgtggctggtattggacttgttgtattattcttcagttggatgctc

SEQ ID NO: 471865 - DNA, 82 bp, Homo sapiens
gcgggcgctcccggcgagccacgggaaagcaggcaggatgggagagtcgccgatagaaccacctcttccctgcctcctgggc

SEQ ID NO: 471866 - DNA, 90 bp, Homo sapiens
cagcgggaaaaggctaatggcacaactgtccacgtaggcattcaccccagcaaggcatgtggcgtcatagtagaattaatcaaaagcaag

SEQ ID NO: 471867 - DNA, 75 bp, Homo sapiens
attgcagttgcgtgttgttcagaaaggttacaggaattaactgtttgttcagaagacaatgttgatgttcatgat

SEQ ID NO: 471868 - DNA, 82 bp, Homo sapiens
cacgcacctcgtcaccaaggccaagtttccagagtgtggattctttggcatgtatgacaaaattcttctctttcgccatgac

SEQ ID NO: 471869 - DNA, 75 bp, Homo sapiens
agccatgcccatcgcagccgccccgaaggagccaggttttcctttggaatatggataaatacaccatgatacgga

SEQ ID NO: 471870 - DNA, 83 bp, Homo sapiens
ggcctgggccaatacctttgtaatcaggctatagaaagcgcaattggtggtaacgcttatcaacacagcaaagtgaaccagtg

SEQ ID NO: 471871 - DNA, 90 bp, Homo sapiens
cgtgcctgcagccggcgggtacctgcggccaattcggtggaacgaggacgcggactgcgaaggcagcaaattgtggctactaatttgccc

SEQ ID NO: 471872 - DNA, 100 bp, Homo sapiens
ctatctcagcccttcgtactgggacgttggggagggggctgtgccgggcggagagaactcagcgaggattctgaggtgtatactcttgatgtaccagatg

SEQ ID NO: 471873 - DNA, 74 bp, Homo sapiens
tctcagacagcctcttcgtgtgggtagatgacattaatgctgataagaatatctcttctgcacagattgttggt

SEQ ID NO: 471874 - DNA, 99 bp, Homo sapiens
cgacagcacagacagaatccctgctaccagatctatcttgggatcccatggctttctttactgggctctggggccccttcacctgtgtaagcagagtgc

SEQ ID NO: 471875 - DNA, 75 bp, Homo sapiens
gtgactctgctggctttggcgtatacacagccagaagatcagctgccatgttacttgactcacaccaaccctaga

SEQ ID NO: 471876 - DNA, 90 bp, Homo sapiens
ctgaagggccttgacgatctggacgccgatgccgatgatggctgggcagacgatcgtcaccggattgaggagaaacgtaaaaggacatat

SEQ ID NO: 471877 - DNA, 100 bp, Homo sapiens
ccgtctccagccttggtctgagtggactgtcctgcaggttttaaaatcaaagatgggaaaatcggagaaaattgcccttccccatggccagcttgttcat

SEQ ID NO: 471878 - DNA, 82 bp, Homo sapiens
ctccatcacccaccaacaacaccacaataatccacagccaaggcaagacatctgtatagattctgcttcatccgtgagagag

SEQ ID NO: 471879 - DNA, 75 bp, Homo sapiens
gatccagcctgcggagcctgtggggcagtgcccagcagaggagcacgcagctgaacaagaagagagccatcccca

SEQ ID NO: 471880 - DNA, 100 bp, Homo sapiens
ggccccacctcgctgttcgcggtgacggtggcgccgcccggggcgaggcagggccagcagcaggcgggagtaatctatgccagcaattatgacaatgtta

SEQ ID NO: 471881 - DNA, 100 bp, Homo sapiens
gaaacaggttaatatgcagaagaaatccatataggatctttgagtatttgcaactcagcctagaagaggcagaattttcagagctcaacctggtggccca

SEQ ID NO: 471882 - DNA, 98 bp, Homo sapiens
gtacatgtaaagtgcattttcctgatccaaacaagcttcattgttttcagctaacagtaaccccaggccctttctggttactgtggctttatggcagc

SEQ ID NO: 471883 - DNA, 100 bp, Homo sapiens
attacccgttaagtcccccaaagatgagatttacctgtgagatgtttcatcccaacatgcttaattcaccattatgagaaatgcttccagtcacaaaaat

SEQ ID NO: 471884 - DNA, 60 bp, Homo sapiens
ctttgtatgaacaaaaccagtctgatgtgcttctgggaacttggcagacgcagcttagag

SEQ ID NO: 471885 - DNA, 74 bp, Homo sapiens
cggcttctggttctcacttgtcgctattgcagatcccaaccccctgctagactaataagtggagaggaacattt

SEQ ID NO: 471886 - DNA, 75 bp, Homo sapiens
caggacccactggaagcctagaaatggttcagccgtctgtatatctccccagatacctgaaactgaccacctgag

SEQ ID NO: 471887 - DNA, 75 bp, Homo sapiens
tttttctacctgttgacgtgtcaagcactaactgaatattgtaatacagtccagctagattctgggatagattac

SEQ ID NO: 471888 - DNA, 88 bp, Homo sapiens
ccacctcatccaccccagccaggcctcgaaaaagcccaagacagcagaagcagacacctccagtgaactagcaaagaaaagcaaagaa

SEQ ID NO: 471889 - DNA, 74 bp, Homo sapiens
agaccttcgaccagctcaccccggacgagagcaaggagaggctagggctaactcaggtgagatggagccgctat

SEQ ID NO: 471890 - DNA, 90 bp, Homo sapiens
cgaaatgttgatttggatttggcagcatctcacagaaagagagtgcacctatgatatgtgttttagaaatagccgttaaactttggtttg

SEQ ID NO: 471891 - DNA, 75 bp, Homo sapiens
gcgactccggagacagcccaaatatcctcggaagagcgctcccaggagaaacaaaatgccaattcctgtccagtt

SEQ ID NO: 471892 - DNA, 86 bp, Homo sapiens
catgtggcagtggaaaatgcgctcgggctggaccagcagtgcctccggagccagcgtggtggccatagacaacaagatcgaacagg

SEQ ID NO: 471893 - DNA, 96 bp, Homo sapiens
gactatggagtacagtttacatcttcacggaagtttttcacaatttctccaataattctaaagccatggctgaaaccttttacctttctaacattg

SEQ ID NO: 471894 - DNA, 90 bp, Homo sapiens
ccgctgggaggacacacccctcgtcatactcggtgttggccctggagggacaggaaagccagaaatggacttcgtgagactcgctcgact

SEQ ID NO: 471895 - DNA, 90 bp, Homo sapiens
tgaaaatgcagaaactcagtttagacaattctaggtctcgttccagatcatattctccagctcataacagagaaagaaaccacccaagag

SEQ ID NO: 471896 - DNA, 74 bp, Homo sapiens
aaaaatgtccttaaagcaattgagcaggctgatctactgcaggagctgagatgattgacaaattgacattgaca

SEQ ID NO: 471897 - DNA, 114 bp, Homo sapiens
cgcctttgcccccgtgcgcacccccgccccgctcaccttagccccgcgcccgagggatgaggtctctatgttgcctagggtggtcttgaactcctgtgctcaggtgatcgtctg

SEQ ID NO: 471898 - DNA, 100 bp, Homo sapiens
tgcttctgaaacgtcagctgcgctcccctaggagtgctgagcccgcggaaccgcagccatgaggaggagcgagtggacattctaatcaacaacgcgggtg

SEQ ID NO: 471899 - DNA, 75 bp, Homo sapiens
tcctcgtcgagcgcaacccaaggaggaggcaaaacagattcagaatctgcagaaagcaggcactcgtacagactc

SEQ ID NO: 471900 - DNA, 74 bp, Homo sapiens
agctgtaccagtccgccattttgctaccaagaaagccaaagctgccccagagcacatcagctatgtgccccagc

SEQ ID NO: 471901 - DNA, 100 bp, Homo sapiens
aacatccacagcagcgactggcccaagttctttgaaaagcaattttacctgctcaagaatggaaacctcctcttccagcttatgattttctaagtatgat

SEQ ID NO: 471902 - DNA, 118 bp, Homo sapiens
aagatgatgctccaagaacaatagcttgccctcataaacaacaacgaactgtctacagactgatgctcgtgaaagcatggaacgtggacgagctccaggcctacgcgcagctcgtgtc

SEQ ID NO: 471903 - DNA, 115 bp, Homo sapiens
cgcagaagtcgcgtgtctaggtgagtcgcggtgggtcctcgcttgcagttcagcgaccacgccgcggcgagtcctttgcacatgttggcaacacacgcatccgcatcggcctccc

SEQ ID NO: 471904 - DNA, 100 bp, Homo sapiens
tgaagggaaagctccagatactaaaactgggagtgatttttccatgtttgaagctttgcgagatactatttattctgaagtagctacattaatttctcaa

SEQ ID NO: 471905 - DNA, 75 bp, Homo sapiens
agtgcaccttcggcgtgctgcaggccggccccgggctccaccgcccccccagcccacggtgtcacctcggccccg

SEQ ID NO: 471906 - DNA, 100 bp, Homo sapiens
catcgggagaatgctcttcaggatagtatcttggccagggaactcaaacagcagatgcaggaggaaaaggcttctcttttacatcgtactcaggaagaaa

SEQ ID NO: 471907 - DNA, 98 bp, Homo sapiens
gtcgggtcgcttccccgcagcatggaggacgatgcaccagtgatctacgggctggagttccagatataaagatgaagcgcagctgtataaagaagagc

SEQ ID NO: 471908 - DNA, 96 bp, Homo sapiens
ccgcggtccagaccaacatgagagaccggaaagtgaccagaagaggtgtgcagtttccaggcctggcccatacagacctccaacaggtgctcccct

SEQ ID NO: 471909 - DNA, 75 bp, Homo sapiens
agcaggccagcccggacctctggagtgcccccagcccagagcccggtgtttcccattaaacactaccaggacaaa

SEQ ID NO: 471910 - DNA, 100 bp, Homo sapiens
ctcacggcagaagtgagctggaaggtcttggagcgaagagctcggaccaagcgctcagtatccatatattcctgcacatattacaaagcctaaggaacat

SEQ ID NO: 471911 - DNA, 75 bp, Homo sapiens
attccgacgtcttgaagacttccgagtagatttgaggagctcaagcttgggaaaatggtgtgcattccttgtatc

SEQ ID NO: 471912 - DNA, 83 bp, Homo sapiens
cagacgctgtgctcgctggcaccccgaacgggttgcttcccccgctgcgagaagaaaaagtcagcactttttgaagtgtctga

SEQ ID NO: 471913 - DNA, 100 bp, Homo sapiens
ggggagagtagggtgctgtggtctgagctagagggtgaagctggcggagcaggaggatgggcggacttgttctttaagtacacctggaataactttttgc

SEQ ID NO: 471914 - DNA, 98 bp, Homo sapiens
ctctgctgtctccttctcttcctcagggctcccgtgtctgctcgccctccgacgctgctcaggatgctcgtcagaagttccgctctgttctggttgaa

SEQ ID NO: 471915 - DNA, 82 bp, Homo sapiens
aagaagaggacgacgacgacgaggaagaggaggtttctgaggtccacgctgcttttatgagctgtaacactcaccgcgaaga

SEQ ID NO: 471916 - DNA, 83 bp, Homo sapiens
cagaacccgaccaacatccagaacttccagctgcccccaggatcctggtgcacctgagccgtggaggggctgaagtccagatc

SEQ ID NO: 471917 - DNA, 95 bp, Homo sapiens
aaaatgtccattcatctgatccacatgcgtgtggcagcccaaggctttgttgtaggagcaatgactgttgttctggcataaagcatgcttccatt

SEQ ID NO: 471918 - DNA, 90 bp, Homo sapiens
cgcctgacaggagatgtattacaacccccaggaactagtgctcaaagcttggattctgccgtgccactcacgaatggcgacacagaagac

SEQ ID NO: 471919 - DNA, 89 bp, Homo sapiens
caccagtgtggcatgggcatgtaaggtgcgcggagggactgcaccttctccatcaggtgcagaagagatcagcaaggacaactcctgca

SEQ ID NO: 471920 - DNA, 75 bp, Homo sapiens
atcgagagggcctgagggccctgcagaaggatctcagcctctctgttccagtgtctcgccccatcctcaccctca

SEQ ID NO: 471921 - DNA, 115 bp, Homo sapiens
ggagaatcaccaagaatgcaaaccccacactgtcaggattctagaacttctaaaattaaagtttgggtggatccaaacttctacagcaaaaacttacttcttttaggaaagacat

SEQ ID NO: 471922 - DNA, 98 bp, Homo sapiens
cgccaggaagctgtggctggccgcatacccgccatcttctccccagggcagcctgtgagcagcaagctgtggctctgactctgcaggaggacagagca

SEQ ID NO: 471923 - DNA, 75 bp, Homo sapiens
ctcgccttgtatctcaacaccctgagtgcggatttctgctatgatgacaggatcagtttgacaacttagaaaaac

SEQ ID NO: 471924 - DNA, 75 bp, Homo sapiens
tgcaaaggcagcaagagatgcacaggagtctacatcagcatcagcatctgcgtcaccatttcaatctgcatggta

SEQ ID NO: 471925 - DNA, 100 bp, Homo sapiens
gctcgggcgccggcgagatgcctttgttcaccgccaaccccttcgagcaagacgtgggaaacttggatttaactggccagaagcaggtattcaaagcaga

SEQ ID NO: 471926 - DNA, 100 bp, Homo sapiens
cagagtctccacacccaccaggacacccaggaaagaccacagcaagattctttcattcgtctcctcctagcctgggggaccaggctcgaactgaccctgg

SEQ ID NO: 471927 - DNA, 75 bp, Homo sapiens
gcgattggcatcctcagccgcttttctgccttcaggatcctccgctcccgagggattaaagcctgtggtttccac

SEQ ID NO: 471928 - DNA, 98 bp, Homo sapiens
gtggtcccgacggtcacccgaatcgcagggagtcgccgctggagaggggctcggcgcccggcggggactgcagtacatggactggacctgcctggagc

SEQ ID NO: 471929 - DNA, 74 bp, Homo sapiens
aagcagatgctgctgaattctggagaaagttttttggagacaaaactacagtctttggaacagcaattagaaga

SEQ ID NO: 471930 - DNA, 50 bp, Homo sapiens
aagacacccaagaagcacagaagtgtatgaaaatgaaagtcttcagaatg

SEQ ID NO: 471931 - DNA, 51 bp, Homo sapiens
ttttcatttcaaacataacgcaagaaattgaacttgaatgtggaacccagc

SEQ ID NO: 471932 - DNA, 100 bp, Homo sapiens
gctcctcctgcccgcagcccgggccacctccaggagggaaggggtcctggcttgcctggatggctacatgaatatagccctggagcagacagaagaatat

SEQ ID NO: 471933 - DNA, 83 bp, Homo sapiens
caccctgcagttctacaatgagaggttgcaaaagcttctcatttcagagagatgccaggatcctaagtgcctgccaaacttac

SEQ ID NO: 471934 - DNA, 100 bp, Homo sapiens
aggctttatgggagcatgggttaccagcgacgcaccctagaaggggttttgccatgttcgctaggctggtctcaaactcatggattcaaggggactgccc

SEQ ID NO: 471935 - DNA, 85 bp, Homo sapiens
tgagctccgtattctctgaagcctggaaacgaggcactcagttggaagagtccagcaagaacccccagtcggatcttcaggccca

SEQ ID NO: 471936 - DNA, 83 bp, Homo sapiens
ggggatcgtgatgggacaggtggtcggactcagattgacgagatgcctgaggctgccgtgaaatcaacagccaacaaatacca

SEQ ID NO: 471937 - DNA, 83 bp, Homo sapiens
tgtccagaacgtgccatggagacgcttaacgacctgcctagagctggaacgttacctccagagcgagccctgctatgtttcag

SEQ ID NO: 471938 - DNA, 100 bp, Homo sapiens
accccagcaagatgcggaggctgcctcggcggagcagaggaaccacacgctgatcatgcattggggctttccagctctcacagaaccttcagcatcccca

SEQ ID NO: 471939 - DNA, 75 bp, Homo sapiens
ggaatatatcctgactgattatgaaaagtatctctctcgcctcttgccatcaattgcattccaaattcttggatc

SEQ ID NO: 471940 - DNA, 74 bp, Homo sapiens
aaccatgtatcacattgattgtagaggtggacgtctgatttatgaagctccccatccacctatctgagtacctg

SEQ ID NO: 471941 - DNA, 51 bp, Homo sapiens
tgttgatacctataccaaccgtttaaggtgggagaaggagagaaattggtg

SEQ ID NO: 471942 - DNA, 74 bp, Homo sapiens
atatttcgagcagtttggcaaggtacggaatgagccctggaacatttctatttcagcagaatatattgcccagg

SEQ ID NO: 471943 - DNA, 60 bp, Homo sapiens
cctaatttacagcaaccatgagattgccatctacggcaccaatttctgcacctcggccag

SEQ ID NO: 471944 - DNA, 100 bp, Homo sapiens
ctcgaagaactcgagcgacagagacaagctgagcttgccgcacaaaaagctagagaggaatttgctgattcccttggaattccgtttttggaaaccagtg

SEQ ID NO: 471945 - DNA, 86 bp, Homo sapiens
cgggagttactgatgggaatttttgaaatgggctgggaaaagccatctcctattcagctttttctccagcggctgaaggctaacct

SEQ ID NO: 471946 - DNA, 75 bp, Homo sapiens
tttgaagacattttcaagcagtgtctacgaacaattattgaaggcacaagaagacacatcatctcagagttggag

SEQ ID NO: 471947 - DNA, 75 bp, Homo sapiens
aggaggatggcggagtcggggctcctgacggtattgtactgatgatatgctgcaaagagaaatgatgtccaatcc

SEQ ID NO: 471948 - DNA, 50 bp, Homo sapiens
gcctcgccgctgctgccgtcgcggcctccttttagaggactcagaagaag

SEQ ID NO: 471949 - DNA, 100 bp, Homo sapiens
cgaccatcaaatccgtgtcggagtccttacagcttggtgtaaaaattgccaaagcagttgcctgccacaactttgtaaaagccaaaaaggaggttgaaaa

SEQ ID NO: 471950 - DNA, 90 bp, Homo sapiens
atctgtcttcggtggactccttcggcagtccacccaccgccgccgcctcccagtctggggagcagggaggagccctgtgccctgtcccag

SEQ ID NO: 471951 - DNA, 100 bp, Homo sapiens
gacgcccctcagcagcctggcagcagcccccggggcaagagcaggagcccggcaccccccgccgacaaggaggatgtgaagttcatttccaatccgccct

SEQ ID NO: 471952 - DNA, 75 bp, Homo sapiens
aagccttagcagcaaaagactttgttaacctcagaattcctagaggacctgtgcaacaacctcttgaggatcgaa

SEQ ID NO: 471953 - DNA, 90 bp, Homo sapiens
cccagacaccctgaaccagggggaattcaaagagctggtgcgaaaagatctgcaaaattttctcaagaaaccagactgtgatgactggga

SEQ ID NO: 471954 - DNA, 50 bp, Homo sapiens
catgagctggggcacggagctgtggaattaaagctatagagagtcccaac

SEQ ID NO: 471955 - DNA, 98 bp, Homo sapiens
gcatccaaccaaaggttttgcctctgtttcagaaaagtttggtgaggattcatcaacctccagtatgatgtctgtgaactttgatgttcaatcaaatc

SEQ ID NO: 471956 - DNA, 74 bp, Homo sapiens
gcgggagaaatcatctttggacaaaagaaagcaagaccccgagtggaaggcatcgttggcttcacagtatgact

SEQ ID NO: 471957 - DNA, 80 bp, Homo sapiens
ccggctgggctcggtattccccttcctgctagtcctggtggatctgcagtacgaagagggtgctcgagaggaagacctcg

SEQ ID NO: 471958 - DNA, 75 bp, Homo sapiens
ggaagagaagcagttcctggagacaatgcagatcttcgtgaagactctgactggtaagaccatcaccctcgaggt

SEQ ID NO: 471959 - DNA, 80 bp, Homo sapiens
cgcctcttggtttgcgtcctgcactgaaaggaaatgacggattttgtcagcccaagactaccccgtcggtcattctgttc

SEQ ID NO: 471960 - DNA, 116 bp, Homo sapiens
ctcaagtaatttacaccagaaataccaagggtggagatgctccagctgctggtgaagatgcatgaataggtcccagcatttgagggtgatgatggattctgtgtgtttgagagcaa

SEQ ID NO: 471961 - DNA, 80 bp, Homo sapiens
gctggagctgctgcatgaactctacaatttcctggccatccaagctgatcacaagatttctgttgtgaaggatgtggctc

SEQ ID NO: 471962 - DNA, 75 bp, Homo sapiens
atctactctttcaactacaccagccagcccgaccagacaggagacaatttatccagcatgttgctagaaaatcta

SEQ ID NO: 471963 - DNA, 76 bp, Homo sapiens
gaaggaagtcatcatgggccggcctggaacagcccaccttgggacaccttgactccaagcccagcagtaagtccaa

SEQ ID NO: 471964 - DNA, 100 bp, Homo sapiens
tttgtgcaggacaccgacatggaacagggactcactggggggggagtttgttgcttgtctcctgtccctattacgacaaatgacagatagacattatcaa

SEQ ID NO: 471965 - DNA, 82 bp, Homo sapiens
ggatcctgaaccgcgcggccgaaccctccgttacagaatgtctgaaggggacagtgtgggagaatccgtccatgggaaacct

SEQ ID NO: 471966 - DNA, 100 bp, Homo sapiens
agtgccagcaccctcctgaaccactctttcttcaagcaggctgtggtccaaggccatttttgctggctataagcggggtctccggaaccaaagggagcac

SEQ ID NO: 471967 - DNA, 75 bp, Homo sapiens
ctttttgccaccaatcccttcgatcaggatgttgctgccactggtgacatgccaacttaccagatccgagctcct

SEQ ID NO: 471968 - DNA, 100 bp, Homo sapiens
aaaaatgtgaagtggtaattcaacattttaatggaaaatatctgaaaacaccaccaggcatcccagttttcaccatggagcagctgagctcagcaaacac

SEQ ID NO: 471969 - DNA, 99 bp, Homo sapiens
gaaaccgatctgcccgttgtgtttgtgaaacagagaaagataggcggccatggtccaaccttgaagcggcgcgcgagcgggccgggcgggcggccgagg

SEQ ID NO: 471970 - DNA, 100 bp, Homo sapiens
tgaagtagatgataaagatgatgatatccttctcaaccttgtgggatgtgaaaactctgttactgaaggttgaaacagttcctcaggctacagtgaagac

SEQ ID NO: 471971 - DNA, 100 bp, Homo sapiens
gtgcaatcctcacattcaagctgataggctgcgctaccggaatgtcatccagcgagtgattagtctggatgtggatagtgaagctaagaaactattgggt

SEQ ID NO: 471972 - DNA, 75 bp, Homo sapiens
aaaaatcggcagatgttacagctgctcatgaaccacttggcaaagatcttttgccagaaatgagggcatactggc

SEQ ID NO: 471973 - DNA, 75 bp, Homo sapiens
aagtacccgtccatcatagtcaactgcgtggaagagaagcactcaaaaggctatgagaatggtacaaacagattg

SEQ ID NO: 471974 - DNA, 75 bp, Homo sapiens
gaacagttttttctaatggctattcaagcttagcagtgtctgcaaaaacgaatcttttcctacaacctgttaact

SEQ ID NO: 471975 - DNA, 75 bp, Homo sapiens
caaaatgtcaacaaattgatgggtagatttcgggcagacaacttgaacaagctgaagaacctatgcagcaagaca

SEQ ID NO: 471976 - DNA, 75 bp, Homo sapiens
cagcagcggcggtggcggcagcaagaggatcaggaagacaactgttagttttgtggcttactgctgctccaccca

SEQ ID NO: 471977 - DNA, 83 bp, Homo sapiens
ccgagtgcagaagatctgggtgcccgtggaccacaggccctcgttgcccagatgaattacatgaatgacagtcttcgaaccaa

SEQ ID NO: 471978 - DNA, 75 bp, Homo sapiens
ggagaaatcatctttggacaaaagaaagcaagaccccgagtggaagtgaagtaagaactctgctagagaggaaat

SEQ ID NO: 471979 - DNA, 101 bp, Homo sapiens
cctgctcctgctcatggacgacgtctacgacgttcctccatcggtgagcaaggatgtgcccgatggcccactgctgcgtgaggagacctacgatgtgcccc

SEQ ID NO: 471980 - DNA, 100 bp, Homo sapiens
cacacggggcaacaacctcaccgtgcaccttcgcaagaagcaccagttcaagtggccctcagggcatccccgttttcggcctggggctgttggatgtttg

SEQ ID NO: 471981 - DNA, 100 bp, Homo sapiens
tcttcatctttctccgatcccagttagcaggaatactttagcctggaaggaacagctttctcaagttctcgatgccatgtttgaaaggatagtcaaagct

SEQ ID NO: 471982 - DNA, 83 bp, Homo sapiens
ttgcccgaagccgggcggaggagagctcaagctaagacctcctgccccccgaggtctgcagtctcctgaacccagcagccatc

SEQ ID NO: 471983 - DNA, 97 bp, Homo sapiens
gacaacatcatcttctcagaagcccccagtgagcctttgctgtgcaaattcgctgatggaggacaaaagaagcgacagaatcaaagcaaatataccc

SEQ ID NO: 471984 - DNA, 75 bp, Homo sapiens
tggagatttgataacactggagatcagcaccaaatcccacagaggcatctgagtgattcgcctttgccagtctca

SEQ ID NO: 471985 - DNA, 90 bp, Homo sapiens
attcctcatgacattgctgtctgggttatgtggtccgaatcagtggtgggaacgacaaacaaggtttccccatgaagcagggtgtcttga

SEQ ID NO: 471986 - DNA, 100 bp, Homo sapiens
agcactcagaatgctccaggcagtgtaatctcattccatcttcattcatgactccagacaggatccactagttcctggactatgggaactgatgactcgc

SEQ ID NO: 471987 - DNA, 96 bp, Homo sapiens
gaacattgatttcatcaccgacatcacctgggaggacctgcaggagatcggcatcaccaagctggggcaccagcaccaagtacagtccgcagcggg

SEQ ID NO: 471988 - DNA, 89 bp, Homo sapiens
gtgatgcttaagctggtggagaaactcgggctcattgtcatccccaagccaggccagttctccaggtggaactgtagtgtagcgacctc

SEQ ID NO: 471989 - DNA, 100 bp, Homo sapiens
tcacccatcttttaccaagtacagaggcttcatcttatgaaatggacaagagggtgacaaacagcatgtttggtgcttcaagaaagaagtttgtagaggg

SEQ ID NO: 471990 - DNA, 90 bp, Homo sapiens
caagtaccggatcagcgtgggcgcccctgtctacatggcggcagtcattgagtacctggcaggtggatttgccgctgcagtcaccacccc

SEQ ID NO: 471991 - DNA, 90 bp, Homo sapiens
ctctgatatcttcctgtcatggttccccttctactacatgctgaagaaggtgcttcctggaggggcctgccccactgttcctgtgctgag

SEQ ID NO: 471992 - DNA, 50 bp, Homo sapiens
aagtcattcaacgggaattgaatagggcaagtgtccagagaatggctggg

SEQ ID NO: 471993 - DNA, 83 bp, Homo sapiens
gaagttagagaaaagggctatgaacgattaaaagaagaactcgcaaaagctcagaggtactatactggcaattgctggagaag

SEQ ID NO: 471994 - DNA, 82 bp, Homo sapiens
gcgcaccgacatctgcctgctcaaagggatgtttcagcagcccctgagaaggaagaggaggaagctgagggcccgctgaggg

SEQ ID NO: 471995 - DNA, 75 bp, Homo sapiens
aggccactgaataacacccaaaagagcaagcagcccctgccatcggcacctgctgtggaggaagatgcagagtca

SEQ ID NO: 471996 - DNA, 90 bp, Homo sapiens
aaagaatggcccttgtggataagcacaaagtcaagagacagcgattggacagaatttgtgaaggttgaccccctgtttacagtgccagcg

SEQ ID NO: 471997 - DNA, 125 bp, Homo sapiens
cgccattcttgattatcataatcaagttcggggcaaagtgttcccaccggcagcaaatatggaatatatgatcgaagccgcggtcaaggccgccagagaagcctttcccagctggtcatcccgca

SEQ ID NO: 471998 - DNA, 100 bp, Homo sapiens
gtccgcggcttcattcttgaactccaagaccggcccagacctctcgtttcatcttgccatgtcacgagtcaatgctgtgtcgtcttttcaaaaatctgcc

SEQ ID NO: 471999 - DNA, 51 bp, Homo sapiens
tggcaccactgaagtgaccgaatgagcattccccgtcggagccctttctag

SEQ ID NO: 472000 - DNA, 100 bp, Homo sapiens
ggagattttgatgtggatgatgccaaagttttattagctgaaaactcgtcaaggaacagaactgctaattcagtctgacaatgacactgttattaatgat

SEQ ID NO: 472001 - DNA, 90 bp, Homo sapiens
gaagcctgcatttctgcattctgcttaattccctttccttagtgaattttgtggcgaaaatctaagcaagcagaaatttactcgagcagt

SEQ ID NO: 472002 - DNA, 100 bp, Homo sapiens
ttccgccctaatggaggtctccagtttcggagttcgcagcacttactaaagaactcaatgtatgcagggaacagctccttgaaagggaagaagaaattgc

SEQ ID NO: 472003 - DNA, 100 bp, Homo sapiens
agagagcgcagcgactacgaccgttcccgcgagagagatgaaagacgtcgaggggacgattggaatgacagctggtctcttgtggctcagcgccgtgcgg

SEQ ID NO: 472004 - DNA, 51 bp, Homo sapiens
taaggaatcacagacacctaaggctcaaagtgctgacaaataaagcttctg

SEQ ID NO: 472005 - DNA, 100 bp, Homo sapiens
aggtgatacaggtggttcagtcagaaggcagacggtaacaagtactccttgctggattgaacttcatctgaatggacctctacagtggttggacaaagta

SEQ ID NO: 472006 - DNA, 75 bp, Homo sapiens
caatgaaacccccaagatgggcatctattacattccatatacgctcaacggcaagaaagtggaagttgccgtcaa

SEQ ID NO: 472007 - DNA, 75 bp, Homo sapiens
gaccaagaagccaaagaactggctaggcaaataagctttaagcaacagccaactcagtttataaatccagaaaca

SEQ ID NO: 472008 - DNA, 75 bp, Homo sapiens
aggccgccctgcgctctcggcgggccaaactcaccgtgctcagttcacccgtacttgtcaaaatggctcaactcc

SEQ ID NO: 472009 - DNA, 73 bp, Homo sapiens
aaacagccaccttcagtatctcagtcctccagtgtttggatattcaggttgctacgatttctgcaaacggaga

SEQ ID NO: 472010 - DNA, 51 bp, Homo sapiens
gcagaatacagagatatggaatcaggtccctccagctacaaggtgggcacc

SEQ ID NO: 472011 - DNA, 106 bp, Homo sapiens
agcagccaagctcttcgctggctcccgggggctctcccgggttcctctcattgcaggctgaagtctgaagatgatgagaaactgaaaaagaggaaggagcgatttg

SEQ ID NO: 472012 - DNA, 100 bp, Homo sapiens
aagaacttagtagatgcattgaggatgtgtttaaggaaactaaatatattttgccaactttggaaaaagaattattcttggcagagcacagtgaccttga

SEQ ID NO: 472013 - DNA, 75 bp, Homo sapiens
gcggggcatcgtgtctcgaccgcgtcttctgagtcagggggtcctgatgacaacttaattgaaggtggaggaaca

SEQ ID NO: 472014 - DNA, 98 bp, Homo sapiens
cgctccctgcccggcagcgactcggagagaagcctgtgtctcccaaatcaggaacactgaagagccctcccaaaggatttgatacgactgccataaac

SEQ ID NO: 472015 - DNA, 74 bp, Homo sapiens
atacggcgtacccgtcaccctcattggtcacggtctagatcacattctcgatccagaggaaggcgatactctcg

SEQ ID NO: 472016 - DNA, 97 bp, Homo sapiens
cttgaagccgaccagaatgatagccagtccctggagctggtgcacaggttccagaatcttgtggaagaagaatgaagttgctgattatgaagctaca

SEQ ID NO: 472017 - DNA, 87 bp, Homo sapiens
gagtgtgcggctccaggtgggctcacgcggtactgggcctaatcgctacgtgcctctttggctatgatgcctatgtcaccttccccg

SEQ ID NO: 472018 - DNA, 98 bp, Homo sapiens
tccttcaagcatataagtggtcaaacaaggagctggtcaggctcaccatcgagaagcagggacgtccgtctccgacgagccccgtgaagcccagttcc

SEQ ID NO: 472019 - DNA, 51 bp, Homo sapiens
tgcagaggtgctggagctggcaggttggtcaaagaaaaagtgatgtatgaa

SEQ ID NO: 472020 - DNA, 75 bp, Homo sapiens
attgaccacaacacgcgccagacgtcgtggatcgacccccgcgaccgtataaaagaacgtgtggatcactttgct

SEQ ID NO: 472021 - DNA, 103 bp, Homo sapiens
ggagaaggagcacgattacagggatgagcatttggactttatccagtcacacctgcggaggttctgccttcagtcgacgaagcggagcaggtgtgggtgtggg

SEQ ID NO: 472022 - DNA, 76 bp, Homo sapiens
gattacccacttcgagtcctttattgtggaggttgggaggtggctggagatcatatccagagtggggctggaggtt

SEQ ID NO: 472023 - DNA, 99 bp, Homo sapiens
gtgctggcgagccgcagtgaggccaacgccgtgttcgacatcctggccgtgctgcagatcgcaccccctccctccctggcggagcccctgaaggagctg

SEQ ID NO: 472024 - DNA, 98 bp, Homo sapiens
gccaagtcaattctggagacctgggtgtgggtcaagcaaccagatttgaacatggaattcaatccttcagatcatcctcgggccagcacaatattcct

SEQ ID NO: 472025 - DNA, 50 bp, Homo sapiens
gcttcgtccagatcgggaaggccgcggcgagtcctttgcacatgttggca

SEQ ID NO: 472026 - DNA, 105 bp, Homo sapiens
acagtgtcccgtctactgcctggggcccctgtcatgcagcagctgcagggtgatacaattctggagactggagaagtaattccaccaatgaaagaatttcctgat

SEQ ID NO: 472027 - DNA, 75 bp, Homo sapiens
caccgcagatgttgtcaaggtggcctaccaggaggccaggggtgtcgccatggttcgagaacttgtcttggacaa

SEQ ID NO: 472028 - DNA, 98 bp, Homo sapiens
ctctccgctccgcatggcggcagcggcctgcacaccaagggcgcccttcccctggatacggtcactttctacaagattccaactccacagagtgacca

SEQ ID NO: 472029 - DNA, 97 bp, Homo sapiens
gttgtgggaggaaccaattattacattgaatctctgctctggaaagttcttgtcaataccaaggtggacatgttgagtgaaattaacattgctcccc

SEQ ID NO: 472030 - DNA, 100 bp, Homo sapiens
atatcaacggcttcctgaagagagaccgggacaataacatccaattcactgtgggagaggagatgcctgaggaaacccagacccaagaccaaccgatgga

SEQ ID NO: 472031 - DNA, 80 bp, Homo sapiens
ggcgcaggccaggtgctacaggacagcaaatgcggtggccagcatcgaaatgttcagccttttagtgatgaagatgcatc

SEQ ID NO: 472032 - DNA, 100 bp, Homo sapiens
tggttgcagaatgcgaagtctgtggtttatcattgtaatcagcttcttaccaaatacagaagaaagggctattgcaagacacgaagtccgagaaattgag

SEQ ID NO: 472033 - DNA, 74 bp, Homo sapiens
gtcggaatcagatttgaaaatgaaagtatatattcgactttatgggagaaaatttagcaaagaagatcatgttc

SEQ ID NO: 472034 - DNA, 100 bp, Homo sapiens
ttctccacgagcgacgtctccaagctcctcccgtccctggccaaggctcaggaaacttacatgcttgctgtaactttggatgaatggaaaaagaaactgg

SEQ ID NO: 472035 - DNA, 75 bp, Homo sapiens
ctgaaactggccacccagctgaccggaccggtcatgcccgtccggaacactttgagaatcactacaagaaaaact

SEQ ID NO: 472036 - DNA, 83 bp, Homo sapiens
tgaggttcagctgatgaagcttctgaaccatccacacatcataaagctttaccagcggggatctgatgagcttctttcttctg

SEQ ID NO: 472037 - DNA, 80 bp, Homo sapiens
gcggacaaaacgccaggcggatctcagaaggccagttcaaagatatccttggaacagaagatcttattgtggaagtgact

SEQ ID NO: 472038 - DNA, 97 bp, Homo sapiens
cagaaagcaggcgaacccgcggcgcaataacgcccaggatccggttgtggccgtggctgaggatggccgggagaagccgaagctgccgaaggagaga

SEQ ID NO: 472039 - DNA, 90 bp, Homo sapiens
ctggacctcttcaccaactacatctcactctacaacacgtgtatgaagttcaacgtggacaaggaagcaggggagaggcagatctaccac

SEQ ID NO: 472040 - DNA, 100 bp, Homo sapiens
ttggggctgctgtttctcttcgccgacgagataatttggaatggttagccagagccactaactgggcaaaatttactgctacagccagtttgggtgtaat

SEQ ID NO: 472041 - DNA, 100 bp, Homo sapiens
ttactgaaatttgatgacctagatggaacacatgctctgatgcgcctacacagagccctacaaagtctgtcccatctcgtcggcagcccccaaagaggac

SEQ ID NO: 472042 - DNA, 75 bp, Homo sapiens
cctgcagctgctcgcctgtctccgtcggaagggagcccaagctttgcagaggaagaattgtatttgcaacgggta

SEQ ID NO: 472043 - DNA, 51 bp, Homo sapiens
acctggtggaggtgttaaatgaaagcagctattttcaagttcatcacaagc

SEQ ID NO: 472044 - DNA, 75 bp, Homo sapiens
cgaggcacagcgtttcttgcaagaatgggaggaaatgctcggaacttctttacgtttttcaaacgcagctggctc

SEQ ID NO: 472045 - DNA, 100 bp, Homo sapiens
cttttgcaagagctgctaagagcgctgggagcaccggcagcaccagtgtgtgaggggagcaggcagcggtcctagccagttccttgatcctgccagacca

SEQ ID NO: 472046 - DNA, 74 bp, Homo sapiens
ttcaatgagtaaacatattcctatgtgacaagccgaggcggtgagccgggcaggaggaaggagcctccctcagg

SEQ ID NO: 472047 - DNA, 100 bp, Homo sapiens
cccaaccctgggagctccgagtgtcagaagggcggcaaggagtacctgatgcgggcccacttcggcctgcctagtgtggaggccgaagacaaggagggca

SEQ ID NO: 472048 - DNA, 50 bp, Homo sapiens
aactctttcccatttggaggagtgggctggagtgcagtggcgtgatctcg

SEQ ID NO: 472049 - DNA, 101 bp, Homo sapiens
tccaagggaggaagaccaaagaaggcctgattgggctgttgcaggaaggaaacacaactgtattagtagaggtctgtgtgccattgcccaggcagagtctc

SEQ ID NO: 472050 - DNA, 83 bp, Homo sapiens
ctgggatcccggccaccagcaattgtccggagttgatccccctcatattgtgtacagcatgtctacatcctgagcctaaagag

SEQ ID NO: 472051 - DNA, 80 bp, Homo sapiens
acgacgttccatctgtggaaggacctaccaaccagggtcttcctgagagctatcaacaagtttgcagaaaccatgaacca

SEQ ID NO: 472052 - DNA, 82 bp, Homo sapiens
aatgggtctgggaccttaacagggagccatggatggaggaagccttgtaggagaagtaaatgaagatggggagatgactgga

SEQ ID NO: 472053 - DNA, 82 bp, Homo sapiens
acgcacgggatccagagcgccgcgcacttcgtcatgttcttcgcgccctggttgaagaagcctcagcggaggcgatacggcc

SEQ ID NO: 472054 - DNA, 100 bp, Homo sapiens
atttaagaattaaaagatgatgagaaataaggacaaaagccaagaggaggacagttcgctacacagcaatgcatcgaggacccagatgatgtggtaccag

SEQ ID NO: 472055 - DNA, 51 bp, Homo sapiens
ggctgctgcaggagccattttagcttccactgcgattccaaagacttggac

SEQ ID NO: 472056 - DNA, 74 bp, Homo sapiens
aatcaagcaacttcaacaggaacttcagactgcccttgaagtatgcagagcatttttacaggaagataaaggcg

SEQ ID NO: 472057 - DNA, 82 bp, Homo sapiens
tggcggcggtgaccctgcagacatcatccatgacttccagcggatctttgtggagttcacctctgtgtttgactgccagaaa

SEQ ID NO: 472058 - DNA, 74 bp, Homo sapiens
ctcctgcaaaagtggaagcgaagccgaaaaaggcagcagcgaaggtaccgaaagcacagtaatcactggtgtcg

SEQ ID NO: 472059 - DNA, 50 bp, Homo sapiens
tgagctgcagcgaagcacctctttactgtgacaccatcgccacaacaggc

SEQ ID NO: 472060 - DNA, 75 bp, Homo sapiens
tgcgcttccccatggggctggcctgcggcgcctgggcgctctgaggctgcagaaacaggaagtggcaaaactggt

SEQ ID NO: 472061 - DNA, 98 bp, Homo sapiens
ccgctgaagaggaatcaattttggtatgcagataatcactgggctcatgggtcttgctctttacaaagaggcattagctatgggaatgatgacagaat

SEQ ID NO: 472062 - DNA, 90 bp, Homo sapiens
ggaataggtgtatcaagtaatggtgcaaagcctgaagctatggagttactagtagagaaagcaatcagcagtgcttctagccctcagagc

SEQ ID NO: 472063 - DNA, 75 bp, Homo sapiens
agagagaagctccccacgtggttccgtgagcagcagccaagctggacagatgacctgcctctctgccacctctct

SEQ ID NO: 472064 - DNA, 98 bp, Homo sapiens
gatgatccgcatggaccggcggggaggcacctggaagctgctgggctctgtggtctatgcccacagcaagggcaaccttcgcccagaagaggcacttc

SEQ ID NO: 472065 - DNA, 82 bp, Homo sapiens
aagacggaaccgccacagcactcaagactggagactgatgcatgagggggctacggaggcgcaggagcggtggtgatggtct

SEQ ID NO: 472066 - DNA, 100 bp, Homo sapiens
ccaggcgctcctagaccttccagcagtactttggtggacgagttggagtcatctttcgagccaaaggtcattccaaatgctatatgtggaatttgtctga

SEQ ID NO: 472067 - DNA, 91 bp, Homo sapiens
ccaggatgttggaaatgattgggaagtccttggtgttcaccagtggtataagttgaaatccaaaccaggaaagaaggacaaggagcgagga

SEQ ID NO: 472068 - DNA, 90 bp, Homo sapiens
cggacaggcgacagcgacctgcggcagacggaatcagtccccaatgcctggaaattcctcattggattactgtgttttaaacagaatttc

SEQ ID NO: 472069 - DNA, 96 bp, Homo sapiens
cagataccagaaggcagccaagctcttccaggggaagctaagacgtcctctactatcacgtcagaaaactcagactgaacccagaaatcgccaagg

SEQ ID NO: 472070 - DNA, 100 bp, Homo sapiens
ccctctttaaaaattccgccgaaaaagagaagacgctttacccgactctttgggccgttatctcacgaagaggagcaggacttggatggtgagaaggggc

SEQ ID NO: 472071 - DNA, 98 bp, Homo sapiens
aggatccttaccaaatgtgagccagctgcggagcagtgcgtcagagtttcaggacgtagacaagtttggcaacgagatcacccagctggcccggcccc

SEQ ID NO: 472072 - DNA, 75 bp, Homo sapiens
ggagcgcgcctctttttggcttggggagctgcagcgttcggtgatgtggcagtgaaaatgttgaatgtgacagca

SEQ ID NO: 472073 - DNA, 88 bp, Homo sapiens
ggccgggattcgcggcccggagctcgggaccggtttgtttgaataagagatctgacctgaccggcccaactgtacaactcttcaagga

SEQ ID NO: 472074 - DNA, 98 bp, Homo sapiens
ctcttacttcaatttgaacccatttgaggattggtagcttatgtcgatcttgatgaaagagcaattgatgctctcagggaatttaatgaagaaggagc

SEQ ID NO: 472075 - DNA, 75 bp, Homo sapiens
actatgactcttcctggaatacacccacctaccttgaaccagatggaggagatgtataagaaagctcatgctgct

SEQ ID NO: 472076 - DNA, 123 bp, Homo sapiens
tgaatacctctcattatttattgatgataagctgaaaaagggagtcaaagggatatgtggaacctgcctctggacagccgctacgtcaccttaactgggaccatcacacgagggaagaaaaag

SEQ ID NO: 472077 - DNA, 90 bp, Homo sapiens
tccagaacatccactagcctcactaaaggcctatattcacacacgtatgcgggcgaaaacgtctgacttcctcaaggtgctgaaccgcgc

SEQ ID NO: 472078 - DNA, 96 bp, Homo sapiens
tcagggcaaccccctgccacctcagatatttaatggcgaccgatactgtggagtggcctttttgaagatgtaactattagagctgggcattctcct

SEQ ID NO: 472079 - DNA, 97 bp, Homo sapiens
ctaagattcttggataccacagtatcataaaattcctctaaatgcagtttcatcacccaaacatactagagttggctgcatattttacagagactga

SEQ ID NO: 472080 - DNA, 100 bp, Homo sapiens
gaaagccgtctacactctcacctatggtgtcatggagaaactccagctgggcccagagattctgcagcgggaaaatccaaggcttatttatgccaggctg

SEQ ID NO: 472081 - DNA, 100 bp, Homo sapiens
caataaggggtcataggtggaaaagacatgagctcatggtgacacccagcactgccggaaggctctgcaccgggccgtccagtgcaccagtgactaccca

SEQ ID NO: 472082 - DNA, 51 bp, Homo sapiens
gcgtgagtgatcactctcaatcccgggtggcacaagaatggctcaactctc

SEQ ID NO: 472083 - DNA, 75 bp, Homo sapiens
ggtgggcctctgagatatgccgtttacggctacctggcctatcgaaactttatgattgacacttaccgactgaac

SEQ ID NO: 472084 - DNA, 82 bp, Homo sapiens
gcggatctcaccgccgctcagggactttctgcagggcgactgcaccaaagcgaaacagaagctgaactggaagccccgggtc

SEQ ID NO: 472085 - DNA, 90 bp, Homo sapiens
tttatttctacttaataacgtgcacctttctcatcctgtttatgtccgacgtgcagctatttgaaagaagccaacactaaaccacaaata

SEQ ID NO: 472086 - DNA, 75 bp, Homo sapiens
gccgggcaatgcctcgcgggcgcaatgaatccgcggcaggcatacccagatggaagtagcaaagaaaagagaaga

SEQ ID NO: 472087 - DNA, 50 bp, Homo sapiens
catcgctgttgaccccctgcgaggatctcttctctgaaagctgaattaac

SEQ ID NO: 472088 - DNA, 100 bp, Homo sapiens
caaacctgaaggacttcatctcccgatttgaggtcccaggtgtgacaccttcagcaggtctcagggaagatggcagccctaggggacattcaggagtccc

SEQ ID NO: 472089 - DNA, 74 bp, Homo sapiens
cactttcgccagcccgtgccgcgagcgcggcctgcaggagggtctcgctctgttactcaggctggagtgcagtg

SEQ ID NO: 472090 - DNA, 100 bp, Homo sapiens
cagttgctggacagtttgaggatgcagatgttgatcactgaaaatgatttatgcaagtttaagcggacttgtctcaggtgtggccagaggcaaaccagca

SEQ ID NO: 472091 - DNA, 50 bp, Homo sapiens
acgacatccacttctaccccaccttccggaaaccatactcaggaggtctt

SEQ ID NO: 472092 - DNA, 98 bp, Homo sapiens
gccttgccccttttggaacagaaacaggctgcccaggctttgctgaggttctgcagaccttcagcacctgcaaggggatgctgggtgagatcctgtct

SEQ ID NO: 472093 - DNA, 75 bp, Homo sapiens
ctgccttgcctacaccccctcacaatcagactgaggatgtcaggatggagatgaagatgaggaagctgagtcagc

SEQ ID NO: 472094 - DNA, 100 bp, Homo sapiens
cgctggagctgggtcagtccgccgctcaccccgcggccgcaccttcccgccttctcaggtatgatctcgtgaaaccttgagagaaactgaatgacgaatg

SEQ ID NO: 472095 - DNA, 80 bp, Homo sapiens
tctgtcctgaaggaagtcagccacccgttcctcatcaggctgaattcggcgttggaactactttttcccagaagaattac

SEQ ID NO: 472096 - DNA, 82 bp, Homo sapiens
cttgtgggagcaaaaccaacgcctggctcggagcagcagcctctgaggctttatcctgtggataaacgcagagtgaacgagt

SEQ ID NO: 472097 - DNA, 102 bp, Homo sapiens
cgcccccagctcccccgcctcggggagggcaccaggcccctagcagtcttcttgatgctttggaacaacatttagcttccttggaaggaaagaaaatcaaag

SEQ ID NO: 472098 - DNA, 90 bp, Homo sapiens
accaggacagaaaagacagtgttctgctttcatggagttcacagaagagtcgaggaggtggttatcactaggctaaaactggacaaagac

SEQ ID NO: 472099 - DNA, 75 bp, Homo sapiens
ttgacaaactgctttcccatagagctatgaagacggccaagtgggagatgcaaatattaatacacaagaaggagg

SEQ ID NO: 472100 - DNA, 82 bp, Homo sapiens
ccaggaacctgggcgagcagcggcgggggcccgaggggtttggtgcacctcgatttggaggaagtagggcagggcccttatc

SEQ ID NO: 472101 - DNA, 100 bp, Homo sapiens
gcaacccaggacttgcagagctcatagcagaggcagcctggcatcctcgctacaacctcattgttgtgggccgatacccagatcctaatttcaaaagttg

SEQ ID NO: 472102 - DNA, 100 bp, Homo sapiens
cagctgattgtaatgaatttgcccaatgttttgatgattggcagagacccactgtctggtatcatgatattagctggtttgacatcaagtcatttgtgag

SEQ ID NO: 472103 - DNA, 75 bp, Homo sapiens
gtaatatatgacattgccagtcaagcacacttgcacctaaagcattaataagaaacctgactcagaagcaagtgc

SEQ ID NO: 472104 - DNA, 83 bp, Homo sapiens
cccggtgcccgaggaggcagccaagctcgtggcctgcctctgcgtgcgtgctggagaatctggtaaaagcaccattgtgaagc

SEQ ID NO: 472105 - DNA, 132 bp, Homo sapiens
ttaaaatattactactgggttattaatcctgctgacagtagtggcattacacctaaaggattaggtgtcatggagaaactccagctgggcccagagattctgcagcgggaaaatccaaggcttatttatgcc

SEQ ID NO: 472106 - DNA, 132 bp, Homo sapiens
ccgagccagaaggttctcgtctggaggagaggaggatgattttgaccgcagcatgcacaagcccctgaagaagatggccgaccggatcaggaagtatcagatcttgaacaatgaggtttttgccatcctgaa

SEQ ID NO: 472107 - DNA, 74 bp, Homo sapiens
tgatgaagaggatgatgatgaagaggagagacaaaggcagcgctgccctcgggggagtattggccctggcggaa

SEQ ID NO: 472108 - DNA, 75 bp, Homo sapiens
atgatctcctaaaagaaaagcagtctgtggaaagaaagtcgtggattcacagataaagtagatcgactaaaactg

SEQ ID NO: 472109 - DNA, 95 bp, Homo sapiens
tggggtgaactaccttcacacaaagaaaattgctcactttgatctcaagatctacaactcttgaaaaagaagttcctgtcatcttcatccaccct

SEQ ID NO: 472110 - DNA, 75 bp, Homo sapiens
aagacacgacatctagccctgaatctgcagtcagactcagtcacatgcccactcgaagtcgcactgctatggaaa

SEQ ID NO: 472111 - DNA, 51 bp, Homo sapiens
tgaatgagcagagccggctgctggagcagaaaatgtggacacagacttgcc

SEQ ID NO: 472112 - DNA, 100 bp, Homo sapiens
cacggctcttcccggcgctctcctggctcccttctgccccagctccgtctcggcggcggcggtgatgtcttggcattgcccattttcaagcaggaagatt

SEQ ID NO: 472113 - DNA, 98 bp, Homo sapiens
ctcctggaagagatggccatccgggtcttcctggccccaagggctcgccgcagttcgacagaagtgtacagaggcttctggcaacacggattgccgtc

SEQ ID NO: 472114 - DNA, 90 bp, Homo sapiens
ctggacactctccgagaggtgaagggtaaatgggaagttggtagctctgaaggtgatcaggctgcaggaagaagaagggacacctttcac

SEQ ID NO: 472115 - DNA, 100 bp, Homo sapiens
gcacatgtctgggaggataattgggatgatgacaatgtagaggatgacttctctaatcagttacgggagctactttgcccgagatgctgcatattcccac

SEQ ID NO: 472116 - DNA, 82 bp, Homo sapiens
tgtcccagctcggcccgcgggggagccccgggagccgcacggtgaagcaaatcatggaggaggctgtcaccaggaagtttgt

SEQ ID NO: 472117 - DNA, 75 bp, Homo sapiens
ggagggcaagaagggcaagaaggcatttgtctggccttcccttttactgctggctgggaaggaggagcatcagac

SEQ ID NO: 472118 - DNA, 90 bp, Homo sapiens
gtagacctgtgggcacggacgcacgccactttttctctgctgatccaggtctaaagacattgccctcacagagtgaaatgatggcagaaa

SEQ ID NO: 472119 - DNA, 82 bp, Homo sapiens
cggcttcctagtgagtcggcggctgatttagaaggaggttcaggctacggtgagccgaagacaaaacttgccaatggcactt

SEQ ID NO: 472120 - DNA, 100 bp, Homo sapiens
gaaaaattcaagaagttgaaaaacgcttttcacgtcacctggagagatgcacaggctaaatgtgaacaataatgtcttggaagagaaattatttttcagg

SEQ ID NO: 472121 - DNA, 100 bp, Homo sapiens
ggagatggcggcgcgatggagcagcgaaaacgtggttgtagagttccgtgactcccagctccagaaactaaaacgatcactttctttcaagaccaagagt

SEQ ID NO: 472122 - DNA, 100 bp, Homo sapiens
tttaacagataccctgccctgcacaaaccagagaaccaggacattgactggggggctcttgaaggccactgcagaccccggaaggtcaaggctgacatcc

SEQ ID NO: 472123 - DNA, 82 bp, Homo sapiens
cgatgacaccattgcagaaggaataaccttcatcaagttttatgctccatgtttggaagagacttttggatgtgggtacctg

SEQ ID NO: 472124 - DNA, 100 bp, Homo sapiens
gtttttctacaggcaaatggcatcttggacaccacggctcttatcaccccaacttccgtgctgccgcagcgggaaccgcaagagcttggtggtaggaacg

SEQ ID NO: 472125 - DNA, 51 bp, Homo sapiens
ctgaaaggcaaggccatttaaatgtctgtggtgctcccattcaagtttccg

SEQ ID NO: 472126 - DNA, 82 bp, Homo sapiens
atatctacagcacctatcacttgttccctccaagacaactgaatgcaaattcaacacccaacagcttccttaatagcaaagg

SEQ ID NO: 472127 - DNA, 100 bp, Homo sapiens
ccgagcgacttctaggagcctggggttcggcgctatggaggagctcgatggcgagccaacagtcactgatcccaaaatggctgggcgaaaacttgctcta

SEQ ID NO: 472128 - DNA, 98 bp, Homo sapiens
gcagtggtggccctggagcagtatgccagcaagagacgagttgtactgctgtcacaggaaatggacgctggattacaagcatggcagctcaggcagca

SEQ ID NO: 472129 - DNA, 100 bp, Homo sapiens
tgaaaaagctgccctgagacggtgtcccgccgaaagatcagtgtgcgtgtgaccaccatggatgcagagctggagtttgccatccagcccaacaccaccg

SEQ ID NO: 472130 - DNA, 100 bp, Homo sapiens
gtttagagagtagagtgacccttggatccctgacagcagaatcccagcctgcagaattttcttcctgccccttgaactctgatgaagaagtgaataaatg

SEQ ID NO: 472131 - DNA, 100 bp, Homo sapiens
gtacctgttttatacttgcttttgcttcagcgttctgtggttgtcaacaggttttcttccacccctgagatggcaagaccagccccttgtcttcctcagc

SEQ ID NO: 472132 - DNA, 83 bp, Homo sapiens
cctctgtctgcctgtgtccctgaccatggctccctgcagtaccctttaacgggtgaaaatgtttgccattaaactcacatgaa

SEQ ID NO: 472133 - DNA, 95 bp, Homo sapiens
gttctgaagactttagtcctctctcacctgatgtgcctatggagtcttttagtcctgctatacagctgcaccttgtacatcaagctccatgtaat

SEQ ID NO: 472134 - DNA, 100 bp, Homo sapiens
ctcttctgcctgctgcactttggagtgatcggcccccagagggaagagtccagcctagggtgaatgtttccccctccaagaaggggcccttgcagcacca

SEQ ID NO: 472135 - DNA, 90 bp, Homo sapiens
accaaataatagctgtttgtattttggctgctgcaggagccattttaggaaatctactttcttcaatgtgttaaccaatagtcaggcttc

SEQ ID NO: 472136 - DNA, 100 bp, Homo sapiens
atctggagtagcactgagatcttccggtggcgggaactgcagtcatggatcatattacggtacccaagatcctattgatcatcgcttcagttattgggat

SEQ ID NO: 472137 - DNA, 83 bp, Homo sapiens
cctactgtggggccgcggccggaccgagcgcctcgacctcggtctgaggaggagagacttcagcatgcaaaccttcatctgtt

SEQ ID NO: 472138 - DNA, 100 bp, Homo sapiens
ttaaaaattccgccgaaaaagagaagacgctttacccgactctttgggccgttatctcacgtactccaaagattcaggtttactcacgtcatccagcaga

SEQ ID NO: 472139 - DNA, 98 bp, Homo sapiens
ttctatggaacacgaatgtacaaagaggacccggtgcaaggaaaatccaatggagaactctctttgagcagagctggtggagttgagatctataatgg

SEQ ID NO: 472140 - DNA, 51 bp, Homo sapiens
gtgctggctgccgcgcggccgaggtaatctgtaagtcagatgctccaacag

SEQ ID NO: 472141 - DNA, 95 bp, Homo sapiens
agacctgccttccggggacagccagccctcgctggaccagaccatggccgcggccttcgatgatatcatcaagttgaatcgaaaggaagggaaga

SEQ ID NO: 472142 - DNA, 74 bp, Homo sapiens
ctttgacgacgttgaccgcacactggatgaatggaagctggtgcctgggtcccggcaggaagaagtgatcgacc

SEQ ID NO: 472143 - DNA, 86 bp, Homo sapiens
cccggctcacctggcggtgcccgaggagtagtcgctggagtccgcgcctccctggatcatggaagggaagtggttgctgtgtatgt

SEQ ID NO: 472144 - DNA, 74 bp, Homo sapiens
gaacattctgccgaagagaacaagacgtgtgaagactcaggaaagtgactattttaccccacagggagaattcc

SEQ ID NO: 472145 - DNA, 137 bp, Homo sapiens
aatggaagatagaagggacaccattagaaactatccagaagaagctggctgcaaaagggctaagggatccatggggccgagtgctgatggcagagattggtgaggatttggataaatctgatgtgtcctcattaatt

SEQ ID NO: 472146 - DNA, 100 bp, Homo sapiens
agtaagaatgcgactattgcagttcgtcactggaacctgccgtttacctctaggaggatttgctgagctcatgggaacgtcaaggtcgtgggaaataaaa

SEQ ID NO: 472147 - DNA, 90 bp, Homo sapiens
aattcttatgccggtctagatccaagcaaccagatgaggaagtgctggctgatgtccgcaccatcgtgaaccagatcagctacacccccc

SEQ ID NO: 472148 - DNA, 88 bp, Homo sapiens
cttggcacctcacccaaagcctcactggggacaccatgtggcggatctttactggatcgctgctggtagaggagaagtcaagtgccct

SEQ ID NO: 472149 - DNA, 80 bp, Homo sapiens
agaattcagaaggaacttgcagaaatcacattggaccctcctcccaactgtaggaagattcttacctctgaagacaatgt

SEQ ID NO: 472150 - DNA, 100 bp, Homo sapiens
cacatctgctcttcttgcccattacctgctgggtttaccatggcaatggggatttatactggggtgagaggtcactatcctcctctccactgctttcttg

SEQ ID NO: 472151 - DNA, 75 bp, Homo sapiens
gaagagaaaggcccggagactacagttaaatctcacacagaaacagatgagaaacaaacagagagccgcaccatc

SEQ ID NO: 472152 - DNA, 73 bp, Homo sapiens
gagaagtacatcaaggggccttcgctgagctaccgcacccagcctgccctgccaaaggccagagccgtggctc

SEQ ID NO: 472153 - DNA, 74 bp, Homo sapiens
aaattatccgtttctggaaacattctacactgaaggaagaggatcaccttccaagacaaaacagtcttcatggg

SEQ ID NO: 472154 - DNA, 74 bp, Homo sapiens
ggagttcccctcagagagatgatctaaaacttctttgtgaacaaaatgtggagcagctcctgtacgaaagccct

SEQ ID NO: 472155 - DNA, 101 bp, Homo sapiens
gggcggctggcctcaccgcccactggatcagtgtactgttacccggacatacctattccttcacaagttctggttcttcagtgctgcttactattttggta

SEQ ID NO: 472156 - DNA, 82 bp, Homo sapiens
ttgctggctacagcttcagaagaccgaagcgttcgtatctggaagggactggtgattgcagctggaagtgcccatgaccgag

SEQ ID NO: 472157 - DNA, 100 bp, Homo sapiens
gtgggaggcttacctggggctgctgcaggccgagtacaccgagggggtgttcagacttacatctcttggatatgttgaccccaactgaaagaaagcgaca

SEQ ID NO: 472158 - DNA, 82 bp, Homo sapiens
gcatcccagtttttggtcttctgtcaaaaacacagggatgagctgtgctgtcgtcatgcctcaaacccgatcccaggcacag

SEQ ID NO: 472159 - DNA, 74 bp, Homo sapiens
ctctgacgagctgcaatttggttatgagaaaagagtagttgaacagctacggaagaacctgatagtaaagcaag

SEQ ID NO: 472160 - DNA, 75 bp, Homo sapiens
ggcgccgccgccattgccgctctctcgatctgtaagagcaaagctaaagaatctcagcagtattatcacagcttg

SEQ ID NO: 472161 - DNA, 90 bp, Homo sapiens
ggctgactacttcatcgtggtaggctatgaccacgagaagccagagtgtgaacatggctacgcctcttcattcccgtccatgccgagccc

SEQ ID NO: 472162 - DNA, 120 bp, Homo sapiens
ctcatcgaacagctggagcaaggcgacgaaccttggagagaggagaacgaacatcttctggacctttgtccaggagaaactcccatgtatggaatcccactgtatgatttataaacagac

SEQ ID NO: 472163 - DNA, 101 bp, Homo sapiens
cctggtcttgctcggccgatgaagtgcagaggtttttttctggttttgccagatcgaagtcatcctaaactgctgatgagtggaggtgggggttatcttct

SEQ ID NO: 472164 - DNA, 75 bp, Homo sapiens
tgtacacacaggagagctggctgcagtaaaaatcattaaattggagcctgatatgaccacattctgaagtgggaa

SEQ ID NO: 472165 - DNA, 50 bp, Homo sapiens
tgtccatccactcaggacatctgcagatgcaccagcaaggaatactgaag

SEQ ID NO: 472166 - DNA, 90 bp, Homo sapiens
caaaatttgccatccgagggatgctgaaaacctttgggcttcatggagtcgtcttagatgttgattcacttcttggacacttaatgattg

SEQ ID NO: 472167 - DNA, 100 bp, Homo sapiens
aaaaatgtgcatactcacagagttagagagagggatggtgagacatcatctcattatgttgcccagactgatcttgaacttctggactcaagcaatcctc

SEQ ID NO: 472168 - DNA, 50 bp, Homo sapiens
tcctctccatctgcccgtagcttgccagccaactcagcctggttaagaac

SEQ ID NO: 472169 - DNA, 97 bp, Homo sapiens
tgcctgtgagatggcactgtgacggtgcccacctcgtggggtgtgtgagggccgagtgaaatcgtgcatttgcgtgaatggcattactgaggaagct

SEQ ID NO: 472170 - DNA, 74 bp, Homo sapiens
aacattgcacgatgcctcctggaaagcgtctctagcagctgatatccccagacttggatatagttcctcatccc

SEQ ID NO: 472171 - DNA, 100 bp, Homo sapiens
agttttcacctgagtgctggagaggacaagattaaagtcaagagaagccttgaggatgagccaaggagaattgacatctcaccaagtaccctgaggaagc

SEQ ID NO: 472172 - DNA, 82 bp, Homo sapiens
ttgggcgggggatgtgagcgctgagcccttggcagtgtggacgaatgtggaacctcgctctgtggctgtgttcccttggcac

SEQ ID NO: 472173 - DNA, 49 bp, Homo sapiens
atagaacctattatgctctatcagggcctgccttaagtgtgaaagtaat

SEQ ID NO: 472174 - DNA, 96 bp, Homo sapiens
gtggcgttcaagatgtcgaccaagaatttccgagtcagtgacggggactggatttgccctgacaaaaagaatacttcttgattcagaacgtaggaa

SEQ ID NO: 472175 - DNA, 75 bp, Homo sapiens
tgcggtctgggccttttgggcagcttttccggcctgacaacttcatctttgtacgaattggagcaatgttggctt

SEQ ID NO: 472176 - DNA, 83 bp, Homo sapiens
cttggactgagtcctgcaggacacaggtacaatgactcttcttgcttttcacctaagttgaataagcaccctgtgcactttaa

SEQ ID NO: 472177 - DNA, 88 bp, Homo sapiens
aaatatgaactatgataagctgagcagagccctgcgatactattatgacaagaataatccagaatggctactctgatctatgttgata

SEQ ID NO: 472178 - DNA, 96 bp, Homo sapiens
cacatggggatgaagaggtatgaagtggctggacgccgagtgctcttctactttgatgaggagtttgagaaactctctgatttcttcaaaactcac

SEQ ID NO: 472179 - DNA, 100 bp, Homo sapiens
gccatggtctacatgggggcaaagggaaacaccgctgcacagatggcccagggtgatccaggtgagatacttggccatgtgcccgggatgctgttgaaag

SEQ ID NO: 472180 - DNA, 74 bp, Homo sapiens
tgaagggaggaaatagtggcaggtgacagtctgcatgtgcagttttcagatgcagcaaatattttggtgatggg

SEQ ID NO: 472181 - DNA, 87 bp, Homo sapiens
tctgacacccaggcagggcctagggtgggacgatggcaggtgggggcagcgacctgagcaccagaagctgcagttcatcatctgctg

SEQ ID NO: 472182 - DNA, 100 bp, Homo sapiens
atacttttgagccagacttattagatgaccctaattcagaaaagaagaagaagagggatactcccatgctgccaaagagctaaagttgcagacaagatcc

SEQ ID NO: 472183 - DNA, 100 bp, Homo sapiens
tatcaagcctaatgacttcaagttcccattcacagctggtggagttgagatctataatggagatcgtaaaataaaggtttccaacaccctggaaagccgg

SEQ ID NO: 472184 - DNA, 90 bp, Homo sapiens
ggccccatgacctccgctcccctgtctacgacatcagacattgtgttggaggacacccagccgttctctcagcccatggttggctccccc

SEQ ID NO: 472185 - DNA, 82 bp, Homo sapiens
cccgcgtccgccgattcctcctccttggtcgccgcgtccttggctggcgtggtcctccggggtcacagccctcgccgcacgc

SEQ ID NO: 472186 - DNA, 100 bp, Homo sapiens
ggtgatgacatttgccttacaggaaggaaaagtagctatccattgtcatgcagggcttggtcgaacagatcgtactgagaagcactccacaatgccagac

SEQ ID NO: 472187 - DNA, 100 bp, Homo sapiens
ctccggatttctatgtgcagatgaaatgggaattcaccagctggggtaaatgggcttgatactgtgagagtgcctatgtctgtcgtgaactttgagaagc

SEQ ID NO: 472188 - DNA, 80 bp, Homo sapiens
ctttgttggagttttgcccacgcgttgtaattaagcctcgcacaatatggctgtctgtccccagaccccagagcacgtcc

SEQ ID NO: 472189 - DNA, 50 bp, Homo sapiens
aaatcgagcagaaagaatgtctttcagaaagatgtgcgggacatcctcac

SEQ ID NO: 472190 - DNA, 100 bp, Homo sapiens
tgaagacatttcctctcctcccctctggatttctcagaggtcatgatgatgggcagcgcccgagtggcggagctgctgctgctccacggcgcggagccca

SEQ ID NO: 472191 - DNA, 98 bp, Homo sapiens
tttaaacaagagatttccacagaagcagcctgagggaactggcatgatagatgaagagttcactgttgcaagactctacattagcaaaatgaagtcag

SEQ ID NO: 472192 - DNA, 75 bp, Homo sapiens
ggcggagcgccatggcctgcatcctgaagggatcccaatcacccttcagtaccttatcattattatgaacctttt

SEQ ID NO: 472193 - DNA, 101 bp, Homo sapiens
gggggactagagctggccctgggctgtcactataggattgcccacgcagagggtcctaaaaaggtggggacgctgtggcgagaagccgggcttagctggaa

SEQ ID NO: 472194 - DNA, 96 bp, Homo sapiens
tgcaggatcaggatctggagatggagccaagcaaccgacataatggaaacatcagggtggaagtccatgattcagtctcaccctcatttagtagca

SEQ ID NO: 472195 - DNA, 75 bp, Homo sapiens
atcattgtccaggcctgcagaggtggtccaggttcacactagaaggccaaaacttccgcaaacatctgatgatga

SEQ ID NO: 472196 - DNA, 75 bp, Homo sapiens
gagaatctgtcctggtacaaggatgatgaggaccgagaggagcggaagctgctgctggaccctagcagcccccct

SEQ ID NO: 472197 - DNA, 100 bp, Homo sapiens
gttcaaaaggcatcaagacgagtggggagagtgaagaaaccagcctggacaccaagtctgtgtcagaaggccacctcaagaggaacatcgtggtgaagac

SEQ ID NO: 472198 - DNA, 100 bp, Homo sapiens
gtcaagtacgagagtggccctgacggaggggaggaagttaatttggagtggcccctggagtcagtttcctacaccatccgaggccccacccagcacgagc

SEQ ID NO: 472199 - DNA, 100 bp, Homo sapiens
agcttttaaaaaaacattctacccaagtctacctgggaccgactcagcccaaaaccatgtttgcccaagttgaatctgatgatgaggaagcaaagaatga

SEQ ID NO: 472200 - DNA, 75 bp, Homo sapiens
tggtttggggagtctgaggccaatgtcagagaaatctttgacaagcgttttgctgctgacatcatctccgttttg

SEQ ID NO: 472201 - DNA, 100 bp, Homo sapiens
gtcggccaagaaagacaaagacccagtgaacaaatccgggggcaaggccaaaaagaaggttcagttggagacgatcataggtggctgctgtgacaaaggg

SEQ ID NO: 472202 - DNA, 100 bp, Homo sapiens
tgagttctcccgccctcttggtgaggtcagtttaggggctggtgcaaaggatgagttgcacattgttgaagcagaggcaatgaattacgaaggcagtcca

SEQ ID NO: 472203 - DNA, 75 bp, Homo sapiens
cgctaggtggcatctcctctcacggatgcctcggcagagtggcatgattccgactggatactctcagtgccagcc

SEQ ID NO: 472204 - DNA, 100 bp, Homo sapiens
tcaaagaatattaaaaaatctggagggactccaacttcaatgtatttgattttcatcaagcagctgatggtatccaggaacaacagagacaagaacaagc

SEQ ID NO: 472205 - DNA, 100 bp, Homo sapiens
acgctggctgcagggacccggtgacagcgtgagaggttcgcagaaatgctgcctttttatatggtcttggtttggtctacttccattataatgcatttca

SEQ ID NO: 472206 - DNA, 83 bp, Homo sapiens
gtccgacctcacaggccgacaagatacctctcgcatgtccacctcacaggttaacacagaaatctgcctcctgggccatgccg

SEQ ID NO: 472207 - DNA, 73 bp, Homo sapiens
gagtactaccctgcctttgagcatcagacaggttccttcaatggtgccttagctgctgttcctgtccaggacc

SEQ ID NO: 472208 - DNA, 75 bp, Homo sapiens
cgggctccgcgtacttcctgttcaggagagaagatgactgaggaggaggtggagaccgttctggcaggacacgag

SEQ ID NO: 472209 - DNA, 50 bp, Homo sapiens
ccccacagaccagcccagcattcagtgcaagaagaaacacacgctgctgt

SEQ ID NO: 472210 - DNA, 98 bp, Homo sapiens
gcggcccgcttcctggaatggcaagcgcagcaacaacagagagcacgtggtggaatgaatcttacttgttgaatatcttctggttactagttggattc

SEQ ID NO: 472211 - DNA, 95 bp, Homo sapiens
gcctggcctaaagggcttcgtggatgagcacaccatcaacatctccctcagtctgcaccgtttgaatggggatgtgaatgttaatggcttatcta

SEQ ID NO: 472212 - DNA, 98 bp, Homo sapiens
ggaggtgaatttccatgtcaacatagtccagtgtgaaatggccaccagtggtgacagacaaagagactcagaagttaatttcaaggaactgagaacag

SEQ ID NO: 472213 - DNA, 98 bp, Homo sapiens
aaatagcctttgccatcactgccattaaggtgtcagttgtacccgaggcgttctcagcagcagcaagtacctgtggtggatttccaggctgaactgag

SEQ ID NO: 472214 - DNA, 83 bp, Homo sapiens
ccgccgccgcgcgaggaaatggccgaggagccggagccgcaggtgtccctggccagtgtccttccacctgtccacaagcatgg

SEQ ID NO: 472215 - DNA, 74 bp, Homo sapiens
tgcatgtggctgcaggacctctgtcagagaatgaaacactcatcgcatgggtggactccattatgctggtggaa

SEQ ID NO: 472216 - DNA, 96 bp, Homo sapiens
cggcggtgagatcgtcagcgctgactccatgcagacatgtcatgctgcccaaggacatagccaagctggtccctaaaacccatctgatgtctgaat

SEQ ID NO: 472217 - DNA, 98 bp, Homo sapiens
ttgctccatttacaatctgaaaactcgtgaggggaacgtgcgcgtgagtcgtgagctggcaggacacacaggtgcttcaagctgtcttgccgggctgt

SEQ ID NO: 472218 - DNA, 75 bp, Homo sapiens
gaagatgactgtggatttcgaggagtgtctgaaggactcgccccgcttcagattctggaagaagcaactgaagaa

SEQ ID NO: 472219 - DNA, 73 bp, Homo sapiens
gaagtggttctggaaactttggtggcccttcagaaggtttttaatttttctacttcacatatatttgaaacaa

SEQ ID NO: 472220 - DNA, 75 bp, Homo sapiens
aggccctggcccagagggacaagttctcccacggcagacctgcggcctcttcacacacaccatcttctacaacga

SEQ ID NO: 472221 - DNA, 100 bp, Homo sapiens
aaaagctgccctgagacggtgtcccgccgaaagcgggctacattgagagacctcagctgattcgagcaaaagtgccaattgtgaagttcagggataaagt

SEQ ID NO: 472222 - DNA, 100 bp, Homo sapiens
tggacagcaccagacactccctggcccacacctcccgctcatcgcccgccacggttgaccagtatctctaccacatgcgcctctctgatgagaccctctt

SEQ ID NO: 472223 - DNA, 51 bp, Homo sapiens
caaccacctcgagcggctgctggacgaagatggaaaatggttgatcattat

SEQ ID NO: 472224 - DNA, 50 bp, Homo sapiens
gcggggctgcggagggccagtggactcagtcctcctccgcctcctcctct

SEQ ID NO: 472225 - DNA, 83 bp, Homo sapiens
cctgaagaaggtcagtgtgcttgcttggagatcaggacgcaaaggaactgtggctgcaccatctgtcttcatcttcccgccat

SEQ ID NO: 472226 - DNA, 100 bp, Homo sapiens
ctgcctcccagaacaaagtgggaaagggaagcttagcccgccgctgccgcctccgagcagcccgccagaataacctgaatctgctcagagacctggctgt

SEQ ID NO: 472227 - DNA, 74 bp, Homo sapiens
gccgctgtcacctggaggacaacttgtacaagaggagcaacgaattcgaggatacgaagcgttttcggcttcct

SEQ ID NO: 472228 - DNA, 74 bp, Homo sapiens
cgggtcttgggtcctccgagagcagcagcgatgtccagctcgccgctgtccaagaaacgtcgcgtgtccgggcc

SEQ ID NO: 472229 - DNA, 82 bp, Homo sapiens
cggagagggtgctggctgccgcgcggccgaggtcctcagtttgcagaagacccctcccagttgccttcaactcagttacctt

SEQ ID NO: 472230 - DNA, 100 bp, Homo sapiens
ctggcatggtggatgttctttacgccaaagtccatatgaaagatggctccaacagttctaatacccgatttacaattacattgaactacaaggatcccct

SEQ ID NO: 472231 - DNA, 100 bp, Homo sapiens
agacttctgaagaacaaatcagcctggtcaccagcttttcggaacagcagagacacagagggcagtcatgagacatgggaaagcggaaccaccaaaagga

SEQ ID NO: 472232 - DNA, 101 bp, Homo sapiens
ctggatcgctgatacctatgccagcaccatagggcactatccacctggtttccatcgggcctatagttccccactctacagcaaccagcagtacgcttgtg

SEQ ID NO: 472233 - DNA, 100 bp, Homo sapiens
ggaggaggctggagtgggcgcggaggcgaccgccatggcgttcctcaaactccgtgaccaggtactgctataaccagaatttggtagaaaaaggatttac

SEQ ID NO: 472234 - DNA, 80 bp, Homo sapiens
aatcgacgtgctgttttcataggtgttcctctgaacaacagggagaatatctctgatcccacctcaccattgagaaccag

SEQ ID NO: 472235 - DNA, 100 bp, Homo sapiens
ttaaagagtaactcctcattcgccatctgtctccgtgggtttgactgctcattaccaggaacttcaggtgtctgcccagcttcatggggacaggatgcag

SEQ ID NO: 472236 - DNA, 100 bp, Homo sapiens
cacctaacagacgaggaatcagctttgaagtgggagcccagttggaagcccgggaccgtttaaaaaactggggttgcagatggtgtaggaggctggagag

SEQ ID NO: 472237 - DNA, 110 bp, Homo sapiens
ttccctctaccttaaggatgtgcaggatcttgatggtggcaaggagtggctattatcatggaaaactaatttttcccagagaatttcctttcaaacctcccagtatctat

SEQ ID NO: 472238 - DNA, 50 bp, Homo sapiens
cagcctcctgagttgctgggattacagtaccacctgtactctgagcctca

SEQ ID NO: 472239 - DNA, 96 bp, Homo sapiens
gcggcgcccgctggccgggctggctgcggccgccctgggccgggccccaccggacgtgtactaatggtcacttgatgtgcgctggctgttttatcc

SEQ ID NO: 472240 - DNA, 90 bp, Homo sapiens
caggaacccaccagaaggaaccaattccggacacataacaagcagcagtgaggacaccaaagggtcctcactgagcagcgagtcgtcccc

SEQ ID NO: 472241 - DNA, 110 bp, Homo sapiens
cctgcctggcccccagccagttccctgctgaagatggccagatccccttgtctggtgacagagctgaatgaacctctctccaatgaagatcgaaatctcctctctgtggc

SEQ ID NO: 472242 - DNA, 83 bp, Homo sapiens
acatgatagttgatctggataatgtggtcaaaaagaatggctctcttctgtgtataaacagcagtggtttgctatgctgcggg

SEQ ID NO: 472243 - DNA, 100 bp, Homo sapiens
ataagtcatgtgctcttgctgaggacccacaagaacttcgagatggattccaacatcctgctagacttgttaaggtttctggtcctcataccgtgtggtt

SEQ ID NO: 472244 - DNA, 83 bp, Homo sapiens
ctgtcttcggtggactccttcggcagtccacccaccgccgccgcctcccagtaactggtgcccctacccaatgtccaagctgg

SEQ ID NO: 472245 - DNA, 74 bp, Homo sapiens
gcctgccagcccctcctcagatgcccctgccggagatccctcagccctggctgttaaacagagtttcgacctgg

SEQ ID NO: 472246 - DNA, 75 bp, Homo sapiens
ttaaatgaagccactgattagcaatttaaagatcctctccaagggtgtcaaattgagaaccaggtagatccccac

SEQ ID NO: 472247 - DNA, 75 bp, Homo sapiens
gcgtcctgagcagcagccccgcggtgctggattttctctgtgggcagttctttttgttttgggaagacttctgac

SEQ ID NO: 472248 - DNA, 82 bp, Homo sapiens
gagaggtggacagatctgagagatactgagcggacaagtactgccctctgctgatcaaagaaggggggatgccccttctgag

SEQ ID NO: 472249 - DNA, 75 bp, Homo sapiens
attcaagactcctctgctttggactgaagatatttgcaaatatggatccatccctcctgatgtggaggagaagtt

SEQ ID NO: 472250 - DNA, 122 bp, Homo sapiens
cagtgactccaggatttctgaagactattgtggaagaagcatccattaagagcctaaaaccattggccaaccgtcacgcaactgccagtaaaaatattttccgagaagacccaataatcgcg

SEQ ID NO: 472251 - DNA, 100 bp, Homo sapiens
cacctccattttcctaggtgtcattacagtgatcatcataggcttatgtcttgctgcaggtggattggtgatagaaaagcagtgctttgatcccacctgt

SEQ ID NO: 472252 - DNA, 83 bp, Homo sapiens
tgccacagcagttcctgcagcttccttgagcagcccctgtcaaagggaacaggaagcagtccacggagggtgacgccctagac

SEQ ID NO: 472253 - DNA, 100 bp, Homo sapiens
ctctctccgtgctcatcttcatcgccctggctctgaatggctttggtgggatgtgtatgaccttcacctcattaacatctcacagaaagttctccgctcc

SEQ ID NO: 472254 - DNA, 75 bp, Homo sapiens
gcaacccccaggatgtgacctattttgtggcctatcagagatcgaatggagctgttagaaatagcaaaaaccaat

SEQ ID NO: 472255 - DNA, 98 bp, Homo sapiens
gcgaatatcgtcatcgttagaaggagatatgtcagtattgaattctcccagacatcagagctgtataatgcatgttgatatggattgcttctttgtat

SEQ ID NO: 472256 - DNA, 100 bp, Homo sapiens
acttgtttcttatatgtgatgccattccagcactggactcatggaggctgagcatttattcagctggtacgtgacaatgcagatctgcgttgtgagcttc

SEQ ID NO: 472257 - DNA, 100 bp, Homo sapiens
cagagcagtcagcagagcagccacgatgatgattctagcaggttcctgagtcctcgagcgcgggaagaaaggtttggaaagcagagtggagaacaaagag

SEQ ID NO: 472258 - DNA, 83 bp, Homo sapiens
tccttgcccgagaacatccagtttgatgtttactacaaggtctgagagtcactggagctaccagaagcatcatggggccctgg

SEQ ID NO: 472259 - DNA, 83 bp, Homo sapiens
ggaaggacaccaagatgcggatccgggcctttccgcgttccaatccacatgctgcctatcccaaccctggaccaagcacatca

SEQ ID NO: 472260 - DNA, 75 bp, Homo sapiens
ccgggactctgaactatggcgaaatcttacaggctggtgttaaaggaacttcggaatcccttaaaggtgtgaaac

SEQ ID NO: 472261 - DNA, 80 bp, Homo sapiens
ttcccgtgattgcgttacaagctttgtctccttcgacttggagtctttgtccaggacggccaaagaggtgctgaaaaaat

SEQ ID NO: 472262 - DNA, 100 bp, Homo sapiens
ggcgctgaatgaaagaatgaactggttgtgcaggaaccaggatccgaacccgcctccccagtctgcgctcctcagaccaccggcaggtgaacagcctgat

SEQ ID NO: 472263 - DNA, 82 bp, Homo sapiens
tcctcaccccctgaaaatgttcgcctgctccaagtttgtctccactccctccttggacataagcagctctatgaccaatagc

SEQ ID NO: 472264 - DNA, 96 bp, Homo sapiens
tgagcgccagagaggacgtttccaactcaaacaggtctccttcctgccacctagtgaagaagttgcctttcttccctttgccttccagcatgattg

SEQ ID NO: 472265 - DNA, 100 bp, Homo sapiens
ttttgggactgctgtgcctcctcctcctgtggtggaggagaaggaaagagttgcacggtcaattggcccgtgaaggggacgcctactttcaaacaaggca

SEQ ID NO: 472266 - DNA, 75 bp, Homo sapiens
agacttttgtgttgcagttcgggaagattgttgatcgaatcgacaatgatggggatggctttgtcactactgagg

SEQ ID NO: 472267 - DNA, 75 bp, Homo sapiens
agatgagctgggattcctagaggtgctgagctgtgaggagagcatcagggtttgggctctgctgcctttccccga

SEQ ID NO: 472268 - DNA, 74 bp, Homo sapiens
cgaggcccgcagggacatggccggggacacccagtggtccagggaggctgccggcgtggaccgcgggaaggcgg

SEQ ID NO: 472269 - DNA, 87 bp, Homo sapiens
aaacaccacatcactttaactaatctaattactgaagagactactcatgttgttatgaaaacagtacgtagagaaatcgacactctt

SEQ ID NO: 472270 - DNA, 100 bp, Homo sapiens
ctgtccctggctccctcattaccgtcgccagcggagcgaacccgagagcgtggagcgggctgggccagctgagctgactgctgcccactttggaggaggc

SEQ ID NO: 472271 - DNA, 100 bp, Homo sapiens
tataaaaagtgaagtacatcttgcaattcctaatgtgtatcccagtcgacatcagtgacagtgatatgatgctgaacatcatcaacagctctattactac

SEQ ID NO: 472272 - DNA, 100 bp, Homo sapiens
cacgacggccccagggaggatgacgaacccaacctggtgcccggcccgcaggcaatccagcatccagcagatgagaagttgcaagagaaggcatggggtg

SEQ ID NO: 472273 - DNA, 75 bp, Homo sapiens
cttgccaaccctcccaagaagttcagagtttcagactctctggctcaatctgtagttcagcatctaagatggata

SEQ ID NO: 472274 - DNA, 82 bp, Homo sapiens
aacctcctgagtggctgggactacagaggctgctggtttgcctagaagagtccatttatattcacaacattaaagacatgaa

SEQ ID NO: 472275 - DNA, 97 bp, Homo sapiens
agaggaggccgtccagcagatggcggatgccctgcagtacctgcagaaggtctctggagacatcttcagcagatgaagactggcccatttgcagagc

SEQ ID NO: 472276 - DNA, 97 bp, Homo sapiens
cactgttgcctatcagaagtcaattcaaaggacctgcccccagagagaaccctacagcttggggcctgggctcctctgaccatcctcattgagaaag

SEQ ID NO: 472277 - DNA, 51 bp, Homo sapiens
cagacaagttccatcccacctttgagtcagcccctagcctgcagagcagtg

SEQ ID NO: 472278 - DNA, 101 bp, Homo sapiens
tgaaaatggagatattgggaaagaaagatatagagacaacgactatgtccaattttcatgctcaggaaatttggtgagcggcctccacctaaacgacttac

SEQ ID NO: 472279 - DNA, 99 bp, Homo sapiens
tggagcctcagttggaagcagccgatccagcctgcggagcctgtggggcaggcatggaagaggagatggttcgtgttacgcagtggccgtttaactgga

SEQ ID NO: 472280 - DNA, 100 bp, Homo sapiens
ttcagtgttggctgataaaattgccctgaaactggttggtgaagaaggatttgtagctctttcgacgtgtagcagcagctttgccgggaatggaaagcac

SEQ ID NO: 472281 - DNA, 100 bp, Homo sapiens
tgccccactcgagggaggggcccagagcagcctccttcctctcctcccaggatacgtactatcagccccgtgccctggagaaacatgctgacagcatcct

SEQ ID NO: 472282 - DNA, 75 bp, Homo sapiens
ctgcagcagctgagaaaggagctcggggactcccccaaagacaaggttctgctccagacgagcccttaccacgtt

SEQ ID NO: 472283 - DNA, 96 bp, Homo sapiens
cagtaatctagctgcagttttgatgcacagaggcagaactggggctcccttgcatcttccagttacaaattcagtgccttctgcagtttccccaga

SEQ ID NO: 472284 - DNA, 116 bp, Homo sapiens
tgccaatagagtgattttagactatttacatcgtgggttacaaccaatgaaagaagcagatgccattgatgacactctgagttccaaacttaaagttaaagagctttcggtgattg

SEQ ID NO: 472285 - DNA, 100 bp, Homo sapiens
tgacagagctctaccagtctttaggctgtccagtgaatacagagccatctggcccaacctgtgagaagaaaacatactctgtgcctgcccaccaggaacg

SEQ ID NO: 472286 - DNA, 82 bp, Homo sapiens
ggagaaatgcgagagctgcctgcagggctacttcctcctggacgggaagtgcaccaagaactctgcgaccttcaagtcgttt

SEQ ID NO: 472287 - DNA, 90 bp, Homo sapiens
gcacctgcgcgaagctggccaaagcctgcccagacggctcacctgtgcgggatggaacaaaagttcgatcctttggtacagaagacagac

SEQ ID NO: 472288 - DNA, 88 bp, Homo sapiens
cagggcaaggcggcggacggctgcgtcgcccgaggcgaggaggagcgctggcggcatcattcttaacaaagaagttaaatattggtgg

SEQ ID NO: 472289 - DNA, 74 bp, Homo sapiens
cgctgcccagaagaagggaaggcgcgagtgaggaaaggaggtactgtagctatttgagaaagtcaaagaagttt

SEQ ID NO: 472290 - DNA, 101 bp, Homo sapiens
aaccgagctcccgtctgccttgcaggttgcaaaagcttctcatttcagagagatgccaggatcctaagtgcctgccaaacttaccaattctaaggaataag

SEQ ID NO: 472291 - DNA, 51 bp, Homo sapiens
accctggtggagtttgctattgaaccccatgcatcccagctcaaggtggtc

SEQ ID NO: 472292 - DNA, 100 bp, Homo sapiens
cgggcatcttgctgttcgtgattatatttcttggagttgtgttggtaatgaagaaaagggtgcggaggcagcaaatgttacaggtcctggtggtgttcca

SEQ ID NO: 472293 - DNA, 75 bp, Homo sapiens
cactgtaatcacagggactaccagaatatttcaagaaatggagtatgctgctgctgttccgctttgcgtcctcgc

SEQ ID NO: 472294 - DNA, 82 bp, Homo sapiens
tctggagtgaagaacgccgccatccagccaccattccaaggacagctaacccccgcatcggtgacgtgatccagaagctggc

SEQ ID NO: 472295 - DNA, 83 bp, Homo sapiens
ccagaaactagcaccagccccaaatttcccgtacccgtgcgcagaggacgaggagtgcggcactgatgagtactgcgctagtc

SEQ ID NO: 472296 - DNA, 100 bp, Homo sapiens
cctacacaaaggacctactactgcctatcaaaacgcccaccacaaatgcagtgcacaagtgcagagaagaggaggtatcttgcagtgggcctctgtccca

SEQ ID NO: 472297 - DNA, 75 bp, Homo sapiens
cgtgagcgcctcgcctggatgtgagtttcagccagtccactggggatcaggcattagaagttctacagtacctct

SEQ ID NO: 472298 - DNA, 99 bp, Homo sapiens
tcggctccgcgcccgccgcgccgggagcagcaccgcggggccaggactccctggaggaaaagcggaagcggcagcggtctgaacgcctggaacggattt

SEQ ID NO: 472299 - DNA, 90 bp, Homo sapiens
cagcggccgcgattcggggaggtaggcgctgggccgaggaggggagcttttggaagagtcccagatggaagcgaccaggctccggcagaa

SEQ ID NO: 472300 - DNA, 101 bp, Homo sapiens
gtgctaggaaacattcccccaggagatggcatgccagtaggtcctgtaccaccagggttctttcaggaaatggagttgttttttccttcaagtggaggttg

SEQ ID NO: 472301 - DNA, 100 bp, Homo sapiens
cacgacgagcgcggaggaccgggaggctcccgggcttgcgtggacctgcgaccgcatcaagcagtccgccagcggaaccaagcggcgcgtgttcatcatc

SEQ ID NO: 472302 - DNA, 75 bp, Homo sapiens
tttgcaacagaattacagagtatgattcattgagaaggtcaaaacgaaattcagactctacggagttggcagcac

SEQ ID NO: 472303 - DNA, 89 bp, Homo sapiens
ggagtctcctttggtatccgcaaactctacatgaaaagtctgttaaaaatctttgcggctaagaaatggcatttcaaaaggcagtgaaa

SEQ ID NO: 472304 - DNA, 50 bp, Homo sapiens
tggcagcatgtatatcttttggtaacaagaaggggcccttaggccgttgg

SEQ ID NO: 472305 - DNA, 73 bp, Homo sapiens
cctcctcctctccttctacctgctggggttgcttgtcagtagcgggcaaggcccagatagctaataaccgaac

SEQ ID NO: 472306 - DNA, 101 bp, Homo sapiens
gaaaagaacctctctcaaatagaaaatgtccatggatatgtcttgcagtctcatatttctcctctgaaggtaagaatgattgatgttggctgatattggag

SEQ ID NO: 472307 - DNA, 49 bp, Homo sapiens
ccaccatgaaagctaagctgctgaaggagagaagtttgctgaggaatgc

SEQ ID NO: 472308 - DNA, 76 bp, Homo sapiens
gtcaaactggcaatatttgggagagcaggcgtgggcaagtcaggtagacgttacatccaagaggaaataatccagg

SEQ ID NO: 472309 - DNA, 74 bp, Homo sapiens
ggggattctcgacctgctaacagaactggaccttttcgatgtttactgaactgcaacagatgaggcaacagtta

SEQ ID NO: 472310 - DNA, 51 bp, Homo sapiens
atataatcaactcctctgcctgggtttcgtgcacctgaagttgccagagga

SEQ ID NO: 472311 - DNA, 100 bp, Homo sapiens
aaacgtagggaccacatcaaagacagctttcacagtttgcgggactcagtcccatcactccaaggagagaagattacataccggttacggcacctccttc

SEQ ID NO: 472312 - DNA, 83 bp, Homo sapiens
cagcctggacctgtaccaaggcaccgggtccctcgcccaggtccccttggacaaatgggatattagaaatggctactccccag

SEQ ID NO: 472313 - DNA, 75 bp, Homo sapiens
ggtgccgcagctgcgatggccgtggccgtggggagaccgtctatcatatctgaagatattagtgagctacaaaag

SEQ ID NO: 472314 - DNA, 75 bp, Homo sapiens
tggcaaactcactagtatgcacttctacggctggaagcaggatccctccccgcggcggcgatggcccgagccatg

SEQ ID NO: 472315 - DNA, 100 bp, Homo sapiens
gcgacggcggaacccgtgggcctgtggactgcagcctcggcggtcagcagtggacagtttgcggttgtgaagaaatgccgtgagaaaagcaccggcctcc

SEQ ID NO: 472316 - DNA, 74 bp, Homo sapiens
ttctccactttcgccagcccgtgccgcgagcgcggcctgcaggagtgggccccctgagaagaagatgggcatca

SEQ ID NO: 472317 - DNA, 83 bp, Homo sapiens
tcctgtacagcctgcagaactggtctcctatggacagaagtgcgggcaaggagctttgttcctccccgatgtcaccctcccac

SEQ ID NO: 472318 - DNA, 82 bp, Homo sapiens
ggagctcactctcctgtccctggacctcatgcaccatattcacatgttggcaggaagttatgttcgtgatgatgcagtcccc

SEQ ID NO: 472319 - DNA, 90 bp, Homo sapiens
gtctggtgtgggtttcccaagcaaggttccttggaagaagatgtctgcagagatgtagaagacagaagtagctcagggtcctgggggaat

SEQ ID NO: 472320 - DNA, 89 bp, Homo sapiens
gcggagagcacgccatgaaggcctcgggcacggacatggatttgattgacatactttggaggcaagatatagatcttggagtaagtcga

SEQ ID NO: 472321 - DNA, 87 bp, Homo sapiens
atgggcaaagagatccggcctacctatgctggcagcaagagcgccatggagcgcctgaagagagagctaatttacaaagaagtcatg

SEQ ID NO: 472322 - DNA, 99 bp, Homo sapiens
agcagacattcccgccgtgcaacgcggagtggagctcagccaggggcagccggctctggtgctcccagaagaggaaaatgttggggcttttcaggaagc

SEQ ID NO: 472323 - DNA, 100 bp, Homo sapiens
gttagcatggtggagtatgtgttgagctcatccccgggcgattcctgtctaagaaaaggaggatttgtggctgcgctggagcggcagatctttgacttcc

SEQ ID NO: 472324 - DNA, 85 bp, Homo sapiens
gaaccaagcagcacgcgtatctatgccattgccaagtgttcactcatcttaaacatcctcagttgaaatccgtatgctccgctag

SEQ ID NO: 472325 - DNA, 83 bp, Homo sapiens
aaaaacaagtgtgtgcatctggctgttagaagaattcatgctcatccgggtgtacaagggagaagaagccacattccaaatct

SEQ ID NO: 472326 - DNA, 58 bp, Homo sapiens
ccgcccggggtccggtgggcaaaaggtactgttatggataccaaggtcgatgaattaa

SEQ ID NO: 472327 - DNA, 100 bp, Homo sapiens
ctatgcctactgcaccatccccacctaccccagcggccagatcggcttcatgctgtgcagcaagaacccgcagcagtgttgtactgctacttctataaac

SEQ ID NO: 472328 - DNA, 98 bp, Homo sapiens
tgttccacattgctgcatttgttctgcctgacttggaccctggaaaacctggccctcttcaatttctgacaaaagctgtcacgggaagtctttttagg

SEQ ID NO: 472329 - DNA, 75 bp, Homo sapiens
aaagaatagagaagacacagatgtgatagccttaatgcagcacttattaaacggagtgtcactcttgttgcccag

SEQ ID NO: 472330 - DNA, 75 bp, Homo sapiens
gcccatggtggacgcccagcacttcctgccggccggtgatttcagaaagtatggatatactcttcagaataagag

SEQ ID NO: 472331 - DNA, 74 bp, Homo sapiens
caagtatggcaacatgacagaggaccatgtgatgcacctgctccaggactcagaattcatgattgaagaaatgc

SEQ ID NO: 472332 - DNA, 96 bp, Homo sapiens
aggcatcagatgccagctctgaaaaactcttcaacactgttattgtaaacaaagtgctcggaggattaagagaagatcataaaagatttcagagag

SEQ ID NO: 472333 - DNA, 74 bp, Homo sapiens
cagctactgactctgtttcagccatcttcgataaaggcaaaaagaactgataaatttcaaacggaagagagtgg

SEQ ID NO: 472334 - DNA, 98 bp, Homo sapiens
ctcgaaggcaggacagcggtggcggcaggatcttatggttggtgatgaggcaagtgaattacgatcaatgttagaagttaactaccctatggaaaatg

SEQ ID NO: 472335 - DNA, 98 bp, Homo sapiens
ggcaatgagaacagcacctcggacaaccagattgtaaaccatggctgtgtggatacaagctcagcagctccaaggagaagcccttcatcagatgcaag

SEQ ID NO: 472336 - DNA, 75 bp, Homo sapiens
aaagaagctgcagcggaggaaggcgagattgcctcggtctggcatggtaccctctcgaagctgctgggaagcctg

SEQ ID NO: 472337 - DNA, 51 bp, Homo sapiens
tactttgctgaaaatagaactggtttggcaaatacgtgtagacctacattt

SEQ ID NO: 472338 - DNA, 100 bp, Homo sapiens
gatattccaatttatgcagataaggaaaactcttgaacgtacgacaaagaattataaaacctactgaatctccagattgccaagtgaaacacaatggttg

SEQ ID NO: 472339 - DNA, 120 bp, Homo sapiens
cggcgggcggcaaaggagcagccatgagggccgggcccagtcaccgaccgtagtgggcagcagtcagtgacaggtgtaacctctgtggatgacagcaacagttactggaggatacggggg

SEQ ID NO: 472340 - DNA, 75 bp, Homo sapiens
ttcaccttcgatgttgagaaatcggagattcagactttccacctgcaggtacctggaagaggtgggctacacaga

SEQ ID NO: 472341 - DNA, 83 bp, Homo sapiens
ccaggaaacgcaggcactgcctgctctgaaaagatttcaaataccggtacggatgccactcatgcggagcacatcgagaccat

SEQ ID NO: 472342 - DNA, 107 bp, Homo sapiens
ctggccctggccctgatcatcctgctgggcttcgtccagatcgggaagggtaactaggatttctacctcaaccgcgagacctatgcaaggacggtgtggaccaactc

SEQ ID NO: 472343 - DNA, 74 bp, Homo sapiens
cgaggtagaggcagtggcgcttgagttggtcgggggcagcggcagttgcagaggaaagtggtcgcttatggtca

SEQ ID NO: 472344 - DNA, 100 bp, Homo sapiens
aaaaaactactaggatcacgcggcatgtattgagctcagtctgcatctccaaagagaaaaaaacagcacaagaaatacagaagtgttatttcagacatat

SEQ ID NO: 472345 - DNA, 75 bp, Homo sapiens
ggtcaacgtggtatactcgcagacaacccaaccggtatacaatgcacgaaagcaagagattatcaaagtcactga

SEQ ID NO: 472346 - DNA, 106 bp, Homo sapiens
gagagcttcatcaaaaatagtgatagctttgataagtgtcatggagaaactccagctgggcccagagattctgcagcgggaaaatccaaggcttatttatgccagg

SEQ ID NO: 472347 - DNA, 74 bp, Homo sapiens
atagttgagaatttatcctcaagagtcagctggcagggatctacaagggcttctgtctggatgtgatcaggaat

SEQ ID NO: 472348 - DNA, 75 bp, Homo sapiens
gtcctgaccaccgtgaacggacagtcccccccagctgcatcttcctcccgtgaggctggccgagctccacgctga

SEQ ID NO: 472349 - DNA, 96 bp, Homo sapiens
gctttgacctgactgtccgcacgcagaagcagggggatgacagctctgaatgggggaactccttcttctggtctcggaggaccccatcctagccct

SEQ ID NO: 472350 - DNA, 100 bp, Homo sapiens
cgtgcctgccatgacgtcatagctctgcggaggtggaagttggggagctttgaggcaccgcatgcgtggggagaccaccctgtggaaccctggctgtgac

SEQ ID NO: 472351 - DNA, 50 bp, Homo sapiens
ggagaggagcgtcaacagcagcaccatggctgtttttgcagcagtgttgc

SEQ ID NO: 472352 - DNA, 115 bp, Homo sapiens
ctccggtcccaacttcgcttctctgctgaccctctctcgtcgccgctgccgccgccgcagctgccaaaatggaattgacataggggatagcttaactattccagatgaattcacg

SEQ ID NO: 472353 - DNA, 82 bp, Homo sapiens
tactctctctttctggcctggaggctatccagcgaggccactgtctgcagctcccgtgaagatgtccactccagacccaccc

SEQ ID NO: 472354 - DNA, 119 bp, Homo sapiens
aggaggagccgaagcccaaaaagctgaaggtggaggcgccgcaagcgctgagagccgccgtctagcgccccgacctcgccaccatgagagccctgctggcgcgcctgcttctctgcgtc

SEQ ID NO: 472355 - DNA, 98 bp, Homo sapiens
ccagaatctgcctttttataagacccccaggtgacagcagagctagacgcctggaatgaagacttgcttcggcagatgaatgacttcaacacagagga

SEQ ID NO: 472356 - DNA, 51 bp, Homo sapiens
ctgcacgctgggcaaggccgagggtgctttcttctgcgacctggtactcat

SEQ ID NO: 472357 - DNA, 75 bp, Homo sapiens
atgcttgacagagatgagtttgcagttacattatacaacgtgaaggctgagatctttcccccttcgggaatggag

SEQ ID NO: 472358 - DNA, 100 bp, Homo sapiens
tggatgatgccaaagttttattagattgactttgaagatgtgattgcagaaccagaagggacacacagttttgacggcatttggaaggccagcttcacca

SEQ ID NO: 472359 - DNA, 51 bp, Homo sapiens
ggaagtcattaggaacaatggtgcaaggtcctcagaatggttggaatgacc

SEQ ID NO: 472360 - DNA, 100 bp, Homo sapiens
ccaacatgatcgagtcgtccaacatgctgggatagaatttttgcggcatttgaagagctttttccagattatgtttaaaattgaaaccaagccatgtggt

SEQ ID NO: 472361 - DNA, 100 bp, Homo sapiens
ctttgatgctagcctgtccgggatcggccaggaactgggtgctggtgcctatagcatgaggtatccgaaaggcattcatgttgagactttagaaactgaa

SEQ ID NO: 472362 - DNA, 74 bp, Homo sapiens
gccaagatccaggataaggaaggaccctgatgctcccataagacagaaaatgccccttgatgatctggatagag

SEQ ID NO: 472363 - DNA, 75 bp, Homo sapiens
attttttgcctttgttgattaactggacaaattcagggttctgatgactgtcttgtgaaaatatgggcaacagat

SEQ ID NO: 472364 - DNA, 96 bp, Homo sapiens
cctctcctcccctctggatttctcagaggtttgtcctggttgtggtcaagactggatgatgtaactggctctctaggaagcctcacttggccgtaa

SEQ ID NO: 472365 - DNA, 74 bp, Homo sapiens
gtcatgagctttgtgaacctgggttctgggccggagaaggggcgacgttcgggcaccccccgaatggacaatct

SEQ ID NO: 472366 - DNA, 101 bp, Homo sapiens
gccaagggggagtggtgtggcgtggagttagatgagccacttgggaagaatgatggcgctgttgctggaacaagattctggatgaaattgaagaacataac

SEQ ID NO: 472367 - DNA, 153 bp, Homo sapiens
aggggggaaaggaggagctggagacagattgtaggaccgagcgcgggcaggcgggaggcaacggagctaccagccggagcaccggcagcaccagtgtgtgaggggagcaggcagcggtcctagccagttccttgatcctgccagaccacccag

SEQ ID NO: 472368 - DNA, 75 bp, Homo sapiens
gggatgagctgaatgtcaaatctgaggagcagggctcaagggttcttgttgatgcacgagataagcttggcattc

SEQ ID NO: 472369 - DNA, 90 bp, Homo sapiens
aaggaaagcccctcggtaacccagccgctggcaccatgaacccaggtgaagcggaggctggacctggaaactgaccatcagtacctggcc

SEQ ID NO: 472370 - DNA, 80 bp, Homo sapiens
cccttcaccgcgggcgccaatggggagcagaaggactcggacacagagttgcatgctgagaatttgaaaaatgaagatga

SEQ ID NO: 472371 - DNA, 82 bp, Homo sapiens
caccaccgctgatgagatcctgcagcagtgtgatgggcgaactttctgaccaagtatacaactacccagagggcctaggaga

SEQ ID NO: 472372 - DNA, 97 bp, Homo sapiens
ggatgctggaggacatctgggggccacaaatgctccttctcctggagacgcaactcaaggttgggcccatgagatgtgtgctctgtatattccggag

SEQ ID NO: 472373 - DNA, 90 bp, Homo sapiens
gagaatatttaatggaaaatcgcttggttaaaacctgacacttttaacagagcttggggcttccttggtcgcacccaccacctgcctgcc

SEQ ID NO: 472374 - DNA, 96 bp, Homo sapiens
acagaagagcttctcctcatcaactggggatgattacagttcttcctaaaaaagccaccaattaccctagttatgggcccatcatctcacctggac

SEQ ID NO: 472375 - DNA, 100 bp, Homo sapiens
gtgacagaaccgtggacagcaacatttcccacaggacacgaagtttgtcggcccttgccttggcagagctgaggtctcctctgagcctccggcctccata

SEQ ID NO: 472376 - DNA, 75 bp, Homo sapiens
tcctagacatgcgtggcgtcggggctgtggcacggtcgggtccggggcagaggtggaggagacactgaagcgact

SEQ ID NO: 472377 - DNA, 82 bp, Homo sapiens
cagaaaagcaagagtttctgtttagatgaccagtctcctggaaaatttctaccttgaaccgtatctgaaagaggttattcgg

SEQ ID NO: 472378 - DNA, 82 bp, Homo sapiens
aaggtcgccctcaaggccatgatcaaaacgacttgaactgccatgtcctctgaagaaggaaagctcttcgtgggagggctca

SEQ ID NO: 472379 - DNA, 100 bp, Homo sapiens
acgaggaaacctttgagctgcggaccccgagtccagcgggcggcgggaggtgggcgagggcctggcctgccaccagctgtgcgcccgagggcactgctgg

SEQ ID NO: 472380 - DNA, 100 bp, Homo sapiens
tccgtgtgcagtacctccgccagatccacgccaaccacgaggccagaaatcagcgaggagctcaaggacctgatcctgaagatgttagacaagaatcccg

SEQ ID NO: 472381 - DNA, 90 bp, Homo sapiens
tgttcttatgacctttccacaacttggaccagttcagcctattccttgttgtggagccgccaccaaaatgcagattttcgtgaaaaccct

SEQ ID NO: 472382 - DNA, 75 bp, Homo sapiens
tcgagaccagcctgagcagcatgcgatgactacctgtccctggagggttcccgctggccaccagccatcaggcag

SEQ ID NO: 472383 - DNA, 74 bp, Homo sapiens
actgatgggctcacatatacgaatgaatgccagctctgcttggcccggatacgaggagaagaccttttcatgtg

SEQ ID NO: 472384 - DNA, 98 bp, Homo sapiens
gcagtgtcgtggcctggagctcattgcctcagaggcacagcgtcaccttcgtcccctccggagctgcacgtggcctgagcaggatggtgccctccagc

SEQ ID NO: 472385 - DNA, 100 bp, Homo sapiens
tgcctcctaaacgtgtaccatttccacttgatgtcatcacgcagaaggggtgaaagagactcggtgacagatacagcggagctggagttcgcccaaatca

SEQ ID NO: 472386 - DNA, 100 bp, Homo sapiens
gcccagaaactacaggctgaaaagcatgacgtaccaaacaggcacgagataaggaggaagacagcgaacccctcccaccacaggatgcccagacctctgg

SEQ ID NO: 472387 - DNA, 83 bp, Homo sapiens
cggtgggtgagcggcggccacggcatcctgtgctgtgggggctacgaggaaaggtcgtggagtcagatttgagtgatgatggc

SEQ ID NO: 472388 - DNA, 100 bp, Homo sapiens
gcagttgaaggagtataacacagttgcagagcttgaagtgaaaaccagagaaaaattagaagctgctaagaaaaaaacaagctttgagattgcagagctt

SEQ ID NO: 472389 - DNA, 83 bp, Homo sapiens
gcggccggcggtgtagacgccccttcgccgggacctggcacccgaatccggcctgccggagcctggcagagagcaggtgtgtg

SEQ ID NO: 472390 - DNA, 100 bp, Homo sapiens
aaacaagaaagccagcttcgtaatgaggttgcaattctacaggtcaaaatgcagatcttcgtgaaaacccttaccggcaagaccatcacccttgaggtgg

SEQ ID NO: 472391 - DNA, 100 bp, Homo sapiens
tcttctgtcctgaatacagtatctccttaagattgcatccttcttcagcaacaatttggactacttcattgcttcactgagctatggacctaaggcagcg

SEQ ID NO: 472392 - DNA, 75 bp, Homo sapiens
atggctttcagcaacttggcagagagaatcaaggcaagaggaggaacgacgtagaagagaggaagagatgatgat

SEQ ID NO: 472393 - DNA, 75 bp, Homo sapiens
tcggcagcaagaacagagagagaggtggacagatctgagagatactgaggtcagagtggtgctgggaacaactgg

SEQ ID NO: 472394 - DNA, 76 bp, Homo sapiens
ctcgctcagggcggctgccccgggacccgcagatcttagcaaagcaatgtctcaagatggtgcttctcagttccaa

SEQ ID NO: 472395 - DNA, 100 bp, Homo sapiens
aatctcaaccccggcaacaacctccttcaccagccgccagcctggacagacagctactccacgtgcaatgggcggcgactggcggcgcgatggacctgac

SEQ ID NO: 472396 - DNA, 100 bp, Homo sapiens
ccagcaccatggaggacgtgaagctggagttcccttcccttccacagtgcaaggaagacgccgagtctgacagcaatgcaagcttcctccgtgctgccag

SEQ ID NO: 472397 - DNA, 100 bp, Homo sapiens
gagacatttctggctctgaaggcgaacgcttcgctggccatttaggagctctgctcaaagccagacgaaatgcccggcgaagccacagaaaccgtccctg

SEQ ID NO: 472398 - DNA, 74 bp, Homo sapiens
gcggaaggccctcaacatcccggagcagctgccacaatgggacatgtgcaacattaacaacagtgtcttcagtg

SEQ ID NO: 472399 - DNA, 100 bp, Homo sapiens
atgctaagaaagaatcttgtcactttagccactgctactacaggtggacttaggtgaaggcaagatttgcttctgttgtgaagaatttcaaccagccaag

SEQ ID NO: 472400 - DNA, 97 bp, Homo sapiens
cccttggcgatgtactcatagaagaccaatttccgagtccagattgagaggatccagaatccagatctctggaatagctaccaggcaaagaaaaaaa

SEQ ID NO: 472401 - DNA, 100 bp, Homo sapiens
ctttacatccgagtccaaagttgtgtttactgagaagaccacagaagtcacctgcaccggtgcccgtgacgtacgagctgcccacactgtataggacgga

SEQ ID NO: 472402 - DNA, 75 bp, Homo sapiens
gaattgatgaattgcaagtttgtgccccatagctgcacagagttggcgtggacctggatgaaaatctgaaggagg

SEQ ID NO: 472403 - DNA, 100 bp, Homo sapiens
cttcctggcgctttcctgggttgcttctggcggccatggtgttgctgctgtactccttctccggtcccaatgccatttcggtgagcctgtccccaatggg

SEQ ID NO: 472404 - DNA, 75 bp, Homo sapiens
ttgcggagtccccgccgaagaacccgaggctacagcatgctggccatagggattggaaccctgatctacgggcac

SEQ ID NO: 472405 - DNA, 82 bp, Homo sapiens
aagatgaccgacgacgacctgtttgtggacttggggagcggttttggctacgggcctccacctccaccgccagatcagtttg

SEQ ID NO: 472406 - DNA, 99 bp, Homo sapiens
gtcttctatcgctcccatcgtcatctttgcatccaaccgaggcaactgtgtcatcagtagccggatcgagctgggagatgtgacaccacacaatattaa

SEQ ID NO: 472407 - DNA, 90 bp, Homo sapiens
cacccagacgactcagtatctgagagcagacacgcccaacaatgcaactcctatcaccaccaaatgatttctcagtatcactaaaagcac

SEQ ID NO: 472408 - DNA, 58 bp, Homo sapiens
cacgcatccatccagatgaacgtggccgagacctctgctccttttaaggaaagaccaa

SEQ ID NO: 472409 - DNA, 98 bp, Homo sapiens
aagagtgaaaattcctcggaggacggtgacataacggataaggttgttaaaaaagcagacatgatcaacaaaaatatgactcatcaggtccaagctga

SEQ ID NO: 472410 - DNA, 87 bp, Homo sapiens
ggacagaggcaccaaggacctccaagacaggtccctgtgcgttttattgcgacctgccggtgggaactttgtctccgagtcggagca

SEQ ID NO: 472411 - DNA, 90 bp, Homo sapiens
cccaggacccgcctggctgcgagatatctctttcgacgtgtagcagcagctttgccgggaatggaaagcacacaggacagaagcagagaa

SEQ ID NO: 472412 - DNA, 82 bp, Homo sapiens
ttcaatatagacctcgttacataacaggagaaggatttgatgccctggatccctttattcccatcctggtttccaactataa

SEQ ID NO: 472413 - DNA, 58 bp, Homo sapiens
cccgaggacaccgactaccagcagattgaaggattctcattaagcaaactagggaatt

SEQ ID NO: 472414 - DNA, 51 bp, Homo sapiens
acatggagattctcttaaaaaggtatatgccattccgccctctgcttgccg

SEQ ID NO: 472415 - DNA, 73 bp, Homo sapiens
cgcgagctcctggaggcggcgggatggaggcggcggccgtcaccacgttctgcgcttttccgagtcggacata

SEQ ID NO: 472416 - DNA, 100 bp, Homo sapiens
atctatccgggacaaggaaggttacaatagcatacattatgctgccgcctatgggcacaggcagtgtctggaattgagtatttgatttctgacactggag

SEQ ID NO: 472417 - DNA, 51 bp, Homo sapiens
tgagtgatcactctcaatcccggattccagatgagatgatccagtgcgtag

SEQ ID NO: 472418 - DNA, 97 bp, Homo sapiens
ggacttcgtggacgacgtgagcgaggaaggaaagattctgaagcttggcggagaggggtgtgtgagtggacaccagtgaagtaacggtttttgtgtt

SEQ ID NO: 472419 - DNA, 98 bp, Homo sapiens
caggactcagttctgaccaaggagctgagatgtgatggctggagactcaacaccattctggacggcaacatgagtgagaatgaggaagaggaaatttc

SEQ ID NO: 472420 - DNA, 75 bp, Homo sapiens
gagaaggaggagtggattaagtgcattaagaagcgaaatgtggtgattttaaagctgttatagtggaagtatcag

SEQ ID NO: 472421 - DNA, 100 bp, Homo sapiens
cgagagcgagtgcctgagcaacatccgcgagttcctgcgcggctgcggggcttccctgcggctggagaacaactctgctcatggtgattacatgcaaaat

SEQ ID NO: 472422 - DNA, 87 bp, Homo sapiens
ccgagcgaaagacaaggttgtccaagaatctactgcgcatgaagtccaacgtggagcacctgacggagaaaatgaagaccaccatcc

SEQ ID NO: 472423 - DNA, 151 bp, Homo sapiens
gagcaggggaaggaactttgggtcctgaatcttctgggagctgaggaaccagatatcttgaaaagctgccagaaaggtgttcagtggaatcacacttacaaaatttggagggattgtggtgttggcttttgccaaatctcaaattttccag

SEQ ID NO: 472424 - DNA, 100 bp, Homo sapiens
cagctcagcctggacctgtaccaaggcaccgggtccctcgcccaggtccccttggacaaatggtgatcctggtggagggattgaaatgtctgagttcatc

SEQ ID NO: 472425 - DNA, 100 bp, Homo sapiens
gttccactgaaatcacaatggaaagtcttgacttgactggttctttatagagttggaagcaagacatcagaataatatcttcatagatgacataagtgac

SEQ ID NO: 472426 - DNA, 82 bp, Homo sapiens
tggtggcgttgctgctgctgctctcaggagttttgagagcaaaatgacaacacccagaaattcagtaaatgggactttcccg

SEQ ID NO: 472427 - DNA, 97 bp, Homo sapiens
ttgccctgtatgaacagcccccatcttcccatgcttgtcaaaaatcagaggcaactaacactgcggcttcctgaggccaacatagccgaggtagagg

SEQ ID NO: 472428 - DNA, 83 bp, Homo sapiens
gacacttctagactgattaaaaatcttggtggcagaagctcctcctggggtagagacagatcttattgatgttggattcacag

SEQ ID NO: 472429 - DNA, 98 bp, Homo sapiens
tgctcggccgatgaagtgcagaggtttttttctggaattgaatgatctggcacgggaccctccagcacagtgttcagcaggtcctgttggagatgata

SEQ ID NO: 472430 - DNA, 83 bp, Homo sapiens
cagccctccccgcctctgcgtctttgctcccggagcgcttgaaggagctgcggatctcccttgagtttagaaatctggctgag

SEQ ID NO: 472431 - DNA, 92 bp, Homo sapiens
ggaaattcagcctcaaaaccgtcctgctgcttgctgaccaaatggtcagaagttgagtagcaggggcctaggagggctcgaagccttcacag

SEQ ID NO: 472432 - DNA, 74 bp, Homo sapiens
atccgggtcttttgcgttctctttccctctcccaacatggcggcctcagagcgccgccctgtgctgggctgccg

SEQ ID NO: 472433 - DNA, 80 bp, Homo sapiens
ctctctttctggcctggaggctatccagctgcctatgattacacaataccacctatggagaaagctgttgtgaaaacgga

SEQ ID NO: 472434 - DNA, 100 bp, Homo sapiens
ggaactgcgcagcctcttcgagcgccgcggacgcgtcatcgagtgtgacgtggtgaaaggtgaagtggaggttctggatccgaacgaccctttaggaccc

SEQ ID NO: 472435 - DNA, 75 bp, Homo sapiens
gaaagacccaggagaagccgcccaaagaactggtgggtttgctgagttctctcgttgtttccctggcctctgtga

SEQ ID NO: 472436 - DNA, 75 bp, Homo sapiens
ctcccatgtccctgcttttcttgggatgaatttcacccattcatcgaggcacttcttccacatgtccgtgcaatt

SEQ ID NO: 472437 - DNA, 75 bp, Homo sapiens
ccggaaaacacacgttcctccgaaaccggtttgcaagtccttgtagaggtcatgatgatgggcagcgcccgagtg

SEQ ID NO: 472438 - DNA, 100 bp, Homo sapiens
tgcacaaggtcttccagtttctgaacctaggtatttacttatgggatgtagaaggcagaaaatattttgacttcctgagttcttacagtgctgtcaacca

SEQ ID NO: 472439 - DNA, 50 bp, Homo sapiens
cgagaccgcggccgggaccgaggcagaatggggaaatggagagagaacct

SEQ ID NO: 472440 - DNA, 100 bp, Homo sapiens
gaggtcttcgggaattccagcgaggagaggatttcgtttccgttatgtatgtgaaggcccatcccatggtggactacctggtgcctctagtgaaaagaac

SEQ ID NO: 472441 - DNA, 100 bp, Homo sapiens
ggaaaggctgcggccccgcgccagagggccggtggctcctccgggcttctgaggacccgcagggagcggtttggatttaggtggcgagtagaaaaagaag

SEQ ID NO: 472442 - DNA, 101 bp, Homo sapiens
tgatgagcctcggaaagtgctcctgcggctgtatggagcgattttgcagatggacatccaggcctgctcggccgcctggaaggctgacggcgtgtgctcca

SEQ ID NO: 472443 - DNA, 99 bp, Homo sapiens
atgcggtcattctctttgtccttgtgccagtcgcacaggattacaaggcagaggaagacccagcaaaatttaaatctatcaaaacaggccgaggaccct

SEQ ID NO: 472444 - DNA, 100 bp, Homo sapiens
cccgcagttctccatcgtggagcaccgtctggtctcgaggaatgttgtcttcgccacagtcaggatctggtgattttgaagagaaaccacaacaacaaag

SEQ ID NO: 472445 - DNA, 83 bp, Homo sapiens
agtcttgaagattcatgaaaaaaatggctgcaagcaactgacctcactagagaagtgtaccagcatttagcccactatgtacc

SEQ ID NO: 472446 - DNA, 89 bp, Homo sapiens
gaagggtattgccgctgttactgatatacctttagggaagagtgtatcacagccattgggaactttcttcacccatcaaagcctcaggg

SEQ ID NO: 472447 - DNA, 100 bp, Homo sapiens
ccgcgggaagcggcaggagccgccgccgacacctgaagctaaaccaggtggacaggtgaaatgtcagtatatctctgctgtggataaagttatatttgtg

SEQ ID NO: 472448 - DNA, 98 bp, Homo sapiens
gctcccgtggccgcgtgctgggaggagactggagcccggttaggaagaatggagttggcgactcgctaccaggtgctggagaatctggtaaaagcacc

SEQ ID NO: 472449 - DNA, 100 bp, Homo sapiens
aggagccgctggggctgccgccacggccgcccggaggtatgtgaagacctacctgttgcccgacagatcctcccagggaaagcgcaagactggagtccaa

SEQ ID NO: 472450 - DNA, 75 bp, Homo sapiens
cggcggcgcgcggcggccgaggccaggacctgaaggagaagaaggagaaggtggaggagaaggcaagccggaaag

SEQ ID NO: 472451 - DNA, 104 bp, Homo sapiens
cagcggccgagcgggcggcttcctggcctgggcgctccggtggcggcggagcgggctgacgcacgaggcacacaggaaggaggtggagcaggtgtatctgcgct

SEQ ID NO: 472452 - DNA, 98 bp, Homo sapiens
ggcccagcgcttcctgcagaaggccgagaagctctacccactgccctcggcccgcgctgcagtattgaagtatgagaacaatgttatgaatatcaggc

SEQ ID NO: 472453 - DNA, 50 bp, Homo sapiens
gtcagctcaaaccactagttatacagatcgtcagtatttaaacagatcac

SEQ ID NO: 472454 - DNA, 90 bp, Homo sapiens
cagggcatgaaggtccaggcgctggccagcgggagatacagatgacccaccaagaattactcagaaccctgtgatcaatgggaatgtggc

SEQ ID NO: 472455 - DNA, 100 bp, Homo sapiens
cccacactcagccactgcgggcgaggagggcacaaggccaggttcccaagagctcagttaagtgggcagaccaacatccacctcagcaaaaacttcttcc

SEQ ID NO: 472456 - DNA, 95 bp, Homo sapiens
tccggggcctctgtgagcaaaacttggttgagttgttacaacaaaagttgagagaaaagttggatgaatttaatgaattggctatacagaaagag

SEQ ID NO: 472457 - DNA, 84 bp, Homo sapiens
ctggccagtgggccaccgacctctacagtggctatctggcctttgtttggtcctaggcctacttacaagcctccagtctcaaat

SEQ ID NO: 472458 - DNA, 98 bp, Homo sapiens
ctgccgagaagccagtcacgccgggagctggtacacagcctcagaaaaccgcctgattcccactgagttacgccgagaggctctggccttacaggggt

SEQ ID NO: 472459 - DNA, 100 bp, Homo sapiens
cagcaggatggtggtggatgcggccaactccaatgggcctttccagcccgtggtccttctccatattcgaggtgaagcaactcgtgcccatccgcgatca

SEQ ID NO: 472460 - DNA, 82 bp, Homo sapiens
tttcaggagactagacctcgtaattacattctctcggccagcgcctccgcgcccaccttgggacaccttgactccaagccca

SEQ ID NO: 472461 - DNA, 98 bp, Homo sapiens
tttctcctagctgtgaactgtgtcctaatcaggatggaattttcaaggagacagatgctggaagttgtggaagctgatcgaggaagcctaagcaggct

SEQ ID NO: 472462 - DNA, 75 bp, Homo sapiens
tgttaaagacaaactttgcagtaagcgaacaggtctgcggtgacagctcttcttcagagagaaggacaacaaggt

SEQ ID NO: 472463 - DNA, 50 bp, Homo sapiens
aaaagcagtaaagccagaggaaggtacatgtactggacagactggggtga

SEQ ID NO: 472464 - DNA, 100 bp, Homo sapiens
ggctttggagcggctaaaaacctgatgataatgaagataattcaaatgatgggacccagccatccaaaaggaggcgaatgggctcaggagatagttctag

SEQ ID NO: 472465 - DNA, 100 bp, Homo sapiens
agaaggcatgggatcctgaaactaaaagatgtcacaaaggaaaacgaggaaagtcccaggatgactactgtgtcaaaggaagccagatcgctgagggtcc

SEQ ID NO: 472466 - DNA, 100 bp, Homo sapiens
tcactgcggtcctaaccccgccgcagctcctcggacgcagccacataaagaagatccctaatagtcatttctcaacaattatatagtcaactgatgtaac

SEQ ID NO: 472467 - DNA, 98 bp, Homo sapiens
cgccgtccccggcccccgcccgccgcgcgccgcccacgccccgggaccggaccctcgcgccgcccgcggaatgcatcctgtcgggcatcatgtctgtg

SEQ ID NO: 472468 - DNA, 100 bp, Homo sapiens
gagaggtggcacctggaagcttctgggctcagccatctgtgcccacagcaaagtaacgatgggggtccatcctcttcaagtaagactacaaacaagtttg

SEQ ID NO: 472469 - DNA, 83 bp, Homo sapiens
cacagaccttactccccttagaacagcaatcatcctcttccagtggtagcgtgtttgggtctggaaacactggaagaggggga

SEQ ID NO: 472470 - DNA, 75 bp, Homo sapiens
ctccagcgggtccccggcaaactccttccacttcaaggacaggaagatgtcacccaagcgcatagctaaaagaag

SEQ ID NO: 472471 - DNA, 100 bp, Homo sapiens
cccaactgttctagtgttgtggaggttgattctcaggatgatggagtgagtgatggaataggttgccaactgtagttactccactcagcacagaatggct

SEQ ID NO: 472472 - DNA, 102 bp, Homo sapiens
gtgggatcgatgtttcaatattggaagcgatttgatctacggcgactccagcccggccgcaccacctgggtctccgccatgaacgggcctgccctgcagccc

SEQ ID NO: 472473 - DNA, 83 bp, Homo sapiens
cgaggcaccgaggcactcagaggagatgtgatgactgaagcccaccacaaatatgaccactctgaggctacaggatcctcaag

SEQ ID NO: 472474 - DNA, 82 bp, Homo sapiens
tcatcctggcctacgtcatcggatctgaagaagacacttgaatcatgggtgacgttaaaaattttctgtatgcctggtgtgg

SEQ ID NO: 472475 - DNA, 100 bp, Homo sapiens
gtccctgatcaagctgaacttttccaagaacagtgagggatgattcaaagccgccttactcctacgcgcagctgatagttcaggcgattacgatggctcc

SEQ ID NO: 472476 - DNA, 75 bp, Homo sapiens
tttcatggttccatcagccgccttcatcaaatcaaacagtgtatcctactcagtacatgtatctgaagattaccc

SEQ ID NO: 472477 - DNA, 101 bp, Homo sapiens
aaaggagcccatcgtgcgggtcttgcaaagggatgatcatggtgattttactgctgcttgtggctatcgtggttgttgcagtctggccgaccaactgatgg

SEQ ID NO: 472478 - DNA, 113 bp, Homo sapiens
tcgccccaaggggattgcctggcaggacgtgaaggggaagaggcccaccctggagtaaccctcactggagaatccagagaacctagaagtcggaatccggaagaagatcgaac

SEQ ID NO: 472479 - DNA, 100 bp, Homo sapiens
ccgccgccgcgcacctgccttcgctcccgcaccgcactattcctgatcagagaactccagttgcttcaacacacagtatcagtagtgcagccaccccaga

SEQ ID NO: 472480 - DNA, 101 bp, Homo sapiens
agtacggtagtcaaacccccaggatttggtgctatggagaaatttttggtagaatataagagtgcagtggagaagaaactggcagagtacaaatgtaacac

SEQ ID NO: 472481 - DNA, 88 bp, Homo sapiens
gagaagctaagaagtctttcaatgatgatgctatgctgatcgagaagtttgtagacacaccgagcctcctgacaaggtgatccgggcg

SEQ ID NO: 472482 - DNA, 100 bp, Homo sapiens
gacggattcatttagagctgcggaacaggacgccctctgatataaaccgagaaaactggtgtacaatagagccatgccctgatgcagcatctcttctggc

SEQ ID NO: 472483 - DNA, 90 bp, Homo sapiens
tgagagtgttcttcaggcaattattgaaagaatccccccagttcttggacaggtttcctgtgaacttgtgtctccaaaactcaatcgggc

SEQ ID NO: 472484 - DNA, 100 bp, Homo sapiens
ctctcccgaagccgcgggtctccggccggcggcggcggcggcggcggcggcggcgcagattctgaagaatatttctgtgtaaaaagaattttctcagggg

SEQ ID NO: 472485 - DNA, 83 bp, Homo sapiens
aaaccaaggatctggggatcttcgcactatcccaagcatcaagatggtgctcatgtggaccagtggtgacgccttcaagacgg

SEQ ID NO: 472486 - DNA, 75 bp, Homo sapiens
tgccggagccgctgtgtgcaaagttcctattgatggtccccccatagtacagcaatcatttgaaactccaagggc

SEQ ID NO: 472487 - DNA, 48 bp, Homo sapiens
gaacattgaaatgcacaagcaggtgaaaggtgtagcagtcactcggcc

SEQ ID NO: 472488 - DNA, 90 bp, Homo sapiens
ggccagtcatttcttgctgctgtgctccttctccatgaaaatcagtggaatgagcttcttgaaactctgcacaaacttcccatccctgac

SEQ ID NO: 472489 - DNA, 100 bp, Homo sapiens
cgggggtcttcctcctccgccgttgacaggacccagatgatgtggtaccagttggccaaagaagagcctggtgttggtgcatgtgctttggactagcatt

SEQ ID NO: 472490 - DNA, 100 bp, Homo sapiens
gaagcctgcatttttttgtggagtggtttgaatatcgtaagcgcacgtttaaacatctcaagcggctatgtgactacgtttgtgacctcctcttagaaga

SEQ ID NO: 472491 - DNA, 75 bp, Homo sapiens
gctcacaacatgcacagcctggcgacggctgcggtctagatgttgatggaatatatcgagttagtggcaatctgg

SEQ ID NO: 472492 - DNA, 100 bp, Homo sapiens
ctgaaacctacctgcagccccaaatcacgccgaatcctgtaactcagcacgttcaggtggaaaaggattattcatacctgaaggagatatgtgatcacca

SEQ ID NO: 472493 - DNA, 80 bp, Homo sapiens
agctcggcccgcgggggagccccgggagccgcacggcttcaggtgagaccacaggagttgacatcactaaaattcaagtc

SEQ ID NO: 472494 - DNA, 83 bp, Homo sapiens
cctgaagacaaaaatccagaagtacaagcagtctgcggacaaggcaaaatctcagcaagttcggacctctagtacaataaggc

SEQ ID NO: 472495 - DNA, 83 bp, Homo sapiens
ggaattcctcatttgcaagagagacagttactggaacatagagattttataggaatccacattcatctcaatggaaggatcct

SEQ ID NO: 472496 - DNA, 82 bp, Homo sapiens
tcaggctcttgctagatcagcaccggaggtggaagactgccccatgttatagtacattgtgcagcagagagaagaccagatg

SEQ ID NO: 472497 - DNA, 100 bp, Homo sapiens
accccgtctgtggcaaagagccccgaagctaagagcccccttcagtcgcagcctcactctagttaattatcttcacccccaaatccctgttgcgccaccc

SEQ ID NO: 472498 - DNA, 80 bp, Homo sapiens
ccgacgtgggcggtgggccccagccccacagaccagcccagcattcagaccctacagcttggggcctgggctcctctgac

SEQ ID NO: 472499 - DNA, 82 bp, Homo sapiens
agacccagctacgtggactagagtttcctagaggaagttctggcttctggactgcacagccgaagcaaggagagctctcaag

SEQ ID NO: 472500 - DNA, 75 bp, Homo sapiens
ggaaacaccatggctgcggcggcccagctctctctgacacagtgtatttatggaaaacctggagggcccctcttc

SEQ ID NO: 472501 - DNA, 74 bp, Homo sapiens
gcgcggagcccggctcccgcaccatggaggaggacgacagctacgttttctggatatgccgcagaaggatccgt

SEQ ID NO: 472502 - DNA, 80 bp, Homo sapiens
acagacccagggcatttggtggacacttttgcttgcagttaggtcaagtggagagcaagtgcaccggcacctggaccaac

SEQ ID NO: 472503 - DNA, 90 bp, Homo sapiens
ggaactagaaactttctgtcagtgtaacatctgcacctcctgccccccgaggtctgcagtctcctgaacccagcagccatctacgccaac

SEQ ID NO: 472504 - DNA, 50 bp, Homo sapiens
cggggtgtcagtgtggaggagactgaggatgagcacaagcctgggagatg

SEQ ID NO: 472505 - DNA, 100 bp, Homo sapiens
agacttgcaacactaaacgagaaattgacagcccttgaacggagaatagagtacattgaagctcgggtggatgaagactacatccaggacaaatttaatc

SEQ ID NO: 472506 - DNA, 98 bp, Homo sapiens
ctggtgcaggaggctcactccgatttaaggtgcccgagtccacgctgatggactgccgtagacgtgtagatttggaaaatggtacttgcagtcatcca

SEQ ID NO: 472507 - DNA, 75 bp, Homo sapiens
ggcagagcgtgtctgaggtggtgcgcggctccgtgctcctgatattctctaagccgctttcatcatgggagaaat

SEQ ID NO: 472508 - DNA, 51 bp, Homo sapiens
tgaagtgcagaggtttttttctgtttgtatgccagaagaagggtttaaagg

SEQ ID NO: 472509 - DNA, 100 bp, Homo sapiens
gcgttccggaggcccggccacctctgagaagggagacgacgctgctgggtccgctgagcggggcgacccgagcttcgatgtttttgaagcaggcatttga

SEQ ID NO: 472510 - DNA, 75 bp, Homo sapiens
gccgggttggtggctcctgcacatttttacagttctccagtccttctctttcgaagttggtgagatggcaaagca

SEQ ID NO: 472511 - DNA, 83 bp, Homo sapiens
ctgacaaccttggaacagaacaagaggacaggaggtgtcgttccagttggaaaatggatataccttatttgattatgatgttg

SEQ ID NO: 472512 - DNA, 100 bp, Homo sapiens
tggtggaaggctgtttccctgcggggagagaccattctaacacaggtaccgtccagacagtgcctctgagaaagggaacctaaaggcgtgtttccgacgc

SEQ ID NO: 472513 - DNA, 75 bp, Homo sapiens
ctcatcacacaggatccgcccctggacatggaggagaaggtccgcttcaaggagaccctcacgcagggcttagag

SEQ ID NO: 472514 - DNA, 49 bp, Homo sapiens
cggggctccagtggagagttcttacgcttcacttaaaggacaagaagcg

SEQ ID NO: 472515 - DNA, 76 bp, Homo sapiens
ggaatatgccattgaggctatcaaggacctagatgtgaaggctggtggaggctgtgtaatgaccattggagaaatg

SEQ ID NO: 472516 - DNA, 74 bp, Homo sapiens
ttcgggaggaggccttgtccacaggacatctgtgttaaggcttatctagcccttcgtcatcacacaaacctact

SEQ ID NO: 472517 - DNA, 98 bp, Homo sapiens
cagcttccttctgaaaaggcgatcttcctgtttgtggataagacagtcccacagtccagccatggtctgaaaaagttcttttcttgtcgtggaattgc

SEQ ID NO: 472518 - DNA, 98 bp, Homo sapiens
ccggctcctgtgacttcaagtgtcgctctagaggacaaaatcccagtccttggcacaaactcaggaaatggaagccggagtctgttttttgtggggct

SEQ ID NO: 472519 - DNA, 98 bp, Homo sapiens
tttcctttccctcagcacacagaggatgatgctgactttgatgaaggagtatgctgctgctgttccgctttgcgtcctcgctacaaacgcctggtgga

SEQ ID NO: 472520 - DNA, 51 bp, Homo sapiens
cactggacccagctgtgaaacggctgctgcagaagaatattttgcctgctg

SEQ ID NO: 472521 - DNA, 101 bp, Homo sapiens
gcgcgtcctgctgaccccagccggcgccgagggcttggaatctcgagcgggaaaaggtggttcaatactggctgctgactactctcagcttgaactgagga

SEQ ID NO: 472522 - DNA, 50 bp, Homo sapiens
gcactgagctgtctgtgcgcggacctctgcggcccttcttcagtcctggt

SEQ ID NO: 472523 - DNA, 74 bp, Homo sapiens
gctgctgaacacctgagtgcccgggcaggcttcactgatgggcaacactccagattcagcctcagacaacctcg

SEQ ID NO: 472524 - DNA, 100 bp, Homo sapiens
gtcacaggtccagggcagaggaccaacatgggcattttgtttatgagcaaggtggtgctgatgcagtgcaacattgagtcggtggaggagggagtcaaac

SEQ ID NO: 472525 - DNA, 100 bp, Homo sapiens
gagagtccaagttaaagaacatggcgacgtctaatctgttaaagatgaggataggaattcactcaggctccgtgctggctggagttgttggggtgcgaat

SEQ ID NO: 472526 - DNA, 73 bp, Homo sapiens
ctggaaatgttatgcagctcagcaaggtgaaggtatctgaataaccaggtgtttgtgtctctggccaatggag

SEQ ID NO: 472527 - DNA, 100 bp, Homo sapiens
ttcctatccaaatacttttgaatggcaatgtaaacttccagccatcaagcccaagactgaatttcaattgggacatggatttgattgacatactttggag

SEQ ID NO: 472528 - DNA, 100 bp, Homo sapiens
gttcttggctcccttgtatatttttctcaggaggcgtcacggtggggaacataggacgacagttagctatgattgctctgggaacagttactaatgtgga

SEQ ID NO: 472529 - DNA, 82 bp, Homo sapiens
cggcgatcggccgcggccgctctctgaagaacctccgagtacgaggtttggtgcacctcgatttggaggaagtagggcaggg

SEQ ID NO: 472530 - DNA, 82 bp, Homo sapiens
gcggggaggctgaagggacgctcgggtaggcaagacctcctgccccccgaggtctgcagtctcctgaacccagcagccatct

SEQ ID NO: 472531 - DNA, 74 bp, Homo sapiens
taccaacttcgccaccctgcggtggattgactacggcaaagtggccactcaggacctattcaaactcagtctgt

SEQ ID NO: 472532 - DNA, 100 bp, Homo sapiens
cccacgactgcctgggacctggccaagggctccacacaccaagaccaaggtgctggagaatctggtaaaagcaccattgtgaagcagatgaggatcctgc

SEQ ID NO: 472533 - DNA, 96 bp, Homo sapiens
caatacataaagaacagcgtaactccagacatgctaggtcttgactccactaacggggacttctcatacggctttgaacttggaccttggtgcata

SEQ ID NO: 472534 - DNA, 83 bp, Homo sapiens
ctgagccctacaacacccccagcggccgccggctcccccacgagaaaaatggctacaaacttcctagcacatgagaagatctg

SEQ ID NO: 472535 - DNA, 99 bp, Homo sapiens
tgctgaactggtgcagagggacgtggatgcctctccctcgcctctgtcagggaccactgacaattagggatgtgactgtagaattctctctggaggagt

SEQ ID NO: 472536 - DNA, 75 bp, Homo sapiens
ctgaaggccaggttttgcagtggtctgagaagaaacatggcggctatccttctctcacatcgaaaaggaaatttt

SEQ ID NO: 472537 - DNA, 100 bp, Homo sapiens
ctgctctggaacaactggtgctgatggctcccttggcgaaggagtctgtttttcaacccaggaaggagttccatctggaatatgacaaattagaagaacg

SEQ ID NO: 472538 - DNA, 101 bp, Homo sapiens
gggacagcatatcagagctttgaacagtggccaatccgccatggtatagttgaagattgggacttaatggaaaggtttatggagcaagtgatctttaaata

SEQ ID NO: 472539 - DNA, 100 bp, Homo sapiens
acagctcttaccacatgatacaagagccggctggtggaagagtggggaccagaaagttttactcccaaaaaagaagaggaggagagccaaccagcaaaga

SEQ ID NO: 472540 - DNA, 82 bp, Homo sapiens
cgccctctcccacagcggagtccaaaacaggcctaccagaactgtggctgcaccatctgtcttcatcttcccgccatctgat

SEQ ID NO: 472541 - DNA, 50 bp, Homo sapiens
ggaaactagtgtctgacatcaacagggaagagagaagggcacagttacct

SEQ ID NO: 472542 - DNA, 100 bp, Homo sapiens
atgccgcagtaccagacctgggaggagttcagccgcgctgccgagaagctttacctcgctgaccctatgaaggtttctagaccaactggggagattcccg

SEQ ID NO: 472543 - DNA, 78 bp, Homo sapiens
ctagcacccagaagatgagaccgcaattcgagaatcaaagggccgggagcgatgcgctcctggttgcagccagaatgc

SEQ ID NO: 472544 - DNA, 98 bp, Homo sapiens
gcgcctcgcggcatggcgtcggaggggccgcgggagcccgaaagcgagtttttgaaatcatgaatcctgtttatagtcctggatcttctggggttccc

SEQ ID NO: 472545 - DNA, 97 bp, Homo sapiens
gtcagatggattgactatggaaaagttgccaaattgatttctcacattggcaaactgagagattttcttctggaacacaggaaagattatattaatg

SEQ ID NO: 472546 - DNA, 82 bp, Homo sapiens
gaacgtcgacattctctggcaagctgctgagacaatgcagatcttcgtgaagactctgactggtaagaccatcaccctcgag

SEQ ID NO: 472547 - DNA, 100 bp, Homo sapiens
ccactgtatctaaagggtggggtagctgatgccctcctgtatagagccaccatgattcttacagttggtgatggagtttcgctcttgtcgcccaggctgg

SEQ ID NO: 472548 - DNA, 74 bp, Homo sapiens
cccaaagcacggggattacaaacgtgtacaaagataatcaatgctgattcggaggacccaaaatacattatcaa

SEQ ID NO: 472549 - DNA, 50 bp, Homo sapiens
gatacttctagatttcatttacacagaaaacccgcctagtgccaagcaac

SEQ ID NO: 472550 - DNA, 100 bp, Homo sapiens
tataggaacctggtctccctgggccaggagtggtggctcacacctgtaatcccagctctgggaggccaaggccagtggattgcttgagcccaggagtttg

SEQ ID NO: 472551 - DNA, 100 bp, Homo sapiens
aagattgctcctggagcagttgtatgtgtagaaagtgaaatcagaggagatgtaactatcggagtctcatgaacagtgtatccagtggattgttaagttt

SEQ ID NO: 472552 - DNA, 50 bp, Homo sapiens
cttggagtccggacatctgaaacttggtatgtgccgtccaggtgaaaaac

SEQ ID NO: 472553 - DNA, 75 bp, Homo sapiens
acagctttatttcacatgtacagcatttggcgcctcaaggaaacagagcaaatgcagcgttacaatcaaagactt

SEQ ID NO: 472554 - DNA, 50 bp, Homo sapiens
gaattccagaatgatgaaattgtagtgcttcatgttggcggaaccattgt

SEQ ID NO: 472555 - DNA, 100 bp, Homo sapiens
cagcttctccttcgcatccgacgcaaccggcagcagcgctgccgccgcgtcctcagccaccgctccctcttcccacgctgtggaaatacaaagaactctg

SEQ ID NO: 472556 - DNA, 82 bp, Homo sapiens
catgctttagctatctgaacgaaacttccctttggggagttaagttttccagccccccgtccagctccgacgccggcctgcg

SEQ ID NO: 472557 - DNA, 100 bp, Homo sapiens
acggcgaatttaattcggcataaacttaaagaggttgctatgagtaatgtagaagaagccgtccaggtagcaattgatgtaggctaccgccatattgact

SEQ ID NO: 472558 - DNA, 101 bp, Homo sapiens
agggctcgggcgccggcgagatgcctttgttcaccgccaaccccttcgagcaagacgtggggagcatgataaagatccagaaagcttttttaaggtattaa

SEQ ID NO: 472559 - DNA, 97 bp, Homo sapiens
atagccctcagaagaaagattctggaggaaaggtttacaagcaggccacgattgaatctctgaagccaagaagacctgtgcagacagtgacttcacc

SEQ ID NO: 472560 - DNA, 50 bp, Homo sapiens
gcagcgtgcgttcagccctggggggacccgaagctgccagtactgtacca

SEQ ID NO: 472561 - DNA, 75 bp, Homo sapiens
gatttggatgtgggatccggttccttggtgtcatccagccttagcaaaccagagtacccggcagtgtcacctgct

SEQ ID NO: 472562 - DNA, 98 bp, Homo sapiens
acttggagtccggacatctgaaacttggtgctggagaatctggtaaaagcaccattgtgaagcagatgaggatcctgcatgttaatgggtttaatgga

SEQ ID NO: 472563 - DNA, 82 bp, Homo sapiens
ccaatggcctctggatgaaacgtcaggaatttactacacagttgcatttgctggtctggcctttgcgtccttctacctggca

SEQ ID NO: 472564 - DNA, 90 bp, Homo sapiens
gaagaaaagaaagatgcagaggaagaggaaagcgaactgatccaacttagaaataatgtttcattcaagataaggctcgtggcttaggag

SEQ ID NO: 472565 - DNA, 100 bp, Homo sapiens
tgaagccgagctcatcagtgatgaggcccaggccgacctggcgctgcggagtaacagatcaactcctagcaatcatgatcggatacagcgtctgaggcaa

SEQ ID NO: 472566 - DNA, 100 bp, Homo sapiens
gctaccttctcccatcaccccagactttgagcaaagcatggtcctggttgcctgtggaccatacaccacatctgacagcatcacgtatgaccccctgctt

SEQ ID NO: 472567 - DNA, 101 bp, Homo sapiens
ccacgtcgttccgcgacggcctggctttctgcgccatcctgcaccgccaccggcccgacctcatagctggccacggtagtacggcggttctcccagaccgg

SEQ ID NO: 472568 - DNA, 87 bp, Homo sapiens
gggctcctgcgagaagcaagcggaacttcctgagtttctccttggaccaagatgactgatggaaaactctccacctctacaaatggc

SEQ ID NO: 472569 - DNA, 95 bp, Homo sapiens
cagtcttcccgcgtccgccgattcctcctccttggtcgccgcgtccttggctggcgtatgggtctgtgaagaaatcccggatctcaagctcgcta

SEQ ID NO: 472570 - DNA, 75 bp, Homo sapiens
taacaggatattcctcatgacattgctgtctggaccattcaaagactgtcagcaagcaaaagaagctgggcattc

SEQ ID NO: 472571 - DNA, 75 bp, Homo sapiens
cattatggaatacaaaactcacaccgacagcatcaaaaaagactgtatcttcaccattgacccatcaaccgcccg

SEQ ID NO: 472572 - DNA, 73 bp, Homo sapiens
gaagaagcagcacgaaagagagaggtccgtctaatgaagaacagcaaaccagtccagctacgggggcccagcc

SEQ ID NO: 472573 - DNA, 83 bp, Homo sapiens
caccaaccctgccatccgggagcagacggtcaagtttgacaagtatgcgcccaagctggacagcccctacttccgacattcca

SEQ ID NO: 472574 - DNA, 100 bp, Homo sapiens
gctataagcccctgtatatcccctccaaccgggtcaacgatggtgtttgtgaccgctgcgggcagtgccgctttggagccctgtgcgaggccgagaccgg

SEQ ID NO: 472575 - DNA, 74 bp, Homo sapiens
aggaaatgcatccatgctgtggaaaccagaggtcaagagcaatctgaatccaaatgcaaaggagtttgttcctg

SEQ ID NO: 472576 - DNA, 90 bp, Homo sapiens
aggaaggattcctgagattccaggaggaagtactggcgaagtgctccatggaccacagaatactggccatggtgcaacttctggttttgg

SEQ ID NO: 472577 - DNA, 98 bp, Homo sapiens
ccatgacaaccaggcaatgctggatagataccgaattcttatcacaaaggattccagacagcattggaaaagacatagaaaaggcttgccaatctatt

SEQ ID NO: 472578 - DNA, 100 bp, Homo sapiens
ttggtgttagtcagtgaaccacaagcaaaacacttactattttggagtttaaagtatgtcatcatggcaaagtttcggagaaggacttgcatcattttgg

SEQ ID NO: 472579 - DNA, 82 bp, Homo sapiens
cgccctttccacctcgcggcagttcgatcatggaagggaagtggttgctgtgtatgttactggtgcttggaactgctattgt

SEQ ID NO: 472580 - DNA, 119 bp, Homo sapiens
gaaacttggccacagaagacctggtctacatgctagagggcttgggcattcacacggacacattcagctaacgtattttagcaggtggagtgaggttgaagattcctgtgacagcgatg

SEQ ID NO: 472581 - DNA, 75 bp, Homo sapiens
catctaatgttcttagtgacattagtctatgaagacggccaagtgggagatgcaaatattaatacacaagaagga

SEQ ID NO: 472582 - DNA, 73 bp, Homo sapiens
cctgatggaggaagtgctcctgctgggcctcaaggaccgcgaggaccttaaaggctttgatccaggagagaaa

SEQ ID NO: 472583 - DNA, 100 bp, Homo sapiens
ccgatccagcctgcggagcctgtggggcaggatggatcttctcctgaactcccaagtcttgagagaaaaaataaaagaaggaaaattaaaggaaaaaaag

SEQ ID NO: 472584 - DNA, 101 bp, Homo sapiens
cctctctccctgatcttacgtgctcaaggtattgaaatagaagagttacagaatgaggaagaagaactaagtccacctctcatggagtacaatataaatgt

SEQ ID NO: 472585 - DNA, 101 bp, Homo sapiens
tttaagtctttactagaccagttaaaagagattgggtctctccacattgccccggctgctctccaacccctgagttcaagtgattcacctcccttggcctc

SEQ ID NO: 472586 - DNA, 97 bp, Homo sapiens
atttatcaaactagatgcacaaagaaagcgcctttctccaggctcaaaagagtatcaggacctgaaggagaagaaggagaaggtggaggagaaggca

SEQ ID NO: 472587 - DNA, 75 bp, Homo sapiens
ggaggcgtcaagcttctgaaagaaagattagagaaattcttccatcggcccatgcagaatgccaccaagtatggc

SEQ ID NO: 472588 - DNA, 83 bp, Homo sapiens
gaagctgaaaccacagacatgactgagtcctccatgaagactctagccaagagcttagaagatgctctgaggcaaactgcaag

SEQ ID NO: 472589 - DNA, 98 bp, Homo sapiens
gcatctttcccaaagtagccacaaatatcatgagggcgtggctgttccagcatctaacagagtatatcaggcgacagctagaagaggagcagcggcac

SEQ ID NO: 472590 - DNA, 98 bp, Homo sapiens
ggaaaatccgccgccaggcgctgtccccgacacgggtctgcgggccaggcatcgacatccgcaacgactatcagcagctgaagcgcctggagaactgc

SEQ ID NO: 472591 - DNA, 50 bp, Homo sapiens
aagattggtgcaataccttgatggccttccagcaggaaatttcactgaac

SEQ ID NO: 472592 - DNA, 120 bp, Homo sapiens
aacttccatcaaatctaccacactaagagttgaccagtcaattctcacagcaaaagatacagatattgtggatgaagccatctattacttcaaggccaatgtcttcttcaaaaactatga

SEQ ID NO: 472593 - DNA, 83 bp, Homo sapiens
tttctgctgaccgcgggccctgccctgggctggaacgaccctggattcaagatgaccaacgaagaacctcttcccaagaaggt

SEQ ID NO: 472594 - DNA, 75 bp, Homo sapiens
gcacaatggatggtcgtggaagcccagttcacattcatccttcctcagcaggcaggagcgatttggcaacatgac

SEQ ID NO: 472595 - DNA, 75 bp, Homo sapiens
aactcgagcgacagagacaagctgagcttgccgcacaaaaagctagagagagtgctgcagcagctcccagtccag

SEQ ID NO: 472596 - DNA, 83 bp, Homo sapiens
gcctttgccgatccgccgcccgtccacacccgccgccaggttgaatcgctcctagctgacccctcacgtctcttatgatacgt

SEQ ID NO: 472597 - DNA, 73 bp, Homo sapiens
tcgacactgccagctggaaccagaccataagatggcagtgaacgtatactcaacgtcagtgaccagtgataac

SEQ ID NO: 472598 - DNA, 82 bp, Homo sapiens
gccggcagctgctgcctcgcgcccgggagcaggaggagctgctggcgcccgcagatggcgacgttgtggacgtttaccagcg

SEQ ID NO: 472599 - DNA, 96 bp, Homo sapiens
ccgggatcgtgaccgagaccgtgaccgagagcgtgaccgagagcgcgaatatcgtcatcgttagaaggttggcagtggaatccctctgaccggccc

SEQ ID NO: 472600 - DNA, 101 bp, Homo sapiens
cactgcaccttcaatggcattgagtagtcatttgatccttcaaaaatcacaaggaagaaaagtgttataacttattctccaacaactggaacttgtcaaat

SEQ ID NO: 472601 - DNA, 96 bp, Homo sapiens
tggacctgttgaactatcagtacttggacaagatgaacaacaatatcggcattctgtgctacgaagatgcctttgaagatgagaaacccccaaaga

SEQ ID NO: 472602 - DNA, 83 bp, Homo sapiens
tcatttccttcgtacccacagtgcttcatgagaggaaggtgggagtcaatcattttgacaagtctcctgaaaggaacagctag

SEQ ID NO: 472603 - DNA, 96 bp, Homo sapiens
tccacagggctccccgccccacccggcctgataaagcgcgccgactgggctacaaggccaagcaagggcgagatgtgtgacagaggtggcatcaag

SEQ ID NO: 472604 - DNA, 49 bp, Homo sapiens
gcctcccgggtagctgggactacagtgtagtgtgcttcagagtctgaaa

SEQ ID NO: 472605 - DNA, 99 bp, Homo sapiens
aggaggacagttcgctacacagcaatgcatcgagtgtggtttattgacaatcatttacaatgccgaagagtgctgtagtgagccagcacagtgggtaac

SEQ ID NO: 472606 - DNA, 75 bp, Homo sapiens
tgcacgcggggcgcgggccccgaaggctctccatcgaaggcaacattggctggagtgcaatggcgcgatctcgac

SEQ ID NO: 472607 - DNA, 100 bp, Homo sapiens
gccagatagaaaacggcgagagtgggcgagaacgtccactgcgggccggcgaaagctggacgcgtgaccaaaaccaaagacggccatgaagtgagatcgt

SEQ ID NO: 472608 - DNA, 97 bp, Homo sapiens
tgcccttcacgctccaggagctagggtacatccgggaaggcttcctggccgtgcagcatgctgtggaccgggccatcatggagtaccatgccgatgc

SEQ ID NO: 472609 - DNA, 100 bp, Homo sapiens
ttcgtcaaggaccctcaggggatcatatctgaagatattagtgagctacaaaagaatcaaactacatctgtagccaaaattgcacaatacaagaggaaac

SEQ ID NO: 472610 - DNA, 100 bp, Homo sapiens
gtgtgcgagtctggcactgttcccgctgtttgtgccagcatctgctgtcaggtggctcagaggccatgtggaagtgttacatcaccttttgcttggaaag

SEQ ID NO: 472611 - DNA, 95 bp, Homo sapiens
gaccatccccctgtgcaggctccaccaccgctgtgctaactggaccgcggcagaagagtgggatctcactttgtcactcaggttggagtgcagtg

SEQ ID NO: 472612 - DNA, 100 bp, Homo sapiens
gtagtgcttcgttccatggacgttacgccccgggagtctctcagtatcttggtagtggctgggtccggtactaggttttgacaagcttgcatcatgcgtg

SEQ ID NO: 472613 - DNA, 82 bp, Homo sapiens
ggcgccaagatcccagtcacaattatcaccgggtatttaggcacagaccccacaggctcctcggacactgggtccatcacct

SEQ ID NO: 472614 - DNA, 51 bp, Homo sapiens
cttctgccatctgactgtcctgctggctgatattgaggagaaaggcgtccg

SEQ ID NO: 472615 - DNA, 141 bp, Homo sapiens
atcaggaaccctaagaagaggcgccagaggagccgccttctgcctcagaacggcgtgactcggaggacccagatgatgtggtaccagttggccaaagaagagcctggtgttggtgcatgtgctttggactagcatttatgc

SEQ ID NO: 472616 - DNA, 75 bp, Homo sapiens
cgaaaagaatttcttaaaacctgtgttggagcatggaatacctacatcagttgactttataggctgtgatccagc

SEQ ID NO: 472617 - DNA, 100 bp, Homo sapiens
cttcggggccccagcggcggcggcgaagagcccgccctgtcccagtaccagtttctcttcagcaacgggtagcagaattggaaaaaattaatgcagaatt

SEQ ID NO: 472618 - DNA, 90 bp, Homo sapiens
aagaacgcttcgcccgttggtgctatatcactgtgtccactactatgatcttcgtaacactaaacagccaatcatggtattcaaaggaca

SEQ ID NO: 472619 - DNA, 75 bp, Homo sapiens
cgcggatggccgtaaccccgaaggaaataattccgttgatgcagcaaagccgctgctgcggaaggcgatccagat

SEQ ID NO: 472620 - DNA, 90 bp, Homo sapiens
gtacccaatgcctgtttattcaccatcaacaaagaagaccacacactgggaaacatcattaaatcggcagagcggcttgggtaaatccac

SEQ ID NO: 472621 - DNA, 76 bp, Homo sapiens
aagctttggatcagacttttgtgttgcagttcgggtctgccatcatggatgttctcgcagaagcaaatggcacctt

SEQ ID NO: 472622 - DNA, 75 bp, Homo sapiens
agaaaagtctctaagtttgtggcatgttatttgaaagcaattgagacgcaaccgaactttgcagtagcttggagt

SEQ ID NO: 472623 - DNA, 76 bp, Homo sapiens
cctcgatccgcccacagacctcaaattcaaaggttcaacagagtttggaaaagatttctaaactggagcaggaaaa

SEQ ID NO: 472624 - DNA, 100 bp, Homo sapiens
ctggaatcacccctagatctttcttgaagacttgaattagattacagcgatggggacacagaaggggaaaagagtttctttttacaaacgagcccaaatc

SEQ ID NO: 472625 - DNA, 98 bp, Homo sapiens
ccccgcggctgcggcgcaggtgccctcggcctgagtcgggatggagctgcctgctgtgaacctgaagggggcaatggcggcttcctgtgttctactgc

SEQ ID NO: 472626 - DNA, 98 bp, Homo sapiens
ccgccatgctgtctctagactttttggacgatgtgcggcggatgaacaagcggcaggagtctttgttgctggctatgaaagcctgaaaaagaatgaaa

SEQ ID NO: 472627 - DNA, 73 bp, Homo sapiens
agcaatcgaaagatactgctgcaatggaaaggcctctcaaggtgagcatagctaccccaaaacagaaaccaaa

SEQ ID NO: 472628 - DNA, 100 bp, Homo sapiens
aaaatcatggagaaatgtacattaccattgactggaaagcaatgtgtcaaccgcattattactgaaaagaaaatccaatctgatttgacaagtcatgaga

SEQ ID NO: 472629 - DNA, 98 bp, Homo sapiens
gaaactttcaaagtttgatgagcagagaactgctactgatttctataattggcctgatgaatcctttgatgaaatggacagtacactagctgttcaac

SEQ ID NO: 472630 - DNA, 90 bp, Homo sapiens
ttgtgatctgcgatcgagcctcggtcaaggaggtgttcctgatccaagcagaaccctgttatttgaagagcctgagaaatcttatcccgt

SEQ ID NO: 472631 - DNA, 51 bp, Homo sapiens
accatccttcaagtgaacaattggatctcactggcatcgaatctatggatc

SEQ ID NO: 472632 - DNA, 75 bp, Homo sapiens
tcggttctacctgggagaatccaccgccatccgccaccatgccggcccgctggggctggaggcacgggcccatca

SEQ ID NO: 472633 - DNA, 51 bp, Homo sapiens
cattctgcaagcaggcaacctgaatacaggcaacaattggcattgactttt

SEQ ID NO: 472634 - DNA, 50 bp, Homo sapiens
agagaatgctgacagtcctgcagattagctaatcatcagctggataaaga

SEQ ID NO: 472635 - DNA, 75 bp, Homo sapiens
tataatcaggaagtggatgcctccatttttaaggtcatcctgtacagttctacagcatgaataggcctgcctctc

SEQ ID NO: 472636 - DNA, 75 bp, Homo sapiens
gactcaccagcggcagcgacaccccgcagcaggacaggtggtgtcatcacttctgacatgattgaaatgatattt

SEQ ID NO: 472637 - DNA, 90 bp, Homo sapiens
ggacaagccttgcactgggtaaaccacgttcatggtcatggaatctcatttaccagccacgagttgtcaagtcctgtggattccccttct

SEQ ID NO: 472638 - DNA, 100 bp, Homo sapiens
tgattggattgatgaacaatgaagcagctcaggttttgctgttactgctcagtgtagtcacaccttgaataagaaatggaaaaccttgggatgttgataa

SEQ ID NO: 472639 - DNA, 100 bp, Homo sapiens
gtttgatgaagcagatcgaatgtttgacatgggatttggtgaatgcatcccggcagggtattgaagatgctgaagaaacagcaaatcaaacttgtggtgg

SEQ ID NO: 472640 - DNA, 90 bp, Homo sapiens
gccggggaagtgtctgtagcgtccctccctctcaaccacaataacaggcggagggtcggcgtagaaaaccagtctatccaagaccaggca

SEQ ID NO: 472641 - DNA, 51 bp, Homo sapiens
gaggtcacaccttcagtccttcgagcaagttttgagagtattttagaaggg

SEQ ID NO: 472642 - DNA, 82 bp, Homo sapiens
gggaatgagcaagaatggaagatcaagctgcaagtgcttgttccagggtctccctccactgctgtagtaacccgggtccggg

SEQ ID NO: 472643 - DNA, 75 bp, Homo sapiens
atgttcagtaccctgaaggatgggactgaagggggatcatctagaagttgatcatggccttgccaggttggtgac

SEQ ID NO: 472644 - DNA, 75 bp, Homo sapiens
ctccgtgtaccggcagaaggcccgggtctcccaagagctcaagggagtgcatccgccccaacccttttccccctc

SEQ ID NO: 472645 - DNA, 90 bp, Homo sapiens
ggtaacaagaaataccgtgccctgaggttggacgtggggaatttctcctggggctcagagtggtgaaacttcctacatccgagtttatcc

SEQ ID NO: 472646 - DNA, 75 bp, Homo sapiens
acggcagcaaccgcagcagcagccttcagtctgcagatctccaggggagcccaccagcctagtcaacatggcctc

SEQ ID NO: 472647 - DNA, 75 bp, Homo sapiens
cagattccagaaaaattacagcacatctcagtgaatttgcaagtgatgggtagcctatgaaaatcctgacttcac

SEQ ID NO: 472648 - DNA, 99 bp, Homo sapiens
gtgaagtccgtccgggaaacggaggaaaaaaagagttgcgggaggctgtcggctaataacggctgatttaaactgcaatattcaagatgatgctggggc

SEQ ID NO: 472649 - DNA, 101 bp, Homo sapiens
tatgccgccaatgcctcctccaggagggatacctccacctatgggccctccacacctccagttggtagctggcagtgttgtgatggcttttgaagaagtat

SEQ ID NO: 472650 - DNA, 98 bp, Homo sapiens
ttgtacagagtttgaaaaaacggatggaagtaccagactatgaaatgttgaatccttggcctgaatatatttacacacgtcttgagatgtataatata

SEQ ID NO: 472651 - DNA, 50 bp, Homo sapiens
ggacaacttcgcccgggacttcatggtactccaaagattcaggtttactc

SEQ ID NO: 472652 - DNA, 75 bp, Homo sapiens
cagaatacctttacagaggttaaaattgggcttaaaagacaaccttcttgcttctgggacatccagcctgacagc

SEQ ID NO: 472653 - DNA, 82 bp, Homo sapiens
cttggcccttgttcccccaaatgtctgactctgactctcggactgagaaacgcaaggttgggttaacggcatggagaacagt

SEQ ID NO: 472654 - DNA, 100 bp, Homo sapiens
tggcagaatcttggaatgcagcttttttggaatcttctgctaaagaaaatcaggagattatggtgggctccatgtttcaagcagaaattccagttggcat

SEQ ID NO: 472655 - DNA, 90 bp, Homo sapiens
ggaagtgtatcttcatacatcaccacacctgaaagcaggtgtaataatgtcctttatatcagaggtgtggaagaagaggaagaagatggg

SEQ ID NO: 472656 - DNA, 100 bp, Homo sapiens
cctcggcccgcacgccaagcacgtggtgggctatggccaccttggtgaaaggtgtagcagtcactcggcctacacccacagcatcgaccttgtgaaccca

SEQ ID NO: 472657 - DNA, 59 bp, Homo sapiens
gtattcttggatcttgcacaggaaggaattaaagtcctggtacctgggataaaagttgc

SEQ ID NO: 472658 - DNA, 114 bp, Homo sapiens
aggacctgaaggacgcgcaggagaagctggagctcacggagaagaaggcctccgacctggagcagatccgcagggacatccgagacttccggtctagcgcggggctggacaaag

SEQ ID NO: 472659 - DNA, 73 bp, Homo sapiens
aagaagcagaagaaacagttaatcgtgatatcccaccccttacagctcccggtggcagcatctttgcccccaa

SEQ ID NO: 472660 - DNA, 83 bp, Homo sapiens
catgcgtcgtcggcctctgggcagcagactgtgccctgtccacggtgcctcctgcatgtcctgctgccctgagctgtcccgag

SEQ ID NO: 472661 - DNA, 107 bp, Homo sapiens
ccttttccgttgccggtgccggcctagcgtcctggaattacttcaatcaaaggtcggatccgcagctgcttgcccggttctactatgccgacgaggagctgaaccag

SEQ ID NO: 472662 - DNA, 90 bp, Homo sapiens
tgggaagatggccgtctttccttgcccacggccgccaatcccactctcgctcctgctgacagaagaggaagcagccctctacattcaatc

SEQ ID NO: 472663 - DNA, 101 bp, Homo sapiens
gccgagtggcggtccgacagagtcctccgtgtcctcccccgcatgacccccttggcccgacaacaagctcaaatacgtcaccaaatggcagaggacagcaa

SEQ ID NO: 472664 - DNA, 107 bp, Homo sapiens
atgacttctgccttcaagctggatttcctcccggacatgatggtcgagggccgcctgctcgttcctgacagaatttttgagtatccgaggagcccaggaggaggaac

SEQ ID NO: 472665 - DNA, 51 bp, Homo sapiens
tgagatattctgctgagtggaagaatgagtccctggaacgccagatgcgtg

SEQ ID NO: 472666 - DNA, 100 bp, Homo sapiens
tgagagattacctgaagttgcactcaaaagcaagatatactactaactttgaaatggaataagcctaaaatgaccaatgtgtgatttcagtggaataaat

SEQ ID NO: 472667 - DNA, 127 bp, Homo sapiens
agtggggcgcgtgaagctcctttctccttccatcctgaagccctttccgctgtggacaggaaaacaggcttatatttggcaccctttaccctgcgtattattcctacaaggctgtgaaatcaaagga

SEQ ID NO: 472668 - DNA, 100 bp, Homo sapiens
ttgcagaattttctacttattctcacagtgacttaaatagaccactggaagatgactgtcaagttttagaagaggttttaggtagaggaatttcaggaag

SEQ ID NO: 472669 - DNA, 83 bp, Homo sapiens
cttaaattgatttcaagtttgaacaaggtattgttgcagcatctggcagtgagactgaggatgaggacagcatggacattccc

SEQ ID NO: 472670 - DNA, 98 bp, Homo sapiens
tcctgacgctcctggcgcatctggtggtcgtcatcaccttattctggtcccgggggtgagcccctccagactccgaataggagatcaagagtttgatt

SEQ ID NO: 472671 - DNA, 90 bp, Homo sapiens
acctggtgcagggcctgattgaggactgccagctggcgctgcagcatttctttgaaggtgttgaagctcgcgtggcacagggcataaggg

SEQ ID NO: 472672 - DNA, 100 bp, Homo sapiens
atgaagtcaggataggtgttcttaaacacttgcatgattttctgaagtctcctacggtagtgtgcagcttatgcaaacgagagggtcatctaaagaagga

SEQ ID NO: 472673 - DNA, 89 bp, Homo sapiens
gggcctactcgcccgccaccctgcgctgccgccgctctgaggagttaaaggtctggagaaaatgatgtggaatataacaacatggaatt

SEQ ID NO: 472674 - DNA, 75 bp, Homo sapiens
agaggcctgcgagcactccggcgaggccaaggccttccaggactatcaagagtgagccatggagctacgtgtggg

SEQ ID NO: 472675 - DNA, 98 bp, Homo sapiens
tcctacagagttatcaggttccagaccctgccttctcttctgaaagcatgagatactttgatagagcagccttatttgtggaagcttgcctcaagtat

SEQ ID NO: 472676 - DNA, 74 bp, Homo sapiens
atggaatccatgcttaaatcaaattatatccagatcgagagacagaagattctgaaagggttcaatgaaatgag

SEQ ID NO: 472677 - DNA, 100 bp, Homo sapiens
ggcgggttgggccccaagaagctggtcctgttgttggtgaatggagctcagttgtgtggggggaccctgatcaacaccatctgggtggtctccgcggccc

SEQ ID NO: 472678 - DNA, 83 bp, Homo sapiens
atcggggggctgaaatccatcttcatcctaccgctccgcccacctgcctagagctggaacgttacctccagagcgagccctgc

SEQ ID NO: 472679 - DNA, 83 bp, Homo sapiens
gggctttaccatctttgtggctgtgcttgccaggcctggctccagtgctcttacagcctgttccaagtgtggcttaatccgtc

SEQ ID NO: 472680 - DNA, 96 bp, Homo sapiens
cagaatcgcatgaatgttcacaatctcgccactgtatttgggccaaattgctttcagtggctgactgttcttgggatgaaacaataaagatctatg

SEQ ID NO: 472681 - DNA, 95 bp, Homo sapiens
cagtttttggtcttctgtcaaaaacacagggatgaggatagagggaggaatcagcagcttggaaattcaagcacgtgatctggcgggatgggcgt

SEQ ID NO: 472682 - DNA, 100 bp, Homo sapiens
tgcgtatgggacagcttttaaagtgtttgaaagattttgcattcaacattcaggctatcagatggttcagaatgttgcaaatacaaaattgacaacccgg

SEQ ID NO: 472683 - DNA, 100 bp, Homo sapiens
cagaaacacaagaccttcgtggaaaaatacgagaaacagatcaagcactttggtgtgatgaatgcagactctgctaccattttggctgtttggatcctcc

SEQ ID NO: 472684 - DNA, 75 bp, Homo sapiens
cagaaatcgactttctgagagagcaaacaacgtgtactcgtgcagcatggacggcatggtgctggtgtggaatgt

SEQ ID NO: 472685 - DNA, 50 bp, Homo sapiens
gtaaagccccaaagagtcttcctgcaaagaaccctatgtataattggagc

SEQ ID NO: 472686 - DNA, 50 bp, Homo sapiens
gccagtggcatctgtgacaacttgcttatgtgggcgctatctccaactgt

SEQ ID NO: 472687 - DNA, 88 bp, Homo sapiens
agttcctgagagtggagatctggaagaatcctgtaagtacaatcccaagtattctgttgctaatgacaccggctttgtggacatccct

SEQ ID NO: 472688 - DNA, 82 bp, Homo sapiens
tggcacttcattggccacctacagaaacaaaatgtcaacaaattgatgggtgatgctgtggagtcttcaaaaagcccgacca

SEQ ID NO: 472689 - DNA, 96 bp, Homo sapiens
gaagctgtttcgggccagcgacccgctgctcagcgtcctcatgtggggggtaaaccactcgatacactgaagagatggtgccttggcacccttgcc

SEQ ID NO: 472690 - DNA, 80 bp, Homo sapiens
ggcgaaccgaggggcctgtgcggccgcccggcccggccgcggatcaggaagccagttgagggaagttctccatgaatgta

SEQ ID NO: 472691 - DNA, 74 bp, Homo sapiens
gatgacgaagctcccaaaaggcagactcgtcgaagagcggctaaaaacgttagtctctgaaagccactcggaat

SEQ ID NO: 472692 - DNA, 150 bp, Homo sapiens
gatgccctctgaatctttgtgtttggctgcccaggctcgcctcgactccaaatggttgaaaacagatatacaggtactccaaagattcaggtttactcacgtcatccagcagagaatggaaagtcaaatttcctgaattgctatgtgtct

SEQ ID NO: 472693 - DNA, 83 bp, Homo sapiens
atgaggttagattcttcgacgaggagtcctacagcctcctcaggaagatcaaccctgaccaccccattgtggagacgctgcgg

SEQ ID NO: 472694 - DNA, 87 bp, Homo sapiens
gattattagctttagtgaaatgggctaataatgctggcaaagtggaaaaatgtgcgctagtgtcagcagtgggatacctgcgcttga

SEQ ID NO: 472695 - DNA, 119 bp, Homo sapiens
gaattcttttagaagaagggaaaaacctcttgagatgtgactgtttccatctattttctgcttgccaggcctcattgctacgatttcagagtaccctggtaatagctgagcatgcaaat

SEQ ID NO: 472696 - DNA, 75 bp, Homo sapiens
cgcagatctccgggccacctgccttgaagcccccgcctctcctggactcttttcaagaccagtctccatctccag

SEQ ID NO: 472697 - DNA, 82 bp, Homo sapiens
tctttgctcaaggatcccagttttctctggatgacgtgactccatcaagaatgctggaggaagggtgtttgtccactgccag

SEQ ID NO: 472698 - DNA, 75 bp, Homo sapiens
catccatcgcataagagcaaagaacactgttgttgccacaggggtttggaaatcccttgtctccaggttgctggg

SEQ ID NO: 472699 - DNA, 75 bp, Homo sapiens
tggggcctggaccagcctcttctgaaacactgggccaaaactggacaagccaaggcatctgtagccaaagtaaac

SEQ ID NO: 472700 - DNA, 75 bp, Homo sapiens
ataagtggaattttggagatattcaaaggacaagtaaatttttgtgaaacattgcagatgttagatggatttggg

SEQ ID NO: 472701 - DNA, 112 bp, Homo sapiens
aaacatccaagaaaaatgtccttaaagcaattgagcaggctgatctactgcaggaggagatgagtatgatgtatgtgccatttgtttggatgagtatgaagatggagacaaa

SEQ ID NO: 472702 - DNA, 98 bp, Homo sapiens
cccgcggccagtgcgggtggctggctttgccattagcgggggcctttcctgaggacggcgtacggagtgtggttatttctcaaactctgaggctgcgg

SEQ ID NO: 472703 - DNA, 75 bp, Homo sapiens
gcttggcggcttttctcctcagttttctggagtgctttggaggagagctcttccgccctctctggatgagggaac

SEQ ID NO: 472704 - DNA, 135 bp, Homo sapiens
ctacagcacaaataactccataatgtctgaaaatactgaaattgatagcagtttgaatgccttatacaggatgctgtgttctttgctcctttgtgaatgtctgttgctggtagctggttatgctcatgatgatga

SEQ ID NO: 472705 - DNA, 98 bp, Homo sapiens
agcagaagattgagctgctgatgtcagttaactctgagaagtcgtcctcttcagaaagagaatggatcttggagaatgtctgaaagtccatgacctgg

SEQ ID NO: 472706 - DNA, 59 bp, Homo sapiens
agctggccctggagtcccctgaggtgcggctctatgagtggacaacagagaaggagctg

SEQ ID NO: 472707 - DNA, 110 bp, Homo sapiens
ggtccaccccctggtgctgctcagtgtggtggatcatttcaaccgttggagtgcctcaagcttattgcctctcaaaaatttacagacaaacgcattggctatttaggggc

SEQ ID NO: 472708 - DNA, 97 bp, Homo sapiens
acaatatttctcagaggatagcctttcacttattcatctgtccagcatgactcatccccgggagtgttgacaggactctggactgtcttcacactag

SEQ ID NO: 472709 - DNA, 100 bp, Homo sapiens
cgcacccatcccaccttcccgcaccctgggaccggacctgaaggagaagaaggagaaggtggaggagaaggcaagccggaaagagcgaaagaaagaagtg

SEQ ID NO: 472710 - DNA, 98 bp, Homo sapiens
ccacaacatctttttatgtggaggcttcagctctgaaatgaaagcttgggatataaggactggcaagtttctggcccccaaagacaaaccaagtggag

SEQ ID NO: 472711 - DNA, 100 bp, Homo sapiens
tggggacgaagagctgcagctcctcctgtgcgggaggcggcgacggcggcggcggggggagaggaagagaaagaagcgtctccagctgaagccaatgcag

SEQ ID NO: 472712 - DNA, 98 bp, Homo sapiens
caggctgtaaactttggaactgataagtgagagagataagattaaatctcttgatgaacagtgtgtggttggcaaaatttccaagcactggactggaa

SEQ ID NO: 472713 - DNA, 100 bp, Homo sapiens
tttaaagaaggcaaggagagaatgtatgaagaacagtcacaggacagatcgaacggttggaagtaagcagccttgcccaaacatccagtgcagtggcctc

SEQ ID NO: 472714 - DNA, 50 bp, Homo sapiens
gttttggctgcttaaactgctggttgaaggggaccagctgcctccaggac

SEQ ID NO: 472715 - DNA, 50 bp, Homo sapiens
ccaagactgaatttcaattggctaaaccaggtggacaggtgaaatgtcag

SEQ ID NO: 472716 - DNA, 89 bp, Homo sapiens
aggattctacagatatatgcaaacaccaactctacaacattacctgtcatatactgaagaatctcttcttccagttatgcagcacctgg

SEQ ID NO: 472717 - DNA, 75 bp, Homo sapiens
ggaatctcactctgttaaagctggtctgttctaactgagatttgaaagaagccaacactaaaccacaaatataca

SEQ ID NO: 472718 - DNA, 74 bp, Homo sapiens
agacaaggaacccataaagatgctgtttacggagaactgtggaagacaggaatgtttgaacgcatgtctctgca

SEQ ID NO: 472719 - DNA, 100 bp, Homo sapiens
gcctgcgaaagtgctcgggaagagggagagcaaacttggctcagcccactattgacctgaaaagtggttctggaaaagtgtaccaaggccctgcaaaagg

SEQ ID NO: 472720 - DNA, 74 bp, Homo sapiens
acccttgatcctcctcctaattgcagacccaacatgagtgaagtttcctgcaagaaacgggacgactatttgga

SEQ ID NO: 472721 - DNA, 100 bp, Homo sapiens
gacctttgagcatacaccgagagagtgaggagccagacgacaagcacacactatggcgctgaaacggattaataagggaggctgccggcgtggaccgcgg

SEQ ID NO: 472722 - DNA, 75 bp, Homo sapiens
atcggatctacaggaccagttgaatcatctgttgaaatagaatgacatgtgcacagcgacttcaccgcggcagcc

SEQ ID NO: 472723 - DNA, 90 bp, Homo sapiens
acacgtgggcaacgtacgtcagacggcagtggtggaaaagatccatgccaagaggtacttggaaggctccatcgcccctgaagacaaagg

SEQ ID NO: 472724 - DNA, 93 bp, Homo sapiens
gctgatcgcctgggtggttgttggcgtgtccctgcagcgaaggatcctggttggaacttgctactaccagcaccatgccctaccaatatccag

SEQ ID NO: 472725 - DNA, 97 bp, Homo sapiens
ccgagcagtcaagaagaacatgccccaagttattcgtcagtgaggcggaaattgtggtgtacttgtgtgctatacttggtagatcagaaactcagga

SEQ ID NO: 472726 - DNA, 100 bp, Homo sapiens
ccaagggttgtatcgaggctataaaagcacagttttaagagaggaataagttcccctgtcagtggaggatgggatacttcaacctgggggttgaaatcaa

SEQ ID NO: 472727 - DNA, 50 bp, Homo sapiens
cttctttggagaatgatatcaaaccaacagagtcttgctctgttgcccag

SEQ ID NO: 472728 - DNA, 99 bp, Homo sapiens
acaatgagagctctcaagttgagtcaacaaaggaaggaaatccaagtaccactgcctgtgactctcaagatgatgatcggctgaatgtaacagaggaac

SEQ ID NO: 472729 - DNA, 90 bp, Homo sapiens
cagaaggaaaatgggtcaagcttgaaaaaacaacgtacatggatcctactggtaaaactagacctttccaaagtgaaactgatgagattt

SEQ ID NO: 472730 - DNA, 100 bp, Homo sapiens
gctttcttcttcttcagcgagattcctgagccgttctatccctagactctacaggggcaggtaattcactggtccacaagcggtctcctttacgtcgaaa

SEQ ID NO: 472731 - DNA, 98 bp, Homo sapiens
catgccgctctccaccatccgcgaggtggcggtgctgaggcacctggagaccttcgagcaccccaacgtggtcagtttaaaattggtggtgaatggtg

SEQ ID NO: 472732 - DNA, 100 bp, Homo sapiens
ggccagacagcagctaagctggttcatcccatcagcctggattggtgaaactgaatcacaggagatatttccagctgttctaaagaaatccaaatggcag

SEQ ID NO: 472733 - DNA, 74 bp, Homo sapiens
gaaggatcgggagtacacagacatcatccggatgtggatgtagaagaggcagttctggggcagtatactgaaga

SEQ ID NO: 472734 - DNA, 50 bp, Homo sapiens
tcatactctgttatagataaacaaggtgaatctggattgggaaagtcgac

SEQ ID NO: 472735 - DNA, 97 bp, Homo sapiens
tagtctgaaagggaaaacccccattcattctggattggtggatctgaagtacaaaatattttccagtattttaataagcggaaaacctactttgctc

SEQ ID NO: 472736 - DNA, 82 bp, Homo sapiens
cacccctaaaagcacctggccccgctacagcaaaccaggtgcactgtgaagagttcatccccgagtttgagaagcaataccc

SEQ ID NO: 472737 - DNA, 74 bp, Homo sapiens
gaagaccacacactgggaaacatcattaaatcgatattagaaatggctactccccagtcaattttcatctttgc

SEQ ID NO: 472738 - DNA, 100 bp, Homo sapiens
gattacaggcacccgccaccatgcccgactaaatagccattcgttcctggttaactcggaaacacatccagaggctgcatgcagctgccacagtcatcaa

SEQ ID NO: 472739 - DNA, 85 bp, Homo sapiens
tcagcctccggagtagctgggattacaggggtgggaaccgccaaacctctcccttctttttgacttcacccttggataccatcaa

SEQ ID NO: 472740 - DNA, 90 bp, Homo sapiens
gtctggactgatctccatgtcctgttgtggggcttttacagcctttggggccttgcccgagatggacagccggattccttatgatgacta

SEQ ID NO: 472741 - DNA, 87 bp, Homo sapiens
aatgttcatctttagagcaagaggagcttcaagcattgcagatagagcaaggagctccaaatgagaagatgaagcaagtgttaaaga

SEQ ID NO: 472742 - DNA, 82 bp, Homo sapiens
gccgcgcggcttcctccagacctctcggcgcgggagcccagcagccggggccgccctattacaccgacccaggaggaccggg

SEQ ID NO: 472743 - DNA, 98 bp, Homo sapiens
acacagctgcttccattggccagtatgaagtggtgaaggagtgtgtgcagcgttgtcgagatgtccacagaaggaggatttggtggtactagcagcag

SEQ ID NO: 472744 - DNA, 83 bp, Homo sapiens
gtcgcaggccacccgccagcgcctgagcatccccgtcatggtggtcaccctgggcccctcgggaggcattggcacagaccgtg

SEQ ID NO: 472745 - DNA, 90 bp, Homo sapiens
cactgttgtttcacaagatgatgtttgaaactattccaatgttcagtggcggaacttgcactgggaaaactcttcagatttttaacattg

SEQ ID NO: 472746 - DNA, 76 bp, Homo sapiens
ggagggcgagcgaggaggatggcggagtcggggctcctgacgggaaatcctcattgacgattcaatttgttgaagg

SEQ ID NO: 472747 - DNA, 75 bp, Homo sapiens
atcagcagccagcatcttctttattgaggtatccgttacagcactgatgtgagtgtagatgaagtaaaagctttg

SEQ ID NO: 472748 - DNA, 75 bp, Homo sapiens
aaaaaatcaaatacagtagaggacccttttcactcttggaggagtctactcttcatcttgtgttgagacttcgtg

SEQ ID NO: 472749 - DNA, 100 bp, Homo sapiens
ggagctcctccaccaggccaaagacttcggcagcaaggcatctttacatatgtgattatcataaaaacttaattcagagtgttcgaaacagaagaaagag

SEQ ID NO: 472750 - DNA, 96 bp, Homo sapiens
acctttaaaagcagtaatggaacaagctaatgcatcaatctcaaataattctacaagtaaaaggaaatctgagtctgccacttgcaacttagtcag

SEQ ID NO: 472751 - DNA, 98 bp, Homo sapiens
ggatctggaggagcagttgtctgatgaagagaagcacctatttgccctggctgtggatgatgaccccgaggtgcggaagaatgtgtgccgtgccctgg

SEQ ID NO: 472752 - DNA, 89 bp, Homo sapiens
ggcaaggtgatccagcaaggtcggcagagcaaggggcttacgcagaaggacctggccacggctgatcagctgaccgaagaacagattgc

SEQ ID NO: 472753 - DNA, 100 bp, Homo sapiens
cagtgtgccccttccgctgtcaatgccatcttcgagtggtccagtgttctgatttgggtgctggagaatctggtaaaagcaccattgtgaagcagatgag

SEQ ID NO: 472754 - DNA, 75 bp, Homo sapiens
agatacataagatcgtagccagacccccagatgcctataagaaaatcttagaaaccacaatgactccaactggaa

SEQ ID NO: 472755 - DNA, 100 bp, Homo sapiens
acgcagaagacgggtgatttctgcatttccatctgagctgcggcatgaagctgaacctggactatctgctggagatgctttgggagtacttggccctgac

SEQ ID NO: 472756 - DNA, 73 bp, Homo sapiens
gtggggctgcagtactcgggcaagaccaccttcgtcaatgtcatcgcgggtctaggtgctggagtgcgcacgg

SEQ ID NO: 472757 - DNA, 115 bp, Homo sapiens
cggtgagctgcggcgagcggagcttcgcggggatcctgctggactgcacgaaaaagctcttgtcaggatggtgaagctgttcatcggaaacctgccccgggaggctacagagcag

SEQ ID NO: 472758 - DNA, 50 bp, Homo sapiens
ttggaattgatgatcaagatttccagggcgatgccagtccctccactcca

SEQ ID NO: 472759 - DNA, 74 bp, Homo sapiens
aagttaaccggtgtaggagaagaaatccgcagaagcttattaaagttaaggagttcaaagaaggacgcagagcc

SEQ ID NO: 472760 - DNA, 82 bp, Homo sapiens
tccagcggggacctgctccgggacaacatgctgcggggcacagggtcagatgacttgtctgcaaagctgtgggatgtgagca

SEQ ID NO: 472761 - DNA, 100 bp, Homo sapiens
ctggcggacgctcaagtacctgtggaccgtgtgctgccactgcgggggcaagacgaagaatggcattgtgcccatcgtggagcctgagatcctccctgat

SEQ ID NO: 472762 - DNA, 98 bp, Homo sapiens
cgaggcggcggtgtgggcgcgtcaggccgcgacgagggcgctgaggttatgaagacagtatggagtttccagaccatagtagacatttgctacagtgt

SEQ ID NO: 472763 - DNA, 96 bp, Homo sapiens
ctggcgtgcactccgcacctcggggacattattgcgcgtggaacggctgcttttggaagtctgaaccggacggcttttctcatttccacttgtacg

SEQ ID NO: 472764 - DNA, 95 bp, Homo sapiens
tgcatttcttcgctaccccacagcttctgctcatggtgctggagaatctggtaaaagcaccattgtgaagcagatgaggatcctgcatgttaatg

SEQ ID NO: 472765 - DNA, 90 bp, Homo sapiens
gaatctttagaacttggcaagtctcactagataccttcaatcatcattttgagctcaaaggccccttcacagatgtagtcactacaaatc

SEQ ID NO: 472766 - DNA, 75 bp, Homo sapiens
ggcagtttcaataacaggtcattgccgagaaaaggattatgctaaagagagatatggaatatcttcaatgataca

SEQ ID NO: 472767 - DNA, 83 bp, Homo sapiens
ggaattctcaaattgtcccaaactgattcagctacaacacgcaacaagattgacctggctgaaaggagagaggtttcccagca

SEQ ID NO: 472768 - DNA, 74 bp, Homo sapiens
cttgtcccggggagtccgcgcctcccacgccggacctggtattacaagtggataaataatgtgcactgctctga

SEQ ID NO: 472769 - DNA, 75 bp, Homo sapiens
atggcagccagtcagtggtggaggacttggatgttgtgggtgatggtatgcagtgtcctccttcacctttgcttt

SEQ ID NO: 472770 - DNA, 100 bp, Homo sapiens
ccgatcttctgtgttctgcgtggggacggccgcctagagtggttcagccacaaggagactggatacacgtctgtttaactacgcaaaaggtaatgctggc

SEQ ID NO: 472771 - DNA, 75 bp, Homo sapiens
cggaggccgggttgccagattacggtacatggactggacctgcctggagcccagcccagagcatctcctcagtgc

SEQ ID NO: 472772 - DNA, 100 bp, Homo sapiens
tccctctccgagtgctgctcctgtcattgtggccatggacgaggagaggagacgccgtgagcgggacgaccagatgtaccgagagcggctgcgcaccttg

SEQ ID NO: 472773 - DNA, 76 bp, Homo sapiens
catttcactacagacgaaatccactagctcctcaagagttactgatctatgaaatggcagagaatggaaaaaattg

SEQ ID NO: 472774 - DNA, 98 bp, Homo sapiens
gctcctttaccagaattaccgaatccctcagcagaggaaggccttgctgtccccgttctcgacgccagtgatctcaggatggacccaagctctgccgg

SEQ ID NO: 472775 - DNA, 100 bp, Homo sapiens
cacgaatctgcccacccctcctgtaacccagcctgtttcacttcttggtctctgacattgacagagcctggacgttggaggaagccccaggacgttggag

SEQ ID NO: 472776 - DNA, 95 bp, Homo sapiens
actcaaatgcaaaggcttactaagtacccacttctgttggataatattgccaaatacacagagaacttccctcagtgtgtgctagaaatctctga

SEQ ID NO: 472777 - DNA, 95 bp, Homo sapiens
ctgggggctgcggcctagaggtccgggcttggagttcgcctcagacgcggtggagccgccggagtctgagaaggattaacctccatttcagctaa

SEQ ID NO: 472778 - DNA, 97 bp, Homo sapiens
cttcttacttgctacgcactgatgttttctttctgccactattactattttcttccactaaaaaagcgtaatttggatgatgatgacgacatgggag

SEQ ID NO: 472779 - DNA, 82 bp, Homo sapiens
catcagtcaggcagatgtttgtcgactggaatggcctcctaaaaagagttatgtgaattacaaggttttacaggagcaaatt

SEQ ID NO: 472780 - DNA, 80 bp, Homo sapiens
gaaaaagtgctcctgggactccaggataccagacaggggcaagtgtccgagtggtgaatcagctacttacagagatggat

SEQ ID NO: 472781 - DNA, 92 bp, Homo sapiens
ctgccaatttaccagagataattgataacaccctgtaacagctgaaataacatagctgatccagaagaactgttcacaaaattagagcgcat

SEQ ID NO: 472782 - DNA, 100 bp, Homo sapiens
ccggaatgcagtaccctcagcagcagctccagaagaaaaggaagtcattaaaggacagtatggcaagctcacggacgcgtacggctgcctgggggagctg

SEQ ID NO: 472783 - DNA, 91 bp, Homo sapiens
ctggagctgaagcgcaggctgcggggcgcggagtcgggagactcttgcaagctggatgccctctgtggatgaaagatgtatcatggaatga

SEQ ID NO: 472784 - DNA, 101 bp, Homo sapiens
aaaacacagatccagagtgttactggcttacaaattggattgaggtatctcagatgaagacatcatcaacattactcttcctactggagtccccattcttc

SEQ ID NO: 472785 - DNA, 75 bp, Homo sapiens
agccaagccagcgacccaccatggagacccgctacaacctgaagagtccggaacaatatgatgcgtttgtgaagt

SEQ ID NO: 472786 - DNA, 82 bp, Homo sapiens
acccacattctccttccttgagatgatgtggaggatttgccctgccctggctgtggaataccctctaccatctgctttggtc

SEQ ID NO: 472787 - DNA, 82 bp, Homo sapiens
ctcctgtcagccagcactgggcaacctgggccctgtataacctcgtgtctgtctaccgtgggctggatgacactttgcacac

SEQ ID NO: 472788 - DNA, 100 bp, Homo sapiens
agtttgctattcgtatgtgtccaccgttgaccacaaaaaacatcaagatgtatcagccactgctggctgttgataggtgatcttcagctttgcaaactgg

SEQ ID NO: 472789 - DNA, 82 bp, Homo sapiens
ctggaaatcgtctcgaaactgctctcagagcctacccaaacgaggaagaccacaagttagattgccagttaaaacaagaggg

SEQ ID NO: 472790 - DNA, 51 bp, Homo sapiens
tggaacgagaccttcctctttgaaggtcggattgtttgtgctgaacgaact

SEQ ID NO: 472791 - DNA, 98 bp, Homo sapiens
agcagagatggagagctaaagtccaagagagtgttacagaaagggagagaataggaattcccacggagcctgactctgcagacagccatgcccaccct

SEQ ID NO: 472792 - DNA, 98 bp, Homo sapiens
ggaacactcatgtagcgagaacaccttcctgtgtgttatctcatctcatcctcacagcagcccagagagacagggactgagaaacggaaatactacca

SEQ ID NO: 472793 - DNA, 98 bp, Homo sapiens
gaagaggaggaggaagccgagtttggcgaggaggatcttttccaccaacagcaaacggggattcagcgtccgatcctttggaacagggactcacgtga

SEQ ID NO: 472794 - DNA, 100 bp, Homo sapiens
ctgttcagccacttgcaacacaatgtttccaactctctaacatgtttaaccctcaaacatatgggaaaatagtctccacaaaggcaattttggataagac

SEQ ID NO: 472795 - DNA, 50 bp, Homo sapiens
tggcatggcttctggggacctttacgagggtacttttgacttcagtgaca

SEQ ID NO: 472796 - DNA, 73 bp, Homo sapiens
gtcatcagctgtcattgagcaaggtggtttgtgatgaaaatggttccaagggctatggatttgtacactttga

SEQ ID NO: 472797 - DNA, 117 bp, Homo sapiens
tgacaagacgcggctgccgtacgtggccctcgatgtgctctgcgtgttgctgggaaacgttttgatggtaaattacaatcagaatcaactaataatggaaaaaataagagagatgta

SEQ ID NO: 472798 - DNA, 50 bp, Homo sapiens
gagagagtccgggagcccgagcttgagtgtactaatggtcacttgatgtg

SEQ ID NO: 472799 - DNA, 74 bp, Homo sapiens
tctgccggtgctgctgcgccctgcggagctccgaacacgtgcgcggcacaagagactatagtccccggcagatg

SEQ ID NO: 472800 - DNA, 100 bp, Homo sapiens
attcgtcgcggcggcggtggagatcgcaggtcgctcagggatctatttgtgatgactatatggcaactctttgctgtcctcattgtactctttgccaaat

SEQ ID NO: 472801 - DNA, 83 bp, Homo sapiens
acaggagaaagaacatttccatcaaaccctgagagctttattaccagacatgatctttcagccaggcagattcagcctctctc

SEQ ID NO: 472802 - DNA, 75 bp, Homo sapiens
agattcgcagtggtcgcttcttctccttgcatgaccgacggagcccagcaagccttgaggagaaccatggaaatc

SEQ ID NO: 472803 - DNA, 74 bp, Homo sapiens
ggatcgctgtgatcgtcacttgccatgaaaccgtctcaggggtctggtagttttggagccattctgggcagcag

SEQ ID NO: 472804 - DNA, 51 bp, Homo sapiens
ttgaagatgcaacgagtgcacttgagctgatgagattttctgaccacgggg

SEQ ID NO: 472805 - DNA, 137 bp, Homo sapiens
gcccggcctcatcgtgccggcttcgcgcgcgaacccggctttcgcatttgggaccctgcaggacaatgcagatcttcgtgaagactctgactggtaagaccatcaccctcgaggttgagcccagtgacaccatcgag

SEQ ID NO: 472806 - DNA, 82 bp, Homo sapiens
ctggttcagctcatacaacagcttcttaggtgcctaatggataagaacttcgttaggattgggaaatggtttgtccgaccct

SEQ ID NO: 472807 - DNA, 90 bp, Homo sapiens
tgttgatccttacggaagatgatggcttcaacagatccattcatgaagtgcatcagaggctccttgaaatgctagatacagagaaggaac

SEQ ID NO: 472808 - DNA, 74 bp, Homo sapiens
cttcgcagtctggaaagctttaggagttcacagtgtggatgagcttttagaaaagtacatggactcttatgata

SEQ ID NO: 472809 - DNA, 75 bp, Homo sapiens
acctttttgaagcctttgcaaaacctctgcgacttgatatcaaaagaaagctaactgctagatctgatcgagtta

SEQ ID NO: 472810 - DNA, 96 bp, Homo sapiens
ttcactaccgtagaagaccttggctccaagatactcctcacctgctccttgaatgacagcgccacagaggttggaaaactggttaaagaagctgcg

SEQ ID NO: 472811 - DNA, 90 bp, Homo sapiens
atttcacaaagaatttccttaagagctggactggtgctgttgggacattcgccagagccctggattgcagcagttctgtgaggcagccta

SEQ ID NO: 472812 - DNA, 50 bp, Homo sapiens
ctcactgcagcctcaacctcccaggagaatcgcttgaacctgggaggcgg

SEQ ID NO: 472813 - DNA, 75 bp, Homo sapiens
cgccgatggctccgacccgctctggatgttttcaaactgcagtaaacaatcaatctataagaccattgaaagtaa

SEQ ID NO: 472814 - DNA, 90 bp, Homo sapiens
tacagatcttgaagctgctgttgctgatgctttgtttcaggcgacctccaagaagggtatcagtcgactggataaacagatgagaaagtt

SEQ ID NO: 472815 - DNA, 100 bp, Homo sapiens
tgcagaaattgtctctgccttggactatctacattccggaaagattgtgtaccgtgatctcaaggtgagtgaactgccttcctccgtcatccataaggat

SEQ ID NO: 472816 - DNA, 100 bp, Homo sapiens
ataaagaaggtgtgattgaaccagacactgatgctcctcaagaaatgggagatgaaaatgcggaggggaggtaactccaggactatctcaggtggaatat

SEQ ID NO: 472817 - DNA, 74 bp, Homo sapiens
tgtgtctaaagagtgtaaagacacgcactcctggctttaaagtttatacttgcatttgccatacctgataagcc

SEQ ID NO: 472818 - DNA, 100 bp, Homo sapiens
aggctgctgggaggagagcataaggtaaaggccgaggggcaaagaaaaggaaagcatctggctctgaaaatgaaggcgattataaccctggcaggaaaac

SEQ ID NO: 472819 - DNA, 101 bp, Homo sapiens
tgctgggcgccttggaaccagcgtcagaaagaccctgctcctctgttctccgcagcctgatgggccatcgatgcacccctcggagctaatagcggagatga

SEQ ID NO: 472820 - DNA, 100 bp, Homo sapiens
ctcggcgatgagctaagacgctgtttcagagcgtttgggtcctctgaggccccttgaccaggccggacatggtggctcacacctggaatcccagaacttc

SEQ ID NO: 472821 - DNA, 82 bp, Homo sapiens
gccgcgaggaggaggccctgctggtttctgtgcggcgcgagcccagcattgacctgctgcaggccttcgtggagcactggaa

SEQ ID NO: 472822 - DNA, 96 bp, Homo sapiens
tgctcttcatcaccttcgtggtcgtctggtcctactacgcgtacgtggtggagctctgcgtgtctgctggcagaggactggccatttggagctgag

SEQ ID NO: 472823 - DNA, 99 bp, Homo sapiens
aagaaactgaggcctggaatttgattaactcattcaaggttacccagttgaaggacagaataacgggctcccagattcacaagccccaccaagaggatc

SEQ ID NO: 472824 - DNA, 100 bp, Homo sapiens
ttccaggctgtgcagagaagggtatctgaaaaggaaaaggagagtattgccagagcaagagctggatctcgtctttctgatgctgatatgctaactggtg

SEQ ID NO: 472825 - DNA, 82 bp, Homo sapiens
tgtagtcctgttcttctggctctaagatctgaatgttgtgaccactaatttggatcagttcttaagagcagccccggtaact

SEQ ID NO: 472826 - DNA, 90 bp, Homo sapiens
gcatcagtgactcacaaatcagcaacacagaatttctgcaagtaattggatctgcccaataacatgattcatcaggtgccaattaaatcc

SEQ ID NO: 472827 - DNA, 83 bp, Homo sapiens
cctgggtagaggccgggaagccacggttctgggacctggaggaaagatcctagggtgaaatgacaatggatgctctgttggct

SEQ ID NO: 472828 - DNA, 85 bp, Homo sapiens
ctggataccaaatagcagtggaaaccgggtgcaggttcgcagccctgtcaaccagctccgagccggcagcgaaacctgaagtgga

SEQ ID NO: 472829 - DNA, 100 bp, Homo sapiens
tatgctgctgtaacacagtttgaggttaatttcacctaccagtttttgaaaaagaagttctatatatttagccaatttatgtatgatgaacacatcaaat

SEQ ID NO: 472830 - DNA, 100 bp, Homo sapiens
agcttcgaaggcgaccttccttgctttcagaatttcacccaggttctgacaggccaagaataaggagacgggtgctttggctgcggccaaagtcattgaa

SEQ ID NO: 472831 - DNA, 75 bp, Homo sapiens
aaggtagagatgatgaccccccactacagtgagggccccaaggctgttgcagctcctcgacctgatcggttggtc

SEQ ID NO: 472832 - DNA, 82 bp, Homo sapiens
agcagcacttcagattctgttgatgaagttgtatcacggactgattcaccgagcccaaccgtactcaactcacatatttcta

SEQ ID NO: 472833 - DNA, 74 bp, Homo sapiens
gtccctgaagagggaagacacgcggaaacagctcaggagcatctatcggctgcacgccaacatcaacacaggcg

SEQ ID NO: 472834 - DNA, 100 bp, Homo sapiens
ttactttgtcttggtatactacatggcaaaatgggaaagcattcgttcagtcagagagcataatagaagtactgcgttttgatgatggagggctactaca

SEQ ID NO: 472835 - DNA, 50 bp, Homo sapiens
ctcccaaagtgatgggattacaggtgctgtggctcacacctgtaatccca

SEQ ID NO: 472836 - DNA, 75 bp, Homo sapiens
ttcatgcactctcccctcccgcaggaattgcattttgtgaaaaaagaacaagaattttctgcaaggatcatatct

SEQ ID NO: 472837 - DNA, 82 bp, Homo sapiens
ggaagaggagaaggaaattgtcccgaatccctgcagggacttttaaaagctgaagagcacagctggtcccttgcggaattgg

SEQ ID NO: 472838 - DNA, 75 bp, Homo sapiens
ggcagggccagcagcaggcgggagacactgctctagtaccagtcctggctctttgccccaggagcaaattaaaag

SEQ ID NO: 472839 - DNA, 82 bp, Homo sapiens
ctgaggacaagtaccctctgatcatggttcctgatgaggagtgtacctcacagccttctaggatctccagagtggacaggaa

SEQ ID NO: 472840 - DNA, 51 bp, Homo sapiens
ccgaggatgataaacacccaggacaggtcttcagaactactagcagataat

SEQ ID NO: 472841 - DNA, 100 bp, Homo sapiens
cgcctgccgcctccggagcgcctgtgtggttgatgcggatgaaattaaaaggctaggaaagagatttaagaagcttgatttggacaattctggttctttg

SEQ ID NO: 472842 - DNA, 100 bp, Homo sapiens
gcgctgttttcgtgatcttcagaccccaggttctttgctcaccatggatgatgatatcgccgcgctcgtcgtcgacaacggctccggcatgtgcaaggcc

SEQ ID NO: 472843 - DNA, 75 bp, Homo sapiens
aaggattccaagtaactcttatttgattgtaaaccatggctgtgtggatacaagctcagcagctccaaggagaag

SEQ ID NO: 472844 - DNA, 76 bp, Homo sapiens
ctttatcccagtgtttccaactgtacaccaaagaggagcgggttatcaatactctggctgaccatcatcatcgtgg

SEQ ID NO: 472845 - DNA, 74 bp, Homo sapiens
gagcagcgcccctcggcgccccgccaagggcgcagattctttctgtacgggggggccctcagcctcttggcctt

SEQ ID NO: 472846 - DNA, 100 bp, Homo sapiens
gggatagagactgcatgctgatgaacgcacctgcataatgttacgagatgacttccgacaaaaccccacagatgttgtagtggcagctggagagcctgca

SEQ ID NO: 472847 - DNA, 82 bp, Homo sapiens
aaaatgcaaaaaaggaggccaaagactttctgtgcttgaggaacttgttaatagcggacgcttacgaggcactgtggttggt

SEQ ID NO: 472848 - DNA, 75 bp, Homo sapiens
aggaagtactcatcgactgatgtggcagactttgctccctggcaaaagtgttacacataatattgcattacttcg

SEQ ID NO: 472849 - DNA, 75 bp, Homo sapiens
gggcagaggcttgggccgccgagctggacccggaccggttttgggtgaattttgaagtcttcatcagtatatcca

SEQ ID NO: 472850 - DNA, 83 bp, Homo sapiens
gagaaacctggatctgcgatctgtttgtggtacaccaggggttggaaaaaccacactaggcaaagaacttgcgtcaaaatcag

SEQ ID NO: 472851 - DNA, 98 bp, Homo sapiens
cccgataagcgctttcgcttggcgctgggcagcttcgtggaggagtacaacaacaaggtttggtgcacctcgatttggaggaagtagggcagggccct

SEQ ID NO: 472852 - DNA, 82 bp, Homo sapiens
cttagattctgggaaatccacaccaccacgtaaggctgcttttgtcagagacgttttattaccgggagaatgggatgtatgt

SEQ ID NO: 472853 - DNA, 76 bp, Homo sapiens
ccaggttacatacagcttacatcttgcatcctcaagcgtggaaaagcgagattgtctttgaccatttgctatggac

SEQ ID NO: 472854 - DNA, 133 bp, Homo sapiens
caggctatctgaacacggtgactgtctctccagatggatccctctgtgcttctggaggcaaggaaactggcccagcagatcaagcaggaagtgcggcaggaggtagaagagtgggtggcctcaggcaacaaac

SEQ ID NO: 472855 - DNA, 75 bp, Homo sapiens
tgtccgccctgctcacccggatccagcgctagggctgctggccagaacaaacaacattctattaccaagaacacg

SEQ ID NO: 472856 - DNA, 75 bp, Homo sapiens
taaagtattaccatgcacagtgcaagagtatgctgctgctgttccgctttgcgtcctcgctacaaacgcctggtg

SEQ ID NO: 472857 - DNA, 90 bp, Homo sapiens
cccgcctcggcccgcacgccaagcacgtggtgggctatggccaccttggactggaaggatcaccagcacatatgcggccagtcagcagct

SEQ ID NO: 472858 - DNA, 95 bp, Homo sapiens
tgaagcagatgagttgagtggagatgcttctgtggaagatgatgcttttatcaaggcgtgccttcagatgctgattcttctgctgccagtaataa

SEQ ID NO: 472859 - DNA, 100 bp, Homo sapiens
gcaaacatttttccccaaccataagccaatgtgtcacgaagctgccgtctccatctactgcagcatgcgcaaacggagcctctcccactgggccctggtg

SEQ ID NO: 472860 - DNA, 100 bp, Homo sapiens
taatcctactcagaagaacttgtacagagatgtgatgttggagaactatagcaatctggttttcttggtgatacatttgatattgcctggaatggcagaa

SEQ ID NO: 472861 - DNA, 90 bp, Homo sapiens
cttgctctgagctgcggttactgtgtccaggccccgggttctcaggttcaaaccttgtactactcagctgatcacaagctgcttgatggg

SEQ ID NO: 472862 - DNA, 101 bp, Homo sapiens
ggtccctggatccagtgctactgctacaaataagttgacttcaagcctcgagccagcatggatactgtccatcacatgttactttttggatgcaatatgcc

SEQ ID NO: 472863 - DNA, 100 bp, Homo sapiens
tgtgtgtggccagtcatttaccaccaatgggaacatgcacaggattttttatcaagcagaaatgcatcgaacaacgagaatcaagatcactgagctaaat

SEQ ID NO: 472864 - DNA, 75 bp, Homo sapiens
ccggagcaggcgaggtggccggagccgtgtggaccaggaggagcgctgggtgagcccctccagactccgaatagg

SEQ ID NO: 472865 - DNA, 100 bp, Homo sapiens
gaaagatggaagactaccaggctgcggaggagtggaagacttataaccctgccttctcccggttggaaatctggttccggtttttctttgtggtgctcac

SEQ ID NO: 472866 - DNA, 75 bp, Homo sapiens
aacacctctgccgctgctaaaaggagatacaactcgtcaacgaatcaaattcagtgatgacagagtatgcaagag

SEQ ID NO: 472867 - DNA, 100 bp, Homo sapiens
cttcaactacttcttctacaacaagcggctcaagcgaatcgtcttctttagctgccgttccatcagagcactgcagtttcctcctgaaggctggctccgg

SEQ ID NO: 472868 - DNA, 75 bp, Homo sapiens
cctcccgggtagctgggactacagagataattgacgaccttgccaacctagtggagaacacagatgaaaaacttc

SEQ ID NO: 472869 - DNA, 100 bp, Homo sapiens
ttccctttggatgtagcaaggaagaaattgttcagttcttctcaggaagcctgcctggaaagatgggtccactgccacgtgtgttctggctgtagacaac

SEQ ID NO: 472870 - DNA, 88 bp, Homo sapiens
aatggcccacatcaggacagctgttccttggccatcccaaagctattctgggggcaacagaggtggagcagctcctgtacgaaagccc

SEQ ID NO: 472871 - DNA, 93 bp, Homo sapiens
aacctgggcgagcagcggcgggggcccgagggaataccctctaccatctgctttggtcagggtgccgctcgaggatttaaaagcaacaagaag

SEQ ID NO: 472872 - DNA, 100 bp, Homo sapiens
cgctcatctccatcgtgaccaaggagaagggcatgatttcaccttcacttgaactgcttcattcaggactctgcaaattccctgaagtagaaggaaaaat

SEQ ID NO: 472873 - DNA, 82 bp, Homo sapiens
ggagccggagctgggcgcggattcgccgaggcaccgaggcactcagaggagaagctccaccatgaggcgaggtggatggagg

SEQ ID NO: 472874 - DNA, 100 bp, Homo sapiens
cgcctccgaagatgggggatttctacgacccggagcacccgacccctgagaaccctaaggactctgcaatatgaataattccctagagaacaccatctcc

SEQ ID NO: 472875 - DNA, 100 bp, Homo sapiens
ttgaatgttttatgaatgatgttgatgtatctggaactatgaatagcttcctgcctgacacagctcacttcaagaagtgcacaatgtcagaacgtggaat

SEQ ID NO: 472876 - DNA, 82 bp, Homo sapiens
gttcgtgtcgctgctgcaggaggccaaggacggcgttctggatctcaaagcggtgctggagaatctggtaaaagcaccattg

SEQ ID NO: 472877 - DNA, 78 bp, Homo sapiens
tagtaagcttgggaggtaggagttggcgagtagtagcgaggagacgaagatcaagcttcaggagtctccggaagacat

SEQ ID NO: 472878 - DNA, 75 bp, Homo sapiens
gttcgagatcaccttcgagtgcatcgaggacctgtctgaaggagccgaggaggtgctgctgctggcccggcggac

SEQ ID NO: 472879 - DNA, 100 bp, Homo sapiens
gcctgagtagccggtaacaaacgagggttcccgggattggaccgacgcagccatgaaagctgtatgtgatggcttctgtgtttgtctgtctactcctttc

SEQ ID NO: 472880 - DNA, 51 bp, Homo sapiens
cggcctcctcgtggagcggagcaagggttgcagtgcacgaggggattaact

SEQ ID NO: 472881 - DNA, 75 bp, Homo sapiens
aacaaaactgcaccttggaaattgagagctgacctgaaggagaagaaggagaaggtggaggagaaggcaagccgg

SEQ ID NO: 472882 - DNA, 75 bp, Homo sapiens
attcgcagtggtcgcttcttctccttgaaaatgtatggagatctagatgtcttattcctgacagatgaatacgac

SEQ ID NO: 472883 - DNA, 51 bp, Homo sapiens
ccagcccccatggcttcagaagaggcctgtgacactcctctgcaccccctg

SEQ ID NO: 472884 - DNA, 91 bp, Homo sapiens
agcgcgtgcccgcgaggagccgccgcgcgcccgcgccctccgcgcgacgccaggtgatgtgtccaatctagatcccaacttctcatttgaa

SEQ ID NO: 472885 - DNA, 100 bp, Homo sapiens
acaaaggcaaaggattcggatttattaagcttactgttaccaatgctgtggtcacagtgccagcttactttaatgactctcagcgtcaggctaccaaaga

SEQ ID NO: 472886 - DNA, 51 bp, Homo sapiens
gtcaacattgcccagcaagtggtgctggagaatctggtaaaagcaccattg

SEQ ID NO: 472887 - DNA, 100 bp, Homo sapiens
atccaagggacattgccactgactgtccagaaggtgttggcatcccaagcctgccatgcaaatgcagccctgaggatttggctactgcatataacaacag

SEQ ID NO: 472888 - DNA, 100 bp, Homo sapiens
tgctctcccggcaaggaaacttcgcaggctggcttcgccgtggcccagtgcataaaccagcacagctccccgtccctgtcctcacagtcgccaccctccg

SEQ ID NO: 472889 - DNA, 101 bp, Homo sapiens
ccgcgggtttccaccccggcgggagctgtcaggttggctccgcgcaggagtagggctgattggagccattgtacagtgtcgggaacataccaggacactga

SEQ ID NO: 472890 - DNA, 80 bp, Homo sapiens
ctagttaggattttattactggcagcatgtatatcttttgtttatgcatgtatgatggttttcttcttgagcaacatgat

SEQ ID NO: 472891 - DNA, 127 bp, Homo sapiens
tgaagatggacagaaaagctgtggagacccacctgctcaggaaccctcaccttgtttcggactatagcaagctgcctcgtacccagccagacggcaccagcgtccctggagaaccagcctcacctat

SEQ ID NO: 472892 - DNA, 74 bp, Homo sapiens
tatgatacaatcttgcgtgtcctgggctctaatgtcagagaatttctacaggttggactccatgaaagaattgc

SEQ ID NO: 472893 - DNA, 90 bp, Homo sapiens
taaaaactgtattcaaaaatgaaaagagaatcaagcttcagatttggggacaagaatccttcaagaaacaggaaaaaactcctaaaacac

SEQ ID NO: 472894 - DNA, 73 bp, Homo sapiens
gtgattgaggacaagaccatcgagctcatggactgcaatgtgccgatcttagctgctgcctgagaggatgtct

SEQ ID NO: 472895 - DNA, 90 bp, Homo sapiens
aaagcagtctaaacctgtgaccacccctgaagaaattgcacagtatcagcagcgtcgccagcaggagaatatgcagcgccagagccgagg

SEQ ID NO: 472896 - DNA, 100 bp, Homo sapiens
gtcagatgtcagaggaggaattacaacttcattttacttatgaagaaaaatctcctggcaattacagcgtggtgtccctcgtggccgttcacccctccac

SEQ ID NO: 472897 - DNA, 100 bp, Homo sapiens
acattaaatgcaatagcccttcagtactgttgtacgggagaatgaagttgaagaggtaaaagaggagggtccaaaagagatgactttggatgagtggaag

SEQ ID NO: 472898 - DNA, 100 bp, Homo sapiens
ccgtgtgggtggacgtcaaggactcctgcgtgggctcggcgtggtattcagcaacggggagcgcgccaagcagctccggcgcttctccatcgccaccctg

SEQ ID NO: 472899 - DNA, 100 bp, Homo sapiens
ggattcgctcccagagcagctgcggccaggggacagtgggaaggtggaccctgtctacgagaccctgcgctatggcacctccctggcactgatgaaccgc

SEQ ID NO: 472900 - DNA, 50 bp, Homo sapiens
cctggtggaggtgttaaatgaaagctgaccccgcactacatctacccacc

SEQ ID NO: 472901 - DNA, 95 bp, Homo sapiens
gagaactatagcaatctggttttcttgggaaataatgaagatgtttcattttcaagaccagcagatcttgaccttattcagtcaactccctttaa

SEQ ID NO: 472902 - DNA, 100 bp, Homo sapiens
cggtcaaaggatgctgagtccggagcgcctagccctaccggactacgagtatctggccctggcaggtgcccggcccgccccccaccctccggctcccagg

SEQ ID NO: 472903 - DNA, 100 bp, Homo sapiens
tctccatccatccctttctgatactttccctgaatcccagtctggaaagggtagtaaaagaggcgggttgaaaggattgttgacaaaaggaaaaataaaa

SEQ ID NO: 472904 - DNA, 73 bp, Homo sapiens
cgagcgggacagcgcggcggggagcgacgactaatgatgctggctactttaatgatgaaatggcaccaattga

SEQ ID NO: 472905 - DNA, 75 bp, Homo sapiens
caccttcacctgccttggtcatggctctgctattctccttgatccttgcgcgttcgttcacatagctcccagttt

SEQ ID NO: 472906 - DNA, 98 bp, Homo sapiens
ttaaacttcagcgacaactgagtcaggatgattgtaagttatggagaggaaacctggccagctctctatcggctccagggcccacaacggcagtgtcc

SEQ ID NO: 472907 - DNA, 83 bp, Homo sapiens
ggggattgtgggagtctccgcgtcccgctcgctgggagagaggctctacagattctcccctgcccctggagaaggaggagcag

SEQ ID NO: 472908 - DNA, 75 bp, Homo sapiens
tggaacttttaagtggagtggtggatcagaccaaagatggatgaggggtatgtctgataagtcactccgactagt

SEQ ID NO: 472909 - DNA, 100 bp, Homo sapiens
tgaaggccagagttcttttactgtctcatcttgctagaatgaaaattcctgagacccttgaagaagcttcaagtctggatagtcagaagtttgtgacagt

SEQ ID NO: 472910 - DNA, 83 bp, Homo sapiens
cccttgttcccccaaatgtctgactctgactctcggactgagaaacgcaagactcagcccacctgcacccaggtgaaataaac

SEQ ID NO: 472911 - DNA, 80 bp, Homo sapiens
ggctttaccatctttgtggctgtgcttgccaggcctggctccaaccgcgctgagcacgttcttccaagaaaccaacattc

SEQ ID NO: 472912 - DNA, 99 bp, Homo sapiens
gaattacccatttcaaaggtggatacctgaaaggtctcctaaccgctgcagagagtgctttcttccagaggctccccaaaaaggccacaaagacagccc

SEQ ID NO: 472913 - DNA, 75 bp, Homo sapiens
agctgaatgtgttactccattgctgaggagtgaaataatagtgtaatccttgctgatgaaatgggcctaggaaag

SEQ ID NO: 472914 - DNA, 96 bp, Homo sapiens
ctcctcttttgacttggactatgactttcaacgggactattatgatagtccagttacaacacagggatcacaacaaacacaaccgccacagaagca

SEQ ID NO: 472915 - DNA, 83 bp, Homo sapiens
ccagagccatcgagagcagccgcgacctgctgcacaggatcaaggtgctcttacagcctgttccaagtgtggcttaatccgtc

SEQ ID NO: 472916 - DNA, 104 bp, Homo sapiens
cacaaaagaaacctggaggctcccctcctggggcacccggcttctgctccaaccagctttatcttcaagccaggatgaagggagactgggcaagactcttacgc

SEQ ID NO: 472917 - DNA, 100 bp, Homo sapiens
cactggacaccttcgtcccctttgatccctgtgtgctgaagaggtcagcagatccggaagctcatcaaagatgggctgatcatccgcaagcctgtgacgg

SEQ ID NO: 472918 - DNA, 82 bp, Homo sapiens
catcaaccagctgccgccgtccatcctgctcaagtgggtaattccagaattgattggccataccattgtcactgtattactg

SEQ ID NO: 472919 - DNA, 100 bp, Homo sapiens
ccggaaccgagatgcccctgaggggggctttgatgcagtactccaggcagccgtctgcaagcaatcagaaacggagactgttcatctgtttatcccagct

SEQ ID NO: 472920 - DNA, 76 bp, Homo sapiens
cacaacttcagtctattcatgaaaatgtaaaggttgctccttgagggcaggacagttcttatggctttatccgttg

SEQ ID NO: 472921 - DNA, 74 bp, Homo sapiens
ttgatagcgatgaggacttcaatgctttcttcaactgtggcagctgccaacaagaagcattagaacaaaccatg

SEQ ID NO: 472922 - DNA, 75 bp, Homo sapiens
acaaattcatcccagaaatctaagagaagttggtgagatggcaaagcagtatatagagaaaagtcttttggttcc

SEQ ID NO: 472923 - DNA, 75 bp, Homo sapiens
attgagacctacgtcatggacagccggatcgatgtaccaaagcttcagcctcatccgggattggagaagaaagaa

SEQ ID NO: 472924 - DNA, 82 bp, Homo sapiens
ctcgatcttgggacccaccgctgccctcagctccgagtccagggcgaggccccttcccagctgcctgcctgccctagccagc

SEQ ID NO: 472925 - DNA, 83 bp, Homo sapiens
gctaaagcagcgtgcgttcagccctgggcatttgacattgtgcagcaaagaaatggttatggagaagcccagtccgctgcttg

SEQ ID NO: 472926 - DNA, 75 bp, Homo sapiens
ggccagtctggagacagtcaaggttgggggccgtcccgctcctaaggcaggaagatggtggccgcaaagaagacg

SEQ ID NO: 472927 - DNA, 51 bp, Homo sapiens
ctctgttctgcccggaggagccgcccggtcttactgaagtaacacaaagct

SEQ ID NO: 472928 - DNA, 75 bp, Homo sapiens
taggacggaaacgccgaggaacccggctgaggcggcagaaactgattattgatgagaagaagtattacttatttg

SEQ ID NO: 472929 - DNA, 102 bp, Homo sapiens
aatgcatgggaagaaacttccatgaaaattgctacaggtgtgaggcattgaacctggccacatcccaggtaccgtgaacatccccttcacagacttcctgag

SEQ ID NO: 472930 - DNA, 101 bp, Homo sapiens
gggcagggcagacgccgtgtgtctgtttcacggagctgcggcgccaagatgagtggagaggagaacccagccagcaagcccacgccggtgcaggacgtaca

SEQ ID NO: 472931 - DNA, 90 bp, Homo sapiens
tcaaatccgtgtcggagtccttacagattacaggtccaccaggttgtggaaaaactcagttttgtataatgatgagcattttggctacat

SEQ ID NO: 472932 - DNA, 109 bp, Homo sapiens
cgacaagaaaaacaatcgcttcaatgatgggaaggtggatcccgccgggaggtactttgctggacacaactcagatgggaagttcatcgcccgggcacagcggatagag

SEQ ID NO: 472933 - DNA, 100 bp, Homo sapiens
actcaactccacagcagctgatgaggtgacagctcatctggcagctgcaggtggataattactgtaccttcctcatggaaaaagttttatttaaagtgtt

SEQ ID NO: 472934 - DNA, 75 bp, Homo sapiens
catgaagaaactcaatgatcgtgtcatgagaggtgtcaaattgagaaccaggtagatccccaccacctacagtaa

SEQ ID NO: 472935 - DNA, 100 bp, Homo sapiens
cacagagccgcgccgcccgcaccacagaccttcgcctcgccccgccggttcctcaccctcggggagcaacatgggtctcggacagcccgggagacgagcc

SEQ ID NO: 472936 - DNA, 51 bp, Homo sapiens
ttcgcagtggtcgcttcttctccttggaagcaaaatgtggattcagcaaac

SEQ ID NO: 472937 - DNA, 73 bp, Homo sapiens
ccgcgagcgactgcggcgccgagccggagaactacgatgacccgcacaaaacccctgcctccccagttgtcca

SEQ ID NO: 472938 - DNA, 90 bp, Homo sapiens
ggcagccaaaagattgaaggaaggtgatacaatgatggggcagcaagtggccaagcagtccttgatggagatgcagagtcgtcatggggc

SEQ ID NO: 472939 - DNA, 50 bp, Homo sapiens
cctgcctctccctgggctctgaatcaggaaacccaggcccaacggcaggt

SEQ ID NO: 472940 - DNA, 90 bp, Homo sapiens
taattaactcatgtctctctctcttttctttcagtctgcaactgtgtctgatggcgaaagcataacccctactgtagaactaaatgcact

SEQ ID NO: 472941 - DNA, 82 bp, Homo sapiens
cacagcatctgaggagggttatgaccatctggcagatgcagaaacaggcccagagaggtgtggacactgccagcggctgcag

SEQ ID NO: 472942 - DNA, 75 bp, Homo sapiens
agcgggagctggacggcgagcgcgagcggcgcgagaaaggtttggaaatcccttgtctccaggttgctgggattg

SEQ ID NO: 472943 - DNA, 75 bp, Homo sapiens
cgcgaacccctctgggatccccgccgctctgtctacaacccgaggactttccttatcccagttgattgtgcagaa

SEQ ID NO: 472944 - DNA, 74 bp, Homo sapiens
taagagatgtgattaatgtattccaccacctccgccagttaagaggaaaaagttggtagctggcagtgttgtga

SEQ ID NO: 472945 - DNA, 100 bp, Homo sapiens
gtctgggcttcccgggcgagcggtgggacggttcactgggaaacatcgatgacctggcgcagcagtatgcagattattacaacacctgtttctccgacgt

SEQ ID NO: 472946 - DNA, 100 bp, Homo sapiens
ttggagacccagtctgagtgtctgtccccagagcctcagtttgtgcaggacaccgacatggaacagggactcactggggccccttggatctcccttcgtg

SEQ ID NO: 472947 - DNA, 51 bp, Homo sapiens
atgaagatgaaagagactgcaggatctgtgccagttcagaagcaggcgagc

SEQ ID NO: 472948 - DNA, 82 bp, Homo sapiens
agaaatcacattggaccctcctcccaactgtagttgtctgttttgatgccaagataaactttgatgacaacgcagaattccg

SEQ ID NO: 472949 - DNA, 100 bp, Homo sapiens
tcacccaatggatccattcctcccattcatgtgcctccaggttatatctcacaggtaaaaagatggcctatcagaaggtccatgcagatcaaagagctcc

SEQ ID NO: 472950 - DNA, 75 bp, Homo sapiens
acaaatactactacatcccgcagtacaagaactggagaggatgtcacatgtacttcagtttgaggataaaagcag

SEQ ID NO: 472951 - DNA, 100 bp, Homo sapiens
acagagcgctactcctggcagtgcgtcaatcagagcgtcctgtgcgtttccctgaaacctgggctcttgaagacgcatcactggagcagatggataatgg

SEQ ID NO: 472952 - DNA, 97 bp, Homo sapiens
cacccacatacaggagacaccaaagaagagaaagacaaggatgaccaggaatgggaaagccccaggtcggtgagctggtaaaggttacgaagattaa

SEQ ID NO: 472953 - DNA, 100 bp, Homo sapiens
ccgaagcccaaaaagctgaaggtggaggcgccgcaagcgctgaggtttttcgttggaatatacgttgcacatttatggcgattctgagtgtgagggcaga

SEQ ID NO: 472954 - DNA, 75 bp, Homo sapiens
gacccaggcctgctcggccctcacaggatgaaacagaagctgagcgggagaagaagcgtctagaacgagccaaga

SEQ ID NO: 472955 - DNA, 51 bp, Homo sapiens
aacagggttgcaaactgtcttccagaggagacacaccttgaagaaacaaca

SEQ ID NO: 472956 - DNA, 100 bp, Homo sapiens
ccacgccgcccaggagacccctctgctgcaccacttcatgacttaattcagtgcacaaatgagatgaatgtgaacatcccacagttggcagacagtttat

SEQ ID NO: 472957 - DNA, 101 bp, Homo sapiens
caatgacgctttaaagagagataaagatgccatttatgggtgggatgtgtgtgggctgaaattccgagctgcggttgtgcatgagaatacacccttcgtgg

SEQ ID NO: 472958 - DNA, 76 bp, Homo sapiens
ccccaagacagagcgctactcctggcagtgcgtcaatcagagcgtcctgtgcggcagctgtgcctcctgctgaatg

SEQ ID NO: 472959 - DNA, 49 bp, Homo sapiens
cccaggccccgccgaggcggccagctagttcttctggagctcaacttct

SEQ ID NO: 472960 - DNA, 82 bp, Homo sapiens
atttttattaactggaggcgacggcggctgcggcggcggcgggaccccgccatcatgaccgggtcctataacaacttcttca

SEQ ID NO: 472961 - DNA, 50 bp, Homo sapiens
gatggagcccagatccgaatccaggtgcacttttcaaggagattgtgtac

SEQ ID NO: 472962 - DNA, 98 bp, Homo sapiens
tagttcgaactatgtggaggagatgtactgtgcttggctggaaaaccccaaaagtgtacataagattcatgttacatgtaaagctgtcctcatttgtg

SEQ ID NO: 472963 - DNA, 100 bp, Homo sapiens
accatttattcagcactcagaatgctccaggcagtgtaatctcattccatcttcattcatgactccagacagtccaggccttcgcgtctcctgcgccagc

SEQ ID NO: 472964 - DNA, 74 bp, Homo sapiens
ctaaacttttgagatagatttggctctagacaaaatgtttcacttttgggtaaatacattcttcataccaggac

SEQ ID NO: 472965 - DNA, 50 bp, Homo sapiens
gggattttgtcagcttgtcgtcaagagagcgcgccagccttggaaggaat

SEQ ID NO: 472966 - DNA, 50 bp, Homo sapiens
gcctcccaagtagctaggactataggtccatccaagctgaatgatcgcgc

SEQ ID NO: 472967 - DNA, 90 bp, Homo sapiens
tactcggaaggtcagttctgatacattggagaccattgctcctggaaagaagcacttgtaaggaaatatagcatccattgtgaaagtgga

SEQ ID NO: 472968 - DNA, 83 bp, Homo sapiens
ttggagaagaatggaaagagaagactgatagagacttcgttaaggaaacccttttccaaagagaaatgaagaagaaaactgta

SEQ ID NO: 472969 - DNA, 74 bp, Homo sapiens
cacagctaagacgccaggacccactggaagcctagaaatgggcatttgcacgccaaaggcaaagaagaaaaaat

SEQ ID NO: 472970 - DNA, 90 bp, Homo sapiens
gctgggcccactgcctgatgatgatgacatggcttctcccaaactcaagctgaggcttttttccagacttcaagctcccattccaacagt

SEQ ID NO: 472971 - DNA, 99 bp, Homo sapiens
cccgtccccgccccgggggccgccgccacccgcctcccaccatggctctgaagagaatccacaaggtttggacatatttgactcttttccccccaggtt

SEQ ID NO: 472972 - DNA, 100 bp, Homo sapiens
cgtggtgtgcaccggctggctgaggaaatcgcctcccgagaagaagttgaggcgctatggatacttcaggccagggaagattttgtaccatattccgctc

SEQ ID NO: 472973 - DNA, 80 bp, Homo sapiens
gccttcctgtggcaggagagacaacaaagcgctattatcctaaggtcaaagggaagtgtaccactgaccacatctcagct

SEQ ID NO: 472974 - DNA, 48 bp, Homo sapiens
tgccaggagagcaatgcaaaagtgtaaactggagttgctggtgggcag

SEQ ID NO: 472975 - DNA, 100 bp, Homo sapiens
tccctttcgagttgcagcttacaacaagaaaaagaagcgtatggactactatgactctgaacattgcagagctattttgctgcatgtgaggatgagatcc

SEQ ID NO: 472976 - DNA, 100 bp, Homo sapiens
cagaagtgatcgctcagctggagaacgcggctaaagttctgatgggagccaagagaaaggctgtatcaggataccagtctcatgatgatagttctgacaa

SEQ ID NO: 472977 - DNA, 75 bp, Homo sapiens
agtatctccgtttcctggatgtgaacagcttccttctcctacatctgcttgctgctgggatacccgtcaccaccc

SEQ ID NO: 472978 - DNA, 105 bp, Homo sapiens
cgccgcggggcagccgccgctcctccgggctgcatgaaagcggttacgatgctggcaaagccctgcagcgcctggtgaagaagcctgtgcccaagctcatcgaga

SEQ ID NO: 472979 - DNA, 90 bp, Homo sapiens
cttccatttgtgtgtgatgattgttcaggaatattttgggattcctgtcagacctgctgaagaaggcgaaccggccgtacgatgagccca

SEQ ID NO: 472980 - DNA, 90 bp, Homo sapiens
ggatgagctatgacttgctaaacaatctgttgacttacagattccagtctgctgttagatgattattcatccaagttgagccccaaacca

SEQ ID NO: 472981 - DNA, 75 bp, Homo sapiens
aactggccctggactacctctgcagaaaaatggctacaaacttcctagcacatgagaagatctggttcgacaagt

SEQ ID NO: 472982 - DNA, 100 bp, Homo sapiens
acaaagtttgtgcttcaggaatgaaagccatcatgatggcctctcaaagtcttatgtgtggacatcagtcatattccagagagactctgtgaaagtaaag

SEQ ID NO: 472983 - DNA, 98 bp, Homo sapiens
ccagcttagcttctgtcctaaagcccctggcaaccgtgtcaaagataattttgactatatacaatatgaggacctaacctctggatatgattcgacta

SEQ ID NO: 472984 - DNA, 100 bp, Homo sapiens
tgtgagctctgcaagtatgacttcataatggagaccaagctcaaacccctccggaagagctttgaaggtacaatcgtgtgggagagccaagacctccacg

SEQ ID NO: 472985 - DNA, 90 bp, Homo sapiens
accgtgaagattccaagttcaggagaactcgaccgatcctgtttgaccaaactcagagatcaattaaggcacagcttcagaactttgtta

SEQ ID NO: 472986 - DNA, 100 bp, Homo sapiens
aagttaaaaccaaagtgtcagcacctcaacaacatttttttttggcttaacaaaacatcaaacggcatacaaatgattctcagagagagttcaacagcag

SEQ ID NO: 472987 - DNA, 100 bp, Homo sapiens
aacttgacctcggtcccagtgccccacaccaccgcactgtcgctgcccgcctgccctgaggagtccccgctgcttggagaagatggtataaactggtcca

SEQ ID NO: 472988 - DNA, 75 bp, Homo sapiens
cgggcccccaggcatggctagctcggcgccatgtcagaaccggctggggatgtccgtcagaacccatgcggcagc

SEQ ID NO: 472989 - DNA, 100 bp, Homo sapiens
aagaaattcgacttcagtaatttgagtagtagcaaagccttctagacaagctcagtggaatctgaagggcccaccccatggaggaatgctgggtgacaga

SEQ ID NO: 472990 - DNA, 100 bp, Homo sapiens
gcctgtggaaccgttgccgactgcacatttgaagagctgtgtgagagaggcggcgactggcggcgcgatggacctgaccgggctcctgctggacgaagaa

SEQ ID NO: 472991 - DNA, 83 bp, Homo sapiens
caagtttgcagatcgggagcgcaaggtcgccctcaaggccatgatcaaaacactcggtgaaatacctggagtgctcagctctc

SEQ ID NO: 472992 - DNA, 115 bp, Homo sapiens
agcatgaccagaccatgttagataaacttgtggatggacttgctacctcttgggtgaactctagcaattacaagagtcaacctatttgatttcttgacaagaccacaatctgatc

SEQ ID NO: 472993 - DNA, 98 bp, Homo sapiens
ggatttgcaacgaattcaatgaacattcctgctcttgttggcaaacaacatttcattgaattggatgaaaatagacagagattattgcagaaatgcaa

SEQ ID NO: 472994 - DNA, 100 bp, Homo sapiens
gacatgcctttgtgcctttcccaggttcagaaacagcatatttagaaaacagatctaattctagacctttagaaagcaaaagatacggatcaaaaaagaa

SEQ ID NO: 472995 - DNA, 83 bp, Homo sapiens
ccgagaactggctgaagccgatgaacagcgccgggatccaggtgggaggaggagctcgccaagcgcatgaaccttcagaccat

SEQ ID NO: 472996 - DNA, 50 bp, Homo sapiens
ctcctggggaatgtgcctcagcttctgaattctgcttggtcagaatcgtg

SEQ ID NO: 472997 - DNA, 144 bp, Homo sapiens
cagtgcctgatcctgcaacacgagcatggcatggccccgcaggtcttcacccaggccctggagtgcatgcgcaggaagatgttaccgagtacttcagtgaattccttagtgcaggggaacggagtcttgaattccagggatgcg

SEQ ID NO: 472998 - DNA, 74 bp, Homo sapiens
gtagagtgaaaagtgcagctgcaaccaatctctcagccctgtattatatgggctaatttcatataccgagtatc

SEQ ID NO: 472999 - DNA, 98 bp, Homo sapiens
gatgaccacaagctgtccttggatgagctgggccgcaaataccaagtggacctgtccaagctcgccctcccctacctgcggaagagtcaagggaatgt

SEQ ID NO: 473000 - DNA, 90 bp, Homo sapiens
cagactgctggctgtgtgtgctgcaaaccgagacaagttcaccccgaagtctgccgaatagcctaacatggcagaccagagacagcgctc

SEQ ID NO: 473001 - DNA, 75 bp, Homo sapiens
acagcatgcctcaccaagtcacatgacaagcagagatacaactcgtcaacgaatcaaattcagtgatgacagagt

SEQ ID NO: 473002 - DNA, 100 bp, Homo sapiens
cggctgctggatggaggggattttgtcagcttgtcgtcaagtactatactggcaattgctggagaagattttgcaattgttgcttctgatactcgattga

SEQ ID NO: 473003 - DNA, 83 bp, Homo sapiens
gcagaagtcattttaaactatggacgactccgaggaacattgagtttggtgccctggttgtcagatgttggaaagcagtagga

SEQ ID NO: 473004 - DNA, 98 bp, Homo sapiens
cgcggcggccacagctggggccggtggctccggaacgtaggtgacctcacagtgactcaagctaccacttactgttgattgtgacgaaatgccagctg

SEQ ID NO: 473005 - DNA, 100 bp, Homo sapiens
tattatggctgctgttgtccaacagaacgacctagtatttgaatttgctagtaacgtcatggaggatgaacgacaggggcagtctgcagcaaaacgacaa

SEQ ID NO: 473006 - DNA, 95 bp, Homo sapiens
gtcaaagcctctgtcaccacaccaaaatacaaatggggatctgtgactcatcagagtgtgggggttgtgaaaggatctcaaagatttcatgagac

SEQ ID NO: 473007 - DNA, 49 bp, Homo sapiens
cacctcattgtgcaagaaccaaaagcaatggctgccatccggaagaaac

SEQ ID NO: 473008 - DNA, 80 bp, Homo sapiens
gtttttagttcaacaagtgtcacggcatacaagcaggagccatgtgttcacatgtcatgtggaccagtatttaactgtgg

SEQ ID NO: 473009 - DNA, 100 bp, Homo sapiens
gctactcctggcagtgcgtcaatcagagcgtcctgtgcgttgatattcactgatggactccaaagaatcattaactcctggtagagaagaaaaccccagc

SEQ ID NO: 473010 - DNA, 74 bp, Homo sapiens
actttctgaccaaggaggtgatggtggatgacaggctagtcacaatgcaggtctggctctgggagaggagtgga

SEQ ID NO: 473011 - DNA, 82 bp, Homo sapiens
aaagaaagtccttggaatggcagtgttggagaaaaattaagagcatggggctgcttttggtccaccgcaaggtggatttcat

SEQ ID NO: 473012 - DNA, 75 bp, Homo sapiens
gagataattgataacaccctgtaacagctgagtaaagaagctaagtggaagagtgtttcctcctctggccgtaaa

SEQ ID NO: 473013 - DNA, 82 bp, Homo sapiens
tattgggccttaggaaattcgttgatgttctggtggattatggatcagatccaaatcaatctattaatgagatgaagcggtt

SEQ ID NO: 473014 - DNA, 90 bp, Homo sapiens
cctcatcatgaactttctggagtgtgtagcccacaatgccctggagtgtgcacgagccatctacgcctacgccctgcaggtgttccccag

SEQ ID NO: 473015 - DNA, 82 bp, Homo sapiens
ggctgccaggggagctggagccacctgcgaaggtgtcctcccatactggacccctacagggagtgcatccgccccaaccctt

SEQ ID NO: 473016 - DNA, 96 bp, Homo sapiens
aggccaggagcggttccagagcatgcatgcctcctactaccacaaggcccacgcctgcatcatgagcccccctccatgcgcctgaaggcccgaccc

SEQ ID NO: 473017 - DNA, 75 bp, Homo sapiens
accccgggcactgttgctgctgcgggaggttgaaaatctttctaaacgatacgaagaaatttatcttaaaaataa

SEQ ID NO: 473018 - DNA, 75 bp, Homo sapiens
ctagtctttccgcttcttgaatttctctctgtaaaggagccagttctggtgactcagtccgcagctatagttcca

SEQ ID NO: 473019 - DNA, 50 bp, Homo sapiens
gaaactgacccgatcagtgccaggtctcggcgcggaagatggccggcggc

SEQ ID NO: 473020 - DNA, 100 bp, Homo sapiens
gctgcagccgcacctggccaagggtggagttctacttcctttcccagtacgtgtcgccagccgactccccgttccgccacatcttcatgggccgtggaga

SEQ ID NO: 473021 - DNA, 75 bp, Homo sapiens
ccgcggcggcgcgggtgctccgggccgaggccgcgcttagaccatgctcagcctccaagcagccttgtcatcgac

SEQ ID NO: 473022 - DNA, 87 bp, Homo sapiens
aaaactgaagatgtgaatactctgacatgcacatgatggtgtccaagccagaacagtgggtaaagccaatggctgtagcaggagcca

SEQ ID NO: 473023 - DNA, 83 bp, Homo sapiens
ctggccggagcagtgaaccagcacgggggaaatcttcccaaggctgcagacaccgacggatttgctttgggagccagagtagc

SEQ ID NO: 473024 - DNA, 82 bp, Homo sapiens
gacagtggattttgcagttacttagctctccctaattgtagttacataaagttacaacttgactaaaactacaaggaagatg

SEQ ID NO: 473025 - DNA, 100 bp, Homo sapiens
aatgaatatctggttttgtctctgctgggcctgtgtgcctggaaaggaattgttttggcctaggatcatccagctatcagttgagggatttgcagttgat

SEQ ID NO: 473026 - DNA, 80 bp, Homo sapiens
gcaggcagtacccctcttctctcgtaccagtaatgttcgatccacatttttcaaggactgtttatatgaagtatttgatg

SEQ ID NO: 473027 - DNA, 127 bp, Homo sapiens
ccgcggaggctcctcggtccttcagcacccctcggcccgacgcacccacgcccctcaccccccgagagccgtgcctggagaagttccctgtgatccagcacttcaagttcgggagcctgctgcccat

SEQ ID NO: 473028 - DNA, 98 bp, Homo sapiens
aaagagctgcaccgcttcgagtctattgccattgcccaagcagcaaagtggggcaccaaggccctgtgctaagcactcataatcctctgggggtgcta

SEQ ID NO: 473029 - DNA, 100 bp, Homo sapiens
ctctccccaccccgggccagctacgacgatccctacaaaaaggctgtcgccatgtcgaaaaggccaagactaaggggctgcagagcggggtggacattgg

SEQ ID NO: 473030 - DNA, 51 bp, Homo sapiens
actgcagaggtgctggagctggcagatccaggatgagaagactgataaaag

SEQ ID NO: 473031 - DNA, 100 bp, Homo sapiens
gccgtagacaccagctccgaaatcaccaccaagggtctcgctctcacccaggctggagtgcagtgacacagttgcagctcactgcagcctcgacctcctg

SEQ ID NO: 473032 - DNA, 165 bp, Homo sapiens
ctgctccagcctggcggacagcatgccttcgctgcgatgcctgtataacccagggactggcgcactcacagctttccagatccatccttttacaatccctgctattattcgtccattcagcgtattgaactatgatccacctcaaagggatgaatttttgggaac

SEQ ID NO: 473033 - DNA, 80 bp, Homo sapiens
gatccagcctgcggagcctgtggggcaggtttaagttactgagccaggaggaaggcgagtacttcaatgtgcctgtgcca

SEQ ID NO: 473034 - DNA, 90 bp, Homo sapiens
aattactcatcatgatctcttcacccgcaccatgatcgttatgaatgatcagagccaaggagcaataactgaacgtttaagaagcttcag

SEQ ID NO: 473035 - DNA, 100 bp, Homo sapiens
tcggaccagctctgtaaaagccccgcctctgccttcggataggcatagaatgtcaagctaaccaggcgtccgctacttcagaagagtgtactgtcgcatg

SEQ ID NO: 473036 - DNA, 98 bp, Homo sapiens
ctgaaattcagagaggggaagtgatttgcctcagcttgtactatgcggcattccaaaagaactcactgtcctgattgggatagcagagaaagctgggg

SEQ ID NO: 473037 - DNA, 101 bp, Homo sapiens
cagagccggaacgtcatccctgatatccctgaccacttcctgtgtctgtgggagcactgtgagcggatcctgttacagtgcaaagaagaaatggcaaacgg

SEQ ID NO: 473038 - DNA, 82 bp, Homo sapiens
tggagcttggtttcgggatctcggtgctgcagacggcgagacctcctgcacagcggccctccaggcactgaagcgtaagaag

SEQ ID NO: 473039 - DNA, 82 bp, Homo sapiens
ccatcgctcatgccaggagggaacaaagaagcgtgaggctgacgcttgtgcttgccctggcaaccctgatagctgcctttgg

SEQ ID NO: 473040 - DNA, 83 bp, Homo sapiens
ccccgttcctggagattctgattgaggtcgcaatggaagaagagatcgccgcgctggtcattgacaatggctccggcatgtgc

SEQ ID NO: 473041 - DNA, 111 bp, Homo sapiens
tgcgccgcgtgtcctcggagcgcggtccctgtattggtctcctgctcctagagggaagcccgtcagcctgagctacagatgcccatgccgattcttcgaaagccatgttgc

SEQ ID NO: 473042 - DNA, 100 bp, Homo sapiens
cctccggcccggcggggccgacgagtccggaggggctgccgcgggaggtatttaacatgaagtcgctccagattgtgttacctgcccgagcagaccccga

SEQ ID NO: 473043 - DNA, 50 bp, Homo sapiens
ccccagcttcatctgtcctctgagtcacagatgtgacattgatgtgtcca

SEQ ID NO: 473044 - DNA, 98 bp, Homo sapiens
tacgggcggcgacggcttctcgccgtgttgccgcccgctgtgctatgagcagtcagagcgccgtctccacaagagtttacaaatgaaaatggaggaaa

SEQ ID NO: 473045 - DNA, 80 bp, Homo sapiens
actgcagctttaaaaagcagtgggctctggaacaacacggtgttcatcttttctacaggaactgtggctgcaccatctgt

SEQ ID NO: 473046 - DNA, 112 bp, Homo sapiens
cgcgctccaagagctccagcctgagccggctcgaggttaaccccaaagattggctttccttggagtgaaatcaggaacatctctttcaatgacaaaaagtttgtcattaaac

SEQ ID NO: 473047 - DNA, 100 bp, Homo sapiens
gaatctatcaaaaaggaagcatgttggacgatatctaatattacagctggaaatagggcacagatccaggtgtgtatgatatagtgaataatcttggctc

SEQ ID NO: 473048 - DNA, 100 bp, Homo sapiens
gggatcttcctgagcagagctctccgggttccccggctcgcggggcccggcgaagggcaggaagtgggacccatggcagccgagacctcccagtcaacag

SEQ ID NO: 473049 - DNA, 98 bp, Homo sapiens
cgcgcgtgcgggattccggcgccgctctccgagctcgatccgctgctcgcacgggagccagctgggtgaatgtggaggctgtggacccacgaggtcga

SEQ ID NO: 473050 - DNA, 82 bp, Homo sapiens
ctgtgctcaagcatttcaacgtgcgtgtcacccacgcagacatcttcagccgctgccagaacccagcgggtgccgcttctcc

SEQ ID NO: 473051 - DNA, 82 bp, Homo sapiens
cctgagatcaaatggcacttcattggccacctacagaaacaaaatgtcaacaaattgatggtgagacggtttaagcggaagc

SEQ ID NO: 473052 - DNA, 50 bp, Homo sapiens
gtggtctctgcacctcctttctaacaacaccgatggacttcaggaacttg

SEQ ID NO: 473053 - DNA, 75 bp, Homo sapiens
acatcatgattaaacgctacaactctaccgctgctaccaatggagtcaaattgactttatcagctttaatcgatg

SEQ ID NO: 473054 - DNA, 131 bp, Homo sapiens
atcggatcaccggcgtgccccaccatgtcagacgcagccgtagacaccagctccgaaatcaccaccaagtaatctatgccagcaattatgacaatgttagcagaccatgcagctcgtcagctgcttgattt

SEQ ID NO: 473055 - DNA, 100 bp, Homo sapiens
ctgagccctcccttcttcctctcagttcctagagtccgaccgccgccgccgccgagagagaggagaaggaggcctacaagactatgaaagaggatgaaaa

SEQ ID NO: 473056 - DNA, 75 bp, Homo sapiens
gctgtggaccctctcagccaacgatatggaggacgacagcatggaatcgagtcactggcatttacgaactcagct

SEQ ID NO: 473057 - DNA, 90 bp, Homo sapiens
gtgctagcggccccttcgccctgcagggatgatcatggtgattttactgctgcttgtggctatcgtggttgttgcagtctggccgaccaa

SEQ ID NO: 473058 - DNA, 101 bp, Homo sapiens
caacatctcccacctcagcagcctgatcgctcagctagaagagaagcagcagcagcccaccagggagctcctgcagagagcctccaggaggaactcagtaa

SEQ ID NO: 473059 - DNA, 98 bp, Homo sapiens
aagggtgcagactatatggactgcttatatagaaccctggggttattagtaaaacgattggagaaaggtggtaaagctgaacatgaaaatctttttcg

SEQ ID NO: 473060 - DNA, 90 bp, Homo sapiens
tgagcttctaactcattgtattcctcctgagataataatgaagaaaaacacaccttgactttagtcagatacatcactgtctgttaaagg

SEQ ID NO: 473061 - DNA, 121 bp, Homo sapiens
tcaagatggcggccaatgtgggatcgatgtttcaatattggaagcgctttgatttacagcagctgcagggggaaatttgcagtggtgagaaaatgtataaagaaagattctgggaaagaat

SEQ ID NO: 473062 - DNA, 82 bp, Homo sapiens
cgacgctatggcgcactggagtaccctgttcctggcaacaatgcagatcttcgtgaagactctgactggtaagaccatcacc

SEQ ID NO: 473063 - DNA, 90 bp, Homo sapiens
agcaaataactgctgcagtttgggttccaattgtggacaagataaggaccattgctcaggctgtctatggagccaaagatattgaactct

SEQ ID NO: 473064 - DNA, 82 bp, Homo sapiens
gaagggacacctttcacagctatcagggaaggtgacagagctgaatgaacctctctccaatgaagatcgaaatctcctctct

SEQ ID NO: 473065 - DNA, 100 bp, Homo sapiens
cctcacctcgatgcagccagtagcttggatccttgtgggcatgatccataatcggtttcaagcatattgagtatcagtgctgatattgaaacaattggag

SEQ ID NO: 473066 - DNA, 75 bp, Homo sapiens
gttctgtttgtcaagtaaactgttgtgccaggcttattcaaacctccttagagctaacatggatgggctgaagaa

SEQ ID NO: 473067 - DNA, 94 bp, Homo sapiens
aagccgctggcagccgcggatctcaccgccgctcaggcatgatgccttcttctgtagagtgggcgctttgcagaatacgtgttgaatgaaatca

SEQ ID NO: 473068 - DNA, 90 bp, Homo sapiens
tgatataatggccaagaggaatcagaaacctgaagttagaaaggctcaacgagaacaagctatcagccggatcgagctgggagatgtgac

SEQ ID NO: 473069 - DNA, 51 bp, Homo sapiens
cgagatcttccgccactacgaatctgcacattcattgcaaccttcttctgg

SEQ ID NO: 473070 - DNA, 100 bp, Homo sapiens
tgagacacagttgccgctgactcgggaggaggacctgatcaagactgatgatgtcctggatctgagacagctgggaagtggtggaaggactgagggggga

SEQ ID NO: 473071 - DNA, 100 bp, Homo sapiens
cttgtgcaatgctactctgccatggatcccttcagcacactttccagcagcatcacctgcacagaccagttgatgcggatgaaattaaaaggctaggaaa

SEQ ID NO: 473072 - DNA, 50 bp, Homo sapiens
gtggaggcagaggtggcatgggaaggaattacggagatatagaattgctg

SEQ ID NO: 473073 - DNA, 90 bp, Homo sapiens
ctcgccagcagccgtccggagccagccaacgagcgaattcagtactgtacacaggaaattactgtcttccgtgaagacttagtaaataaa

SEQ ID NO: 473074 - DNA, 82 bp, Homo sapiens
caatatctgtcttcggtggactccttcggcagtccacccaccgccgccgcctcccaggtttattcactggatctctgaatac

SEQ ID NO: 473075 - DNA, 74 bp, Homo sapiens
gcaggaacggctccagcatcaagatccgtctgacagggaccacttaatagtgagtcttccaaccagagcttgtg

SEQ ID NO: 473076 - DNA, 100 bp, Homo sapiens
cgacgtgcggcccgaatgccagcgcctcttctaccggggcaagcaggtaattttttctgcaggatgaattaagagaagagacacttgctcatcaggcatg

SEQ ID NO: 473077 - DNA, 100 bp, Homo sapiens
ggcgtcgtggccttcagcacgttaatgccggagctccctgggtcctcagcagtgaggctggcctccctgcgtgacctgcccgcccagctcctggagctgt

SEQ ID NO: 473078 - DNA, 100 bp, Homo sapiens
cggagcgcggcaggacttggctggacggcgcggccacggagaagggcgcgatatgaggccccaggattcctggcgaggtcctcctccccttttccagcag

SEQ ID NO: 473079 - DNA, 83 bp, Homo sapiens
ttcgttgtatttgtgacatctgtgggtttaatccaacagaagaaggcccaagtctgttttggtggtctgagaggaaaaaagat

SEQ ID NO: 473080 - DNA, 75 bp, Homo sapiens
cacacagatcaccctgggaatcctcatctccactcagcgggcccaggatcaagcaaccccttctgagcctgagat

SEQ ID NO: 473081 - DNA, 80 bp, Homo sapiens
gggaaccaccacgctcacggactgcctgcgacgtattggtaaaggttttcaaggtgtcatgaaaagatggggatttaaag

SEQ ID NO: 473082 - DNA, 75 bp, Homo sapiens
gcgcgggccgggccggcgtggctgctgctggcaatctggaaaagggagatttcattgccctggatcttggtgggt

SEQ ID NO: 473083 - DNA, 100 bp, Homo sapiens
gaagcttgaggaaatgactcggactgaacaagaggccagagactgctgctactttgaaacgtacgatagaggccctgatggacagaggagcaatagtgag

SEQ ID NO: 473084 - DNA, 73 bp, Homo sapiens
tcgggcgaggagaggaggtgaccccgcgaaaggttttaaaatcaaagatgggaaaatcggagaaaattgccct

SEQ ID NO: 473085 - DNA, 50 bp, Homo sapiens
cagcatcgcaccccaagaaaccagggatgaagtcaataaagcgtatcgga

SEQ ID NO: 473086 - DNA, 51 bp, Homo sapiens
ttttgccaggtgtttgttaccttgtttccaaggcaggaaaggtaaagagac

SEQ ID NO: 473087 - DNA, 75 bp, Homo sapiens
gtttcaccagatgtcctcaaaacaaacagacagaagaaggaagtggctaatggcctctgatgattgtcactcaga

SEQ ID NO: 473088 - DNA, 75 bp, Homo sapiens
ctcgaggcccggctggcgcacctgggcgtgcaggggacggaaaatatagtcgcggtgatgataagcaacctgaaa

SEQ ID NO: 473089 - DNA, 101 bp, Homo sapiens
aagatgccaggacaccccgaaagccggaaaacgcacccttacccttctgaagaacagaaaaagcagttggcacaagacacgggactcaccatccttcaagt

SEQ ID NO: 473090 - DNA, 74 bp, Homo sapiens
ctgctcagtgtggtggatcatttcaaccgcctcctgctcttcatggatgaagcagacgccttccttcggaagcg

SEQ ID NO: 473091 - DNA, 82 bp, Homo sapiens
ccgccaccacccactccggacacagattacgtctattttgagaactcttccagcaatccttacctggttagacggattgagg

SEQ ID NO: 473092 - DNA, 75 bp, Homo sapiens
gattgggctgagcagaggacgacatgttgcttttcgtggaggtcttaattacagagcacggtgacctgggtaata

SEQ ID NO: 473093 - DNA, 139 bp, Homo sapiens
gctgcggtctctggccagcacgctggactgcgagacggcccggctgcagcgagcgctggacggagaggaaagcgagtaccttgtggagctgagagaatacgggcctgtgtactccacatggagcgccttggagggtgag

SEQ ID NO: 473094 - DNA, 75 bp, Homo sapiens
tttctccaaatgagctcatcctgggctggtgaaagacccctgacaaaagacaatcatcttctgggtacatttgat

SEQ ID NO: 473095 - DNA, 101 bp, Homo sapiens
aaaaagtgattaagcagagaatggagaagaaggttgattccagaacaagttgaaatcatcgcagaaggataaagttcgtcagtttatgatcttcacacaat

SEQ ID NO: 473096 - DNA, 83 bp, Homo sapiens
ccctccctcggtttgcctactgaagagcttatcagagctctacttgggaaactactctgggcagttgaaaagtagaaagtcat

SEQ ID NO: 473097 - DNA, 51 bp, Homo sapiens
cctgcagctgcgatgcctgcccgagccctcatcctgcaagtctctcggaaa

SEQ ID NO: 473098 - DNA, 100 bp, Homo sapiens
tgtgcttccacttaaggttttgcaaggtccagtggcattgcagagcacggatggttgcaggagccaacttttacattgttggacgagaccctgctggcat

SEQ ID NO: 473099 - DNA, 75 bp, Homo sapiens
aaacttcgccaactccgctgcctttgccgccaccatgcccaaaacgccctgtatgatgagattcgtcagtttcgc

SEQ ID NO: 473100 - DNA, 100 bp, Homo sapiens
gcaaaagctgcttgaaaacattccaggctttacagatgccagttttctaacactattaaagaagatgccagatgttgaacagctatatggccttcaccct

SEQ ID NO: 473101 - DNA, 75 bp, Homo sapiens
aggagctaaagcagcgtgcgttcagccctgggtgtgtcccagatgcctgtggccgagggcaagagtgttcagcaa

SEQ ID NO: 473102 - DNA, 75 bp, Homo sapiens
gaagaagctgcagccgcacctggccaagggggtcagcggctggaagagtccttggaatatcagcagtttgtagcc

SEQ ID NO: 473103 - DNA, 90 bp, Homo sapiens
gtgagtccagctcctctgacagcgaagactccgaaacaggtccacgctgcttttatgagctgtaacactcaccgcgaagatctgcagctt

SEQ ID NO: 473104 - DNA, 82 bp, Homo sapiens
gatgggcagacggattcatttagagctgcggaacaggacgccctctgatgccgactcgcgggccgctgcacccaccgccaag

SEQ ID NO: 473105 - DNA, 90 bp, Homo sapiens
agaaccagcttaaagatatggctattgctactggtggtgcagtgccttatgcccgctcagaggcccacctcacagagctgctggaggaga

SEQ ID NO: 473106 - DNA, 89 bp, Homo sapiens
cggcgccgccgcgtcttcccggtctcctttcccggccgcacaggtgtgccggtccaacaaaagcccttgggtctgtttgacttgttcaa

SEQ ID NO: 473107 - DNA, 100 bp, Homo sapiens
ctgagaggagtgaaggcggcaaaatggcggaccgcttctcccgcttcaacgaagaccgagactttcagcatcatggataccgacttatatgatgagtttg

SEQ ID NO: 473108 - DNA, 100 bp, Homo sapiens
gaacagttgattcagcggttgcgaagaatggaacgaagcttaagtagctacaggggaaaatattctgagctcttcttggatccctcgtggaaactacata

SEQ ID NO: 473109 - DNA, 75 bp, Homo sapiens
tggccgtagcggcttgttggataagaaggacagaataacgggctcccagattcacaagccccaccaagaggatca

SEQ ID NO: 473110 - DNA, 100 bp, Homo sapiens
tcctggagaagggattgcccagtcagcaaaggttcagccctccaaggctaccaagcagtttctcgaagagattaacaagtggacagttcagtacaatgtt

SEQ ID NO: 473111 - DNA, 100 bp, Homo sapiens
gatcccatctcggccagttcggatccccccagggattcccccaggagtgcccagggtgaggtggctttgaccccgggttgcccggccagcacgaccgagg

SEQ ID NO: 473112 - DNA, 82 bp, Homo sapiens
gtattcaccagttaatagcaccagtgccagaaatcacatccaaagtcagttccagtttcttcaaagaagaaagaagcctctc

SEQ ID NO: 473113 - DNA, 131 bp, Homo sapiens
cagaattggacgaaagtttcaaggagtttgggaaaaaccgcgaagtcatggggctctgtcgggaaggtctgtttctgtcgactgtggaccacttatgtgcgatccgtggaccacttgcgtgcgatctgtcg

SEQ ID NO: 473114 - DNA, 82 bp, Homo sapiens
gtccgccgattcctcctccttggtcgccgcgtccttggctggcgtagtctctggtaagaagagtgaaagcaaagaagccaag

SEQ ID NO: 473115 - DNA, 100 bp, Homo sapiens
tttgtctcagagctcggagctggacccccccatcgagtcgctgatccctgaagaccaaatagtttgcctgagaatacagatcaacccacagaacaaagcg

SEQ ID NO: 473116 - DNA, 82 bp, Homo sapiens
attccccggaatcgtgtgctgggctggtcccccttgctggaataagctctgattatagccttgaagagatagatgaaaagga

SEQ ID NO: 473117 - DNA, 96 bp, Homo sapiens
ggaggccgtccagcagatggcggatgccctgcagtacctgcagaaggtctctggagacatcttcagcagctgtttgagatcctggccaagaccccg

SEQ ID NO: 473118 - DNA, 75 bp, Homo sapiens
tcggagctaatccacaatctccgcaagagaacgaggtgctcaaagtccaactgaagaaatatgtaggagctgtcc

SEQ ID NO: 473119 - DNA, 100 bp, Homo sapiens
gaaacgtttagcatcagtgactcacaaatcagcaacacagaatttctgcaagtaattggcagattttgacaacaaaccagtaaatggccccaagtcagaa

SEQ ID NO: 473120 - DNA, 75 bp, Homo sapiens
aaggccaagatccaggataaggaagcttcttggacacttaatgattgttggcaagaaatgtgctgctgatctggg

SEQ ID NO: 473121 - DNA, 100 bp, Homo sapiens
gggtttgagtccagcagtgctttaggtcagtatgggaatcctttaaataaatatatcagacattatgaaggattatcttacaatgtggattcattacacc

SEQ ID NO: 473122 - DNA, 83 bp, Homo sapiens
ctgaaagcctctaacacccacagatccctctatgactgcaatgtgaggtgctggagaatctggtaaaagcaccattgtgaagc

SEQ ID NO: 473123 - DNA, 82 bp, Homo sapiens
ggaaatcgggctgaagcgactgagtccgcgatggagcgggtccatatggaatatttgctggtagggatgcctccagaggact

SEQ ID NO: 473124 - DNA, 50 bp, Homo sapiens
ggctgctagtgaacagcgacgtgttctgtcaggccaagcagaaggcagcc

SEQ ID NO: 473125 - DNA, 104 bp, Homo sapiens
ctgagccgagggctcgcactcttctggtctcccaggcccaacccacctgaaggaaccactcgttttgactattattttatcactctttgtgaaacttcacaatg

SEQ ID NO: 473126 - DNA, 96 bp, Homo sapiens
cttcaatactacctttatttccaccatagggcgtctctggccgagcctctttttgtggaaaacgacagcagcagcagtggcctggaagacgccacc

SEQ ID NO: 473127 - DNA, 90 bp, Homo sapiens
ggatgagcccggcctcccttttcatcaggacgggaagcaatatgctcccctgctggccgtgttcagctcccaaggccagtcagagctgat

SEQ ID NO: 473128 - DNA, 75 bp, Homo sapiens
gataataggggctggaaagccagcagctgtggtactccagacaaaaggatcaccattcccgtgcagaccttctcc

SEQ ID NO: 473129 - DNA, 100 bp, Homo sapiens
ttttgacttggactatgactttcaacgggactattatgatagtgtttgcagaagccaaacctgaccacagacactaaggacaaggagtacaaaccccatg

SEQ ID NO: 473130 - DNA, 74 bp, Homo sapiens
ggttgtgcaacaggcaggcacaaacaagactgatgttgtctgtggagatcctgctgggccgtggcttcaccttt

SEQ ID NO: 473131 - DNA, 98 bp, Homo sapiens
gtccgcggaccagcagcgcgggagagcggactcccctcgccaccgcccgagcccaggtgtcaaggagcagaagcttttgaaatccagcattctggatt

SEQ ID NO: 473132 - DNA, 75 bp, Homo sapiens
cctgagctgtgcaaccaatcagagtccagtggagaagtgctcttaaagttccgtacagataaaggaagagatccc

SEQ ID NO: 473133 - DNA, 100 bp, Homo sapiens
ggtatcgggaggtgccgaacactggaatggtctgccgaaaaccgaccgacccggttgattggccaccacttgtcctgggactgctcactctgctgaagca

SEQ ID NO: 473134 - DNA, 100 bp, Homo sapiens
aacaagtcccagctgaagctgggcatctggggcgccgtcatttcaccaagctgataatgttcggggaacccgccatcacgggctggtggagaggccatcc

SEQ ID NO: 473135 - DNA, 100 bp, Homo sapiens
ttctcagctacttgggactcctctctcaagagaagctgcaagagcaacatctttcctcaccccaaggtgcagagtccagtggtgacatggatgttctcct

SEQ ID NO: 473136 - DNA, 88 bp, Homo sapiens
agaacagttaatcctcaatttaagcctgatctaacccctagaaacaggctttcatgagaaggacaagaagccatattgccgaaaggat

SEQ ID NO: 473137 - DNA, 100 bp, Homo sapiens
tctcagtgctgccagagctgagccagtccctagggctcagggagcaggagcttcaggttgtccgagcatctgggaagatcccttggttccagtaccccat

SEQ ID NO: 473138 - DNA, 88 bp, Homo sapiens
cgggagccgagccgggcggggcgagggcagctccggtgctggagaatctggtaaaagcaccattgtgaagcagatgaggatcctgcat

SEQ ID NO: 473139 - DNA, 50 bp, Homo sapiens
tgggctgtgtttcgaaatgaagacagccctctgcccgaggagatgctcag

SEQ ID NO: 473140 - DNA, 82 bp, Homo sapiens
aagaagactggtctctcccaccacacagaggaaaaggagaaggcccagttggcagcagaagctctaaagcaggcaaatcgtg

SEQ ID NO: 473141 - DNA, 73 bp, Homo sapiens
cggtgtctgctcctgtcgccttcgcctcctaatccctagccactatggtttccaatacttatctacaggaatc

SEQ ID NO: 473142 - DNA, 83 bp, Homo sapiens
catccccgaccacttgcggcctgagtatgggaaatcctcattgacgattcaatttgttgaaggccaatttgtggactcctacg

SEQ ID NO: 473143 - DNA, 100 bp, Homo sapiens
gctgtcagcctctccaaagcctgcgcgagaggagccgggacacgcctagcgcgggctccaggaattgtcttagaagaaagaaggcaagccaccattttac

SEQ ID NO: 473144 - DNA, 94 bp, Homo sapiens
ccgtgaccgagagcgtgaccgagagcgcgaatatcgtcatcgttagaagggaagtcgagacaacatgagtgtgattttgatctgttttccaaat

SEQ ID NO: 473145 - DNA, 98 bp, Homo sapiens
gtgccaccttctcctatgactgcacttttcaggattagaagaggctgtgtatagaaacatacaagcttgcaaggagcttgcccaaaccactcgtacag

SEQ ID NO: 473146 - DNA, 75 bp, Homo sapiens
agaacagagccatcattcaagaagtttgcttcatgtggttatgatattcctctcaaccctttaaatctgatccct

SEQ ID NO: 473147 - DNA, 100 bp, Homo sapiens
cgatggacatggacatgagccccctgaggccccagaactatcttttcggccagaagaatgtttgaaggtgagatggcaagtttaactgccatcctgaaaa

SEQ ID NO: 473148 - DNA, 82 bp, Homo sapiens
cgagccccgcccggcccgggccatgtcggtgggcgagctctacagccagggggatatgagactttctactcggaatatcctg

SEQ ID NO: 473149 - DNA, 96 bp, Homo sapiens
tgaagatttcttggctcggtcaaatgttgggaggtgccatgactttcgggaaactgcggatgtcattgccaagatataattgaccctgcaatcctg

SEQ ID NO: 473150 - DNA, 50 bp, Homo sapiens
cggtctatggactttccgaagacgagacacctagctcccctgtttgacaa

SEQ ID NO: 473151 - DNA, 96 bp, Homo sapiens
cggcgaccgcctctgcttcaatgtgggccgggagctgtacttctatatctacaagggggtccgcaaggacctgccctcattcacccagaatgtgca

SEQ ID NO: 473152 - DNA, 75 bp, Homo sapiens
tgtacagcgttgaccgtgtgtctgggtcggcactcttcaccctcccgagccctgcccgtctcggccccatgcccc

SEQ ID NO: 473153 - DNA, 75 bp, Homo sapiens
cgcgcggtccatcgcccactggacgccgcccgcggccggaccggtgtcatttgcctatgctgtatattggattag

SEQ ID NO: 473154 - DNA, 50 bp, Homo sapiens
ccagaggccagtggcactcccagctcgtggaagctgttgctgccctgggg

SEQ ID NO: 473155 - DNA, 96 bp, Homo sapiens
cctttgaatagaggttcttccacagcctcccatctgcatctgctttaggaacttagtgatttggcccgtgaccctccagcacaatgttctgcaggt

SEQ ID NO: 473156 - DNA, 89 bp, Homo sapiens
ccagggaaccctggtcaccgtctcctcagacttcccaagtaagaagcggaagaggagccgctggaaccaagacacaatggaacagaaga

SEQ ID NO: 473157 - DNA, 95 bp, Homo sapiens
gtacacagataaagacaatggagggatgcttgtatggtctccatatcacagtatcccagatgccaaatgttccaagtatgaagatctaaaagaaa

SEQ ID NO: 473158 - DNA, 100 bp, Homo sapiens
aacctcattatccgctatgatgtggaccgggccatctccgggggctccattcagttccacaggcgcatgggccacgtttccagtgcttggtggccatgtg

SEQ ID NO: 473159 - DNA, 75 bp, Homo sapiens
gtcggtgggcgagctctacagccagggagttgaccacatttggccatttcccagaagggccccaccccaagggtg

SEQ ID NO: 473160 - DNA, 100 bp, Homo sapiens
aaaatttggacattgaccccaaactgcaagaatacctcggcaaattccgacgtcttgaagacttccgagtagatgatctccaggaggtgacccaggacct

SEQ ID NO: 473161 - DNA, 74 bp, Homo sapiens
ctgaggccccagaactatcttttcgtaatgtgccttcagactttaaactttggaaatggatttgctttggctct

SEQ ID NO: 473162 - DNA, 96 bp, Homo sapiens
cagcatcgtcacggacactcctgagctacagagactgaagaggactcaggagcaaatcagtaatgtctggaggcggctggtggaaatccaattccc

SEQ ID NO: 473163 - DNA, 90 bp, Homo sapiens
cctattggagattgtgaatcctgctgtctgtgcagggctcatagtgagtgttctgtgagatggcagcctatttcacccactcaaacctgc

SEQ ID NO: 473164 - DNA, 50 bp, Homo sapiens
agattctcagggcaacccagatctgaagaggagttgtacgcatgtcagag

SEQ ID NO: 473165 - DNA, 50 bp, Homo sapiens
taaaaggtgtcaagaagctcagaatgacacgatgaggcgagtggtacgac

SEQ ID NO: 473166 - DNA, 76 bp, Homo sapiens
atcacttacaaggacgaccaggccaagcttaagaagtgggccccctgagaagaagatgggcatcaaggcttcaaac

SEQ ID NO: 473167 - DNA, 75 bp, Homo sapiens
ttgggcaagagaagaattcagaagaaacaaaagtgccaccgaagagggaaatcctcattgacgattcaatttgtt

SEQ ID NO: 473168 - DNA, 99 bp, Homo sapiens
gaatcaactgagagagatgcttaaaaatcaccagttactttaatgactggccctctcctcctccatctccttgactgggtccggctccatgtgtgcgag

SEQ ID NO: 473169 - DNA, 101 bp, Homo sapiens
caggtacctgtggatgtggtcgagatgaaagcttttcatgcaacacccaacacttataagcggaagaacacagaaacagctctagacaacaaaccttgtgg

SEQ ID NO: 473170 - DNA, 78 bp, Homo sapiens
tgagggaaatgatgaccaaagatagaggctatggagaaaaggtgagctgtcagggagaaatgtcgaaacaggtcaaga

SEQ ID NO: 473171 - DNA, 100 bp, Homo sapiens
attctaaggcaacacttccttgaagaaacaagcttacaggttgagcatcctgtcacagaatgcattactggcctggacctagtccaggaaatgatccgtg

SEQ ID NO: 473172 - DNA, 82 bp, Homo sapiens
ggcgtcctcggcccccgccccattccgttcgcgtaagactttgaccccgacgcaggcttcagtgattgccgcggatcagaag

SEQ ID NO: 473173 - DNA, 78 bp, Homo sapiens
agacacacatagcagaagctactggctgggtccctgggtggaagagattagaaactcatgatgttgtgatcgagtgtg

SEQ ID NO: 473174 - DNA, 75 bp, Homo sapiens
gtacatcaaggcctccggcagctatgcaggttctgcggggagtgtctccagccctgcctgcaggtgccatccccg

SEQ ID NO: 473175 - DNA, 74 bp, Homo sapiens
taagatgtcaggacatcctggaagctgggaaagggtattgacctgatggacatggcttcggacatcctgcagcc

SEQ ID NO: 473176 - DNA, 100 bp, Homo sapiens
ggcgtccgttggccttcgtacccgtcttgattgagattgcttcacctgtggtatcagacatcacaacatggggctcaccaagcagtacctacgctatgtt

SEQ ID NO: 473177 - DNA, 100 bp, Homo sapiens
cgccgccgcgcctgcgcagaaggccggggccggccagaagcgggcggcgcgggggagatggttggctgttgaaggcacgaatggaatagataatcatgta

SEQ ID NO: 473178 - DNA, 89 bp, Homo sapiens
ggctggcatcatcattgttggagatgagatccttaaggaattgaatgatctggcacgggaccctccagcacagtgttcagcaggtcctg

SEQ ID NO: 473179 - DNA, 82 bp, Homo sapiens
ggctgaagcgactgagtccgcgatggagcattttgaaagcgaagcagaagccgtagaatcagcggcgagcctgttgaaagaa

SEQ ID NO: 473180 - DNA, 100 bp, Homo sapiens
gactgtggtgtctttgctgagggtcacattgagctgcaggttgaatccggggtgcctttagcatactggagcatagtgaaagagtctattttgaagcttc

SEQ ID NO: 473181 - DNA, 76 bp, Homo sapiens
gatcagagcctgaccagcatccccgccttcagccagagaaactggtctttcatggtgctgattcagacatagaatg

SEQ ID NO: 473182 - DNA, 75 bp, Homo sapiens
agaagccccgcaataggcttaaacaatctggacaaggcatatgtggaacgtactgccaaatctgtcgaaagggag

SEQ ID NO: 473183 - DNA, 100 bp, Homo sapiens
gaggataatggtatcatcaaggccttcagaaacatccctggcatacccagagtatcttatcacttaccagatcatgaagccagaagccccttcccagacc

SEQ ID NO: 473184 - DNA, 100 bp, Homo sapiens
cagtatcgtggcacacatacttgtacccgacagggccggttaagagaactgcgcatcagtttgggacagagcactgaatatcgtcacatttggtcccttg

SEQ ID NO: 473185 - DNA, 98 bp, Homo sapiens
gtggtgtttgggggcttttatcttttctttttcacagagaagatcttgaagattcttcttaagcagaaaaatgagatctgggacttggctagtggcaa

SEQ ID NO: 473186 - DNA, 85 bp, Homo sapiens
cgccaggacttcaacatgatggagcaaaagaagagggtgtccatgattctgcaaagccctgaagagagaagggcacagttaccta

SEQ ID NO: 473187 - DNA, 75 bp, Homo sapiens
aacttttgatcgaactggcagacggatatttactgcggtatatattgcacccctaaaagccctagtacgtgaaag

SEQ ID NO: 473188 - DNA, 75 bp, Homo sapiens
gcgtcgactgcccagagtccgcggccggggcgcgggagtccagaatgacagggtccagaaactggcgagccacga

SEQ ID NO: 473189 - DNA, 80 bp, Homo sapiens
ggtcaccaaggtcacaggacccaggaattgcgccctccggcattgagtatgctgctgctgttccgctttgcgtcctcgct

SEQ ID NO: 473190 - DNA, 100 bp, Homo sapiens
tgcagccactcggccctgcgccgcgacaagtacgtggccgagttcctcgagtgggatgatgtgatgccagccacttactgtgaaattgatttagataaag

SEQ ID NO: 473191 - DNA, 99 bp, Homo sapiens
ttgaagctgtttatagtagactgaatccacatagagaaagtgatgggtgtgttgttggtggctgcaatgccagctttgcttctcagggagggctagctc

SEQ ID NO: 473192 - DNA, 98 bp, Homo sapiens
gaggagctcgcctgctgccctcttgcgcgcgggaagcagcaccaagttcacggccaacgccttggcactaggctttctacagaacaaactgcacagct

SEQ ID NO: 473193 - DNA, 83 bp, Homo sapiens
ggacacctacagccccgacgaacatttctgggtgacactcaacaggattcccgatgctattccaagttcagatcaaattcgag

SEQ ID NO: 473194 - DNA, 82 bp, Homo sapiens
ttgccggctcccctctcaggacaacccagatgtgcaacaaagtgcgatgtttggtgccctggttgtcagatgttggaaagca

SEQ ID NO: 473195 - DNA, 50 bp, Homo sapiens
acccttgatcctcctcctaattgcagggaacatccttctgtatcagaaat

SEQ ID NO: 473196 - DNA, 100 bp, Homo sapiens
tcttcaatgaccggccgtggaggagggcaactgcggaaagtgccagtgaatgcctgcgagaccaagacacattccaccccagtggggggtcccataccac

SEQ ID NO: 473197 - DNA, 100 bp, Homo sapiens
atccaagaagaagcagcctcatttgttttctggtgtcatcgtaggtggccacctatggcttttggggttcatcatgcctagtggcgtataagaagacccc

SEQ ID NO: 473198 - DNA, 90 bp, Homo sapiens
gtgagattactcaacttctagttccacctgaaaactgtagttcgtttccacttgttccatgtgacacagaccagcctcaagacaagcccc

SEQ ID NO: 473199 - DNA, 100 bp, Homo sapiens
cagagagaaaattgagacggagctaagagatatctgcaatgatgtactggttccaaaagcatttgctgcaagtctcttggattatataggctcgcaggcc

SEQ ID NO: 473200 - DNA, 158 bp, Homo sapiens
catttgttggggagaagaggattggaggtgtcagtgttaaaggaacctctacaacgaaggtgaagccacggaagataagttccagggtctccctccactgctgtagtaacccgggtccggggcctcggtggtgctcctgatgcccctcacccacccct

SEQ ID NO: 473201 - DNA, 51 bp, Homo sapiens
gtctcctacatttagccaatgaaaaggcttccatctgtatcacaagttgcc

SEQ ID NO: 473202 - DNA, 97 bp, Homo sapiens
cctcgccaaagcagagaaatagtgcgatggtcgggatttgacttcacttaggaatgtaagttgtgaggtagatatgtttaaaacccttcatggatca

SEQ ID NO: 473203 - DNA, 83 bp, Homo sapiens
agaacggaaaactcccaacttcctggctcagcaggagttgatgaagcagctctccatccttcctcgtgacaactatagtctcc

SEQ ID NO: 473204 - DNA, 99 bp, Homo sapiens
gggggatggttccatcatggcgtcaatgcagaggacagttatgggatggatgggaaggttaatcagccccgtctcactgcagacatcaactggcaaggc

SEQ ID NO: 473205 - DNA, 113 bp, Homo sapiens
gggaagccagagccgcctgccatgccccagccagtccccacagcataacagaaaaccatgagctgttttccaagagcttcatctccatggaagtgcctgtcatggtagtaaat

SEQ ID NO: 473206 - DNA, 100 bp, Homo sapiens
gccacaatgggacatgtgcaagatgcagcggaacctgaagatggagatgcttgccgggtgtggggctgggatgtgccaggtcgtggtgacctgtcccatg

SEQ ID NO: 473207 - DNA, 100 bp, Homo sapiens
cgtttcttgggtcgtcatttcccccgcttctatgtcctgtacacaatcttcatgaaagatctgcattctgcccctcctgatgtcaccacgggcctcgtgg

SEQ ID NO: 473208 - DNA, 50 bp, Homo sapiens
caactgttgggaaatacaatgaaaggaatctctgaaggaagaagatgaat

SEQ ID NO: 473209 - DNA, 99 bp, Homo sapiens
gaagcacttccctaacatcgacagagagaaggcaatgagccgacccatcttgtacagcaactggctgtcaaagatgctgagatgaatcgtcacctgtgt

SEQ ID NO: 473210 - DNA, 87 bp, Homo sapiens
gtggagccaccagcctctccttgtgcttcaccgatatagacacattttgggattgtggcagccagatatcgggccatacggaggact

SEQ ID NO: 473211 - DNA, 101 bp, Homo sapiens
actacagtttacagtctgactactggaagcgtctggatggttccatcaagggagaaatccgaaaacaggcactggaccacttcaatgcagatgggtctgag

SEQ ID NO: 473212 - DNA, 98 bp, Homo sapiens
gggcacctccggtaccgctgcagccaccgcggcccccgcggaaagtgactgagaccgaagatgatagtgatagtgacagcgatgatgatgaagatgat

SEQ ID NO: 473213 - DNA, 97 bp, Homo sapiens
cggcagctgttagccgagcaattggtcctgagaaaagggtgccagcgatgcctggatcgcctgtggaagtgaagatacagtccagatcctcacctcc

SEQ ID NO: 473214 - DNA, 90 bp, Homo sapiens
caagaaggtgccggtggtgcgagtcttcggagcgaccccggcaggatctttcgaagatggtttggctgccttggagatttggagatctga

SEQ ID NO: 473215 - DNA, 74 bp, Homo sapiens
gtcttcacgcagctgctcatctggatgtgaagttcgacgccgtgagcggtgactactatcccatcatctacttc

SEQ ID NO: 473216 - DNA, 83 bp, Homo sapiens
cttcggcagtccacccaccgccgccgcctcccagagctgaagaagcaggtggagagtgccgagctgaagaaccagcggctcaa

SEQ ID NO: 473217 - DNA, 111 bp, Homo sapiens
acgaaagcctcagcgagctgcggcagaagggctacgaagaagtgcttcagcgggccaggaagcgcatccaggagatatggcataatccacgctggtggggtagggaaatat

SEQ ID NO: 473218 - DNA, 101 bp, Homo sapiens
ctcgtcctcatctgggttctcactggccattggcttctcatggatgataagggcctcgctctgttacccaggctggagtgctgtggtgtgtttgtgactca

SEQ ID NO: 473219 - DNA, 75 bp, Homo sapiens
acagaaatatgaaaaaaacaatgagtcatctgatagctcatcaattgttccaggacacgaagggagattcttcca

SEQ ID NO: 473220 - DNA, 87 bp, Homo sapiens
aattcttaaaaaggctcagaaagatggatttttgcatgagacgcttctggacagtactggagaaaatgaaactgggattgacccatc

SEQ ID NO: 473221 - DNA, 83 bp, Homo sapiens
caacatctttcacaaacactcagccccgaagatgttggagatctatgctgttcctgggcatgtacccagaagagcattttatc

SEQ ID NO: 473222 - DNA, 100 bp, Homo sapiens
tgtaggagacacagtgaactccaagactgttttgatgttcatgatgcatcttggtgctgggctttgacaaacttcctctgtggggtaccatcctcatctc

SEQ ID NO: 473223 - DNA, 100 bp, Homo sapiens
atcaggaatggattgaaatctaatgaaccgaaactttgggcagcagtgaggatgccagagttcatgggtttctagaagacaagttttcaactgcagatac

SEQ ID NO: 473224 - DNA, 100 bp, Homo sapiens
gatcttcaactcagtcctgtttgacaacatctgccctacccccatcctgcagaagaggatgaaagtcctggacagacttatcacagagagagaagaaacg

SEQ ID NO: 473225 - DNA, 51 bp, Homo sapiens
gccctgggagctggaggaaccgcggaattgaatgatctggcacgggaccct

SEQ ID NO: 473226 - DNA, 101 bp, Homo sapiens
ggcgcgtgctcggtgtcggcagaggagaccgaaaagtggatggaggaggcgatgcacatggtccgtggcactcaggtagttggttctgacatgactgtgac

SEQ ID NO: 473227 - DNA, 74 bp, Homo sapiens
tggccaccatgttccagaacctgttcccctccatcaacgtgcacaaggacgcaaagtaccacatgcagcgctgc

SEQ ID NO: 473228 - DNA, 50 bp, Homo sapiens
ggagaaagcctggatgctcaaggtgctggagaatctggtaaaagcaccat

SEQ ID NO: 473229 - DNA, 83 bp, Homo sapiens
gtcggcttgtcctggctcttgccctcatcctggttctggaatcctcagttcaagggacccagacatggagctgcgggaagaag

SEQ ID NO: 473230 - DNA, 90 bp, Homo sapiens
cgcgggagccggggcggcccttggccgcattcccgcccgtcccgcagcggcgcgcggagccagctacaagcctatcgtggaattcatcga

SEQ ID NO: 473231 - DNA, 83 bp, Homo sapiens
agctgggacacccgggagtcaggaaatggacttgggaccctggaggactgacgctgctggcctgggcgtccccttccgctgag

SEQ ID NO: 473232 - DNA, 98 bp, Homo sapiens
ggcaacgatcggaactcggacacggcacaatgatgctatacaatgtgtctcctacaatcctattactcatcaactggcatcttgttcctccagtgact

SEQ ID NO: 473233 - DNA, 101 bp, Homo sapiens
cttgtcgcgagctgctgatacagaagagatggatattgaaatggacagtggagatgaagcctaagaatatgatcagatctgtgactttggcctggcccgtg

SEQ ID NO: 473234 - DNA, 75 bp, Homo sapiens
cagcgtggaggacctgtggaaggcatggaagtcatcagaaggtcagatgtcatgtaatccttcctttggtggcat

SEQ ID NO: 473235 - DNA, 100 bp, Homo sapiens
atttagctcaaattattgaagcctgtgatgtgtgtctgaaggaggatgataaagttctacatcaaacagttcgttaactgcagacgtaaattctggattt

SEQ ID NO: 473236 - DNA, 83 bp, Homo sapiens
cctgtacagcatcaactacctgcactttggggagcctaagtcctgctgtgagccgtgagctttgaggcggtgggatgtgtcag

SEQ ID NO: 473237 - DNA, 100 bp, Homo sapiens
gcggagtttcgggtccgaggagcctcgcgcggcgctggagagagacaagatgtccgccagagctgcggccgccaaggaaagaccacagcaagattctttc

SEQ ID NO: 473238 - DNA, 82 bp, Homo sapiens
gcagggcctgcagcgggagctggacggcgagcgcgagcggcgcgagaaaacacgcagcccaagaaggtccggaaggtcccgc

SEQ ID NO: 473239 - DNA, 75 bp, Homo sapiens
aaagaactagcagagctggtgatgtttatggcacagtaatggcatagaggagcctttggaagaatcctctcatga

SEQ ID NO: 473240 - DNA, 98 bp, Homo sapiens
cgccagacccgaggcgctagggaagatcgcaccgcggacgcccgctgagcttggcgcacgggccgaccagggtcctggcggcagagaccacgtcccag

SEQ ID NO: 473241 - DNA, 100 bp, Homo sapiens
cacggggtctggaggtcacagatgattccccaaagtacaattaccatttggactccagtggtagctatggcagaagagcactgatcgtactggctcactc

SEQ ID NO: 473242 - DNA, 75 bp, Homo sapiens
aattttccacctcctgacacaacaccactcagccgaatacatcaagcaatggtaacatctttaaatgaagataat

SEQ ID NO: 473243 - DNA, 100 bp, Homo sapiens
tgctttgttcctaaacaggaggtgaaaacattcagtcttctgccattagtttcggagcaacatcccctgtcacctggttgatatctcttgcggattaccc

SEQ ID NO: 473244 - DNA, 100 bp, Homo sapiens
ctctcaaagtgctgggattacaggcatacacatccctgtgatcatgagtctggctcaaagccaatttatagcaaatcatccatttctgtttattatgaag

SEQ ID NO: 473245 - DNA, 122 bp, Homo sapiens
ccgcgatccgggccgggagctgcgggcgcccgggcgcccgaggcttcccggtgcgctccgccagatgtgaagttcatttccaatccgccctccatggtggcagcggggagcgtggtggccgc

SEQ ID NO: 473246 - DNA, 95 bp, Homo sapiens
agacaaggctggagacaaacctcatatgcagacttatgaagttgaccttaataagttcagcgctgtgtggagatcctgagccgggccaagaggcc

SEQ ID NO: 473247 - DNA, 90 bp, Homo sapiens
gccggaggctcgccgacgaccttgggagccatttgtgcaggccaagctgcggcccgaggacggcctgtacctcattcactggagcaccag

SEQ ID NO: 473248 - DNA, 100 bp, Homo sapiens
agccgtccccagaacgcagatcagaggtagtcggacctttcccgctggcgcgcagcctcagctagactggcataaggtcccagctggtgatatgaagagg

SEQ ID NO: 473249 - DNA, 73 bp, Homo sapiens
actttcacaataagagcagaggatggaacacttcagtgcattcaaggctccctgaaacaacagtaacctaccc

SEQ ID NO: 473250 - DNA, 83 bp, Homo sapiens
cgtagcccgagtcggtcagcgccggagcaaaatgatgcttcaacacccaggccaggtctctgcctcggaagtgagtgcttctg

SEQ ID NO: 473251 - DNA, 80 bp, Homo sapiens
gtaaaggtcaatgcgtaggggtagagtaagagccctaatttgtttagaactgtaatatgcacagttaaaacaacttgtcc

SEQ ID NO: 473252 - DNA, 50 bp, Homo sapiens
ttcaaacttctatatcacagaaaaggaagagtgacccagtcccagccatg

SEQ ID NO: 473253 - DNA, 101 bp, Homo sapiens
atcctttccactggggtgaagttgattacctggctggtgtttgcttgttctggagtgatcttctgactggaaaagaactatgtcatggatcaaggaaggag

SEQ ID NO: 473254 - DNA, 101 bp, Homo sapiens
atgaaatcttgactgccatccttgcctcgctcactgcacgccagaacctgaggagagaatggcatgccagggcccactggaaaatgacttggtagttcatg

SEQ ID NO: 473255 - DNA, 90 bp, Homo sapiens
gaggatgtggatccctcagttggtcgattcaggaacatggtgcaaactgcagtggtcccagtcaagggtgacgaggaaacatttgaaaac

SEQ ID NO: 473256 - DNA, 98 bp, Homo sapiens
cgacggttcttcatcctttacgagcacggcctcttgcgctacgccctggatgagatggcgcatttctcctgggaggaatcctctactcctggcagttt

SEQ ID NO: 473257 - DNA, 75 bp, Homo sapiens
cttgggaacctagctgatgataggggggttccatctcccaacttgtccatgagaataaaggcagccccgttgatg

SEQ ID NO: 473258 - DNA, 75 bp, Homo sapiens
cccaactaccggcggctggagacgcagagagctggtgcaggcctttacccatgctcctgcaacattagaagcaga

SEQ ID NO: 473259 - DNA, 100 bp, Homo sapiens
gcccagagagggccagagcgtcggggaggcaagatgatccaccagcggttccatcctacacttgggatcttaattcatatcttgaagataaagtctacct

SEQ ID NO: 473260 - DNA, 119 bp, Homo sapiens
ggaagaccgcgcgcagggcctgcagcgggagctggacggcgagcgcgagcggcgcgagaaaatgaaggatttgggggcagagcacttggcaggtcatgaaggggtccaacttctcgggt

SEQ ID NO: 473261 - DNA, 95 bp, Homo sapiens
acctcctgtggtttttgattcaagtcctgttctacctactgccaattggaaagggttacacatcattttggaatgactgtatatcatctggatta

SEQ ID NO: 473262 - DNA, 118 bp, Homo sapiens
tcagtggagacgttgaaggagatgattaagtctggaatgaatgtggctcgtctgaacttctctcatggaactcatgagtgtgggatttgcagtaaaccgatgggcgatctcctggatc

SEQ ID NO: 473263 - DNA, 100 bp, Homo sapiens
taagctttgcaacagaattacagagtatgatgaaatgcttccagactgcacacttttacttagaggacagtacatcccctagagttatatccacacctcc

SEQ ID NO: 473264 - DNA, 79 bp, Homo sapiens
cccaaggccaacagagagaagatgactcagatcatgtttgagaccttcaacaccccagccatgtacgttgctatccagg

SEQ ID NO: 473265 - DNA, 78 bp, Homo sapiens
ttccgtcacaggggctatttgtttggatatcctgaaagatcaatgttacggcagtcccagtcctactgcacagacaca

SEQ ID NO: 473266 - DNA, 100 bp, Homo sapiens
cgtctgcctgtacaccgagtgcagccactcggccctgcgccgcgacaagtacgtggccgagttcctcgagtgggaatttcgctaaggagtttgtgatcag

SEQ ID NO: 473267 - DNA, 75 bp, Homo sapiens
aggcccagcatatacaaaggcatggaagtatgaaaatggttgtatcagagtaagatggacggtagctttgattgt

SEQ ID NO: 473268 - DNA, 74 bp, Homo sapiens
gaataggtgtatcaagtaatggtgcaaagcctgaagctctaagtatgcagtcatctccaaatggccagtttgta

SEQ ID NO: 473269 - DNA, 82 bp, Homo sapiens
tcggaaaccggtagcgcttgcagcatgatgatggatttggacatgcttctatgaagaaatgccacatggtccgagagcaaac

SEQ ID NO: 473270 - DNA, 100 bp, Homo sapiens
gaagttccagctctgcgccgatctatgcacgcagatgctggagaagtccccttatgaccagctgagatctgtatctgtggacctgaatgttgatccctcg

SEQ ID NO: 473271 - DNA, 90 bp, Homo sapiens
caatcagctggcctggtttgatactgacctgtaaatcatcctttaggtggcaggatcccattttctcactggcgactcccctgcgtgctg

SEQ ID NO: 473272 - DNA, 100 bp, Homo sapiens
gccgggacgggctgcaggcgggggtgctgcagaggacacgaggcggcgggctggagacatggaccgcggcgagcaaggtcaccctgctgattgccttcat

SEQ ID NO: 473273 - DNA, 101 bp, Homo sapiens
ctgatggtggtgctgagtctgattgctgcagcagaacagccctgtggcccccacagcccagcccaaagccccaccctcaagaactccccagtcgggatcag

SEQ ID NO: 473274 - DNA, 100 bp, Homo sapiens
gttacaagttgctgccaccttatcttagagttattcaaggggatggagtagatattaataccttacaagaggatatgggccctcacattttccaaacctg

SEQ ID NO: 473275 - DNA, 100 bp, Homo sapiens
aggggctgttcttttgctgcaaatgaagttgatggaattacactgtgatacgactgactgagcttcagtttcagcgactcacccgagaactggaagtgga

SEQ ID NO: 473276 - DNA, 100 bp, Homo sapiens
taccaacatgtctgtacctactgatggtgctgtaaccacctcacagattccagcttcggaacaagagaccctgtgctgattcccctttgctgtggataag

SEQ ID NO: 473277 - DNA, 75 bp, Homo sapiens
cgtgaaggggaagaggcccaccctggagtaaccctcactggagaatccagagattgctgctaaaattgattcaat

SEQ ID NO: 473278 - DNA, 90 bp, Homo sapiens
gaaagacgttcaacgacttactggggagagaaagaaaaggaacgggagctgagagtgaaactggaacgccaagctgaagaagaacgaata

SEQ ID NO: 473279 - DNA, 82 bp, Homo sapiens
ccgctgttcgacaccaagatcttcaggacgctctggcgtgttaagagaagtactagccggacatcatgagtggctgtcgggt

SEQ ID NO: 473280 - DNA, 100 bp, Homo sapiens
tgggggctcctatattgtccaggggttgaaatccattggggagagggacctcatctttcacaaaggccttcacaacgaagtgacctcacaatgactcaag

SEQ ID NO: 473281 - DNA, 76 bp, Homo sapiens
gtgctgtccacgcacctggacgacgcccggcgccagcacatcgcagaagacccttttgaggacttctttgggaatc

SEQ ID NO: 473282 - DNA, 75 bp, Homo sapiens
ggctcacctgtgcgggatggaacaaaagcggagctccctgggtcctcagcagtgaggctggcctccctgcgtgac

SEQ ID NO: 473283 - DNA, 75 bp, Homo sapiens
ccgggatcccagagctacccttcttggagcccacaggggatgcacaggaacaaacgagggaatatgcctcctatg

SEQ ID NO: 473284 - DNA, 75 bp, Homo sapiens
gaaggcagacagcgagtggcgacgatacttgaaactgcatctgcagagcactgattatggtaacttcctggccaa

SEQ ID NO: 473285 - DNA, 83 bp, Homo sapiens
caaacgtaaatgcaaaggacatggccggccggaagtcttctcccctgcacttcgctgcagactctatcaagaagaatatctaa

SEQ ID NO: 473286 - DNA, 74 bp, Homo sapiens
ctggattcaagtcccaggagtcctgaccagagagcaggactatgatgccttctttgaagccagagaaaataatg

SEQ ID NO: 473287 - DNA, 50 bp, Homo sapiens
agagcctgccccagagcccaaggtaaattcgaaccaccattatttcaccc

SEQ ID NO: 473288 - DNA, 75 bp, Homo sapiens
aatgaggcacctaaaaattgtataccgcagattcagacatttgaagacagtgatttgttccatttgattggtgtt

SEQ ID NO: 473289 - DNA, 50 bp, Homo sapiens
caggagaagctggccattgcggagggagctgcagtccatggctgaccagg

SEQ ID NO: 473290 - DNA, 90 bp, Homo sapiens
ctgggtcctcaatgcagggggccatttcatagatgaaaatggctctcgccttccagcaattccccggaatatatttttgggagagacctt

SEQ ID NO: 473291 - DNA, 90 bp, Homo sapiens
gtcaactttactgagaattttccacctcctgacacaacaccactcaacaggggcaagtgtccgagtggtgaatcagctacttacagagat

SEQ ID NO: 473292 - DNA, 110 bp, Homo sapiens
cggatcgaatccctcacgcgggcgcggatcgaccggagcagagagctggcgagcaaggtgagaagccctaccactgcaactgggacggctgcggctggaagtttgcgcgc

SEQ ID NO: 473293 - DNA, 75 bp, Homo sapiens
cggctgcggcggcggtggcggccgcgaccagggcaagtcattcatcaaagacgccttgaaatgtaaggcccacgc

SEQ ID NO: 473294 - DNA, 101 bp, Homo sapiens
tttccagcatgcaggggctgctcaggcaatggtggcttgctatccgggaaatggaacaggttatgttcgccacgtggacaaccccaacggtgatggtcgct

SEQ ID NO: 473295 - DNA, 75 bp, Homo sapiens
tagactcaggagtcgtcaagaggctctgcaccctggatggaaagcagccaataggagctctgaacccaaaaagag

SEQ ID NO: 473296 - DNA, 75 bp, Homo sapiens
ggaacgtgtcccggggccgacccggcccgtagtgtggaagcagcttcaggaggaggaagccaagaatctggtgag

SEQ ID NO: 473297 - DNA, 90 bp, Homo sapiens
gggattacagtgcggacggccagcttcttcactacagccccaactggaccctaggcaaaagtgagtggcactcctctgccaggactccag

SEQ ID NO: 473298 - DNA, 97 bp, Homo sapiens
gagacgcgggcggctagagccggagtggggcgagccgcggaacccggccgggagccgcgcgaggcggaagccattaatttgctagaaccaatgacaa

SEQ ID NO: 473299 - DNA, 82 bp, Homo sapiens
aggtggtggtgtgcgacaacggcaccggggctgctgagaaactaggtgaaactgagaaacttagtataatgattgaagaatg

SEQ ID NO: 473300 - DNA, 82 bp, Homo sapiens
gcagtgaagtggtgagcctttttgtcactggtctgggatctgccgatatgggggatatgaagacccctgattttgatgacct

SEQ ID NO: 473301 - DNA, 75 bp, Homo sapiens
aacaatgccatcttctgcacaattgttttaggcacttttgtggtacagctgggctcaaaatgcagagaactcaaa

SEQ ID NO: 473302 - DNA, 100 bp, Homo sapiens
gtggaagcgaagccgaaaaaggcagcagcgaagcctcctccagagttgtgacctggaagttgcaaacaaagtcaaagctgcactgaaaagcttgattcct

SEQ ID NO: 473303 - DNA, 90 bp, Homo sapiens
caaaaaatgcagaaaagctcaaggtgaagattgctgaccttggaaatgcttgttgggtggcaagaaactatattcagtctttgactcaga

SEQ ID NO: 473304 - DNA, 90 bp, Homo sapiens
ggaggattcagggaataggagctggggagcccttctgcgccacagggtgaccatcgggatgaggaggaagagacccacatgaagaagtca

SEQ ID NO: 473305 - DNA, 80 bp, Homo sapiens
ggaagcagccgatccagcctgcggagcctgtggggcaggctggagcattggatttgctaaaggagcttaagaatattcct

SEQ ID NO: 473306 - DNA, 146 bp, Homo sapiens
ggcggggccgagcgccgcgcgtcccgagcatggcaggctccctgcctccctgcgtggtggactgtggcaccggttccagaagaaggcttcttattgggatgtgtgtttgcaattgcggattatccagagcagatgtctgataagca

SEQ ID NO: 473307 - DNA, 100 bp, Homo sapiens
cagaaagggcagaatcttgtggcagtggtaatagtactggatatcaaattcgtctccagagtcagtggaacctagtgaagtgaaacaagcaacttcaaca

SEQ ID NO: 473308 - DNA, 98 bp, Homo sapiens
aggtgggctccaagtgtctcgatacagcaattttggcaataactcttatcactcctcaagaccctcatctggatccagtgtgcccaccacccccacat

SEQ ID NO: 473309 - DNA, 100 bp, Homo sapiens
tgtgtgtgatatttctctgttgatattaatataggtctctcggctgctgggggcattccacaacccaaaacaggtgaacctatgggtcgtggaacaaaag

SEQ ID NO: 473310 - DNA, 97 bp, Homo sapiens
ctccactttcgccagcccgtgccgcgagcgcggcctgcaggaggatttttagactctgaggagcagttggagctaatccacattatggaaatggaaa

SEQ ID NO: 473311 - DNA, 98 bp, Homo sapiens
aaaagccttttgtaaaggtggaagatatgagccatgaaactggaacgccaagctgaagaagaacgaatacggaagcacaaagcagctgctgagaaagc

SEQ ID NO: 473312 - DNA, 75 bp, Homo sapiens
ggaaatagtggcaggtgacagtctgcatgtgcagttttcagaatgttggctaccagggtatttagcctagttggc

SEQ ID NO: 473313 - DNA, 100 bp, Homo sapiens
gggcggacgagcacgaacacacgaatggcctgtccagaagacagccaaatacatccttcaaacagacttcactgcaggagacagagtggattcatcctgt

SEQ ID NO: 473314 - DNA, 75 bp, Homo sapiens
aaaagagaggacagcggacgagcagatccgactcattctgatgaaggaaagagcgtccctgtgcagctgcgtgtc

SEQ ID NO: 473315 - DNA, 74 bp, Homo sapiens
cagccagtggtcacagctggatgtttgcgacatcccagagagcttccagaggtcagcagcctctggacccgtga

SEQ ID NO: 473316 - DNA, 101 bp, Homo sapiens
gtggaggggcagtctcggctcaacgagaagatcctggaagaaccgcaccctctgatgttccagaaactccaggaccagacagggtctggctctgtcaccca

SEQ ID NO: 473317 - DNA, 74 bp, Homo sapiens
tcagacctgccaatttaccagagataattgataacaccctgtaacagctgaatactattcgttacttgtccttg

SEQ ID NO: 473318 - DNA, 48 bp, Homo sapiens
aggtctggagctcgaccgggccagcatgggctactgcatcctttttgt

SEQ ID NO: 473319 - DNA, 75 bp, Homo sapiens
acatgtcccaacattacatcccaacagccgctcaggaagcaatcttgcatgcgtctggaaatggcacaaccaagg

SEQ ID NO: 473320 - DNA, 80 bp, Homo sapiens
gaaaaggaagttttctggaatgggtttgtgtttgggatgcagaactacgggaacttcgagctgaatgttttataaaagaa

SEQ ID NO: 473321 - DNA, 83 bp, Homo sapiens
tttcggatcatgtctggtggctccgcggattataacagggcgtgatggtgggcatgggtcagaaggattcctatgtgggcgac

SEQ ID NO: 473322 - DNA, 100 bp, Homo sapiens
ttcaacaaaacaggagtcagcccgtacagcaagaccctggtcctccaaacgtctgagggccataggaaaaggatacagagtagagtttcatgaacctgaa

SEQ ID NO: 473323 - DNA, 75 bp, Homo sapiens
ccaaataagctatatactttggttacctatgtacctgttaccactttcaaaaaagtgtcggaggaaggcttccag

SEQ ID NO: 473324 - DNA, 83 bp, Homo sapiens
cagcacttaagcaaacgggaattctcgcgaaatctggcattttttaaagtttgcgccccacaaagaggaaatattccaaaggt

SEQ ID NO: 473325 - DNA, 100 bp, Homo sapiens
gagcaatttcacctgtgtttgccttcctggtccaagccttgtcatcggccagtaagtttgaagcagagttgaaagctgagcaagatgagcggaagcggga

SEQ ID NO: 473326 - DNA, 50 bp, Homo sapiens
tgcaagtacccgctcctccttaaggtgacttaagagattaaaattaattt

SEQ ID NO: 473327 - DNA, 51 bp, Homo sapiens
ctcttctccttcagagtaaagtggttgaggcggggtttcaccatgttgccc

SEQ ID NO: 473328 - DNA, 98 bp, Homo sapiens
ctcagatgctgccagggtccctgaagagggaagacacgcggaaacaggcatccgtgtcattctggaccttactcccaactaccggggtgagaactcgt

SEQ ID NO: 473329 - DNA, 100 bp, Homo sapiens
tgatgagggcttcagtgcagacgcagtggtggccctggagcagtatgccagcaaggagcacgtgcgaaaggtcttccagaagcaggcaagcatggaggag

SEQ ID NO: 473330 - DNA, 100 bp, Homo sapiens
gggcgattgcagtgcgttccgccaaaactgttacatcaggttgtggagcagttacaaaaggttcattttatcacagataccctgtcaaagggtgagacaa

SEQ ID NO: 473331 - DNA, 51 bp, Homo sapiens
ccatcctccaaacaagtgaagtctgttgcggttctcccacttttccataag

SEQ ID NO: 473332 - DNA, 100 bp, Homo sapiens
ccgctcagcggcagtcacctgttcacctgtggcacagcagccttcagccccatgtgtacctacatcgacttgacgttcctgacgaagcaggagatcctcc

SEQ ID NO: 473333 - DNA, 50 bp, Homo sapiens
caccgttcccccagccgggctgataaacccactgccctacagccgcgtgg

SEQ ID NO: 473334 - DNA, 83 bp, Homo sapiens
atctccagagctagcaaatcacccaaactcccaagagatgccctgtatccaagcccaatatgggacaccagcaccgagtccgg

SEQ ID NO: 473335 - DNA, 80 bp, Homo sapiens
tggtcttcctgctggggctcatgtttgagggcacagactccatcaagatggagaacgggcagagcacagccgccaagctg

SEQ ID NO: 473336 - DNA, 100 bp, Homo sapiens
tgtggataagcacaaagtcaagagacagcgattggacagaatttgtgaagcttcaggggccctgtcaaagttaacccgtggattgaaagatgaatcgctg

SEQ ID NO: 473337 - DNA, 100 bp, Homo sapiens
ctttatttcagatacagataagacgctgaacacgttttaagagggatgacgtcatgatgccccagcgggtgaggctgcaacacgaggctgccgttcagca

SEQ ID NO: 473338 - DNA, 82 bp, Homo sapiens
gaggtgacacggctgaaggaccttcttcgtgctcagggcctgggagatattattgatactatgctaagaaggaatctgatct

SEQ ID NO: 473339 - DNA, 51 bp, Homo sapiens
gcctagcgtcctggaattacttcaatcaaacaacaagggaggtgtcacagt

SEQ ID NO: 473340 - DNA, 82 bp, Homo sapiens
tggcgtgcactccgcacctcggggacattattgcgcgtggaacggctgcttttggaagtgatgtcttggcattgcccatttt

SEQ ID NO: 473341 - DNA, 100 bp, Homo sapiens
gactggcatgttctccttgagcaccatccggggtcaccaggcctaaatgtgcacagcatgctcaagcaccagacgctggtcctgacgctgcccaccgtcg

SEQ ID NO: 473342 - DNA, 74 bp, Homo sapiens
caggaccagctgcagctgctgtatggagagtcggcttgactacactgtgtggagcaagttttaaagaagcaaag

SEQ ID NO: 473343 - DNA, 100 bp, Homo sapiens
ctagactctagccgtcccactgaccctctgagccacagcagcaacagcagctcagaaaatgagccgtcagactgctacagcattacctaccggtacctcg

SEQ ID NO: 473344 - DNA, 75 bp, Homo sapiens
gcgccgcgaaggcggtgctcgggccagcccttctctgccgtccctgggaggaatgcatcctgtcgggcatcatgt

SEQ ID NO: 473345 - DNA, 100 bp, Homo sapiens
gggcgcccgaggggccgagcgaggtcctggctataagtcaccatggcacagcaagctgccgataagtatctctatgtggataaaaacttcatcaacaatc

SEQ ID NO: 473346 - DNA, 82 bp, Homo sapiens
gattcctcctccttggtcgccgcgtccttggctggcgtcttgatcctctcccagaaaaggttttacagcaaagacccaatgc

SEQ ID NO: 473347 - DNA, 96 bp, Homo sapiens
ctgtgcaactgcagctacagtggaaaaaagcaaactgctcttgatcccaggtcaacccccagaatcagctcttgtggccttgaagtggctgaagac

SEQ ID NO: 473348 - DNA, 90 bp, Homo sapiens
ggctgggggctgcggtcggcaaggaagcggagggggccggagaagagagctctggggtcgacacggttaacacagaaatctgcctcctgg

SEQ ID NO: 473349 - DNA, 100 bp, Homo sapiens
ccgaagatggtggcggctactcctcctgcggaaagtgaccagaagaggtgtgcagtttccaggcctggcccatacagacctccaacaggtgctcccctgt

SEQ ID NO: 473350 - DNA, 75 bp, Homo sapiens
cacccttccagatgatttttgaggtataattgaaatcctcaaaggaatgcaagaattgggagtacatcctgatca

SEQ ID NO: 473351 - DNA, 100 bp, Homo sapiens
tgtggcctcgttacctgcaggtattgggagatccacagctaagacgccaggacccactggaagcctagaaatgtggacagaggactgcagaaaatcaacc

SEQ ID NO: 473352 - DNA, 76 bp, Homo sapiens
cgcagacccaaatacgtgtctccccaggatgtgacgaccatgcaaacctgtttcttatctcagtcatcactatggt

SEQ ID NO: 473353 - DNA, 128 bp, Homo sapiens
atcctctagtagccacggtgtggcagctgctctgaaccaggacctggacccggacccaaagtgccatgtctttaatcccctgcccggatggcaacagtagttctaggaggagacaccatgggccctga

SEQ ID NO: 473354 - DNA, 100 bp, Homo sapiens
ctttcctgtgttagggagaataatgtttgtgacataaattcagtgcatggcttgtttgccacaggaaccatagaggccataggaaaaggatacagagtag

SEQ ID NO: 473355 - DNA, 100 bp, Homo sapiens
tggtggaggaggtggcaggcctcggcgttaacacagattatgcgaactggacagaacacttgggaaagtaaaaatatccttgctgtttcatttgctccac

SEQ ID NO: 473356 - DNA, 75 bp, Homo sapiens
gttcccgttaaccttagccacaaagtcaaaggtactccacatcagcattctcaagactggagaagttaggcctca

SEQ ID NO: 473357 - DNA, 75 bp, Homo sapiens
gaaggacatgaagactaccacatgatgaccctttggctttgctgagagaggactcagatgatagtgacgaatgtc

SEQ ID NO: 473358 - DNA, 101 bp, Homo sapiens
gttccaccaggccgggaagcccatcgggagggtgtgaagacagagaatgaccacatcaacctgaaggtggccgggcaggacggctccgtggtgcagttcaa

SEQ ID NO: 473359 - DNA, 90 bp, Homo sapiens
gatctgcagggagacgcacagccaggacatcctggaacctgggaaaggatagaagagcgagcagaatttttgaataagtctgtgcagaaa

SEQ ID NO: 473360 - DNA, 51 bp, Homo sapiens
cgcaactttgaggagacagtgcggtgggtcttatatccagatggccaggct

SEQ ID NO: 473361 - DNA, 96 bp, Homo sapiens
agtcaggaagcttctgccggttagctggccacgatatcaactatttggctttgtcagtatgtccgtggttcagaccctgtattaaagcttttggac

SEQ ID NO: 473362 - DNA, 50 bp, Homo sapiens
tctttgggggcagcctgcagaggctgcgatgccttcaattaagttgcaga

SEQ ID NO: 473363 - DNA, 82 bp, Homo sapiens
aggaggcctgttcataaaagatatcgaggatttagccggaaggatcaagcaaccccttctgagcctgagattgacctggaag

SEQ ID NO: 473364 - DNA, 100 bp, Homo sapiens
agcagaagcagccaaaatggatccccagtgatgacttcaaacctgcttctattgacacttcttctgaaggataccttgaggttggtgaaggtgaacaggt

SEQ ID NO: 473365 - DNA, 98 bp, Homo sapiens
gaacacgaaacagatgccaaccgagagggtgatgtacagttcattgattatgaatattctggatacaactacctggcatatgatattggaaatcattt

SEQ ID NO: 473366 - DNA, 100 bp, Homo sapiens
cttgtcgccagggttccctgacttctaccccaacaacttgaactgcacctggattatcgaaacatctcatggcaaggacgccctgcatgccaatggaggc

SEQ ID NO: 473367 - DNA, 142 bp, Homo sapiens
cggcgagctgcacctggagatctgcctgaaggacctggaggaggaccacgcctgcatccccatcaagattggtgctgaagacatggacggcttccaggcagacacggaggaggaggaagaggaggagggcgactgtatgatc

SEQ ID NO: 473368 - DNA, 99 bp, Homo sapiens
tagctttgtaggagcatggcttggagcacttcctattccactggattgggaaagaccatggcagggaggagatatcaccaaacatgatggaacaggcgg

SEQ ID NO: 473369 - DNA, 83 bp, Homo sapiens
ctctctgtgtggctgtaacttacgtgtactttaccaacgagctgaagcaggaactgtggctgcaccatctgtcttcatcttcc

SEQ ID NO: 473370 - DNA, 74 bp, Homo sapiens
tgaagcttcagaaattgttagaaaggaataatccagaatggctactctgatctatgttgataaggaaaatggag

SEQ ID NO: 473371 - DNA, 82 bp, Homo sapiens
agaggggacagaggcaccaaggacctccaagacagggcgccatgttttggaagtttgacctgcacacaagctcgcacctgga

SEQ ID NO: 473372 - DNA, 101 bp, Homo sapiens
agaaacgtgacgagcaatgatgaagaaacctatgagaatatcccaggccagtcaaagatcacattcctcttacaagccatcagaaatacaacagctgctga

SEQ ID NO: 473373 - DNA, 82 bp, Homo sapiens
gactatcctctccctcatgacccgagagaagcacccagatggctaatcaagacaagccctgaactggctgagtcctgcacat

SEQ ID NO: 473374 - DNA, 100 bp, Homo sapiens
cctctatgaatctttaagtgaaaagcaaggcatgacacaagaatcctttgggaacgcagctgttgttctccggagtcggctgaaggtcagggtggtgaag

SEQ ID NO: 473375 - DNA, 90 bp, Homo sapiens
gcggccaatgtgggatcgatgtttcaatattggaagcgctttgatttacagcagctgcagcccaggagttaaagtcactgtttgaaaaaa

SEQ ID NO: 473376 - DNA, 89 bp, Homo sapiens
gtgaaggtccggggcttgccctggtcttgctcggccgatgaagtgcagaggtttttttctgaatgaaaaatctactactcccgtctcaa

SEQ ID NO: 473377 - DNA, 100 bp, Homo sapiens
cccggatgctgcggcgcccgctggccgggctggctgcggccgccctgggccgggccccaccggacgataaccagttcaggatgtccatcctggaacgact

SEQ ID NO: 473378 - DNA, 78 bp, Homo sapiens
tgtggatgcaaatctgagcgttctcaacttggttattgtaaaaaaaggagtgttaggttgccctcggacatgccttca

SEQ ID NO: 473379 - DNA, 98 bp, Homo sapiens
agcaggctgagcgatacgacgggctgtaatccccttgcacaaaccggccggagtaaattgcagaatcaaagagctgctttgaatcagcagatcctgaa

SEQ ID NO: 473380 - DNA, 100 bp, Homo sapiens
agaagacggaaatccaaaggcagacagtacgggctcccttcgccaaactcttcattttctctgagaccaagacacattccaccccagtggggggtcccat

SEQ ID NO: 473381 - DNA, 99 bp, Homo sapiens
tgggcgacctgcaggcagcaccggaggcccaggtctccgtgcagcccaacttccagcaggacaaggacaacgctgtggaccgcctggcacctggggacc

SEQ ID NO: 473382 - DNA, 107 bp, Homo sapiens
gtcgcgaccagagccattggagggcgcggggactgcaaccctaatcagaaaatgtcactgaaattcacaaatgcaaaacggattgaaggacttgatagtaatgtgtg

SEQ ID NO: 473383 - DNA, 74 bp, Homo sapiens
cttgaaagcacaccagcggacgcacacaggatatcccagaagctcctgagagactgatgacagacaccattaat

SEQ ID NO: 473384 - DNA, 95 bp, Homo sapiens
tcagttgtgcgttgcggccagtcgccactgctgaaccttttgaggatggctttgcaaatggggaagaaagtactccaaccagagatgctgtggtc

SEQ ID NO: 473385 - DNA, 83 bp, Homo sapiens
tttgcttcagccgcagtcgccactggctgcctgagtgaaggagaacgacctgctcagaatgagaagaggaaggagaaaaacat

SEQ ID NO: 473386 - DNA, 100 bp, Homo sapiens
agatgatgagcagtttgtttctctgtatggcacagaagaatatttgaggccatgtggaagtgttacatcaccttttgcttggaaagatttactaagaagt

SEQ ID NO: 473387 - DNA, 50 bp, Homo sapiens
ggatcctctgtacgcccgttcactgaaaggtacaacttgctggggtaaag

SEQ ID NO: 473388 - DNA, 106 bp, Homo sapiens
ctctggggaaaatggctgcgtcttcgagtggacccagatgatgtggtaccagttggccaaagaagagcctggtgttggtgcatgtgctttggactagcatttatgc

SEQ ID NO: 473389 - DNA, 111 bp, Homo sapiens
ttcaacttcaatttttctgcagtggctctgggtccagccccttacttaaagctgtggatttcttcaatcagatcaacatgctttatggaactatcacagacttctgtacag

SEQ ID NO: 473390 - DNA, 76 bp, Homo sapiens
gattcatcatcatctgaaccagggatcacagtctaaggtccagattcggcaacacaccagtgcaacaaagactcag

SEQ ID NO: 473391 - DNA, 100 bp, Homo sapiens
tcatgagcaggcagcagctgcattgaaaaatgctggccaggctgtcacaattgttgcacaatatcgacctgaaggtttttagaacttcagccataaaaat

SEQ ID NO: 473392 - DNA, 85 bp, Homo sapiens
gactctgaggctgatatgcaatgtcacttacaacattaatcagatactgcatttaaggaacatggcaacccgtgtgtgtctcatc

SEQ ID NO: 473393 - DNA, 75 bp, Homo sapiens
ttggagggggcttccccggaatggagggctccgggcccaagtttgaggagaatcaggaaacccaggcccaacggc

SEQ ID NO: 473394 - DNA, 50 bp, Homo sapiens
ctcatggaggctgagcatttattcagaatttcgaggatgtcagatgtaaa

SEQ ID NO: 473395 - DNA, 100 bp, Homo sapiens
tgtccaacagaacgacctagtatttgaatttgctagtaacgtcatggaggatgaacgacaggtcaaaatgcagatcttcgtgaaaacccttaccggcaag

SEQ ID NO: 473396 - DNA, 90 bp, Homo sapiens
actgattacaagaatcctatagaccagtgtaataccctgaatcccgtttggttgggatgttccagtaattctgagaaattcagaagagac

SEQ ID NO: 473397 - DNA, 80 bp, Homo sapiens
atcctgctgcaattaccatcttagaaactgctcagaaaattgcaaaaggtcacccctcctaatttctcagtgtcacaagt

SEQ ID NO: 473398 - DNA, 74 bp, Homo sapiens
gacattttcgagcgcatcgcagagattttattccctcaaagttgcccccaaagttaaagccacagctgcgcctg

SEQ ID NO: 473399 - DNA, 100 bp, Homo sapiens
tatgagactcttaccctgggagatatgattaggagaagtggtggccacagtcgaaaaatcccaaggtttccactgtatccaaaaggaggggagaagttgc

SEQ ID NO: 473400 - DNA, 144 bp, Homo sapiens
gccagcgcctgagcccgcccttgatcttcgctgtggcatggcggacgaggggaagtcgtacagcggggtagaaatatttctgtcatggctcattcaaagactaggaccaatgatggaaaaattacatatccgcctggggtcaag

SEQ ID NO: 473401 - DNA, 73 bp, Homo sapiens
gacagctagaattggaaaaccttacagccatcatctctcagcaaggtgacatatttgtttttgacctggagac

SEQ ID NO: 473402 - DNA, 100 bp, Homo sapiens
acgagggcgtgtataatggaagctggggaggccggggagagattcgacacagagttgcagcctgtcaagaccttttggatcctgattcagccatccatcg

SEQ ID NO: 473403 - DNA, 83 bp, Homo sapiens
aacttcgttgcttgcttgcctgtgcgcgcgtgcgcggacatggcctcaaacgatgataccacgagtcaacccaaaagttgctg

SEQ ID NO: 473404 - DNA, 51 bp, Homo sapiens
aaggatgcccttttcatcgaagtggcagtcacagaccagacaagaaagctg

SEQ ID NO: 473405 - DNA, 100 bp, Homo sapiens
tggaggccctggaggacccttcccccgagctcatggagggcccagaggaggacattgctgacaagactacagtggtagtggaggccgaagcggcgggaac

SEQ ID NO: 473406 - DNA, 100 bp, Homo sapiens
ccaggcatgcagtgttcttggctgtgcaaaagtggaggcatttttcataatagaaggatgtgaagttaccccagatgtaaacatttcaggccaaaaattt

SEQ ID NO: 473407 - DNA, 97 bp, Homo sapiens
agttaaccagagccatccttcgggagaggatatgtagcgaggaggaacgcgctaaggcaaagcacctgatgcagagtttgcggggtggtacagaagc

SEQ ID NO: 473408 - DNA, 113 bp, Homo sapiens
gagacaggccatgcctttcaagtgcatgcagctcactgatttcatcctcaagtttccgcacagagccctgcatgcccaacactgccttgctcatcaagaaccccttggctgcc

SEQ ID NO: 473409 - DNA, 60 bp, Homo sapiens
ttggggaaatccttcggatggtgaactcattagaagttaacacagaaatctgcctcctgg

SEQ ID NO: 473410 - DNA, 100 bp, Homo sapiens
ctcacatatttacttcagatggtctgcatgctgaggtatcatgaactgatcactaaatatgggaagttggagcctttggcagaagtggacctaagacccc

SEQ ID NO: 473411 - DNA, 75 bp, Homo sapiens
atgcaattatggttggcagcactgtaacctttatagctggagtttatcagaaaaaagcagcaagcctcggcagca

SEQ ID NO: 473412 - DNA, 74 bp, Homo sapiens
gaggacttcggtcttttgttctgttgcagctgggtttgctgttgctaggggttgaatgcctttgagaacttgat

SEQ ID NO: 473413 - DNA, 75 bp, Homo sapiens
ctgccaccgctgcccgagcccgggactggtgattgcagctggaagtgcccatgaccgagctggcgtcctccgggg

SEQ ID NO: 473414 - DNA, 96 bp, Homo sapiens
cttgtggctgctttggacccccgtgctcctgcagggacactctgtctacggacccttgtggaggaggtgcgccagtctgtaactcctgccgagcca

SEQ ID NO: 473415 - DNA, 100 bp, Homo sapiens
gaagagcctgaaccacaggtaccagatgggctgcgagtgcaaggctctgacgcccgctctgcggcttcggtgtttgaacaggccacagtccaggagcgct

SEQ ID NO: 473416 - DNA, 50 bp, Homo sapiens
cagcctcccaaggagtctgcaagttgagccaaacttgcttcctgctgtga

SEQ ID NO: 473417 - DNA, 103 bp, Homo sapiens
ttgtagtccggccgtggttgggggagccgcggctcatgcgcggtgcacagaggcttgtttcacatctgtaacaacagatacttggcatatcgaaattttatga

SEQ ID NO: 473418 - DNA, 100 bp, Homo sapiens
caggattctcagcccttgcctgggagaacagttcaggagacagatggccccaagagcccagatccagaaagtgagtgagaaggttggaggagctgaagga

SEQ ID NO: 473419 - DNA, 50 bp, Homo sapiens
ttcatctaccacgctttcgttgttaagtccaaaagtgctgggcattgcca

SEQ ID NO: 473420 - DNA, 100 bp, Homo sapiens
gagttttctatcgatgttggttatgagagatttttgggacctgaaatcttttttcatccagagctaggtcagtggaaagtccaatcatgtgaggagaaac

SEQ ID NO: 473421 - DNA, 100 bp, Homo sapiens
ctgcaagcatggcaaagactggcaaaagcacaaggattctcgctgtgacagagacaacaccgagtatgagaaaagtgagcttgtagtggacaaaacaaag

SEQ ID NO: 473422 - DNA, 101 bp, Homo sapiens
ccatgttctctcgcgcgggtgtcgctgggctgtcggcctggaccttgcagccgcaatgggacccagatggaaggatgctcttagatatttttgatgaaaat

SEQ ID NO: 473423 - DNA, 82 bp, Homo sapiens
atcgatagggatgcagaggatcagaaccggtacctggatggcatgactgactttatggcctttcaccaagaacatgaagtgc

SEQ ID NO: 473424 - DNA, 86 bp, Homo sapiens
ctgtgggtgctgggacttcccgtccgcggcgtggaggaaaatgcatccgatgcagatttatggctcctgaacagttgcactgtaaa

SEQ ID NO: 473425 - DNA, 75 bp, Homo sapiens
ctgtgaagctgagactctgcgagtattcagactgattacgtctcaacacttttctgtagaaggtcagttggaatt

SEQ ID NO: 473426 - DNA, 82 bp, Homo sapiens
ctttgttttcccacgctaggagctaccacaacagccacacccactcgcccgggtctatggccacggtcggagagtggtcctg

SEQ ID NO: 473427 - DNA, 80 bp, Homo sapiens
aggacgccggaacaccctggaagccgagaaatggagatgtcagtgaaaaaagggatccagaatgattactaacctatgac

SEQ ID NO: 473428 - DNA, 78 bp, Homo sapiens
tgcagtgtcttccacaacctggtccagttacaacacagggatcacaacaaacacaaccgccacagaagcactatggca

SEQ ID NO: 473429 - DNA, 105 bp, Homo sapiens
aattttagcacccagtatgttttagatggcagtggccacatactttctcagaaaccttcacatcttggtcaaggttacacggtgtgggcacacaacctcattgcc

SEQ ID NO: 473430 - DNA, 101 bp, Homo sapiens
actgaaaccaccgtggaagtcgcctggtgtgaactgcagattcagaatggacagtttagaagaacctcagaaaaaagtctttaaggctcgaaaaacgatga

SEQ ID NO: 473431 - DNA, 100 bp, Homo sapiens
agtaaggctgaaatcattgaagtgcttggagtgcagaactgaaagagagagacaagagagacacctccaacttcgacaaagagttcaccagacagcctgt

SEQ ID NO: 473432 - DNA, 100 bp, Homo sapiens
gacatggccactccagtcggtgttgagcacggcgagcagtctcaggcctttagtgatgatggaaagaccgttgtttaccttgtggctttccatctgttct

SEQ ID NO: 473433 - DNA, 50 bp, Homo sapiens
tggggacgtgcctgggcctggcctgtgttccttgcctgtatctccccttg

SEQ ID NO: 473434 - DNA, 101 bp, Homo sapiens
ggccaccctactgcctggaggccggggagccgacgcctgatacttggtgcttgaaaaactgaagaaggaagacgctgaccgaattcatatattcagttctt

SEQ ID NO: 473435 - DNA, 100 bp, Homo sapiens
tatgctcctaagtgtgcagcctgtggccaacccatcctcccctctgaggtgaaagtccttctcggtcacagagtaatccaggttgcatgtgggagtagag

SEQ ID NO: 473436 - DNA, 50 bp, Homo sapiens
ggacggagaaaaatctgggacagtgtcttctcagaaaaaaccagccttga

SEQ ID NO: 473437 - DNA, 97 bp, Homo sapiens
ggtgctgccggcgcctcctccgcgggcgtgaaggcggcgctcctactccctccccggactccgcgggtggtcttcgaggccctgcacaatctggagc

SEQ ID NO: 473438 - DNA, 51 bp, Homo sapiens
ttcctcacccgcgcctgcgacctcggcacattcaggaccccgcgagccagc

SEQ ID NO: 473439 - DNA, 94 bp, Homo sapiens
cccagttggcccagaggatctcttctaacatccagaagatcacacagtgttatttcttcagaggccccacagtatcaaatatccgcctggctgg

SEQ ID NO: 473440 - DNA, 75 bp, Homo sapiens
cctgaggaggcgagctagccgggagttacaccgccaccgccagaaatattattcatctgtgccagaggaaggagg

SEQ ID NO: 473441 - DNA, 90 bp, Homo sapiens
atttaaggaaacttgcagagaatgaaatcactttgtgtcaaaaagaaataactcagctgaagcatcagaggcattatcatcccatagtgc

SEQ ID NO: 473442 - DNA, 100 bp, Homo sapiens
ttaacaaaaagttacccaaagaacttctgttaagtgccggtggtggtgtgcacattgagccccggtatagacagttcccccagctgaccagatcccaggt

SEQ ID NO: 473443 - DNA, 90 bp, Homo sapiens
aggactgttcttgaggtattcaggaaatgggtcctgatgaatatgaagagatggaagaagaggaggaggaggaagaggaggaagacgagg

SEQ ID NO: 473444 - DNA, 75 bp, Homo sapiens
agaagctgactgaggaaggctctcccaagggacagactaatatggttgagccccttatacccacgaattgctgat

SEQ ID NO: 473445 - DNA, 100 bp, Homo sapiens
aaaaaaaaaagaaagaaaactacaggcggggacggcttctcggaaggaccagtacctcctctcgcctgtgaactgttggtatctggttctgcatcagacc

SEQ ID NO: 473446 - DNA, 100 bp, Homo sapiens
caggctgtgctttggaagagtatgcctgggtcccgccgggtctgaagcctgaacaggaagtccagcgctgtactgctgatatgaacatcactgcagagca

SEQ ID NO: 473447 - DNA, 83 bp, Homo sapiens
gctgtttgtattttggctgctgcaggagccattttaggctttatcctgtggataaacgcagagtgaacgagtttggggagtcc

SEQ ID NO: 473448 - DNA, 50 bp, Homo sapiens
tgcgagagcctcctcacttgggggagttgctgagtcagcccagaccggaa

SEQ ID NO: 473449 - DNA, 100 bp, Homo sapiens
gacaatcacggagggtgagtggctggaggtcatagaggagggagatgctgacgaatgggtcaagttgagtacattcggcgccagaagcaacccaggccac

SEQ ID NO: 473450 - DNA, 75 bp, Homo sapiens
cgggccggggaccccttagacctcgtggcgctcgcagagcaggtgcagaagccatgcctttcttggacatccaga

SEQ ID NO: 473451 - DNA, 75 bp, Homo sapiens
tctcacttaggccaagaagtcaccttgtgtggatggattcagtaccgaagggtttggaaatcccttgtctccagg

SEQ ID NO: 473452 - DNA, 75 bp, Homo sapiens
ataacccttttaacgagtattccaaatttgatggcaagatatggccgcgtggaaagtgtcaaaattcttcccaag

SEQ ID NO: 473453 - DNA, 96 bp, Homo sapiens
ccgtccccgccgactccctccgatggcggcaccaagaggcccgggctgcgggcgctgaagaagatggtggtttgagtccagccaatgacactggag

SEQ ID NO: 473454 - DNA, 100 bp, Homo sapiens
aacagcaatccagacctctctggagacgagaatgtacggaatggccacatcaaaagaatcactgataatgacatccagtccctggtgctagagattgaag

SEQ ID NO: 473455 - DNA, 100 bp, Homo sapiens
cttcctggtttacctggcactcctggacaggatggattgccagggcttcctggcccgaaaggagagcctgcacgtgtggttctcaaatataggcattctg

SEQ ID NO: 473456 - DNA, 75 bp, Homo sapiens
gtttttgaggatcctgctccacagagaatgctctgcacccgttgatttaaagccttccatctgaagtatgatgaa

SEQ ID NO: 473457 - DNA, 90 bp, Homo sapiens
ccagcatcaagatgatttatggtaataagctcaaggagaaattgaagccatagtcgtgcctgtttgcttagcattcctattgacaactct

SEQ ID NO: 473458 - DNA, 113 bp, Homo sapiens
aaagaggggcaagaaccccatgaaagctgtgggactggcctggtgccccgcaccgtcctctggctgaccatcgagctagccattgtgggctccgacatgcaggaagtcatcgg

SEQ ID NO: 473459 - DNA, 74 bp, Homo sapiens
ggattcccagtgtccccacgagctgtgtggtccatgatgagttactgcaacaaggaggtatacaataaggagaa

SEQ ID NO: 473460 - DNA, 74 bp, Homo sapiens
cagcaagcctctgcaaatctgggacaaaaaggctgtgggtgagcgtggaggatgctcagatgcacaccgtcacc

SEQ ID NO: 473461 - DNA, 100 bp, Homo sapiens
cttctgttcttcgtagccggggagaacctcgtgtagtgagggttcaggaaggtgagactgccaactttacagttctcagaaatggatctgttgatgtgac

SEQ ID NO: 473462 - DNA, 100 bp, Homo sapiens
tcacagtgcttccaccctggacgaagccacccccaccctcaccaaaataccctctaccatctgctttggtcagggtgccgctcgaggatttaaaagcaac

SEQ ID NO: 473463 - DNA, 74 bp, Homo sapiens
cggtctgggccttttgggcagcttttccggcctgacaacttcatctttggaaagaaccggaggctgaagcaggc

SEQ ID NO: 473464 - DNA, 50 bp, Homo sapiens
cacagtgttaacaatgcatccacagaggacctacaagaacagtgaggagc

SEQ ID NO: 473465 - DNA, 83 bp, Homo sapiens
ccgcgccccccgggacccccacgccgccgccagtgcctccggagccagcgtggtggccatagacaacaagatcgaacaggcca

SEQ ID NO: 473466 - DNA, 100 bp, Homo sapiens
ttaccctgttaccctggaagttcttcatcagtatattcggtgctcttcgaactggtgcttatatggtgtacattttgatgaccaaaggcctgaagcagtc

SEQ ID NO: 473467 - DNA, 100 bp, Homo sapiens
ttggaagagtatgcctgggtcccgccgggtctgaagcctgaacagctggacagtgccacatcgcttatccaggcagctaaaaacctgatgaatgctgttg

SEQ ID NO: 473468 - DNA, 100 bp, Homo sapiens
gtcaacagaaaagattttgctgtcaaagttgtgtcagtgaatacaaacaggctacccacctttctgttctgagacccctcaagagacatataagaaggtg

SEQ ID NO: 473469 - DNA, 77 bp, Homo sapiens
tcaaggatatgctgtattcagctcaggaccaggcaccttctgtggaaggacaatgaaggccaaacagctctacatta

SEQ ID NO: 473470 - DNA, 75 bp, Homo sapiens
gtcctggctcttgccctcatcctggttctggaatcctcagttcaaggtgatgaacagcctccttctaaatcattg

SEQ ID NO: 473471 - DNA, 74 bp, Homo sapiens
cctggatgacttcacggacttacagccgctccgaccgctggtcccagatgccagcaagcagcggctgatggaga

SEQ ID NO: 473472 - DNA, 96 bp, Homo sapiens
ccggaatgctgcccgatggccctgggtcctcgctgtggggcaatccgggcttgcagacgaggaagcgcaacaggaaaggagagaagaatggcaagg

SEQ ID NO: 473473 - DNA, 100 bp, Homo sapiens
ctaagctgaataaagctgttttggaactgtcaggtacctcaaagctctctctgccttctggggaaaagataacttttcttgatactccaggacatgctgc

SEQ ID NO: 473474 - DNA, 90 bp, Homo sapiens
cccagctacctccccaataggtgcatcaggagcttgtgcagtggaggggtcaaagaaaactgatgttgaggagagaccaagaacaacact

SEQ ID NO: 473475 - DNA, 101 bp, Homo sapiens
ttcgcggagaaaaggctgacatgcccgtcctatatgacagcggacaaggcaaaatctcagcaagttcggacctctagtacaataaggcgaacctcctcttt

SEQ ID NO: 473476 - DNA, 90 bp, Homo sapiens
gagaaagatgatgatgttgtaagccttagcagccttgatctgaaggggtgaaagatttgaaagttgaagatgacatctcaatgaaggtga

SEQ ID NO: 473477 - DNA, 100 bp, Homo sapiens
aaaaggtgacatagaaatcagtctttatacagttgaaaagaagaaaaagccatcttacactactcaaagggagtctgtgagccacttcactacaagaact

SEQ ID NO: 473478 - DNA, 90 bp, Homo sapiens
gaaagacagctggattcatggtccgtactgctgagtgagtctatgatcttggctgacagcagccatggcgagcggcagtggagacagcgt

SEQ ID NO: 473479 - DNA, 100 bp, Homo sapiens
gggcgtcaacatctacaaggaagggcaggatgtacccctgaaaccggatgctgagtaccctgaatgttcaacgatctcgcctctctgtcgctgacgctgc

SEQ ID NO: 473480 - DNA, 98 bp, Homo sapiens
acgaggaccatgctgggccggagcctccgagaagtatcttgcaatatattcagaactctccctcctagtgacagcaatgaatttgatccagaagaaga

SEQ ID NO: 473481 - DNA, 98 bp, Homo sapiens
cgaatcgcagggagtcgccgctggagaggggctcggcgcccggcggggactgcagattgtaaaccatggctgtgtggatacaagctcagcagctccaa

SEQ ID NO: 473482 - DNA, 75 bp, Homo sapiens
aatgcagctgtgaacgatcagagctggtgccgacaagaaagccgaggctggggctgggtcagcaaccgaattcca

SEQ ID NO: 473483 - DNA, 89 bp, Homo sapiens
attcgcagtggtcgcttcttctccttggagctcgaggccatgagcagatataccagcccagtgaacccagctgtcttcccccatctgac

SEQ ID NO: 473484 - DNA, 96 bp, Homo sapiens
ttactatagaaaatattcatcaacctagagctgccaagaagcattcttcatctaaagataaggtacttttacagcgggttgatgaactagagaagc

SEQ ID NO: 473485 - DNA, 99 bp, Homo sapiens
tccacaccacgctctcagtcagcctggggaatgagacccaaactgctcatacagaattacgcatttccacttctaatgatcacacgcgctgcaacgtgt

SEQ ID NO: 473486 - DNA, 51 bp, Homo sapiens
aaaaatgtgaaaaccaacccccgaacgtcactttggaacttcttgggtgaa

SEQ ID NO: 473487 - DNA, 78 bp, Homo sapiens
gtgttggttgctttcggccagcgggacggcatccgaggtggttccacgagtgtttgggcgcatggtgggtaaaagccg

SEQ ID NO: 473488 - DNA, 100 bp, Homo sapiens
tggaggaggagccgccgccgccagatcactggggtgatcctgctggctgttggagtctggggcaaacttactctgggcacctatatctcccttattgccg

SEQ ID NO: 473489 - DNA, 84 bp, Homo sapiens
agaagtcgcgtgtctaggtgagtcgcggtgggtcctcgcttgcagttcagcgaccacgtgttctaagaacggaagcatctgggc

SEQ ID NO: 473490 - DNA, 100 bp, Homo sapiens
tggaatttcaagtaattgggtatcaaaccacagtcagacttgttggggcttattcaggtcatgattgtggtatttggagatgaacctccagtcttctctc

SEQ ID NO: 473491 - DNA, 100 bp, Homo sapiens
tcccgaattccagtcacttttcacagaaggactgaagagtctgacagactatgaaaatgatgttagacaaaaagcaaattcgagcaattttcttattcga

SEQ ID NO: 473492 - DNA, 90 bp, Homo sapiens
ggagaactacagaaacctggtctccctaggtggccagcatcgaaatgttcagccttttagtgatgaagatgcatcaattgaaacaatgag

SEQ ID NO: 473493 - DNA, 96 bp, Homo sapiens
acagctttatcgtctgcaacaacatgttaagtgcctagaaagagccatgaagtttgcctttgaggaattccacctgtggtaccagtttgctctgtc

SEQ ID NO: 473494 - DNA, 82 bp, Homo sapiens
aaaagcagggaggttatgaggcttaataaagaagggaaagaatatggcaaagctgatgcaagatgggtttattttgatccaa

SEQ ID NO: 473495 - DNA, 82 bp, Homo sapiens
agaagatcatcattaaggacggaggcacggactggggttttaaggggtgtggcaggaggttttggactcgatgagtttccac

SEQ ID NO: 473496 - DNA, 100 bp, Homo sapiens
ctggacgatcactgggactttaccttctcatactttgttagaaaagccaccagataacgaaggaggcccaacttcattcaataaggagcctgacggattt

SEQ ID NO: 473497 - DNA, 51 bp, Homo sapiens
aactacaatcacctaatgcccacaagatccatcacaaagcgaagtcatggg

SEQ ID NO: 473498 - DNA, 100 bp, Homo sapiens
ctttttgctagctggttttggaacagtttcagctggcatggtactggatatagtacaggacaagtcctgcgcttggggatcctctgtacgcccgttcact

SEQ ID NO: 473499 - DNA, 50 bp, Homo sapiens
catagcccgaaaaagtgatttgggttcccagtctaagtgggtgactttcc

SEQ ID NO: 473500 - DNA, 100 bp, Homo sapiens
tgatgcaaaggacttagaaggacaaacgtttgagaaatgtaatcttggttctcctgaagatttcctctccaaagccttagatcctcctcagctccaagtg

SEQ ID NO: 473501 - DNA, 100 bp, Homo sapiens
gcaggaaatccaccccgctgcacttcgccgcaggtaccttgggatcacaaggcccctcacataccctgtgaggcagaatgggaaatgcatggcgaagatg

SEQ ID NO: 473502 - DNA, 83 bp, Homo sapiens
cttcgcggccagcatttctacgccgtggagaggagggcatattgcgagggctgctacgtgaatttttgaagagattcggaaaa

SEQ ID NO: 473503 - DNA, 100 bp, Homo sapiens
ttgttccttattgtggttcctgctgtggttttgatcatgttgttaccctcggacgtagcccggcttgtattgggccgactgcagcagtggcccagggcaa

SEQ ID NO: 473504 - DNA, 100 bp, Homo sapiens
ctagctatgtggtgtcagtgattgaacaaattttgcactacatgattcacaatgattgctctggaagcagccaaagcactggatgacaagaactgctggg

SEQ ID NO: 473505 - DNA, 98 bp, Homo sapiens
tacaacttcaaatctgacatctggtctcttggctgtctactatatgagaaagcagatctggctgtggcaggcctcaccattacagctgaacgggagaa

SEQ ID NO: 473506 - DNA, 80 bp, Homo sapiens
ttgtgcttctgcccaacgacatcgatggcctggagaagggtagaagagcagaggatggctctgtcattgattatgaactg

SEQ ID NO: 473507 - DNA, 74 bp, Homo sapiens
ttcttgatcagtatctcactctgctggcagatgatccagcagagactccccctaatgggccagattgtggctat

SEQ ID NO: 473508 - DNA, 78 bp, Homo sapiens
tgcaccagaatgaaggagaaccagaaacatatctattatatcacaggtgacaccttgtttgtggctggctgcgggaag

SEQ ID NO: 473509 - DNA, 88 bp, Homo sapiens
gcagctttatccaggctggtctgcaagagacaattatggtaattgggatacttctggcagcgaactgagtgaaggggaattggaaaag

SEQ ID NO: 473510 - DNA, 74 bp, Homo sapiens
ttgcctgttgctgctatacctcatcggggcggtgattgccggagagacacatctcaattcaaaggcagcttgct

SEQ ID NO: 473511 - DNA, 100 bp, Homo sapiens
cctgtgttctgcttttttcattgttccactggacgctcatcagagggaagatctttttcctcaattgagagcctccttttcacctgaccagaagaggctg

SEQ ID NO: 473512 - DNA, 98 bp, Homo sapiens
tctgcacgaagttccggcgcatcctccacaccgacaccatctggaggaggcgttgccgtgagggcatgagccatgagcccaagtccccttcgctaggg

SEQ ID NO: 473513 - DNA, 50 bp, Homo sapiens
aagaaccttctggactaatgatgatccagatgtggacgagtgcagctccg

SEQ ID NO: 473514 - DNA, 96 bp, Homo sapiens
cctacgtcccgctgccgtcgccgccgccaccatgcccaagagaaaggaactggcgctgaagaccctggggacagatggcctttttctcttttcctc

SEQ ID NO: 473515 - DNA, 99 bp, Homo sapiens
gatatccaggctgaatctatcccattgatcttaggaggaggtgatgtacttatggaagatgagaatgtgcctactgctcctgatcctccaagtcaacat

SEQ ID NO: 473516 - DNA, 100 bp, Homo sapiens
ccggcttctccaacacggaggaggagcagacgctcaaccagcttctggtagaaatggatgccactgaggcggctcccagctgcgttggcgacatggccga

SEQ ID NO: 473517 - DNA, 100 bp, Homo sapiens
ttcaacttcaatttttctgcagtggctctgggtccagccccttacttaaaggggtggcactgaatcaacaagacaagcaactcaattgattaatgctttg

SEQ ID NO: 473518 - DNA, 103 bp, Homo sapiens
cgacaattgttgagttgggctccatctttcagcagttggcacacatggttaaggaacaggaggaaaccattcagagacagagtctcgctctgttgcccaggct

SEQ ID NO: 473519 - DNA, 90 bp, Homo sapiens
cgatttacctggagaaaggagtgcctggctgttatggaaaggtatgatctcgtgaaatcttgagagaaactgaatgacgaatgaaactat

SEQ ID NO: 473520 - DNA, 100 bp, Homo sapiens
tggttctcagactggaacagcgaagcatgttggcagataaattgaacatgactccagaagaagctgaaaggtggattgtaaatttgattagaaatgcaag

SEQ ID NO: 473521 - DNA, 96 bp, Homo sapiens
ccccaccccttggagccaggcgccggggtctgaggtcccctcttgctgttggctgcacatcaggaaggctgtgatgggaatgaaggtgaaaacttg

SEQ ID NO: 473522 - DNA, 100 bp, Homo sapiens
attcagttgaaatgcaactactgcaaaaattccttttgttcaaaaccagaaatcctggaatgggagttgcaggaagaggcagaggaagaggaagaggaag

SEQ ID NO: 473523 - DNA, 100 bp, Homo sapiens
ctgagttaatgtcaaatgacagcaaagcactgtgtggctgaataagcggtttcagcgttaaaaacaatggccagtcagggaggccccaagtatactctct

SEQ ID NO: 473524 - DNA, 90 bp, Homo sapiens
ctttaaggtgatatggagcaactgctttcacaggggcaccaggtgtatgtatggatctatgacccagttcactttaaaacatttgtcatg

SEQ ID NO: 473525 - DNA, 100 bp, Homo sapiens
ctggggaaggtgctcaattcccatacatgcactagaggtacagcagggaagaactggaaactcagagaaagaaactgcccttccatctacaaaagctgag

SEQ ID NO: 473526 - DNA, 82 bp, Homo sapiens
gaaggataagtcgaaggggaaggcgcctgaagaggacgaagatcacacaaaccctgaactggctggtgaggatgacatcaga

SEQ ID NO: 473527 - DNA, 82 bp, Homo sapiens
cagatatagccgttggtacaaagacctgcctagagctggaacgttacctccagagcgagccctgctatgtttcagcctcaga

SEQ ID NO: 473528 - DNA, 74 bp, Homo sapiens
acaaaatgtgaaattcttcaattattaaagccaatgtgtgaaagccagagcccagaggtggagcagttagggag

SEQ ID NO: 473529 - DNA, 100 bp, Homo sapiens
accttcctgcagttcttcggccggtgttatagttttgccgctggactcttccctcccttcccccaccccatcaggatgatatgagacttgaaagaagacg

SEQ ID NO: 473530 - DNA, 74 bp, Homo sapiens
gccctgccctggaacagcttcagcagctagagaaggccaaagctgcaaagatccccgtcgaggtcaagatcaag

SEQ ID NO: 473531 - DNA, 82 bp, Homo sapiens
gcgcagaaaccccgttgacaaggcactgctttttcatgacgaaatcatgagtggaggatctcaagtccacattttttggggt

SEQ ID NO: 473532 - DNA, 50 bp, Homo sapiens
ttcgacttggagtctttgtccaggacgaacatacatatgatagttgagaa

SEQ ID NO: 473533 - DNA, 100 bp, Homo sapiens
gagcccggaagcgcagaagctggtgtttcaggcctcacctgaagatcatgaaaaatacggtggggatccacagaaccctcataaactgcatattgttacc

SEQ ID NO: 473534 - DNA, 100 bp, Homo sapiens
caaggacgacacccactactttgtgatgacagccaagaagcagtgcctgctgcggctgggggtgctgcgccagctgagatatggggagcctacactccgg

SEQ ID NO: 473535 - DNA, 100 bp, Homo sapiens
tcttcgctctttgcatcttaactgcagtgctacagctagaatgaagcacatcaacctatcatttgcagcgtgtggatttctgggcatttaccacttgggg

SEQ ID NO: 473536 - DNA, 100 bp, Homo sapiens
aggagggcaaggtgtctggctgcgcgtttggctgcaatgagctcggcctcggggctccgcagggggcacccggcagccgcgacaattccccaagcctgaa

SEQ ID NO: 473537 - DNA, 75 bp, Homo sapiens
gcacagcagaagctctgaatcgtgttcctgaatgaaagaagtcagccaatcctgaggcaaaagaaacattttaat

SEQ ID NO: 473538 - DNA, 127 bp, Homo sapiens
agttcctccccgggcccctgagccatgcccatcgcagccgccccgaaggagccagcacccttacccttctgaagaacagaaaaagcagttggcacaagacacgggactcaccatccttcaagtgaac

SEQ ID NO: 473539 - DNA, 100 bp, Homo sapiens
aagaaggaaaattagagaagatccagaccaaggcagggttaaagcacgaattgggagctctcagcgacatcaccagtcagcagccaaagacctaactcag

SEQ ID NO: 473540 - DNA, 96 bp, Homo sapiens
ccagccccctctgcagaatgccaagctgttgcttttaaaaatgccaaacagtttgagcaagcaaaagatgcctgcctgagggaagctgttgcccat

SEQ ID NO: 473541 - DNA, 100 bp, Homo sapiens
cctgggctttcttggggtgcagaggaatctggaaaaccaggggctcatgtaactgtgaagaagctgtttgttggcggaattaaagaagatactgaggaac

SEQ ID NO: 473542 - DNA, 100 bp, Homo sapiens
tccctagaaaagttcactcgcagtgtgatcaaaagcagcatggatctgcctgtggatgaatggaaatcatatctgcttcaaaagtgggcttcactcccga

SEQ ID NO: 473543 - DNA, 100 bp, Homo sapiens
ccaaacatcaagcagaatgtgatttgcttgaagatatgagggcagagcatcaaccccaagttggcgggcctgattgggcggcacgggccccagaacaagc

SEQ ID NO: 473544 - DNA, 83 bp, Homo sapiens
cccgaacttctcccgctctacctcagcctgcgggactgctcggctcggcttctaggcgacaatgcagatcttcgtgaagactc

SEQ ID NO: 473545 - DNA, 82 bp, Homo sapiens
gaccaccaaggaaatatttatgtttttgacttacatggaaacagtaatcagttgtggagacccaggtataccagccaatgga

SEQ ID NO: 473546 - DNA, 90 bp, Homo sapiens
caaatgtttccttaaagtgcctcgatctaaggatgaccctggaaagtttgcttgcctaaactggacttgaagcaatttaaactactggag

SEQ ID NO: 473547 - DNA, 100 bp, Homo sapiens
gatgcagaggaaagaaaagaatacattcctgattacctgccacccattgtgtcttctcaagaagaaccttctgaggaaaggaggccatacagaaattgaa

SEQ ID NO: 473548 - DNA, 75 bp, Homo sapiens
gaaataaagaaacttcgagaactggaaggctatgataaggaaccactcgttttgactattattttatcactcttt

SEQ ID NO: 473549 - DNA, 90 bp, Homo sapiens
gcacccgccgtgccgcatgagcatcgcggagcttgacccgtccatcgctgtgacagccctcagcgcctttttccaggagaccaacatccc

SEQ ID NO: 473550 - DNA, 75 bp, Homo sapiens
cccagatgatgccagcaagcgtcttaactctgcgctcctcagaccaccggcaggtgaacagcctgatgcagaccg

SEQ ID NO: 473551 - DNA, 100 bp, Homo sapiens
cagccttctgaagtgggaagttgctggattctgatggcaccattactatagaggagcagattgtccttgtgctgaaagcgaaagtacaatgtgaactcaa

SEQ ID NO: 473552 - DNA, 50 bp, Homo sapiens
ctggtctcgaactcccgacctcaggacagaagcagtacaacatccacgtg

SEQ ID NO: 473553 - DNA, 83 bp, Homo sapiens
cgaccagatcttccaggacgagacgggcaagaaccgggggatatgagactttctactcggaatatcctgagtgttgcgtggat

SEQ ID NO: 473554 - DNA, 80 bp, Homo sapiens
cggggcgctccaggaggcactcacaggaggatttgttggtattgaggaaaacggtgaaatcctttttggctgtttgccag

SEQ ID NO: 473555 - DNA, 100 bp, Homo sapiens
caacttctcccggagcagccggagagcaggcgtcgggacgcagcaaagagaggagaggtgaactaccgaggccaggtggtgagcctgatccggatgcgga

SEQ ID NO: 473556 - DNA, 100 bp, Homo sapiens
cctaaacacctcaacgatgacgtggtcaaggttttgcacactagggaccaagaagccctcggggacactgctgagaaaagactgccgaagggaagaccag

SEQ ID NO: 473557 - DNA, 97 bp, Homo sapiens
gggattaatgctaaatttgtgaatgctgtgtatgataccttacttaatactaagagtcaagtaccattggccaggatcaaacgcttatggaacgtga

SEQ ID NO: 473558 - DNA, 113 bp, Homo sapiens
agaggattggaggtgtcagtgttaaaggaacctctacaacgaaggtgaagccacggaagataaggaacgccacagaagtatgatcccactttcaaaggacccatttacaatag

SEQ ID NO: 473559 - DNA, 82 bp, Homo sapiens
gttcacgttcatgggcgagggaacagatgagaaacccggcaatgaaagacatgaagaatgcaaccctctccctgaattctaa

SEQ ID NO: 473560 - DNA, 75 bp, Homo sapiens
gctataacctacaagcagttggacagggtattgcaggcaacaaggacctttcatacagggcagccacaccttgtc

SEQ ID NO: 473561 - DNA, 75 bp, Homo sapiens
aagctattcagacacccctgaaatctgccaaaatgtgggccaaactgaaattgcagaaggcttcagaacgatggc

SEQ ID NO: 473562 - DNA, 100 bp, Homo sapiens
acctttttcacctgtgacacagattttttacgtccttcagacacagacccgaggggaagctgcagccagccagctgattttatatcactatcctgaactt

SEQ ID NO: 473563 - DNA, 98 bp, Homo sapiens
cccctgcgagccctgcgcctcagccgcgccgagcgctcacaaagcgttttcccacccggtggaagttgatgggtcgaaactaaatgtgaccagcacgt

SEQ ID NO: 473564 - DNA, 73 bp, Homo sapiens
gtgcttcctcagcccctgtcaaaaagcagtttccaccatcctggagtgtggttttgggtcctgctcctcggtg

SEQ ID NO: 473565 - DNA, 74 bp, Homo sapiens
tgaatcttgacaagaccatagagagttgcaaagcacaattaggtcaaaatgcagatcttcgtgaaaacccttac

SEQ ID NO: 473566 - DNA, 100 bp, Homo sapiens
cggcaccgcgacggcggcgaggccctggtcagccccgacggcaccgtcaccgaggcgccgcgcacagtcaagaagtagaacttcatggaggaacacggag

SEQ ID NO: 473567 - DNA, 89 bp, Homo sapiens
gagcgagctgagtggttgtgtggtcgcgtctcggaaaccggtagcgcttgcagcatgggctgaagaagatgcagagcagcctgaagctg

SEQ ID NO: 473568 - DNA, 82 bp, Homo sapiens
agcagcggcgggggcccgagggcaagagtgagccatggagctacgtgtggggaacaagtaccgcctgggacggaagatcggg

SEQ ID NO: 473569 - DNA, 100 bp, Homo sapiens
gcactgaggaatgtgccctttcgctcagaggtcctgggctgggaccccgacagccttgctgactatttcaagaaggtttcccttgggggctttgaaataa

SEQ ID NO: 473570 - DNA, 60 bp, Homo sapiens
ctatctgggcaaaattaggagagacgactgggtttggattcagaagaggattattataca

SEQ ID NO: 473571 - DNA, 82 bp, Homo sapiens
gctaaagagagcagtaccctgatggagtcccttgcaggcctccggtgtggctgtctctgatggtgtcatcaaggtgttcaac

SEQ ID NO: 473572 - DNA, 100 bp, Homo sapiens
gcagcgtccctgtgacctggccgatgaggaagtactgagcctgttggaggaactggcccggaaacaggaggacatgagcgggatcgtgtgcagaagaaaa

SEQ ID NO: 473573 - DNA, 100 bp, Homo sapiens
gggacgcgacgcacaaccaggcgatggtgcactggacgggcgagaacagcagcgaatatgaagacaaggctggaagacctagcaagccaccctctccaaa

SEQ ID NO: 473574 - DNA, 83 bp, Homo sapiens
atcaagtaatggtgcaaagcctgaactgaaccacaatctctacgaggtgatgagcaaactggagaagcaacattccaataaag

SEQ ID NO: 473575 - DNA, 100 bp, Homo sapiens
gatgaaactagaaagaccacgaacttcaaaggggaaagcaaggccaaagacagggagaaggagtgtggccatctggggccgtgtggtatttgccactcag

SEQ ID NO: 473576 - DNA, 50 bp, Homo sapiens
gttgagctgcagcgaagcacctctttacgctggagtgcaatggcgcaatc

SEQ ID NO: 473577 - DNA, 110 bp, Homo sapiens
cgtggatccaagatggcgacggcgatgtcaccaggtgtcaagatgctgcaagtacataggactggactgggcaggctgggggtcagcctctccaagggtcttcaccacaa

SEQ ID NO: 473578 - DNA, 96 bp, Homo sapiens
cgaattcagaaggatatcgacgtcgtgatccagaagtccagagctgaggactgcctgtttgcaggaagctcttcgtgggcggtcttgactggagca

SEQ ID NO: 473579 - DNA, 75 bp, Homo sapiens
tggtgatcaatgtgaacaatattctcaaggaggcaagtgaggcctatctggttggcctttttgaagacaccaacc

SEQ ID NO: 473580 - DNA, 75 bp, Homo sapiens
atagcaacaacgtttattgtgcgcaggcttttccatcctcatcctcacaggcaaacgcacgggctgcgcctgccg

SEQ ID NO: 473581 - DNA, 82 bp, Homo sapiens
gctttataagttcagtgctgatgaattcttcataccccgggtgtaatctagctcctgtggtggagtttgctgcagatgtggg

SEQ ID NO: 473582 - DNA, 74 bp, Homo sapiens
atagcgttgcaaatccttaaaagagtcttaacgttgatattcactgatggactccaaagaatcattaactcctg

SEQ ID NO: 473583 - DNA, 75 bp, Homo sapiens
attttcagaggggaatgctaagagacaatgcagatcttcgtgaagactctgactggtaagaccatcaccctcgag

SEQ ID NO: 473584 - DNA, 80 bp, Homo sapiens
ggctggccaagttactggagccgatatactgagccttcataagggttgactacctcagatttgctgcactcattgtggac

SEQ ID NO: 473585 - DNA, 78 bp, Homo sapiens
agtgatctacgggctggagttccagggagatgcagttaaagacttgatgcttcgctttctgggtgaaaaagctgcagc

SEQ ID NO: 473586 - DNA, 98 bp, Homo sapiens
gagcctagcacctcttatactgatataaacaggggtcacatgacgacagaagccaagagggctgcaaagatggaaaagaagatgaaaattttgcttgg

SEQ ID NO: 473587 - DNA, 75 bp, Homo sapiens
ggagtgatatcagacaccgagcttcagcaagctctctccaacgggggatatgagactttctactcggaatatcct

SEQ ID NO: 473588 - DNA, 85 bp, Homo sapiens
ctagtcatagcataccatttatcgggctcggcgcaggcccgcggggagcgcagcccggcggagcgctgccactggagtgacatgt

SEQ ID NO: 473589 - DNA, 97 bp, Homo sapiens
cgtcgctagaactcagttgtgcgttgcggccagtcgccactgctcctgattacatcaaccccagagccgtgcagctgggctcccttctcgtccgcgg

SEQ ID NO: 473590 - DNA, 97 bp, Homo sapiens
tgcatttcttgccctagtgacttaactgccgaaggaaaatgtcactgtcccattggccatattttaggaagagctgaagagagacctgaaaattaag

SEQ ID NO: 473591 - DNA, 98 bp, Homo sapiens
gctccgtcgtggaagcaggactgcgccgcgtcttcctcaaggtcaaaatgcagatcttcgtgaaaacccttaccggcaagaccatcacccttgaggtg

SEQ ID NO: 473592 - DNA, 96 bp, Homo sapiens
atcacattggaccctcctcccaactgtaggttctgccattactgcaatagccacatctgtgtgtcacggcccaccctgtcgccagcttcatcatgc

SEQ ID NO: 473593 - DNA, 100 bp, Homo sapiens
ctggcattgctggaggatacaaacgtaaagtgctgggcaacctgcagttgaacttgctgagcaagtccaaggtgtacgaggacccagctctgagcgccat

SEQ ID NO: 473594 - DNA, 83 bp, Homo sapiens
tgcaggagctggtttccctcccacctttgccattcctcaagctgcaggtgagaagccctaccactgcaactgggacggctgcg

SEQ ID NO: 473595 - DNA, 90 bp, Homo sapiens
cgcttccgacggggcggccgggggctcagagatccaagtgcgcgccctggcgggtccggaccaaggcacgtgtggttctcaaatataggc

SEQ ID NO: 473596 - DNA, 100 bp, Homo sapiens
gtgcggacagcattgggagcggccgagccatcccaattaaacagtttttcagttatgggacaaaaatattatatcaaaacactgaagctttgcaatctaa

SEQ ID NO: 473597 - DNA, 51 bp, Homo sapiens
ctgcaaagtgtccccggcaagaagggcgaactttctgaccaagtatacaac

SEQ ID NO: 473598 - DNA, 83 bp, Homo sapiens
aacaaaggaaggggagcccgggacccccgggggcgcagggagctgcttcctatgtctggtggatgtggtgcccgtgaagaacg

SEQ ID NO: 473599 - DNA, 100 bp, Homo sapiens
aagctgtctaagtccaaagatttttacccagccgccccgggggaaggtgcggaggacgcagacagcgggcccgagagccgcagcgggggcgaggagacca

SEQ ID NO: 473600 - DNA, 90 bp, Homo sapiens
ggaagtaggggtgcacctcagcactatcccaagactgctggcaacaggatcccttggttccagtaccccattatctatgacattcgggcc

SEQ ID NO: 473601 - DNA, 75 bp, Homo sapiens
ctcataggaatccatttaagtttaatggagttgatttggagcatatgcgaacaataaaacctgaaaaacacttac

SEQ ID NO: 473602 - DNA, 146 bp, Homo sapiens
taaaggcagcagtagccttgatagattatattccagaaaaatcagaaagcagcttgttcatcataaacagatatgttccatttaaggctctgaagatggggagagaattctggatgatccaggtgggcccttaataatggtccctt

SEQ ID NO: 473603 - DNA, 90 bp, Homo sapiens
atgaagaggtttcccctgaagtactagcaaagagttccgttctggaaaggcacccatccttattgctacagatgtagcctcccgtgggct

SEQ ID NO: 473604 - DNA, 74 bp, Homo sapiens
ccacaataaaagagacctctacttagctcagcaattcttaccttgctgtaacagaagacaagtacgaaatactg

SEQ ID NO: 473605 - DNA, 75 bp, Homo sapiens
atacttgtacttacaaaacccggaaccgagccttttgcagaaaaaacttcagcatgtgccaggaacacaacctca

SEQ ID NO: 473606 - DNA, 82 bp, Homo sapiens
cccccgcctgcccgcccgggagctgtcggccccggcccgactctatcacaagaaggtggagccatcgaagcccccacccaca

SEQ ID NO: 473607 - DNA, 97 bp, Homo sapiens
ctgattcaaattcaacagaatcctctgaaacttccacaggtgggagacctacctgatgcagatattaaacctccagaaaatgtactgtttgtgtgta

SEQ ID NO: 473608 - DNA, 100 bp, Homo sapiens
gtataatttttgattctgattggaatcctcagaatgatcttcaggtacgacactggcatttgcaggaacatatttactggtgaactttgctccaaatata

SEQ ID NO: 473609 - DNA, 83 bp, Homo sapiens
ggcaaggcggcagctcctggcgctgcgggcgtccccacagttctgtctctcgcctgatgctggaagaggagcaaacactggcc

SEQ ID NO: 473610 - DNA, 101 bp, Homo sapiens
gcttcgctcggaagggtctttgttccctgcagccctcccacgtgctctacggaaacgtattcgagaggacagaaaggccaccacagctcagaaggtgcagc

SEQ ID NO: 473611 - DNA, 98 bp, Homo sapiens
gggacgttgagtccccacagacctggaaattgcggcccctctttctcaacccagagcaaattgagacgtccgggaccatggccaacctggagcgcacc

SEQ ID NO: 473612 - DNA, 83 bp, Homo sapiens
cctgtggccgccatgtttgagcgaggtctcggcgcggaagatggccggcggcgtggacggccccatcgggatcccgttccccg

SEQ ID NO: 473613 - DNA, 144 bp, Homo sapiens
gtttggaggagccagtgtaatgctagaagtcctagaagaaatttggagtgtgcgtgcgcgccgagcgctccagaacctgggtatcaacccagcaaacattggcttcagtaccctgactatggagtctgacaaattcatctgcat

SEQ ID NO: 473614 - DNA, 82 bp, Homo sapiens
gctggatttaagcactgctgcactttatgagcaccatatgaaggcggagtatggaaagttagagtggacctacctgataaat

SEQ ID NO: 473615 - DNA, 88 bp, Homo sapiens
ccatgttcagcggccgcgtggaggtgctgaccgatgccggaggcctaaagatccctcctggctgtgagctggtggtcggcggtgagcc

SEQ ID NO: 473616 - DNA, 100 bp, Homo sapiens
ggaaggggcacgggcacccccgcggtccccgggaggctagagaagaagcgcacgctgaaggggtccattgagctctcccgaatcaaatgtgttgagattg

SEQ ID NO: 473617 - DNA, 82 bp, Homo sapiens
tgctgaaatgtttgacgacactgatggtttgcgctgataaagcagtttgtgtccgacgtggcctggggggagctggactacc

SEQ ID NO: 473618 - DNA, 50 bp, Homo sapiens
cagagcaccaggcccaccgtgaaagcgtggagattggtgaaagcgtgaga

SEQ ID NO: 473619 - DNA, 100 bp, Homo sapiens
tggcactcaacatgaacaactacaaaggctatgaaaagaagccctattgtaatgctgccggtggtggtgtgcacattgagccccggtatagacagttccc

SEQ ID NO: 473620 - DNA, 111 bp, Homo sapiens
gtggagccggtgccgagccggggcgaagctggatcccctagctcccagcagtaggaggacagttgacatttaccatatcatatgaccttgaagaagaggaagaagatacag

SEQ ID NO: 473621 - DNA, 82 bp, Homo sapiens
ctctgctgcggcgcggggaccgctgtgctctcggtcttgaggaccggcccagctcaggctcctggggcagcggcgaccagag

SEQ ID NO: 473622 - DNA, 76 bp, Homo sapiens
gagatgagttggggatttgcccatgtaagcacgccttccacagaaagaggtacttcatcgattccaccaacctgaa

SEQ ID NO: 473623 - DNA, 74 bp, Homo sapiens
aaaacactggaagaagatgaagaggaactttttaaaattaagactttgaccccgacgcaggcttcagtgattgc

SEQ ID NO: 473624 - DNA, 75 bp, Homo sapiens
gactctgaggaaaagctcgcaccagctctggcaggctgccctgagcacgctcaaccccaaccccacggacagctg

SEQ ID NO: 473625 - DNA, 100 bp, Homo sapiens
gtggccttcaccaacgctcgcgactgcttcctccacctgccgcggcgtctcgtggcccagctgcatctgctgcaggcctatatgaacccaatagcaatgg

SEQ ID NO: 473626 - DNA, 50 bp, Homo sapiens
tccgactctcccacctgctaaggcaaatactgtggtctggggttgcaaat

SEQ ID NO: 473627 - DNA, 101 bp, Homo sapiens
gcacagacgcacgggacaggagagcctgggcaagactggagagacgcaaacatgcagatctttgtgaagaccctcactggcaaaaccatcacccttgaggt

SEQ ID NO: 473628 - DNA, 100 bp, Homo sapiens
aataatacaactgttcagcttcatactcctgagggctacagactcaaccgaaatggagactataaggagggcttgccaagtatcttgctgcagagagaac

SEQ ID NO: 473629 - DNA, 80 bp, Homo sapiens
tgaccatctcgggaagtgaggagagcccccattggaccagtgtttgcttagaaaagcgccctcatcaagttagccaacat

SEQ ID NO: 473630 - DNA, 74 bp, Homo sapiens
cagaccattttgacagtcgagaacgaagagtgttcctcttcgtggatcctgagctggtgtctgcgtctgtgtgc

SEQ ID NO: 473631 - DNA, 100 bp, Homo sapiens
gcactatctagtgtcagtgatggcggtgaaacgtcagccggcagccagacccggtccgtttggaatgcctgggatggtgccgccgcatgttcctcctcag

SEQ ID NO: 473632 - DNA, 100 bp, Homo sapiens
tgctgccaagatcctagctgatgccacagccaagatggtagaggctgccaaggaactctattttaagaacctctcaaaacgaaacaagcaaatcatggag

SEQ ID NO: 473633 - DNA, 101 bp, Homo sapiens
tcagccttaggctggaagcaaggatgggcgccattcctgaggaagagaaccgctggacatgggttctctgaggatgggatattgatgatgttaagaagttc

SEQ ID NO: 473634 - DNA, 80 bp, Homo sapiens
tcctaagcctgcacagccgcggcggcagcagcagtgagagaggccgagcatggttatgcgtccctgtgcccgcatcgcag

SEQ ID NO: 473635 - DNA, 100 bp, Homo sapiens
gtcatgctgccgacaccctgacggccacgaacttccgagtgggtgacagtatgttgactgctgtctctgtggccagagattgtggaatgattctacctca

SEQ ID NO: 473636 - DNA, 82 bp, Homo sapiens
ggggaggaggactctggagctgacagcgcgcacttcacccgcagttggattttttatcaagcagaaatgcatcgaacaacga

SEQ ID NO: 473637 - DNA, 98 bp, Homo sapiens
gcggcggctgcggcccaatatagacctttccaaagtgaaactgatgagatttgatgatccactgttggggcctcgacgagttcctgtcctgggaaagg

SEQ ID NO: 473638 - DNA, 101 bp, Homo sapiens
ccaacttttgccctggattacagctcacggatgattgatatccagaccaggatggctgggcgagcattggagcttctttatctgccagagaataagccctg

SEQ ID NO: 473639 - DNA, 98 bp, Homo sapiens
agactgaccacatccctgctcatctcacctatgggaagctgctagctctaacagactcacaccacccggcaagaactgctcactacggctccctgccc

SEQ ID NO: 473640 - DNA, 80 bp, Homo sapiens
agtccccaccacagggatcatcgaatacccctttgacttacaaagtgtcattttcaggaagatctcagtgagcacgtagt

SEQ ID NO: 473641 - DNA, 100 bp, Homo sapiens
tgcgggaaggccttctctaggccctggctgctacaaggccatgtccggacccacactgaaaccagactgtgatgactgggagagcgggctgaatgcaatg

SEQ ID NO: 473642 - DNA, 83 bp, Homo sapiens
cttggcgccaagcccagtaaggctgtgagcctctcagtcactgggcaattgaaggaacagactaaaaatcgtgtcctggaagg

SEQ ID NO: 473643 - DNA, 100 bp, Homo sapiens
gatgattacagttcttcctaaaaaaggtcacggtctagatcacattctcgatccagaggaaggcgatactctcgctcacgcagcaggagcaggggacgaa

SEQ ID NO: 473644 - DNA, 147 bp, Homo sapiens
gtcctcgggcccgcaggtcgcagggcggcctgcagctgggccgcggccgaggaggcagcgcgacctccgcacggttaacagaaccttctggatatttaacagatggcccaattaactataaatataaaactaaatgtacttggctca

SEQ ID NO: 473645 - DNA, 140 bp, Homo sapiens
cgtatcccgagcatggaggttactgagaccgttatttcttcatggcctgcctagcttaagcagtagctggaaaacactttgcgtcagagagcagatcctgtttacagtccacctcttcaagtttcaggactttgctggag

SEQ ID NO: 473646 - DNA, 75 bp, Homo sapiens
gcccccaacccagaccacacccttgagcctgagcccgacattattcctgagaatagcctaacatggcagaccaga

SEQ ID NO: 473647 - DNA, 100 bp, Homo sapiens
ataggtgtatcaagtaatggtgcaaagcctgaagtaaaatatacccaggaccataaacagatgaaaggtagaccaagtctgattttagatacacctgcta

SEQ ID NO: 473648 - DNA, 100 bp, Homo sapiens
ttctgcaagcaggcaacctgaatacagatatgtcttctccgactactatgaagaagcctgaaaagccattgttcagctctgcatctccacaggattcttc

SEQ ID NO: 473649 - DNA, 100 bp, Homo sapiens
tgagaatgaatctgaaaaaagagaactggtattcaaagaggatggtcaggggtttcctgaggctcaagctctaggactggaggtgttccatgcaggcact

SEQ ID NO: 473650 - DNA, 89 bp, Homo sapiens
ggcgcagatgcgggccctgctggaccagctcatgggcacggctcgggacgatggactcaccctgtcacccaggttggactgcactggcc

SEQ ID NO: 473651 - DNA, 100 bp, Homo sapiens
cggggtccgcttggacgggtacgcgcggctggtgcagcaaaccatcctgtgttaccaggtttattttcttgaaaaggctccaggcttcggcttggaaaat

SEQ ID NO: 473652 - DNA, 74 bp, Homo sapiens
tggatatgagaccatgaagaacaaagacacaggtcactcaaataggcaggttcaccggaacagcacaatccgcc

SEQ ID NO: 473653 - DNA, 96 bp, Homo sapiens
tggctcagaggctctatgcaggttccactgtcaaggaccagttgctcttctgtgatgactgcgatcgtggctaccacatgtactgtctcaccccgt

SEQ ID NO: 473654 - DNA, 50 bp, Homo sapiens
gactgctcagggtgccagacctcatcgcagcaagagcaactcaccaccag

SEQ ID NO: 473655 - DNA, 49 bp, Homo sapiens
ctggagggggatgagtcctgagtgacaaaaatgctgagtttcttccgta

SEQ ID NO: 473656 - DNA, 82 bp, Homo sapiens
aggacaaccaatatttccaggggatagtggtgtggatcagttggtagaaataatcaagagaaaagaaaccttgtttattccc

SEQ ID NO: 473657 - DNA, 75 bp, Homo sapiens
cagggtctagcccagccgaatccgcgtcgggctgtaactcgagtgccaggatagtaatgatgacactgaagatgt

SEQ ID NO: 473658 - DNA, 98 bp, Homo sapiens
ccagctcttcagcattgtccgccaggcctgtgtccggagcctgagctgtgagctcttagcttctgccagctatgatgacacagtgaagctgtaccggg

SEQ ID NO: 473659 - DNA, 83 bp, Homo sapiens
gtaatgtgtttaacaaagccacgaataacctataatgcggacaaggcaaaatctcagcaagttcggacctctagtacaataag

SEQ ID NO: 473660 - DNA, 76 bp, Homo sapiens
tttgttcaccgccaaccccttcgagcaagacgtggggtgttgaaagcagcaggggcctagaagacattaaaccgat

SEQ ID NO: 473661 - DNA, 100 bp, Homo sapiens
ttggatgtgaaggcatttcaaaaagctatgtcttcagaggaacaaaagatttgtctgccaaacaactgcaggtccatccacatcgtggcgctggggaacg

SEQ ID NO: 473662 - DNA, 99 bp, Homo sapiens
tcacagcactctgggcgaaaattggatgtgaaaatgaagccagaccgagctgaagacctaactgcagcatgtctgtatttggagatggggcctctacag

SEQ ID NO: 473663 - DNA, 98 bp, Homo sapiens
cgaattaaaatttatacttcgcaaaactcagcaattttttgatgaggttaagaatagacccaccagcatttcgtgggatggtcttgattcagggaagc

SEQ ID NO: 473664 - DNA, 82 bp, Homo sapiens
ggaaacaccctcctggctgttcgataaagtttcctacactactgaggtttaggggcactgtgaagcaaaagccacgcctcag

SEQ ID NO: 473665 - DNA, 100 bp, Homo sapiens
gcatttccttcagtgcttcctacagagaacaatggagccagaggtaccttaacatggggaatcttcttaaagttttgacatgcacagaccttgagcaggg

SEQ ID NO: 473666 - DNA, 100 bp, Homo sapiens
cacagaaattctgcattgaaaaagttgggaaagaaaattggctacccagaagtcatacctggcattcccatcaagagcaccatggacaaccccaccacca

SEQ ID NO: 473667 - DNA, 75 bp, Homo sapiens
ctgaggatgacgggacagtggccttcgcgctaacgaaggcctttggacaagcacacacaaaccacaagaaggtgg

SEQ ID NO: 473668 - DNA, 100 bp, Homo sapiens
atgccatctacaaagaattctccttccacaattttaatcagggaactgctcgcagaaagaagaaggtggttcatagaacagccacagcagatgacaaaaa

SEQ ID NO: 473669 - DNA, 100 bp, Homo sapiens
cctgtttggagacagaggaacagagggtggagcttagtctctgggatacctcagatggcaggagagctggctgacaaaaaggaccgtgatgcatcacctt

SEQ ID NO: 473670 - DNA, 83 bp, Homo sapiens
ccaagctcggatccctgaatttgatccaggaaagatgaatgggagggctgattttcgagagccgaatgcagaggttccaagac

SEQ ID NO: 473671 - DNA, 98 bp, Homo sapiens
gaagcgtgcaaatgccagaaagaggatttggccagagcgttttgtattggctcacagtggttgattgatcaaccccattggacgttggttctgtggta

SEQ ID NO: 473672 - DNA, 100 bp, Homo sapiens
acaaggaccttgcatactgtctcaatgatggcgagtgctttgtgatcgaaaccctgaccggatcccataaacactgtcgaactgtggcgataacacagca

SEQ ID NO: 473673 - DNA, 83 bp, Homo sapiens
ccggaatcccgcgcgctgcccacgattcgcttctgagtggaaggaatgaaggccagctgaatggtgaaacaaatacacccatt

SEQ ID NO: 473674 - DNA, 100 bp, Homo sapiens
cgcgaccggcgcgatgagtgccaacgaggaccaggaggtggaatgaggtaccatctactgtctccagaggaccgagaagaacttgtagatggcacaagac

SEQ ID NO: 473675 - DNA, 83 bp, Homo sapiens
cccagctcagccagacacaggcagagcaagctgcacagtgctgggagagcaggcaatttagataaaatccttcatcagtgttt

SEQ ID NO: 473676 - DNA, 100 bp, Homo sapiens
cgcaaggtggagagccgcggggaagggggcagagagacaactgtgatgatccactagcatccctgctctctccaatggctttttccagttcctcagacct

SEQ ID NO: 473677 - DNA, 90 bp, Homo sapiens
cagattcgcagtggtcgcttcttctccttggatctcactggcatcgaatctatggatcagtgtcgccataccttggaacagcataactgg

SEQ ID NO: 473678 - DNA, 80 bp, Homo sapiens
cgaagataccagcagacgatggggagcttgcagcccctttgccactcagttttcatggagtgataatgaaaggagcagca

SEQ ID NO: 473679 - DNA, 90 bp, Homo sapiens
ctcggctgccaggggagctggagccacctgcgaaggtgtcctcccatactggacccctacaggtacactcacgtggaagctgagtgtcct

SEQ ID NO: 473680 - DNA, 76 bp, Homo sapiens
caagacccggacattccaggccacagtcctgggaagtcagatgggattgaaagaatgtccctggctgcttattgcg

SEQ ID NO: 473681 - DNA, 105 bp, Homo sapiens
cgagaggaagggttggaggtcgggccacccgaggtgctggacaccctgtcgcagcttctgaagattatctgcctggacctgtcagaggaaatgtcactgccaaag

SEQ ID NO: 473682 - DNA, 98 bp, Homo sapiens
cggctcacctgtgcgggatggaacaaaaggacataccgagggattgcatatgttaaatggaaattttataaagaagcaactcaagatttttctgctgc

SEQ ID NO: 473683 - DNA, 50 bp, Homo sapiens
ctctgctcttcagtacaatcctggaccagttactctccacaagaaaattc

SEQ ID NO: 473684 - DNA, 100 bp, Homo sapiens
aaaatctcaacaagcaactagaaaaaaagcgaaggttggaagaggaggctctccaaaaagatcccggctactcaacagaaatgaaggaggaatctgtaaa

SEQ ID NO: 473685 - DNA, 50 bp, Homo sapiens
atctgatattcttaagccaacagaattcagagttcaagagctccttaaag

SEQ ID NO: 473686 - DNA, 50 bp, Homo sapiens
cgactgtcattcacaaccccctgaaagcgcttctggagttacagtgaatg

SEQ ID NO: 473687 - DNA, 100 bp, Homo sapiens
cgaacagcgggcggtgttcccggctccgtggggccgtcttcccggcgagtccgcgacggtcgccgcccacggcgagccactggagcatctactactgtat

SEQ ID NO: 473688 - DNA, 75 bp, Homo sapiens
aacggagagcgtagtgaccatcatgatgaaaactttcggaagagaaagttgcctgtggtaagttcagttgttaaa

SEQ ID NO: 473689 - DNA, 90 bp, Homo sapiens
gaactctttccagcttgtgtctgccctggtacctgacagtgtaaagaaggagctcctacaaagaataagaacattccttgctcagcatgc

SEQ ID NO: 473690 - DNA, 76 bp, Homo sapiens
aggaggaggatgaatttgatagagaggttttgcacactagggaccaagaagccctcggggacactgctgagaaaag

SEQ ID NO: 473691 - DNA, 82 bp, Homo sapiens
ctctctggaccgatcccactgttgttcctcaaagtcattcaagctgtactcgccgaaggagcccccgaacggcaacgccttt

SEQ ID NO: 473692 - DNA, 90 bp, Homo sapiens
aagtacctggggtgaccgccattgagttgggtgaagagacctgcactttccgcatctatggggaggttggctctgactgtaccaccatcc

SEQ ID NO: 473693 - DNA, 82 bp, Homo sapiens
cggaccccgcggagcctcttgcctcggtgagaagccctaccactgcaactgggacggctgcggctggaagtttgcgcgctca

SEQ ID NO: 473694 - DNA, 95 bp, Homo sapiens
cgacaagccgctggcagccgcggatctcaccgccgctcaggaaaatggacccaagtggggtcaaagtgctggaaacagcagaggacatccaggag

SEQ ID NO: 473695 - DNA, 50 bp, Homo sapiens
gtggagcccccctttaaacctctgttgttgggacagaaataacccagagc

SEQ ID NO: 473696 - DNA, 98 bp, Homo sapiens
agacggctcacctgtgcgggatggaacaaaaggttcaaaatcaaaggaagcccagaagggaggtcatttttacagtgcaaagcctgaaatactgagag

SEQ ID NO: 473697 - DNA, 100 bp, Homo sapiens
accagtttctgatggagctgaagcaggaagccctcacctttgccaggaactggggggccgactatatcctgatgatgaggagtctgatgaggaagctgtg

SEQ ID NO: 473698 - DNA, 98 bp, Homo sapiens
tggaactgaccgaattaaaatttatacttcgcaaaactcagcaattttttgatgaggacaggaagatgtcacccaagcgcatagctaaaagaaggtcc

SEQ ID NO: 473699 - DNA, 90 bp, Homo sapiens
ctcgctggtttgaagtggaaaagcgtgaagtgggttgttacaagttgagttgaaaacaagaaaaacttgcttttggcgccatcaaaaagg

SEQ ID NO: 473700 - DNA, 90 bp, Homo sapiens
ttacatcagaaggatacagttcatgacaatgactttgagccctaccttactggacagtcaaatcaggtgtccaggatgtggaggtgcact

SEQ ID NO: 473701 - DNA, 90 bp, Homo sapiens
tgcaggactctagtaacccgcgaaatgatgggatagcgttgcaaatccttaaaagagtcttaacggtggagtctttcattttggatcagg

SEQ ID NO: 473702 - DNA, 82 bp, Homo sapiens
gaggatcgtcaggctctaaacaaaattctgctgttacaacttctaaatgggaattatttgaccagcatgaagaatcagaaga

SEQ ID NO: 473703 - DNA, 82 bp, Homo sapiens
gctgcgccgcctatgcggacattacagccccgggcaccatgactacgctgactgccatgaatatgtttcgacagcaacaaaa

SEQ ID NO: 473704 - DNA, 102 bp, Homo sapiens
gcagcaggactcagaggcgagagtggccccagccgggccagaagcaggaatactcccccagttgcaagaggcgcaggaccgtggaagacttcaacaaattct

SEQ ID NO: 473705 - DNA, 83 bp, Homo sapiens
tgccgcgcggctcggagccctggaagcagcagctcaccgaggacggggactccaaattgtggctactaatttgccccctgaag

SEQ ID NO: 473706 - DNA, 75 bp, Homo sapiens
tttggagcaatctatttgggcagtgaagcaattctgtggtgttcttggtcacacatttatggagtttctgaaggg

SEQ ID NO: 473707 - DNA, 100 bp, Homo sapiens
aagggaaggcgcgagtgaggaaaggaggtactgtaggtcgttgaggacttccacatggagattggcacaggaccagactcaagacacacaactcataaca

SEQ ID NO: 473708 - DNA, 88 bp, Homo sapiens
ggaatgcttttttatctcatattagtgcctgtgatggcatctttcatctaacacgcccagtctgactctgtctgtaatacctgattgc

SEQ ID NO: 473709 - DNA, 74 bp, Homo sapiens
ggtgccgtggcatgtcgatttgtccttcactacagcatggcctgtatgagaagaaaaagacctcaagaaagcaa

SEQ ID NO: 473710 - DNA, 97 bp, Homo sapiens
atgagagcctgaggagccattttgagcaatggggaacgctcacggactgtgtgctggcggcagcagctgaaattgatgaagaaccagtcagtaaagc

SEQ ID NO: 473711 - DNA, 100 bp, Homo sapiens
ggatgctcatccataaaactgaagatgtgaatactctgagatcatgatgcagccgtccttttggatttctttttaataatgtgtgacccttcacctttga

SEQ ID NO: 473712 - DNA, 98 bp, Homo sapiens
tcaactccatccaacacttcgtttactccgatggatatcagtattgacaaatagcaaagaagaggccctaaccatggccttccgtggagagcagagtg

SEQ ID NO: 473713 - DNA, 100 bp, Homo sapiens
cttatttcaactgctcgaccaagctttatggatttaccaaagatcactttgggaagcagtgacatccaacctgtatcaagtcttctaatctgtgaacatg

SEQ ID NO: 473714 - DNA, 100 bp, Homo sapiens
gaagccgaaagatgtccaggtcgggcgcggcggctgagaaggcggactccagacagcgaccccagatgaaggtctcgccagcacgtttcccgggggacac

SEQ ID NO: 473715 - DNA, 100 bp, Homo sapiens
cacagctacatatttgttattggggagaaaatcttcagagggagcccacctacgatgcagaattccagcacttcttgagaggaaatgagattgtcctgag

SEQ ID NO: 473716 - DNA, 83 bp, Homo sapiens
atgagctggggcaccgagctctgggcagaatccagagaccacatttgaagtatatgttgaagtggcctatcccaggacaggtg

SEQ ID NO: 473717 - DNA, 98 bp, Homo sapiens
gtcacaggaggccttacatcaggatatgcctgaggagagctctgaggaggattcactcaggagaaaagagtagttgaacagctacggaagaacctgat

SEQ ID NO: 473718 - DNA, 100 bp, Homo sapiens
ggagtgtgggtcagacccagaggagaacagcttcagtatcagacacagcacagcagccatctgaagagcaaagcaagtctcttgaaaaaccgaaacaaaa

SEQ ID NO: 473719 - DNA, 85 bp, Homo sapiens
gcggcgcccctcggcctcggagcaacgagcgcagcgccgcatcatggcagaacaggatgtggaaaacgatcttttggattacgat

SEQ ID NO: 473720 - DNA, 100 bp, Homo sapiens
agaagagctgcggaaggaggaggagcggaagaaggcccaggatgttttggtgcaggagatggaagtggttaaacaaggaatgagccatggagagctctca

SEQ ID NO: 473721 - DNA, 101 bp, Homo sapiens
aggcggttctgagagcttcagagagcgatggaaagcatcctgtccctggaggctgtaatttggagttcgatttagatattgatcccaacatttacttggag

SEQ ID NO: 473722 - DNA, 75 bp, Homo sapiens
cggtgacggcgcggggtccgcgcccggagcgccccgccgcgcacaatgccttcaattaagttgcagagttctgat

SEQ ID NO: 473723 - DNA, 100 bp, Homo sapiens
tctcttctgtgcccccatctccagaggaggctgcggaggaggaggaggaagaccacgcatgtatccagaggcgctacctgtagggatcctaagcaacccg

SEQ ID NO: 473724 - DNA, 90 bp, Homo sapiens
cccttgctgtaaattatgagaaagaagaagaattcctcactaatgagctctccagaaaattgatgcagggttcttttcctatgactccat

SEQ ID NO: 473725 - DNA, 75 bp, Homo sapiens
acaaacactggactgcaaaaggaaaggactcatgaatcaagcaagcaaacgtgaaaaatggattaaggctgatgc

SEQ ID NO: 473726 - DNA, 82 bp, Homo sapiens
aatcttctgggagctgaggaaccagatatcttgaaaagctgccagaaagcgatctagggcagccctgcagaggtacctgttc

SEQ ID NO: 473727 - DNA, 88 bp, Homo sapiens
tcatccaaccttcttccacacgtgcccgaatctgctgtgacctggatgtcttggccagcaagaagaattatatccagatcgagagaca

SEQ ID NO: 473728 - DNA, 100 bp, Homo sapiens
gtcttctctgcagctttaccggactttcttgtctgcacagaaagtcccagtacaacttccattgctgagaaaatcctcagaggactttcccacttcgctc

SEQ ID NO: 473729 - DNA, 100 bp, Homo sapiens
ccagtgtcaagaagccatcggcctcaagggcatcgatatttcaggccaccctggagaaatgtgccacgtgctcccagcccatcctggaccggatcctgcg

SEQ ID NO: 473730 - DNA, 90 bp, Homo sapiens
caagtccagcttatagacccaatcaaaaaagaaactagcaaactttttaatgaggaatttgcagttaacatgtttcgaacattaccacct

SEQ ID NO: 473731 - DNA, 48 bp, Homo sapiens
actttccatttgccttcctggaaagacgcttctggggccagcttatgg

SEQ ID NO: 473732 - DNA, 82 bp, Homo sapiens
atcgcatctccccgacaaacaccacgagaattccgcagcccacacgatgccttcaattaagttgcagagttctgatggagag

SEQ ID NO: 473733 - DNA, 101 bp, Homo sapiens
acaagctgaagaaatccaaggatacagtctcagaggacaccattaggctaatagagaaacagattgggaaaatgaggtacgttagtgttcgcgattttaaa

SEQ ID NO: 473734 - DNA, 106 bp, Homo sapiens
ctggttccccaacatgcctcaccctcatctatatcctttggcagctcacagcaatggctgccatccggaagaaactggtgattgttggtgatggagcctgtggaaa

SEQ ID NO: 473735 - DNA, 105 bp, Homo sapiens
tgacggtggaggttcgcggctctaacggggctttctacaagtgccggtggtggtgtgcacattgagccccggtatagacagttcccccagctgaccagatcccag

SEQ ID NO: 473736 - DNA, 90 bp, Homo sapiens
tgctgctccttgcagccctggctgtggctacagggccagcatcgtcatcagacagtgaggaggacccagaagccttggagaagcagaaga

SEQ ID NO: 473737 - DNA, 100 bp, Homo sapiens
cggagacctacctgcggcgtcggcagctgctgctccgaggtggcgggacaggcttcattgggacagccctaacccagctgctgaatgccagaggccacga

SEQ ID NO: 473738 - DNA, 100 bp, Homo sapiens
tgtaatcagcttcttaccaaatacagaaggaattgaagccattttttatgaaggaagttggcagtcactttgatgattttgtgaccaatctcattgaaaa

SEQ ID NO: 473739 - DNA, 101 bp, Homo sapiens
tctccttctgcatccttaactgagaatgaggtcccggatgttacaggtcagagccctccagacccccaaggactgtactcactgcccagaaatagctgctg

SEQ ID NO: 473740 - DNA, 99 bp, Homo sapiens
tgctgtttcttgggactgcgaagctatacaggctgtgtgatgaatgcagactctgctaccattttggctgtttggatcctcctttgaaaaagtctccta

SEQ ID NO: 473741 - DNA, 109 bp, Homo sapiens
gggagacgctcttggtgtccccagcaccgaaggatgatgtctcatgctgaaggacaacaaagagacttaattagacgaattgaatgccttcctacttctggccatctta

SEQ ID NO: 473742 - DNA, 75 bp, Homo sapiens
tctcactacggccaaccaggacggcagggtcatcctgagccgccaagacaatgcagatcttcgtgaagactctga

SEQ ID NO: 473743 - DNA, 100 bp, Homo sapiens
gagtgccctgtcctgccggagccgctgtgtgcaaagttcctattgatggtccccccatagtgccaagtcctgccctgccaacttcttggcagctgccgac

SEQ ID NO: 473744 - DNA, 102 bp, Homo sapiens
cgggaccaaggcggagcaaagtcgccgggggtgtggggtgttccacgctatgttgggagtgttcgctttcgagcatcctgaggttagcattacacttctccc

SEQ ID NO: 473745 - DNA, 75 bp, Homo sapiens
ggaggaaacagctggctaagctcatcattgttactggtgccatgcctctgcaactcctcctgttgctgatcctac

SEQ ID NO: 473746 - DNA, 75 bp, Homo sapiens
aaagtcctctttggacatctaactaagaccctctttgcaagttcagtgcttaacctgaccgaactggctgccctt

SEQ ID NO: 473747 - DNA, 82 bp, Homo sapiens
atttcacatccagcagaggaggcgggggcagccgctgagacggtttttcacaaggtgtcgtgaaaactacccctaaaagcca

SEQ ID NO: 473748 - DNA, 97 bp, Homo sapiens
tggaaatgagaagactcaggaacatttcactcacaacacagtcagggggtgttcatacttctacagctcctctactagtgacctctccaactatgac

SEQ ID NO: 473749 - DNA, 87 bp, Homo sapiens
gtcagacgcagccgtagacaccagctccgaaatcaccaccaagcttcctgatttctcccgattccttccttctccctggagcggccg

SEQ ID NO: 473750 - DNA, 50 bp, Homo sapiens
tgctgcactttgggttcaaggcgacacctcccccactggcaggattgcca

SEQ ID NO: 473751 - DNA, 76 bp, Homo sapiens
acaccacatgaagagctagagagacttgcagggcccatggcggacacccagtacatcctgcccaatgacatcggcg

SEQ ID NO: 473752 - DNA, 82 bp, Homo sapiens
caagaacagaacaggccctatggggcatacctatggctttattgacctcgactcccatgcgaatttacatagtacatgacga

SEQ ID NO: 473753 - DNA, 107 bp, Homo sapiens
gacttggatgcctgcaaagcgaggctgaagaaggccaaggctgcagaagccaaagccacgacaatgcagatcttcgtgaagactctgactggtaagaccatcaccct

SEQ ID NO: 473754 - DNA, 99 bp, Homo sapiens
aacctgtgaccccggcacaggccatgtggcctacctggcagggtgccttcaaatctcttgacaaagatggcactggacaaatccaggtgaacatccagg

SEQ ID NO: 473755 - DNA, 75 bp, Homo sapiens
ctggaaagagaattgcattatatattggaaatctaacatggtaatctatgccagcaattatgacaatgttagcag

SEQ ID NO: 473756 - DNA, 100 bp, Homo sapiens
cttcaccaggggagatggcacaggaggctttaaaagtaaagaatgtgtcccaaaacttgtggctgattttatggctaagaagttttcattggatgcatta

SEQ ID NO: 473757 - DNA, 83 bp, Homo sapiens
ccgaccctggccgccccgagcggagcctggaggtggcagtagagaagagcatcacagaagttgctcaggagctgacagagctg

SEQ ID NO: 473758 - DNA, 102 bp, Homo sapiens
tcagaactgagtggcaacttcgagcaggtattagaaaactactcggatgctccaatgacaccaaaacagattctgcaggtcatagaggcagaaggactaaag

SEQ ID NO: 473759 - DNA, 80 bp, Homo sapiens
agtggaaaggatggcccccaaaagcataatggcagcgtctgaggttgctggtgttgtggccaatgcccccagtcctccgg

SEQ ID NO: 473760 - DNA, 98 bp, Homo sapiens
aactggtccctgcagataatgaaaaagggttatctgggaacaaagcaggacaagtctgggcacctgaaggatctactgctttcaagtgtctgctttca

SEQ ID NO: 473761 - DNA, 75 bp, Homo sapiens
agtattcgggtgggagtggcccgattttccagcaccacccagctatgcagaagtggtaacagaggaacaaaggcg

SEQ ID NO: 473762 - DNA, 98 bp, Homo sapiens
ctgtgattggaattgaaacagtacaactgcctccaccagaggaaaatagtatgggaattcctattatggtagatgatgagctggagatcaaggcctac

SEQ ID NO: 473763 - DNA, 100 bp, Homo sapiens
ccaagaaacatctcaccaatttcaaatccggtgctggagaatctggtaaaagcaccattgtgaagcagatgaggatcctgcatgttaatgggtttaatgg

SEQ ID NO: 473764 - DNA, 75 bp, Homo sapiens
agcgtgaccgagagcgcgaatatcgtcatcgttagaaggaagctcttcgtgggcggtcttgactggagcacgacc

SEQ ID NO: 473765 - DNA, 75 bp, Homo sapiens
gcaactttgaggagacagtgcggtgggtggacatgttgagtgaaattaacattgctccccggattctcaccaatt

SEQ ID NO: 473766 - DNA, 51 bp, Homo sapiens
ctgggatgaacatgggcaggataaatgataggaagccacaacggaggggag

SEQ ID NO: 473767 - DNA, 98 bp, Homo sapiens
caggcagaaggcctctctcctgatacagcaggcgctcaccatgttccctggagggggaagtgcaggcgctgtttctgaggcacgaaggctacctggga

SEQ ID NO: 473768 - DNA, 100 bp, Homo sapiens
tgagcctcagaagttggtggagaaggtggcaggggacattgagagccttctggacaggaaggtgcaggccctgaagctgttcgggggtcttgtctggatt

SEQ ID NO: 473769 - DNA, 98 bp, Homo sapiens
ccggggtttaagggccaggaaaggaagcattcagggaatttaggtgtagccagaagaaaatcaggtcctggtgcttgatggtcgaggccatctcctgg

SEQ ID NO: 473770 - DNA, 98 bp, Homo sapiens
gaacgcttcgcccgttggtgctatgtgcttgtgagtgaggattctgacagtgatggcattgtggcccacttccctgcccatgagaagccagtgtgctg

SEQ ID NO: 473771 - DNA, 98 bp, Homo sapiens
tcgcacacccggcatctacatgctcatcttcgacaataccttctcaagcaaagtggaagatgctttctacaaaggtgaactcaggctgaatgaggaaa

SEQ ID NO: 473772 - DNA, 87 bp, Homo sapiens
acctggaacccttgaaggatgcagattgccacactgaaggtcaaaatattttattcactgatggagaatatattaatcagatagctg

SEQ ID NO: 473773 - DNA, 110 bp, Homo sapiens
actgaagcagatgttgaacaacaaggttggtcaaagaaaaagtgatgtatgaaaaagaggcaaaacaacaagaagaaaagattgaaaaaatgagagctgaagacggtgaa

SEQ ID NO: 473774 - DNA, 87 bp, Homo sapiens
ggggttctgagactccctgtcccggaccgcagcaggagcgagaacccgagcagcgccatgagcaacactaccgtcgtccccagcact

SEQ ID NO: 473775 - DNA, 87 bp, Homo sapiens
ccaaaatatggcaaagaaacctattctgagggtatttctcaagctgccagatacgtttaccaacgactcatcaacgacgggattttg

SEQ ID NO: 473776 - DNA, 82 bp, Homo sapiens
tcctggggtcggcgccgagtgggaggatggcggaagtgagcgagtgctgtgctttcatgggcctcttctttatgaagcaaag

SEQ ID NO: 473777 - DNA, 90 bp, Homo sapiens
gcataaacatggagaaaagctctacactggactaagagaagttgttaccgaacatctcataaataaggtgaaggaaatacaggtgctgca

SEQ ID NO: 473778 - DNA, 99 bp, Homo sapiens
gggagtcgaagcgagggtctgaagttcacgactactagaaggggaggggagtggaaaggctctcagtgaaaaaggtgtctgatgatttgtgagcctcaa

SEQ ID NO: 473779 - DNA, 101 bp, Homo sapiens
atgctggcaagtctgaaggtcaaatagaagaagtcagagatgccatggaaaatgaaatgagaacccagcttcgccgacaggcagctgcccacactgatcac

SEQ ID NO: 473780 - DNA, 75 bp, Homo sapiens
ttggagagctcatctggaattttgccgatttcatgactaaccagtatgtgttcagagcaacattgttttgttgac

SEQ ID NO: 473781 - DNA, 98 bp, Homo sapiens
gtccttcctcaagactacctcattctcactggctcggagactcctgcctgctgaggtaagaatgattgatgttggctgatattggagtgctcattcac

SEQ ID NO: 473782 - DNA, 100 bp, Homo sapiens
tggagctttaccaaaaaggcctcgcacattcagttggacagaatccaagaaaacaggggcccgaaacccaaggcagtacagcagaattaattacagggct

SEQ ID NO: 473783 - DNA, 83 bp, Homo sapiens
gagaagcgcacgctggagggcgagctgcatgatctgcggggccaggtggccaaggaagcgcctcttggacgcgtgtgaccgat

SEQ ID NO: 473784 - DNA, 83 bp, Homo sapiens
tgaagaagtcaaggttgcccccaggcggtccttcctggtgacttttttgaacgaaccattctgtgcaacagccttgtgtggag

SEQ ID NO: 473785 - DNA, 100 bp, Homo sapiens
cagtggcctgtcgttggaagagtacaagctgatcctgtccacagtggatgaggatcgcagtacggaacctgaccgattgcaggtgtttcacaagagagcc

SEQ ID NO: 473786 - DNA, 100 bp, Homo sapiens
caggccctggagtgcatgcgcagaggctgaggctgcagtggccacccaggagacatccaccgtcaggctaaaggtcagctccacagccgtaaggacacag

SEQ ID NO: 473787 - DNA, 80 bp, Homo sapiens
ctgtctgtgcaggtggtcaactgcagccgtgtattcagccttaggtacaccaggggttggaaaaaccacactaggcaaag

SEQ ID NO: 473788 - DNA, 92 bp, Homo sapiens
ccgatgtctgggattactgcacggggtcgcgccgtggcggagcagacttaattcagtgcacaaatgagatgaatgtgaacatcccacagttg

SEQ ID NO: 473789 - DNA, 90 bp, Homo sapiens
ccgccactgcgcagggcggctgggcagctatgtcatcaacgggcgcaccaaggacaaagccaaaggccccttgttagctggccatccctg

SEQ ID NO: 473790 - DNA, 73 bp, Homo sapiens
gagctatgagtcctctgaaatgaacagcataaaatcatgagtggaggatctcaagtccacattttttggggtg

SEQ ID NO: 473791 - DNA, 83 bp, Homo sapiens
ctggggagcactgtttgcagagttctctctctctggctgctggaacccaatgtgaatattggactggcggagccttgggaagt

SEQ ID NO: 473792 - DNA, 82 bp, Homo sapiens
gccctcgctctgagctgcgcctggacctggttctgccttctggacaatctttccgggtacagctctgccggggggggaaaaa

SEQ ID NO: 473793 - DNA, 82 bp, Homo sapiens
gccgcagagcgccgaggaggctttcctgctggtggcaaccgcctacgagacactcaagacaatgcagatcttcgtgaagact

SEQ ID NO: 473794 - DNA, 82 bp, Homo sapiens
gcgcgggggcggctcctgctcttcctggactcctgagcagagacgctgaccggaaaggagattgagattgacattgaaccta

SEQ ID NO: 473795 - DNA, 100 bp, Homo sapiens
taatcacttgtctagagaaagaaaaagaaccctgcaagatgaagcgacatgaaatggtggatgaacccccagagcttgtggacaaatgtataggatcaag

SEQ ID NO: 473796 - DNA, 101 bp, Homo sapiens
ttcctttccgtctggcggcagccatcaggaacctggccactgctccttggtccttggcattatgacgggattcccttgtcacctctgacagttcctggctg

SEQ ID NO: 473797 - DNA, 83 bp, Homo sapiens
gtttttaaagtaggagagcctacatattcttgcagtcctggaagttgccgtactcagtacagaaggacagatccaagacttta

SEQ ID NO: 473798 - DNA, 75 bp, Homo sapiens
aggcagggccagaggaaagtgagattcccacagaccccagtgaaggctcaagaatgggacatggacgcccggcgg

SEQ ID NO: 473799 - DNA, 100 bp, Homo sapiens
ggagtacaccccgcagcacagccgcgacttcaaggtgagatcggactggaactgttcggctgcgaccagaaatttattttcctgagtaaattgccgagaa

SEQ ID NO: 473800 - DNA, 100 bp, Homo sapiens
gtgcctcaaagtctacctgagcgcccaggaaagttatatcacagatgatattggaatatcgacttggaaggagcagacttttctctcccatggtgcctta

SEQ ID NO: 473801 - DNA, 82 bp, Homo sapiens
agagtctccatcaggaaaacaagcctggttcagttaaacctactcaaactattgcttgcttggctcaggaacaacagaagag

SEQ ID NO: 473802 - DNA, 90 bp, Homo sapiens
tgattgtaatggagatgtgaacaaagctatcaatatattgctggaagggaattcagacacactatttgtcgtagatgtccagacaagcca

SEQ ID NO: 473803 - DNA, 98 bp, Homo sapiens
gctccatcccaaacacacacacatttttcccccggacttggaaagtcacccaaagccgccccaagtgcaggtgctggagaatctggtaaaagcaccat

SEQ ID NO: 473804 - DNA, 90 bp, Homo sapiens
cggcggcgacgcggacctgcggactagcgaacccggaggcggcagcagagacctccggggggcaacaagccccaacagcatggtgaccac

SEQ ID NO: 473805 - DNA, 100 bp, Homo sapiens
ctgtcattctggactgcacccctacgggaacccacgaccattatatgctggaatggttccttccccgggaaatggatacaagtagaagaaaattccattt

SEQ ID NO: 473806 - DNA, 82 bp, Homo sapiens
tcctggactgaaagcaggagcgctggcaggggatatgagactttctactcggaatatcctgagtgttgcgtggatgtaaaac

SEQ ID NO: 473807 - DNA, 98 bp, Homo sapiens
ccagcacgactcctcgggcagcctcaacgagaactcggagggcaccggaggtcacgagaagagaatgccttctagatgcaaaatcacctccaaaccag

SEQ ID NO: 473808 - DNA, 96 bp, Homo sapiens
cccctgtctcccggaggagcgcgcaccgtgccaatgggtcatgtttggttagaaggtgacaatctacagaattctacagattccaggtgctatgga

SEQ ID NO: 473809 - DNA, 100 bp, Homo sapiens
ccgggagcgagcccaggcggcagccgccctgcccgcaggccatgtggcccccgctgttgctgctgctgctgctgctcccggccgccccggtccccaccgc

SEQ ID NO: 473810 - DNA, 96 bp, Homo sapiens
tggccatgtgcccctctactcctcctcatctgtccccaccacaatcaatacgattggaaccagcacaagtacaacatctgcaggggctgctgagag

SEQ ID NO: 473811 - DNA, 80 bp, Homo sapiens
ctggagcctcagttggaagcagccgatccagcctgcggagcctgtggggcagagaaattaatggacttacgaaatgaata

SEQ ID NO: 473812 - DNA, 100 bp, Homo sapiens
taaaaatggacactggagtagaagtctctgatattggaagccaaggtggtgaaattgcctctacctttgatcacccagaactggtgaagcttggaagttg

SEQ ID NO: 473813 - DNA, 95 bp, Homo sapiens
gtacatgctggattgtagaacttctctctctggcaagtgtccagagaatggctgggatgaaagtacacttgaactctttttacatgaacttgcaa

SEQ ID NO: 473814 - DNA, 98 bp, Homo sapiens
caggacgtggatgacaagtatgaccgcatgaagggcagcccaatggatccaatggtgatgaagagacctcagttgtatggcatgggcagtaaccctca

SEQ ID NO: 473815 - DNA, 74 bp, Homo sapiens
atattaatctttggagagacatcctatattcctttcagggtttgaaagtattcttgaagggctgtttggacctg

SEQ ID NO: 473816 - DNA, 98 bp, Homo sapiens
gccggctcccgctcgggcggccgcggacatgtgcaggatgtccttcaagagatttctgcatattttggatctggctcatccgtgatatacaattttca

SEQ ID NO: 473817 - DNA, 105 bp, Homo sapiens
agaaccaggttctccttcgaggaacagagaaaatgaaaccagcagacagaatttgtcagataagtttataccatggatagcacaaaggagaagtgtgacagttac

SEQ ID NO: 473818 - DNA, 50 bp, Homo sapiens
caggagcggaacaacgtcggcgagcgggtttccaacatggctagatccat

SEQ ID NO: 473819 - DNA, 100 bp, Homo sapiens
cggagcggccgccaggaaggactcaccgaggcgcaggggctggaggtggtgctgggggccacccagaggagaaggccaccccgcctggaggcacaggcca

SEQ ID NO: 473820 - DNA, 82 bp, Homo sapiens
aagcacccacaaaactagcatcctcctggaggagctcgggaggagaggctgaagaaggagcttcgggtcaagctggagctgg

SEQ ID NO: 473821 - DNA, 50 bp, Homo sapiens
aagcgctttgatttacagcagctgcaggcctaaaggggagtggccccagt

SEQ ID NO: 473822 - DNA, 82 bp, Homo sapiens
ggaaatcagggagctcttaacccagtttgaaacgtaactggttccctgaccaggcagcagcccagacgcggcacagagaggg

SEQ ID NO: 473823 - DNA, 100 bp, Homo sapiens
aggcatcctccttgaagtatttggctgaggagttttcaatcccagctacagaagaagtttccaaaaatctggttgccatgaaagaaattctgtatggcac

SEQ ID NO: 473824 - DNA, 74 bp, Homo sapiens
gcaaagcgtcgagatcccgggcgggggcaccgagggctaccacgttctgcgggcttggacttaaggatcagcag

SEQ ID NO: 473825 - DNA, 76 bp, Homo sapiens
gtttctagaacgttttccggagttggaagccgtcatggaaaatggaagatttgcaaaatacaaatattttacccat

SEQ ID NO: 473826 - DNA, 83 bp, Homo sapiens
aagcccttccgtgtactcgggaatccggcacaaggcactgggctacgtgctggacagacaatgcagatcttcgtgaagactct

SEQ ID NO: 473827 - DNA, 100 bp, Homo sapiens
attccagagacaaaatagctcccctcctctgttgtagctgttcctctggcaatacaaactttctgctttcagctgaccggttccctgatgtgttacctgc

SEQ ID NO: 473828 - DNA, 90 bp, Homo sapiens
ctcgccggcccaagcccctcgtcgaccccgcctgcatcacctccatccagcccggggcccccaagggctcacccttcagaggacaatgac

SEQ ID NO: 473829 - DNA, 100 bp, Homo sapiens
agagcaagatcaccgtgacatccgagccaaaatgaagtttaatccctttgtgacttccgaccgaagcaagaatcgcaaaaggcatttcaatgcaccttcc

SEQ ID NO: 473830 - DNA, 100 bp, Homo sapiens
ccaccatggcagatggcaacagaggatgtcaacaattttttggaggcgtgcaatggaattgagttttgccctggtaaatgggaataatatccgaggcatg

SEQ ID NO: 473831 - DNA, 100 bp, Homo sapiens
gactagaaattgcaccacagatatatgggttgaagcagttcaggtacttttgaagcattctgcagatgttaatgctcgagacaaaaattggcaaacccct

SEQ ID NO: 473832 - DNA, 100 bp, Homo sapiens
agtttcttactcgggagctggctgaagatggctactctggagttgaggtgccagttgaaacaaaattctaatcaacatataattcagaaggatcttcatc

SEQ ID NO: 473833 - DNA, 90 bp, Homo sapiens
gtgctaaggcgggatgtgtcagtcaaagcagcctctgaacttctcatgaaactctcaggtgactgtggaagaggtcatgaccacaactgc

SEQ ID NO: 473834 - DNA, 75 bp, Homo sapiens
caaaatggaggtgaaggcggcatcattatcaatatgtcatctttagcaggtttgatttttgccaagcatcagaag

SEQ ID NO: 473835 - DNA, 90 bp, Homo sapiens
aaaagatggagccctgcatatgattggctctttagctgaaatacttctgaaggtcatgtccctgggactcctgtctacagagaaaaagaa

SEQ ID NO: 473836 - DNA, 49 bp, Homo sapiens
gaaacctggatctgcgatctgtttgtgatggcctgatatgaaggagtca

SEQ ID NO: 473837 - DNA, 75 bp, Homo sapiens
caagtacactgaaattcatcctgagatgaggcaccacactgtaactcgaggcatcaccaaaggcgtgaaggagga

SEQ ID NO: 473838 - DNA, 83 bp, Homo sapiens
gttttcctaatgcctacaacactgccatggtgtgaagcctcagtttaggtcatctggtggttcagaacactcaacagagggct

SEQ ID NO: 473839 - DNA, 83 bp, Homo sapiens
caaggcaaaccccagcacttaagcaaacgggaattctcgcccctgggcgctgcctatggcacagccaagagcggtaccggcat

SEQ ID NO: 473840 - DNA, 75 bp, Homo sapiens
gtcggcgctcaccatccagttcatccagaactgccattggatgtccagaatcccctgtagttgataatgttggga

SEQ ID NO: 473841 - DNA, 100 bp, Homo sapiens
tgaacattgtgaacgtagtctggaagacttgcttcgagaaaggaaacctgtgagatggggtcacagtggttataaagagttataccctgaagaatttgaa

SEQ ID NO: 473842 - DNA, 100 bp, Homo sapiens
cccgccatgggctgctgcagctccgcctcctccgccgcgcagactcagcccacctgcacccaggtgaaataaacagctttattgctcacacgaagcctgt

SEQ ID NO: 473843 - DNA, 95 bp, Homo sapiens
tgacagaaatcacctatgtttacagcgacagggaaatgatcttcattggttagcatgtgccttatatgtggcttgcagaaaatctgttccaactg

SEQ ID NO: 473844 - DNA, 96 bp, Homo sapiens
caggagcgggtgcagctgcagatggtggggaagctgaggcaggaagccctttagtcacttgccgaaggccacgctgttacccatgggaccggtttt

SEQ ID NO: 473845 - DNA, 50 bp, Homo sapiens
cagatgttcctgtggaccccagtccaggaatggaggatctttggttccat

SEQ ID NO: 473846 - DNA, 82 bp, Homo sapiens
aaggagctaaagcagcgtgcgttcagccctggggaactctgcgaccttcaagtcgtttgaggaccgagttgggaccataaag

SEQ ID NO: 473847 - DNA, 82 bp, Homo sapiens
ggaagtatcatcaagaacaaggagggcatggatgctaagtcactaactgcctggtcccggaagtctggctagataatcccaa

SEQ ID NO: 473848 - DNA, 75 bp, Homo sapiens
catgcatgcaccaaaacgaggacaggaagatgagaatgtgcctactgctcctgatcctccaagtcaacatttacg

SEQ ID NO: 473849 - DNA, 98 bp, Homo sapiens
taacgttgaggcccttcttgtgtatctggagaaaatagagatgccatggacaatattaccaggcagaaccaattctacgatacccaagtcatcaaaca

SEQ ID NO: 473850 - DNA, 50 bp, Homo sapiens
ctttgaactactgccggagcttctgccagtttgctggcctagacctgaac

SEQ ID NO: 473851 - DNA, 82 bp, Homo sapiens
tgactttggtgccctcaacatctctcagagacgaaaggtggtgcttcccacctttatcctggagaagcgatctttgctggag

SEQ ID NO: 473852 - DNA, 100 bp, Homo sapiens
gtcgatatcctcgtaatgtagaagaagaaaccaaatacattgaactgatgattgtgaatgatcaccttatggatggatggtcacaataccactttgtagc

SEQ ID NO: 473853 - DNA, 76 bp, Homo sapiens
cggagtacctgcgctatgaagacacgcttcttctggaagaccagccaacaggtcatcatcagatttgaaatattta

SEQ ID NO: 473854 - DNA, 75 bp, Homo sapiens
tgcttcatatgcaaaagatccacttaataactatgcagtcaaggttcatctctaacaagtatttagtgaaacgac

SEQ ID NO: 473855 - DNA, 104 bp, Homo sapiens
tccagtttccccatgagtccagccctaggtggttgaagatggatatgaattttttgcaaagaggcagttggtcactctgttttctgcgcccaattattgcggag

SEQ ID NO: 473856 - DNA, 96 bp, Homo sapiens
gccaagatgtctgacatggaggatgatttcatgtgcgatgatgaggaggactacgacctggcagctgagtatgtcccagagaaggtgaagaaagcg

SEQ ID NO: 473857 - DNA, 75 bp, Homo sapiens
gccccaccatgtcagacgcagccgtagacaccagctccgaaatcaccaccaagaactgccattggatgtccagaa

SEQ ID NO: 473858 - DNA, 83 bp, Homo sapiens
gcagcgaactgggtggcgaacggggcgagcctggaggattgtcactccaacctcttttcgctgaactaaaattccagatggca

SEQ ID NO: 473859 - DNA, 74 bp, Homo sapiens
tgatgtgagcaaatgcctcattcaggaggatttgacagctaaggatattgaagaaattattgatgagctcaagg

SEQ ID NO: 473860 - DNA, 50 bp, Homo sapiens
gtgccagagcctttattactaaaagggttttttatcagcaattggacacc

SEQ ID NO: 473861 - DNA, 75 bp, Homo sapiens
ataaactcaaccccttctcttccaaaagaattaaacaaccaccatgtcgagcaaaaaggcaaagaccaagaccac

SEQ ID NO: 473862 - DNA, 100 bp, Homo sapiens
cacccaccctgggcttcagcactggcagcccccagatcctggtgaagaccatgatacgtaaacgctcctttgggaacccattcgagggcagccggcggga

SEQ ID NO: 473863 - DNA, 100 bp, Homo sapiens
gccaggcctgtgtccggagcctgagctgtgaggacacaggcctgtactaccaccggtacctccaggaggtcatcgatgtactggagacggatgggcattt

SEQ ID NO: 473864 - DNA, 83 bp, Homo sapiens
gttcgttgtatttgtgacatctgtgggtttaatccaacagaagaagcctcagaagaggaaagtggaaagcctttccagtgtcc

SEQ ID NO: 473865 - DNA, 101 bp, Homo sapiens
gccgaggcggcgacggaggaaacagaagatgacgaagttatacggaagcgtctcctcattgatggagatggtgctggagatgatcggagaattaatctgct

SEQ ID NO: 473866 - DNA, 100 bp, Homo sapiens
gttcgcgtggctcccagcccgggaccccacccccgctggacagtgggggaaactgaggcctgagcgggttgattcttcaccacactgaaaccattaggaa

SEQ ID NO: 473867 - DNA, 99 bp, Homo sapiens
atttcagatgtgattcatctaaggttgacggatatattcagacgttacgacacggatcaggacggctggattcaggtgtcgtacgaacagtacctgtcc

SEQ ID NO: 473868 - DNA, 100 bp, Homo sapiens
tgctctttgaattccagtcccgtgtggttgtactacaatcccagagtcagacctagaagaaagatcagtagaacaagactctacagaactgtttaccaac

SEQ ID NO: 473869 - DNA, 87 bp, Homo sapiens
gagagagagcaagcgtttcagcgcctacaattacaggaattggattcaagtacgtggctctgggagacctcatcatcctcatcactt

SEQ ID NO: 473870 - DNA, 88 bp, Homo sapiens
agagtcacacacggtcctaagagctgggcaccaggaagcgaaggctgagcaaaatggagccatctaccttccaacaccagatcgatga

SEQ ID NO: 473871 - DNA, 98 bp, Homo sapiens
accagtaaaatatggtgaactcattgtcttaggggagaagatgtcaaccggacactagaaggtggaaggaaacctcttcattatgcagcagattgtgg

SEQ ID NO: 473872 - DNA, 74 bp, Homo sapiens
tctggataaggaccagtacctgcccaggaaactgcctttcatccgctgtagtttacaatgcagggatctggttg

SEQ ID NO: 473873 - DNA, 95 bp, Homo sapiens
tggatggacttgattctgatgagagagagaagaagaaggaggttcctgctgtgccagaaacccttaagaaaaagcgaaggaatttcgcagagctg

SEQ ID NO: 473874 - DNA, 83 bp, Homo sapiens
caaaaactccaaactcctctccaccagcgccaagagatttgaagaccttgcttctcatcacccactggattatgccccaggct

SEQ ID NO: 473875 - DNA, 100 bp, Homo sapiens
aaaagatctctggaagcgattaatgataaaatttcatggagaagaaggccttgactacggaggggttgccagatccctagcaactggaactaaagccggg

SEQ ID NO: 473876 - DNA, 90 bp, Homo sapiens
ctgaccgcagcaagaagcttttcaggcactacaccgtgggctcctatgacagcttcgacacttccagacctgatggccaaaagaaaggaa

SEQ ID NO: 473877 - DNA, 74 bp, Homo sapiens
ctagttacctggccagggtacgcgacaattggcggagatttggagcaagaggtggtggtggccttcccccgaag

SEQ ID NO: 473878 - DNA, 98 bp, Homo sapiens
cttctaccgctgcggctactgcaagaacgagtcgggcagccgctccaatgggtgtccggtggagagctgtttgaccggatagtggagaaggggtttta

SEQ ID NO: 473879 - DNA, 102 bp, Homo sapiens
tgactccccagccctagaagtgtttacagagcagcctccatcgccattgccaaaaagcaaagttcagatattttggatggcagtagtagcagcagtggctta

SEQ ID NO: 473880 - DNA, 100 bp, Homo sapiens
caacaacctgtgtgctcggtacgatgaaaacctgatcacagatctctatagaatcatggtgtcatggaaagggatttactttatactgactctgttttgg

SEQ ID NO: 473881 - DNA, 74 bp, Homo sapiens
ctatatactggctctcagattggaagtcaggataatgatcctttattaggacagtcgccgtggagaagtaaaat

SEQ ID NO: 473882 - DNA, 82 bp, Homo sapiens
cgccgcgatggtgacccggttcctgggcccacgctaccgggagctggtcaagaactggtctcggcgcggaagatggccggcg

SEQ ID NO: 473883 - DNA, 88 bp, Homo sapiens
catgtctgagtcggagctcggcaggaagtgggaccggtgtctggcggatgcggtcgtgaagataggtcctcagaatggttggaatgac

SEQ ID NO: 473884 - DNA, 51 bp, Homo sapiens
tcgaatgaataatcaaaagtttccttggtaccagcatcaagatgatttatg

SEQ ID NO: 473885 - DNA, 100 bp, Homo sapiens
gaaactgtaggacaaggcccgccgcctagcaaagactattaccagttactggtcacccggtctcaggagagaagaccaagaggtcggagaagaggtagaa

SEQ ID NO: 473886 - DNA, 82 bp, Homo sapiens
gtgccagcacctttcggcttctgagacggcggcagcagcggcattcaggtgaaaggaaagcaagccaggatggatatttacg

SEQ ID NO: 473887 - DNA, 136 bp, Homo sapiens
aagaaaaagagcaaagataagaagagaaaaagagaagatgaagaaacccagcttgatatgttggatggattggatgctttggtatatgatttggattttcctgccttaagaaaaaacaaaaatattgacaactttt

SEQ ID NO: 473888 - DNA, 100 bp, Homo sapiens
accgggtccagacccacgcggcgccagttctccggcgggaaggaaaaccgcgcagagaggcctccccatggccacccatggaccagtcggcattcacttc

SEQ ID NO: 473889 - DNA, 75 bp, Homo sapiens
ctgagtggttgtgtggtcgcgtctcggaaaccggtagcgcttgcagcatgatgtggacgagtgctcactagcaga

SEQ ID NO: 473890 - DNA, 74 bp, Homo sapiens
ctgatctgtacccagaaagagtcatacctggagcagcagcttatgaaaaggaatctacataatgttaagagaat

SEQ ID NO: 473891 - DNA, 83 bp, Homo sapiens
gctcgtatggtcaacattgatggaaaacaaatcaaactgcaaatctgggatacggttgtggcagcactgcctgaaggtatgag

SEQ ID NO: 473892 - DNA, 98 bp, Homo sapiens
gcgcccgccgcgcggagcgccccttcgcgtcccctgcaccatgagctggggcaccgagctctggaaatgcactcggtgatggaaagagagccactatt

SEQ ID NO: 473893 - DNA, 75 bp, Homo sapiens
tgatcaccaggataatattctctcattgattaatgtcaatgaacattctagtatgccagtagaaaaaaatatcac

SEQ ID NO: 473894 - DNA, 97 bp, Homo sapiens
tgacggccacccaccatggccgcagaccagcgcccgaaggccgacacgctggccctgaggcaacggctcatcagatttgagttctgtgaacctgcat

SEQ ID NO: 473895 - DNA, 75 bp, Homo sapiens
tcgggcgccgcgaggtcgtgttcccgaacaggttctctttgtaaagaatccttttctggtcaagtttcttcttca

SEQ ID NO: 473896 - DNA, 82 bp, Homo sapiens
aaaactgccttcagaagcaaaagctcagaattctgcaaatgcagattttgcaaactttgatgcatttggacagtctagtggt

SEQ ID NO: 473897 - DNA, 75 bp, Homo sapiens
ctttaatgagaagatctccattcctgaggaggagattcaattagcagagcctcacagacaatggccaaatgtgtc

SEQ ID NO: 473898 - DNA, 50 bp, Homo sapiens
actcggagatgcctggaatacagtaagatcttgatgtggaagaaatggag

SEQ ID NO: 473899 - DNA, 131 bp, Homo sapiens
cggtccagggaaggaagcaaagcaaatggagaatggcatgctggtgacggacagtgcagggaagcaactgcagagacaccatgccacaaggagagtgatctcttcccctgttttcacaatggaggactccg

SEQ ID NO: 473900 - DNA, 82 bp, Homo sapiens
atcaagaagatcttcgagttcaaagagaccctcggaacgttacgagaagtttctgagaagctgaacaaatataatttaaaca

SEQ ID NO: 473901 - DNA, 100 bp, Homo sapiens
cggcggcgaaggaggacgccaggactgcgtcccggagccaagtgcgggaggcgcgcagggccggcggcgcgcggaggtatcccatgtataaccgattgtg

SEQ ID NO: 473902 - DNA, 82 bp, Homo sapiens
gtttctttgtcatgtagccaagactggagaaacaatccggttgctgaaccaatccccatctgtagtttctgtcttggtacaa

SEQ ID NO: 473903 - DNA, 100 bp, Homo sapiens
gagagcaaaggctgtgtctacggcagcctggggatatagcctcatgcattgtgcgtcagcagcaatgtttatggtgaaaaatggcaacgggaccgcgtgc

SEQ ID NO: 473904 - DNA, 90 bp, Homo sapiens
gtctgctttaaagcgcataagaatgtcctggcagcattcagccagtattttaggaatggtcgttggagatcagagtggaagttcaccatc

SEQ ID NO: 473905 - DNA, 100 bp, Homo sapiens
gagctttgatagtcgtaccatatgcagaagacaactgggcggagttaatggaagtcaaccatgatgacaaagtggtcaccaccgaacgcttcgacctttc

SEQ ID NO: 473906 - DNA, 95 bp, Homo sapiens
gtgtttcaactatgcaaagaaaaatgtggaacagaataacttatctgatctcataaaaggcattgctcatcgtgatctgaaaccagaaaatatat

SEQ ID NO: 473907 - DNA, 101 bp, Homo sapiens
catatccgagggtgtcctgttacttccaagtcatcaccagaaaggtgcaagtgaaagtgtaggaaaacatatgcttgaagcgtgcaacaataatctggaaa

SEQ ID NO: 473908 - DNA, 86 bp, Homo sapiens
ctagaatcaactgagagagatgcttaaaaatcaccagttactttaatgagatgaatctggttatagatggacaagagacgatcatt

SEQ ID NO: 473909 - DNA, 93 bp, Homo sapiens
ctggggccaagggacaatggtcaccgtctcttcaggtgctggagaatctggtaaaagcaccattgtgaagcagatgaggatcctgcatgttaa

SEQ ID NO: 473910 - DNA, 100 bp, Homo sapiens
aaacttggaaagagcaagatcggcagccctaaactccttgaagcagaaaccatgcggcacatcttcatgaacaattaccatctgtgcaacgaaattagcg

SEQ ID NO: 473911 - DNA, 100 bp, Homo sapiens
caagcactaaaccactatgcttaccgagatgcggttttcctcgcagaacgcctttatgcagaagagctatcagcttcccagtttgcacaattcatcaaga

SEQ ID NO: 473912 - DNA, 100 bp, Homo sapiens
gcactttactacaaagatggacttctctgtacagctgcagaagcagaaccacagactatgacttggtcggaggcgatcagctcaactgtcacttcggctc

SEQ ID NO: 473913 - DNA, 118 bp, Homo sapiens
tctttgggggcggagagagaggtgcccagcccgtgcaggacacgaagctgcatgtgtttgacgcaaatctctctactttagttagaagatgccccaatcttgtccatctagacttaag

SEQ ID NO: 473914 - DNA, 100 bp, Homo sapiens
ctggttctacttcacactgcagaactgggttctggactttgggcgtcccattgccatgtattctaccttgtaaatactgttatttgtatatactgtaaat

SEQ ID NO: 473915 - DNA, 75 bp, Homo sapiens
tggacagtgcatggagatggttcagcaggacaagggaacaagaacttttctttttccacgatttgagtcctggaa

SEQ ID NO: 473916 - DNA, 75 bp, Homo sapiens
acttcattggccacctacagaaacaaaatgtcaacaaattgatggccttgaaaagatcttttgaggtcgaggagg

SEQ ID NO: 473917 - DNA, 95 bp, Homo sapiens
ttcttcctcttcggctcgccactgggcctggtcctggccatgcggaggacggtgctgcctgggctggacgagatggagtttcaccgtgttgccca

SEQ ID NO: 473918 - DNA, 100 bp, Homo sapiens
tctgtggtccgtaggagccactatgaggagggccctgggaagggtgtccgcaatgttgccagtgtctgtctgcagattggctacccaactgttgcatcag

SEQ ID NO: 473919 - DNA, 90 bp, Homo sapiens
agcacatcgagaccgcttaccgcatctggctggagccctgcattcgcggcgtgtgcagatggagaaggatgaaactgtgagtgactgctc

SEQ ID NO: 473920 - DNA, 75 bp, Homo sapiens
gatgttggagaactacaggaacctggtctccctgggtatgttgagtctaaaaaggacagagtcacagtagtcttc

SEQ ID NO: 473921 - DNA, 129 bp, Homo sapiens
ttctcccggttctgtgcgctaaccccggagcccggccccggggaactagggagcgtctccggctgcacagcgctcaggcacttcaggtggcaagacagctccttcttcagcagcaacagcagcagcaag

SEQ ID NO: 473922 - DNA, 100 bp, Homo sapiens
ggcttctggggacctttacgaggtggagagtatagtgaagatgatgtaaatgaattagtgaaggaagatgaagtggatggtgaagagcagacacagaaaa

SEQ ID NO: 473923 - DNA, 76 bp, Homo sapiens
gaaaatgggactggttgaccaactggtggaacccctggtatcgtcgtcctccccgcagtcaggctgcccatcaccc

SEQ ID NO: 473924 - DNA, 100 bp, Homo sapiens
tcttcaaagaatgatatttccaaagtttgcagaaaagaatatgaggtgggcaccatgtccttgaagcttcaggcaagcaatgtaaccaacaagaatgacc

SEQ ID NO: 473925 - DNA, 98 bp, Homo sapiens
gagcacgcgtttcccgcaacccgataccatcggacaggatttctccgcctcagcccaacggggaggagggtgaggacaaaatcttcttaatcaacaag

SEQ ID NO: 473926 - DNA, 83 bp, Homo sapiens
cttggctagtgcaagccttgtttattttcctcaccactgaatctacaggcctgctggagtcccagctgagccggcatgaccag

SEQ ID NO: 473927 - DNA, 50 bp, Homo sapiens
gtggaatctcagttgaaaaatattagatgtgagaagggtgttatgtctct

SEQ ID NO: 473928 - DNA, 99 bp, Homo sapiens
cccacaactgcctggtccgcgaggcggcttacagggagaacacagttggcctccaccgtttctgccccacagaaaacgtagcaaagatcaaccgagagg

SEQ ID NO: 473929 - DNA, 105 bp, Homo sapiens
tgggggctgagcccgccgtctacccgtggccgctgccggtctacgcaaaatacatatctcagtgcattgatgagatcaagcaggagctgaagcaggacaacatag

SEQ ID NO: 473930 - DNA, 100 bp, Homo sapiens
cgggccctggggccgcaacccgcgccgggcgagtgtcacatttgaagacgagcactgaggatgaggaaccaactgaagaatatgaaaatgttggaaatgc

SEQ ID NO: 473931 - DNA, 51 bp, Homo sapiens
aatttccatgtcaacatagtcctgtatgtgttgaagcccactttcacaaag

SEQ ID NO: 473932 - DNA, 97 bp, Homo sapiens
ttacattaaatatgaacgtggctatgccttcatggtactggctcctgtatcacccagctctggagttgaaagagctcttcattcctgagtctcctgt

SEQ ID NO: 473933 - DNA, 75 bp, Homo sapiens
agcaaaatggcggatcatgtgcagagctacattcatgggagcagccaggctcagtttgtggcagaatcacacatt

SEQ ID NO: 473934 - DNA, 90 bp, Homo sapiens
ccgagatgccgggggagcggggccttccacaccccctccgtgggtgtgtgcatctcctccgccaaggccggccggctgtgcaggcctccc

SEQ ID NO: 473935 - DNA, 100 bp, Homo sapiens
cttttccgtgctgatttctttcaacctcggctgctctttggcgtaaattgcaatcgattagggatcgtttctcagaatcaagttagaagtgagagttcag

SEQ ID NO: 473936 - DNA, 90 bp, Homo sapiens
caaccccaaggaggacgagggccggttgccgggcgcgggcgagaaagattttcagctgaactctcatctctcaacactggcaaatattca

SEQ ID NO: 473937 - DNA, 75 bp, Homo sapiens
gatttgttaaggattccaagtaactcttatttggtactgccaaaattatgacatgataccaaggaaattagaatg

SEQ ID NO: 473938 - DNA, 100 bp, Homo sapiens
tcgcctctttccatcgaacattccgagaatgcgagagaaagagcctccgtcaccacatatttgcaggcctttcagatatatccatctcacaagacatccc

SEQ ID NO: 473939 - DNA, 100 bp, Homo sapiens
catgtttttccgaagcctgcatttttttgtggagtggtttgaatatcgtaagcgcacgtttaaacatctcaagtggacagtttgcggttgtgaagaaatg

SEQ ID NO: 473940 - DNA, 100 bp, Homo sapiens
cccggcagacggctcagggaatggagccgagcatgtcgggactccacctggtgaagaggggacgggaacacaagaagctggacctgcacagagactttac

SEQ ID NO: 473941 - DNA, 75 bp, Homo sapiens
gaaatcctaatgacagtctccaaattcgcctccatctgtaccatggacatggtccggcgaggagagatcatcgac

SEQ ID NO: 473942 - DNA, 100 bp, Homo sapiens
gagcacaatgactttctgaagctgagaaccatgctcatggtgaggacgcttgagcggaagttagaagcaaaaatgatcaaggaggaaagcgactaccacg

SEQ ID NO: 473943 - DNA, 74 bp, Homo sapiens
gaactcagaccgtaccttgcaacaagctgaagtcacctgggagcccccctggacctgagctgcccattgaaaca

SEQ ID NO: 473944 - DNA, 101 bp, Homo sapiens
aacatgagtagagaactgtatcgagatttagcacttcactttgcaggtatgtgacgcattcccagactcttcagccaactgagcatcagcttcttcacagc

SEQ ID NO: 473945 - DNA, 88 bp, Homo sapiens
gaagagtgagagatggaacccgaagaagaaaggattcgttacagccagagattgactttatattcagagcaccaatcaaattaagcaa

SEQ ID NO: 473946 - DNA, 75 bp, Homo sapiens
cggccggggcctggtccgggcggtgcagaaactatgttccaacttcctgtcaacaatcttggcagtttaagaaaa

SEQ ID NO: 473947 - DNA, 100 bp, Homo sapiens
cacaggttaacatccgaaaaagagacaattcccggaaggaagtccaacgaaggatctctgctcatcagccaggatctggttctgctgccggagaaggcaa

SEQ ID NO: 473948 - DNA, 74 bp, Homo sapiens
cccatcctatccagagattagttttagttgcagcatggaacaattacaggacactcatgaggaccatgatactt

SEQ ID NO: 473949 - DNA, 97 bp, Homo sapiens
caattgacatctatggaacttctgttatggttcaggggctactgttcccgtagacaaagacgtcttcgaaaaacactcaacttcaagatgggtaaca

SEQ ID NO: 473950 - DNA, 100 bp, Homo sapiens
gaccccaggacacacacagctgcctcccggtgcgagaagaagaccccggcttgagagtgagcttgtgaaactttgtattgcaatgattgatactggaaaa

SEQ ID NO: 473951 - DNA, 97 bp, Homo sapiens
tggagtcggagaaatgcaacaacctctggctcttcctggagaccgggcagctccccaaagacaggagcacaggcattgatctggagaacattgtgta

SEQ ID NO: 473952 - DNA, 83 bp, Homo sapiens
agatatagccgttggtacaaaggtatcacctcttctgggctcaagatggacaacaagaagcgcctggcctacgccatcatcca

SEQ ID NO: 473953 - DNA, 101 bp, Homo sapiens
cgtatctgcctaggcattttgctgtctcctcctaatacggagcagcatttctttctattactactatctatgctgagactggttcaggttttgtagtacca

SEQ ID NO: 473954 - DNA, 87 bp, Homo sapiens
tccctcagcttccgccccaaaaggctaatagctcgtcagcttgctaaaatccatgctattcatgcacacaatggctggatccccaaa

SEQ ID NO: 473955 - DNA, 83 bp, Homo sapiens
tctgggcgaaaattggatgtgaaaatgaagccagaccgagatgctgtctttgcatttcaactacgcaacccagtgcacaatgg

SEQ ID NO: 473956 - DNA, 83 bp, Homo sapiens
cggaaaccggtagcgcttgcagcatgctttctaaaaccaatttttccaacaacaacgatttccgtgctcttctgcagtctttg

SEQ ID NO: 473957 - DNA, 74 bp, Homo sapiens
gcgcgcgggagttcgaggccctgcggagctgcttcgccgctgcggattgtcagtggcttcgccccgaggagagc

SEQ ID NO: 473958 - DNA, 100 bp, Homo sapiens
cagccccagacagccggcgctggctgtggtcggtgctggcggcggcgcttgggctctgattaacacagattcctcagatccagaagactgaaatttcctt

SEQ ID NO: 473959 - DNA, 75 bp, Homo sapiens
aaccgacaaccttcccagaaagtccaagctcgtgaaacgcttcgttaagggactcaggcagtacgggaagaactt

SEQ ID NO: 473960 - DNA, 50 bp, Homo sapiens
gtgtggagaaggaatatcccaaccggggaagaaggagaaagggccaaccc

SEQ ID NO: 473961 - DNA, 88 bp, Homo sapiens
ttcaactacgaatactaagaacccaggaagtggtcatagtaagtgctacaagaacacccattggatcttttttaggcagcctttcctt

SEQ ID NO: 473962 - DNA, 100 bp, Homo sapiens
cgcaagtctcgtggccacgagctgttgtggccagcagcgcccatgggctgggcaacctgatctttttcctcataacttgccgaccgacccgtgacagcaa

SEQ ID NO: 473963 - DNA, 82 bp, Homo sapiens
attctgttagacagtgaatgtggaaaggagattgacagtcacaattttgtaataagatgttgctatcggagctccacaagaa

SEQ ID NO: 473964 - DNA, 102 bp, Homo sapiens
ccgcttcctggaatggcaagcgcagcaacaacagagagcacgtggtgagaagccctaccactgcaactgggacggctgcggctggaagtttgcgcgctcaga

SEQ ID NO: 473965 - DNA, 83 bp, Homo sapiens
cttcgatgatcgtgtgtcggatgaggagaagactgcttttcaggaagccttggacgctgcaggtgataaacttgtagtagttg

SEQ ID NO: 473966 - DNA, 75 bp, Homo sapiens
ctgagggtcttcgaggctgtggaacagggaaaccctcagggaagaggaggaggagaaaaagcagctttctcaccc

SEQ ID NO: 473967 - DNA, 100 bp, Homo sapiens
acgggcacaagagggcagcagtgaggaattgtactgtatctgcagaacaccttatgatgagtcacaccacgatatttgctgaagtttgaacaaatttatc

SEQ ID NO: 473968 - DNA, 73 bp, Homo sapiens
ccaagattcgcattgaagatgacgggagctacttccaaattaaccaaggactttgaacatgtcggggatcgcc

SEQ ID NO: 473969 - DNA, 75 bp, Homo sapiens
caaccagcagctaatcacattttctcacaggcagtcttcccgtgtcccagtgagcctgctctcagcaaaaacgag

SEQ ID NO: 473970 - DNA, 74 bp, Homo sapiens
tgactactggggccagggaaccctggtcaccgtctcctcagatctacggaatccagaggcagcattgtctccaa

SEQ ID NO: 473971 - DNA, 90 bp, Homo sapiens
acggcggcagcttcaccgccgagtcctccagggatccagattagatgatcaaagatgtgctccaccacctgctaccacaaagggtccgac

SEQ ID NO: 473972 - DNA, 88 bp, Homo sapiens
taattttcctcacacacagttacttgccaagacgattgaatacgttttgccaacctatgaaatggccgtgaaaatgcctgaaaaagaa

SEQ ID NO: 473973 - DNA, 100 bp, Homo sapiens
aagcgcttcctcttcctcctactcaccatcagcctcctggttatggtacaggcgccaagcccatctttgtgtgcttgcatccaactgtgatgagcctatg

SEQ ID NO: 473974 - DNA, 50 bp, Homo sapiens
cccgctggcgcgcagcctcagctaggctgacagtgagagctgaatgtccg

SEQ ID NO: 473975 - DNA, 50 bp, Homo sapiens
cggtcctggtccctgctggttgtcagagcaccataacatggtgtgggaag

SEQ ID NO: 473976 - DNA, 100 bp, Homo sapiens
cagtatatcaatgtggattgtgcaaaattaaaacgactcctgaaggctattgacctgaaaagtggttctggaaaagtgtaccaaggccctgcaaaaggtg

SEQ ID NO: 473977 - DNA, 50 bp, Homo sapiens
tggagttggcgactcgctaccagtgttctaagaacggaagcatctgggct

SEQ ID NO: 473978 - DNA, 121 bp, Homo sapiens
gctagtaattgagcctcaaaatgaagatggcacatggcccaggcagaccttgcagtcaaagtccctaatattaaggagctttgtggatgatactatgcatcttctagagaagcagtcctca

SEQ ID NO: 473979 - DNA, 50 bp, Homo sapiens
ctccactcgaggcatctcacaggggaacactgtgaagaacatgttgcttt

SEQ ID NO: 473980 - DNA, 75 bp, Homo sapiens
atcagtaaagaaggaaaaagcagtaaagccagaggaagggccaaaacactcattgactcagatctctcaatccat

SEQ ID NO: 473981 - DNA, 100 bp, Homo sapiens
gcaagatttggttatagacttccagctgaaggtttaaaggcactaaccaggctgtatctggacaaggccaccttaatatggaatggaaatgctgtttcag

SEQ ID NO: 473982 - DNA, 88 bp, Homo sapiens
ccagagaaaccctgcaaaggagtccctagagacacctagtaatgtggatcaatcttcctgtcctacaactgacaaaggatcccctaaa

SEQ ID NO: 473983 - DNA, 97 bp, Homo sapiens
gggatctctagcctacaggatggcttggccttgcacataagtcttcccatgcacaagatgattaatacagatcttagcagaatcttgaaaagcccag

SEQ ID NO: 473984 - DNA, 82 bp, Homo sapiens
caaatttattcaagtcaattaccatcctttaccaggattgttgtgtccactgtatcctggcttgcttgttctgcgaattcct

SEQ ID NO: 473985 - DNA, 75 bp, Homo sapiens
ccaggaccacctggaagcctagaaatgagtctcgctctggccagagattttctaaataatggtcaggaatctgca

SEQ ID NO: 473986 - DNA, 82 bp, Homo sapiens
aatcgacacacaaagaatagagttgagcctgtgggacacttcgggccagcatccttcagaaaaagcatccccgaggaggaag

SEQ ID NO: 473987 - DNA, 100 bp, Homo sapiens
tgtacaccctggtgaccaagagggattcaaagacctcagttggatgaacccattccactgtatgaggcaaaagtttccatggaagctgttcagaaaaatc

SEQ ID NO: 473988 - DNA, 90 bp, Homo sapiens
ctgaaatgagaatgaagagagctcagaatgcggacccagaatgattggagagcaagaagagcaatccacatagaagaagcacagagcaaa

SEQ ID NO: 473989 - DNA, 50 bp, Homo sapiens
ggctggaggccccggcggctagcaggtggcctgacggagcaagagctgat

SEQ ID NO: 473990 - DNA, 75 bp, Homo sapiens
gtttgctctcatgaacatgcaatgagaagactgatcaatctggatcaagattataggaccggcccaagtgaggag

SEQ ID NO: 473991 - DNA, 75 bp, Homo sapiens
cagcgcgccatcctgcaaaaccacaccgacttcaaggacaagagaacggagaccaacctgggctgaagaaagaag

SEQ ID NO: 473992 - DNA, 75 bp, Homo sapiens
tcctgcctcagcctcctaagtagctgggactacagaaccgggctgtgggtcggcccaaggggaagctgggcccgg

SEQ ID NO: 473993 - DNA, 75 bp, Homo sapiens
tggccctgatcatcctgctgggcttcgtccagatcgggaaggctgatccagtgtctctttgggccacttcaggcg

SEQ ID NO: 473994 - DNA, 90 bp, Homo sapiens
cgcctcccgagtcactgcagccaacccttcagcaagcatcaagatggtgctcatgtggaccagtggtgacgccttcaagacggcctactt

SEQ ID NO: 473995 - DNA, 90 bp, Homo sapiens
ctcctttcattccaagtttgactccagattttgctgaatggattagaatacgaccatatgtgggatgtttggtacaatatttgcccctcc

SEQ ID NO: 473996 - DNA, 50 bp, Homo sapiens
agtggaaccaacccagccgaccccccagccaagctctaaagcacatgtag

SEQ ID NO: 473997 - DNA, 75 bp, Homo sapiens
cattgacgccatgtcgggttattcgagtgaccgagaccgcggccgggaccgaggtttttggctttcacccccaac

SEQ ID NO: 473998 - DNA, 89 bp, Homo sapiens
aagaagggacggggatttctcctcctaatctgggcctcttgtcatggctactggcgcaactacttgagctgcacgtctgcccacaccag

SEQ ID NO: 473999 - DNA, 100 bp, Homo sapiens
ttccatcgactcaagacaatctcatccgaaaccacacaggatccctggctgtagcgaacaacaacccaaccattactggaagaaatctttcctgttttct

SEQ ID NO: 474000 - DNA, 87 bp, Homo sapiens
gccaccggctggagcggatcccacacctccggaccgagggacgcggggccctccagaatttccacagcatacacctggacctgttcc

SEQ ID NO: 474001 - DNA, 90 bp, Homo sapiens
gctggtcagcacagcctgcggtttccggctgcaccgcggcatgaatgtgcccttcaagcgcctgtctggggaagtcatctacaataagac

SEQ ID NO: 474002 - DNA, 75 bp, Homo sapiens
gcacgctcggctgctacgtggaaatcctcaagctgctatgaggaaaatgaagctcgggctggttaactgacttgc

SEQ ID NO: 474003 - DNA, 101 bp, Homo sapiens
attatcaattaccgtacagatgcaaaacaaaagtggttacttctgactggtatatctgcacagaaattccattacagaaaccttcttcttggtgaacacga

SEQ ID NO: 474004 - DNA, 100 bp, Homo sapiens
cgccggtgcagcgggggggcccgggggccctggtggccctgggatggggaaccgcggtggcttccgcggaggtttcgtagcttaacgacagcgttcttca

SEQ ID NO: 474005 - DNA, 85 bp, Homo sapiens
gtgccggccgggattcgcggcccggagctcgggaccggaaatttgcgagaatccccgatttatcattgatggagccaacagaact

SEQ ID NO: 474006 - DNA, 100 bp, Homo sapiens
agcgccgcgaacttggtggccagcgccgcgcccggggccgtgcgctctcgggccactcggccgcagacgaagttatacggaagcgtctcctcattgatgg

SEQ ID NO: 474007 - DNA, 90 bp, Homo sapiens
agcatctttactggaaaaaagtgaaggagaaaagttttttgacattgatagtggaagaaatgctcctttgcatgctcctccttcagaaca

SEQ ID NO: 474008 - DNA, 75 bp, Homo sapiens
cacaaacgccgcaccaggtcttgtagcagcgcctcctcgacaaatgctgtgcttcatgaagttaaaagagagggg

SEQ ID NO: 474009 - DNA, 75 bp, Homo sapiens
aggactgaagcagatggcaactctgatcccaactctggttaatgactccagagagtaagatcagattcgtccaca

SEQ ID NO: 474010 - DNA, 82 bp, Homo sapiens
ctctgcccccccttccccacgcaaccccagatccatttacactttacaaattcagaaggagctggcggacatcactttagac

SEQ ID NO: 474011 - DNA, 75 bp, Homo sapiens
cgttaaaaatttagtggatcaacatgagcctaagaagggtgctgttggcccaaaggttgccctgaagccccccat

SEQ ID NO: 474012 - DNA, 75 bp, Homo sapiens
gcgccatgtccgcgcacaatcggggcaccgagctcgatttgcctactggctgggaagaagcatatacttttgaag

SEQ ID NO: 474013 - DNA, 75 bp, Homo sapiens
accagattttcatgatggctttttacttgaagtacacagagaaagcttggaacgtaggcgttcccggtccacatc

SEQ ID NO: 474014 - DNA, 100 bp, Homo sapiens
cgcctgctgcactttgggttcaaggcgacagaggaggacgcctttgtccgctgtgtctccgtcctagggaacctggctgaccagctctactacccctgtg

SEQ ID NO: 474015 - DNA, 50 bp, Homo sapiens
tttgcagcagtggatcgaatatatcaagagtggagactgctgcacggact

SEQ ID NO: 474016 - DNA, 75 bp, Homo sapiens
ccaccaggccgggaagcccatcggcgtgaagcacatctcctgtcccctgctcatcctgcacgctgaggacgaccc

SEQ ID NO: 474017 - DNA, 75 bp, Homo sapiens
aactgagtgaatatgatcagatttctccaccaaattctcagcctgataaggagcctccattatggcatgctgaat

SEQ ID NO: 474018 - DNA, 73 bp, Homo sapiens
agcaagagcaagatcaccgtgacatccgaggtgcctttctccaaaagatataaagatgaagcgcagctgtata

SEQ ID NO: 474019 - DNA, 71 bp, Homo sapiens
atgtcagaaataatgattgatgctgaaggaagggtctggcgggaatttcctgaccggttggtgggttaccc

SEQ ID NO: 474020 - DNA, 83 bp, Homo sapiens
ctgctgtagtcacaggagctgtagagaggaccccggtacatctgaaagccgggaaatggcgacgttgtggacgtttaccagcg

SEQ ID NO: 474021 - DNA, 100 bp, Homo sapiens
cagtggccctggaggaggccaagaatggctattcaagtggacaagttcaactttgagagtttcccggagtcccctggggagaaggggcaatttgcaaacc

SEQ ID NO: 474022 - DNA, 90 bp, Homo sapiens
gcggggcacaggtgagccctggctgcgcgcgcggcccctcctccccggcgcctcccaggcctcatggcggtccgagcttcgttcgagaac

SEQ ID NO: 474023 - DNA, 83 bp, Homo sapiens
ttttatttttccccaattcagcagagaatattttcaagggggggccaattcctgtccccccagcagcatggcatcgtgtgctg

SEQ ID NO: 474024 - DNA, 100 bp, Homo sapiens
agcctcctccttaacttcctgcttgcagcgtttgatccagcatgaccttcctcttgatgttgctgctcatcttcttctacatttttgctgtgactggtgt

SEQ ID NO: 474025 - DNA, 100 bp, Homo sapiens
aatttaccagagataattgataacaccctgtaacagctgagtatattcaagagcaaatgaccaagagccatgtgggtggtggttggctaaagttcggatg

SEQ ID NO: 474026 - DNA, 90 bp, Homo sapiens
cgggtgctgcaggcgccgccgccggacgtcggcaacggagaaggtcgtggttcaattccagaattctttcatattatgaaaagaaagttt

SEQ ID NO: 474027 - DNA, 100 bp, Homo sapiens
ggatttaaaagacagtcctcgtcagcactgactttcagctatggaatcggtcagttcaccgggacctggaggcccagattgcgatcgtgacggagaacca

SEQ ID NO: 474028 - DNA, 75 bp, Homo sapiens
ctgtggacagtgaagagaggcctctcccaaagcacctgcgcagctccagtgatccacaagctcagaaatacatcg

SEQ ID NO: 474029 - DNA, 75 bp, Homo sapiens
ttggtgtgattagcttcgcagtctggaaagctttaggagttcacagtactgcagatgtatttaattttgaggaaa

SEQ ID NO: 474030 - DNA, 75 bp, Homo sapiens
ggcgtattccacatagcaaacagtgatgtcttggcattgcccattttcaagcaggaagattccagccttccattg

SEQ ID NO: 474031 - DNA, 75 bp, Homo sapiens
caaaagtttataccaagtcttctcatttaaaagctcacctgaggactcacactgttacagccaagttctacttct

SEQ ID NO: 474032 - DNA, 90 bp, Homo sapiens
gtccagccgctcaccctggacagagggactttgaacatgtcggggatcgccctcagcagactcgcccaggagaggaaagcatggaggaaa

SEQ ID NO: 474033 - DNA, 74 bp, Homo sapiens
ggtgttccacgctatgttgggagtgttcgctttcgagcagctgtgacacaagcctcactgcagtctataattca

SEQ ID NO: 474034 - DNA, 50 bp, Homo sapiens
gaatgctaagaactgctgggaggatgacaatttacactgactgggccaac

SEQ ID NO: 474035 - DNA, 85 bp, Homo sapiens
cgacaagaaaaacaatcgcttcaatgatgggaaggtggatcccgccgggaggtactttgctgatttagcatgtagactgctgggg

SEQ ID NO: 474036 - DNA, 100 bp, Homo sapiens
ctcgcccaccacgtccagcttcaccacgcggctgcacaactgcaggaacaccgtcacgctgctggaggagctgagatctgtatctgtggacctgaatgtt

SEQ ID NO: 474037 - DNA, 97 bp, Homo sapiens
acctcttctgcctcttcatgggtttgccagaacccaataaagatgccatcttccaaggcctgacgcaggaccaggggttttatacatccaaagactt

SEQ ID NO: 474038 - DNA, 75 bp, Homo sapiens
ttcctgagtgcttctttcttggagctgaccatgagatgctcttagtgatcttgcattacactttctgaataaaat

SEQ ID NO: 474039 - DNA, 75 bp, Homo sapiens
ctggcacagggccttctgctgcatttcctgcccagaggagcctggtcggggtgctccacagaagctgtgcctggg

SEQ ID NO: 474040 - DNA, 75 bp, Homo sapiens
gtggaagcaggactgcgccgcgtcttcctcaaggttgttcctcaaagtcattcaagctgtactcgccgaaggagc

SEQ ID NO: 474041 - DNA, 100 bp, Homo sapiens
tgtcatgttcagtgaactggtggtatatgagtagaccagtgatgagtggcccaggactctatgaccctacaaccatcatgaatgcagatattctagcata

SEQ ID NO: 474042 - DNA, 90 bp, Homo sapiens
gtcaaatgttcagccagtatcaacaccagtaacagtgtgtggagatatccatggacagactctgagatttgcccacctgatgaccttgcc

SEQ ID NO: 474043 - DNA, 74 bp, Homo sapiens
aaaagaacaatataaaggaagcctctgaacttttgaagaatatgggctctctaaatacgtacagattctgcgat

SEQ ID NO: 474044 - DNA, 83 bp, Homo sapiens
acagccgcggcggcagcagcagtgagagggatgtttcagcagcccctgagaaggaagaggaggaagctgagggcccgctgagg

SEQ ID NO: 474045 - DNA, 83 bp, Homo sapiens
cacccccggcggcggcacgatgccctttgacttcaggaggaagcccttagtgtatacaaggaagcaattcagaaaatgccaag

SEQ ID NO: 474046 - DNA, 100 bp, Homo sapiens
cgaaaacatgaccgctgagcccatgaggacacaactcagatgggaagttcatcgcccgggcacagcggatagagtacgactgtgaactagttccccggcg

SEQ ID NO: 474047 - DNA, 83 bp, Homo sapiens
tggcttttactaaaaatggacgcctggcaaccaagttgtgaccgagattcccgacgagagagactgaggggaagagaggaagg

SEQ ID NO: 474048 - DNA, 73 bp, Homo sapiens
taaaatcctgctctggccggattccagactcgtgggggaaaggctggacctgagggcactcgctttgctcctg

SEQ ID NO: 474049 - DNA, 100 bp, Homo sapiens
gcaagtttgaggactggctgatgcccattctggaccagatggtgatggagcagaacacagaggagtcagtggatcggtggggaaaatgctgcttaccctg

SEQ ID NO: 474050 - DNA, 75 bp, Homo sapiens
gtttatgctgagagaacagtttgaagcaaatgggtatttctttaaaagaagaggaatctcttgttggcatttgaa

SEQ ID NO: 474051 - DNA, 83 bp, Homo sapiens
ctcgctctcggcttgaccgcattcttcctcccagggggatatgagactttctactcggaatatcctgagtgttgcgtggatgt

SEQ ID NO: 474052 - DNA, 75 bp, Homo sapiens
gctcaggatggggcggccgtggtgaggaaccctggactctcaggcgctgaacaacctgcagtccaccttctcagg

SEQ ID NO: 474053 - DNA, 143 bp, Homo sapiens
ctctcttcatgggccatgcccggtgaccacttttggaccaaaggcctgtgtgctgcagaacccccagaccatcattgttttaactcaaatgggtgatgaaaaggactcttggaaagtgaaaactttagatgaaattcttcagg

SEQ ID NO: 474054 - DNA, 74 bp, Homo sapiens
tttgctccagtgcttttgccacattcaagtacattttgaccaatttaaagaagcattaatactcatcttgtcca

SEQ ID NO: 474055 - DNA, 100 bp, Homo sapiens
gactttcctccaagagcacattgcctggtaagatgctcttcagtaggttacctgcaacatccaggatcagaacaagtacaatttcctcgaaccacttcac

SEQ ID NO: 474056 - DNA, 100 bp, Homo sapiens
atcgccgctcattaaagttcaagaatttgacatctgcagtatatggtgtagtaaaccaatttctgtcctgcaagattattgcgatgccattaaaataaac

SEQ ID NO: 474057 - DNA, 116 bp, Homo sapiens
taatgagagcagcaggatcagatggtactgaactttttgatcaggtcctcgatgggcttcctggaatattggtgtgtttatttgcatcagatgtgctggaattcatagaaatcttg

SEQ ID NO: 474058 - DNA, 98 bp, Homo sapiens
ggaatatgaggaagacctactggagcagtcgcagtgagtttaaaaagtccacaactcccaggcctgttgcagatctccaactcctgctttgtgtgacc

SEQ ID NO: 474059 - DNA, 90 bp, Homo sapiens
cagggaagcagtgaaaatgatgagagatgtgccactgattaatgaacttgaatcagcaatacatcagctgtacaaacagcgagcttcccg

SEQ ID NO: 474060 - DNA, 78 bp, Homo sapiens
gaagtcgagtagttcagttgtggaattggttatgctactgtgttctcagatccgaaatgtggcagcaaatctctgtgt

SEQ ID NO: 474061 - DNA, 76 bp, Homo sapiens
ctacagatgatgagtcggtggcagagatcaatggaaccatgaacaccgagaaggacatcctgctgcgacctgagct

SEQ ID NO: 474062 - DNA, 75 bp, Homo sapiens
agttcatgcaaagcgctgagaacaggaccccccgcccccgagccttcacgtaaatgggtccagtcatgcctccca

SEQ ID NO: 474063 - DNA, 82 bp, Homo sapiens
tgtcttccccagctctgcagccacatactatccgtttgttcaggaaccaccagtgacagatctttcccagggaactccgatg

SEQ ID NO: 474064 - DNA, 82 bp, Homo sapiens
ctccagcccggcccggcagcgacatggaagtgttagatgatgaagatagcaacaacatcacagtaggatccttagttacagt

SEQ ID NO: 474065 - DNA, 75 bp, Homo sapiens
gcctgggactgcaccgcaccgagggcgagctccagtgaaaacagcgctgcgccatcctccgttcagcccacctga

SEQ ID NO: 474066 - DNA, 100 bp, Homo sapiens
gccataatgtagccgaggttcaaaaacgagaatttgtctgcagtgtatggaagctccaaaaggaaagataccagattgatcttgatcacctctgcctccc

SEQ ID NO: 474067 - DNA, 96 bp, Homo sapiens
tgacttcagagagtttgttctggaaatgcagaagaccatcacagacctcagaacacaggagaacccatccccccacggaccttgactgaagctggc

SEQ ID NO: 474068 - DNA, 100 bp, Homo sapiens
cttccatccagtaacagaggcaggaggatcccttgatgccaagagttcgagaccagctggggcaacaaaggagctgcaggaggagagcggtctgacagtg

SEQ ID NO: 474069 - DNA, 78 bp, Homo sapiens
ttcccgctggcgcgcagcctcagctagtcatccgtccttggctcaggatttggagagcttgcaccaccaaaaatggca

SEQ ID NO: 474070 - DNA, 80 bp, Homo sapiens
gcgccgtatgggactttgggcgctgtgagcggcggcgagcagccacgccgcaatgaagagcttcttacagtgaaagcaaa

SEQ ID NO: 474071 - DNA, 80 bp, Homo sapiens
aaatgtctgactctgactctcggactgagaaacgcaaggcgatcagtgggtgaccgcggctgcgagggactttgtcatcc

SEQ ID NO: 474072 - DNA, 148 bp, Homo sapiens
caggtgatctgcccacctcggcctcccaaagtgctgggattacaagcgtgagccactgcgtggcctgagttctcaaaagtctatggccctgtgttcactgtgtattttggcctgaagcccattgtggtgttgcatggatatgaagcag

SEQ ID NO: 474073 - DNA, 75 bp, Homo sapiens
agagattcatctttcatgcagtgacatgttgataaaaaatgatggtggagccgccaccaaaatgcagattttcgt

SEQ ID NO: 474074 - DNA, 83 bp, Homo sapiens
gctttggaaacgacgtcatgtgttaggagggaaaacccctgatcctaaaatgaatgctaggacttacatggatgtaatgcgag

SEQ ID NO: 474075 - DNA, 100 bp, Homo sapiens
ggctttatatcctctgggcctgggtttcctgaagtcaccacacatagaggagagagaaaatggctgagttaaagggtgggtatatggctgccaaggtcca

SEQ ID NO: 474076 - DNA, 140 bp, Homo sapiens
cggcgcccccggccgctaccgctcaggtgctgcaggcacagcccgagaaaccgcagcactacaccactattcctgatcagagaactccagttgcttcaacacacagtatcagtagtgcagccaccccagatcgaatccgc

SEQ ID NO: 474077 - DNA, 98 bp, Homo sapiens
cccaggtgtgatttgccagaacaggagatattccagatgagaggtggtgggcccagtgaactttgaggcgctgatcatcaccatgtcggtagtcgggg

SEQ ID NO: 474078 - DNA, 90 bp, Homo sapiens
tggcaaagtggttgtggtcactggagctaattcaggaatagggattatcagcatagaaagaaagccttgtaaccatcaggtagatacagc

SEQ ID NO: 474079 - DNA, 115 bp, Homo sapiens
tttctcctcattgaagctatgcagtatttctttggcatcactgcagctagtaatttgccttctggattgctggactctgtgaagctgagcaggagcagatgcggaagatcctcta

SEQ ID NO: 474080 - DNA, 90 bp, Homo sapiens
gggcagatggcaagtggagacagcaatctcaacttcaggtctacttccccagcaggacagcatcattctcctatatcttctagacatcac

SEQ ID NO: 474081 - DNA, 100 bp, Homo sapiens
gcaagatggcaaatttgcttcagtttttgtgtataagagagaaaatgaagacaaggttaataaagctgccaaggacccagatgatgtggtaccagttggc

SEQ ID NO: 474082 - DNA, 100 bp, Homo sapiens
ccggagcccccggcccaagggcgacttctccagccgggcccgcgaagtggactcacaccacccggcaagaactgctcactacggctccctgccccagaag

SEQ ID NO: 474083 - DNA, 78 bp, Homo sapiens
aaaaataccacgacaaaaccaccctactgagtcagtgctgattctctcaaatagagcttgaaggataaatcttcattt

SEQ ID NO: 474084 - DNA, 100 bp, Homo sapiens
ttcggatgtcgaatcgctgccgcgtggggggttccgctgctgcctctgccacgttactacagccaaccgctaagtcctatcagccatggaaacaccattg

SEQ ID NO: 474085 - DNA, 100 bp, Homo sapiens
acaggcataccttaatactgtggaggcttatgatccccagacaaatgagtggacccagagctgccaatttatatttcctgttcctagttgtcctgaactg

SEQ ID NO: 474086 - DNA, 98 bp, Homo sapiens
ctacccgcttcactggcaccatggtgactcgaaaagccctgtttcctggtgactctgagattgaccagctctttcgtatctttcgtatgctggggaca

SEQ ID NO: 474087 - DNA, 82 bp, Homo sapiens
aagcgggccacgcacctcgtcaccaaggccaagggtaaagttctttacaaagttcgctggaaaggctatacatcggatgatg

SEQ ID NO: 474088 - DNA, 75 bp, Homo sapiens
cagagcctcgcctttgccgatccgccgcccgtccacacccgccgccagcgtcccctccagaggaggacggctggg

SEQ ID NO: 474089 - DNA, 83 bp, Homo sapiens
tttaaggaaataacatttagagtggactgtgcccccagcagcccccaaggccttctctgactaccagatccagcagatgacag

SEQ ID NO: 474090 - DNA, 75 bp, Homo sapiens
tgagccactgcctgacagatacacggtgtcggaggaaggtgagcgctacattggcatgtggcaggctggtcagcg

SEQ ID NO: 474091 - DNA, 80 bp, Homo sapiens
gcttgcctacccgccggcccgcgggtctacttcctcaaagagatgctgcaatttgtcagtaatcaagtgggagagttccc

SEQ ID NO: 474092 - DNA, 90 bp, Homo sapiens
attctttctgcaccaaacccggaaggaatctacgagaacgaagaccagctgctctgggaccccagcgtcctccctgagagggaggtggag

SEQ ID NO: 474093 - DNA, 100 bp, Homo sapiens
cagagcgtcgggatatcgggtggcggctcgggacggaggacgcgctagtgccaagaataaggagacgggtgctttggctgcggccaaagtcattgaaacc

SEQ ID NO: 474094 - DNA, 96 bp, Homo sapiens
gaaaccctgattaaacccttggaaaaattcagaaaagagcaacttggagctgtaaagtacgaggatgtcgtccaggaaagattgtgcagatgactg

SEQ ID NO: 474095 - DNA, 83 bp, Homo sapiens
agaggtcccaatcccccactctttccgccctaatggaggtctccagtttcgggagcatcgagtacagctgtccggcctccaac

SEQ ID NO: 474096 - DNA, 83 bp, Homo sapiens
ctaacttcctcggccgagccgggccgcgccgccgctgccgccgccgcgcgcggtaatagctcttcaagtctgcaataaaaaat

SEQ ID NO: 474097 - DNA, 75 bp, Homo sapiens
ggcttggattactcttacaagtgcaccacgcctgtcccagaacagcacaagacaggatctcactctgtcacccag

SEQ ID NO: 474098 - DNA, 71 bp, Homo sapiens
gtaacatagtccgattgcgttatttcttctactccagtggtgagaaggagagaagaccaagaggtcggaga

SEQ ID NO: 474099 - DNA, 100 bp, Homo sapiens
gcgccgcggccgttagtcatgtcggccacccctttgctgtgaagttgcttgcgctctgtaagaaagaaatcaagaattcaaaagatatccagaagctcct

SEQ ID NO: 474100 - DNA, 75 bp, Homo sapiens
cgcctcgtcgacatgagtgatgtggaggaaaacaacttcgagggcagaatttgtccaatatgtgcagcgttacct

SEQ ID NO: 474101 - DNA, 101 bp, Homo sapiens
cagaaggaagcacaaaaagggacagtcggtgggaagaagagcgctatcctgaaggcatcaagtggaaattcctagaacataaaggtccagtatttgcccca

SEQ ID NO: 474102 - DNA, 109 bp, Homo sapiens
tgcagctcttgggttttttgtggcttccttcgttattggagccaggcctacaccccagcccagctgatgaagaacacgggtgtgatccttgccaatgacgccaatgctg

SEQ ID NO: 474103 - DNA, 90 bp, Homo sapiens
ttacagaggagggcactgcggctcagaggctgggtctcggcgcggaagatggccggcggcgtggacggccccatcgggatcccgttcccc

SEQ ID NO: 474104 - DNA, 100 bp, Homo sapiens
gccaaggagcacagggtgtccctgaagtgccgcaggcagctccgtgtggaggagctggagatgctatccatgggaacttcttgcttactggtgcctatga

SEQ ID NO: 474105 - DNA, 100 bp, Homo sapiens
tcctcggtggaggcgtacatcactgtcgtctcatgggagaaagacactgtttcacttgtctcaggacagagtttagggtatggatttgttaactatattg

SEQ ID NO: 474106 - DNA, 75 bp, Homo sapiens
caaagaagatgcctcgaactaaacaaattcatcccagaaatctaagaggcacatctccctaacacttcctgccac

SEQ ID NO: 474107 - DNA, 100 bp, Homo sapiens
agaaaacgtaatgaggatgaagattcaccaaataagctatatactttggttacctatgtacctgttaccactttcaaaaaactcacgtgctgtgtgtcag

SEQ ID NO: 474108 - DNA, 100 bp, Homo sapiens
agagcggcggctcctccgggggacccgcggtccccaccgtgcagcggggcatcatcaagatggtatattgaagcaagtcaaagattacattaaacagtgt

SEQ ID NO: 474109 - DNA, 89 bp, Homo sapiens
gaaaatggaggaagcagaaaccagaaactttaaatcttgagaaaagaagattgtctatcatgaaggagccaaatgatttctcagtatca

SEQ ID NO: 474110 - DNA, 50 bp, Homo sapiens
gacagaagcgactttggtgagactctgacgaaggggaggaccaggctggc

SEQ ID NO: 474111 - DNA, 82 bp, Homo sapiens
cccaagcattcatgttccctcaccagctgtagtatgatctcgtgaaatcttgagagaaactgaatgacgaatgaaactattg

SEQ ID NO: 474112 - DNA, 50 bp, Homo sapiens
cccagggtggctgaatcacggaatggtgcggtggctactaaagttcgaag

SEQ ID NO: 474113 - DNA, 97 bp, Homo sapiens
gccgccttttgtgctgcggccgcggagcccccgagggagtaccctgacttctaccggaagctctacggcctcttggacccctctgtctttcacgtca

SEQ ID NO: 474114 - DNA, 82 bp, Homo sapiens
ttggactgagtcctgcaggacacagatgcatttttgtagaagcattttgaggatgaatgtttgcaaatcattttgaaattgc

SEQ ID NO: 474115 - DNA, 100 bp, Homo sapiens
ccattcacaaggcagctcgctctgggagcctagaatgcatcagtgcccttgtggcgaatggggctcacgtcgacttctaaccgaaaatcttcagttggcg

SEQ ID NO: 474116 - DNA, 51 bp, Homo sapiens
agcgaagtggagagcgccagagtaatggaaatgagccgtcagactgctaca

SEQ ID NO: 474117 - DNA, 75 bp, Homo sapiens
tgaaggggtctagatgtaaatgtcagtggaaaggagagctaccatcactaagattccctataaggagcccctgct

SEQ ID NO: 474118 - DNA, 120 bp, Homo sapiens
ctcaaccccatccactgccgcggccgtgggcccgaccgcggggacccgggaaggtgtggctcattgactttaatccatttggtgaagtcacagattcactgctgttcacctgggaagaac

SEQ ID NO: 474119 - DNA, 121 bp, Homo sapiens
aacagcgaggctttcagttctttggaattccattcttttccttattcttctgatgtggatccagggtgaagctgacactagaaggcctggaggaagatgacgatgatagggtatctcccac

SEQ ID NO: 474120 - DNA, 100 bp, Homo sapiens
catcactatacaacaaaacaggtcatcactaagaaatcaggtgtagttctgctgaatcctattcctaaggtaccttgtggtctataatcctttagaacaa

SEQ ID NO: 474121 - DNA, 100 bp, Homo sapiens
ggattatagtctctcgccacagcggcctcggcctccccttggattcagacgccgattcgcccagggttacacatcattttggaatgactgtatatcatct

SEQ ID NO: 474122 - DNA, 100 bp, Homo sapiens
aagcagaagagccaagaaggaagcgccgagtagtcaccaaggcctataaggttctaagctggtctatgtccatcaccttcttggagaaggagcctttgcc

SEQ ID NO: 474123 - DNA, 75 bp, Homo sapiens
aagctactaaccagagccggctctttctcggatgcccaggtggacctgtttcgtgacatcactttctacgtctac

SEQ ID NO: 474124 - DNA, 51 bp, Homo sapiens
attgccacttgatgccgccaaacgacagtcattttgtttactcattcagcc

SEQ ID NO: 474125 - DNA, 100 bp, Homo sapiens
agtggcccatcatgaaggattaattcgactgatagaaccaggtggaagtttagctgatgctataagtgaaaactacagaatcatgagttactttaaagaa

SEQ ID NO: 474126 - DNA, 97 bp, Homo sapiens
cagcacccgtgacaccgtgctcagccgggagcgcggcctctccttccaccactgttaggcaattttcttcagtggtatggcattttctcaaataaaa

SEQ ID NO: 474127 - DNA, 75 bp, Homo sapiens
ggccatggcgtacgcctatctcttcaagtacatcataatcggcgacacagtaagactttgaccccgacgcaggct

SEQ ID NO: 474128 - DNA, 100 bp, Homo sapiens
ggcccagaatccaccgtcaggcataaattgattattcctcgcccacatctgtgccagatgaggagactgtccttcctgtttcgcagatgaggaaactgag

SEQ ID NO: 474129 - DNA, 100 bp, Homo sapiens
agtacgtgttcagcagccctgcaggagtggacggcaatgctgcgtcatcaccatctcgggacgcatgaccttcacgagcaataagtccatggagatcgag

SEQ ID NO: 474130 - DNA, 83 bp, Homo sapiens
aaagcattttttacgtaaaatcatcatggtgcaccctaaggacagagcgggatgccaccagcttgtccaaagggaagttccag

SEQ ID NO: 474131 - DNA, 75 bp, Homo sapiens
gccagacacaggcagagcaagctgcacagcaagctatagtcagcagactggacctcaacaacctcagcagttcca

SEQ ID NO: 474132 - DNA, 88 bp, Homo sapiens
tacgcgcggggcgggtgctgcttgctgcaggctctggggagtcgccatgggtctcggattgcgagctggctgccgagtttttcggttg

SEQ ID NO: 474133 - DNA, 102 bp, Homo sapiens
gttgaagttcaagagctcagaccctaaaagtgtcctgccatacttcgtagctacaaaactggctaaaatccggaagccaactttggataagccctctccgga

SEQ ID NO: 474134 - DNA, 75 bp, Homo sapiens
acagcatcaactacctgcactttggagaaccaaagtcctgcaataccaagtttccaggcccgaagagcatcccag

SEQ ID NO: 474135 - DNA, 100 bp, Homo sapiens
gggtcgacatgttaaaacgggtcagttggcagccatcaaagttatggatgtcactgagattttgtggaagtataatactttgtcattatgagatgtcgtc

SEQ ID NO: 474136 - DNA, 151 bp, Homo sapiens
cctgctacctgatcaacgagggcatctgcaaccgcaacatcgaccagaccatgctctccatcctgctcttcttccacagattcagaagaagatgttgttgaaactcctgcagtgtctcatgatgaacatacacaccaagagataaagggcc

SEQ ID NO: 474137 - DNA, 50 bp, Homo sapiens
acgccccccctccttcacgccacacacacctgtcgcctggttgggcccgg

SEQ ID NO: 474138 - DNA, 87 bp, Homo sapiens
agacaccagcagcatgcccagccagggcagggtggagagctgcagctgcagttggctgagaaagcagatatattctgtggatcaaac

SEQ ID NO: 474139 - DNA, 83 bp, Homo sapiens
tgtgtttgggagcctcatcattggttatgccaggtgaaatgacaatggatgctctgttggctcgattgaaacttctgaatcca

SEQ ID NO: 474140 - DNA, 100 bp, Homo sapiens
ggtggtagcggcgtctggctgctgcggaccccgccgagtcctagcgcctggcctgcgcgccgctgcccgcgccacaggtcatctttgctttgaaccagac

SEQ ID NO: 474141 - DNA, 98 bp, Homo sapiens
caagttactcagatggaaaactgaaagcccctcctaaaccatgtgctggcaatcaagggacccagatcacgggatgaattgtaaaagcaacatcagct

SEQ ID NO: 474142 - DNA, 82 bp, Homo sapiens
ccaggggcctcagtactgtataccacaggtttgttgataagccggggcccttcgtgggaccctgcggtcactggatcaggcc

SEQ ID NO: 474143 - DNA, 100 bp, Homo sapiens
atgtgaactgctggcaggctgccttccctgacccccagttacgcctggaatatgaaggcttccccgtcccggtgagcgagtgctgtgctttcatgggcct

SEQ ID NO: 474144 - DNA, 101 bp, Homo sapiens
agccggtgatatgatctgtcctgaatgtggcttggttgtaggaggcaagtgaggcctatctggttggcctttttgaagacaccaacctgtgtgctatccat

SEQ ID NO: 474145 - DNA, 82 bp, Homo sapiens
gaggccgccggttttctccccgcttgccggggtggtcctcttccctttgtcggggctttgaccacgacctttgaagagcttc

SEQ ID NO: 474146 - DNA, 75 bp, Homo sapiens
agcagaagcagccgctgagctgtggtggcctagatgcccgatacaacggttcaactacacgaatggaccatgaaa

SEQ ID NO: 474147 - DNA, 83 bp, Homo sapiens
ggagctgaagactccagtatgcaactgactacaaggagatgcatcactgtaagcgataccgctcccctgaaccagacccgtac

SEQ ID NO: 474148 - DNA, 75 bp, Homo sapiens
gccacattgtcatatgctagtgatctctataatggttccagtatagtctctagtagacccaaatgatttgtacat

SEQ ID NO: 474149 - DNA, 123 bp, Homo sapiens
ctccgagttctcggtactcttcagggatgagtcatgtggcagtggaaaatgcgctcgggctggaccagcagacctgcctagagctggaacgttacctccagagcgagccctgctatgtttcag

SEQ ID NO: 474150 - DNA, 75 bp, Homo sapiens
caaatgctgctaaacctacatctaccagtgagcttcaggttccaatttattgtgcctaaagaatggaacagcaaa

SEQ ID NO: 474151 - DNA, 74 bp, Homo sapiens
ggctgcggggcccacctctctaagcctatggaaaagcttctgggttggatggcaagcatgtggtgtttggcaaa

SEQ ID NO: 474152 - DNA, 75 bp, Homo sapiens
gccaggcaccaagggctttccaggatccccagggctacttctacaagtccgaacagccagtccagcaaaatgaac

SEQ ID NO: 474153 - DNA, 75 bp, Homo sapiens
agccaatgacagtagctggaatgacataaaaaactctggatatatatcacggtcattcagtggtgcacccaccac

SEQ ID NO: 474154 - DNA, 100 bp, Homo sapiens
tctcctcactctcgctcgccgtttccaggagcacagtttgaaggaggagtttcctgcctggtatgagaagcttgttctggaaatggttcaccataacaca

SEQ ID NO: 474155 - DNA, 76 bp, Homo sapiens
ttcccactgatgacaattgaggaatttgcagcagggactgctgagatgtcctctattcttgaagagcgtattcttg

SEQ ID NO: 474156 - DNA, 147 bp, Homo sapiens
cttctccacccgaggcttccacctccaacgagccatgttccaggctgcaggagccgcccaggccaccccctctcatctgatcttgcatctttaatggataaaacatttgagagaaagttgcctgttagttctttaacaatatcacgg

SEQ ID NO: 474157 - DNA, 116 bp, Homo sapiens
gcacgcagtccgacttggccttcttcaggttcccgcgggaccctgccaggtggccattaagcagatgaatcttcagcagcagcccaagaaagagctgattattaatgagatcctgg

SEQ ID NO: 474158 - DNA, 100 bp, Homo sapiens
ttcacattcaatgaattttttttcatctttcagcaaaaatagtgatctttgatatgccttggttaatgaatggtcaagttgaagaagcaagattaaaaga

SEQ ID NO: 474159 - DNA, 83 bp, Homo sapiens
caaggacaccaggagcccccaaggagttggaagaggccactgcagaacaaattagacttgcacagatgatttcggaccataat

SEQ ID NO: 474160 - DNA, 101 bp, Homo sapiens
aattatccgaaaccgcctcactgggccaggagtggtggctcacacctgtaatcccagctctgggaggccaaggccagtggattgcttgagcccaggagttt

SEQ ID NO: 474161 - DNA, 83 bp, Homo sapiens
ctgggcttgtccttgctggtgcatgcgtcgtcggcctctgggcagcagtccaatcagtgaaagtcgaagagtactacaggaat

SEQ ID NO: 474162 - DNA, 50 bp, Homo sapiens
tcgaggacgctggagcccagcaagttggagtcattcgttgcccagtttgc

SEQ ID NO: 474163 - DNA, 75 bp, Homo sapiens
cggcaccaactattcgcggagctggaatgactggcaacccagaactgataaatttcaaacggaagagagtggcag

SEQ ID NO: 474164 - DNA, 90 bp, Homo sapiens
tctattctctcggcctgtcagcaaaactgactggagctctcccgtgtcagctcgtagcacagaaggtgaagagcctgctgtggggccagg

SEQ ID NO: 474165 - DNA, 100 bp, Homo sapiens
tgcagctgacccggcgaagggagccgaccgggccctgggctggaggtaaaaccccacgctccgacagttagttaatatgtgcatcaacccagatccagag

SEQ ID NO: 474166 - DNA, 83 bp, Homo sapiens
gaagtatgatcgctcctccctgcggaccctggggtcaggattttttatcaagcagaaatgcatcgaacaacgagaatcaagat

SEQ ID NO: 474167 - DNA, 83 bp, Homo sapiens
cctggagcctcagttggaagcagccgatccagcctgcggagcctgtggggcagggagcgagtcaaggccatgttctaccacgc

SEQ ID NO: 474168 - DNA, 83 bp, Homo sapiens
caagactctcttcgctctttgcatcttaactgcaggtatattgaagcaagtcaaagattacattaaacagtgtagcaaatgcc

SEQ ID NO: 474169 - DNA, 82 bp, Homo sapiens
atatcacccataatcggaatgtgatcacagagcctatttacccagaagtagtccatatggatgacgtcatgatgccccagcg

SEQ ID NO: 474170 - DNA, 82 bp, Homo sapiens
cagacgacaagcacacactatggcgctgaaacggattaataaggtgtcgtgaaaactacccctaaaagccaaaatgggaaag

SEQ ID NO: 474171 - DNA, 90 bp, Homo sapiens
gtggtgcgtgatgtggctaagatgctgccgactctgggcggcgaggaaggcgtctcccggggtttccaaggcaagaccggccctccaggc

SEQ ID NO: 474172 - DNA, 100 bp, Homo sapiens
caaaaagtgatattggatggatatgggagctgtggccctcagaatttaaacttaaggaaagagtgggaaagtgaggggcacgaccataataacatccctg

SEQ ID NO: 474173 - DNA, 100 bp, Homo sapiens
tgtgcggggccgtggcggccgcggcgatgactcggacccagtgctcaggagctgtcccaggaaatcaaggcttttctgactggcgtagaccccattctgg

SEQ ID NO: 474174 - DNA, 100 bp, Homo sapiens
ttcgggctggttgttccgttgcgagctgcagctgcgatctctgtggtaggcccagtgtgggccaaactgaaattgcagaaggcttcagaacgatggcagc

SEQ ID NO: 474175 - DNA, 100 bp, Homo sapiens
ctgcgcctatccgccgggagcctttgtgtccgtgtcccgagaccgcaccacccgcctctgggccccagacaggaaaaggggaagatagtgatgtactcag

SEQ ID NO: 474176 - DNA, 100 bp, Homo sapiens
ccgcggccatggcgtacgcctatctcttcaagtacatcataatcggcgacacagggaccttggtagctaatgtccgaagaaagtgactctctgagaacca

SEQ ID NO: 474177 - DNA, 75 bp, Homo sapiens
cgcgggtctccgtggaagtccgtttcgtgagcagcgccaagagacgtctcagagaggctgtgcagctgctggagg

SEQ ID NO: 474178 - DNA, 75 bp, Homo sapiens
atttagaggcccgagttcgggaagagattctgtacgagctgttccttcaggaactgtggctgcaccatctgtctt

SEQ ID NO: 474179 - DNA, 50 bp, Homo sapiens
ggtttggttccacatcactgcaataaagagaactgcgacacatcaccaag

SEQ ID NO: 474180 - DNA, 87 bp, Homo sapiens
gacaagtccccagggaatgccacagcatcctccagcacctcagcatattgagtatcagtgctgatattgaaacaattggagaaattc

SEQ ID NO: 474181 - DNA, 83 bp, Homo sapiens
tatgtggaaatagcgcggctgtgcaagtacctgccagagaacgacctgaaggctcagcttgtcaatcggaaacagaaattaga

SEQ ID NO: 474182 - DNA, 74 bp, Homo sapiens
cattctctatctgcgcaccttggagtccaagcttgtgctctttggagggccctcctggacccgggagcggaccc

SEQ ID NO: 474183 - DNA, 88 bp, Homo sapiens
cgccccgagaaccaatcagcagccgcgttaggtgccaagtcctgccctgccaacttcttggcagctgccgacgacaaactcagtgggt

SEQ ID NO: 474184 - DNA, 76 bp, Homo sapiens
aatatgagtgatgacaaaccctttctatgtactgcgcctggatgtggccagtcactcagcctctgaagaagcttcg

SEQ ID NO: 474185 - DNA, 95 bp, Homo sapiens
ggccgctcggccggcagcatccttggggagagcagcaccgaggccagcaagacgctgcccgccatcgaggtctctgctgctgatgaagctgtgac

SEQ ID NO: 474186 - DNA, 71 bp, Homo sapiens
gaacagtaaaatggttcaatgtaaggaacggatatggtttcatcaacaggactatgacatcacccagctcc

SEQ ID NO: 474187 - DNA, 96 bp, Homo sapiens
aattgagccacagagtaattatattccagggagaccaaattttgaggaaggtggaccaacatcagtagggagaaagcatgaatttatacgctcaga

SEQ ID NO: 474188 - DNA, 96 bp, Homo sapiens
gaggacagctggccgccgatattcaccaagcgcttcgctacaagtgtctttggtgcaacactaacaaggcttgtctggactacccagttacaagcg

SEQ ID NO: 474189 - DNA, 100 bp, Homo sapiens
aacaaggctgactataagaggggaagtgtggcccagagttgctcagaattggagcagagcctgagacgtatctgcagatcctgtcatcagctggcaagtc

SEQ ID NO: 474190 - DNA, 100 bp, Homo sapiens
cgcggcaggaccaagcaacaatgacgaagatgatcctgcagaagctgaaaaggagggaaatgaaatggagggtgaggagttagatccattagatgcttac

SEQ ID NO: 474191 - DNA, 50 bp, Homo sapiens
cagcctcccaaggagtctgcaagttgataagctgtcattggaaggaatag

SEQ ID NO: 474192 - DNA, 100 bp, Homo sapiens
aagctgtgagaacaactacacgttacgctattcgttgtggtccaaaacagtttacctcttatctaacagacttaattcagtgcacaaatgagatgaatgt

SEQ ID NO: 474193 - DNA, 87 bp, Homo sapiens
ggaaggacaccaagatgcggatccgggcctttccgcggagcgtgctttggacaccatgaattttgatgttataaagggcaagccagt

SEQ ID NO: 474194 - DNA, 83 bp, Homo sapiens
cgagtgacccgggtgccgaggagcgggaagagttgctggggtgaaatgacaatggatgctctgttggctcgattgaaacttct

SEQ ID NO: 474195 - DNA, 100 bp, Homo sapiens
caaatactgctggaatggacatctttgccaaattctctgcatatatcaagaattcaaggccagaggctaatgaaggactccttctcctcccccacgtcgg

SEQ ID NO: 474196 - DNA, 100 bp, Homo sapiens
agcatttcggctcagctggaggaggccagctctacaggcggtcctcaaagagtcgctgaggctgtacccaccagcatggggcacctttcgcctgctggaa

SEQ ID NO: 474197 - DNA, 75 bp, Homo sapiens
cttcagatacaggccagccaattgtgttttcacagcctgaaagtgatgagagctctctttacgagaaaaggaaga

SEQ ID NO: 474198 - DNA, 86 bp, Homo sapiens
cttgaatgtctgccgaaatgttcaagtttaccaaaagagaggcaccgctggaacactaatgagtgtgtcccggcatggatatccgg

SEQ ID NO: 474199 - DNA, 90 bp, Homo sapiens
gtccctggagcggccgccttccagcccactgaggcggctcccagctgcgttggcgacatggccgacacccccagagatgccgggctcaag

SEQ ID NO: 474200 - DNA, 100 bp, Homo sapiens
gtactgagcctgttggaggaactggcccggaaacaggaggacattttgcaagaacgaggctcaaggatgtgagggacacagtattgacagctgaagaaat

SEQ ID NO: 474201 - DNA, 74 bp, Homo sapiens
agaatacattgctgattatctcatgcagcgatttgaaattattaatgcaatttatgaacctacggaagaagaat

SEQ ID NO: 474202 - DNA, 115 bp, Homo sapiens
caacgaccgtctggggaagaaggtccgcgttaaatgcctcctttcatgtactctgcccaacggttttgggggacaatctgggccagaaggggagcgcagcttggcaccccctgat

SEQ ID NO: 474203 - DNA, 142 bp, Homo sapiens
ggaaattgttggattgccagaagaagaagaaatcccagcaaataggaaaattaagtttagtagtgctcctattaaggcatttcccggaaacattaactctgacggtgtggtccggcacgaattacagcatccgattattgcc

SEQ ID NO: 474204 - DNA, 100 bp, Homo sapiens
agatgtgatgttggagaactatagcaatctggttttcttgggaggagacatcacagctttcccagatcgggaggaaaaatatggaatgtgttttaccgct

SEQ ID NO: 474205 - DNA, 100 bp, Homo sapiens
tttcctcatcatcaaggatcaggaccgcaagtcccgtcttatgggacttgaggccctcaagtcttcccaagggattgttgaagaaacttctgaagaggga

SEQ ID NO: 474206 - DNA, 100 bp, Homo sapiens
cttctgggccaccatttgccagggcctcgctcgaggcgacgttgtggacgtttaccagcgggagttcctggcgctgcgcgatcggttgcacgcagctgag

SEQ ID NO: 474207 - DNA, 83 bp, Homo sapiens
cgaagatgcagctagtaaaacagaggcttgaaactgtcacaaacgtcaagtctgagttggagatggcccaggaagacctgtcc

SEQ ID NO: 474208 - DNA, 87 bp, Homo sapiens
gagtttgcgactcgcggaccggcgtccccggcgcgaagaggctggactcggattcgttgcctgagagatggggacttgctatgttgc

SEQ ID NO: 474209 - DNA, 75 bp, Homo sapiens
tctttatatcctgacactatgaatgctacttggatgcctcttaaggctggaggcaaagctggaaaggacagtggg

SEQ ID NO: 474210 - DNA, 75 bp, Homo sapiens
tcgcagtggtcgcttcttctccttgtgggccgggcacggtggcttacgcctgtaataccagcactttgggaggcc

SEQ ID NO: 474211 - DNA, 73 bp, Homo sapiens
agcggagagcgagagaggggagcagacaatgcagatcttcgtgaagactctgactggtaagaccatcaccctc

SEQ ID NO: 474212 - DNA, 75 bp, Homo sapiens
acaagaatatgctgccaaaattatcaacaccaaaaagctttctgctagggcagttactcgggagttacccagcta

SEQ ID NO: 474213 - DNA, 100 bp, Homo sapiens
tttgctgcgggcgccggcgctggcggccgtgccgggagggagaggctagtggtaacaggccgagctggatggatgggtatggggagaggggcaggacgtt

SEQ ID NO: 474214 - DNA, 83 bp, Homo sapiens
caggggcgagggctacccgctctttgccgtgacaacaccgttcccccagccgggctggaaattgcagaggccgtcaacatgga

SEQ ID NO: 474215 - DNA, 83 bp, Homo sapiens
tgttcctcgcgggccgccgggtgctggtcaccggggcaggcaaaggtcttgccccagaagctgcgggcacatccacgcctgaa

SEQ ID NO: 474216 - DNA, 50 bp, Homo sapiens
ccggagctcgtccagctgcgtgcctaggctcttgtcaggatggtgaagct

SEQ ID NO: 474217 - DNA, 83 bp, Homo sapiens
gtcaagcgagaaagaacatcctctttaacccagttcccaccctcacagtcagggactttgaacatgtcggggatcgccctcag

SEQ ID NO: 474218 - DNA, 100 bp, Homo sapiens
tcttggcttctcccagcatagccccagcatgttggcagataaattgaacatgactccagaagaagctgaaaggtggattgtaaatttgattagaaatgca

SEQ ID NO: 474219 - DNA, 89 bp, Homo sapiens
gagaaagtcgtcttccacttgcacgaaagctttcctaggccaaaaagagcctagtgtgttaattgtaacctacaaggagcctgcaaaat

SEQ ID NO: 474220 - DNA, 100 bp, Homo sapiens
gtggaggtgacacaggaccataagccagaacttcccaaggaaagagaacgaatcgaaggacttggtgggaggccttttcagatattaatggcaaagttca

SEQ ID NO: 474221 - DNA, 71 bp, Homo sapiens
gtgcgggttgcaaggagcgtgcgtgcgtctggggaacttatgacattttagtaacaaaagataatcaaacc

SEQ ID NO: 474222 - DNA, 98 bp, Homo sapiens
aagaccgcccttactggaggcggcggctgcacactacccacccagaagaagtccgtccatgtcaaagatgagctggacaaatttgccagcataagaat

SEQ ID NO: 474223 - DNA, 74 bp, Homo sapiens
aagttccgcagcctggcatggcttctggggacctttacgaggctgctctttggcgtaaattgcaatcgattagg

SEQ ID NO: 474224 - DNA, 98 bp, Homo sapiens
gcctcggccgcgccggaggagggcggggagaggaccatgtgagtgggctccggagcctcagcgccgcgcagatcacaatgaggacctagggcatctgt

SEQ ID NO: 474225 - DNA, 82 bp, Homo sapiens
cgtccttctccactttcgccagcccgtgccgcgagcgcggcctgcaggaggaatgaattcagatatttccagagaatgacca

SEQ ID NO: 474226 - DNA, 100 bp, Homo sapiens
actcaggccctcccgtcggtcattaagggccatgctatgatagtggaagcttatccaaaataatagatccagaagaagtgacctgaagtttctgtgcaac

SEQ ID NO: 474227 - DNA, 74 bp, Homo sapiens
gataaacatcacgatgctgctcatgaaatcatcgagaccatccgaaaaggagaacaacttcccgccactgccca

SEQ ID NO: 474228 - DNA, 83 bp, Homo sapiens
cgcccttgatcttcgctgtggcatggcggacgaggggaagtcgtacagcggcctcggcggagccatcggctacgtgctgggtg

SEQ ID NO: 474229 - DNA, 96 bp, Homo sapiens
cccgagcgagcaaattcctactgtccggctgcgcggctaccgtggccgagctaggttttgaacctttcaaatggtatggaggagatagtgaaccct

SEQ ID NO: 474230 - DNA, 80 bp, Homo sapiens
ggacagtggagtctggcatcttattgattttggaattacagatgcaaagtataatggaaaagaaaatgaaaaccaagaga

SEQ ID NO: 474231 - DNA, 100 bp, Homo sapiens
ggcgcgcggctggagccggcgccgggcacggcatcgggggcctggactgcacggcccggcagcaggtcaagggattggttccaaaataatcaaaaaggtg

SEQ ID NO: 474232 - DNA, 75 bp, Homo sapiens
aacctgggggctccctggacaactccgagcaggagaactacgatgacccgcacaaaacccctgcctccccagttg

SEQ ID NO: 474233 - DNA, 101 bp, Homo sapiens
cacgcacccgctggacctgctcaagtacatcgacgccatcagcaacaagcagggcgagctggagaattacgtgtccgacggctacaagaccgcactgacag

SEQ ID NO: 474234 - DNA, 75 bp, Homo sapiens
cgcctacggaccccccagcaacttcctcgagatcgatatggcccactgcgtgaccttggttcagctgtccatttc

SEQ ID NO: 474235 - DNA, 100 bp, Homo sapiens
aaagattcccaggatgtgagcaacacgggaccggcatttattaatacagcaaaagaaatttatgaaaaaattcaagaaggagtctttgacattaataatg

SEQ ID NO: 474236 - DNA, 83 bp, Homo sapiens
ggggtctccggtgtggagttctggaaactgtgaggtgatttgcaggtgctggagaatctggtaaaagcaccattgtgaagcag

SEQ ID NO: 474237 - DNA, 100 bp, Homo sapiens
cccatccccgcgccggcccacgggactttgaacatgtcggggatcgccctcagcagactcgcccaggagaggaaagcatggaggaaagaccacccatttg

SEQ ID NO: 474238 - DNA, 83 bp, Homo sapiens
caaggctgtgcaacgcggagcgtgagaggaagctccttccgcttccagccgttcgagtcctatgactccaggccctgcctgcc

SEQ ID NO: 474239 - DNA, 100 bp, Homo sapiens
ggctgcaggcttcagcctgcgctggttggtgaaacagagatgtcaggaaggcccgaacaagacaggaacgtcctgtgccctggactgtggagctggcatt

SEQ ID NO: 474240 - DNA, 101 bp, Homo sapiens
gccatctcctgggccgcctggcggccatcgtggctaaacagtcttggtgatgccttggacagcagcaactccatgcaaaccatccaaaagaccaccacccg

SEQ ID NO: 474241 - DNA, 97 bp, Homo sapiens
gcgcgccgagacccctcagggcggccggtgtcatggagaaactccagctgggcccagagattctgcagcgggaaaatccaaggcttatttatgccag

SEQ ID NO: 474242 - DNA, 100 bp, Homo sapiens
cacctgggggtttttctacgttacatcttctctcaggcggaccccagtccactggtacagcaacatctttcatgtcttcatccgcatctcgagagaagag

SEQ ID NO: 474243 - DNA, 100 bp, Homo sapiens
cattcagtttgcagtgaaacacctagtcattttgttcagggttacacatcattttggaatgactgtatatcatctggattacgtggctgtatgttaattg

SEQ ID NO: 474244 - DNA, 75 bp, Homo sapiens
gtaatagaggacttgaagcagaaagcaagtgaatacgagtcagaaggtggaaccgtcccaaaatgtcccttgctc

SEQ ID NO: 474245 - DNA, 82 bp, Homo sapiens
gcttttgatatctggggccaagggacaatggtcaccgtctcttcaggtattttcaaatcaaagaagtttgaacacttaaaaa

SEQ ID NO: 474246 - DNA, 96 bp, Homo sapiens
ggtgatgcagggatgcctggaatagaagagaatgacctagcaaaagttgatgatcttccccctgctcagcacattgccagtatcgatgggaggcgc

SEQ ID NO: 474247 - DNA, 50 bp, Homo sapiens
gcttccgggagggcggctcgcagggcagctttggaagaagtagaaggtga

SEQ ID NO: 474248 - DNA, 100 bp, Homo sapiens
taagcatcgtggcgctggtggggggagtcctcatcatcatcgcctcctgcgtcatcaacttaggcgcctcccttctgtctgccccaccatgccgggacat

SEQ ID NO: 474249 - DNA, 75 bp, Homo sapiens
gaaggctgctattgaaagagagtatgcacaggcacgcagatcctgtgcacagcccaggcagcgctgggcaaaggc

SEQ ID NO: 474250 - DNA, 98 bp, Homo sapiens
ctgggatgatggatgtccattatagtgaatgcttagagcatgaaagttttctgccgtctttggaatcttgtttgcaaacagctcaaaggagatgcggc

SEQ ID NO: 474251 - DNA, 99 bp, Homo sapiens
atcagaactgaaggagcttgataaatttgataacctagatgctgaagctgatgaaggttgggcagggaggtatggaaacattggaacttcaaaaggaca

SEQ ID NO: 474252 - DNA, 82 bp, Homo sapiens
ccttggcagcaatggctgtatttgaagataagtttaggccagacatggaggtgctgactgggttacttttttaaacactagg

SEQ ID NO: 474253 - DNA, 90 bp, Homo sapiens
aaatttttggatgatgatggatccatttctcctattgaggagtcaactacgctggggaggaggaggaggaagggagcggcagcagtgaag

SEQ ID NO: 474254 - DNA, 95 bp, Homo sapiens
aggagaagaagctggctcccatcacctacccgcagggcctggcactggccaaggagattgcgggctgacgcacgaggcacacaggaaggaggtgg

SEQ ID NO: 474255 - DNA, 83 bp, Homo sapiens
gttcccgcagagtggataaagaactgggagaaatcagggagaggcgaattagtccctgtgaagcaggaagagtgagggcaggt

SEQ ID NO: 474256 - DNA, 96 bp, Homo sapiens
agcttctgtatgggaaccatgtagtggtgcaccaattccagctggacatcactgtgaaaatgggacgggataaagtccgagaaatgtttatgaaga

SEQ ID NO: 474257 - DNA, 97 bp, Homo sapiens
gcatcgccacagctgaaggctgcgagggactaagagcagagtaaagctttccagtttgaatttagatgatcacgcaaagaagaaattaattaaactt

SEQ ID NO: 474258 - DNA, 75 bp, Homo sapiens
ccgccgcccgccgccgctggagctagaggtgcagagcattgtagaccaaggagccatggataggagaagtatggg

SEQ ID NO: 474259 - DNA, 98 bp, Homo sapiens
ttttggacctgaaacagaaattctggaacacctatatggatgggaaggccattgtgactatgtggtgattacagttgtcttactactgagtttcctac

SEQ ID NO: 474260 - DNA, 75 bp, Homo sapiens
gatggctgtgtgcccggtgcaaaagaaatgcgtggacagcacctagtgtgttaattgtaacctacaaggagcctg

SEQ ID NO: 474261 - DNA, 100 bp, Homo sapiens
cagcgggtccggtgcaggtgaggggcgcgcgcctgcccagctttgcagcccccgaacgcggcctcgcacagttgctctatatgcaatcagtgctgtctac

SEQ ID NO: 474262 - DNA, 75 bp, Homo sapiens
cgagagcgcccacaaaacccaacgagccctggacgactgcaagatgcacgtcagctaactgttcagatgatgcaa

SEQ ID NO: 474263 - DNA, 74 bp, Homo sapiens
aagagagcagttgaagaagtgaagaaattattggtacctgcacttctcggacaaactatttagtggaaaaggct

SEQ ID NO: 474264 - DNA, 103 bp, Homo sapiens
ctcagggcaggctcagccccataactctggcaaaagctctcacaagcaaaagccttggagaggaggagaatgtatcaagctgcaagctttcttcctggtggca

SEQ ID NO: 474265 - DNA, 80 bp, Homo sapiens
ccgaggcaggcggatcacttgagattgttgatccatttcagatacttgtggcagcaaacaaagcagttcacctctacaaa

SEQ ID NO: 474266 - DNA, 51 bp, Homo sapiens
cgcgagcaaggccgccagatgtgcagatccacctccgacccttaagccaga

SEQ ID NO: 474267 - DNA, 74 bp, Homo sapiens
actagtgtaggaaaacggctcaacccaccgctgccgaaatgaagtataagtgattcgcctttgccagtctcatc

SEQ ID NO: 474268 - DNA, 100 bp, Homo sapiens
cttcactgggcctgtgatcgaggacataaggaactagtcacagtgttgctgcaacatagagctgacattaactgtcagcaacttgagttggtggaaccaa

SEQ ID NO: 474269 - DNA, 88 bp, Homo sapiens
ttcttctgggggatcttcacatcatgctaaggaacagcttccaaagtaccaggttaatgtgtgaaactgtgagatatgagagacacga

SEQ ID NO: 474270 - DNA, 78 bp, Homo sapiens
ggtattgggagatccacagctaagacgccaggacccactggaagcctagaaatggctacattggcgtggtgaaccgca

SEQ ID NO: 474271 - DNA, 74 bp, Homo sapiens
gatgatgcagggcaggttccacatgtatgaagggtacccactctggaagaccaatctccagttcaacaacaaca

SEQ ID NO: 474272 - DNA, 82 bp, Homo sapiens
aagagtcaacagcagtggcaacagattatggtgacaagctgaacatggagctgagtgagaaatacaagctggacaaagagag

SEQ ID NO: 474273 - DNA, 100 bp, Homo sapiens
gggagggagccgcgcgcctttgtgcgcgcgccgagaatcttatcttggctttggatcttagaagagaatcactaaccagagacgagactcagtgagtgag

SEQ ID NO: 474274 - DNA, 100 bp, Homo sapiens
gcgggaattccgccgcaacctccccatgcacctccgaagggcctacatgagtcctgggttactaggtgtctttcagaagctgattgcatccaaagcaaat

SEQ ID NO: 474275 - DNA, 85 bp, Homo sapiens
caaagtgccatgtctttaatgagctcttgtccctggcaaagcgaaagcgcagtgactctgaggagaaggagccgcctgtgagtca

SEQ ID NO: 474276 - DNA, 75 bp, Homo sapiens
gcgagctgtaatgcgtaatcctgaagaggatggaaaaggttccttcttcagtgcagtcaccggcacagcagcagg

SEQ ID NO: 474277 - DNA, 100 bp, Homo sapiens
gcccagcccggccccgcccgcgccggaagagccacgccgagatggagtttcaccgtgttgcccaggctggtgtcgaactcctgagctcaggcgatccgcc

SEQ ID NO: 474278 - DNA, 100 bp, Homo sapiens
cctatggtttctgcattttgttaagaagcacctcatgcaagcgagggacctgggactgctcacagccagctttgcagttcctgaccccttaatgcctgac

SEQ ID NO: 474279 - DNA, 74 bp, Homo sapiens
cgagcgggtgcgtctgccgcagagtcggcacctgaaggacatggagattagccgatgaattacatatgccatct

SEQ ID NO: 474280 - DNA, 100 bp, Homo sapiens
tgaagcaatcttcctgccttggcctcccagagggttggaattgcagatgtgagatgcacaccggctgcaccatgtcagcagcctggcctggctggacgag

SEQ ID NO: 474281 - DNA, 75 bp, Homo sapiens
acaatttacgcgccgtgtaactgtgaatctttcaaagatccctttgttgatctagcaagtggccaagttcctttg

SEQ ID NO: 474282 - DNA, 82 bp, Homo sapiens
atcgagaggaccttccacgtggattctccagacgagaggtcacgacccccaggagacctggaggactgaatgctgctgcccc

SEQ ID NO: 474283 - DNA, 99 bp, Homo sapiens
cgaaggacttcggcgcgggactcaagtacaactcccggcacgagaactctactacgatcgcgggaaccaccatgagtttgtgtccctggtgaaggacct

SEQ ID NO: 474284 - DNA, 74 bp, Homo sapiens
agcgggtgcgtctgccgcagagtcggcacctgaaggacatggaggatggagagcaatacatcatcatctttgga

SEQ ID NO: 474285 - DNA, 116 bp, Homo sapiens
gaaggagggctctcctgtctgccaccatcctgggttgacaattctacacaaggagatgatgctgtgtatctggacaatgagaaagaaagagaagagtatgtcctgaatgacatcgg

SEQ ID NO: 474286 - DNA, 75 bp, Homo sapiens
gagaactacatcaccgctctgcaggctgttcctcctcgggcaagacatctgtatagattctgcttcatccgtgag

SEQ ID NO: 474287 - DNA, 100 bp, Homo sapiens
accttgtagaacctctttgcagggattacctgcaagtcgtgtgaggtatagagtagatgatgtacagtttccttaccctgccagtatttttgaagtggaa

SEQ ID NO: 474288 - DNA, 100 bp, Homo sapiens
gatcgatgtttcaatattggaagcgctttgatttacagcagctgcaggtagagaatggagccgaatacatcttggagaccatcgactctctgcagaagca

SEQ ID NO: 474289 - DNA, 75 bp, Homo sapiens
aagagctcggtgctggagaacttcgtgggccggtgatgaccagtggctgggagacggtggacatgacgcttcggc

SEQ ID NO: 474290 - DNA, 100 bp, Homo sapiens
atcatatcttgtctaattgtgagctggttaagaagtttttagatccaaacaactattccgcaaactatactgatgttcagagaattccaacttcttacaa

SEQ ID NO: 474291 - DNA, 48 bp, Homo sapiens
aaaattctgaactcaggacttggcaaataccacttgaaagatgtcatt

SEQ ID NO: 474292 - DNA, 101 bp, Homo sapiens
agccccggcactgcctggctgcgagcacatgatggcgatacgggagctcaaagtgtgccttctcgggactcagcccacctgcacccaggtgaaataaacag

SEQ ID NO: 474293 - DNA, 100 bp, Homo sapiens
gtgacagatcttaccaaagtccacacggaatgctgccatggagatctgcttgaatgtgctgatgacaggggattgtcaatgaggcagatcagattccgat

SEQ ID NO: 474294 - DNA, 87 bp, Homo sapiens
gtggccaccgcctccagcttgccaccaaagacctgcgactttgctcagctttggtgtcatccccagcactcctctggccatccatac

SEQ ID NO: 474295 - DNA, 142 bp, Homo sapiens
tgtgatattttctttgaagagagctccagtttatgcagatttgatggcaatacattaaaaactactcatgtgccctggtacctgacagtgtaaagaaggagctcctacaaagaataagaacattccttgctcagcatgccag

SEQ ID NO: 474296 - DNA, 109 bp, Homo sapiens
cggtaacaccgttcacagagctagccggacgtcctccgactcaagatatcaacatggcaggagagcccaaaccatacagaccaaaacctggaaacaagaggcccctttc

SEQ ID NO: 474297 - DNA, 100 bp, Homo sapiens
ctaagcatgagcagctacagtgtccctcgaaccccagatgacttcctgaacagtgtggatgagatggatacagctgcagtcgacttcggcaggttcagag

SEQ ID NO: 474298 - DNA, 99 bp, Homo sapiens
gcgggagaaccgggaaggcgcaaacctcctctccatgctcaaggccgacgtcaacctgtcccacagcgaaagttctgggaagtcatcagtgatgagcat

SEQ ID NO: 474299 - DNA, 100 bp, Homo sapiens
ttttctgtcactggacgccaaggagttttcggtggctcagctgggtaaccggggatcaccatggcggcctcattggatactagttccacacgtgctcccg

SEQ ID NO: 474300 - DNA, 100 bp, Homo sapiens
tggagcgaggagcgcttccgcgtggacaggaagaaacttgaggccatgttacaaggaattgagtgatctacagcgcgatccacctgctcactgttcagct

SEQ ID NO: 474301 - DNA, 75 bp, Homo sapiens
gcgtgcagctcagcttctccggggcatttttttctacacgactttggtttgagcaactgcgcagggatcctgggt

SEQ ID NO: 474302 - DNA, 98 bp, Homo sapiens
ctggcagagcaacagaaaatgcaggaacaacagatgcaggacacagcattgttggttttgccatgtactattttacctatgacccgtggattggcaag

SEQ ID NO: 474303 - DNA, 83 bp, Homo sapiens
ccaggacacccggaagccggaaatggtctcgtcatggggaggttatgtgttcctgatcaacttaattcctctccacgtcctcg

SEQ ID NO: 474304 - DNA, 143 bp, Homo sapiens
ggaacagctccggtctacagctcccagcgtgagcgacgcagaagacgggtgatttctgcatttccatctgagtttatttgtgcagatgctggaaccaaactagctgagtcaacaatcctgagcaagcagatgatagcctctgt

SEQ ID NO: 474305 - DNA, 50 bp, Homo sapiens
ggtagttccttcgcggtggagaggagtcttttagtcctgctatacagctg

SEQ ID NO: 474306 - DNA, 90 bp, Homo sapiens
ggaaagcacttaaaagtggaaagatgacggatgaaaagaatgaacactgtccttcaaaacgaaggatgtactgagtaaagatgctgggga

SEQ ID NO: 474307 - DNA, 100 bp, Homo sapiens
ccagcctcagtgtgcctctctggccgcccactggatgagcggctttacaggaagtatggtgctggcatctgcttggcttctagagagtcttacaatcgtg

SEQ ID NO: 474308 - DNA, 83 bp, Homo sapiens
agcggagcttcgcggggatcctgctggactgcacgaaaaactctacgaactcgacggggaccccaagaggaaggaattcctgg

SEQ ID NO: 474309 - DNA, 74 bp, Homo sapiens
aggaatgggtctgggaccttaacagggagccatggatttgattgccttatgtgacaagcccaagatctgtgaca

SEQ ID NO: 474310 - DNA, 83 bp, Homo sapiens
ggagatcatagcagagtacgatactcaggtcaaaggggatgaacgtagggcacttagcttcttccaccagaagggcctccagg

SEQ ID NO: 474311 - DNA, 90 bp, Homo sapiens
gtttggaaatgatacaattacctgcacgacacatggaaattggactaaattaccagaatgcagggatgactttgaagaagccaaggaaat

SEQ ID NO: 474312 - DNA, 83 bp, Homo sapiens
gccgcctctgtattacttaccagcgggctgacgcacgaggcacacaggaaggaggtggagcaggtgtatctgcgctgtgcggc

SEQ ID NO: 474313 - DNA, 98 bp, Homo sapiens
atggcaatggcacaaagttctctcgatcagggcatacatctttcttcgacaaaggagccatgttcgactacgacaagagcaaggacagtgggctgcca

SEQ ID NO: 474314 - DNA, 73 bp, Homo sapiens
acagccatcactcatgtccataaggaggtgtttggagaagagggattgaccctgaatcttgaagacgttcagc

SEQ ID NO: 474315 - DNA, 75 bp, Homo sapiens
ggcggctcagaagataaacgaggggctggaacacctcgccaaagcagagaaatacatcaagatggtgctcatgtg

SEQ ID NO: 474316 - DNA, 75 bp, Homo sapiens
tcttttaccgatgctttaacatacagccactagctctctgatccttctgacttaccaaggaatgccttcagaatt

SEQ ID NO: 474317 - DNA, 87 bp, Homo sapiens
aacaggcttcacatgtttcttgtacagttgagatgtgcagtgttacaactccttattactgacagccctgtcctaggagcacaacgt

SEQ ID NO: 474318 - DNA, 137 bp, Homo sapiens
aaaagcttcatctgggatctgatcacacccacagcggatggccagactcgagccttggtcaaccattccggagtgactattccctggctaaatattggcatggtcttttctacctcatgctggtctcgagaccaaaa

SEQ ID NO: 474319 - DNA, 75 bp, Homo sapiens
ccacgttccccatggctcccaggtcattaggaagctggtcatggagtatatcaggcgacagctagaagaggagca

SEQ ID NO: 474320 - DNA, 117 bp, Homo sapiens
gcccgactcggtgattgaggacaagaccatcgagctcatggtactaggttttgacaagcttgcatcatgcgtgagtataagctagtcgttcttggctcaggaggcgttggaaagtct

SEQ ID NO: 474321 - DNA, 75 bp, Homo sapiens
aaggcgagcagggtgcgggagagccccttgcagaagacgccgtacgagctcatggggcattcagaatgggaccac

SEQ ID NO: 474322 - DNA, 100 bp, Homo sapiens
ggagctgttaactagtactggttttgagtatcagcaggtggcctttcagccctccatacttactgtgagtgatggattggaactgagaccgaaatataat

SEQ ID NO: 474323 - DNA, 82 bp, Homo sapiens
cacgctcatgatcgacttcctcacccgcgcctgcgacctcggtggaacacctgcagcaggagactgctgctctgaaaaagca

SEQ ID NO: 474324 - DNA, 75 bp, Homo sapiens
tctctggagttgatcgttactatgtgtcaaaggaggagatgttaaagtaacccatcttgcaggacgacattgaag

SEQ ID NO: 474325 - DNA, 98 bp, Homo sapiens
aaagcgtgctccacaaatatttacagtcggaggagtactcggtgaaatcctgtcctgaagactgtaaggtgagccagccatgagagggtatcttgtgg

SEQ ID NO: 474326 - DNA, 100 bp, Homo sapiens
ctttcattagatatgttcatactggcatatctcagagacatcgtacaaaaggaagttacctctgtgacatcttggatgtaaacacttggatttggtatag

SEQ ID NO: 474327 - DNA, 83 bp, Homo sapiens
gcgcagaggcggcggtggcgagaggtgcggcgaaggaggcagaggcacttatgcttgtcagcaacgcacctcttgctttttcc

SEQ ID NO: 474328 - DNA, 82 bp, Homo sapiens
cggcggcgccatggcagggcttgcaggtgcgcgcggagccatggttatcatgtcggagttcagcgcggaccccgcgggccag

SEQ ID NO: 474329 - DNA, 76 bp, Homo sapiens
ctggaggaggcgttgccgtgagggcatgaaagaattactgatgtccttgatcaaaaaaattatgtggaagaactta

SEQ ID NO: 474330 - DNA, 97 bp, Homo sapiens
tccggctccggcttctgctgttgctcttctccgccgcggcactgatccccacaggcgaaacctaaccaaactgtccctcatcttcagccacatgctg

SEQ ID NO: 474331 - DNA, 74 bp, Homo sapiens
agcgcctcgtcgacatgagtgatgtggaggaaaacaacttcgagggcagagtgtaccttccggtttcccagcac

SEQ ID NO: 474332 - DNA, 100 bp, Homo sapiens
gacatctcgctgaccaagctggacaaccactgtgagaattcatctgtgccttattccagttcactcttgtaagggtgatgcttgtgatcccctcagccct

SEQ ID NO: 474333 - DNA, 101 bp, Homo sapiens
ctggctttcgtctacggctccggggtgtaccgccaggcagggccgagttcagaccagaagggtcagaaaacctccatgtttctcatatcttgcaaaaagca

SEQ ID NO: 474334 - DNA, 51 bp, Homo sapiens
aggagctccaggccgccctggccagttatgatatgactctgacaaatgctt

SEQ ID NO: 474335 - DNA, 96 bp, Homo sapiens
tggaactttgttctaccaatgtgaatgtgcctcttaggagcacttgtccagaagtgtctgggaaaagcttgggctgcacagtgatggtgctccctg

SEQ ID NO: 474336 - DNA, 100 bp, Homo sapiens
cgccggcgcgcgaccccatccccatcccggtccctgcagagcgatccccgggcccagatatggacgcagcagagccgggaagcaggtcctggggaccaag

SEQ ID NO: 474337 - DNA, 100 bp, Homo sapiens
ggaggaggaagaggaagaggaggatgacccacttgaacccagcaagcgtagtcgaggagccctggggtccatcgccctcctgggcttggtgggcacaact

SEQ ID NO: 474338 - DNA, 100 bp, Homo sapiens
tctacaacccgcgcttctggccgcgggaaggagaggtcctctcagggtgcgccatcattgtccgaggtcagcctcgtggtgggcctcctcctgagcggca

SEQ ID NO: 474339 - DNA, 83 bp, Homo sapiens
cagactacggacctgtctgggtctcagccgccaaagaccccgtccggtagctgcctttgccttcattgtggtgaaagatagtg

SEQ ID NO: 474340 - DNA, 90 bp, Homo sapiens
cagcccagttttcctgagatcttgctggaatcccacatggtcatgatccggctgtggatcggtccgtttcatcaagtctgtcagatgcaa

SEQ ID NO: 474341 - DNA, 98 bp, Homo sapiens
ttccttgagctgaacgtcttgcaacagtggccgcacgcataggaaagaccacagcaagattctttcattcgtctcctcctagcctgggggaccaggct

SEQ ID NO: 474342 - DNA, 98 bp, Homo sapiens
cctggactccaacaacaacacaggagagtcgcggttgctgatcgtggtgcttgagtagagccgtggttggtgacagcatgacgagcgaggtgatagaa

SEQ ID NO: 474343 - DNA, 100 bp, Homo sapiens
gtttagtaaatatctttccctagctgaatcctggtaattgatgtccacccgagaaatccctgcagatgttccagcctctgtctagtccagatagccacag

SEQ ID NO: 474344 - DNA, 100 bp, Homo sapiens
cttcccggctcccttcgcctccaggatgcgctgagccctacaacacccccagcggccgccggctcccccacgaggtacatgtcccagagcaagcacacgg

SEQ ID NO: 474345 - DNA, 100 bp, Homo sapiens
cttcagccaaagaaacaagccgtggaataggtgtatcaagtaatggtgcaaagcctgaactcggcttgcccttcccctgcttgtgccgtgtaccctgtaa

SEQ ID NO: 474346 - DNA, 100 bp, Homo sapiens
cgcccatggaagtgcacttaaccccagaaaacaaaatccagtctcatagcagaggagaatataatgtttacagcaccttccagagccatgaaccagagtt

SEQ ID NO: 474347 - DNA, 75 bp, Homo sapiens
gatgtgatgttggagaactacagcaacctgatctcattggttggctggggaacagaccagggaattggtggattt

SEQ ID NO: 474348 - DNA, 73 bp, Homo sapiens
ccgggtcctcagcttccacagcgtgtctgaatttttccctagattggtgtaaacagccagacgtgggccttcc

SEQ ID NO: 474349 - DNA, 100 bp, Homo sapiens
atgtggacttgaaagaagctgcagcggaggaaggcgaggaaaactcaatgtgagtagtgacactgtccagcatggtgtggaaggattaacgtatctcctc

SEQ ID NO: 474350 - DNA, 74 bp, Homo sapiens
ctccctgtgccttgcttggagctgacgccgacgggtgtgatgaatgcagactctgctaccattttggctgtttg

SEQ ID NO: 474351 - DNA, 82 bp, Homo sapiens
gtagggggtgagggtggaagctgggaaacccacaggaggcaaccacactagtttagggagtgcatccgccccaacccttttc

SEQ ID NO: 474352 - DNA, 100 bp, Homo sapiens
gctttgacgagctccagcgcatccatttccccagtgacaaagcggttcctggctcagagtttgaggggcacaaacggatttctgaacagccccttcccaa

SEQ ID NO: 474353 - DNA, 51 bp, Homo sapiens
gaggttaacagctatctttctaatgacagcccatatcaaggcggtgtattc

SEQ ID NO: 474354 - DNA, 100 bp, Homo sapiens
ttgaaaattcacccttgtagagtcattcctgcctttgagcggactcccttttaagagcccccctccatgcgcctgaaggcccgacccagcagccctggct

SEQ ID NO: 474355 - DNA, 82 bp, Homo sapiens
catatgcaaacatgacctttcaagttcagtggctccagcacgtgacacaagctgacctcaagagctccacgttttggcttcg

SEQ ID NO: 474356 - DNA, 83 bp, Homo sapiens
gcctgggccgcgccgacctggtcatgagcttcgttaacatgggaacaagatcactcaaggtgaaggataatctactaatacca

SEQ ID NO: 474357 - DNA, 75 bp, Homo sapiens
ctgcatctttgacaagtttgagtgttgctggaacggttcggataggattttttatcaagcagaaatgcatcgaac

SEQ ID NO: 474358 - DNA, 100 bp, Homo sapiens
aagacagtcctcgtcagcactgactttcagctatggaatcgataccggggagaccacgacgctgcctcctgggcgccatgagttcctgttcagcttccag

SEQ ID NO: 474359 - DNA, 119 bp, Homo sapiens
gctgaagtggagagatcgcctgagcccaggaggtcaaggctacagtgagccgtgactgcaccactgcactccaccctggaatggtagctgagtggaggttgtctcgaggtgttgaagaa

SEQ ID NO: 474360 - DNA, 100 bp, Homo sapiens
gttatgtatttacaagtcttagaatgtgaacgtaatcaaaccctggttcaaactgcctgaattccatcatccctggccctcccttcctatttggagcctg

SEQ ID NO: 474361 - DNA, 74 bp, Homo sapiens
ctggccgccggttgcaagcagatactggtgcctggagagaagtcttttttcctccagccaggagagcagctgga

SEQ ID NO: 474362 - DNA, 83 bp, Homo sapiens
ccgtgacctggggatcgctacggaccttaaaatacccgcaacagccccttcgtcccaatccttcagtgaatctacagacctat

SEQ ID NO: 474363 - DNA, 97 bp, Homo sapiens
accaaataagctatatactttggttacctatgtacctgttaccactttcaaaaattcggagttgggagatggaaatgaaggcagcatttctcaaagc

SEQ ID NO: 474364 - DNA, 82 bp, Homo sapiens
tcttgggacccaccgctgccctcagctccgagtccagggcgagatccagagacaatggccccgatgggatggagcccgaagg

SEQ ID NO: 474365 - DNA, 90 bp, Homo sapiens
agcggatcgggtggagtgtaggtcatatcgccgcgggagaatgaagttgaagaggtaaaagaggagggtccaaaagagatgactttggat

SEQ ID NO: 474366 - DNA, 100 bp, Homo sapiens
ttaatcaaaagaaaaagaagaaaaaaactaaaaagatatttgatattgatgaagctgaagaaggtgtaaagaacttcagaggacgaggaaacaatcgtgg

SEQ ID NO: 474367 - DNA, 156 bp, Homo sapiens
cttctgacaagcacttaaagagttaaaggtcaagatgaagttgaatgatggccaagattaaaggagtcatacctgatagactaaagaagcgggcactgataatcgaaatatagttgatgatgggaaatctcagaaacttactcaagatgacataaa

SEQ ID NO: 474368 - DNA, 51 bp, Homo sapiens
tctgttgcttcatcccaggaaaggaatccatgggaaagagctatgatggga

SEQ ID NO: 474369 - DNA, 82 bp, Homo sapiens
aaaaatgcagtcccctcatgccaagttcatctccgcaatacctacccgatccctgaagttcctgaaggaggctgggcatggc

SEQ ID NO: 474370 - DNA, 82 bp, Homo sapiens
caagctcctggccctggccctgatcatcctgctgggcttcgtccagatcgggaagggccgacgcctccccccagggtcagct

SEQ ID NO: 474371 - DNA, 75 bp, Homo sapiens
gatgagttcttccagtcccctgaggtgatggcaggtgaggctgctgtcagaaaggaacttttacacagtttgcct

SEQ ID NO: 474372 - DNA, 80 bp, Homo sapiens
atggagctagttagctgtctgttgtctgtagcccagagatagaatctcactatgttgaccaggctggtcttgaactcttg

SEQ ID NO: 474373 - DNA, 75 bp, Homo sapiens
agggagactggggtggagacttcggagactgcagttgcaggcccttccttctaccatgattatagtagcagttta

SEQ ID NO: 474374 - DNA, 75 bp, Homo sapiens
ctcatcccactcttccttttactagctcatctctggtatcacgaattcttcaggaggcttggacagagggccggc

SEQ ID NO: 474375 - DNA, 96 bp, Homo sapiens
cacaaattgcctccttatgtctccaacatggaccgcctgggggactcggaactattgctgctctctgaacactatagtcgtcgaatctcacaagcg

SEQ ID NO: 474376 - DNA, 90 bp, Homo sapiens
ctgagatggattctattcccatgggactcaacaaacactgggttgaccctctgcctgatgaggaactgtgagagtgacactgaggaggac

SEQ ID NO: 474377 - DNA, 90 bp, Homo sapiens
cgggaaatggccgctgtgtggttgcaacggagataaattcccggaaccgcgattcggcgtgtcaggttcgagaacttgtcttggacaatt

SEQ ID NO: 474378 - DNA, 75 bp, Homo sapiens
accgtctggtgtctaaaccgcctcgggattcactccttctccagttgcacagccacacccttcagctggccttaa

SEQ ID NO: 474379 - DNA, 100 bp, Homo sapiens
cgaacccagcattttcggcaaccgctgctggcagttttgccaggtgtttgttaccttgacacgttggtcgtcattgcctccgagcccactttagccctca

SEQ ID NO: 474380 - DNA, 100 bp, Homo sapiens
ataatggcaacctgcaagacttaaaagtaggagattgcttccaagtatgatcatcaggcagaagaagatcttcgcaattggatagaagaggtgacaggca

SEQ ID NO: 474381 - DNA, 51 bp, Homo sapiens
tcccactgattctacattacgtcttgctggtggatgccctccttactcccc

SEQ ID NO: 474382 - DNA, 98 bp, Homo sapiens
aacaagactgtccttcggacaagttttaggtgttcaaagctgaaacaggagagaaacttctagaaatcaaggctcatgaggatgaagtgctttgttgt

SEQ ID NO: 474383 - DNA, 98 bp, Homo sapiens
caacaccttcccttattccaacaattagaacatcatgggaatgctatgcagccatctgtcaaggataacagtggtagccatggctctcctatcagtgg

SEQ ID NO: 474384 - DNA, 98 bp, Homo sapiens
ggaggccggccggtgccagcacctttcggcttctgagacggcggcagcagcggcattcagagacactatggacagcgtgaagcagagcgcggccctgt

SEQ ID NO: 474385 - DNA, 83 bp, Homo sapiens
caggtcgcgggagtcgtagggaggacgccgggacacctggaagccgagaaatgatcaacaacccctccccgtcgtaaacgctg

SEQ ID NO: 474386 - DNA, 74 bp, Homo sapiens
aaagcggtacattgcttcttatttagcactcacagagcatatcggtatctccaaaaggcagcaagcatgaacca

SEQ ID NO: 474387 - DNA, 100 bp, Homo sapiens
gggcaaggatggtggaggcgagaacactgaggagagtgttctgccagttctggataatccactgtccaagaaggttcgaggcctcattgatagcttacgg

SEQ ID NO: 474388 - DNA, 90 bp, Homo sapiens
ctgcctttctatttattttacctcagtataacattagcgtgcctacagcaggcaagggcactattacaaactgcatcatcattagcaccc

SEQ ID NO: 474389 - DNA, 100 bp, Homo sapiens
ccaagacttaaagtttcctagatcccagcttattttggggtaagtgcgttcctagcaacagggggtgatgttacccgaaataaagtaagaaaaacattcg

SEQ ID NO: 474390 - DNA, 90 bp, Homo sapiens
gagaagtcatggaactgaaaaagcactgactgctctgcttaagaggaggaaaggcaagctctgactctgaggttggaggcagaacagcag

SEQ ID NO: 474391 - DNA, 75 bp, Homo sapiens
caggagatcccgctggtgaccctgccgctggcgagcgccaccgcatgggtccggcctctttggcctacccccgtt

SEQ ID NO: 474392 - DNA, 88 bp, Homo sapiens
attgttgagaaattggatcttacacttgaaatacagactgttggggaacaagagggtagaagagcagaggatggctctgtcattgatt

SEQ ID NO: 474393 - DNA, 74 bp, Homo sapiens
cgcggcgtcttcaagccgtgggaggagcggaccgaccgctccaaggtttaaataacctccttgatgaaaaccga

SEQ ID NO: 474394 - DNA, 98 bp, Homo sapiens
ctcaggcggacagatggactgtaagacatgcacatgatggtgtccaagccagaacagtgggtaaagccaatggctgtagcaggagccaatcagtacac

SEQ ID NO: 474395 - DNA, 75 bp, Homo sapiens
gagcaaaataaagaaaatcagagttttgaaaatgaaactgatgagacgacaactaagagaagctgaatttggacg

SEQ ID NO: 474396 - DNA, 142 bp, Homo sapiens
ccttcgtcacagccctcatgttcagctccatcgtctgcagcgtcccgcacacctggcagcaaaagagggtgctgtgggcccagaagcgcccatgcctgagagcgtccaggaccaggcagagctgggccttaagggcccttgg

SEQ ID NO: 474397 - DNA, 75 bp, Homo sapiens
atgatttatagctaagactccaggacacccctgaagccgagaaatgagtaattccctcctggtcccagacagtct

SEQ ID NO: 474398 - DNA, 90 bp, Homo sapiens
tgctggtgtggattgttcatcaattggcggggttccatttttccagcccagtggcacccgactcgctctcctctccctcaccgacgcccc

SEQ ID NO: 474399 - DNA, 100 bp, Homo sapiens
cacagattgggggcaggagctgctttttcaatgagaagaatgaacagacctagtgggcgttgcctttagacccagcaaaagagcagtggctcaggcagca

SEQ ID NO: 474400 - DNA, 88 bp, Homo sapiens
catacccaataaccaggtgcttggcaaaatcgagcgggccattgtgcaaggtcctgaaccccgatgatgaggagcaggtgctcagcga

SEQ ID NO: 474401 - DNA, 89 bp, Homo sapiens
tcttcttccagggactcagcacctggcagggaaatgtttcaacgtgcgcaagcgttgcggcggcgggcagaggactactacagatgcaa

SEQ ID NO: 474402 - DNA, 76 bp, Homo sapiens
gtaaatggagagaagaacaaatggaacgcttggaagcccttgacttcaaatctcaacctgagccatccccagttct

SEQ ID NO: 474403 - DNA, 100 bp, Homo sapiens
ctcactgcaacctctgcctcccaggatgctataaaatcaccacggtctttagccatgcacaaacggtagttttgtgtgttggctgctccactgtcctctg

SEQ ID NO: 474404 - DNA, 71 bp, Homo sapiens
atggggttgtcctctttaagaagatacagaaggtggtcatggcactaggagactacatgggcgcctcctgt

SEQ ID NO: 474405 - DNA, 100 bp, Homo sapiens
tatgctatctgcggggccattcgtaggatggccaccagcccctcgggttccaagatgcagctactggagacagagttctcacacaccgtgggcgagctca

SEQ ID NO: 474406 - DNA, 50 bp, Homo sapiens
taagctgaagaacctctacctggacagtcattttgtttactcattcagcc

SEQ ID NO: 474407 - DNA, 75 bp, Homo sapiens
cggccgtctctggagagcagcagagagactgtggaatggaatgactctccagagctgcagattgaaggcatattt

SEQ ID NO: 474408 - DNA, 100 bp, Homo sapiens
gggcggagccaggagccccacggagcgctgcggagcgaacctcacctttccagggcgcaagattttgaagatgtaactgagtttctggaagaggtcattg

SEQ ID NO: 474409 - DNA, 100 bp, Homo sapiens
agactggaagctttactagaagctgcagtttgccgggaggactcatatcactctgtcgtctcatgtgccgcagtagttcttactcctatggaaccaatga

SEQ ID NO: 474410 - DNA, 95 bp, Homo sapiens
gcctgatgttgctaaatgtagacaatggttagagaagaattttccaaatgaatttgcaaaacttactgtagcttgctcaccagtgcatgaaggag

SEQ ID NO: 474411 - DNA, 75 bp, Homo sapiens
caagagggtgttcgactgctagagccgagcgaagcgagtgcgccggtctcggggaaatgcccggttccttcgtgc

SEQ ID NO: 474412 - DNA, 100 bp, Homo sapiens
gacaggaagtctcagcccatgggactctggagacaggtggatgtccgaagagaagaccttgtggaggaaatcaaaaggagaacaggccagcccctctgca

SEQ ID NO: 474413 - DNA, 83 bp, Homo sapiens
gccctacgagtgcaacatctgcaaggtccgcttcaccagcaggttacgggcaggacttgagtggcttcggacagggcttctca

SEQ ID NO: 474414 - DNA, 90 bp, Homo sapiens
atttggctgaggagttttcaatcccacactgctcagcacgcaggcatgtgaggaagctgggcttaaaggagactccagcaaatggagaga

SEQ ID NO: 474415 - DNA, 100 bp, Homo sapiens
tgagctccaggagttcgtctcttacgtctgcggaagtgcagctgcctcagttcttagcgcaggcactgtacaaaacgagttaaacagacatggcccttgc

SEQ ID NO: 474416 - DNA, 82 bp, Homo sapiens
ccaggagttcgtctcttacgtctgcggaagtgcagctgcctcagttcttagcgcagatatcgcaaacggcaccagttcaggg

SEQ ID NO: 474417 - DNA, 75 bp, Homo sapiens
tcacagaattttcatagagctggactattggaagaaactggcgatggaatatgagaggagccctctggaaagaaa

SEQ ID NO: 474418 - DNA, 101 bp, Homo sapiens
gagttctccgggctgaacagcaaattaaagataacttgcgagaggttttcaagatggcagcatctatgcatggtcagcccagtccttctctagaagatgca

SEQ ID NO: 474419 - DNA, 74 bp, Homo sapiens
cggcgcatcacggtgcgcgtggccggaggatttgatgaagatgttaaagcgaaagtggagaaccttctcgggat

SEQ ID NO: 474420 - DNA, 101 bp, Homo sapiens
taggggaccaaggatggcaaaacgacgacaggactcgggtcaagctggaaagcctggaagacgcctacattctgcggggagatgatgattccctctccgac

SEQ ID NO: 474421 - DNA, 92 bp, Homo sapiens
cgcagccttgggcctcgcgccggctatggccgtgccctggggctgagccctcagatagcctgggctggaagctcttctacgtcacaggctgc

SEQ ID NO: 474422 - DNA, 110 bp, Homo sapiens
gggcgacaaggccgtggaattcttctttgcttctgatgcaagggatctgaaacttgcccacccttcgggatattgcaggacgctgcatcatgagcgacagtaaatgtgac

SEQ ID NO: 474423 - DNA, 96 bp, Homo sapiens
aggaaatcaaggacttcctgctcacagcccgacgaaaggatgccaaatagctgtgacttgtggtccctaggggtgattatctatgtgatgctgtgc

SEQ ID NO: 474424 - DNA, 78 bp, Homo sapiens
cctgaaactgggtcggcaggacggtggtggagcccgagagagatgatgattattccccaccttctaagagacaaagac

SEQ ID NO: 474425 - DNA, 102 bp, Homo sapiens
gaggagctgtgcagccgcgaggaggcgcgggaggtgttcgagaacgaccccgagacggtacgccatcccaccagagcacggcaagcgcctggagcggctggc

SEQ ID NO: 474426 - DNA, 83 bp, Homo sapiens
gcgaaggtggcggcgctgctgctcgggctgctcttggagcagcctcccgcgacgatgcccctcaacgttagcttcaccaacag

SEQ ID NO: 474427 - DNA, 100 bp, Homo sapiens
caaaaaagacaggggagtattaaagcatgaagaggaaccacctcagaatatgaaaccacaatcaggaaacgataagccattatcaaaaacagctcttaaa

SEQ ID NO: 474428 - DNA, 75 bp, Homo sapiens
aaaagattcagagttggataagcacttggaatcacgggttgaaggttttaatataactgcaggagttgatgaaga

SEQ ID NO: 474429 - DNA, 100 bp, Homo sapiens
gagaaactcgctcgccttcagaagacagggccgcgttcgcaccaaaaccgtgaagaaggcggcccgggtcatcatagaaaagtactacacgcgcctgggc

SEQ ID NO: 474430 - DNA, 97 bp, Homo sapiens
gtcagttgttgcatcaaatacttcatatttggcttcaatgtcatattttggcgcccgggggctggagaaggccaggcagcagctgcaggaggagctc

SEQ ID NO: 474431 - DNA, 75 bp, Homo sapiens
agcacttggaatacaagatggttgccgggtcatgttaattgggaaaaaggcactgaagtggcagcagcatcaggg

SEQ ID NO: 474432 - DNA, 75 bp, Homo sapiens
caagatcgagcccagcgtcaacttcctcaagtcgcccaaaggcactgaacttaccttcaactacaacctagaatg

SEQ ID NO: 474433 - DNA, 74 bp, Homo sapiens
caaaggccaatgttggtgctggcaaaaaggaattgaatgatctggcacgggaccctccagcacagtgttcagca

SEQ ID NO: 474434 - DNA, 74 bp, Homo sapiens
ttcagctattggaaagtttttttaatgtggttggaacaactgagtgtaaaattctggaacaacgattagaacaa

SEQ ID NO: 474435 - DNA, 75 bp, Homo sapiens
tggccacaaagaactcccacctgcgacacatcgagcacatggagcgttctgccctaggtccaaatgttaccaaaa

SEQ ID NO: 474436 - DNA, 74 bp, Homo sapiens
cacaaggagaagagggcagcagagtcacagctgcaggattatgatcttttgggtgaaaaaataatgtcctgtgg

SEQ ID NO: 474437 - DNA, 90 bp, Homo sapiens
gatctttttacttcatttatttcattgtataacacatctatgaagttaagtgggcagaccaacatccacctcagcaaaaacttcttcctg

SEQ ID NO: 474438 - DNA, 101 bp, Homo sapiens
tgtgctacaggaggtggtgcttacaagtttgaaaaagattttcgcacagcgcagttgtgtagcagttgagtaatgctggttagctgttaaggtggcgtgtt

SEQ ID NO: 474439 - DNA, 100 bp, Homo sapiens
ggatgtggatggggatgacactctggagtatgggaagccacaggctgctaaggaagcaaaaaaggctaagcaagcatctaaaaagactgcaatggctgct

SEQ ID NO: 474440 - DNA, 75 bp, Homo sapiens
cggcagccccgactctcagcactggtatgaacatgctaatgatgataagagcagtttgaaatcagatcccgaagg

SEQ ID NO: 474441 - DNA, 82 bp, Homo sapiens
tccggccgtgtcccgaggaagtgcaagacccgtgtgtttcctgtaacaaatcgttcaagaaactctggtcccttcatgaaca

SEQ ID NO: 474442 - DNA, 87 bp, Homo sapiens
gcgtttcagttttggtcatcggaagtggtgccttcagcacaggatttcggctgaatgcgtcttcttggcccatgttccttttgaaga

SEQ ID NO: 474443 - DNA, 98 bp, Homo sapiens
ccagggttttcgaagttacagagatcaaacaattgtagatcccttcagttcaaaacataatgtgattggccaattctcccccagtgattgtcaacaca

SEQ ID NO: 474444 - DNA, 75 bp, Homo sapiens
ccagtaatcctgttcaagggcaaggtgattgatatgcccgagcacaaccctggcaatttgggaggaacaatgaga

SEQ ID NO: 474445 - DNA, 82 bp, Homo sapiens
gggccgctctgggatcccggccaccagcaattgtccggcttgggcactgtttaaaggaaagttccgagaaggcatcgacaag

SEQ ID NO: 474446 - DNA, 100 bp, Homo sapiens
actttaaaaaactaaagcaaattaaaaacaggatgaaaaagactgattggctcttcctcaatgcttgtgtgggtgaagctttgttctaagaatatttgtt

SEQ ID NO: 474447 - DNA, 100 bp, Homo sapiens
agggttgaatacagagacagaaatgttgatgtggtacttgaagacacctgtactgttgtccaaggacaaaatgatgagaggctctcgcagaggatgtgtt

SEQ ID NO: 474448 - DNA, 100 bp, Homo sapiens
atgtactacaagtttagtggcttcacgcagaagttggcaggagcatgggcttcggaggcctatagcccgcagacttgtgtatgcggatacctgcttcagt

SEQ ID NO: 474449 - DNA, 50 bp, Homo sapiens
caacagcttccaagatagtaacaggactgagcacggaaggcatctaccgg

SEQ ID NO: 474450 - DNA, 100 bp, Homo sapiens
acctactgcagccacgcgggcgagcggctgtgtggatgtcggcgaagccgcgggcgagattttctaccctagcaaggatggtacgaagattccaatgttc

SEQ ID NO: 474451 - DNA, 100 bp, Homo sapiens
attctgtttcgaatatagccacagagataaaggatggacaaatacgtgggacaggccaaatttgagtttcatcatggtgactatgaaaaacagtttctgc

SEQ ID NO: 474452 - DNA, 87 bp, Homo sapiens
cagccgcccgctggccgggagcggagcccctgtgggtcagttgctccgattaaaaatgtttcgagaagatcatgggtcgtggatgac

SEQ ID NO: 474453 - DNA, 123 bp, Homo sapiens
tgaggatttccaagagcaaggatgaaaaattgaagtcacagcccctcagcaccaagcagaaggcctatgagctgtccacgctgacagggacacaggtgctgttgctggtggccagtgagacag

SEQ ID NO: 474454 - DNA, 82 bp, Homo sapiens
ccaggaccctcagtgcaaggagtggcagcaattctgtggtgttcttggtcacacatttatggagtttctgaagggcagtgga

SEQ ID NO: 474455 - DNA, 98 bp, Homo sapiens
acacagacattgatgaattggcatgtaattgtaccaggttacagcagctggacatattaggtgaagtattacagacacttagcacctgatcacttgct

SEQ ID NO: 474456 - DNA, 80 bp, Homo sapiens
cgctctcggaatcacgacccctccctgccatgtatccgcagggcagacatccgatccacctccgacccttaagccagaga

SEQ ID NO: 474457 - DNA, 75 bp, Homo sapiens
gccttgcttcaaaccttcccatgtcagaggaaagggagatcgtggtgaaatggtttgaggctgtccagactggcc

SEQ ID NO: 474458 - DNA, 100 bp, Homo sapiens
tcaatgaccttgcttgaaaatcaacttgttgagaaactttgggtacttaaagttctgcagcatctctcaacttctggtgtatgcaacagcgttattgcaa

SEQ ID NO: 474459 - DNA, 60 bp, Homo sapiens
ggccaagagggatccttcacccgtgtctgtggtgtccgcaaagcccaaggtgcataatcg

SEQ ID NO: 474460 - DNA, 75 bp, Homo sapiens
tccaacgcagtggccgaggaagctgcctgcccggtgtctgcccctgaggaggggagctgttccggtggaatgttt

SEQ ID NO: 474461 - DNA, 100 bp, Homo sapiens
acagactagccactttgcattgactggaaacaatggcatttacagaaagagtcaacagcagtggcaacagagtggcagaatttagtgacatttggaagct

SEQ ID NO: 474462 - DNA, 74 bp, Homo sapiens
tgttgtggaaaaaatgaaaaacatcagcaatcaccttattaaaaggagcccaagccccatctcatcctagcaca

SEQ ID NO: 474463 - DNA, 100 bp, Homo sapiens
ttttgagcgtcgcagagaacttagaaggcaaaagagggaggagatgcgactcgaagcagaaagggcatccgcttcgatcctgaaattccgcaaacactac

SEQ ID NO: 474464 - DNA, 100 bp, Homo sapiens
atggatgctgtgccggggaggcagcctgagccccagcccacatgcctcctgacaaggtgatccgggcgggccccgcaggaattttatcccctcaccggcc

SEQ ID NO: 474465 - DNA, 100 bp, Homo sapiens
caggacacggcctacaacaccaagaggagaagaacgcccagctcctgggtgcggctcagcagctcctcagccactgccaggcccagaaggaggagatcag

SEQ ID NO: 474466 - DNA, 90 bp, Homo sapiens
tgcagatctttgaggacaaccttctgaatgagagcgctcctggttgcagccagaatgcatgacttcaggaggactgtgaaggaggtcatc

SEQ ID NO: 474467 - DNA, 100 bp, Homo sapiens
ttcagatgggatctttccggatcaatccagatggcagccagtcagtggtggaggcgcaagcaaactgtcgagtaggagttgcagcactgaatactctagc

SEQ ID NO: 474468 - DNA, 76 bp, Homo sapiens
ggatttgttaaggattccaagtaactcttatttgaaggaccctctattgtcccaggcctgtgttggctgcctggag

SEQ ID NO: 474469 - DNA, 101 bp, Homo sapiens
gttgtatgcagtgaaagagttgctgaactacaaagaaaggttccagcaacagatagaaatgctttaagttcactctggggaaagctggcctctgaaatctt

SEQ ID NO: 474470 - DNA, 75 bp, Homo sapiens
tggagcctcagttggaagcagccgatccagcctgcggagcctgtggggcagggagaaacacatctcatctttcct

SEQ ID NO: 474471 - DNA, 83 bp, Homo sapiens
gtgaataaagatttggaatttcagctccatgaaccatttcttctgtatagaaatgcaagctttacagaaaccccagaaccagc

SEQ ID NO: 474472 - DNA, 127 bp, Homo sapiens
gctgcagtgggaccgcaagctgagcgagctgtcagagcccggggacggcgaggccctcatgtaccacacgggagaagatgtcaaccggacactagaaggtggaaggaaacctcttcattatgcagca

SEQ ID NO: 474473 - DNA, 75 bp, Homo sapiens
gccaagctgaccaagaagccaaagaactggctaggcaaataagctttaagtgcaaaatggcaactcttaaggaaa

SEQ ID NO: 474474 - DNA, 75 bp, Homo sapiens
ggaactatagtcacacgccaccacacccggctgaggagatctataaggacaggcagaaattctcagaacaggttt

SEQ ID NO: 474475 - DNA, 75 bp, Homo sapiens
agcgccgctccccagggagggagtccgcagcctgagcctctgcaatcccagataatggaagaaggtcctgtctaa

SEQ ID NO: 474476 - DNA, 90 bp, Homo sapiens
ttcagtgggaagcatgtcgtctttatcgctcagcgacaagactctgggacgatgaagaagccgcacaccactgaagagattggtgtgccc

SEQ ID NO: 474477 - DNA, 100 bp, Homo sapiens
cctaaatgaaaatgctgttgtatgcagtgaaagagttgctgaactacaaagaaagattgtcactgctgttccaagggcacacgcagagggatttggaatt

SEQ ID NO: 474478 - DNA, 50 bp, Homo sapiens
caaagagtcagctgttcttgttccaggaaaccactgttgctgcgattgcc

SEQ ID NO: 474479 - DNA, 100 bp, Homo sapiens
catgctcacatcttcaggtgcctcattcacatacgtcaaggaaattgagatgcaacagcattttgaatttgaataccagaccaaagtggatggtgagata

SEQ ID NO: 474480 - DNA, 75 bp, Homo sapiens
cagaactactatattcagtggctaaatggctccctgattcatggaagttaaatgaagttcgaaagagattgaatg

SEQ ID NO: 474481 - DNA, 83 bp, Homo sapiens
cttttctcagatgttggatatttgcttggaaaaacgtgtgggtacgaccttgttctgcagaatcagaagatttggcagtacat

SEQ ID NO: 474482 - DNA, 88 bp, Homo sapiens
ccctcgcgacgcgcccggcccggagcccccagcgcagcggccgcgggcactgtgtttagtcttgagtcagaggaggaggaataccctg

SEQ ID NO: 474483 - DNA, 75 bp, Homo sapiens
agcaaagtaattgcactgaaaggacctgatcccaaccttgaagaaagtcctaaaagaaaaaatattacatatgag

SEQ ID NO: 474484 - DNA, 75 bp, Homo sapiens
tagaggacttgaagcagaaagcaagtgaatacgagtcagaaggaaacttggatttaactggccagaagcaggtat

SEQ ID NO: 474485 - DNA, 97 bp, Homo sapiens
gacttctggcctttggcacgtcctgctccgtggtgctctatgaccccctggttgtcttttggaaatgcaggtttaaggacaaattatctgcttaagc

SEQ ID NO: 474486 - DNA, 83 bp, Homo sapiens
cagccttgggcctcgcgccggctatggccgtgccctggggctgagccctcaggtctgcgaggaacagaagtgcgaggaggagg

SEQ ID NO: 474487 - DNA, 100 bp, Homo sapiens
aaacaccgagggagaaatctaagtgacttctgacagctctctccatggaaggaggcggcggccgcgatgagccttcagcctgccgggcaggggacgtgaa

SEQ ID NO: 474488 - DNA, 74 bp, Homo sapiens
gtttgcccattgaatcagctgaaaccaattccttcgcctcagaaaccaatctagattttagaagtgggctggct

SEQ ID NO: 474489 - DNA, 75 bp, Homo sapiens
cagaatttaaacttaaggaaagagtgggaaagtgaggataacaacgaacttgatgcaagtgataggtttgccaag

SEQ ID NO: 474490 - DNA, 75 bp, Homo sapiens
gaacctcccaccaaaaagcccagcaaagtacccacgtttgttcgaatgctggccccagagggagccctgaatata

SEQ ID NO: 474491 - DNA, 74 bp, Homo sapiens
cgaaggatccccaacggggaggccaacgtgaagaagtgtggacactgccagcggctgcagccgacttggaatga

SEQ ID NO: 474492 - DNA, 83 bp, Homo sapiens
aaaaggcatggtgatccttcgggacaagattcgcttctatgaggtgcaagaagaaacacacgctgctgtgccccgactttgcc

SEQ ID NO: 474493 - DNA, 75 bp, Homo sapiens
ttattgatctccatacaaatgttgccactgctgttttagaacatataaaggtgctggggagtcagggaagagcac

SEQ ID NO: 474494 - DNA, 98 bp, Homo sapiens
gggctgtgtcatagacgtccgacgtgtctggagtgtacctcacagccttctaggatctccagagtggacaggaatctcacttggagggaccatggagc

SEQ ID NO: 474495 - DNA, 51 bp, Homo sapiens
gctttccacatgaaccctgaagatctctctactttagttagaagatgcccc

SEQ ID NO: 474496 - DNA, 50 bp, Homo sapiens
gtttgtcaccacaaaaaggacaggtggttggaggcaaagtaaagaagccc

SEQ ID NO: 474497 - DNA, 98 bp, Homo sapiens
tctcggctatggagtccccatgttggtaagttctcttctacgctgtatgagactggtggctgtgatatgtcacttgtgaattttgaaccagcagcaag

SEQ ID NO: 474498 - DNA, 82 bp, Homo sapiens
agttcaaagagaccctcggaactcttcaggcagtgacagtggtgggagcagcagcagcagcagcagcagcatcaatagcccg

SEQ ID NO: 474499 - DNA, 136 bp, Homo sapiens
cttattgggaactgcctcacctgaaaatgaattcaacataccattaggatcttaccgcttccgggaggatttccattataatgacacagctgggtacttcattattggagggagcaggtatgtggctggcattgaa

SEQ ID NO: 474500 - DNA, 100 bp, Homo sapiens
gctctacaaccagaagaagatcaagcctgtggtggactccttgtgggctctggaggaggtggatccttttcataccttatttggaattgctggattgtca

SEQ ID NO: 474501 - DNA, 80 bp, Homo sapiens
cgggagaccaggagctcctccaccaggccaaagacttcggcaacaatgcagatcttcgtgaagactctgactggtaagac

SEQ ID NO: 474502 - DNA, 48 bp, Homo sapiens
cgggtctgcggctccagcgtgcagaagagattgccttgcaacaggttt

SEQ ID NO: 474503 - DNA, 138 bp, Homo sapiens
tccttatgaacattcatatggtttggaaggtggaaagcaatttcttgaaaagagattacaggaggacccctcgctggaaaggcattttaagggccaccgagatgcagttacctgtgtggacttcagtatcaacacaaa

SEQ ID NO: 474504 - DNA, 83 bp, Homo sapiens
ctccgtgggcataggaccctccgagccaggttccatcctggttctcagtccacatggaagaatatccatgagagggtatgcag

SEQ ID NO: 474505 - DNA, 75 bp, Homo sapiens
agatgacgacacgcctttgcacgacgctgccaacaacgggcactacaagttccaagatgagatgggattctccaa

SEQ ID NO: 474506 - DNA, 80 bp, Homo sapiens
cgtggaaagcctaagagcacaggatccttctgaagggacatccaacgggctcatagagtggtagctgagcttcaggctgg

SEQ ID NO: 474507 - DNA, 99 bp, Homo sapiens
tgctgatctaagtggagagctcagaaaaggagatcgtattatatcgccaacaaatggaattttcttgagcatgtttctaatcgttttgccattggaatc

SEQ ID NO: 474508 - DNA, 74 bp, Homo sapiens
gccggaactgcggcagtctctccctgccaggctcttcatccaagattcctgaacaagatgaaacctatttagag

SEQ ID NO: 474509 - DNA, 100 bp, Homo sapiens
aagatgctgcttactggtgggaaatcaagtcgtaaaaacaggtcaagtggtgctgctagctgaggaggggatagctcctctttcttctgcaggaccaggg

SEQ ID NO: 474510 - DNA, 101 bp, Homo sapiens
caatggttggccaagtcaaacaccctaccacttatgtcttggatgaagatgaacctcgattccttgaagaagttgattacagtgcagaaagtaatgatgag

SEQ ID NO: 474511 - DNA, 89 bp, Homo sapiens
cctccgctcccccgatcctattcccagtcgtatgagcagcaccagcagtaagagggctccgaccacggcaacccagaggctgaagcagg

SEQ ID NO: 474512 - DNA, 74 bp, Homo sapiens
ttcccatgagccacgttgcccggcaggtcatttcttcagatagctccccagctgtggaaaatgagcatcctcaa

SEQ ID NO: 474513 - DNA, 98 bp, Homo sapiens
tcattatttgccagatctgcagagatcaaaacaagccctccaggaactcacgacatggatttgattgacatactttggaggcaagatatagatcttgg

SEQ ID NO: 474514 - DNA, 51 bp, Homo sapiens
atggctcaggcatatgtgttgctaatggaggttggcaggatgctactaccc

SEQ ID NO: 474515 - DNA, 49 bp, Homo sapiens
tctgccagtccccgttcctggattctagcctggtccgacccccagtggc

SEQ ID NO: 474516 - DNA, 82 bp, Homo sapiens
tgagcctttctggacagaccaacctgtcagtgctgcaactctattaccaggttttaaacttcgccatgatcgtgtcttctgc

SEQ ID NO: 474517 - DNA, 100 bp, Homo sapiens
caacatggggcttgagaaaggtgcggtcccccccgggtctggccaagacacccctgtctgctctgggcctgaaacctcacaacccagcggacatcctgtt

SEQ ID NO: 474518 - DNA, 141 bp, Homo sapiens
ccaccagcagcagcagtagcagcagcagcaacactggtctccggggcgtggagccgaacccaggcattgtagctgagaaactggagatgctaaagaaacagtatgatgagaagctggcacagaaggaggagcttcgcaaga

SEQ ID NO: 474519 - DNA, 73 bp, Homo sapiens
gagccgccactgcccgtacctggacaccattaacagtctgagcacttcaagacgacatcgcagaaggtggctc

SEQ ID NO: 474520 - DNA, 100 bp, Homo sapiens
gccacccaggccttggtcctagcacccactcgagaattggctcagcaggctcctcctgctggaccctccagccccgggcctcaggagcccgagaaggagg

SEQ ID NO: 474521 - DNA, 98 bp, Homo sapiens
aactgataagttgccttatgtcaccatggaggagaaggcagagcccccccaggctatgaatgccctgatgcggttgaaccagctgaagccagggctgc

SEQ ID NO: 474522 - DNA, 100 bp, Homo sapiens
tttattatgcactgctgttctagagcagggatcagcaaacttgctgtaaagagccaggaggctgtgaagagcggcattcaccgtactgtccacgccgggg

SEQ ID NO: 474523 - DNA, 98 bp, Homo sapiens
ggccaggccccactggaggagatgaggaaggctgccgaggatctggaaatttattgcctaagtgtaatcttgaacatgggcggtgctgtgagtgctgg

SEQ ID NO: 474524 - DNA, 98 bp, Homo sapiens
gcgagggccaccacctgcagcacatcagcgaccgcgagatgcccgaaggaaatctactttcttcaatgtgttaaccaatagtcaggcttcagcagaaa

SEQ ID NO: 474525 - DNA, 82 bp, Homo sapiens
aaagctgaggtccagatgaaagagaagtttctggtcactccccaggattatgcgcgaaatggctgcaagcaactgacctcac

SEQ ID NO: 474526 - DNA, 100 bp, Homo sapiens
gctgttcgatctggtggagctactggcgtggtagttaaaggcccagatgataggaatcccatctcatttaggtcaagttgaagaagcaagattaaaagag

SEQ ID NO: 474527 - DNA, 100 bp, Homo sapiens
catcaactcctacgaggacaaaagcaacgacttcgtatggcgcagacggggaagcggagccaacatgccagtggcccggagctgggtttgtcgcaaaact

SEQ ID NO: 474528 - DNA, 74 bp, Homo sapiens
gcaggaactgtggtcagaggctgtgcgtcttggctgctactcagctgcttaagctggcccacaagtacagacca

SEQ ID NO: 474529 - DNA, 118 bp, Homo sapiens
ggacgaggtcctcaagctgctgcaccgcggcgccgacatcaattacgccaatgtggacggactcactgccctgcaccagcctctacggcagacacatgcaggccaacccagaaccacc

SEQ ID NO: 474530 - DNA, 75 bp, Homo sapiens
agaaggatgagctatgacttgctaaacaatctgttggatttaagtgccctgtatgctcaaaatttgtatcctcag

SEQ ID NO: 474531 - DNA, 82 bp, Homo sapiens
gaaataagtcaagtgtttgagattgcacttaaacggaacttgcctgtgaatttcgagcctagatattatcctactgaagatg

SEQ ID NO: 474532 - DNA, 96 bp, Homo sapiens
cctttatcatctgagtccttgtcagaatcagagtatattgaggagagttgaagttggtgaagacattcatgatttaaacaccagatcctgaaaggg

SEQ ID NO: 474533 - DNA, 100 bp, Homo sapiens
aaggaactcaggcgcctcttcttagttgatgatttagttgattctctgaagtgccgcagaatggaattcggcattgttcctacacagcttctcggcaaca

SEQ ID NO: 474534 - DNA, 104 bp, Homo sapiens
gggttttggaagaaggatctttgtgggaagacagggtgaatttatcacagaggaataacgagggagaggagaaagtgaatgccccagccctgcacactttggaa

SEQ ID NO: 474535 - DNA, 101 bp, Homo sapiens
gttggtggtaccctaaaattagggcatgattaaggcatcaagcatgatggaaccatgtgtgatacctgccgccagcaaccaatcattggcattcgatggaa

SEQ ID NO: 474536 - DNA, 75 bp, Homo sapiens
accaaatgtgattttattacccaagtggaagaagagatttcccgacactacaggatgatccgttggtgctgaatg

SEQ ID NO: 474537 - DNA, 100 bp, Homo sapiens
cttctcccctgcacttcgctgcagcactgaacctaccagatgtatttgggttggtcgtcctcccattggaactgaaactacggatcttccgacttctgga

SEQ ID NO: 474538 - DNA, 102 bp, Homo sapiens
caccgccagacggccagaaagttccgccatgagctggggcacggagctgtggatgcttcaggactgccccaaggcccgcagggaggtggagctgcactggcg

SEQ ID NO: 474539 - DNA, 103 bp, Homo sapiens
aggaatatcgagagcgtcatgaacccgagctatagagaaaggagatgaggttttaaaatcaaagatgggaaaatcggagaaaattgcccttccccatggccag

SEQ ID NO: 474540 - DNA, 74 bp, Homo sapiens
gaggagatgctggaggctgggctggacccgagccagcgaccgaagcagaagggactggtgattgcagctggaag

SEQ ID NO: 474541 - DNA, 73 bp, Homo sapiens
aggctccaagacgccgtcgcttgaggagtaaactacaaattcttgtgagtcctaattcctccttatccacaaa

SEQ ID NO: 474542 - DNA, 82 bp, Homo sapiens
atgataacgttattaccacgggggtcagaccaggatccacccgaggaagacaatgcagatcttcgtgaagactctgactggt

SEQ ID NO: 474543 - DNA, 100 bp, Homo sapiens
cattcagtcagaagaaggctgctattgaaagagagtatgcacagatcccatgagctgcgttccaaggtggtttccctgcagctgctcctctctgtgttgc

SEQ ID NO: 474544 - DNA, 124 bp, Homo sapiens
ggatgatggtgaagctaaagaaatttctacacctacccattggtctaaacttgatccaaagacaatgaaggtccactggtgtgtcctccccttccgagtgctgctggtactcacctcacatcga

SEQ ID NO: 474545 - DNA, 104 bp, Homo sapiens
gagcgacaagccgctggcagccgcggatctcaccgccgctcagggtgcagaccatgaattacgtggggcagttagccggccaggtgtttgtcaccgtgaaggag

SEQ ID NO: 474546 - DNA, 101 bp, Homo sapiens
atttctcagaggatagcctttcacttattcatctgtccagcatgactcatccccgggagtgttgagtactactgagcgagtgtgcttgatccagggaacgg

SEQ ID NO: 474547 - DNA, 90 bp, Homo sapiens
gggagaggagctgtggataacgggaggtgaatttccatgtcaacatagtcctgcctaaatggaaacctgataaaaccagaggaggccaaa

SEQ ID NO: 474548 - DNA, 100 bp, Homo sapiens
ctgacatcatctctgtgcactgataataaccctgcagttatggactctgtgggattcattatattgacgctggttaccttggtttcaaggcctacttcac

SEQ ID NO: 474549 - DNA, 56 bp, Homo sapiens
gcaggacaacggcaggacgtgtaaggcagtgacccaggaggctctcacgtggagtc

SEQ ID NO: 474550 - DNA, 82 bp, Homo sapiens
ctcaaactgactttgcagccacggagaggtgtggacactgccagcggctgcagccgacttggaatgacctgggagacaaata

SEQ ID NO: 474551 - DNA, 100 bp, Homo sapiens
ctgcataccatccgcgaccgagtctggcagatccagtcttgctcagctctcacaggagagggcgttcagcaaaaaagggagacgctgtccccgctgtgcc

SEQ ID NO: 474552 - DNA, 75 bp, Homo sapiens
gttgctatataccattgaaaagccttcagagctgagaggaccatgcagtgctggaggccgagaggcagaagatgt

SEQ ID NO: 474553 - DNA, 82 bp, Homo sapiens
gagctttgcgggaaagcagcgacaccattcgcttttcacccaagatgatttgatgtcttataaaactctgatgaaccatgat

SEQ ID NO: 474554 - DNA, 101 bp, Homo sapiens
taccaaacagaatggacaagcttaataaaataaccgtccccgccagtcagaagttgagtatgggattgtgctggatgcgggttcttctcacacaagtttat

SEQ ID NO: 474555 - DNA, 83 bp, Homo sapiens
cggggacggagagaacacgagcccatcagcaaaagactgttgaagtagagagcattttgcccagctcactcggattctttgct

SEQ ID NO: 474556 - DNA, 74 bp, Homo sapiens
tcaccgagcaccctgagaacttcaagttcttcacacacccccattcggcgtagtacccagagagctcaagatgt

SEQ ID NO: 474557 - DNA, 90 bp, Homo sapiens
gtcagccatgtgactgtagtccacatggagctctcagcataccgtgcaacagtatttagcgtggactacaatgatgaactggatatcttg

SEQ ID NO: 474558 - DNA, 98 bp, Homo sapiens
accagctgaggtgtccgtaaagattccagagaagcctgtgaacaaagccttgtgaaaaagggtaaagaacaaaacacacagcgaagcttttttctcag

SEQ ID NO: 474559 - DNA, 71 bp, Homo sapiens
gagccggagggcgggaggaacatgacatcgcggagctgcaagctttcttcctggtggcagatgacatcatg

SEQ ID NO: 474560 - DNA, 74 bp, Homo sapiens
catgtcagccttcccagtagctgggaccacagatattgtgacccccaatgggctgaatgtgaagaagttttctg

SEQ ID NO: 474561 - DNA, 104 bp, Homo sapiens
catgccgtcagctcggctgagaaagctggaggtggaagccaacaatgcctttgaccagtatcgagacctgcccgccagcgccagtacctcgagttctcgctgcc

SEQ ID NO: 474562 - DNA, 98 bp, Homo sapiens
gcgccgcctggctttcgtattcgttgttctcggcgggctgtggggcctccgcgccgcggccgttagtcatgtcggctcagatcgtctgatagaagaga

SEQ ID NO: 474563 - DNA, 74 bp, Homo sapiens
gcctcctgccagccccagcccctggagaggatgcagaaattccaacagaatgggtttcctgaaacggatttgca

SEQ ID NO: 474564 - DNA, 98 bp, Homo sapiens
agcgacggctacgccgaagcactcgttccgggggtgaagcctcctgcgccggccttgcctcgggaagaaggtagataatgactataatgcccttcgag

SEQ ID NO: 474565 - DNA, 75 bp, Homo sapiens
cgggcctggactgtgggctggtgtgtggaactgtgccatggtgtgcagccaaaggaatgcctccctctcccagtc

SEQ ID NO: 474566 - DNA, 75 bp, Homo sapiens
ctgcacggatggtcttgaaacacaaatggtttttggtcttcaaagcttcacctttctccaaaggcagatgtgaag

SEQ ID NO: 474567 - DNA, 75 bp, Homo sapiens
ccccggccgcctgtccgtcgatgcaccgaaaaggacatatttgacagtgattggtacacttctcgaaatctaatt

SEQ ID NO: 474568 - DNA, 100 bp, Homo sapiens
gtgcacagcccaggagctggtgaaactcctcaatgagctcttcggcaagttcgatgaattagccacgcaagatgaagagcgacgtcggcagctgagagag

SEQ ID NO: 474569 - DNA, 82 bp, Homo sapiens
gcagctccgagcgagcgagcggcgcccagcccagcgcctcggccgaacccctccgcagcagttggaaaatggatatacctta

SEQ ID NO: 474570 - DNA, 100 bp, Homo sapiens
gttttgggggccaaaagagacagttggaagatggagacttcacagagaatgcagttgtcttgacttcaggtctgtctgttctgttggcaagtaaatgcag

SEQ ID NO: 474571 - DNA, 87 bp, Homo sapiens
gagcaggagctggatccggcttccggaaggtctctcggccagaacacgtggatgcccacccaccactgagcctcatggtaggaagct

SEQ ID NO: 474572 - DNA, 82 bp, Homo sapiens
aggagtttcagcaaatcatactagtcgtgcaacgtctacagcaacatcaggatttgcagcagaagaggatgaaacacaaaac

SEQ ID NO: 474573 - DNA, 101 bp, Homo sapiens
tccaggcagtgtaatctcattccatcttcattcatgactccagacaggatccggagtgttggaacagcagctgttaatatgtgccttgtggcaactggcgg

SEQ ID NO: 474574 - DNA, 100 bp, Homo sapiens
ggcgacaagggtgttcccgaactagagtggctttttagttggagaaggagcctacagatgggcagtagatcatggaataccctcttgccctcctaacatc

SEQ ID NO: 474575 - DNA, 100 bp, Homo sapiens
ctcttggctcctgtcccgctggccctctgtctgcctgtgtccctgaccatggctccctgcagtaccctttaacggatctagtgaaaagccatttgatgta

SEQ ID NO: 474576 - DNA, 75 bp, Homo sapiens
gcaaaacaactttcccatgtttccctctcctaaagcctggaatttcagagggatgagcacaatgcctggactccc

SEQ ID NO: 474577 - DNA, 75 bp, Homo sapiens
ggacatgaggaaaatgtccttccagcgctgcgcccggacagacaagcatcttcatgatacagttaagaggaatct

SEQ ID NO: 474578 - DNA, 98 bp, Homo sapiens
ttggattcctacagcagcggaaacatcgggaaggtgtgtagaccacactccaaaactgaaactgtggatggcagccatgaaggaagatcccacagtct

SEQ ID NO: 474579 - DNA, 100 bp, Homo sapiens
agaagtttgtgatggtgaaattcctcaatgattccattgtggaccctgtagattcggagaaatcacctgctaagaagctgactaatgcattaagcaagtc

SEQ ID NO: 474580 - DNA, 76 bp, Homo sapiens
gaaaaggagagtattgccagagcaagagctggatctcgtctttctggctcacccacctcattggatctcctttcct

SEQ ID NO: 474581 - DNA, 90 bp, Homo sapiens
cctctccggaatgaggtctcagcacccgcgcgggacagcacccttcctcctgcgacagcccccgacagctgctctcgggagccgcctccc

SEQ ID NO: 474582 - DNA, 100 bp, Homo sapiens
ctcccccgagaacgaggtgctttggatagaattgttgaatatttggttggtgatggtccacaaaacagtaacaacatgctgtaccccaaggaagacaagg

SEQ ID NO: 474583 - DNA, 71 bp, Homo sapiens
agatttgataacactggagatcagcaccaaatcccacagaggcatctgagttacatccttaatgttcagtc

SEQ ID NO: 474584 - DNA, 101 bp, Homo sapiens
gtacctggatctcatcaaaaaggacaccagcaagctgttcaatgaggagaggtacttggaaggctccatcgcccctgaagacaaaggaagctgctcattgc

SEQ ID NO: 474585 - DNA, 82 bp, Homo sapiens
ccatcctgccgtccttctccactttcgccagcccgtgccgcgagcgcggcctgcaggagaaggagaggacttgggtgaggag

SEQ ID NO: 474586 - DNA, 100 bp, Homo sapiens
ctttgaatggttgcgatttcttgataaagtcttggttgctgccaacaagaagtcagcatccggtattgtagctgtccctttcagcgaatggctccttgga

SEQ ID NO: 474587 - DNA, 74 bp, Homo sapiens
ggcgtgactttcccctcgggtccagaattacatgatgcgtaatgctgtgctggcagccatggcggagatggtgc

SEQ ID NO: 474588 - DNA, 98 bp, Homo sapiens
cgactttccctcatggctggtcgtctccagactccacactcctagcaattcctcagcactttgtttgcccccttaaactttgtcatggagaaagtgga

SEQ ID NO: 474589 - DNA, 96 bp, Homo sapiens
ggcccatcgactacaaacggaacttgccgcgtcgaggactgtcgggggctttgaccacgacctttgaagagcttcattttgagatcaagccccacg

SEQ ID NO: 474590 - DNA, 75 bp, Homo sapiens
cacctcgccaaagcagagaaataggtgtccgcaatgttgccagtgtctgtctgcagattggctacccaactgttg

SEQ ID NO: 474591 - DNA, 83 bp, Homo sapiens
ggcatgatccataatcggtttcaaggtctttctaccctggactccatctgtgactccctgagtgttgctttccggggcattag

SEQ ID NO: 474592 - DNA, 75 bp, Homo sapiens
attcaccaaaaggaggcatcactgcagagcatgtgggaaggagtctccccaggacagtgctatcacccgggatat

SEQ ID NO: 474593 - DNA, 100 bp, Homo sapiens
gccggctgtacgcacacaccatcgcaggtttatcaacttatgaggaaatgctgggaattccaaccatccaatcggacaagctttcagaaccttattgaag

SEQ ID NO: 474594 - DNA, 100 bp, Homo sapiens
aagcccgcgcgccgctgcatcccgcgtccagcacctacgtcccgctgccgtcgccgccgccaccatgcccaagagaaagattgaggtggtgccttctgcc

SEQ ID NO: 474595 - DNA, 100 bp, Homo sapiens
tgcgcttgctgctcaggagaaaaaatatggacctcttaaaattgtgtgataatatgcagcatgcatactgggaactgaagagagaaatgtctaatttaca

SEQ ID NO: 474596 - DNA, 83 bp, Homo sapiens
agaagggctacgaagaagtgcttcagcgggccaggaagcgcatccaggaggaattttggagagtaaaaggctgaaccttgtta

SEQ ID NO: 474597 - DNA, 110 bp, Homo sapiens
aaaccttcttgctgtataaccaagggccagagtatcactacctccaccagatgttggggtgatggctgggctgacaggtatgatgtgacagatggatatcagcgagaagc

SEQ ID NO: 474598 - DNA, 83 bp, Homo sapiens
cgacagcgaacatgtcgcggcctgtcagggtgatattcatgaggatttttgcagcgtttgcagaaaaagtggccagttactga

SEQ ID NO: 474599 - DNA, 83 bp, Homo sapiens
cagaagccgagttcaacatcctcctggccaccgactcctacaaggaagctcttcgtgggcggtcttgactggagcacgaccca

SEQ ID NO: 474600 - DNA, 75 bp, Homo sapiens
actcggataccagcgctcagcccacctgtgattatggttgatgccggcccaggatggatcagacctgtgaactac

SEQ ID NO: 474601 - DNA, 90 bp, Homo sapiens
aaagccattacaacctctcttacaacaaaatggttttccactccattgttgttagaagccagaaagcgaaacgactgatagtgtgcccag

SEQ ID NO: 474602 - DNA, 75 bp, Homo sapiens
agggcaaaggtcggaagccggctgcgggagcccagagcgcagctattactataacaagcgcattctgcacaagac

SEQ ID NO: 474603 - DNA, 82 bp, Homo sapiens
ggccacaccatttgccgtggccaggctagaggaagggaaaaggccgaggcatcagcgtgtgaagaccgcaaagacgatcccg

SEQ ID NO: 474604 - DNA, 100 bp, Homo sapiens
tggctcgcgctcgcgctcgcgctggtggcggtcgcctgggtccgcgccgaggttcatgattacaaagaaggaaccccagaagagaagacctactacatag

SEQ ID NO: 474605 - DNA, 75 bp, Homo sapiens
tgtgcagggccccgagccggcccgggtcgagatgccttcaattaagttgcagagttctgatggagagatatttga

SEQ ID NO: 474606 - DNA, 74 bp, Homo sapiens
gaccaccatcctgaatggtttaacgtgtacaacaaggatttgtacacacagatatgacgaaagacttgaaagaa

SEQ ID NO: 474607 - DNA, 98 bp, Homo sapiens
ctgaaggagcaggaaaaccggaagggcctgatagccgccatctgtgcaggcctccccatggccacccatggaccagtcggcattcacttcctcccttc

SEQ ID NO: 474608 - DNA, 75 bp, Homo sapiens
gagttgagccttccaagaagaggcagcttaattgaagatgttcctgctccttctacatctgcagataaagtggag

SEQ ID NO: 474609 - DNA, 80 bp, Homo sapiens
cccaaatgtctgactctgactctcggactgagaaacgcaagggcgccctgcgtccggcagaggaggcgagcatcccgctc

SEQ ID NO: 474610 - DNA, 97 bp, Homo sapiens
ctttagtgccaagagagaacattacagcatggatgaatgcaattggtttgatcatcactgccctaccaaatgttaattgcccaattgagtgcttcat

SEQ ID NO: 474611 - DNA, 101 bp, Homo sapiens
gcacctaccccctactgtggactggagacaatacgagtgcctggaagagctgggatgtctggttgagtcctatggcatgaatgtttgccaaccaaccccag

SEQ ID NO: 474612 - DNA, 75 bp, Homo sapiens
agaggactgggaggagcatgtcaacagtattctaccttgtaaatactgttatttgtatatactgtaaatgatgac

SEQ ID NO: 474613 - DNA, 82 bp, Homo sapiens
cacagagcctcgcctttgccgatccgccgcccgtccacacccgccgccagatatgtaactggttcatcaatgcccggcggcg

SEQ ID NO: 474614 - DNA, 100 bp, Homo sapiens
aagcgaagccgaaaaaggcagcagcgaaggtgattctgaattgctgtgagggcagaacacccaaggagacaatagaaaatttgttgcacagaatgactga

SEQ ID NO: 474615 - DNA, 73 bp, Homo sapiens
ggggaccgggcagggctccccgtcggagtgcactgcgccggacacttcaactttaaccggatcgacattccac

SEQ ID NO: 474616 - DNA, 97 bp, Homo sapiens
ggactctccggccctgtgcagtagggaatctggaaaaattgcaatcaaaacatcatttctctaagaaaattttgggtaaccgaagttctggacaaca

SEQ ID NO: 474617 - DNA, 82 bp, Homo sapiens
tagaaagccttttggagcagaaggaaaaagagaacagtatgttgagagaggggtttagtggttactctcctgtttggaaaaa

SEQ ID NO: 474618 - DNA, 100 bp, Homo sapiens
tagcagaatcctatttccaggaggaggactctatacacagaatgggattttacatatgctggacagaaataagagaatcaagccccggccagaaagattc

SEQ ID NO: 474619 - DNA, 74 bp, Homo sapiens
gctttacatgcacttgaacagactagaaattgcaccacagatatatgggttgtgtacattccaagcagagtggc

SEQ ID NO: 474620 - DNA, 97 bp, Homo sapiens
tcaaaagctgcacttcctgatttaactaaagtgattcaattgaagatggacttcactgcaaatcctaatgtacctggctagctggtggtgagtaggg

SEQ ID NO: 474621 - DNA, 51 bp, Homo sapiens
cacctccatccgcgaagacatcctgtaatagcctgcagctggtgttttgag

SEQ ID NO: 474622 - DNA, 75 bp, Homo sapiens
aataaatggcgtccaaagtcacagatgctatagtctggtatcaaaagaagttttaaccatgctgaccaacgaaac

SEQ ID NO: 474623 - DNA, 100 bp, Homo sapiens
attctgaactcaggacttggcaagaaaacctatttgattctttgacaggccagccacatcctgaagatgtactactgtttgccattccaatatgtgcccc

SEQ ID NO: 474624 - DNA, 51 bp, Homo sapiens
agatgttgtggggagagccaggggaattcagaaggagctggcggacatcac

SEQ ID NO: 474625 - DNA, 75 bp, Homo sapiens
gacatattcgatgccatcgtgatggcggatgagaggtgctgctggtgagtagcagccggtacccagaccagtgga

SEQ ID NO: 474626 - DNA, 82 bp, Homo sapiens
ccgccgtctcttcgagttcttcgtgctgctcaaggtaactaggatttctacctcaaccgcgagacctatgcaaggacggtgt

SEQ ID NO: 474627 - DNA, 100 bp, Homo sapiens
ccctgaagagccagatctcggagaagcagaggcactgcctggagctgcaggtgtatttcgggcgctggctgatcgagggaggccctctggtggtgctcct

SEQ ID NO: 474628 - DNA, 90 bp, Homo sapiens
tcagccgatgcaccgagtccagcccaggaaaatggagaggtttctctactcggacgaggtgcagattggcccggagacggtgatgaccac

SEQ ID NO: 474629 - DNA, 100 bp, Homo sapiens
tcccgcgcgcacctcagccgcctcctagcggcgcggcgctcgctcctacgcaattaccagctctggctgggtcgccacaacttgtttgacgacgaaaaca

SEQ ID NO: 474630 - DNA, 50 bp, Homo sapiens
ttatgaatttaacagtaatgctgccctggtacctgacagtgtaaagaagg

SEQ ID NO: 474631 - DNA, 50 bp, Homo sapiens
aaggaaaaggggattttgctcgcaaggtgactctgacatcattagaagca

SEQ ID NO: 474632 - DNA, 100 bp, Homo sapiens
ctcttcgtcaccttcgacctgctcttcatctccctgctctggatcatcgaactgaatgtaacatcatgtctcgggtaacagaggacacgtccaccctgag

SEQ ID NO: 474633 - DNA, 90 bp, Homo sapiens
cgagaggctcaccgcagtcgtgcaggatctgaaggaggctggagcattggatttgctaaaggagcttaagaatattcctatgaccctgga

SEQ ID NO: 474634 - DNA, 82 bp, Homo sapiens
ggcggagctggcgcggcccctagctttctccttctggtgtggggcccgagaactctactacgatcgcgggaaccaccatgag

SEQ ID NO: 474635 - DNA, 88 bp, Homo sapiens
cctagtagcctcagccgctgtgggctcctggggagatggaggggccggggctgggctcgcagatttgataatgggctgcattaaaagt

SEQ ID NO: 474636 - DNA, 75 bp, Homo sapiens
taacgcatttttgtttttggaaggagaaggatagacttggctttgagaactcttggaacggtctttagccctttt

SEQ ID NO: 474637 - DNA, 82 bp, Homo sapiens
cttacgcagaaggacctggccacggtaactaggatttctacctcaaccgcgagacctatgcaaggacggtgtggaccaactc

SEQ ID NO: 474638 - DNA, 91 bp, Homo sapiens
ggggactcctgacacttccccttccccaccgaaccgcgagttacactgttagaccttatgatagccaagataacgagtgatgagccactca

SEQ ID NO: 474639 - DNA, 90 bp, Homo sapiens
ctgctgtgatgtggaggaagaagagctcagtttctcttcagcaacgggtagcagaattggaaaaaattaatgcagaatttttacgtgcac

SEQ ID NO: 474640 - DNA, 75 bp, Homo sapiens
cttagacagtcgtggttcctgtgatctgtgtcctctttgcagaaggctctggctccgctactgcatcgtgtgctt

SEQ ID NO: 474641 - DNA, 82 bp, Homo sapiens
cagaaagcaggcgaacccgcggcgcaataacggctctgacgcccgctctgcggcttcggtgtttgaacaggccacagtccag

SEQ ID NO: 474642 - DNA, 83 bp, Homo sapiens
ctggagcctcagttggaagcagccgatccagcctgcggagcctgtggggcagctctccagggcacaccgtattcagctctgag

SEQ ID NO: 474643 - DNA, 100 bp, Homo sapiens
gacctgagcccacaaactcaagtattggtaaaggttttcaaggtgtcatgaaaagatggggatttaaaggccagcctgctacgcatggtcaaacgaaaac

SEQ ID NO: 474644 - DNA, 89 bp, Homo sapiens
gcagcggcgagatcgtccaactgaacgtaggggggaccagattctcaagtccaaagatttaacatctccaacccagcgctacatcgaca

SEQ ID NO: 474645 - DNA, 100 bp, Homo sapiens
cgtaatgaggatgaagattcaccaaataagctatatactttggttacctatgtacctgttaccactttcaaaaaccccctggttgtggaatacgaggcat

SEQ ID NO: 474646 - DNA, 100 bp, Homo sapiens
cccgagcctgaggccgagactgccagagtccccagtcctgacttcagttttcatgctgatgagtacctagaagtctacgtttctgcttctgagcacccta

SEQ ID NO: 474647 - DNA, 75 bp, Homo sapiens
ctacagagacaattcctcaagtggacttggccatgattggttgcggctgagccagaggccaactgcagaggaact

SEQ ID NO: 474648 - DNA, 83 bp, Homo sapiens
tcagcccttcatttgacagtgtactgccccgttacttatttttacaagttcgagaacttgtcttggacaattgcaaatcaaat

SEQ ID NO: 474649 - DNA, 100 bp, Homo sapiens
gcttgctggtatactgcatcttgggaacatagaatttatcactgctggtggggcacaggtttccttcaaaacaggatattggccctcctacaatgttcct

SEQ ID NO: 474650 - DNA, 50 bp, Homo sapiens
aaatcctttgatgggttgggcatcaacttctccaacatcttcaaataaag

SEQ ID NO: 474651 - DNA, 75 bp, Homo sapiens
acgaaagcagtgacggaggagcttgtaccaccggcaccaggatcatctacgaccgaaagttcctgctggagtgca

SEQ ID NO: 474652 - DNA, 100 bp, Homo sapiens
tttgccatacagtaaccagagacctccaactaggggcccccaaactgtatcctgcctgtagatctataagtcgtaaggacttagtggattatataaccac

SEQ ID NO: 474653 - DNA, 100 bp, Homo sapiens
atcgtgtgcctgatgatcacgcagctggctggcttcagtggaccacgatcatctcagtccacattggaacgatctgaacagcagatcagggctgcttcta

SEQ ID NO: 474654 - DNA, 98 bp, Homo sapiens
cggaaatgaaaatgtggttctctgttgttggaagaacacagtcagtgaagctgtacattggaatgcgtttacagtcattgtaatggaagcaaaataca

SEQ ID NO: 474655 - DNA, 74 bp, Homo sapiens
acagcaacctgatctcattgggtgtcatggagaaactccagctgggcccagagattctgcagcgggaaaatcca

SEQ ID NO: 474656 - DNA, 50 bp, Homo sapiens
gaacaaaggccgcgacttggaggacccagatgatgtggtaccagttggcc

SEQ ID NO: 474657 - DNA, 100 bp, Homo sapiens
agacggaggcgctgcagcgcttcttcgaagaattcctagaggacctgtgcaacaacctcttgaggatcgaatcttcactcccgctgtctcagcagtctac

SEQ ID NO: 474658 - DNA, 75 bp, Homo sapiens
caacaggtggcctgtggctgggattttacgattatgctcacaggtcatacagcagatggaacaaaaaaaattaca

SEQ ID NO: 474659 - DNA, 83 bp, Homo sapiens
atcacagagcctatttacccagaagtagtccatatgggaagatcagttttcctgccatccaggctgctccctccttcagcaac

SEQ ID NO: 474660 - DNA, 50 bp, Homo sapiens
tgatggaccaattaccataagaatccatcaacagcatcaagtccagacta

SEQ ID NO: 474661 - DNA, 75 bp, Homo sapiens
gtacggccacaaagggccccaccacggccacatccaggaatactcccccagttgcaagaggcgcaggaccgtgga

SEQ ID NO: 474662 - DNA, 83 bp, Homo sapiens
gcagtggagcccaaagacccctggagacatgaaggtagaagatagcaccatgccgattcgtcgaactgtgaattctacccggg

SEQ ID NO: 474663 - DNA, 75 bp, Homo sapiens
ttgagccaggacacaacaccgcggagccctgcaggcggtatcatgatattagctggtttgacatcaagtcatttg

SEQ ID NO: 474664 - DNA, 101 bp, Homo sapiens
caccgcatgtagcagctgggctgaaggtaaagaggatgaatatccaaagaagcccttggggcagcttccacctgaacttcagtcttggggcgtccatcact

SEQ ID NO: 474665 - DNA, 75 bp, Homo sapiens
agcgcagtgaagtggtgagcctttttgtcactggcatcttccttgacttgatgcacctgaagaaacctgggggct

SEQ ID NO: 474666 - DNA, 80 bp, Homo sapiens
agttcaccaaaattcagacattagttctcttggaacggttgattgtaaataggccacatccttggggtcttcttattacc

SEQ ID NO: 474667 - DNA, 90 bp, Homo sapiens
catttagccaacaccacactttcagctacccgtacagtgaggacgcccgccagggtgagcagtacatgaacacccggtgcccagcctggt

SEQ ID NO: 474668 - DNA, 74 bp, Homo sapiens
gggatgatacagctaagaccatgttccggattccctggaaacatgcaggcaagaagcctgtggtaggtaagaaa

SEQ ID NO: 474669 - DNA, 75 bp, Homo sapiens
cgtacttctggccactgggcgagcgtctggcagctgtatgttgatgtctcatcttgaggaaccaaaagtaacaga

SEQ ID NO: 474670 - DNA, 96 bp, Homo sapiens
catggcaggcctggaagaagctgatgctgagatcccttcccactggaggcatgtgatgagaggaaatcaccgaaaacgtggctgcttcaaggatcc

SEQ ID NO: 474671 - DNA, 74 bp, Homo sapiens
ggggaatggaagcggagaacgcgggcaggcgaggcaaacctctctacatttgtaaggaaagatacaaagttctt

SEQ ID NO: 474672 - DNA, 50 bp, Homo sapiens
gcgcggggtccgccgggggaggcggggaatgacaccactccactgggcgg

SEQ ID NO: 474673 - DNA, 50 bp, Homo sapiens
tccaccatgtactacctctggatgtgcatccgtgtcattctggaccttac

SEQ ID NO: 474674 - DNA, 100 bp, Homo sapiens
acctttcccgctggcgcgcagcctcagctagtccacctggaaggccgctgtggtggaaggatgtttgactgcagagatgtggcattcactgtgggcgaag

SEQ ID NO: 474675 - DNA, 82 bp, Homo sapiens
acggagacggcggcagcgctggactaggtggcagactccatcaagaatgctggaggaagggtgtttgtccactgccaggcag

SEQ ID NO: 474676 - DNA, 75 bp, Homo sapiens
tgtatagcatttgttacacagtatggcttaacagcattgcgcagtgatgaagtgattgatttaatgataaaagaa

SEQ ID NO: 474677 - DNA, 90 bp, Homo sapiens
cgagactggagcagagccgctgggcgccggagccgaggcgagcgccgcgcgcaccactggttttcctcctccaccaggcgctccacctcc

SEQ ID NO: 474678 - DNA, 75 bp, Homo sapiens
gatcgtgctggggaccggtctcaccacatgctgctgctgaagaaacacacggaggacatcagcagcgtctacgag

SEQ ID NO: 474679 - DNA, 85 bp, Homo sapiens
gggggctcggctgcagacttggccaaatggacgggactattaaggttcatcaccttgctgggtctcatcctccctccggctggaa

SEQ ID NO: 474680 - DNA, 100 bp, Homo sapiens
ctgtctttgtgtcctgagatcaaatggcacttcattggccacctacagaaacaaaatgtcaacaaattgatggaacccagcagtgatgtggaggtggaga

SEQ ID NO: 474681 - DNA, 100 bp, Homo sapiens
cgtctcttacgtctgcggaagtgcagctgcctcagttcttagcgcaggactcatcaggtctcgctccatttaaaaccaaagaaccatccactcggatcgg

SEQ ID NO: 474682 - DNA, 82 bp, Homo sapiens
tgggcaggccggggcacccgggcacgcagggcgcgcctggcgagcgccccgggaggctgaaggtgatgtggccgccctcaac

SEQ ID NO: 474683 - DNA, 91 bp, Homo sapiens
ccgcggcgcccctcggcctcggagcaacgagcgcagcgccgggatccaggtccggcacgatcaagacccaggctacatgcatcacaagttt

SEQ ID NO: 474684 - DNA, 75 bp, Homo sapiens
agaagatccgggagctgctccgaaaggagagaaggatattcctggactgactgatactacagtgcctcgccgcct

SEQ ID NO: 474685 - DNA, 100 bp, Homo sapiens
ttgtcgatgggctcgctccagaggacatgagcaaggagcaggttgcagatatcaagaaagtcaacaacttcatcagagaacaagacttatatgctttgaa

SEQ ID NO: 474686 - DNA, 75 bp, Homo sapiens
cggtccctgtgacctgtggagacacggccagatctgccctccagcaccacactgtaactcgaggcatcaccaaag

SEQ ID NO: 474687 - DNA, 98 bp, Homo sapiens
agaagaagggaaggcgcgagtgaggaaaggaggtactgtagtgatgatgatgatgattttgatgatgaggaagctgaagaaaaagcgccagtgaagaa

SEQ ID NO: 474688 - DNA, 82 bp, Homo sapiens
agaccctggagcctcagttggaagcagccgatccagcctgcggagcctgtggggcaggtgttactgcggaaatgcaaaactt

SEQ ID NO: 474689 - DNA, 75 bp, Homo sapiens
gctacgtgcctgaggacatctggaggaaggctggtgctgccgaaaagaaccaacttccctgggatcagctccaca

SEQ ID NO: 474690 - DNA, 82 bp, Homo sapiens
tgcttatggcggcgctggagagggggcgctgagctgttggggtttacccaaggtccagcctagcccctaggcaccatgtcgg

SEQ ID NO: 474691 - DNA, 51 bp, Homo sapiens
tcctcctagaggaccaagaccagatgagcctgaagtcttgacagaacctcc

SEQ ID NO: 474692 - DNA, 97 bp, Homo sapiens
gcctggtggagcaggtgggatcccttcaagatgcgctagaagactccaaggggctctcgaacccggccgaggtggaggcgctgagggagaaggtcta

SEQ ID NO: 474693 - DNA, 80 bp, Homo sapiens
aagttcatggtcacggagaaggcagcctacataggaggagaacatttgcctgcactgggcggcgttctccggctgcgtgg

SEQ ID NO: 474694 - DNA, 83 bp, Homo sapiens
gatcagaagctgcgtcccaacatccccaactggtggcagagttatgaggatgcactgcgcaactctggtggcgatgggctggg

SEQ ID NO: 474695 - DNA, 75 bp, Homo sapiens
ctgactttcagctatggaatcgcagcgatggattttgggtggggaagtcctccttgcggagttggcgccagctag

SEQ ID NO: 474696 - DNA, 100 bp, Homo sapiens
gccaactccaatgggcctttccagcccgtggtccttctccatattcgagatctctggaaacatggctacagaacatgttaatggaaatggtactgaagag

SEQ ID NO: 474697 - DNA, 98 bp, Homo sapiens
gttttgtacattgggagagatcgttggttcacagggaagtcgcctggaaaaaccaatagtattctggaacttttcaaagcctgactctcttcttgaaa

SEQ ID NO: 474698 - DNA, 115 bp, Homo sapiens
ctcatcagctcaagccatcctccctaccttagcctcccgattatctgggaccacagtgaaatgcaaaatggaggacgatgcagtacctgcagccaagatgaaaattccatcatct

SEQ ID NO: 474699 - DNA, 76 bp, Homo sapiens
tgcaaatgtctttcgtggaagacataaggtcctcagaatggttggaatgaccctccagctttgaacagagtaccca

SEQ ID NO: 474700 - DNA, 101 bp, Homo sapiens
accgcgacctcagccgcgaccgcccgctcgtactgctgctgcacctgctgcaacttgggccccttttcagggccaagaccagcttcaagtctccatggtac

SEQ ID NO: 474701 - DNA, 100 bp, Homo sapiens
taatgatccaaatagtaacccaaagatcgtgcagctcttggcaggagtagctgatcaaaccaaggatggggaatgaaagctactggttgattttaaagtg

SEQ ID NO: 474702 - DNA, 100 bp, Homo sapiens
acgtgtgccgcgctctgggcacagccttggaaagtcaggaccgcgacggcagcagagcagtgggtcctacgtgtatgaactcagcgcagtcctcatacac

SEQ ID NO: 474703 - DNA, 100 bp, Homo sapiens
cgggggccgtcgcttcggagttggggctgagcagtcctcggggagagcgcgccaagaccgctgcagccgctggctgacattcctctgaatattgatttgc

SEQ ID NO: 474704 - DNA, 87 bp, Homo sapiens
ggcacggacgacagaagcgactttggtgagactctgctcggtgtctataccatccctgctggcgtcgtctgcctgctgtccaccatc

SEQ ID NO: 474705 - DNA, 103 bp, Homo sapiens
tgaggcgggcgttttcttggatgaattgcttgctttggagcactgggcaaaaaccattccagaaaagatggactcagtgatgaaagaggaagagatgactgtg

SEQ ID NO: 474706 - DNA, 83 bp, Homo sapiens
cccgccagttgcttgatcaggtggaacagattcagaaggagcaggattaccaaaggctgtttgcagacaaggtcccaaagaca

SEQ ID NO: 474707 - DNA, 83 bp, Homo sapiens
ctttctccttcaagtacttggcagatcactctcttagcagttaacaagcacaagccctggctggagcccacctaccacggcat

SEQ ID NO: 474708 - DNA, 96 bp, Homo sapiens
cctgctcctctgggttgaaacccgggcgccgccaagatgccgcctggagatgcccaaagatgagctgcccaaccataactgcattaagcacctgcg
